United States Patent Application Publication US 2018/0126003 A1 - sequence listing, part 127

SEQ ID NO: 222870 - DNA, 2667 bp, Artificial Sequence
  derived and/or modified sequence
atgcagacccccagagccagcccccccagacccgccctgctgctgctgctgctgctgctgggcggcgcccacggcctgttccccgaggagcccccccccctgagcgtggcccccagagactacctgaaccactaccccgtgttcgtgggcagcggccccggcagactgacccccgccgagggcgccgacgacctgaacatccagagagtgctgagagtgaacagaaccctgttcatcggcgacagagacaacctgtacagagtggagctggagccccccaccagcaccgagctgagataccagagaaagctgacctggagaagcaaccccagcgacatcaacgtgtgcagaatgaagggcaagcaggagggcgagtgcagaaacttcgtgaaggtgctgctgctgagagacgagagcaccctgttcgtgtgcggcagcaacgccttcaaccccgtgtgcgccaactacagcatcgacaccctgcagcccgtgggcgacaacatcagcggcatggccagatgcccctacgaccccaagcacgccaacgtggccctgttcagcgacggcatgctgttcaccgccaccgtgaccgacttcctggccatcgacgccgtgatctacagaagcctgggcgacagacccaccctgagaaccgtgaagcacgacagcaagtggttcaaggagccctacttcgtgcacgccgtggagtggggcagccacgtgtacttcttcttcagagagatcgccatggagttcaactacctggagaaggtggtggtgagcagagtggccagagtgtgcaagaacgacgtgggcggcagccccagagtgctggagaagcagtggaccagcttcctgaaggccagactgaactgcagcgtgcccggcgacagccacttctacttcaacgtgctgcaggccgtgaccggcgtggtgagcctgggcggcagacccgtggtgctggccgtgttcagcacccccagcaacagcatccccggcagcgccgtgtgcgccttcgacctgacccaggtggccgccgtgttcgagggcagattcagagagcagaagagccccgagagcatctggacccccgtgcccgaggaccaggtgcccagacccagacccggctgctgcgccgcccccggcatgcagtacaacgccagcagcgccctgcccgacgacatcctgaacttcgtgaagacccaccccctgatggacgaggccgtgcccagcctgggccacgccccctggatcctgagaaccctgatgagacaccagctgaccagagtggccgtggacgtgggcgccggcccctggggcaaccagaccgtggtgttcctgggcagcgaggccggcaccgtgctgaagttcctggtgagacccaacgccagcaccagcggcaccagcggcctgagcgtgttcctggaggagttcgagacctacagacccgacagatgcggcagacccggcggcggcgagaccggccagagactgctgagcctggagctggacgccgccagcggcggcctgctggccgccttccccagatgcgtggtgagagtgcccgtggccagatgccagcagtacagcggctgcatgaagaactgcatcggcagccaggacccctactgcggctgggcccccgacggcagctgcatcttcctgagccccggcaccagagccgccttcgagcaggacgtgagcggcgccagcaccagcggcctgggcgactgcaccggcctgctgagagccagcctgagcgaggacagagccggcctggtgagcgtgaacctgctggtgaccagcagcgtggccgccttcgtggtgggcgccgtggtgagcggcttcagcgtgggctggttcgtgggcctgagagagagaagagagctggccagaagaaaggacaaggaggccatcctggcccacggcgccggcgaggccgtgctgagcgtgagcagactgggcgagagaagagcccagggccccggcggcagaggcggcggcggcggcggcggcgccggcgtgccccccgaggccctgctggcccccctgatgcagaacggctgggccaaggccaccctgctgcagggcggcccccacgacctggacagcggcctgctgcccacccccgagcagacccccctgccccagaagagactgcccaccccccacccccacccccacgccctgggccccagagcctgggaccacggccaccccctgctgcccgccagcgccagcagcagcctgctgctgctggcccccgccagagcccccgagcagccccccgcccccggcgagcccacccccgacggcagactgtacgccgccagacccggcagagccagccacggcgacttccccctgaccccccacgccagccccgacagaagaagagtggtgagcgcccccaccggccccctggaccccgccagcgccgccgacggcctgcccagaccctggagccccccccccaccggcagcctgagaagacccctgggcccccacgccccccccgccgccaccctgagaagaacccacaccttcaacagcggcgaggccagacccggcgacagacacagaggctgccacgccagacccggcaccgacctggcccacctgctgccctacggcggcgccgacagaaccgccccccccgtgccctag

SEQ ID NO: 222871 - DNA, 2049 bp, Artificial Sequence
  derived and/or modified sequence
atgcagacccccagagccagcccccccagacccgccctgctgctgctgctgctgctgctgggcggcgcccacggcctgttccccgaggagcccccccccctgagcgtggcccccagagactacctgaaccactaccccgtgttcgtgggcagcggccccggcagactgacccccgccgagggcgccgacgacctgaacatccagagagtgctgagagtgaacagaaccctgttcatcggcgacagagacaacctgtacagagtggagctggagccccccaccagcaccgagctgagataccagagaaagctgacctggagaagcaaccccagcgacatcaacgtgtgcagaatgaagggcaagcaggagggcgagtgcagaaacttcgtgaaggtgctgctgctgagagacgagagcaccctgttcgtgtgcggcagcaacgccttcaaccccgtgtgcgccaactacagcatcgacaccctgcagcccgtgggcgacaacatcagcggcatggccagatgcccctacgaccccaagcacgccaacgtggccctgttcagcgacggcatgctgttcaccgccaccgtgaccgacttcctggccatcgacgccgtgatctacagaagcctgggcgacagacccaccctgagaaccgtgaagcacgacagcaagtggttcaaggagccctacttcgtgcacgccgtggagtggggcagccacgtgtacttcttcttcagagagatcgccatggagttcaactacctggagaaggtggtggtgagcagagtggccagagtgtgcaagaacgacgtgggcggcagccccagagtgctggagaagcagtggaccagcttcctgaaggccagactgaactgcagcgtgcccggcgacagccacttctacttcaacgtgctgcaggccgtgaccggcgtggtgagcctgggcggcagacccgtggtgctggccgtgttcagcacccccagcaacagcatccccggcagcgccgtgtgcgccttcgacctgacccaggtggccgccgtgttcgagggcagattcagagagcagaagagccccgagagcatctggacccccgtgcccgaggaccaggtgcccagacccagacccggctgctgcgccgcccccggcatgcagtacaacgccagcagcgccctgcccgacgacatcctgaacttcgtgaagacccaccccctgatggacgaggccgtgcccagcctgggccacgccccctggatcctgagaaccctgatgagacaccagctgaccagagtggccgtggacgtgggcgccggcccctggggcaaccagaccgtggtgttcctgggcagcgaggccggcaccgtgctgaagttcctggtgagacccaacgccagcaccagcggcaccagcggcctgagcgtgttcctggaggagttcgagacctacagacccgacagatgcggcagacccggcggcggcgagaccggccagagactgctgagcctggagctggacgccgccagcggcggcctgctggccgccttccccagatgcgtggtgagagtgcccgtggccagatgccagcagtacagcggctgcatgaagaactgcatcggcagccaggacccctactgcggctgggcccccgacggcagctgcatcttcctgagccccggcaccagagccgccttcgagcaggacgtgagcggcgccagcaccagcggcctgggcgactgcaccggcctgctgagagccagcctgagcgaggacagagccggcctggtgagcgtgaacctgctggtgaccagcagcgtggccgccttcgtggtgggcgccgtggtgagcggcttcagcgtgggctggttcgtgggcctgagagagagaagagagctggccagaagaaaggacaaggaggccatcctggcccacggcgccggcgaggccgtgctgagcgtgagcagactgggcgagagaagagcccagggccccggcagcagaagatggggcttccagaaggccagaggcagccccagatgcagactgggcgtgtag

SEQ ID NO: 222872 - DNA, 2667 bp, Artificial Sequence
  derived and/or modified sequence
atgcagacgcccagagcgagccctccaaggccggctttgctattacttttgctgctgttgggtggtgcacacggtctgtttccagaggaacctcccccgctgtccgtggctcctcgggactacctgaatcattatccggtgtttgtaggcagcggtccgggtagactcactccagccgaaggagctgacgacctgaatattcagagggtcctccgagtgaacaggacactgtttatcggagatagagataacctgtaccgggttgagctagagccacctacaagcacagaactaagatatcagagaaagctcacttggaggagtaacccctctgatatcaatgtgtgcaggatgaaggggaagcaagaaggtgagtgtagaaatttcgtgaaggtgttacttctgcgagatgaaagcacgctcttcgtctgcgggtcaaatgcctttaaccctgtgtgtgctaactacagcatcgacaccctgcagccagtcggcgataacatcagtggaatggctaggtgtccatacgatcctaagcacgctaacgttgcattgtttagcgatggcatgttattcacggccactgtgactgactttttagccattgacgccgtaatttacagaagtcttggtgaccgccccacactgagaaccgtaaagcacgacagcaagtggttcaaggagccctactttgtgcatgcggtcgagtggggttcccacgtgtatttttttttccgggagattgctatggaatttaattacctagagaaagtggtcgtgtcacgagtggcccgcgtgtgtaaaaacgacgtcggtggtagccctcgagtactggaaaaacagtggacaagctttctcaaagcgcggctgaactgtagcgtgcctggagattctcatttctactttaacgtacttcaagccgtaactggggtcgtgtctcttggtggcagacccgtagttctcgctgtcttcagtacccctagcaactctattccagggtcagccgtgtgcgccttcgatttgacacaggttgctgctgtgttcgaggggcgctttagggaacagaaaagccccgaatcaatatggactccagtccctgaggaccaggtgccccgcccaagacctgggtgttgtgcagcccccggaatgcagtacaatgcctcatctgcattgcccgacgatatccttaacttcgtgaaaactcatcccctaatggatgaagccgtaccaagcctcgggcatgccccgtggatcctaagaacgctcatgcggcaccagctgaccagagtggcagtggacgtcggagccgggccttggggaaaccagactgtggtgttcctcggctccgaggccggaactgtactgaagttcctcgtgcggccgaacgcctctacctccgggacaagtggccttagtgtgttcctcgaagaatttgagacgtatcgcccagaccggtgtggaagacccgggggtggggaaactggccaacggctgctatcactagaacttgacgccgctagcgggggcctgttggccgcctttccccgctgtgtggtgcgcgtgccagtggccaggtgtcaacagtactcaggctgcatgaaaaactgtattgggtctcaggatccctactgcggctgggcccccgatggctcttgcatcttcctttcacccggtacgcgagctgcttttgaacaagatgtgtcgggagctagtacgtccggattaggagattgcaccggattactacgggcgtcacttagcgaagaccgcgcaggattggtgtcggtcaacctccttgtgacgtcatccgttgcagctttcgtggtgggagccgtcgtgtccggtttcagtgtgggctggttcgtcggcctgagagaaagacgggaactggcacggcggaaggacaaagaagccattcttgcccacggggccggcgaagcggtgctcagtgtcagtcgcctgggggagcgaagggcacaggggcccggagggcggggaggaggtggaggtggcggtgcaggcgttccccccgaggccttgctggcccccttaatgcagaacggttgggctaaggctactcttttgcaggggggcccccacgacttggattccgggctgcttcccacccctgaacaaacccctttgccgcagaagcggttacccaccccacatccacatccacacgctcttggtccacgagcttgggaccacggacaccccctgcttccggcgtctgcatcctccagcctcttgctgctggctccagcacgcgcacccgagcaaccacccgcaccgggcgagcccacgcccgatggtcgcctctacgccgctcggcccggacgagctagccacggcgactttcccttgactccccatgcctctcccgataggcgccgggttgtatccgccccaacaggcccccttgatccagcgtccgccgcggatggactccctaggccgtggagtccaccacctaccggctctttacgaaggccgctcggtccccatgccccaccggccgctaccctgcgccgcactcataccttcaacagcggggaggcaagacccggcgatcgacatcgcggatgtcacgctcggccaggtactgacctcgcccacttgctcccatatgggggagccgaccgcactgccccaccagtcccttag

SEQ ID NO: 222873 - DNA, 2049 bp, Artificial Sequence
  derived and/or modified sequence
atgcagacaccacgcgccagccctccccgacccgccctcttgctccttctgctgctccttgggggcgctcacgggctttttcccgaggaacccccccccctctccgttgcaccaagggactatctcaaccattatccagtgttcgtcggttcaggtcccgggcgtttaaccccagcggagggcgccgacgatctgaacatacagagggtgttgagagtgaaccggactctgttcatcggcgatagggataacctgtatcgggtggagctggagccccccacatccaccgaacttaggtatcagcgaaaactaacctggcggagtaacccaagcgacattaatgtttgccggatgaaaggaaagcaagagggcgagtgccgaaacttcgtgaaggttctactgctgagggatgagtctactttgttcgtctgtggcagcaacgcttttaaccctgtttgtgccaactacagcatcgataccctgcagcccgttggcgataatatcagtgggatggcccgctgcccttacgatcccaagcacgccaatgttgctctgttttccgatggcatgctgtttacagcgacagttactgacttccttgccattgacgccgtaatttatcggtctctgggggataggcccacactcaggactgtgaagcacgactccaagtggtttaaggagccatattttgttcacgcagtggagtgggggagccacgtctacttcttcttcagagaaattgctatggagtttaactacctggagaaagttgtggtctcccgggtcgcaagggtctgtaagaacgatgttggcggatctccccgcgtgctggagaagcagtggacatcgttcctgaaggctcgactgaactgttcagtgccgggggattctcacttctacttcaacgtgcttcaggctgtaacaggagtggtgtcgttgggaggccgccccgtggttctggctgttttttctactccatcaaattcaatccctggttctgcagtgtgtgcctttgacttaacacaggtggctgccgtatttgaggggcgattcagagaacagaaaagcccagaaagtatttggacaccagtgcctgaagaccaggtcccacggccccgccctggctgctgcgccgcacccgggatgcagtacaacgccagcagcgctctacccgacgatatactgaactttgtgaagacccacccgctgatggatgaagccgtgccgtccctgggccacgctccctggatcctgcggaccctcatgagacaccaactcactagggttgcggttgacgtcggcgccggaccctggggcaatcagaccgtcgtgttccttgggtccgaagctgggacagtactcaagttcctagtgcgcccgaacgcctctaccagcgggacaagtggtctgtctgtatttttggaggagttcgagacctatcgacccgataggtgtggtcggcctggcggcggcgaaactggtcagcggctcctgtctctcgagctagatgcagccagtggagggctcctggcggcctttccccgctgcgtggtcagggtgccagtcgcgcgttgccaacagtatagtgggtgtatgaagaactgcatcggcagtcaggacccctactgcggttgggctcccgatggatcttgcatttttctctcccctggaacccgcgctgcatttgaacaagacgtgtctggagcgtccacttcaggactgggggattgcacagggcttctgcgggcatccttaagcgaagaccgcgctggtttggtttcggtcaacctgctggtcacttcaagtgtggccgcttttgtggtcggggccgtggtgtcgggctttagcgtgggttggttcgttggactgagggagagaagggaactcgcccggaggaaggacaaggaggctatcctagctcacggggctggcgaggctgtgctgagcgttagccggttaggggagcgtcgggcccagggaccaggatcccgtcgttgggggtttcagaaagcgagaggatccccgagatgtagactgggagtgtag

SEQ ID NO: 222874 - DNA, 2667 bp, Artificial Sequence
  derived and/or modified sequence
atgcaaactccaagggcaagtccaccccgcccggcccttctactgctcctgctcctgcttggcggagcccacggactctttcccgaggagccgccccctttgtcagtcgccccccgggattatctgaaccactaccccgtattcgttgggtccggacccggcaggctgacccccgcagagggcgctgacgacctgaatatacagagagtgctgagagtgaataggacgctctttattggggatagagataatttgtatagggttgagcttgagccccccacctcaactgagctgagatatcagcggaaactgacctggcggtctaaccccagcgatattaacgtgtgccgaatgaagggaaaacaggaaggagagtgccgtaacttcgtgaaagtactgctgttaagggatgagtctactctgttcgtgtgcgggtccaatgcctttaacccagtttgcgctaattactccatagacactctccagccagttggtgacaatattagcggtatggcacgttgcccttacgatcccaaacacgctaatgtcgctttgttttccgacgggatgctattcacagccactgtcaccgatttcctggccatagacgccgtgatttataggtctttaggcgaccgaccaactcttcgcactgtgaagcacgattcaaagtggttcaaggaaccctactttgtccatgccgtggagtgggggagtcacgtctactttttctttcgcgaaatcgcgatggagttcaactacttagagaaggttgtcgtgagtcgagtggccagagtctgtaaaaacgacgtgggcggatctccccgcgtactcgagaaacagtggacatctttccttaaagctcggcttaattgttcagtccccggtgactctcacttctatttcaacgttcttcaggctgttactggcgtggttagcctgggggggagacccgtggtgctagctgttttttcaactcccagtaattccatacccggctcagctgtgtgtgctttcgatcttactcaggtggctgcggtgtttgagggccggtttagggagcagaaatccccagaaagcatttggacaccagtgccagaggatcaggtaccccgacccagacccggttgttgcgcggcccctggcatgcaatataatgcaagttctgccttgccggatgacatcctgaactttgtaaaaacccatcctctgatggacgaggcagtccctagtttaggccatgccccttggatactccggacattgatgcgacatcagcttactagggtcgccgttgacgtaggagcggggccatggggcaatcaaactgtagtgtttcttgggagcgaagcaggcactgttctgaagttcttggtcagacccaacgcttctacaagcggaacctccgggctaagcgtgtttctggaagagttcgaaacgtaccgcccagatcggtgtggaagacccggtggcggtgaaaccggccagcgcttgttgtccttagagctcgatgcagcgtctggtgggctgctggcagcgtttccacggtgcgtcgttcgggtgccagtagcccggtgtcaacagtactcaggttgcatgaagaattgtattggctctcaggacccttattgcggatgggcccctgatgggtcctgcatcttcctttcacccggcacaagagctgcctttgaacaggacgtctcgggcgcatccaccagcggccttggcgactgcaccggcctgctccgcgcatcattgtccgaagaccgcgcggggctagtgtcagtgaacctgctcgtgacaagctccgtggctgccttcgtcgtgggagcagttgtgagtggcttctccgtgggatggtttgttggcctccgcgagcgccgcgagttggccaggcggaaagacaaggaagcgatcttagcccatggagccggtgaggccgtgctgtccgtgagccgcctgggtgagcgtcgcgcccagggaccaggtggcaggggaggggggggggggggcggggctggcgtgcctccagaggcactgctggcgccactgatgcaaaacggatgggccaaagccacactgttgcagggcggaccccatgacctggactcaggtctgctgcctacgcctgagcaaacccccttgccacagaagcggttgcccaccccacatcctcacccccacgccttaggaccgcgggcatgggaccacggccatcctctgctacccgcttcggcctcatcaagcctactgttgttggcccccgcacgggctccagagcagcctcctgcgcccggtgaacccacccccgatggacgtctgtacgcagcacgccctgggcgcgcttcacacggcgacttccctctgacaccccatgccagtccagaccgcagaagagtggtgtctgctcccactggccccttggatcctgcctcagccgctgacggcctgccccggccatggagtccaccgcccaccggtagcttacgaaggccccttgggccacatgcccctcctgctgcaacgttgcgacggactcacacattcaactccggagaggcaaggcctggagacaggcaccggggttgccacgcacgacccggaaccgaccttgctcatcttcttccctacgggggagctgatcgaaccgccccacccgtaccctag

SEQ ID NO: 222875 - DNA, 2667 bp, Artificial Sequence
  derived and/or modified sequence
atgcagaccccccgggccagcccccccaggcctgccctgctgctgctgctgctgctgctgggcggggcccacggcctcttccctgaggagcccccacccctgtctgtggccccccgggactacctgaaccactaccctgtgtttgtgggcagcggccctggccgcctgaccccagctgagggcgcagatgacctgaacatccagagggtgctgcgggtgaacagaaccctcttcatcggggaccgggacaacctgtacagagtggagctggagccccccaccagcacagagctgcgctaccagaggaagctgacctggaggagcaaccccagcgacatcaacgtgtgcaggatgaagggcaagcaggagggagaatgtagaaactttgtgaaggtgctgctgctgagagatgagagcaccctgtttgtgtgtggcagcaatgccttcaaccctgtgtgtgccaactacagcattgacaccctgcagcctgtgggggacaacatcagcggcatggcccgctgcccctatgaccccaagcacgccaacgtggccctcttcagtgatggcatgctgttcaccgccaccgtgacagacttcctggccattgatgctgtgatctaccgcagcctgggggaccggcccaccctgaggacagtgaagcatgacagcaagtggttcaaggagccctactttgtgcatgctgtggagtggggcagccacgtgtacttcttcttccgggagatcgccatggagttcaactacctggagaaggtggtggtgtcccgggtggcccgggtgtgcaagaatgatgtgggcggcagcccccgggtgctggagaagcagtggaccagcttcctgaaggcccggctgaactgcagcgtgcctggggacagccacttctacttcaacgtgctgcaggccgtgactggagtggtgtccctgggcggccggcctgtggtgctggccgtgttcagcacccccagcaacagcatccctggcagcgctgtgtgtgcctttgacctgacccaggtggccgctgtgtttgagggccgcttccgggagcagaagagccctgagagcatctggacccctgtgcctgaggaccaggtgccccggcccaggcctggctgctgtgccgcccctggcatgcagtacaatgccagcagcgccctgcctgatgacatcctgaactttgtgaagacccaccccctgatggatgaggccgtgcccagcctgggccacgccccctggatcctgcggaccctgatgaggcaccagctgaccagggtggccgtggatgtgggcgccggcccctggggcaaccagacagtggtgttcctgggcagcgaggccggcaccgtgctgaagttcctggtgcggcccaatgccagcaccagcggcaccagcggcctgagcgtcttcctggaggagtttgagacctacagaccagacagatgtggccggcctgggggcggggagaccggccagaggctgctgagcctggagctggatgctgccagcggcggcctgctggccgccttcccccgctgtgtggtgcgggtgcctgtggcccgctgccagcagtacagcggctgcatgaagaactgcatcggcagccaggacccctactgcggctgggccccagatggcagctgcatcttcctgagccctggcaccagggctgcctttgagcaggatgtgtctggggccagcaccagcggcctgggggactgcaccggcctgctgcgggccagcctgtctgaggacagagctggcctggtgtctgtgaacctgctggtgaccagctctgtggccgcctttgtggtgggcgctgtggtgtctggcttctctgtgggctggtttgtgggcctgcgggagcggcgggagctggcccggaggaaggacaaggaggccatcctggcccacggggccggggaggccgtgctgtctgtgtcccggctgggggagcggcgggcccagggccctgggggccggggcggcggcggcggcggcggggccggcgtgcccccagaggccctgctggcccccctgatgcagaatggctgggccaaggccaccctgctgcagggcggcccccatgacctggacagcggcctgctgcccaccccagagcagacccccctgccccagaagaggctgcccaccccccacccccacccccacgccctgggcccccgggcctgggaccacggccaccccctgctgcctgccagcgccagcagcagcctgctgctgctggccccagcccgggcccctgagcagcccccagcccctggagagcccaccccagatggccgcctgtatgctgcccggcccggccgggccagccacggggacttccccctgaccccccacgccagcccagacagaagaagagtggtgtctgcccccaccggccccctggaccctgccagcgctgctgatggcctgccccggccctggagccccccacccaccggcagcctgcggcggcccctgggcccccacgcccccccagctgccaccctgcggaggacccacaccttcaacagcggggaggcccggcctggggacagacaccggggctgccacgcccggcctggaacagacctggcccacctgctgccctatggaggagctgacagaacagcccctcctgtgccctag

SEQ ID NO: 222876 - DNA, 2049 bp, Artificial Sequence
  derived and/or modified sequence
atgcagaccccccgggccagcccccccaggcctgccctgctgctgctgctgctgctgctgggcggggcccacggcctcttccctgaggagcccccacccctgtctgtggccccccgggactacctgaaccactaccctgtgtttgtgggcagcggccctggccgcctgaccccagctgagggcgcagatgacctgaacatccagagggtgctgcgggtgaacagaaccctcttcatcggggaccgggacaacctgtacagagtggagctggagccccccaccagcacagagctgcgctaccagaggaagctgacctggaggagcaaccccagcgacatcaacgtgtgcaggatgaagggcaagcaggagggagaatgtagaaactttgtgaaggtgctgctgctgagagatgagagcaccctgtttgtgtgtggcagcaatgccttcaaccctgtgtgtgccaactacagcattgacaccctgcagcctgtgggggacaacatcagcggcatggcccgctgcccctatgaccccaagcacgccaacgtggccctcttcagtgatggcatgctgttcaccgccaccgtgacagacttcctggccattgatgctgtgatctaccgcagcctgggggaccggcccaccctgaggacagtgaagcatgacagcaagtggttcaaggagccctactttgtgcatgctgtggagtggggcagccacgtgtacttcttcttccgggagatcgccatggagttcaactacctggagaaggtggtggtgtcccgggtggcccgggtgtgcaagaatgatgtgggcggcagcccccgggtgctggagaagcagtggaccagcttcctgaaggcccggctgaactgcagcgtgcctggggacagccacttctacttcaacgtgctgcaggccgtgactggagtggtgtccctgggcggccggcctgtggtgctggccgtgttcagcacccccagcaacagcatccctggcagcgctgtgtgtgcctttgacctgacccaggtggccgctgtgtttgagggccgcttccgggagcagaagagccctgagagcatctggacccctgtgcctgaggaccaggtgccccggcccaggcctggctgctgtgccgcccctggcatgcagtacaatgccagcagcgccctgcctgatgacatcctgaactttgtgaagacccaccccctgatggatgaggccgtgcccagcctgggccacgccccctggatcctgcggaccctgatgaggcaccagctgaccagggtggccgtggatgtgggcgccggcccctggggcaaccagacagtggtgttcctgggcagcgaggccggcaccgtgctgaagttcctggtgcggcccaatgccagcaccagcggcaccagcggcctgagcgtcttcctggaggagtttgagacctacagaccagacagatgtggccggcctgggggcggggagaccggccagaggctgctgagcctggagctggatgctgccagcggcggcctgctggccgccttcccccgctgtgtggtgcgggtgcctgtggcccgctgccagcagtacagcggctgcatgaagaactgcatcggcagccaggacccctactgcggctgggccccagatggcagctgcatcttcctgagccctggcaccagggctgcctttgagcaggatgtgtctggggccagcaccagcggcctgggggactgcaccggcctgctgcgggccagcctgtctgaggacagagctggcctggtgtctgtgaacctgctggtgaccagctctgtggccgcctttgtggtgggcgctgtggtgtctggcttctctgtgggctggtttgtgggcctgcgggagcggcgggagctggcccggaggaaggacaaggaggccatcctggcccacggggccggggaggccgtgctgtctgtgtcccggctgggggagcggcgggcccagggccctggcagccgccgctggggcttccagaaggcccggggcagcccccgctgccgcctgggcgtgtag

SEQ ID NO: 222877 - DNA, 2667 bp, Artificial Sequence
  derived and/or modified sequence
atgcagaccccccgggccagccccccccggcccgccctgctgctgctactgctgctgctgggcggtgcacacggcctattcccggaggagccccctccactgtcggtcgctcccagagattacttgaaccactatcccgtgtttgtaggatccgggcccggcagactaacccctgcggagggtgctgacgacctgaacattcaacgggtgctgcgagtgaatcggactctattcattggcgaccgcgacaatctttaccgagtagaactggagcctcctactagtaccgaactgaggtatcagagaaaacttacttggcgtagcaacccctccgatataaatgtgtgtcgtatgaaaggtaagcaagagggagagtgccggaattttgtaaaggtcctactcctgcgcgatgaaagcacattatttgtgtgcggatccaatgccttcaatccagtctgcgctaactatagtatagacaccctccagcccgtcggggacaatatcagtggcatggcccggtgcccctatgacccgaagcacgctaacgttgcgttgttctccgatggtatgctgtttacagccactgtcaccgatttcctggccatagacgctgtcatttatcgatcactgggagaccgtcctacactgaggacagtcaaacatgattccaagtggttcaaggaaccgtacttcgtgcacgccgttgaatggggttcccatgtgtattttttttttagggagatagctatggagttcaactatctcgagaaggttgtcgtttctcgggtggccagggtatgcaagaatgacgtgggtggatctccaagggtgctggagaagcagtggacatcctttctgaaggcaaggctgaattgttcagtgccaggagactcacatttctacttcaacgttctgcaggccgtgacaggtgttgtcagcttaggcggacggccggttgtcttggccgttttctccacaccttccaatagcatccccgggtcagccgtgtgcgccttcgacctgacgcaggtggcagctgtattcgaggggcgctttcgcgaacagaagtcgcctgagtccatttggacaccagtgcccgaagaccaagtccctagaccgcggcccggttgttgtgctgcccctgggatgcaatacaacgccagttccgcacttcccgatgacatcctcaattttgtaaagacgcatcctcttatggacgaagcagtgccttctctgggacatgctccctggatacttcggaccttgatgcgacaccagctcactcgagttgccgtcgatgttggcgccggtccctggggtaaccagactgtcgtgttcttgggctcagaggccggtacagtcctgaagttcctggtgagacctaacgccagtaccagtggaacttctggactgtctgtgtttctggaggagtttgagacctacaggcctgaccgttgcggacgaccaggcgggggagagactggacagcggctgttgtcgctggaacttgacgcagcttccggcggacttctggctgcattccctcgctgtgtcgtcagggtccctgtggctcgttgccagcagtatagcgggtgcatgaaaaactgtatcgggtcacaagacccttactgcggctgggctccggacggaagttgcatctttctgtctccaggtactagggcggcctttgagcaggatgtgtccggcgctagcacctccggcttgggagactgcacaggcttattgcgggctagcctcagcgaggaccgggctggcttggtctccgtgaacctgctggtgacctcctcagtggctgcatttgtcgtaggcgccgtcgtgtccggtttttcagtaggctggtttgtgggcttgagggaacggagggagctggctagacgtaaggacaaggaagcaatactcgctcacggcgctggcgaggcagtattatctgtgtcacgcttgggagagcgacgcgcgcagggtcctggcggccgaggcggtgggggcgggggcggcgccggggttcccccagaagctctgctcgcgccgctcatgcaaaacgggtgggccaaggccactcttttgcaggggggcccacatgacctagactctggtcttttgcctacaccggagcagacgcccctgcctcaaaaaaggctgccaacaccgcacccgcaccctcatgcgttaggcccccgcgcgtgggatcatgggcaccctctgcttcccgcatcagccagtagtagcctgctgctactggcacccgcgagagcccctgaacagcctcccgcgccaggcgagcccactccagatggccggctctacgccgcgcgtccaggccgcgcaagccatggggacttccctctgactccgcacgccagcccagatagacggcgcgtcgtgagtgctccaacagggcctttagaccctgcaagtgctgccgatggattgccacgtccatggagtccgcctcccacaggttctttgaggcggcccctggggcctcacgcccctccagctgcaacattgagaagaacccatacctttaactccggcgaggcccgccctggcgaccggcaccgcggatgtcatgccagacccggtactgacctggctcacctgttgccctacggcggtgctgacagaaccgcccccccggttccctag

SEQ ID NO: 222878 - DNA, 2049 bp, Artificial Sequence
  derived and/or modified sequence
atgcagaccccccgggccagccccccccggcccgccctgctgctgcttctcttacttctgggcggagcccacgggctgttcccagaagagccgcccccccttagtgttgcgcctcgagattaccttaaccactatcccgtatttgtgggaagcggccctggacggctgacccctgcggagggggccgatgacttgaacattcagcgcgttctcagagtgaatagaacgctgttcattggtgatcgagataatctttatcgtgtcgagctggagcccccaacttccaccgagctcagataccagcggaagttaacctggcgctctaacccgtctgacatcaatgtgtgccgcatgaaggggaaacaggagggagagtgccggaactttgtcaaggtgctcctactgcgggatgaaagcactctttttgtttgtggctcgaacgcatttaatccggtgtgcgccaattactctatagataccctccagccagttggggataacatttcaggcatggcgcgctgtccatacgatccaaagcatgccaacgtggccctattttcagatggcatgctctttaccgccactgtgacggatttcctggccattgacgcagttatctataggtccctgggcgacaggccaacacttagaactgtgaaacacgactctaagtggttcaaggagccgtactttgtccacgccgtcgagtggggatcccatgtgtacttcttctttcgcgaaatcgcgatggagttcaattacctggagaaagtcgtggtgagcagagtggctagagtctgtaaaaacgacgtgggtggctctcccagggtgctggagaagcagtggacttcctttttgaaggcgcggctgaattgtagcgttccaggggatagtcacttttattttaatgttcttcaggctgtcactggagtggtttcactggggggaaggcccgttgtgttggccgtgttctcaacaccttcgaactccattcccggttcggcagtgtgtgcctttgatcttacacaagttgctgccgttttcgagggccgctttcgcgaacagaagagccccgagtctatatggactcccgtccctgaggatcaggtgccgcgtccaagaccaggttgctgtgccgcccctgggatgcaatacaacgcatcttctgccctgcccgacgatatcttgaacttcgttaagacccacccactgatggacgaggcagtcccaagcctgggccacgcgccgtggattctcagaactttgatgagacaccagctgacaagagttgctgtcgatgtgggtgcagggccttggggcaatcaaactgtggtgttcttagggtccgaggcagggactgttttgaaatttctggtccggcccaatgcgtcgacatctgggacctctggcctgagtgtattcttggaggagttcgaaacctatcgcccagaccgctgtggacggccgggtggcggcgagaccgggcagagactgctctccctcgagttggacgccgctagtggcggtcttctagccgccttccctcgctgcgttgtgagagttcctgtggcaaggtgtcagcagtacagcgggtgcatgaaaaactgtatcggtagccaggatccctattgtggctgggcaccagacggctcgtgcatttttctttctccgggcacccgcgccgcattcgaacaagatgtgtcaggtgcatcaacttcaggtctgggcgattgcacaggactgttgagggcaagcctgagcgaagaccgcgcaggcctggtgtctgtgaacttacttgtgacaagctccgttgccgctttcgtggtgggcgccgtcgtttcaggtttctccgtggggtggttcgtgggactgcgagagcgtcgggagctcgccaggagaaaagataaagaggcgattctggctcacggtgccggcgaggccgtgctctccgtgtctcgccttggtgagcgacgtgctcagggcccggggtccaggcggtggggcttccagaaggcacgtggttcccctaggtgtcgactgggcgtgtag

SEQ ID NO: 222879 - DNA, 2667 bp, Artificial Sequence
  derived and/or modified sequence
atgcagaccccccgggccagccccccccggcccgccctgctgctgttacttctcttgttggggggggcacacggcttgtttcctgaggagcccccgccgctgagtgtggccccccgtgattatctcaatcactacccagtcttcgttgggtccggtcctggtcgattgaccccagctgagggtgcggatgaccttaatatccaaagggtgttaagggtaaacagaactctgtttataggcgacagagacaatctgtatagagtggaactggagcctcccacatctacggagctgaggtaccaaagaaaactgacttggcgctcaaacccctccgacatcaacgtatgccgcatgaaagggaagcaggagggcgagtgtaggaatttcgttaaagtgctgttactgcgggatgagagtactttgttcgtctgtggctcaaatgccttcaatccagtgtgcgcgaattactccattgacaccctccagccagttggggacaatatctcgggcatggcccggtgtccatacgaccccaagcacgctaacgtagccctgtttagtgacggcatgctgttcaccgcaacggtcaccgattttctagcgattgacgccgtaatttatagaagcctcggagatcggcccaccctgcggaccgtgaaacacgactccaaatggtttaaggagccttatttcgttcacgcagtggaatggggaagccacgtgtacttcttcttcagggaaattgcgatggagtttaactacctggagaaggttgttgtctccagggtggctcgggtgtgtaagaacgacgtaggaggctcgcctcgcgtactggagaagcaatggacttccttcttgaaagcccgactcaactgcagtgtcccaggagatagtcacttttactttaacgtactccaggccgtcacaggggtggttagtcttgggggcaggcccgtcgtgctggccgtcttctccaccccatccaactccatccccgggagtgctgtttgtgcctttgacctgacccaagtggccgccgtgtttgagggccgatttagagaacagaagtcgccagaatcgatatggacacccgtgcctgaagaccaggtgccacggccgcggcctggttgctgtgctgcaccggggatgcagtacaatgctagcagtgccctcccagatgacatcttgaattttgtcaagacccatcccctcatggatgaggccgtgcctagcctgggccatgctccctggattttgcggaccctgatgcggcaccagttgacgcgcgtggccgtcgacgtgggagctgggccctggggaaaccaaaccgtagtcttcctggggagtgaggccggtaccgtcctgaagttccttgtgaggcctaacgcttcgacctccggaacaagcgggctgtcggtgttcttagaagagtttgagacctataggcctgatcgttgcggacgcccagggggtggagaaacagggcaaaggctgctgtccctggaattagacgccgcctccggcggattgctggccgcttttccaagatgcgtcgtgagagtccccgtggctcgttgccaacagtacagcggctgcatgaagaactgtatcggatcacaggatccatactgtggatgggcccctgacgggagctgcatcttcctgagcccgggcaccagagccgccttcgagcaggacgtgtccggggcatcaacatcaggactgggagactgtaccggactgctgagagcatcccttagcgaggatcgagctggactggtatcggtcaacctcctggtcacatcatctgtcgctgcatttgttgtgggggctgttgtgagtgggttttccgtcggatggttcgttggattgagggagcgccgcgaattggctcgacgaaaagataaagaagctattttggcgcacggggccggagaggctgtgctgtccgtctctcggctgggggagcgtcgggcccaggggcctggagggcgcgggggaggcggaggaggaggcgcaggcgtgccgccagaagcgctgctggcccccttgatgcagaatgggtgggcaaaggctactttgctccagggcgggccccatgacctcgattctgggttgttgccaacgccagaacagactcctctcccccaaaagcggctgcccaccccccacccacacccgcatgcactgggccctcgcgcatgggaccacggccatcccctcttgcctgcctcagcttcatcctcactgctcctgctggccccagcccgggccccggaacagccccctgctccaggggagccgacacctgatggacgcctgtatgctgcccggcccggccgagcctcacatggcgacttccccctgactccacatgcctcaccggaccgcaggagagtggtgagcgctccaaccggcccacttgatccagcatctgcggcagacgggctgcccaggccctggagtcctccaccaacgggatcgctccgaaggccgcttggcccacacgccccccctgctgcgaccctgagaaggacacacacatttaacagcggggaggcccgaccgggggatcgccacagagggtgtcacgctcgccccggcactgacctggctcatctgctgccgtacggtggtgcagaccgcaccgcccctccagttccctag

SEQ ID NO: 222880 - DNA, 2667 bp, Artificial Sequence
  derived and/or modified sequence
atgcaaactccccgtgctagccccccaagacctgccctcctgctgctcctccttctgctgggcggagcgcacggacttttccctgaagagccaccacctctgagcgtggctcctcgtgactatcttaaccattacccagtgtttgtaggatcaggacctggccgtttgacgccggctgaaggcgcagacgacctcaacatccaaagagtgctgagagtcaatcggaccttgtttatcggagacagggataatctgtatagagtcgagttggaacctccgacatcaacggaattaagataccagcggaagttgacctggcgcagcaaccccagcgacatcaatgtatgtcgaatgaaagggaagcaggagggagaatgcaggaattttgttaaagtcttgttactaagagacgagagcaccctgtttgtttgtgggtcaaatgcttttaaccctgtctgcgctaactacagcattgataccctgcagcccgtgggcgacaacatttcgggaatggcgaggtgcccctacgaccccaagcatgcgaacgttgcgctattttcagatggcatgttgttcactgctacagtgactgactttctggcaatcgatgctgtgatttaccgaagtcttggggacagacctacccttaggacggtgaagcatgacagcaaatggtttaaggaaccatactttgtccatgcagtggaatggggtagccatgtctatttcttcttccgggaaatagctatggaattcaactatctagagaaggttgtcgtgtctagggtggcacgggtctgcaaaaatgatgtaggaggttcccctcgggtgctcgaaaagcagtggactagtttcctgaaggcccgtttgaattgttctgttcccggagattcccacttttacttcaatgtgttgcaggcagtaacaggcgtggttagtctcgggggtagacctgtcgtgctggcagtcttcagtactcctagcaatagcattccaggaagtgccgtgtgtgcgttcgacctgacgcaggtagccgcagtattcgaagggagatttcgcgagcaaaaatcccctgagtcaatctggaccccagtgccagaggatcaagtgccgagaccacgcccagggtgttgtgcagccccaggcatgcagtacaatgcttcctctgcactcccggatgatattttaaacttcgtgaagacccaccctcttatggacgaggcggtgccaagcctgggacatgccccatggattctgcgcactctgatgcgacaccagctaactcgcgtcgccgtcgatgttggggcaggcccttggggaaatcagaccgtggtctttctgggttccgaggcaggaaccgtgctgaaattcctggttcggccaaatgcatctaccagcgggacatctggcctgagcgtctttcttgaagagttcgagacttataggccggatcgctgtggaagaccaggcggtggggagactggccaaagattgctgtccctggagctcgatgccgctagcggcggacttctagcggcattcccgaggtgtgtggtgcgggtgcctgtcgctaggtgccagcaatactctggctgcatgaagaactgcatcggaagccaagacccatattgcggctgggcccctgacgggtcctgtatcttcctcagccctgggacgagagccgcatttgaacaggacgttagcggtgcctccacaagtggcctaggggattgcactgggctgctgagagcttcgctgtccgaggaccgggcaggactggtgtccgtgaatcttttagtgacatcctctgtggctgcttttgtggtaggcgcagtcgtgtccggtttttccgtgggctggtttgtgggtctgcgagaaaggagggagcttgcgcgtcggaaagataaagaggcaatcctggcgcacggagccggtgaagccgtcctgtccgttagtcggctgggtgagcgcagggcacaggggcctgggggacggggtgggggtggaggcggtggggcaggtgtgccgcctgaggccctcttagccccactaatgcaaaacgggtgggcaaaagctacactgctacagggaggaccacatgacctggactcagggctacttccaactcccgaacagacacctctgccacagaagcgcttaccgactccccacccccacccgcacgcgttgggtccacgggcatgggaccacggccatcccctgctgcccgcaagcgccagtagttctttgctcctgctggcccctgcacgagccccagagcagcccccagcacctggggagcccacacccgatggacgcctgtacgcagctcggcctggtagagcaagccacggcgacttccccctgacacctcacgcctcccctgacagacgcagggtcgtgtcggcccctacaggcccactggatcctgcttcagctgctgacgggttgccacgaccgtggtctccacccccaaccggatctctacgaagacccttaggaccacacgcccctccagccgctactttaaggcgcactcacactttcaattctggagaagctcgtcctggcgaccgacacagggggtgccatgctaggcccggtactgacttagctcatctgctgccttacggcggagcagaccgcactgcccctccggttccatag

SEQ ID NO: 222881 - DNA, 2049 bp, Artificial Sequence
  derived and/or modified sequence
atgcagaccccgagggcaagcccgcctcgtcctgcactactccttttgctgcttctattagggggtgcccatgggctctttcctgaggaacctccgccacttagtgttgcaccgagggactacctgaaccattacccggtatttgtgggcagcggcccaggtcggcttactcctgctgaaggtgccgacgacttgaatattcagagagtgctaagagtcaatcggacactgtttatcggcgaccgagacaacctttatcgggtagagttagagccacctaccagtaccgagttaagataccagagaaagctaacgtggcgaagtaatccgagtgacatcaatgtgtgtaggatgaagggcaagcaggaaggcgaatgtcgcaattttgttaaggtcttattgttacgagacgaatccacgcttttcgtgtgcgggtctaatgccttcaatccagtgtgtgcgaactatagcatcgatacactccagcccgtaggagacaatatctctgggatggccaggtgcccctacgatcccaaacatgcaaatgttgctctgtttagcgacggcatgctgttcacagcgaccgtgactgacttcctcgccatcgacgccgtgatctacaggagcttgggggatcgccctacactgaggactgttaaacacgattctaaatggtttaaagagccctatttcgtacacgccgtcgaatgggggtcacatgtgtacttcttcttccgagaaatcgcgatggaattcaattatctggaaaaagtggtagtatcacgggtagcccgtgtgtgcaaaaacgatgtcggaggaagcccacgagtgctggagaaacagtggaccagctttctcaaggcacgactaaattgctccgtaccaggcgatagccacttctattttaatgtgctgcaggcagtgaccggcgtggtatcactgggagggagacctgtggtcctggccgtcttcagcaccccttcaaatagcattccgggttccgctgtgtgtgcatttgatctcacccaggtggcagccgtttttgagggacgatttcgtgaacaaaagagccccgagagtatttggacgcctgtgccggaggatcaggtgcctagacctcgaccaggctgttgtgccgcaccaggaatgcagtataatgctagttctgctttgccagatgacatactaaatttcgtcaagacacatcctttgatggatgaagccgtcccttcactgggccacgctccctggatcctccgcactcttatgcgccatcagctgactcgggtagccgtagacgtcggcgctggaccttggggaaaccagaccgtggtctttttaggctctgaagctggcacagtgctcaaattccttgtgcgacctaacgcctctacatcgggtacatctggccttagtgttttcctcgaggagttcgagacttatcgccctgaccgctgtggcaggcctggcggaggagaaacaggacaacgcctgcttagtctggaactggatgccgcttccggcggtttgctggccgcatttccacgctgcgtggtgagagttccggtggccagatgccagcaatacagcggctgcatgaagaactgtattggaagtcaagacccttattgtggttgggctccagacgggtcttgtatctttttgtctccagggaccagggctgcattcgaacaggatgtatccggcgctagcacctcaggtctaggcgactgtacaggcctattgagggctagcctgtcggaagatcgggcaggcctggtgagtgtcaacctactggtcacatcatctgtggcggcatttgtcgtgggggcagtcgtgtctggtttctctgtaggatggtttgttggtcttagggagaggcgtgaactagctcgccgaaaggacaaagaagcaattttggcccacggcgctggagaggccgtgcttagtgtttctcgtctcggcgagaggcgagctcaggggcctgggtctcgtagatggggattccagaaggctaggggtagcccgaggtgccgactgggggtttag

SEQ ID NO: 222882 - DNA, 2667 bp, Artificial Sequence
  derived and/or modified sequence
atgcagacgcctagagctagccccccaagacccgcactgctgctcttgcttttgctgctcggaggtgcacatggcctgttcccggaagagccccctcccctgtccgtcgctccaagagactatctgaatcactatccggtctttgtcggttccggccctggtcgcttaacgccggcagagggcgcagatgacctgaatatacagcgggttttaagggtgaacagaacactgtttattggtgatagggacaatctgtacagggttgaattggagccaccgacctcgacagagttgagataccagcggaagctcacctggagaagcaacccaagcgatattaatgtatgccgcatgaaagggaagcaggagggagagtgccggaactttgtcaaggtgcttctgctccgcgacgagagtacactgtttgtgtgtgggagtaacgctttcaatcccgtgtgcgccaattattcaatcgacactttgcaaccggtgggagacaatatcagtggtatggccagatgcccatacgaccctaaacatgctaacgttgccctattcagcgatggcatgctgtttacagccaccgtaacagattttctcgcaatagatgccgttatttacaggtccttgggcgacaggccgacactgcggacagtcaagcacgactccaagtggtttaaagagccatactttgtgcatgcggtggaatgggggtcacatgtgtatttcttcttccgagaaatcgccatggaattcaattaccttgaaaaggtagtcgtcagcagagttgctcgggtgtgcaagaacgacgtgggcggttccccaagggtgctggagaaacagtggacaagtttcctcaaagctcggctaaactgttctgtgcctggtgactcccacttttattttaatgttctgcaggcagttacgggggtagtgtcacttggaggtcgccctgtggttctcgctgtattctcgacaccgtccaattctatcccaggaagcgccgtctgtgcctttgacttgacacaggtggccgcagtgttcgaaggaaggttccgagagcagaagagtccagaaagtatttggacaccagtcccggaagaccaggtccctcgccctagacctggatgttgcgccgctccaggtatgcagtataatgcttcaagcgccctgcccgacgatatcctgaatttcgtgaaaacacatcccctgatggacgaagccgttccatctctgggccatgctccatggatcctccgtactctgatgcggcatcagttaactagggttgccgtggacgtaggcgctggaccatggggcaaccaaaccgtcgtgttcctcggcagtgaagccggtacagtcctgaaattcctcgtgcgacccaacgctagcaccagcgggacttcaggattaagtgtatttttggaagagtttgaaacctatagaccagaccgatgcgggaggccgggtggcggagagacgggtcagaggttgttaagccttgagcttgacgctgcctctggcggattgctggctgcatttcctaggtgtgtggtgcgtgtgcctgtcgccaggtgtcagcaatattccggttgtatgaagaattgcattggatctcaagatccttactgtggctgggcccctgacggcagctgtatcttcttgagccccggtacgagagcagcttttgaacaggatgtctccggcgcatccacttcgggcctgggcgactgtaccggcttactgcgtgcctcattaagcgaagatagggccggactcgtgagtgtgaacttgctggttacatcctcggtcgccgcattcgtggtcggagcggtagtgtctgggttttccgttgggtggtttgttggtctgcgtgaaaggcgggaattagcgagacgaaaggacaaggaagccatactggcccacggggctggtgaggcggtcctgagcgtctcccgcctgggagagaggcgtgcacagggcccagggggaagaggcggtgggggagggggtggggctggcgttccgccagaggccctccttgccccacttatgcaaaacgggtgggcaaaggctaccctgctgcagggcggacctcatgacctggactctgggcttcttcctaccccagaacagaccccgctgccgcagaaaaggctgccgacacctcatccacacccccatgcactgggcccacgggcatgggaccatggccaccccctactccctgccagcgcaagcagttcactactgttgctggccccagctagggcccctgagcaaccgccagctccaggagagcctactccagacggcagactgtatgcggctcggccaggcagagcttcacatggggacttccccctgacgcctcatgcctcacctgacagacggcgtgtggtctccgctcccactggaccactggatcctgcctccgctgccgacggcttgccacggccatggagcccaccccctacaggatcgctaagacgccctctgggaccgcacgctcccccagctgctaccctgaggcgcacacacacctttaacagtggagaggctagacctggggaccgccacagaggttgtcacgctcgcccaggaaccgacctcgcccacctgctgccttacggtggcgctgataggacggcaccacctgtcccctag

SEQ ID NO: 222883 - DNA, 3986 bp, Artificial Sequence
  derived and/or modified sequence
aaatcctggaagctcagggtcgtgaagaggaagtccagccgcgctatgcgaggtcttcctgtttttggagggggcaggcaccccagggccgattgtcgcgaatcaccttcacctctgggggctcagaatccctgagccagaaggccagggcagggctgggggatacccctgctgctcagacaggaaaatgggctcggagcttgcccaatacttcccagaaggacgaggctgctgaacttctcattcggggctccgggacctggactgtacccctttctggcgtcacctcctcctgtcgcctggccctcgccatgcagaccccgcgagcgtcccctccccgcccggccctgctgcttctgctgctgctactggggggcgcccacggcctctttcctgaggagccgccgccgcttagcgtggcccccagggactacctgaaccactatcccgtgtttgtgggcagcgggcccggacgcctgacccccgcagaaggtgctgacgacctcaacatccagcgagtcctgcgggtcaacaggacgctgttcattggggacagggacaacctctaccgcgtagagctggagccccccacgtccacggagctgcggtaccagaggaagctgacctggagatctaaccccagcgacataaacgtgtgtcggatgaagggcaaacaggagggcgagtgtcgaaacttcgtaaaggtgctgctccttcgggacgagtccacgctctttgtgtgcggttccaacgccttcaacccggtgtgcgccaactacagcatagacaccctgcagcccgtcggagacaacatcagcggtatggcccgctgcccgtacgaccccaagcacgccaatgttgccctcttctctgacgggatgctcttcacagctactgttaccgacttcctagccattgatgctgtcatctaccgcagcctcggggacaggcccaccctgcgcaccgtgaaacatgactccaagtggttcaaagagccttactttgtccatgcggtggagtggggcagccatgtctacttcttcttccgggagattgcgatggagtttaactacctggagaaggtggtggtgtcccgcgtggcccgagtgtgcaagaacgacgtgggaggctccccccgcgtgctggagaagcagtggacgtccttcctgaaggcgcggctcaactgctctgtacccggagactcccatttctacttcaacgtgctgcaggctgtcacgggcgtggtcagcctcgggggccggcccgtggtcctggccgttttttccacgcccagcaacagcatccctggctcggctgtctgcgcctttgacctgacacaggtggcagctgtgtttgaaggccgcttccgagagcagaagtcccccgagtccatctggacgccggtgccggaggatcaggtgcctcgaccccggcccgggtgctgcgcagcccccgggatgcagtacaatgcctccagcgccttgccggatgacatcctcaactttgtcaagacccaccctctgatggacgaggcggtgccctcgctgggccatgcgccctggatcctgcggaccctgatgaggcaccagctgactcgagtggctgtggacgtgggagccggcccctggggcaaccagaccgttgtcttcctgggttctgaggcggggacggtcctcaagttcctcgtccggcccaatgccagcacctcagggacgtctgggctcagtgtcttcctggaggagtttgagacctaccggccggacaggtgtggacggcccggcggtggcgagacagggcagcggctgctgagcttggagctggacgcagcttcggggggcctgctggctgccttcccccgctgcgtggtccgagtgcctgtggctcgctgccagcagtactcggggtgtatgaagaactgtatcggcagtcaggacccctactgcgggtgggcccccgacggctcctgcatcttcctcagcccgggcaccagagccgcctttgagcaggacgtgtccggggccagcacctcaggcttaggggactgcacaggactcctgcgggccagcctctccgaggaccgcgcggggctggtgtcggtgaacctgctggtaacgtcgtcggtggcggccttcgtggtgggagccgtggtgtccggcttcagcgtgggctggttcgtgggcctccgtgagcggcgggagctggcccggcgcaaggacaaggaggccatcctggcgcacggggcgggcgaggcggtgctgagcgtcagccgcctgggcgagcgcagggcgcagggtcccgggggccggggcggaggcggtggcggtggcgccggggttcccccggaggccctgctggcgcccctgatgcagaacggctgggccaaggccacgctgctgcagggcgggccccacgacctggactcggggctgctgcccacgcccgagcagacgccgctgccgcagaagcgcctgcccactccgcacccgcacccccacgccctgggcccccgcgcctgggaccacggccaccccctgctcccggcctccgcttcatcctccctcctgctgctggcgcccgcccgggcccccgagcagccccccgcgcctggggagccgacccccgacggccgcctctatgctgcccggcccggccgcgcctcccacggcgacttcccgctcaccccccacgccagcccggaccgccggcgggtggtgtccgcgcccacgggccccttggacccagcctcagccgccgatggcctcccgcggccctggagcccgcccccgacgggcagcctgaggaggccactgggcccccacgcccctccggccgccaccctgcgccgcacccacacgttcaacagcggcgaggcccggcctggggaccgccaccgcggctgccacgcccggccgggcacagacttggcccacctcctcccctatgggggggcggacaggactgcgccccccgtgccctaggccgggggccccccgatgccttggcagtgccagccacgggaaccaggagcgagagacggtgccagaacgccggggcccggggcaactccgagtgggtgctcaagtcccccccgcgacccacccgcggagtggggggccccctccgccacaaggaagcacaaccagctcgccctccccctacccggggccgcaggacgctgagacggtttgggggtgggtgggcgggaggactttgctatggatttgaggttgaccttatgcgcgtaggttttggttttttttgcagttttggtttcttttgcggttttctaaccaattgcacaactccgttctcggggtggcggcaggcaggggaggcttggacgccggtggggaatggggggccacagctgcagacctaagccctcccccacccctggaaaggtccctccccaacccaggcccctggcgtgtgtgggtgtgcgtgcgtgtgcgtgccgtgttcgtgtgcaaggggccggggaggtgggcgtgtgtgtgcgtgccagcgaaggctgctgtgggcgtgtgtgtcaagtgggccacgcgtgcagggtgtgtgtccacgagcgacgatcgtggtggccccagcggcctgggcgttggctgagccgacgctggggcttccagaaggcccgggggtctccgaggtgccggttaggagtttgaaccccccccactctgcagagggaagcggggacaatgccggggtttcaggcaggagacacgaggagggcctgcccggaagtcacatcggcagcagctgtctaaagggcttgggggcctggggggcggcgaaggtgggtggggcccctctgtaaatacggccccagggtggtgagagagtcccatgccacccgtccccttgtgacctcccccctctgacctccagctgaccatgcatgccacgtggctggctgggtcctctgccctctctggagtttgcctcccccagccccctccccatcaataaaactctgtttacaacca

SEQ ID NO: 222884 - DNA, 2087 bp, Artificial Sequence
  derived and/or modified sequence
ccgcaggcgtcacctcctcctgtcgcctggccctcgccatgcagaccccgcgagcgtcccctccccgcccggccctgctgcttctgctgctgctactggggggcgcccacggcctctttcctgaggagccgccgccgcttagcgtggcccccagggactacctgaaccactatcccgtgtttgtgggcagcgggcccggacgcctgacccccgcagaaggtgctgacgacctcaacatccagcgagtcctgcgggtcaacaggacgctgttcattggggacagggacaacctctaccgcgtagagctggagccccccacgtccacggagctgcggtaccagaggaagctgacctggagatctaaccccagcgacataaacgtgtgtcggatgaagggcaaacaggagggcgagtgtcgaaacttcgtaaaggtgctgctccttcgggacgagtccacgctctttgtgtgcggttccaacgccttcaacccggtgtgcgccaactacagcatagacaccctgcagcccgtcggagacaacatcagcggtatggcccgctgcccgtacgaccccaagcacgccaatgttgccctcttctctgacgggatgctcttcacagctactgttaccgacttcctagccattgatgctgtcatctaccgcagcctcggggacaggcccaccctgcgcaccgtgaaacatgactccaagtggttcaaagagccttactttgtccatgcggtggagtggggcagccatgtctacttcttcttccgggagattgcgatggagtttaactacctggagaaggtggtggtgtcccgcgtggcccgagtgtgcaagaacgacgtgggaggctccccccgcgtgctggagaagcagtggacgtccttcctgaaggcgcggctcaactgctctgtacccggagactcccatttctacttcaacgtgctgcaggctgtcacgggcgtggtcagcctcgggggccggcccgtggtcctggccgttttttccacgcccagcaacagcatccctggctcggctgtctgcgcctttgacctgacacaggtggcagctgtgtttgaaggccgcttccgagagcagaagtcccccgagtccatctggacgccggtgccggaggatcaggtgcctcgaccccggcccgggtgctgcgcagcccccgggatgcagtacaatgcctccagcgccttgccggatgacatcctcaactttgtcaagacccaccctctgatggacgaggcggtgccctcgctgggccatgcgccctggatcctgcggaccctgatgaggcaccagctgactcgagtggctgtggacgtgggagccggcccctggggcaaccagaccgttgtcttcctgggttctgaggcggggacggtcctcaagttcctcgtccggcccaatgccagcacctcagggacgtctgggctcagtgtcttcctggaggagtttgagacctaccggccggacaggtgtggacggcccggcggtggcgagacagggcagcggctgctgagcttggagctggacgcagcttcggggggcctgctggctgccttcccccgctgcgtggtccgagtgcctgtggctcgctgccagcagtactcggggtgtatgaagaactgtatcggcagtcaggacccctactgcgggtgggcccccgacggctcctgcatcttcctcagcccgggcaccagagccgcctttgagcaggacgtgtccggggccagcacctcaggcttaggggactgcacaggactcctgcgggccagcctctccgaggaccgcgcggggctggtgtcggtgaacctgctggtaacgtcgtcggtggcggccttcgtggtgggagccgtggtgtccggcttcagcgtgggctggttcgtgggcctccgtgagcggcgggagctggcccggcgcaaggacaaggaggccatcctggcgcacggggcgggcgaggcggtgctgagcgtcagccgcctgggcgagcgcagggcgcagggtcccgggagccgacgctggggcttccagaaggcccgggggtctccgaggtgccggttaggagtttga

SEQ ID NO: 222885 - DNA, 3718 bp, Artificial Sequence
  derived and/or modified sequence
ccgcaggcgtcacctcctcctgtcgcctggccctcgccatgcagaccccgcgagcgtcccctccccgcccggccctgctgcttctgctgctgctactggggggcgcccacggcctctttcctgaggagccgccgccgcttagcgtggcccccagggactacctgaaccactatcccgtgtttgtgggcagcgggcccggacgcctgacccccgcagaaggtgctgacgacctcaacatccagcgagtcctgcgggtcaacaggacgctgttcattggggacagggacaacctctaccgcgtagagctggagccccccacgtccacggagctgcggtaccagaggaagctgacctggagatctaaccccagcgacataaacgtgtgtcggatgaagggcaaacaggagggcgagtgtcgaaacttcgtaaaggtgctgctccttcgggacgagtccacgctctttgtgtgcggttccaacgccttcaacccggtgtgcgccaactacagcatagacaccctgcagcccgtcggagacaacatcagcggtatggcccgctgcccgtacgaccccaagcacgccaatgttgccctcttctctgacgggatgctcttcacagctactgttaccgacttcctagccattgatgctgtcatctaccgcagcctcggggacaggcccaccctgcgcaccgtgaaacatgactccaagtggttcaaagagccttactttgtccatgcggtggagtggggcagccatgtctacttcttcttccgggagattgcgatggagtttaactacctggagaaggtggtggtgtcccgcgtggcccgagtgtgcaagaacgacgtgggaggctccccccgcgtgctggagaagcagtggacgtccttcctgaaggcgcggctcaactgctctgtacccggagactcccatttctacttcaacgtgctgcaggctgtcacgggcgtggtcagcctcgggggccggcccgtggtcctggccgttttttccacgcccagcaacagcatccctggctcggctgtctgcgcctttgacctgacacaggtggcagctgtgtttgaaggccgcttccgagagcagaagtcccccgagtccatctggacgccggtgccggaggatcaggtgcctcgaccccggcccgggtgctgcgcagcccccgggatgcagtacaatgcctccagcgccttgccggatgacatcctcaactttgtcaagacccaccctctgatggacgaggcggtgccctcgctgggccatgcgccctggatcctgcggaccctgatgaggcaccagctgactcgagtggctgtggacgtgggagccggcccctggggcaaccagaccgttgtcttcctgggttctgaggcggggacggtcctcaagttcctcgtccggcccaatgccagcacctcagggacgtctgggctcagtgtcttcctggaggagtttgagacctaccggccggacaggtgtggacggcccggcggtggcgagacagggcagcggctgctgagcttggagctggacgcagcttcggggggcctgctggctgccttcccccgctgcgtggtccgagtgcctgtggctcgctgccagcagtactcggggtgtatgaagaactgtatcggcagtcaggacccctactgcgggtgggcccccgacggctcctgcatcttcctcagcccgggcaccagagccgcctttgagcaggacgtgtccggggccagcacctcaggcttaggggactgcacaggactcctgcgggccagcctctccgaggaccgcgcggggctggtgtcggtgaacctgctggtaacgtcgtcggtggcggccttcgtggtgggagccgtggtgtccggcttcagcgtgggctggttcgtgggcctccgtgagcggcgggagctggcccggcgcaaggacaaggaggccatcctggcgcacggggcgggcgaggcggtgctgagcgtcagccgcctgggcgagcgcagggcgcagggtcccgggggccggggcggaggcggtggcggtggcgccggggttcccccggaggccctgctggcgcccctgatgcagaacggctgggccaaggccacgctgctgcagggcgggccccacgacctggactcggggctgctgcccacgcccgagcagacgccgctgccgcagaagcgcctgcccactccgcacccgcacccccacgccctgggcccccgcgcctgggaccacggccaccccctgctcccggcctccgcttcatcctccctcctgctgctggcgcccgcccgggcccccgagcagccccccgcgcctggggagccgacccccgacggccgcctctatgctgcccggcccggccgcgcctcccacggcgacttcccgctcaccccccacgccagcccggaccgccggcgggtggtgtccgcgcccacgggccccttggacccagcctcagccgccgatggcctcccgcggccctggagcccgcccccgacgggcagcctgaggaggccactgggcccccacgcccctccggccgccaccctgcgccgcacccacacgttcaacagcggcgaggcccggcctggggaccgccaccgcggctgccacgcccggccgggcacagacttggcccacctcctcccctatgggggggcggacaggactgcgccccccgtgccctaggccgggggccccccgatgccttggcagtgccagccacgggaaccaggagcgagagacggtgccagaacgccggggcccggggcaactccgagtgggtgctcaagtcccccccgcgacccacccgcggagtggggggccccctccgccacaaggaagcacaaccagctcgccctccccctacccggggccgcaggacgctgagacggtttgggggtgggtgggcgggaggactttgctatggatttgaggttgaccttatgcgcgtaggttttggttttttttgcagttttggtttcttttgcggttttctaaccaattgcacaactccgttctcggggtggcggcaggcaggggaggcttggacgccggtggggaatggggggccacagctgcagacctaagccctcccccacccctggaaaggtccctccccaacccaggcccctggcgtgtgtgggtgtgcgtgcgtgtgcgtgccgtgttcgtgtgcaaggggccggggaggtgggcgtgtgtgtgcgtgccagcgaaggctgctgtgggcgtgtgtgtcaagtgggccacgcgtgcagggtgtgtgtccacgagcgacgatcgtggtggccccagcggcctgggcgttggctgagccgacgctggggcttccagaaggcccgggggtctccgaggtgccggttaggagtttgaaccccccccactctgcagagggaagcggggacaatgccggggtttcaggcaggagacacgaggagggcctgcccggaagtcacatcggcagcagctgtctaaagggcttgggggcctggggggcggcgaaggtgggtggggcccctctgtaaatacggccccagggtggtgagagagtcccatgccacccgtccccttgtgacctcccccctctgacctccagctgaccatgcatgccacgtggctggctgggtcctctgccctctctggagtttgcctcccccagccccctccccatcaataaaactctgtttacaaccaccggc

SEQ ID NO: 222886 - protein, 325 aa, Artificial Sequence
  derived and/or modified sequence
MLSHADLLDARLGMKDAAELLGHREAVKCRLGVGGSDPGGHPGDLAPNSDPVEGATLLPGEDITTVGSTPASLAVSAKDPDKQPGPQGGPNPSQAGQQQGQQKQKRHRTRFTPAQLNELERSFAKTHYPDIFMREELALRIGLTESRVQVWFQNRRAKWKKRKKTTNVFRAPGTLLPTPGLPQFPSAAAAAAAAMGDSLCSFHANDTRWAAAAMPGVSQLPLPPALGRQQAMAQSLSQCSLAAGPPPNSMGLSNSLAGSNGAGLQSHLYQPAFPGMVPASLPGPSNVSGSPQLCSSPDSSDVWRGTSIASLRRKALEHTVSMSFT

SEQ ID NO: 222887 - DNA, 2702 bp, Artificial Sequence
  derived and/or modified sequence
ccccctttttaaccacaaaccgaattttctttcatttaggtgatctatatatatctatatcgtatagcttatagcttatatctattttaaataacttaaagccgctaaaatttgggggggaacagctttcgccctggagcggtgcgcgatgctgtctcatgccgacctcctggacgccaggctaggtatgaaagatgccgccgagcttctgggccaccgggaggcggtgaagtgtaggctgggcgtggggggctccgaccccgggggccatccgggggacctggcgcccaactctgacccagtggagggagccactctgctgcccggggaggacatcaccacagtgggctctactccggcctcgctggcggtgagcgccaaagacccggacaagcagcccgggccccagggcggcccgaaccccagccaagccggccagcagcagggccaacagaagcagaagcgccaccggacgcgcttcacccccgcacagctcaacgagttggagaggagcttcgccaagactcactaccccgacatctttatgcgtgaggagctggcactgcgtatcgggctgaccgagtcccgagtgcaggtctggttccagaaccgacgcgccaagtggaagaagcgcaaaaagacgaccaacgtgttccgtgcgcccggcacactgctgcccacgccaggcctgcctcagttcccgtcggctgccgccgccgctgccgccgccatgggcgacagcctgtgctctttccacgccaacgacacccgctgggcggcggccgccatgcctggcgtgtcacagctgcctctgccgccggcgctgggcaggcagcaggccatggcgcagtcgctgtcccagtgcagcctggcggccggtccgccgcccaactccatgggcctgtccaacagcctggcgggttccaacggcgcggggctgcagtcgcacctctaccagcccgccttccccggcatggtgcccgcctccctccccggccccagcaacgtctccggttcgccccagctctgcagctccccggacagcagcgacgtgtggcggggcaccagcatcgcctccctccgccgcaaggcgctagagcacacagtctctatgagcttcacttaatgcagccgcgccccggcccgctccgcccccagcaccgccccgggggccgccccgaggcccttccggcgcgcacccggaccccggcgccctgccccgtcccgccccggccttcgccccgtctcgtttcgtcctcgcctctctcctccactcgctcgggctcaccccaagccccagcccgcgaggcctcccctccgcctgatttcgatcgcccgcggtcccccgtctcccggccgcccctcttcccttcccacccagctgcgccctcggctcggtctccagcgcctcagcccacccttcccgccaccctggcctccctgcttgcgctggccgtgctcgcgccctcctcctggccttctgacgggcggcgttcccacccacaccttcgacgcgacgcctacgacccccctcgcccgccgcctcccctccggtcccctctttccccacacttcgcgaccctcctcccgcgcccggcaaaaagtatccttcccgccattttacgtaccagggagtcgactcaggatctgaaatcagacaccaatggactggtttgtgggcagaaacacacacactcgcactctcgctcacgctcagacgctacacacgcgcgcgcacagacacggtgcacctaggtcacacacggacgtgttcaagggacagcacaatgttagggatttttgtcttaaaggaggacaagcattgctaccaaccgcctcatctgagggcccaactgatatgatttgatttatccttgtactctccaagctcctgtctttctttcctctcccaccacgctacccttgcccagtccacccagtcacatccgtgcagccctctcttggcttgcaagataacgcttttatttttattttatcttattttcattttcttaagcacaactgtgtgagagtgtagaagggaaggcttctcaggaggaacgtgacagtggattgggtggctggagtagactaaagcagtcatgtgacgaggaagaggtgatctgacccattttgataagtctttataaggaagaataaaataaacgtgtaagcaaaattttcttttgtaaaagcaaaagccacatctcttttctggatccttcaggactggggtttgtttgcttccttttctgtttctgtcttctcgctgctctgtgcccttggttgttttgtggtggtcctgtcgtccctcgtgcccctcggccacctgctggcagccgatgggggcactcggacatctacaaccctgcaactttgtacagagaaacacaatcagctctttctgcatgtgctggtcaaatccaaacccagagaacagaagcgctttctaagaatgaacaaatatgtgaaataggatgttttgtgtagataaagcattcttgttacatactggtcaatttgtgatatgttttaacttaatgtctgtgtttatttatggaattcggttttcttaataaatgtttgagctaatataaagcatattatttgacttttccggacaagtttatatcaagttaaatgtaaatggataaaataaaatcattttcagtatgtgaaaaaaaaaaaaaaaaaaaaaaaaa

SEQ ID NO: 222888 - DNA, 978 bp, Artificial Sequence
  derived and/or modified sequence
atgctatcccacgctgatctcctggacgccagacttggaatgaaggacgctgccgagttactcggacatagagaggccgttaaatgcagactcggcgtaggcggctcagatccaggagggcaccccggggatctcgcccccaactctgacccagtggaaggtgcgacactcttgcctggggaggacattactacggtgggctccacacctgcttctctggcagtgtccgctaaggaccctgacaaacagccagggccacagggtggtcccaacccttcccaggctggacagcagcaagggcagcaaaagcaaaagagacaccgtacgcggtttacaccagctcaactcaatgagctcgaaagatcctttgccaagacacactaccctgacattttcatgagagaagagctcgcactccggatcggcctcactgagagtcgagtgcaggtctggttccaaaatcgtagagcaaagtggaagaaaaggaagaaaaccaccaacgtttttcgcgctcccgggacccttctgcctaccccaggtctgcctcaattcccatccgccgcagctgctgctgccgctgctatgggcgattccctatgttcttttcatgctaacgatactcgctgggctgctgcagcaatgcctggggtttcgcagttgcccctcccaccggccctcggtagacagcaagccatggctcagagcctctctcagtgttccctggctgccgggccacccccgaactctatggggctgtccaacagtctggcggggtccaacggggccggcttgcagagccacctttatcagcccgcttttccaggcatggttccagcgagcctgccaggtccttccaatgtgtccgggagcccacaactgtgcagcagccccgactcttccgacgtgtggaggggaactagtattgcctcgctgcgaagaaaggcgctggaacatactgtctctatgtcttttacttag

SEQ ID NO: 222889 - DNA, 978 bp, Artificial Sequence
  derived and/or modified sequence
atgctgagccatgctgacctgctggatgcccggctgggcatgaaggatgctgctgagctgctgggccaccgggaggccgtgaagtgccgcctgggcgtgggcggcagtgaccccggcggccaccctggggacctggcccccaacagcgaccctgtggagggcgccaccctgctgcctggagaggacatcaccaccgtgggcagcaccccagccagcctggccgtgtctgccaaggaccctgacaagcagcccggcccccagggcggccccaaccccagccaggccggccagcagcagggccagcagaagcagaagaggcacaggacccgcttcaccccagcccagctgaatgagctggagaggagctttgccaagacccactacccagacatcttcatgagggaggagctggccctgagaattggcctgacagagagccgggtgcaggtgtggttccagaacagaagagccaagtggaagaagaggaagaagaccaccaacgtgttccgggcccctggcaccctgctgcccaccccaggcctgccccagttccccagcgctgctgctgctgctgctgctgccatgggagacagcctgtgcagcttccacgccaatgacacccgctgggccgccgccgccatgcctggggtgtcccagctgcccctgcccccagccctgggccggcagcaggccatggcccagagcctgagccagtgcagcctggccgccggccccccacccaacagcatgggcctgagcaacagcctggccggcagcaatggagctggcctgcagagccacctgtaccagcctgccttccctggcatggtgcctgccagcctgcccggccccagcaatgtgtctggcagcccccagctgtgcagcagcccagacagcagtgatgtgtggaggggcaccagcatcgccagcctgcggaggaaggccctggagcacacagtgtccatgtccttcacctag

SEQ ID NO: 222890 - DNA, 978 bp, Artificial Sequence
  derived and/or modified sequence
atgctgagccacgccgacctgctggacgcccggctgggcatgaaggacgcggctgagctcctgggtcatagggaggctgtcaaatgtcgcctgggagtgggaggttctgacccgggcggacaccctggcgatttggcacctaacagcgaccccgtggaaggggctacgctgttaccgggcgaggatataaccactgtggggtccaccccagcatcactagccgtgagtgcaaaagaccccgacaagcagccaggccctcaaggtggaccaaacccctcgcaggctggtcaacagcagggccagcaaaaacagaaaagacaccgaacacgctttactcccgcccagctcaatgagctagagagatcattcgctaagacccactatcctgatattttcatgcgagaggagttggccctccgtatcggtctgacggagagccgcgtgcaggtgtggttccagaataggagggctaagtggaaaaagaggaaaaagaccactaacgtgttccgggcaccaggcacactgctgcctaccccaggactcccccaatttccaagtgccgctgcagcagcagcggccgcgatgggtgatagtctgtgctctttccacgcgaacgacaccaggtgggctgctgccgccatgccaggggtaagtcagctccctttgcctccagcgctggggagacaacaggcgatggcacagtcccttagccagtgttcactggctgccggaccaccacctaacagcatgggtctgtcaaattccctggctggaagtaatggggcaggactccagtcacacctctatcaacccgcattcccaggtatggttccagcctccctcccaggtcctagcaacgtaagcggaagtccacaactctgcagttctccagattcgtccgatgtttggcggggaacatcaatcgcctccctccgaaggaaagccctggagcacactgtcagtatgagtttcacttag

SEQ ID NO: 222891 - DNA, 3668 bp, Artificial Sequence
  derived and/or modified sequence
tactctggttagaaatatattactaatctaaactttgttgttggctggctctgaaaaatcagaacattagaaatggttcgcttcacttgtgcaaagcactttaaattgttcaagtagtttaacatattcaagaggaaaataaagagcatttaactttatttacagccttaagtggagttgggagccgagctgaacttagaaactttgaccaaaagagcgagttaggggcgaggatgcgggcgtgggccaagcggaagagcaggagccgggaagaagcccggtgagaagagtgcagagcgctcgaacccacactccgcgagggtccccaaagcagacagcgggcgctggcggtgccagggaagccgactcctctttgcgctctaggcccactgtggggttggggctcgtatagaccccagggcacagccagggcgcctggaccctaggcgcaggcctactgagccgcggcgaagtccaggcgttgtctgaaggccgcggtgtgccctcgtcgcgccctgggctggcgggccaatatgagcggcaggcccagagagcgcaggtgggggcgaccctcaggtcacgccagggtcatggcccgctctgacccctgctctgcccctgccctaggaagatgttagctcagaggcacagagctacgccttcgaagcgcgcagcgccggccaaggggaaggaaaggggagcctggagaaaatcgcagggaagaactagagggagccgggcccagaagctcagggcgaggccgaggcggctgaggctgctttagctcctgctccgggctggagctgccagggctgccgccgccgcctccttcaggcgggcgcaggcgagcgggcgggcggagtgggggactctccgggcgctgacatttgcaggctgccctcctgattggtcccctcgccgagctgctcacgggttcattcaactgttaagcacctccccgtctctctaaaggacattataatgcaagaagccccctttttaaccacaaaccgaattttctttcatttaggtgatctatatatatctatatcgtatagcttatagcttatatctattttaaataacttaaagccgctaaaatttgggggggaacagctttcgccctggagcggtgcgcgatgctgtctcatgccgacctcctggacgccaggctaggtatgaaagatgccgccgagcttctgggccaccgggaggcggtgaagtgtaggctgggcgtggggggctccgaccccgggggccatccgggggacctggcgcccaactctgacccagtggagggagccactctgctgcccggggaggacatcaccacagtgggctctactccggcctcgctggcggtgagcgccaaagacccggacaagcagcccgggccccagggcggcccgaaccccagccaagccggccagcagcagggccaacagaagcagaagcgccaccggacgcgcttcacccccgcacagctcaacgagttggagaggagcttcgccaagactcactaccccgacatctttatgcgtgaggagctggcactgcgtatcgggctgaccgagtcccgagtgcaggtctggttccagaaccgacgcgccaagtggaagaagcgcaaaaagacgaccaacgtgttccgtgcgcccggcacactgctgcccacgccaggcctgcctcagttcccgtcggctgccgccgccgctgccgccgccatgggcgacagcctgtgctctttccacgccaacgacacccgctgggcggcggccgccatgcctggcgtgtcacagctgcctctgccgccggcgctgggcaggcagcaggccatggcgcagtcgctgtcccagtgcagcctggcggccggtccgccgcccaactccatgggcctgtccaacagcctggcgggttccaacggcgcggggctgcagtcgcacctctaccagcccgccttccccggcatggtgcccgcctccctccccggccccagcaacgtctccggttcgccccagctctgcagctccccggacagcagcgacgtgtggcggggcaccagcatcgcctccctccgccgcaaggcgctagagcacacagtctctatgagcttcacttaatgcagccgcgccccggcccgctccgcccccagcaccgccccgggggccgccccgaggcccttccggcgcgcacccggaccccggcgccctgccccgtcccgccccggccttcgccccgtctcgtttcgtcctcgcctctctcctccactcgctcgggctcaccccaagccccagcccgcgaggcctcccctccgcctgatttcgatcgcccgcggtcccccgtctcccggccgcccctcttcccttcccacccagctgcgccctcggctcggtctccagcgcctcagcccacccttcccgccaccctggcctccctgcttgcgctggccgtgctcgcgccctcctcctggccttctgacgggcggcgttcccacccacaccttcgacgcgacgcctacgacccccctcgcccgccgcctcccctccggtcccctctttccccacacttcgcgaccctcctcccgcgcccggcaaaaagtatccttcccgccattttacgtaccagggagtcgactcaggatctgaaatcagacaccaatggactggtttgtgggcagaaacacacacactcgcactctcgctcacgctcagacgctacacacgcgcgcgcacagacacggtgcacctaggtcacacacggacgtgttcaagggacagcacaatgttagggatttttgtcttaaaggaggacaagcattgctaccaaccgcctcatctgagggcccaactgatatgatttgatttatccttgtactctccaagctcctgtctttctttcctctcccaccacgctacccttgcccagtccacccagtcacatccgtgcagccctctcttggcttgcaagataacgcttttatttttattttatcttattttcattttcttaagcacaactgtgtgagagtgtagaagggaaggcttctcaggaggaacgtgacagtggattgggtggctggagtagactaaagcagtcatgtgacgaggaagaggtgatctgacccattttgataagtctttataaggaagaataaaataaacgtgtaagcaaaattttcttttgtaaaagcaaaagccacatctcttttctggatccttcaggactggggtttgtttgcttccttttctgtttctgtcttctcgctgctctgtgcccttggttgttttgtggtggtcctgtcgtccctcgtgcccctcggccacctgctggcagccgatgggggcactcggacatctacaaccctgcaactttgtacagagaaacacaatcagctctttctgcatgtgctggtcaaatccaaacccagagaacagaagcgctttctaagaatgaacaaatatgtgaaataggatgttttgtgtagataaagcattcttgttacatactggtcaatttgtgatatgttttaacttaatgtctgtgtttatttatggaattcggttttcttaataaatgtttgagctaatataaagcatattatttgacttttccggacaagtttatatcaagttaaatgtaaatggataaaataaaatcattttcagtatgtg

SEQ ID NO: 222892 - DNA, 978 bp, Artificial Sequence
  derived and/or modified sequence
atgctgtctcacgcagatttactcgatgcccgtttaggcatgaaggacgccgctgagctgttaggccatcgggaagcggttaaatgccggctcggcgttggcggatctgatcctgggggacatccgggagatctggcacctaacagcgaccctgtggaaggggctacattgctgccgggagaagacattactaccgtgggatcaacacctgcctctcttgcggtttctgccaaagatccagacaaacagcctggccctcaagggggacctaacccttctcaggcaggccagcagcaggggcagcagaaacagaaaagacatcgcactcgatttacgcccgctcagcttaacgagctcgagaggagctttgcgaagacccattaccccgacatctttatgcgcgaggaactcgccctgcgtatcgggttgacagaaagtagagttcaggtttggtttcaaaatcggagggctaagtggaaaaagcggaaaaaaaccacgaacgtgtttcgcgctcctggcactctgctgcccacacctggactcccccagtttccaagcgcagcggctgcagccgcagccgcaatgggcgactccctctgcagcttccacgccaatgacactcgctgggccgcagcggcaatgcctggtgtgtctcagctcccgttgccgcctgcgctaggacgtcagcaggctatggctcagagcctgtcccaatgttcccttgccgcaggaccccctcccaactccatggggctctctaacagtctggccggtagtaatggtgccggactgcagagccacctgtatcaaccagccttccctggaatggtgccagccagccttcccggaccttccaatgtctctgggtccccccagctgtgcagctcacctgattccagcgacgtctggcggggaacctcaatcgcttctcttagaagaaaggcgctggaacacactgtctccatgagcttcacgtag

SEQ ID NO: 222893 - DNA, 978 bp, Artificial Sequence
  derived and/or modified sequence
atgctgagccacgccgacctgctggacgccagactgggcatgaaggacgccgccgagctgctgggccacagagaggccgtgaagtgcagactgggcgtgggcggcagcgaccccggcggccaccccggcgacctggcccccaacagcgaccccgtggagggcgccaccctgctgcccggcgaggacatcaccaccgtgggcagcacccccgccagcctggccgtgagcgccaaggaccccgacaagcagcccggcccccagggcggccccaaccccagccaggccggccagcagcagggccagcagaagcagaagagacacagaaccagattcacccccgcccagctgaacgagctggagagaagcttcgccaagacccactaccccgacatcttcatgagagaggagctggccctgagaatcggcctgaccgagagcagagtgcaggtgtggttccagaacagaagagccaagtggaagaagagaaagaagaccaccaacgtgttcagagcccccggcaccctgctgcccacccccggcctgccccagttccccagcgccgccgccgccgccgccgccgccatgggcgacagcctgtgcagcttccacgccaacgacaccagatgggccgccgccgccatgcccggcgtgagccagctgcccctgccccccgccctgggcagacagcaggccatggcccagagcctgagccagtgcagcctggccgccggccccccccccaacagcatgggcctgagcaacagcctggccggcagcaacggcgccggcctgcagagccacctgtaccagcccgccttccccggcatggtgcccgccagcctgcccggccccagcaacgtgagcggcagcccccagctgtgcagcagccccgacagcagcgacgtgtggagaggcaccagcatcgccagcctgagaagaaaggccctggagcacaccgtgagcatgagcttcacctag

SEQ ID NO: 222894 - protein, 309 aa, Artificial Sequence
  derived and/or modified sequence
MPSAGLCSCWGGRVLPLLLAYVCYLLLGATIFQLLERQAEAQSRDQFQLEKLRFLENYTCLDQWAMEQFVQVIMEAWVKGVNPKGNSTNPSNWDFGSSFFFAGTVVTTIGYGNLAPSTEAGQVFCVFYALLGIPLNVIFLNHLGTGLRAHLAAIERWEDRPRRSQVLQVLGLALFLTLGTLVILIFPPMVFSHVEGWSFSEGFYFAFITLSTIGFGDYVVGTDPSKHYISVYRSLAAIWILLGLAWLALILPLGPLLLHRCCQLWLLSLRQGCGAKAAPGRRPRRGSTAARGVQVTPQDFPISKKGLGS

SEQ ID NO: 222895 - DNA, 930 bp, Artificial Sequence
  derived and/or modified sequence
atgcctagcgccggattatgtagctgttggggcggcagggtacttcccctgctccttgcttacgtatgttacctgctgttgggcgccaccatctttcagctgctcgaacgccaggccgaggcccagtctcgagatcagtttcagctagagaaactgaggttcctggagaattacacatgcctggaccagtgggctatggagcagttcgtacaagttatcatggaagcttgggtaaaaggggttaatccaaaaggcaacagtaccaacccatctaattgggatttcggatccagtttcttcttcgccggaacagtggtcactactattggttacggaaacttagcacccagcaccgaggcaggacaggtgttttgcgtgttctatgccctactagggatacccctgaacgtcatttttctgaatcatttgggtacaggtcttcgggcacatctggccgcaatcgagagatgggaagatagaccccgtcggtctcaggtcctccaagtgctgggactggctctttttcttacactcggcacgttagtgatcctgatttttccaccaatggtattctcccatgtggaggggtggtcttttagcgagggcttttacttcgctttcattacgctgtccactattggcttcggtgactacgtggttgggacggatccgtccaagcactacatcagcgtgtaccgttcactcgccgccatatggattctgttgggcctggcatggctggctttgatcttgccactcggccctctgctccttcatcggtgctgtcagctttggctgctttctctgaggcagggatgtggggctaaggcagcacctggacggaggccacgaagggggagtacagccgccaggggggtgcaggtgacaccacaagactttccaatctcgaaaaagggtctggggagctag

SEQ ID NO: 222896 - DNA, 930 bp, Artificial Sequence
  derived and/or modified sequence
atgcccagcgctggcctgtgcagctgctggggcggccgggtgctgcccctgctgctggcctacgtgtgctacctgctgctgggcgccaccatcttccagctgctggagcggcaggccgaggcccagagccgggaccagttccagctggagaagctgcgcttcctggagaactacacctgcctggaccagtgggccatggagcagtttgtgcaggtgatcatggaggcctgggtgaagggcgtgaaccccaagggcaacagcaccaaccccagcaactgggactttggcagcagcttcttctttgctggcaccgtggtgaccaccatcggctacggcaacctggcccccagcacagaggccggccaggtgttctgtgtgttctacgccctgctgggcatccccctgaatgtcatcttcctgaaccacctgggcaccggcctgcgggcccacctggccgccatcgagcgctgggaggaccggccccggcgcagccaggtgctgcaggtgctgggcctggccctcttcctgaccctgggcaccctggtgatcctgatcttcccccccatggtgttcagccacgtggagggctggagcttcagcgagggcttctactttgccttcatcaccctgagcaccatcggctttggagactatgtggtgggcacagaccccagcaagcactacatctctgtgtaccgcagcctggccgccatctggatcctgctgggcctggcctggctggccctgatcctgcccctgggccccctgctgctgcaccgctgctgccagctgtggctgctgagcctgcggcagggctgtggggccaaggccgcccctggaagaagaccccggcggggcagcacagctgcccggggcgtgcaggtgaccccccaggacttccccatcagcaagaagggcctgggcagctag

SEQ ID NO: 222897 - DNA, 930 bp, Artificial Sequence
  derived and/or modified sequence
atgcccagcgccggcctgtgcagctgctggggcggccgggtgctgccactacttcttgcctacgtatgttatctgctgctcggggctactatattccaattgctagagcggcaggccgaggcacagtcgcgggaccagtttcagttagagaagctgcggtttctggaaaactacacttgcctggaccagtgggccatggaacaattcgttcaggtaatcatggaggcctgggtgaagggcgtgaatccaaaaggtaacagcacaaatccaagcaactgggatttcgggtccagcttcttttttgctgggacagtcgtgacgaccattggttacggtaacctggcgccatccacagaagctgggcaggtcttctgtgtgttctatgcgctgttaggtatacccctcaatgtcatctttttgaatcatctcggtacaggccttcgagctcatctcgccgcaattgagaggtgggaggaccgccccagacgaagtcaggtactacaagttctcggtctggcattattcctcacgcttggaactttagtcatactgatctttcctcccatggtcttttcccatgtggaggggtggtcgttctccgaaggcttctacttcgccttcatcacgttatccactattggtttcggggactacgtcgtgggcaccgatccaagcaagcactatatttctgtataccgctccctcgctgcaatctggattctgctgggtctcgcttggctggcactgatccttcctctgggtccactcttattgcatcggtgctgccagttgtggctgctgtccctgcgccaaggctgtggcgctaaagccgcgccaggaagacggcctcgtcggggcagcacagctgctaggggagtgcaggtaacacctcaggactttcccatttcaaaaaagggcctaggctcctag

SEQ ID NO: 222898 - DNA, 1248 bp, Artificial Sequence
  derived and/or modified sequence
gtcctggccacagcatgcccagtgctgggctctgcagctgctggggtggccgggtgctgcccctgctgctggcctatgtctgctacctgctgctcggtgccactatcttccagctgctagagaggcaggcggaggctcagtccagggaccagtttcagttggagaagctgcgcttcctggagaactacacctgcctggaccagtgggccatggagcagtttgtgcaggtcatcatggaagcctgggtgaaaggtgtgaaccccaaaggcaactctaccaaccccagcaactgggactttggcagcagtttcttctttgcaggcacagtcgtcactaccataggatatgggaacctggcacccagcacagaggcaggtcaggtcttctgtgtcttctatgccctgttgggcatcccgcttaacgtgatcttcctcaaccacctgggcacagggctgcgtgcccatctggccgccattgaaagatgggaggaccgtcccaggcgctcccaggtactgcaagtcctgggcctggctctgttcctgaccctggggacgctggtcattctcatcttcccacccatggtcttcagccatgtggagggctggagcttcagcgagggcttctactttgctttcatcactctcagcaccattggctttggggactatgttgttggcacagaccccagcaagcattatatctcagtgtatcggagcctggcagccatctggatcctcctgggcctggcgtggctggcgctgatcctcccactgggccccctgcttctgcacagatgctgccagctctggctgctcagtctgaggcaaggctgtggagccaaggcggctccaggcaggagacccaggagaggctctacagcagcaagaggagtccaagtcacaccccaggacttccccatatccaagaaaggactgggaagctgaggacccacggactcttcacacagcctagacgcttcctccactccaggtagagggatttcgggggccttctcagaagcaaggagtggacaagcctcttggttaaggctcctcttacctcccaagctcatggacaagtggcaatcagctggggtccctcttttggggtacaaaggaaaggacagaggtgtgggagacccaaggtggtcttgagattgacagacagcaagtccttggagatagcccccgagtccaagaacttaggcaggggccccaagacaataaagttggtctctactatctccta

SEQ ID NO: 222899 - DNA, 930 bp, Artificial Sequence
  derived and/or modified sequence
atgccaagtgctggactgtgcagctgctggggcggacgcgtgctgcccctcctcctcgcatatgtgtgttacctgctgctcggtgccactattttccaactgctggaacgtcaggccgaagcccagagtagggatcagttccagctggagaaactgcgctttctggagaactatacctgtctagatcaatgggctatggaacaatttgttcaagtcatcatggaagcatgggtaaagggtgtgaaccccaaggggaacagtacgaatccctccaattgggactttggttcctcattcttttttgctggaaccgtggtgactactatcgggtatggaaacctggccccaagtaccgaggctggccaggttttttgtgtgttctacgctctcctgggaattccgctcaacgtcattttcctgaatcaccttggtactgggttgagagctcatctggcagcaattgaaagatgggaagataggccgaggagatcccaggtccttcaggtgctcgggctggccctgtttcttaccctgggaacacttgtcatactgatcttcccgccaatggtgttcagtcatgtagaggggtggtccttcagcgagggtttttacttcgcttttatcactctctcaaccattggttttggtgattacgtggtcggtacagaccccagcaagcactatatttccgtgtaccggtcgttagctgctatatggatcttgttgggcctggcctggctggccctgatcctgcccctaggccctcttttactccaccgatgctgtcaactctggttgctctccttgaggcaaggctgcggggcaaaggccgctccaggaaggagacccagacgcggttcaacagctgcacgcggagttcaagtcactccacaggattttcctatttcaaagaaagggctggggagctag

SEQ ID NO: 222900 - DNA, 930 bp, Artificial Sequence
  derived and/or modified sequence
atgcccagcgccggcctgtgcagctgctggggcggcagagtgctgcccctgctgctggcctacgtgtgctacctgctgctgggcgccaccatcttccagctgctggagagacaggccgaggcccagagcagagaccagttccagctggagaagctgagattcctggagaactacacctgcctggaccagtgggccatggagcagttcgtgcaggtgatcatggaggcctgggtgaagggcgtgaaccccaagggcaacagcaccaaccccagcaactgggacttcggcagcagcttcttcttcgccggcaccgtggtgaccaccatcggctacggcaacctggcccccagcaccgaggccggccaggtgttctgcgtgttctacgccctgctgggcatccccctgaacgtgatcttcctgaaccacctgggcaccggcctgagagcccacctggccgccatcgagagatgggaggacagacccagaagaagccaggtgctgcaggtgctgggcctggccctgttcctgaccctgggcaccctggtgatcctgatcttcccccccatggtgttcagccacgtggagggctggagcttcagcgagggcttctacttcgccttcatcaccctgagcaccatcggcttcggcgactacgtggtgggcaccgaccccagcaagcactacatcagcgtgtacagaagcctggccgccatctggatcctgctgggcctggcctggctggccctgatcctgcccctgggccccctgctgctgcacagatgctgccagctgtggctgctgagcctgagacagggctgcggcgccaaggccgcccccggcagaagacccagaagaggcagcaccgccgccagaggcgtgcaggtgaccccccaggacttccccatcagcaagaagggcctgggcagctag

SEQ ID NO: 222901 - protein, 6306 aa, Artificial Sequence
  derived and/or modified sequence
MDIFLVLGMPSASLLVNLLSALLILFVFGETEIRFTGQTEFVVNETSTTVIRLIIERIGEPANVTAIVSLYGEDAGDFFDTYAAAFIPAGETNRTVYIAVCDDDLPEPDETFIFHLTLQKPSANVKLGWPRTVTVTILSNDNAFGIISFNMLPSIAVSEPKGRNESMPLTLIREKGTYGMVMVTFEVEGGPNPPDEDLSPVKGNITFPPGRATVIYNLTVLDDEVPENDEIFLIQLKSVEGGAEINTSRNSIEIIIKKNDSPVRFLQSIYLVPEEDHILIIPVVRGKDNNGNLIGSDEYEVSISYAVTTGNSTAHAQQNLDFIDLQPNTTVVFPPFIHESHLKFQIVDDTIPEIAESFHIMLLKDTLQGDAVLISPSVVQVTIKPNDKPYGVLSFNSVLFERTVIIDEDRISRYEEITVVRNGGTHGNVSANWVLTRNSTDPSPVTADIRPSSGVLHFAQGQMLATIPLTVVDDDLPEEAEAYLLQILPHTIRGGAEVSEPAELLFYIQDSDDVYGLITFFPMENQKIESSPGERYLSLSFTRLGGTKGDVRLLYSVLYIPAGAVDPLQAKEGILNISRRNDLIFPEQKTQVTTKLPIRNDAFLQNGAHFLVQLETVELLNIIPLIPPISPRFGEICNISLLVTPAIANGEIGFLSNLPIILHEPEDFAAEVVYIPLHRDGTDGQATVYWSLKPSGFNSKAVTPDDIGPFNGSVLFLSGQSDTTINITIKGDDIPEMNETVTLSLDRVNVENQVLKSGYTSRDLIILENDDPGGVFEFSPASRGPYVIKEGESVELHIIRSRGSLVKQFLHYRVEPRDSNEFYGNTGVLEFKPGEREIVITLLARLDGIPELDEHYWVVLSSHGERESKLGSATIVNITILKNDDPHGIIEFVSDGLIVMINESKGDAIYSAVYDVVRNRGNFGDVSVSWVVSPDFTQDVFPVQGTVVFGDQEFSKNITIYSLPDEIPEEMEEFTVILLNGTGGAKVGNRTTATLRIRRNDDPIYFAEPRVVRVQEGETANFTVLRNGSVDVTCMVQYATKDGKATARERDFIPVEKGETLIFEVGSRQQSISIFVNEDGIPETDEPFYIILLNSTGDTVVYQYGVATVIIEANDDPNGIFSLEPIDKAVEEGKTNAFWILRHRGYFGSVSVSWQLFQNDSALQPGQEFYETSGTVNFMDGEEAKPIILHAFPDKIPEFNEFYFLKLVNISGGSPGPGGQLAETNLQVTVMVPFNDDPFGVFILDPECLEREVAEDVLSEDDMSYITNFTILRQQGVFGDVQLGWEILSSEFPAGLPPMIDFLLVGIFPTTVHLQQHMRRHHSGTDALYFTGLEGAFGTVNPKYHPSRNNTIANFTFSAWVMPNANTNGFIIAKDDGNGSIYYGVKIQTNESHVTLSLHYKTLGSNATYIAKTTVMKYLEESVWLHLLIILEDGIIEFYLDGNAMPRGIKSLKGEAITDGPGILRIGAGINGNDRFTGLMQDVRSYERKLTLEEIYELHAMPAKSDLHPISGYLEFRQGETNKSFIISARDDNDEEGEELFILKLVSVYGGARISEENTTARLTIQKSDNANGLFGFTGACIPEIAEEGSTISCVVERTRGALDYVHVFYTISQIETDGINYLVDDFANASGTITFLPWQRSEVLNIYVLDDDIPELNEYFRVTLVSAIPGDGKLGSTPTSGASIDPEKETTDITIKASDHPYGLLQFSTGLPPQPKDAMTLPASSVPHITVEEEDGEIRLLVIRAQGLLGRVTAEFRTVSLTAFSPEDYQNVAGTLEFQPGERYKYIFINITDNSIPELEKSFKVELLNLEGGVAELFRVDGSGSGDGDMEFFLPTIHKRASLGVASQILVTIAASDHAHGVFEFSPESLFVSGTEPEDGYSTVTLNVIRHHGTLSPVTLHWNIDSDPDGDLAFTSGNITFEIGQTSANITVEILPDEDPELDKAFSVSVLSVSSGSLGAHINATLTVLASDDPYGIFIFSEKNRPVKVEEATQNITLSIIRLKGLMGKVLVSYATLDDMEKPPYFPPNLARATQGRDYIPASGFALFGANQSEATIAISILDDDEPERSESVFIELLNSTLVAKVQSRSIPNSPRLGPKVETIAQLIIIANDDAFGTLQLSAPIVRVAENHVGPIINVTRTGGAFADVSVKFKAVPITAIAGEDYSIASSDVVLLEGETSKAVPIYVINDIYPELEESFLVQLMNETTGGARLGALTEAVIIIEASDDPYGLFGFQITKLIVEEPEFNSVKVNLPIIRNSGTLGNVTVQWVATINGQLATGDLRVVSGNVTFAPGETIQTLLLEVLADDVPEIEEVIQVQLTDASGGGTIGLDRIANIIIPANDDPYGTVAFAQMVYRVQEPLERSSCANITVRRSGGHFGRLLLFYSTSDIDVVALAMEEGQDLLSYYESPIQGVPDPLWRTWMNVSAVGEPLYTCATLCLKEQACSAFSFFSASEGPQCFWMTSWISPAVNNSDFWTYRKNMTRVASLFSGQAVAGSDYEPVTRQWAIMQEGDEFANLTVSILPDDFPEMDESFLISLLEVHLMNISASLKNQPTIGQPNISTVVIALNGDAFGVFVIYNISPNTSEDGLFVEVQEQPQTLVELMIHRTGGSLGQVAVEWRVVGGTATEGLDFIGAGEILTFAEGETKKTVILTILDDSEPEDDESIIVSLVYTEGGSRILPSSDTVRVNILANDNVAGIVSFQTASRSVIGHEGEILQFHVIRTFPGRGNVTVNWKIIGQNLELNFANFSGQLFFPEGSLNTTLFVHLLDDNIPEEKEVYQVILYDVRTQGVPPAGIALLDAQGYAAVLTVEASDEPHGVLNFALSSRFVLLQEANITIQLFINREFGSLGAINVTYTTVPGMLSLKNQTVGNLAEPEVDFVPIIGFLILEEGETAAAINITILEDDVPELEEYFLVNLTYVGLTMAASTSFPPRLDSEGLTAQVIIDANDGARGVIEWQQSRFEVNETHGSLTLVAQRSREPLGHVSLFVYAQNLEAQVGLDYIFTPMILHFADGERYKNVNIMILDDDIPEGDEKFQLILTNPSPGLELGKNTIALIIVLANDDGPGVLSFNNSEHFFLREPTALYVQESVAVLYIVREPAQGLFGTVTVQFIVTEVNSSNESKDLTPSKGYIVLEEGVRFKALQISAILDTEPEMDEYFVCTLFNPTGGARLGVHVQTLITVLQNQAPLGLFSISAVENRATSIDIEEANRTVYLNVSRTNGIDLAVSVQWETVSETAFGMRGMDVVFSVFQSFLDESASGWCFFTLENLIYGIMLRKSSVTVYRWQGIFIPVEDLNIENPKTCEAFNIGFSPYFVITHEERNEEKPSLNSVFTFTSGFKLFLVQTIIILESSQVRYFTSDSQDYLIIASQRDDSELTQVFRWNGGSFVLHQKLPVRGVLTVALFNKGGSVFLAISQANARLNSLLFRWSGSGFINFQEVPVSGTTEVEALSSANDIYLIFAENVFLGDQNSIDIFIWEMGQSSFRYFQSVDFAAVNRIHSFTPASGIAHILLIGQDMSALYCWNSERNQFSFVLEVPSAYDVASVTVKSLNSSKNLIALVGAHSHIYELAYISSHSDFIPSSGELIFEPGEREATIAVNILDDTVPEKEESFKVQLKNPKGGAEIGINDSVTITILSNDDAYGIVAFAQNSLYKQVEEMEQDSLVTLNVERLKGTYGRITIAWEADGSISDIFPTSGVILFTEGQVLSTITLTILADNIPELSEVVIVTLTRITTEGVEDSYKGATIDQDRSKSVITTLPNDSPFGLVGWRAASVFIRVAEPKENTTTLQLQIARDKGLLGDIAIHLRAQPNFLLHVDNQATENEDYVLQETIIIMKENIKEAHAEVSILPDDLPELEEGFIVTITEVNLVNSDFSTGQPSVRRPGMEIAEIMIEENDDPRGIFMFHVTRGAGEVITAYEVPPPLNVLQVPVVRLAGSFGAVNVYWKASPDSAGLEDFKPSHGILEFADKQVTAMIEITIIDDAEFELTETFNISLISVAGGGRLGDDVVVTVVIPQNDSPFGVFGFEEKTVMIDESLSSDDPDSYVTLTVVRSPGGKGTVRLEWTIDEKAKHNLSPLNGTLHFDETESQKTIVLHTLQDTVLEEDRRFTIQLISIDEVEISPVKGSASIIIRGDKRASGEVGIAPSSRHILIGEPSAKYNGTAIISLVRGPGILGEVTVFWRIFPPSVGEFAETSGKLTMRDEQSAVIVVIQALNDDIPEEKSFYEFQLTAVSEGGVLSESSSTANITVVASDSPYGRFAFSHEQLRVSEAQRVNITIIRSSGDFGHVRLWYKTMSGTAEAGLDFVPAAGELLFEAGEMRKSLHVEILDDDYPEGPEEFSLTITKVELQGRGYDFTIQENGLQIDQPPEIGNISIVRIIIMKNDNAEGIIEFDPKYTAFEVEEDVGLIMIPVVRLHGTYGYVTADFISQSSSASPGGVDYILHGSTVTFQHGQNLSFINISIIDDNESEFEEPIEILLTGATGGAVLGRHLVSRIIIAKSDSPFGVIRFLNQSKISIANPNSTMILSLVLERTGGLLGEIQVNWETVGPNSQEALLPQNRDIADPVSGLFYFGEGEGGVRTIILTIYPHEEIEVEETFIIKLHLVKGEAKLDSRAKDVTLTIQEFGDPNGVVQFAPETLSKKTYSEPLALEGPLLITFFVRRVKGTFGEIMVYWELSSEFDITEDFLSTSGFFTIADGESEASFDVHLLPDEVPEIEEDYVIQLVSVEGGAELDLEKSITWFSVYANDDPHGVFALYSDRQSILIGQNLIRSIQINITRLAGTFGDVAVGLRISSDHKEQPIVTENAERQLVVKDGATYKVDVVPIKNQVFLSLGSNFTLQLVTVMLVGGRFYGMPTILQEAKSAVLPVSEKAANSQVGFESTAFQLMNITAGTSHVMISRRGTYGALSVAWTTGYAPGLEIPEFIVVGNMTPTLGSLSFSHGEQRKGVFLWTFPSPGWPEAFVLHLSGVQSSAPGGAQLRSGFIVAEIEPMGVFQFSTSSRNIIVSEDTQMIRLHVQRLFGFHSDLIKVSYQTTAGSAKPLEDFEPVQNGELFFQKFQTEVDFEITIINDQLSEIEEFFYINLTSVEIRGLQKFDVNWSPRLNLDFSVAVITILDNDDLAGMDISFPETTVAVAVDTTLIPVETESTTYLSTSKTTTILQPTNVVAIVTEATGVSAIPEKLVTLHGTPAVSEKPDVATVTANVSIHGTFSLGPSIVYIEEEMKNGTFNTAEVLIRRTGGFTGNVSITVKTFGERCAQMEPNALPFRGIYGISNLTWAVEEEDFEEQTLTLIFLDGERERKVSVQILDDDEPEGQEFFYVFLTNPQGGAQIVEEKDDTGFAAFAMVIITGSDLHNGIIGFSEESQSGLELREGAVMRRLHLIVTRQPNRAFEDVKVFWRVTLNKTVVVLQKDGVNLVEELQSVSGTTTCTMGQTKCFISIELKPEKVPQVEVYFFVELYEATAGAAINNSARFAQIKILESDESQSLVYFSVGSRLAVAHKKATLISLQVARDSGTGLMMSVNFSTQELRSAETIGRTIISPAISGKDFVITEGTLVFEPGQRSTVLDVILTPETGSLNSFPKRFQIVLFDPKGGARIDKVYGTANITLVSDADSQAIWGLADQLHQPVNDDILNRVLHTISMKVATENTDEQLSAMMHLIEKITTEGKIQAFSVASRTLFYEILCSLINPKRKDTRGFSHFAEVTENFAFSLLTNVTCGSPGEKSKTILDSCPYLSILALHWYPQQINGHKFEGKEGDYIRIPERLLDVQDAEIMAGKSTCKLVQFTEYSSQQWFISGNNLPTLKNKVLSLSVKGQSSQLLTNDNEVLYRIYAAEPRIIPQTSLCLLWNQAAASWLSDSQFCKVVEETADYVECACSHMSVYAVYARTDNLSSYNEAFFTSGFICISGLCLAVLSHIFCARYSMFAAKLLTHMMAASLGTQILFLASAYASPQLAEESCSAMAAVTHYLYLCQFSWMLIQSVNFWYVLVMNDEHTERRYLLFFLLSWGLPAFVVILLIVILKGIYHQSMSQIYGLIHGDLCFIPNVYAALFTAALVPLTCLVVVFVVFIHAYQVKPQWKAYDDVFRGRTNAAEIPLILYLFALISVTWLWGGLHMAYRHFWMLVLFVIFNSLQGLYVFMVYFILHNQMCCPMKASYTVEMNGHPGPSTAFFTPGSGMPPAGGEISKSTQNLIGAMEEVPPDWERASFQQGSQASPDLKPSPQNGATFPSSGGYGQGSLIADEESQEFDDLIFALKTGAGLSVSDNESGQGSQEGGTLTDSQIVELRRIPIADTHL

SEQ ID NO: 222902 - protein, 2306 aa, Artificial Sequence
  derived and/or modified sequence
VDVFMFLGMPSASLLVNLLSALLILFVFGETEIRFTGQTEFVVNETSTTVIRLIIERIGEPANVTAIVSLYGEDAGDFFDTYAAAFIPAGETNRTVYIAVCDDDLPEPDETFIFHLTLQKPSANVKLGWPRTVTVTILSNDNAFGIISFNMLPSIAVSEPKGRNESMPLTLIREKGTYGMVMVTFEVEGGPNPPDEDLSPVKGNITFPPGRATVIYNLTVLDDEVPENDEIFLIQLKSVEGGAEINTSRNSIEIIIKKNDSPVRFLQSIYLVPEEDHILIIPVVRGKDNNGNLIGSDEYEVSISYAVTTGNSTAHAQQNLDFIDLQPNTTVVFPPFIHESHLKFQIVDDTIPEIAESFHIMLLKDTLQGDAVLISPSVVQVTIKPNDKPYGVLSFNSVLFERTVIIDEDRISRYEEITVVRNGGTHGNVSANWVLTRNSTDPSPVTADIRPSSGVLHFAQGQMLATIPLTVVDDDLPEEAEAYLLQILPHTIRGGAEVSEPAELLFYIQDSDDVYGLITFFPMENQKIESSPGERYLSLSFTRLGGTKGDVRLLYSVLYIPAGAVDPLQAKEGILNISRRNDLIFPEQKTQVTTKLPIRNDAFLQNGAHFLVQLETVELLNIIPLIPPISPRFGEICNISLLVTPAIANGEIGFLSNLPIILHEPEDFAAEVVYIPLHRDGTDGQATVYWSLKPSGFNSKAVTPDDIGPFNGSVLFLSGQSDTTINITIKGDDIPEMNETVTLSLDRVNVENQVLKSGYTSRDLIILENDDPGGVFEFSPASRGPYVIKEGESVELHIIRSRGSLVKQFLHYRVEPRDSNEFYGNTGVLEFKPGEREIVITLLARLDGIPELDEHYWVVLSSHGERESKLGSATIVNITILKNDDPHGIIEFVSDGLIVMINESKGDAIYSAVYDVVRNRGNFGDVSVSWVVSPDFTQDVFPVQGTVVFGDQEFSKNITIYSLPDEIPEEMEEFTVILLNGTGGAKVGNRTTATLRIRRNDDPIYFAEPRVVRVQEGETANFTVLRNGSVDVTCMVQYATKDGKATARERDFIPVEKGETLIFEVGSRQQSISIFVNEDGIPETDEPFYIILLNSTGDTVVYQYGVATVIIEANDDPNGIFSLEPIDKAVEEGKTNAFWILRHRGYFGSVSVSWQLFQNDSALQPGQEFYETSGTVNFMDGEEAKPIILHAFPDKIPEFNEFYFLKLVNISGGSPGPGGQLAETNLQVTVMVPFNDDPFGVFILDPECLEREVAEDVLSEDDMSYITNFTILRQQGVFGDVQLGWEILSSEFPAGLPPMIDFLLVGIFPTTVHLQQHMRRHHSGTDALYFTGLEGAFGTVNPKYHPSRNNTIANFTFSAWVMPNANTNGFIIAKDDGNGSIYYGVKIQTNESHVTLSLHYKTLGSNATYIAKTTVMKYLEESVWLHLLIILEDGIIEFYLDGNAMPRGIKSLKGEAITDGPGILRIGAGINGNDRFTGLMQDVRSYERKLTLEEIYELHAMPAKSDLHPISGYLEFRQGETNKSFIISARDDNDEEGEELFILKLVSVYGGARISEENTTARLTIQKSDNANGLFGFTGACIPEIAEEGSTISCVVERTRGALDYVHVFYTISQIETDGINYLVDDFANASGTITFLPWQRSEVLNIYVLDDDIPELNEYFRVTLVSAIPGDGKLGSTPTSGASIDPEKETTDITIKASDHPYGLLQFSTGLPPQPKDAMTLPASSVPHITVEEEDGEIRLLVIRAQGLLGRVTAEFRTVSLTAFSPEDYQNVAGTLEFQPGERYKYIFINITDNSIPELEKSFKVELLNLEGGVAELFRVDGSGSGDGDMEFFLPTIHKRASLGVASQILVTIAASDHAHGVFEFSPESLFVSGTEPEDGYSTVTLNVIRHHGTLSPVTLHWNIDSDPDGDLAFTSGNITFEIGQTSANITVEILPDEDPELDKAFSVSVLSVSSGSLGAHINATLTVLASDDPYGIFIFSEKNRPVKVEEATQNITLSIIRLKGLMGKVLVSYATLDDMEKPPYFPPNLARATQGRDYIPASGFALFGANQSEATIAISILDDDEPERSESVFIELLNSTLVAKVQSRSIPNSPRLGPKVETIAQLIIIANDDAFGTLQLSAPIVRVAENHVGPIINVTRTGGAFADVSVKFKAVPITAIAGEDYSIASSDVVLLEGETSKAVPIYVINDIYPELEESFLVQLMNETTGGARLGALTEAVIIIEASDDPYGLFGFQITKLIVEEPEFNSVKVNLPIIRNSGTLGNVTVQWVATINGQLATGDLRVVSGNVTFAPGMSSYPSATN

SEQ ID NO: 222903 - protein, 6306 aa, Artificial Sequence
  derived and/or modified sequence
MSVFLGPGMPSASLLVNLLSALLILFVFGETEIRFTGQTEFVVNETSTTVIRLIIERIGEPANVTAIVSLYGEDAGDFFDTYAAAFIPAGETNRTVYIAVCDDDLPEPDETFIFHLTLQKPSANVKLGWPRTVTVTILSNDNAFGIISFNMLPSIAVSEPKGRNESMPLTLIREKGTYGMVMVTFEVEGGPNPPDEDLSPVKGNITFPPGRATVIYNLTVLDDEVPENDEIFLIQLKSVEGGAEINTSRNSIEIIIKKNDSPVRFLQSIYLVPEEDHILIIPVVRGKDNNGNLIGSDEYEVSISYAVTTGNSTAHAQQNLDFIDLQPNTTVVFPPFIHESHLKFQIVDDTIPEIAESFHIMLLKDTLQGDAVLISPSVVQVTIKPNDKPYGVLSFNSVLFERTVIIDEDRISRYEEITVVRNGGTHGNVSANWVLTRNSTDPSPVTADIRPSSGVLHFAQGQMLATIPLTVVDDDLPEEAEAYLLQILPHTIRGGAEVSEPAELLFYIQDSDDVYGLITFFPMENQKIESSPGERYLSLSFTRLGGTKGDVRLLYSVLYIPAGAVDPLQAKEGILNISRRNDLIFPEQKTQVTTKLPIRNDAFLQNGAHFLVQLETVELLNIIPLIPPISPRFGEICNISLLVTPAIANGEIGFLSNLPIILHEPEDFAAEVVYIPLHRDGTDGQATVYWSLKPSGFNSKAVTPDDIGPFNGSVLFLSGQSDTTINITIKGDDIPEMNETVTLSLDRVNVENQVLKSGYTSRDLIILENDDPGGVFEFSPASRGPYVIKEGESVELHIIRSRGSLVKQFLHYRVEPRDSNEFYGNTGVLEFKPGEREIVITLLARLDGIPELDEHYWVVLSSHGERESKLGSATIVNITILKNDDPHGIIEFVSDGLIVMINESKGDAIYSAVYDVVRNRGNFGDVSVSWVVSPDFTQDVFPVQGTVVFGDQEFSKNITIYSLPDEIPEEMEEFTVILLNGTGGAKVGNRTTATLRIRRNDDPIYFAEPRVVRVQEGETANFTVLRNGSVDVTCMVQYATKDGKATARERDFIPVEKGETLIFEVGSRQQSISIFVNEDGIPETDEPFYIILLNSTGDTVVYQYGVATVIIEANDDPNGIFSLEPIDKAVEEGKTNAFWILRHRGYFGSVSVSWQLFQNDSALQPGQEFYETSGTVNFMDGEEAKPIILHAFPDKIPEFNEFYFLKLVNISGGSPGPGGQLAETNLQVTVMVPFNDDPFGVFILDPECLEREVAEDVLSEDDMSYITNFTILRQQGVFGDVQLGWEILSSEFPAGLPPMIDFLLVGIFPTTVHLQQHMRRHHSGTDALYFTGLEGAFGTVNPKYHPSRNNTIANFTFSAWVMPNANTNGFIIAKDDGNGSIYYGVKIQTNESHVTLSLHYKTLGSNATYIAKTTVMKYLEESVWLHLLIILEDGIIEFYLDGNAMPRGIKSLKGEAITDGPGILRIGAGINGNDRFTGLMQDVRSYERKLTLEEIYELHAMPAKSDLHPISGYLEFRQGETNKSFIISARDDNDEEGEELFILKLVSVYGGARISEENTTARLTIQKSDNANGLFGFTGACIPEIAEEGSTISCVVERTRGALDYVHVFYTISQIETDGINYLVDDFANASGTITFLPWQRSEVLNIYVLDDDIPELNEYFRVTLVSAIPGDGKLGSTPTSGASIDPEKETTDITIKASDHPYGLLQFSTGLPPQPKDAMTLPASSVPHITVEEEDGEIRLLVIRAQGLLGRVTAEFRTVSLTAFSPEDYQNVAGTLEFQPGERYKYIFINITDNSIPELEKSFKVELLNLEGGVAELFRVDGSGSGDGDMEFFLPTIHKRASLGVASQILVTIAASDHAHGVFEFSPESLFVSGTEPEDGYSTVTLNVIRHHGTLSPVTLHWNIDSDPDGDLAFTSGNITFEIGQTSANITVEILPDEDPELDKAFSVSVLSVSSGSLGAHINATLTVLASDDPYGIFIFSEKNRPVKVEEATQNITLSIIRLKGLMGKVLVSYATLDDMEKPPYFPPNLARATQGRDYIPASGFALFGANQSEATIAISILDDDEPERSESVFIELLNSTLVAKVQSRSIPNSPRLGPKVETIAQLIIIANDDAFGTLQLSAPIVRVAENHVGPIINVTRTGGAFADVSVKFKAVPITAIAGEDYSIASSDVVLLEGETSKAVPIYVINDIYPELEESFLVQLMNETTGGARLGALTEAVIIIEASDDPYGLFGFQITKLIVEEPEFNSVKVNLPIIRNSGTLGNVTVQWVATINGQLATGDLRVVSGNVTFAPGETIQTLLLEVLADDVPEIEEVIQVQLTDASGGGTIGLDRIANIIIPANDDPYGTVAFAQMVYRVQEPLERSSCANITVRRSGGHFGRLLLFYSTSDIDVVALAMEEGQDLLSYYESPIQGVPDPLWRTWMNVSAVGEPLYTCATLCLKEQACSAFSFFSASEGPQCFWMTSWISPAVNNSDFWTYRKNMTRVASLFSGQAVAGSDYEPVTRQWAIMQEGDEFANLTVSILPDDFPEMDESFLISLLEVHLMNISASLKNQPTIGQPNISTVVIALNGDAFGVFVIYNISPNTSEDGLFVEVQEQPQTLVELMIHRTGGSLGQVAVEWRVVGGTATEGLDFIGAGEILTFAEGETKKTVILTILDDSEPEDDESIIVSLVYTEGGSRILPSSDTVRVNILANDNVAGIVSFQTASRSVIGHEGEILQFHVIRTFPGRGNVTVNWKIIGQNLELNFANFSGQLFFPEGSLNTTLFVHLLDDNIPEEKEVYQVILYDVRTQGVPPAGIALLDAQGYAAVLTVEASDEPHGVLNFALSSRFVLLQEANITIQLFINREFGSLGAINVTYTTVPGMLSLKNQTVGNLAEPEVDFVPIIGFLILEEGETAAAINITILEDDVPELEEYFLVNLTYVGLTMAASTSFPPRLDSEGLTAQVIIDANDGARGVIEWQQSRFEVNETHGSLTLVAQRSREPLGHVSLFVYAQNLEAQVGLDYIFTPMILHFADGERYKNVNIMILDDDIPEGDEKFQLILTNPSPGLELGKNTIALIIVLANDDGPGVLSFNNSEHFFLREPTALYVQESVAVLYIVREPAQGLFGTVTVQFIVTEVNSSNESKDLTPSKGYIVLEEGVRFKALQISAILDTEPEMDEYFVCTLFNPTGGARLGVHVQTLITVLQNQAPLGLFSISAVENRATSIDIEEANRTVYLNVSRTNGIDLAVSVQWETVSETAFGMRGMDVVFSVFQSFLDESASGWCFFTLENLIYGIMLRKSSVTVYRWQGIFIPVEDLNIENPKTCEAFNIGFSPYFVITHEERNEEKPSLNSVFTFTSGFKLFLVQTIIILESSQVRYFTSDSQDYLIIASQRDDSELTQVFRWNGGSFVLHQKLPVRGVLTVALFNKGGSVFLAISQANARLNSLLFRWSGSGFINFQEVPVSGTTEVEALSSANDIYLIFAENVFLGDQNSIDIFIWEMGQSSFRYFQSVDFAAVNRIHSFTPASGIAHILLIGQDMSALYCWNSERNQFSFVLEVPSAYDVASVTVKSLNSSKNLIALVGAHSHIYELAYISSHSDFIPSSGELIFEPGEREATIAVNILDDTVPEKEESFKVQLKNPKGGAEIGINDSVTITILSNDDAYGIVAFAQNSLYKQVEEMEQDSLVTLNVERLKGTYGRITIAWEADGSISDIFPTSGVILFTEGQVLSTITLTILADNIPELSEVVIVTLTRITTEGVEDSYKGATIDQDRSKSVITTLPNDSPFGLVGWRAASVFIRVAEPKENTTTLQLQIARDKGLLGDIAIHLRAQPNFLLHVDNQATENEDYVLQETIIIMKENIKEAHAEVSILPDDLPELEEGFIVTITEVNLVNSDFSTGQPSVRRPGMEIAEIMIEENDDPRGIFMFHVTRGAGEVITAYEVPPPLNVLQVPVVRLAGSFGAVNVYWKASPDSAGLEDFKPSHGILEFADKQVTAMIEITIIDDAEFELTETFNISLISVAGGGRLGDDVVVTVVIPQNDSPFGVFGFEEKTVMIDESLSSDDPDSYVTLTVVRSPGGKGTVRLEWTIDEKAKHNLSPLNGTLHFDETESQKTIVLHTLQDTVLEEDRRFTIQLISIDEVEISPVKGSASIIIRGDKRASGEVGIAPSSRHILIGEPSAKYNGTAIISLVRGPGILGEVTVFWRIFPPSVGEFAETSGKLTMRDEQSAVIVVIQALNDDIPEEKSFYEFQLTAVSEGGVLSESSSTANITVVASDSPYGRFAFSHEQLRVSEAQRVNITIIRSSGDFGHVRLWYKTMSGTAEAGLDFVPAAGELLFEAGEMRKSLHVEILDDDYPEGPEEFSLTITKVELQGRGYDFTIQENGLQIDQPPEIGNISIVRIIIMKNDNAEGIIEFDPKYTAFEVEEDVGLIMIPVVRLHGTYGYVTADFISQSSSASPGGVDYILHGSTVTFQHGQNLSFINISIIDDNESEFEEPIEILLTGATGGAVLGRHLVSRIIIAKSDSPFGVIRFLNQSKISIANPNSTMILSLVLERTGGLLGEIQVNWETVGPNSQEALLPQNRDIADPVSGLFYFGEGEGGVRTIILTIYPHEEIEVEETFIIKLHLVKGEAKLDSRAKDVTLTIQEFGDPNGVVQFAPETLSKKTYSEPLALEGPLLITFFVRRVKGTFGEIMVYWELSSEFDITEDFLSTSGFFTIADGESEASFDVHLLPDEVPEIEEDYVIQLVSVEGGAELDLEKSITWFSVYANDDPHGVFALYSDRQSILIGQNLIRSIQINITRLAGTFGDVAVGLRISSDHKEQPIVTENAERQLVVKDGATYKVDVVPIKNQVFLSLGSNFTLQLVTVMLVGGRFYGMPTILQEAKSAVLPVSEKAANSQVGFESTAFQLMNITAGTSHVMISRRGTYGALSVAWTTGYAPGLEIPEFIVVGNMTPTLGSLSFSHGEQRKGVFLWTFPSPGWPEAFVLHLSGVQSSAPGGAQLRSGFIVAEIEPMGVFQFSTSSRNIIVSEDTQMIRLHVQRLFGFHSDLIKVSYQTTAGSAKPLEDFEPVQNGELFFQKFQTEVDFEITIINDQLSEIEEFFYINLTSVEIRGLQKFDVNWSPRLNLDFSVAVITILDNDDLAGMDISFPETTVAVAVDTTLIPVETESTTYLSTSKTTTILQPTNVVAIVTEATGVSAIPEKLVTLHGTPAVSEKPDVATVTANVSIHGTFSLGPSIVYIEEEMKNGTFNTAEVLIRRTGGFTGNVSITVKTFGERCAQMEPNALPFRGIYGISNLTWAVEEEDFEEQTLTLIFLDGERERKVSVQILDDDEPEGQEFFYVFLTNPQGGAQIVEEKDDTGFAAFAMVIITGSDLHNGIIGFSEESQSGLELREGAVMRRLHLIVTRQPNRAFEDVKVFWRVTLNKTVVVLQKDGVNLVEELQSVSGTTTCTMGQTKCFISIELKPEKVPQVEVYFFVELYEATAGAAINNSARFAQIKILESDESQSLVYFSVGSRLAVAHKKATLISLQVARDSGTGLMMSVNFSTQELRSAETIGRTIISPAISGKDFVITEGTLVFEPGQRSTVLDVILTPETGSLNSFPKRFQIVLFDPKGGARIDKVYGTANITLVSDADSQAIWGLADQLHQPVNDDILNRVLHTISMKVATENTDEQLSAMMHLIEKITTEGKIQAFSVASRTLFYEILCSLINPKRKDTRGFSHFAEVTENFAFSLLTNVTCGSPGEKSKTILDSCPYLSILALHWYPQQINGHKFEGKEGDYIRIPERLLDVQDAEIMAGKSTCKLVQFTEYSSQQWFISGNNLPTLKNKVLSLSVKGQSSQLLTNDNEVLYRIYAAEPRIIPQTSLCLLWNQAAASWLSDSQFCKVVEETADYVECACSHMSVYAVYARTDNLSSYNEAFFTSGFICISGLCLAVLSHIFCARYSMFAAKLLTHMMAASLGTQILFLASAYASPQLAEESCSAMAAVTHYLYLCQFSWMLIQSVNFWYVLVMNDEHTERRYLLFFLLSWGLPAFVVILLIVILKGIYHQSMSQIYGLIHGDLCFIPNVYAALFTAALVPLTCLVVVFVVFIHAYQVKPQWKAYDDVFRGRTNAAEIPLILYLFALISVTWLWGGLHMAYRHFWMLVLFVIFNSLQGLYVFMVYFILHNQMCCPMKASYTVEMNGHPGPSTAFFTPGSGMPPAGGEISKSTQNLIGAMEEVPPDWERASFQQGSQASPDLKPSPQNGATFPSSGGYGQGSLIADEESQEFDDLIFALKTGAGLSVSDNESGQGSQEGGTLTDSQIVELRRIPIADTHL

SEQ ID NO: 222904 - DNA, 19237 bp, Artificial Sequence
  derived and/or modified sequence
atggacattttcttagttttagggatgccctctgcatctttattagtaaatcttctttcagctttactcatcctatttgtgtttggagaaacagaaataagatttactggacaaactgaatttgttgttaatgaaacaagtacaacagttattcgtcttatcattgaaaggataggagagccagcaaatgttactgcaattgtatcgctgtatggagaggacgctggtgacttttttgacacatatgctgcagcttttatacctgccggagaaacaaacagaacagtgtacatagcagtatgtgatgatgacttaccagagcctgacgaaacttttatttttcacttaacattacagaaaccttcagcaaatgtgaagcttggatggccaaggactgttactgtgacaatattatcaaatgacaatgcatttggaattatttcatttaatatgcttccctcaatcgcagtgagtgagcccaagggcagaaatgagtctatgcctcttactctcatcagggaaaagggaacctatggaatggtcatggtgacttttgaggtagagggtggcccaaatccccctgatgaagatttgagtccagttaaaggaaatatcacctttccccctggcagagcaacagtaatttataacttgacagtactcgatgacgaggtaccagaaaatgatgaaatatttttaattcaactgaaaagtgtagaaggaggagctgagattaacacctctaggaattccattgagatcatcattaagaaaaatgatagtcccgtgagattccttcagagtatttatttggttcctgaggaagaccacatactcataattccagtagttcgtggaaaggacaacaatggaaatctgattggatctgatgaatatgaggtttcaatcagttatgctgtcacaactgggaattccacagcacatgcccagcaaaatctggacttcattgatcttcagccaaacacaactgttgtttttccaccttttattcatgaatctcacttgaaatttcaaatagttgatgacaccataccggagattgctgaatcgtttcacattatgttactaaaagataccttacagggagatgctgtgctaataagcccttctgttgtacaagtcaccattaagccaaatgataaaccttatggagtcctttcattcaacagtgttttgtttgaaaggacagttataattgatgaagatagaatatcaagatatgaagaaatcacagtggttagaaatggaggaacccatgggaatgtctctgcgaattgggtgttgacacggaacagcactgatccctcaccagtaacagcagatatcagaccgagctctggagttctccattttgcacaagggcagatgttggcaacaattcctcttactgtggttgatgatgatcttccagaagaggcagaagcttatctacttcaaattctgcctcatacaatacgaggaggtgcagaagtgagcgagccagcggagcttttgttctacattcaggatagtgatgatgtctatggcctaataacattttttcctatggaaaaccagaagattgaaagcagcccaggtgaacgatacttatccttgagttttacaagactaggagggactaaaggagatgtgaggttgctttattctgtactttacattcctgctggagctgtggaccccttgcaagcaaaagaaggcatcttaaatatatcaaggagaaatgacctcatttttccagagcaaaaaactcaagtcactacaaaattaccaataagaaatgatgcattccttcaaaatggagctcactttctagtacagttggaaactgtggagttgttaaacataattcctctaatcccacccataagccctagatttggggaaatctgcaatatttctttactggttactccagccattgcaaatggagaaattggctttctcagcaatcttccaattattttgcatgaaccagaagattttgctgctgaagtggtatacattcccttacatcgggatggaactgatggccaggctactgtctactggagtttgaagccctctggctttaattcaaaagcagtgaccccggatgatataggcccctttaatggctctgttttgtttttatctgggcaaagtgacacaacaatcaacattactatcaaaggtgatgacataccggaaatgaatgaaactgtaacactttctctagacagggttaacgtggaaaaccaagtgctgaaatctggatatactagccgtgacctaattattttggaaaatgatgaccctgggggagtttttgaattttctcctgcttccagaggaccctatgttataaaagaaggagaatctgtagagctccacatcatccgatcaagggggtcccttgttaagcagtttctacactaccgagtagagccaagagatagcaatgaattctatggaaacacgggagtactagaatttaaacctggagaaagggagatagtgatcaccttgctagcaagattggatgggataccagagttggatgaacactactgggtggtcctcagcagccacggagaacgggaaagcaagttgggaagtgccaccattgtcaatataacgattctgaaaaatgatgatcctcatggcattatagaatttgtttctgatggtctaattgtgatgataaatgaaagcaaaggagatgctatctatagtgctgtttatgatgtagtaagaaatcgaggcaactttggtgatgttagtgtatcatgggtggttagtccagactttacacaagatgtatttcctgtacaagggactgttgtctttggagatcaggaattttcaaaaaatatcaccatttactcccttccagatgagattccagaagaaatggaagaatttaccgttatcctactgaatggcactggaggagctaaagtgggaaatagaacaactgcaactctgaggattagaagaaatgatgaccccatttattttgcagaacctcgtgtagtgagggttcaggaaggtgagactgccaactttacagttctcagaaatggatctgttgatgtgacttgcatggtccagtatgctaccaaggatgggaaggctactgcaagagagagagatttcattcctgttgaaaaaggagaaacgctcatttttgaggttggaagtagacagcagagcatatccatatttgttaatgaagatggtatcccggaaacagatgagcccttttatataatcctcttgaattcaacaggtgatacagtagtatatcaatatggagtagctacagtaataattgaagctaatgatgacccaaatggcattttttctctggagcccatagacaaagcagtggaagaaggaaagactaatgcattttggattttgaggcaccgaggatactttggtagtgtttctgtatcttggcagctctttcagaatgattctgctttgcagcctgggcaggagttctatgaaacttcaggaactgttaacttcatggatggagaagaagcaaaaccaatcattctccatgcttttccagataaaattcctgaattcaatgaattttatttcctaaaacttgtaaacatttcaggtggatccccaggtcctgggggccagctagcagaaaccaacctccaggtgacagtaatggttccattcaatgatgatccctttggagtttttatcttggatccagagtgtttagagagagaagtggcagaagatgtcctgtctgaagatgatatgtcttatattaccaacttcaccattttgaggcagcagggtgtgtttggtgatgtacaactgggctgggaaatactgtccagtgagttccctgctggtttgccaccaatgatagattttttactggttggaattttccccaccaccgtgcatttacaacagcacatgcggcgtcaccacagtggaacggatgctttgtactttaccggactagagggtgcatttgggactgttaatccaaaataccatccctccaggaataatacaattgccaactttacattctcagcttgggtaatgcccaatgccaatacgaatggattcattatagcgaaggatgacggtaatggaagcatctactacggggtaaaaatacaaacaaacgaatcccatgtgacactttcccttcattataaaaccttgggttccaatgctacatacattgccaagacaacagtcatgaaatatttagaagaaagtgtttggcttcatctactaattatcctggaggatggtataatcgaattctacctggatggaaatgcaatgcccaggggaatcaagagtctgaaaggagaagccattactgacggtcctgggatactgagaattggagcagggataaatggcaatgacagatttacaggtctgatgcaggatgtgaggtcctatgagcggaaactgacgcttgaagaaatttatgaacttcatgccatgcccgcaaaaagtgatttacacccaatttctggatatctggagttcagacagggagaaactaacaaatcattcattatttctgcaagagatgacaatgacgaggaaggagaagaattattcattcttaaactagtttctgtatatggaggagctcgtatttcggaagaaaatactactgcaagattaacaatacaaaaaagtgacaatgcaaatggcttgtttggtttcacaggagcttgtataccagagattgcagaggagggatcaaccatttcttgtgtggttgagagaaccagaggagctctggattatgtgcatgttttttacaccatttcacagattgaaactgatggcattaattaccttgttgatgactttgctaatgccagtggaactattacattccttccttggcagagatcagaggttctgaatatatatgttcttgatgatgatattcctgaacttaatgagtatttccgtgtgacattggtttctgcaattcctggagatgggaagctaggctcaactcctaccagtggtgcaagcatagatcctgaaaaggaaacgactgatatcaccatcaaagctagtgatcatccatatggcttgctgcagttctccacagggctgcctcctcagcctaaggacgcaatgaccctgcctgcaagcagcgttccacatatcactgtggaggaggaagatggagaaatcaggttattggtcatccgtgcacagggacttctgggaagggtgactgcggaatttagaacagtgtccttgacagcattcagtcctgaggattaccagaatgttgctggcacattagaatttcaaccaggagaaagatataaatacattttcataaacatcactgataattctattcctgaactggaaaaatcttttaaagttgagttgttaaacttggaaggaggagtagctgaactctttagggttgatggaagtggtagtggtgatggggacatggaattcttccttccaactattcacaaacgtgccagtctaggagtggcttcccaaattctagtgacaattgcagcctctgaccacgctcatggcgtatttgaatttagccctgagtcactctttgtcagtggaactgaaccagaagatgggtatagcactgttacattaaatgttataagacatcatggaactctgtctccagtgactttgcattggaacatagactctgatcctgatggtgatctcgccttcacctctggcaacatcacatttgagattgggcagacgagcgccaatatcactgtggagatattgcctgacgaagacccagaactggataaggcattctctgtgtcagtcctcagtgtttccagtggttctttgggagctcatattaatgccacgttaacagttttggctagtgatgatccatatgggatattcattttttctgagaaaaacagacctgttaaagttgaggaagcaacccagaacatcacactatcaataataaggttgaaaggcctcatgggaaaagtccttgtctcatatgcaacactagatgatatggaaaaaccaccttattttccacctaatttagcgagagcaactcaaggaagagactatataccagcttctggatttgctctttttggagctaatcagagtgaggcaacaatagctatttcaattttggatgatgatgagccagaaaggtccgaatctgtctttatcgaactactcaactctactttagtagcgaaagtacagagtcgttcaattccaaattctccacgtcttgggcctaaggtagaaactattgcgcaactaattatcattgccaatgatgatgcatttggaactcttcagctctcagcaccaattgtccgagtggcagaaaatcatgttggacccattatcaatgtgactagaacaggaggagcatttgcagatgtctctgtgaagtttaaagctgtgccaataactgcaatagctggtgaagattatagtatagcttcatcagatgtggtcttgctagaaggggaaaccagtaaagccgtgccaatatatgtcattaatgatatctatcctgaactggaagaatcttttcttgtgcaactgatgaatgaaacaacaggaggagccagactaggggctttaacagaggcagtcattattattgaggcctctgatgacccctatggattatttggttttcagattactaaacttattgtagaggaacctgagtttaactcagtgaaggtaaacctgccaataattcgaaattctgggacactcggcaatgttactgttcagtgggttgccaccattaatggacagcttgctactggcgacctgcgagttgtctcaggtaatgtgacctttgcccctggggaaaccattcaaaccttgttgttagaggtcctggctgacgacgttccggagattgaagaggttatccaagtgcaactaactgatgcctctggtggaggtactattgggttagatcgaattgcaaatattattattcctgccaatgatgatccttatggtacagtagcctttgctcagatggtttatcgtgttcaagagcctctggaaagaagttcctgtgctaatataactgtcaggcgaagcggagggcactttggtcggctgttgttgttctacagtacttccgacattgatgtagtggctctggcaatggaggaaggtcaagatttactgtcctactatgaatctccaattcaaggggtgcctgacccactttggagaacttggatgaatgtctctgccgtgggggagcccctgtatacctgtgccactttgtgccttaaggaacaagcttgctcagcgttttcatttttcagtgcttctgagggtccccagtgtttctggatgacatcatggatcagcccagctgtcaacaattcagacttctggacctacaggaaaaacatgaccagggtagcatctctttttagtggtcaggctgtggctgggagtgactatgagcctgtgacaaggcaatgggccataatgcaggaaggtgatgaattcgcaaatctcacagtgtctattcttcctgatgatttcccagagatggatgagagttttctaatttctctccttgaagttcacctcatgaacatttcagccagtttgaaaaatcagccaaccataggacagccaaatatttctacagttgtcatagcactaaatggtgatgcctttggagtgtttgtgatctacaatattagtcccaatacttccgaagatggcttatttgttgaagttcaggagcagccccaaaccttggtggagctgatgatacacaggacagggggcagcttaggtcaagtggcagtcgaatggcgtgttgttggtggaacagctactgaaggtttagattttataggtgctggagagattctgacctttgctgaaggtgaaaccaaaaagacagtcattttaaccatcttggatgactctgaaccagaggatgacgaaagtatcatagttagtttggtgtacactgaaggtggaagtagaattttgccaagctccgacactgttagagtgaacattttggccaatgacaatgtggcaggaattgttagctttcagacagcttccagatctgtcataggtcatgaaggagaaattttacaattccatgtgataagaactttccctggtcgaggaaatgttactgttaactggaaaattattgggcaaaatctagaactcaattttgctaactttagcggacaacttttctttcctgaggggtcgttgaatacaacattgtttgtgcatttgttggatgacaacattcctgaggagaaagaagtataccaagtcattctgtatgatgtcaggacacaaggagttccaccagccggaatcgccctgcttgatgctcaaggatatgcagctgtcctcacagtagaagccagtgatgaaccacatggagttttaaattttgctctttcatcaagatttgtgttactacaagaggctaacataacaattcagcttttcatcaacagagaatttggatctctaggagctatcaatgtcacatataccacggttcctggaatgctgagtctgaagaaccaaacagtaggaaacctagcagagccagaagttgattttgtccctatcattggctttctgattttagaagaaggggaaacagcagcagccatcaacattaccattcttgaggatgatgtaccagagctagaagaatatttcctggtgaatttaacttacgttggacttaccatggctgcttcaacttcatttcctcccagactagattcagaaggtttgactgcacaagttattattgatgccaatgatggggcccgaggtgtaattgaatggcaacaaagcaggtttgaagtaaatgaaacccatggaagtttaacattggtagcccagaggagcagagaacctcttggccatgtttccttatttgtgtatgctcagaatttggaagcacaagtggggctggattatatcttcaccccaatgattcttcattttgctgatggagaaaggtataaaaatgtcaatatcatgattcttgatgatgacattccagaaggagatgaaaaatttcagctgattttaacaaatccttctcctggactagagctagggaaaaatacaatagccttaattattgtccttgctaatgatgacggccctggagttctatcatttaacaacagtgagcactttttcctaagagagccaacagctctctacgtccaggagagtgttgcagtattgtacattgttcgggaacctgcacaaggattgtttggaacagtgacagttcagttcattgtgacagaagtgaattcctcaaatgaatctaaagatctgactccttccaaaggctatattgttttagaagaaggtgttcgattcaaggccctacaaatatctgccatattagacacggaaccagaaatggatgagtattttgtttgcaccttgtttaatccaactggaggtgctagactaggggtgcatgttcaaaccctgataacagttttgcaaaaccaggcccctttggggctattcagtatctctgcagttgaaaatagagccacctccatagacatcgaagaagccaataggaccgtgtatttaaatgtatctcgaactaatggcattgatttggctgtgagtgtgcagtgggagacagtatctgaaacagcctttggcatgaggggaatggatgttgtgttttccgtatttcaaagttttttggatgaatcagcttctggctggtgtttctttactttggaaaatttaatatatggtataatgttaagaaaatcatctgttactgtttaccgatggcaggggatttttattccagttgaggatttaaatatagaaaatcctaaaacttgtgaggcctttaatattggtttttctccctactttgtgattactcatgaagaaagaaatgaagaaaagccttctcttaacagtgtgtttacattcacatctggatttaaattattcctggtacaaacaatcattattctggaaagttctcaagtaagatattttacttcagacagccaagattatttaatcattgcaagtcaaagagatgattccgaattaactcaggtcttcaggtggaatggaggaagcttcgtgttgcatcaaaaactccctgtccgaggtgtgctgaccgtggccttgttcaacaagggaggctctgtgttcttagccatttcccaggctaatgccaggctaaactcccttttattcagatggtctggcagtgggtttattaactttcaagaggtgcctgtcagtgggacaacagaagttgaggctttgtcttcagccaatgatatttacctaatatttgccgaaaatgtctttctaggagatcagaattcaattgatattttcatctgggagatgggacagtcttccttcaggtattttcagtctgtagattttgctgctgttaacagaatccactccttcacaccagcctcaggaatagcccacatacttcttattggccaagatatgtctgctctttactgctggaattcggagcgtaatcaattctcttttgttctggaagtaccttctgcttatgatgtggcttctgttacagtaaagtcccttaattcaagcaagaatttaatagctctagtgggagctcattcacatatatatgagctagcctacatttccagccattctgactttattcctagttcaggtgaactgatatttgaacctggtgagagagaagctacaatagcagtaaatatccttgatgatacagttccagaaaaagaagaatccttcaaagttcaacttaaaaatcccaaaggaggagcagagattggcattaatgattctgtaacaataaccattctgtctaatgatgatgcctatggaattgttgcatttgctcagaattcattatataagcaagtggaagaaatggagcaagatagcctagtaaccttgaacgttgaacgcttaaaaggaacatatggccgtataaccatagcatgggaagctgatggaagtattagtgatatatttcctacctcaggagtgattttatttactgaaggccaggtactgtcaacaatcactctaactattcttgctgataatataccagagttatcagaggttgtgattgtaaccctcacccgtatcaccacagaaggggttgaggactcatacaaaggtgctactattgatcaggacagaagcaagtctgttataacaactttgcccaatgactcaccttttggcttggtgggctggcgtgctgcgtctgtcttcattagagtagcagagcctaaagaaaacaccaccactcttcagttacaaatagctcgagataaaggactacttggggatattgccattcacttgagagctcaacccaatttcttactgcatgtcgataatcaagctactgagaatgaagattatgtattgcaagaaacaataataataatgaaagaaaacataaaagaagctcatgccgaagtttccattttgccggatgaccttcctgaattggaggaaggatttattgtcactatcactgaggtgaacctggtgaactctgacttctctacaggacagccaagtgtgcggaggcccggaatggaaatagctgagataatgatagaagaaaatgacgatcccagaggaatttttatgtttcatgttactagaggcgctggggaagttattactgcctatgaggtgcctccacccttgaacgttcttcaagttcctgtagtccggctggctggaagctttggggcagtaaatgtttattggaaagcatcaccagacagtgctggcctggaagactttaaaccatctcatgggattcttgaatttgcagataaacaggttactgcaatgatagaaatcaccataattgatgatgctgaatttgaattgacagagacgttcaatatttccttgatcagtgttgctggaggtggcagacttggtgatgatgttgtggtaactgttgttattccacaaaatgattctccatttggagtatttggatttgaagaaaagactgtaatgattgatgaatccctttcatccgatgaccctgattcatatgtgacattgacggttgtccggtccccaggaggaaaaggaaccgtccgacttgagtggaccatagatgagaaggctaaacataaccttagtcctttgaatgggacccttcattttgatgagactgagtcccagaagaccattgtgttgcacacacttcaagacacagtgttggaggaggacaggcgtttcaccattcagctgatatcaattgatgaggtagaaatatctccagtaaaaggtagtgcatcaataattattcggggtgataagcgagcatcaggagaagttgggatagctccgtcatctaggcacatcctcattggggaaccctcagcaaaatataatggtaccgctattatcagccttgttcgaggcccagggattttgggggaggtcacagtgttctggaggatattccctccttccgtgggggaatttgctgaaacatcaggaaaactgacaatgcgagacgaacagtctgcagtcattgtagtaatacaggctttgaacgatgacattcccgaggaaaaaagcttctatgagtttcagctcactgcagtcagtgagggaggagttctgagtgaatccagcagcactgccaacatcacggtggtggccagcgactctccctatggccgatttgccttttcacatgagcaacttcgagtgtcagaagcacagagggttaacatcacaatcatccgttccagtggagattttggccatgtgcgactctggtacaagacgatgagcgggacagcggaagcaggcttggattttgttcctgcagcaggggagctcctctttgaagcaggggagatgaggaaaagtctgcatgttgaaatccttgatgatgactatcctgaaggcccagaggaattttctctaacaattacaaaggtggaactccagggaagagggtatgattttaccattcaagaaaatggacttcagatagatcaacctcctgaaataggaaacatctccattgttcgcatcataataatgaaaaatgataacgcagaaggcatcattgaatttgacccaaagtatactgccttcgaagtggaggaagatgttgggctgatcatgatcccagtggtgaggctacatggaacttatggctatgtgacagctgatttcatctctcagagctcctctgccagtcccggaggtgttgattacattttgcatggcagtacagtcacctttcagcatgggcaaaacttaagttttataaatatctccatcattgatgacaatgaaagtgaatttgaggagcccattgaaattctactcactggagctactggaggagcggtccttgggcgccacctagtgagcagaatcataatagctaagagtgactctccctttggagttataaggtttctcaatcaaagcaaaatttctattgctaatcccaattccacaatgattttatcactggtgctggagcggactggaggactcttgggagagattcaggtgaactgggagacagtaggacccaactctcaagaagccttactgccacagaatagagacattgcagacccagtgagcgggttgttctattttggagaaggagaaggaggagtgagaaccataattctgacaatctatcctcatgaagaaattgaagttgaagagacattcattattaaacttcatcttgtgaaaggagaagctaaattagactccagagctaaagatgttacattaaccatacaagagtttggtgacccaaatggagttgttcagtttgctcctgaaactttgtctaagaagacttattcagagcctctggctctggaagggcccctgctcattaccttctttgtcagaagagtcaagggcacctttggagagattatggtttactgggaattaagtagtgagtttgacattactgaagactttctttccaccagtggatttttcaccattgctgatggagagagtgaagctagctttgatgttcatttgctaccagatgaggtacctgagatagaggaagattatgtgatccagcttgtttctgtagagggaggagccgaactggatctggagaagagtatcacatggttctctgtttatgcaaatgatgacccacatggagtatttgccctgtattcggatcgccagtcaatacttattgggcagaaccttattagatccatccaaattaacataacccggcttgctggaacatttggagatgtggctgttgggcttcgaatatcatcggatcataaagaacagccgattgttaccgaaaatgcagagaggcagctggtggtcaaagatggtgccacatataaagtggacgtggtgccaataaagaatcaggtcttcctatcactgggctctaatttcactttgcaactggtgactgtgatgcttgtcggtggacgtttctatggaatgccaacaattcttcaggaagcaaaatctgctgtccttccagtctctgagaaagctgccaattctcaggtcggatttgaatccactgcttttcaactcatgaacatcactgctggcacaagccacgttatgatttctaggagaggcacatatggagctctctcggttgcctggaccactggatatgctcctgggttagaaattcctgaattcattgttgttggcaacatgaccccaacactggggagcctttcattttcccacggtgaacaaaggaaaggagttttcctgtggacgtttcctagccctggttggccagaggcctttgttcttcacctatcaggagtgcagagcagtgctcctggcggagctcaactccgatcaggtttcattgttgctgaaattgaaccaatgggcgtcttccaattttccactagctcaagaaatatcatagtgtcagaagatacacagatgatcagattacatgtacaaagactatttgggttccacagcgatcttattaaagtttcttatcagaccactgcaggaagcgccaagccactggaagattttgagcctgttcagaatggggaactgttttttcaaaaattccaaactgaggttgattttgaaataaccattattaatgatcagctttctgagatagaagaatttttttacattaaccttacttcagtagaaattaggggattacaaaagtttgatgttaattggagcccacgcctgaatctagatttcagtgttgcagtgattacaatattggataatgatgacctggcaggaatggatatttccttccccgagacaactgtggctgtagcagttgacacaactctcattcctgtagaaactgaatccaccacatacctcagcacaagcaagacgactaccattctgcagccaaccaacgtggttgccattgttactgaggcaactggtgtatctgccatccctgagaaacttgtcacccttcatggcacacctgctgtgtctgaaaagcctgatgtggccactgtaactgccaatgtttccattcatggaacattcagccttgggccatccattgtttatattgaagaggagatgaagaatggcacattcaacactgcagaagttcttatccgaagaactggtgggtttactggcaatgtcagcataacagttaaaactttcggtgaaagatgtgctcagatggaaccaaatgcattgccctttcgtggtatctatgggatttccaacctaacatgggcagttgaagaagaagactttgaagaacaaactcttacccttatattcctagatggagaaagagaacgtaaagtatcagttcaaattttggatgatgatgagcctgaggggcaggaattcttctacgtgtttctcacaaaccctcaagggggagcacagattgtggaggagaaggatgatactggatttgcagcttttgccatggttattattacagggagtgaccttcacaatggcatcataggattcagtgaggagtcccagagtggactagaactcagggaaggagctgttatgagaagattgcaccttattgtcacaagacagccaaacagggcctttgaagatgtcaaggtcttttggcgagtcacacttaacaaaacagtcgtcgtgctccagaaggatggggtaaacctggtggaggaacttcagtctgtgtcagggaccacaacctgtacaatgggtcaaacaaaatgctttatcagcattgaactcaaaccagaaaaggtaccacaggttgaagtgtatttttttgtggaactatatgaagctactgctggagcagcaataaacaacagtgccagattcgcacagattaaaatcttagaaagtgatgaatctcaaagccttgtgtatttttctgtgggttctcggctggcagtggctcacaagaaggccactttaatcagtctgcaggtggccagagattctgggacaggactaatgatgtctgttaactttagtacccaggagttgaggagtgctgaaacaattggtcgtaccatcatatctccagctatttctggaaaggattttgtgataactgaaggcacattggtctttgaacctggccagagaagcactgtattggatgtcatcctaacgccagagacaggatctttaaattcatttcctaaacgcttccagattgtcctttttgacccaaaaggtggtgccagaattgataaagtgtatgggactgccaacatcactcttgtctcagatgcagattcgcaggccatttgggggcttgcagatcagctacatcagcctgtgaatgatgatattctcaacagagtgctccataccatcagcatgaaagtggccacagaaaacacagatgaacaactcagtgccatgatgcatttaatagaaaagataactactgaaggaaaaattcaagctttcagtgttgccagccgaactcttttctatgagattctttgttctcttattaacccaaagcgcaaggacactaggggattcagtcactttgctgaagtgactgagaattttgccttttctctgctgactaatgttacttgcggctctcctggtgaaaaaagcaaaaccatccttgatagttgcccatatttgtcaatattggctcttcactggtatcctcagcaaatcaatggacacaagtttgaaggaaaggaaggagattacattcgaattccagagaggctactggatgtccaggatgcagaaataatggctgggaaaagtacatgtaaattagtccagtttacagagtatagcagccaacagtggtttataagtggaaacaatcttcctaccctaaaaaataaggtattatctttgagtgtgaaaggtcagagttcacaactcctgactaatgacaatgaggttctctacaggatttatgctgctgagcctagaattattcctcagacatctctgtgtctcctttggaatcaggctgctgcaagctggttgtctgacagtcagttttgcaaagtggttgaggaaactgcagactatgtggaatgtgcctgttcacacatgtctgtgtatgctgtctatgctcggactgacaacttgtcttcatacaatgaagccttcttcacttctggatttatatgtatctcaggtctttgcttggctgttctttcccatatcttctgtgccaggtactccatgtttgcagctaaacttctgactcacatgatggcagccagcttaggtacacagattctgtttctggcgtctgcatacgcaagtccccaactcgctgaggagagctgttcagctatggctgctgtcacacattacctgtatctttgccagtttagctggatgctcattcagtctgtgaatttctggtacgtgctggtgatgaatgatgagcacacagagaggcgatatctgctgtttttccttctgagttggggactaccagcttttgtggtgattctcctcatagttattttgaaaggaatctatcatcagagcatgtcacagatctatggactcattcatggtgacctgtgttttattccaaacgtctatgctgctttgttcactgcagctcttgttcctttgacgtgcctcgtggtggtgttcgtggtgttcatccatgcctaccaggtgaagccacagtggaaagcatatgatgatgtcttcagaggaaggacaaatgctgcagaaattccactgattttatatctctttgctctgatttccgtgacatggctttggggaggactacacatggcctacagacacttctggatgttggttctctttgtcattttcaacagtctgcagggactttatgttttcatggtttatttcattttacacaaccaaatgtgttgccctatgaaggccagttacactgtggaaatgaatgggcatcctggacccagcacagcctttttcacgcccgggagtggaatgcctcctgctggaggggaaatcagcaagtccacccagaatctcatcggtgctatggaggaggtgccacctgactgggagagagcatccttccaacagggcagtcaggccagccctgatttaaagccaagtccacaaaatggagccacgttcccgtcctctggaggatatggccaggggtcactgatagccgatgaggagtcccaggagtttgatgatttaatatttgcattaaaaactggtgctggtctcagtgtcagtgataatgaatctggtcaaggcagccaggaggggggcaccttgactgactcccagatcgtggagctcaggaggatacccatcgccgacactcacctgtagcacctcactaaccattcgactgagcacactttcatatttgtatcagcttttgtgctaaaactctctaagtacatccacctgtgtaataggaacctgtgaattgtactggatgattaatacaaacgtgattgttgtatttggagtataaattactgattgtatgtgacctgaaaattcactgctataagaaaggtggagtcagtttgtatcagttaataggatgttcatattccaaggatattagttgtttttttaatcatcctatatggctaacattgtttaatgaaagtaataatcaataaagcaatagaatcta

SEQ ID NO: 222905 - DNA, 19338 bp, Artificial Sequence
  derived and/or modified sequence
agtaagaatcagcagcgcgggcaaggagtacggacgggagtcagaggcagagcgagggtgtgtggagggccggcggggaccgccgggagcgcgcggatgtcggtgttcctggggccagggatgccctctgcatctttattagtaaatcttctttcagctttactcatcctatttgtgtttggagaaacagaaataagatttactggacaaactgaatttgttgttaatgaaacaagtacaacagttattcgtcttatcattgaaaggataggagagccagcaaatgttactgcaattgtatcgctgtatggagaggacgctggtgacttttttgacacatatgctgcagcttttatacctgccggagaaacaaacagaacagtgtacatagcagtatgtgatgatgacttaccagagcctgacgaaacttttatttttcacttaacattacagaaaccttcagcaaatgtgaagcttggatggccaaggactgttactgtgacaatattatcaaatgacaatgcatttggaattatttcatttaatatgcttccctcaatcgcagtgagtgagcccaagggcagaaatgagtctatgcctcttactctcatcagggaaaagggaacctatggaatggtcatggtgacttttgaggtagagggtggcccaaatccccctgatgaagatttgagtccagttaaaggaaatatcacctttccccctggcagagcaacagtaatttataacttgacagtactcgatgacgaggtaccagaaaatgatgaaatatttttaattcaactgaaaagtgtagaaggaggagctgagattaacacctctaggaattccattgagatcatcattaagaaaaatgatagtcccgtgagattccttcagagtatttatttggttcctgaggaagaccacatactcataattccagtagttcgtggaaaggacaacaatggaaatctgattggatctgatgaatatgaggtttcaatcagttatgctgtcacaactgggaattccacagcacatgcccagcaaaatctggacttcattgatcttcagccaaacacaactgttgtttttccaccttttattcatgaatctcacttgaaatttcaaatagttgatgacaccataccggagattgctgaatcgtttcacattatgttactaaaagataccttacagggagatgctgtgctaataagcccttctgttgtacaagtcaccattaagccaaatgataaaccttatggagtcctttcattcaacagtgttttgtttgaaaggacagttataattgatgaagatagaatatcaagatatgaagaaatcacagtggttagaaatggaggaacccatgggaatgtctctgcgaattgggtgttgacacggaacagcactgatccctcaccagtaacagcagatatcagaccgagctctggagttctccattttgcacaagggcagatgttggcaacaattcctcttactgtggttgatgatgatcttccagaagaggcagaagcttatctacttcaaattctgcctcatacaatacgaggaggtgcagaagtgagcgagccagcggagcttttgttctacattcaggatagtgatgatgtctatggcctaataacattttttcctatggaaaaccagaagattgaaagcagcccaggtgaacgatacttatccttgagttttacaagactaggagggactaaaggagatgtgaggttgctttattctgtactttacattcctgctggagctgtggaccccttgcaagcaaaagaaggcatcttaaatatatcaaggagaaatgacctcatttttccagagcaaaaaactcaagtcactacaaaattaccaataagaaatgatgcattccttcaaaatggagctcactttctagtacagttggaaactgtggagttgttaaacataattcctctaatcccacccataagccctagatttggggaaatctgcaatatttctttactggttactccagccattgcaaatggagaaattggctttctcagcaatcttccaattattttgcatgaaccagaagattttgctgctgaagtggtatacattcccttacatcgggatggaactgatggccaggctactgtctactggagtttgaagccctctggctttaattcaaaagcagtgaccccggatgatataggcccctttaatggctctgttttgtttttatctgggcaaagtgacacaacaatcaacattactatcaaaggtgatgacataccggaaatgaatgaaactgtaacactttctctagacagggttaacgtggaaaaccaagtgctgaaatctggatatactagccgtgacctaattattttggaaaatgatgaccctgggggagtttttgaattttctcctgcttccagaggaccctatgttataaaagaaggagaatctgtagagctccacatcatccgatcaagggggtcccttgttaagcagtttctacactaccgagtagagccaagagatagcaatgaattctatggaaacacgggagtactagaatttaaacctggagaaagggagatagtgatcaccttgctagcaagattggatgggataccagagttggatgaacactactgggtggtcctcagcagccacggagaacgggaaagcaagttgggaagtgccaccattgtcaatataacgattctgaaaaatgatgatcctcatggcattatagaatttgtttctgatggtctaattgtgatgataaatgaaagcaaaggagatgctatctatagtgctgtttatgatgtagtaagaaatcgaggcaactttggtgatgttagtgtatcatgggtggttagtccagactttacacaagatgtatttcctgtacaagggactgttgtctttggagatcaggaattttcaaaaaatatcaccatttactcccttccagatgagattccagaagaaatggaagaatttaccgttatcctactgaatggcactggaggagctaaagtgggaaatagaacaactgcaactctgaggattagaagaaatgatgaccccatttattttgcagaacctcgtgtagtgagggttcaggaaggtgagactgccaactttacagttctcagaaatggatctgttgatgtgacttgcatggtccagtatgctaccaaggatgggaaggctactgcaagagagagagatttcattcctgttgaaaaaggagaaacgctcatttttgaggttggaagtagacagcagagcatatccatatttgttaatgaagatggtatcccggaaacagatgagcccttttatataatcctcttgaattcaacaggtgatacagtagtatatcaatatggagtagctacagtaataattgaagctaatgatgacccaaatggcattttttctctggagcccatagacaaagcagtggaagaaggaaagactaatgcattttggattttgaggcaccgaggatactttggtagtgtttctgtatcttggcagctctttcagaatgattctgctttgcagcctgggcaggagttctatgaaacttcaggaactgttaacttcatggatggagaagaagcaaaaccaatcattctccatgcttttccagataaaattcctgaattcaatgaattttatttcctaaaacttgtaaacatttcaggtggatccccaggtcctgggggccagctagcagaaaccaacctccaggtgacagtaatggttccattcaatgatgatccctttggagtttttatcttggatccagagtgtttagagagagaagtggcagaagatgtcctgtctgaagatgatatgtcttatattaccaacttcaccattttgaggcagcagggtgtgtttggtgatgtacaactgggctgggaaatactgtccagtgagttccctgctggtttgccaccaatgatagattttttactggttggaattttccccaccaccgtgcatttacaacagcacatgcggcgtcaccacagtggaacggatgctttgtactttaccggactagagggtgcatttgggactgttaatccaaaataccatccctccaggaataatacaattgccaactttacattctcagcttgggtaatgcccaatgccaatacgaatggattcattatagcgaaggatgacggtaatggaagcatctactacggggtaaaaatacaaacaaacgaatcccatgtgacactttcccttcattataaaaccttgggttccaatgctacatacattgccaagacaacagtcatgaaatatttagaagaaagtgtttggcttcatctactaattatcctggaggatggtataatcgaattctacctggatggaaatgcaatgcccaggggaatcaagagtctgaaaggagaagccattactgacggtcctgggatactgagaattggagcagggataaatggcaatgacagatttacaggtctgatgcaggatgtgaggtcctatgagcggaaactgacgcttgaagaaatttatgaacttcatgccatgcccgcaaaaagtgatttacacccaatttctggatatctggagttcagacagggagaaactaacaaatcattcattatttctgcaagagatgacaatgacgaggaaggagaagaattattcattcttaaactagtttctgtatatggaggagctcgtatttcggaagaaaatactactgcaagattaacaatacaaaaaagtgacaatgcaaatggcttgtttggtttcacaggagcttgtataccagagattgcagaggagggatcaaccatttcttgtgtggttgagagaaccagaggagctctggattatgtgcatgttttttacaccatttcacagattgaaactgatggcattaattaccttgttgatgactttgctaatgccagtggaactattacattccttccttggcagagatcagaggttctgaatatatatgttcttgatgatgatattcctgaacttaatgagtatttccgtgtgacattggtttctgcaattcctggagatgggaagctaggctcaactcctaccagtggtgcaagcatagatcctgaaaaggaaacgactgatatcaccatcaaagctagtgatcatccatatggcttgctgcagttctccacagggctgcctcctcagcctaaggacgcaatgaccctgcctgcaagcagcgttccacatatcactgtggaggaggaagatggagaaatcaggttattggtcatccgtgcacagggacttctgggaagggtgactgcggaatttagaacagtgtccttgacagcattcagtcctgaggattaccagaatgttgctggcacattagaatttcaaccaggagaaagatataaatacattttcataaacatcactgataattctattcctgaactggaaaaatcttttaaagttgagttgttaaacttggaaggaggagtagctgaactctttagggttgatggaagtggtagtggtgatggggacatggaattcttccttccaactattcacaaacgtgccagtctaggagtggcttcccaaattctagtgacaattgcagcctctgaccacgctcatggcgtatttgaatttagccctgagtcactctttgtcagtggaactgaaccagaagatgggtatagcactgttacattaaatgttataagacatcatggaactctgtctccagtgactttgcattggaacatagactctgatcctgatggtgatctcgccttcacctctggcaacatcacatttgagattgggcagacgagcgccaatatcactgtggagatattgcctgacgaagacccagaactggataaggcattctctgtgtcagtcctcagtgtttccagtggttctttgggagctcatattaatgccacgttaacagttttggctagtgatgatccatatgggatattcattttttctgagaaaaacagacctgttaaagttgaggaagcaacccagaacatcacactatcaataataaggttgaaaggcctcatgggaaaagtccttgtctcatatgcaacactagatgatatggaaaaaccaccttattttccacctaatttagcgagagcaactcaaggaagagactatataccagcttctggatttgctctttttggagctaatcagagtgaggcaacaatagctatttcaattttggatgatgatgagccagaaaggtccgaatctgtctttatcgaactactcaactctactttagtagcgaaagtacagagtcgttcaattccaaattctccacgtcttgggcctaaggtagaaactattgcgcaactaattatcattgccaatgatgatgcatttggaactcttcagctctcagcaccaattgtccgagtggcagaaaatcatgttggacccattatcaatgtgactagaacaggaggagcatttgcagatgtctctgtgaagtttaaagctgtgccaataactgcaatagctggtgaagattatagtatagcttcatcagatgtggtcttgctagaaggggaaaccagtaaagccgtgccaatatatgtcattaatgatatctatcctgaactggaagaatcttttcttgtgcaactgatgaatgaaacaacaggaggagccagactaggggctttaacagaggcagtcattattattgaggcctctgatgacccctatggattatttggttttcagattactaaacttattgtagaggaacctgagtttaactcagtgaaggtaaacctgccaataattcgaaattctgggacactcggcaatgttactgttcagtgggttgccaccattaatggacagcttgctactggcgacctgcgagttgtctcaggtaatgtgacctttgcccctggggaaaccattcaaaccttgttgttagaggtcctggctgacgacgttccggagattgaagaggttatccaagtgcaactaactgatgcctctggtggaggtactattgggttagatcgaattgcaaatattattattcctgccaatgatgatccttatggtacagtagcctttgctcagatggtttatcgtgttcaagagcctctggaaagaagttcctgtgctaatataactgtcaggcgaagcggagggcactttggtcggctgttgttgttctacagtacttccgacattgatgtagtggctctggcaatggaggaaggtcaagatttactgtcctactatgaatctccaattcaaggggtgcctgacccactttggagaacttggatgaatgtctctgccgtgggggagcccctgtatacctgtgccactttgtgccttaaggaacaagcttgctcagcgttttcatttttcagtgcttctgagggtccccagtgtttctggatgacatcatggatcagcccagctgtcaacaattcagacttctggacctacaggaaaaacatgaccagggtagcatctctttttagtggtcaggctgtggctgggagtgactatgagcctgtgacaaggcaatgggccataatgcaggaaggtgatgaattcgcaaatctcacagtgtctattcttcctgatgatttcccagagatggatgagagttttctaatttctctccttgaagttcacctcatgaacatttcagccagtttgaaaaatcagccaaccataggacagccaaatatttctacagttgtcatagcactaaatggtgatgcctttggagtgtttgtgatctacaatattagtcccaatacttccgaagatggcttatttgttgaagttcaggagcagccccaaaccttggtggagctgatgatacacaggacagggggcagcttaggtcaagtggcagtcgaatggcgtgttgttggtggaacagctactgaaggtttagattttataggtgctggagagattctgacctttgctgaaggtgaaaccaaaaagacagtcattttaaccatcttggatgactctgaaccagaggatgacgaaagtatcatagttagtttggtgtacactgaaggtggaagtagaattttgccaagctccgacactgttagagtgaacattttggccaatgacaatgtggcaggaattgttagctttcagacagcttccagatctgtcataggtcatgaaggagaaattttacaattccatgtgataagaactttccctggtcgaggaaatgttactgttaactggaaaattattgggcaaaatctagaactcaattttgctaactttagcggacaacttttctttcctgaggggtcgttgaatacaacattgtttgtgcatttgttggatgacaacattcctgaggagaaagaagtataccaagtcattctgtatgatgtcaggacacaaggagttccaccagccggaatcgccctgcttgatgctcaaggatatgcagctgtcctcacagtagaagccagtgatgaaccacatggagttttaaattttgctctttcatcaagatttgtgttactacaagaggctaacataacaattcagcttttcatcaacagagaatttggatctctaggagctatcaatgtcacatataccacggttcctggaatgctgagtctgaagaaccaaacagtaggaaacctagcagagccagaagttgattttgtccctatcattggctttctgattttagaagaaggggaaacagcagcagccatcaacattaccattcttgaggatgatgtaccagagctagaagaatatttcctggtgaatttaacttacgttggacttaccatggctgcttcaacttcatttcctcccagactagattcagaaggtttgactgcacaagttattattgatgccaatgatggggcccgaggtgtaattgaatggcaacaaagcaggtttgaagtaaatgaaacccatggaagtttaacattggtagcccagaggagcagagaacctcttggccatgtttccttatttgtgtatgctcagaatttggaagcacaagtggggctggattatatcttcaccccaatgattcttcattttgctgatggagaaaggtataaaaatgtcaatatcatgattcttgatgatgacattccagaaggagatgaaaaatttcagctgattttaacaaatccttctcctggactagagctagggaaaaatacaatagccttaattattgtccttgctaatgatgacggccctggagttctatcatttaacaacagtgagcactttttcctaagagagccaacagctctctacgtccaggagagtgttgcagtattgtacattgttcgggaacctgcacaaggattgtttggaacagtgacagttcagttcattgtgacagaagtgaattcctcaaatgaatctaaagatctgactccttccaaaggctatattgttttagaagaaggtgttcgattcaaggccctacaaatatctgccatattagacacggaaccagaaatggatgagtattttgtttgcaccttgtttaatccaactggaggtgctagactaggggtgcatgttcaaaccctgataacagttttgcaaaaccaggcccctttggggctattcagtatctctgcagttgaaaatagagccacctccatagacatcgaagaagccaataggaccgtgtatttaaatgtatctcgaactaatggcattgatttggctgtgagtgtgcagtgggagacagtatctgaaacagcctttggcatgaggggaatggatgttgtgttttccgtatttcaaagttttttggatgaatcagcttctggctggtgtttctttactttggaaaatttaatatatggtataatgttaagaaaatcatctgttactgtttaccgatggcaggggatttttattccagttgaggatttaaatatagaaaatcctaaaacttgtgaggcctttaatattggtttttctccctactttgtgattactcatgaagaaagaaatgaagaaaagccttctcttaacagtgtgtttacattcacatctggatttaaattattcctggtacaaacaatcattattctggaaagttctcaagtaagatattttacttcagacagccaagattatttaatcattgcaagtcaaagagatgattccgaattaactcaggtcttcaggtggaatggaggaagcttcgtgttgcatcaaaaactccctgtccgaggtgtgctgaccgtggccttgttcaacaagggaggctctgtgttcttagccatttcccaggctaatgccaggctaaactcccttttattcagatggtctggcagtgggtttattaactttcaagaggtgcctgtcagtgggacaacagaagttgaggctttgtcttcagccaatgatatttacctaatatttgccgaaaatgtctttctaggagatcagaattcaattgatattttcatctgggagatgggacagtcttccttcaggtattttcagtctgtagattttgctgctgttaacagaatccactccttcacaccagcctcaggaatagcccacatacttcttattggccaagatatgtctgctctttactgctggaattcggagcgtaatcaattctcttttgttctggaagtaccttctgcttatgatgtggcttctgttacagtaaagtcccttaattcaagcaagaatttaatagctctagtgggagctcattcacatatatatgagctagcctacatttccagccattctgactttattcctagttcaggtgaactgatatttgaacctggtgagagagaagctacaatagcagtaaatatccttgatgatacagttccagaaaaagaagaatccttcaaagttcaacttaaaaatcccaaaggaggagcagagattggcattaatgattctgtaacaataaccattctgtctaatgatgatgcctatggaattgttgcatttgctcagaattcattatataagcaagtggaagaaatggagcaagatagcctagtaaccttgaacgttgaacgcttaaaaggaacatatggccgtataaccatagcatgggaagctgatggaagtattagtgatatatttcctacctcaggagtgattttatttactgaaggccaggtactgtcaacaatcactctaactattcttgctgataatataccagagttatcagaggttgtgattgtaaccctcacccgtatcaccacagaaggggttgaggactcatacaaaggtgctactattgatcaggacagaagcaagtctgttataacaactttgcccaatgactcaccttttggcttggtgggctggcgtgctgcgtctgtcttcattagagtagcagagcctaaagaaaacaccaccactcttcagttacaaatagctcgagataaaggactacttggggatattgccattcacttgagagctcaacccaatttcttactgcatgtcgataatcaagctactgagaatgaagattatgtattgcaagaaacaataataataatgaaagaaaacataaaagaagctcatgccgaagtttccattttgccggatgaccttcctgaattggaggaaggatttattgtcactatcactgaggtgaacctggtgaactctgacttctctacaggacagccaagtgtgcggaggcccggaatggaaatagctgagataatgatagaagaaaatgacgatcccagaggaatttttatgtttcatgttactagaggcgctggggaagttattactgcctatgaggtgcctccacccttgaacgttcttcaagttcctgtagtccggctggctggaagctttggggcagtaaatgtttattggaaagcatcaccagacagtgctggcctggaagactttaaaccatctcatgggattcttgaatttgcagataaacaggttactgcaatgatagaaatcaccataattgatgatgctgaatttgaattgacagagacgttcaatatttccttgatcagtgttgctggaggtggcagacttggtgatgatgttgtggtaactgttgttattccacaaaatgattctccatttggagtatttggatttgaagaaaagactgtaatgattgatgaatccctttcatccgatgaccctgattcatatgtgacattgacggttgtccggtccccaggaggaaaaggaaccgtccgacttgagtggaccatagatgagaaggctaaacataaccttagtcctttgaatgggacccttcattttgatgagactgagtcccagaagaccattgtgttgcacacacttcaagacacagtgttggaggaggacaggcgtttcaccattcagctgatatcaattgatgaggtagaaatatctccagtaaaaggtagtgcatcaataattattcggggtgataagcgagcatcaggagaagttgggatagctccgtcatctaggcacatcctcattggggaaccctcagcaaaatataatggtaccgctattatcagccttgttcgaggcccagggattttgggggaggtcacagtgttctggaggatattccctccttccgtgggggaatttgctgaaacatcaggaaaactgacaatgcgagacgaacagtctgcagtcattgtagtaatacaggctttgaacgatgacattcccgaggaaaaaagcttctatgagtttcagctcactgcagtcagtgagggaggagttctgagtgaatccagcagcactgccaacatcacggtggtggccagcgactctccctatggccgatttgccttttcacatgagcaacttcgagtgtcagaagcacagagggttaacatcacaatcatccgttccagtggagattttggccatgtgcgactctggtacaagacgatgagcgggacagcggaagcaggcttggattttgttcctgcagcaggggagctcctctttgaagcaggggagatgaggaaaagtctgcatgttgaaatccttgatgatgactatcctgaaggcccagaggaattttctctaacaattacaaaggtggaactccagggaagagggtatgattttaccattcaagaaaatggacttcagatagatcaacctcctgaaataggaaacatctccattgttcgcatcataataatgaaaaatgataacgcagaaggcatcattgaatttgacccaaagtatactgccttcgaagtggaggaagatgttgggctgatcatgatcccagtggtgaggctacatggaacttatggctatgtgacagctgatttcatctctcagagctcctctgccagtcccggaggtgttgattacattttgcatggcagtacagtcacctttcagcatgggcaaaacttaagttttataaatatctccatcattgatgacaatgaaagtgaatttgaggagcccattgaaattctactcactggagctactggaggagcggtccttgggcgccacctagtgagcagaatcataatagctaagagtgactctccctttggagttataaggtttctcaatcaaagcaaaatttctattgctaatcccaattccacaatgattttatcactggtgctggagcggactggaggactcttgggagagattcaggtgaactgggagacagtaggacccaactctcaagaagccttactgccacagaatagagacattgcagacccagtgagcgggttgttctattttggagaaggagaaggaggagtgagaaccataattctgacaatctatcctcatgaagaaattgaagttgaagagacattcattattaaacttcatcttgtgaaaggagaagctaaattagactccagagctaaagatgttacattaaccatacaagagtttggtgacccaaatggagttgttcagtttgctcctgaaactttgtctaagaagacttattcagagcctctggctctggaagggcccctgctcattaccttctttgtcagaagagtcaagggcacctttggagagattatggtttactgggaattaagtagtgagtttgacattactgaagactttctttccaccagtggatttttcaccattgctgatggagagagtgaagctagctttgatgttcatttgctaccagatgaggtacctgagatagaggaagattatgtgatccagcttgtttctgtagagggaggagccgaactggatctggagaagagtatcacatggttctctgtttatgcaaatgatgacccacatggagtatttgccctgtattcggatcgccagtcaatacttattgggcagaaccttattagatccatccaaattaacataacccggcttgctggaacatttggagatgtggctgttgggcttcgaatatcatcggatcataaagaacagccgattgttaccgaaaatgcagagaggcagctggtggtcaaagatggtgccacatataaagtggacgtggtgccaataaagaatcaggtcttcctatcactgggctctaatttcactttgcaactggtgactgtgatgcttgtcggtggacgtttctatggaatgccaacaattcttcaggaagcaaaatctgctgtccttccagtctctgagaaagctgccaattctcaggtcggatttgaatccactgcttttcaactcatgaacatcactgctggcacaagccacgttatgatttctaggagaggcacatatggagctctctcggttgcctggaccactggatatgctcctgggttagaaattcctgaattcattgttgttggcaacatgaccccaacactggggagcctttcattttcccacggtgaacaaaggaaaggagttttcctgtggacgtttcctagccctggttggccagaggcctttgttcttcacctatcaggagtgcagagcagtgctcctggcggagctcaactccgatcaggtttcattgttgctgaaattgaaccaatgggcgtcttccaattttccactagctcaagaaatatcatagtgtcagaagatacacagatgatcagattacatgtacaaagactatttgggttccacagcgatcttattaaagtttcttatcagaccactgcaggaagcgccaagccactggaagattttgagcctgttcagaatggggaactgttttttcaaaaattccaaactgaggttgattttgaaataaccattattaatgatcagctttctgagatagaagaatttttttacattaaccttacttcagtagaaattaggggattacaaaagtttgatgttaattggagcccacgcctgaatctagatttcagtgttgcagtgattacaatattggataatgatgacctggcaggaatggatatttccttccccgagacaactgtggctgtagcagttgacacaactctcattcctgtagaaactgaatccaccacatacctcagcacaagcaagacgactaccattctgcagccaaccaacgtggttgccattgttactgaggcaactggtgtatctgccatccctgagaaacttgtcacccttcatggcacacctgctgtgtctgaaaagcctgatgtggccactgtaactgccaatgtttccattcatggaacattcagccttgggccatccattgtttatattgaagaggagatgaagaatggcacattcaacactgcagaagttcttatccgaagaactggtgggtttactggcaatgtcagcataacagttaaaactttcggtgaaagatgtgctcagatggaaccaaatgcattgccctttcgtggtatctatgggatttccaacctaacatgggcagttgaagaagaagactttgaagaacaaactcttacccttatattcctagatggagaaagagaacgtaaagtatcagttcaaattttggatgatgatgagcctgaggggcaggaattcttctacgtgtttctcacaaaccctcaagggggagcacagattgtggaggagaaggatgatactggatttgcagcttttgccatggttattattacagggagtgaccttcacaatggcatcataggattcagtgaggagtcccagagtggactagaactcagggaaggagctgttatgagaagattgcaccttattgtcacaagacagccaaacagggcctttgaagatgtcaaggtcttttggcgagtcacacttaacaaaacagtcgtcgtgctccagaaggatggggtaaacctggtggaggaacttcagtctgtgtcagggaccacaacctgtacaatgggtcaaacaaaatgctttatcagcattgaactcaaaccagaaaaggtaccacaggttgaagtgtatttttttgtggaactatatgaagctactgctggagcagcaataaacaacagtgccagattcgcacagattaaaatcttagaaagtgatgaatctcaaagccttgtgtatttttctgtgggttctcggctggcagtggctcacaagaaggccactttaatcagtctgcaggtggccagagattctgggacaggactaatgatgtctgttaactttagtacccaggagttgaggagtgctgaaacaattggtcgtaccatcatatctccagctatttctggaaaggattttgtgataactgaaggcacattggtctttgaacctggccagagaagcactgtattggatgtcatcctaacgccagagacaggatctttaaattcatttcctaaacgcttccagattgtcctttttgacccaaaaggtggtgccagaattgataaagtgtatgggactgccaacatcactcttgtctcagatgcagattcgcaggccatttgggggcttgcagatcagctacatcagcctgtgaatgatgatattctcaacagagtgctccataccatcagcatgaaagtggccacagaaaacacagatgaacaactcagtgccatgatgcatttaatagaaaagataactactgaaggaaaaattcaagctttcagtgttgccagccgaactcttttctatgagattctttgttctcttattaacccaaagcgcaaggacactaggggattcagtcactttgctgaagtgactgagaattttgccttttctctgctgactaatgttacttgcggctctcctggtgaaaaaagcaaaaccatccttgatagttgcccatatttgtcaatattggctcttcactggtatcctcagcaaatcaatggacacaagtttgaaggaaaggaaggagattacattcgaattccagagaggctactggatgtccaggatgcagaaataatggctgggaaaagtacatgtaaattagtccagtttacagagtatagcagccaacagtggtttataagtggaaacaatcttcctaccctaaaaaataaggtattatctttgagtgtgaaaggtcagagttcacaactcctgactaatgacaatgaggttctctacaggatttatgctgctgagcctagaattattcctcagacatctctgtgtctcctttggaatcaggctgctgcaagctggttgtctgacagtcagttttgcaaagtggttgaggaaactgcagactatgtggaatgtgcctgttcacacatgtctgtgtatgctgtctatgctcggactgacaacttgtcttcatacaatgaagccttcttcacttctggatttatatgtatctcaggtctttgcttggctgttctttcccatatcttctgtgccaggtactccatgtttgcagctaaacttctgactcacatgatggcagccagcttaggtacacagattctgtttctggcgtctgcatacgcaagtccccaactcgctgaggagagctgttcagctatggctgctgtcacacattacctgtatctttgccagtttagctggatgctcattcagtctgtgaatttctggtacgtgctggtgatgaatgatgagcacacagagaggcgatatctgctgtttttccttctgagttggggactaccagcttttgtggtgattctcctcatagttattttgaaaggaatctatcatcagagcatgtcacagatctatggactcattcatggtgacctgtgttttattccaaacgtctatgctgctttgttcactgcagctcttgttcctttgacgtgcctcgtggtggtgttcgtggtgttcatccatgcctaccaggtgaagccacagtggaaagcatatgatgatgtcttcagaggaaggacaaatgctgcagaaattccactgattttatatctctttgctctgatttccgtgacatggctttggggaggactacacatggcctacagacacttctggatgttggttctctttgtcattttcaacagtctgcagggactttatgttttcatggtttatttcattttacacaaccaaatgtgttgccctatgaaggccagttacactgtggaaatgaatgggcatcctggacccagcacagcctttttcacgcccgggagtggaatgcctcctgctggaggggaaatcagcaagtccacccagaatctcatcggtgctatggaggaggtgccacctgactgggagagagcatccttccaacagggcagtcaggccagccctgatttaaagccaagtccacaaaatggagccacgttcccgtcctctggaggatatggccaggggtcactgatagccgatgaggagtcccaggagtttgatgatttaatatttgcattaaaaactggtgctggtctcagtgtcagtgataatgaatctggtcaaggcagccaggaggggggcaccttgactgactcccagatcgtggagctcaggaggatacccatcgccgacactcacctgtagcacctcactaaccattcgactgagcacactttcatatttgtatcagcttttgtgctaaaactctctaagtacatccacctgtgtaataggaacctgtgaattgtactggatgattaatacaaacgtgattgttgtatttggagtataaattactgattgtatgtgacctgaaaattcactgctataagaaaggtggagtcagtttgtatcagttaataggatgttcatattccaaggatattagttgtttttttaatcatcctatatggctaacattgtttaatgaaagtaataatcaataaagcaatagaatctatttgg

SEQ ID NO: 222906 - DNA, 18921 bp, Artificial Sequence
  derived and/or modified sequence
atggatatcttcctggtgttggggatgcccagtgcatcactcttagtgaacctgctttcggccctgctgatccttttcgtgttcggggaaaccgaaatccgattcacaggccagacagagttcgtggtaaacgagacatccactactgtgattcgcttaattatagaaagaatcggggaacccgcaaacgtaactgccatcgtgtcgctgtatggggaagacgccggagatttttttgatacatatgccgcagcctttatccctgcaggggagaccaataggactgtctacatagccgtttgtgatgacgatttacccgaaccagacgagacctttatctttcacctgacactgcagaagccgtctgcgaatgtcaaactggggtggccccggacagtgacagtaactatcctctccaacgataacgcctttggaatcatctctttcaacatgctgccatctatcgctgtgtccgagcccaaggggagaaacgagtctatgcccttgacacttatacgagagaaaggtacatacgggatggtcatggtgactttcgaggtggagggcggacctaatccaccagacgaagatctgtcccctgtgaagggaaacataacctttccaccaggcagagctacagtcatatataacttaactgtcttagatgatgaagtgcctgaaaatgacgagatcttcttgatacagctcaagagcgttgaaggcggtgccgagatcaacaccagccgtaacagcattgaaatcatcatcaagaaaaacgattcgccagtgcgattcctacagtctatatatctcgtgcccgaagaggatcacatactgattatccctgtggttcgcggaaaggataataatggaaacttaattggatcagacgaatatgaagtgagcattagctacgccgtgactaccggcaattctactgcccatgcccagcagaacctggacttcatcgaccttcaacctaataccactgttgtgttccctccattcatccatgaatcccatctgaagtttcagatcgttgacgacacaattccggaaattgctgaatcatttcatataatgttgctgaaagatactctgcaaggcgatgccgtgttgatcagtccgtcagtggttcaggtgacaataaagccgaatgacaaaccatacggtgtgctctcttttaatagcgtgctttttgagcgcactgtcatcattgacgaagaccgcattagccgttatgaggaaataacagtggtacggaatggtggcacccacgggaacgtttccgcaaactgggtgttgacgcgaaattcaaccgacccgtcacctgtgacggcagacattcgcccatcctctggggtgctgcactttgcccagggacagatgttggcaaccattcccctcactgtcgtggatgacgaccttcctgaggaggccgaagcataccttttacagatcctgccacataccatccgcggaggggctgaagtgtccgaaccggccgagctgctgttctatatccaggatagtgacgatgtttacggactcataaccttttttcccatggagaaccagaagatcgagagttcacctggggagaggtacttatctttgtccttcaccagactcggaggtactaagggtgacgtaaggctgctctattccgttttatacattcccgcaggagctgtggatccccttcaggctaaggagggtatcctgaacataagtagaagaaatgatctgatctttccagagcagaagacgcaggtcacgaccaagctgcctattcgcaatgatgccttcctccagaacggagcccacttcttagtgcagcttgagactgtcgaactgctgaacatcatcccgctcatccctcccatctctcccagattcggcgaaatctgtaacattagcttactagtcacgcccgctatcgccaatggagagatcgggtttttaagcaacctgcccattatcctgcatgaacctgaagattttgccgccgaggtagtgtatatacctcttcaccgcgacggaacggacggccaggcaacagtgtactggagtctgaagccatctggcttcaactctaaagccgtgacaccggacgatatcggaccctttaatggctctgtgctcttcctctccgggcagtctgacactaccataaacattaccatcaagggcgacgacattccagaaatgaacgagactgtgaccctctcattggaccgagtgaatgtcgagaatcaggttctcaagagtgggtatacatctagggatctaatcattttagagaatgatgacccaggcggagtgttcgagttttcacctgcctctcgcggtccttacgtgataaaggagggggagtcggtggagctgcacattatccgatctagagggagcctggttaaacaatttctgcactacagggtcgaacccagagattcaaatgagttttacggaaatactggtgtactcgagtttaagcctggggagagagaaatagtaatcacactactggcccgcctcgacggaattcccgaactggacgagcactattgggtcgttctttcatcacatggggagcgggagagtaaactcgggtctgcgaccattgtgaacatcacaatactcaagaacgatgatccgcacggcatcatcgagtttgtgtcagacgggttgatagtgatgattaatgaatccaaaggtgacgccatctatagcgcagtatacgatgttgtccggaaccggggtaatttcggagacgtgagcgtatcatgggttgtgagtcctgacttcactcaggatgtgtttcccgtgcagggaactgtggtgttcggagatcaggaattctccaaaaatattactatctattccttgcctgacgagatccctgaggagatggaagaatttacggtcattctcctgaatggaacaggaggcgctaaggtgggcaaccggactacagccacccttcggatccgacggaacgacgaccccatctatttcgccgaacctcgggtcgtgcgcgtgcaggaaggcgagactgccaacttcacagtgttgaggaacggcagtgtggatgtcacctgtatggttcagtacgcaacaaaagacggcaaggccactgccagagaaagggatttcatacctgtggagaagggcgagacactcatcttcgaagttggaagtagacaacaaagcatctccatcttcgttaatgaagatggtattcctgagaccgacgaacccttctacatcatcctgctaaatagcaccggggacaccgtggtctaccagtacggtgttgccaccgttattatcgaggcaaacgacgatcccaatggcatattttcactcgagccaattgataaagccgtggaggaagggaaaacgaatgctttctggatactccgccaccgggggtattttggctccgttagcgtgagttggcagctatttcagaacgactccgctctgcagcctggacaggagttttacgagacctccggcaccgttaattttatggacggcgaggaagcaaagcctatcatactgcacgcttttccggataaaattcccgaattcaatgagttttactttttgaagcttgtgaatatctcaggcggctctcctggacccgggggacagctcgctgagaccaatctccaggtgacggtcatggtccccttcaatgacgacccttttggcgttttcattcttgaccctgagtgcctcgagagggaggtggctgaagatgtgctgagcgaggacgacatgtcatatatcacaaacttcacaatcctgcggcagcagggcgtgttcggcgacgtgcagctggggtgggaaattcttagctcagaatttcctgcaggcttgcctcctatgattgacttccttctagtgggaatcttccctaccaccgtccatctgcaacagcacatgaggagacaccatagcggcaccgacgcactttactttaccggtcttgagggggctttcggcacagtaaatccaaaatatcacccatcacgcaacaataccattgccaattttaccttttcggcatgggtgatgccaaatgccaataccaatgggtttattattgccaaagacgacggcaacggatctatttactacggcgtcaagatccaaacgaacgaaagtcacgtgactttgtccctgcattacaagacactaggctccaacgccacttacatcgccaaaactacagtcatgaagtacttggaagaatccgtttggctgcatttactgattatcctggaggatggaataattgagttctacctggacggtaatgctatgcccagggggataaaatctttgaaaggcgaagcaattacagacggcccgggaatcctgcgcattggcgctggtatcaacggcaacgacaggttcacaggtttgatgcaggacgtgagatcctatgagcgtaagctcaccctggaggagatatatgagttacatgccatgccagctaagagcgacctccatcctataagtggatatctggaattcaggcagggggagacgaataagtccttcattatttctgccagggacgataacgacgaggaaggggaagagctgttcattttaaagttagtctcagtttacggaggagctcgcatctcggaagaaaacacaaccgcccggctaaccattcaaaagtccgacaacgctaacgggctgttcggcttcaccggcgcttgcatccccgagatcgccgaagagggctcaaccataagctgcgttgtcgagaggactaggggcgctctcgactacgtgcatgtgttctataccatcagtcagatagagacggacggaattaattacttggtcgatgactttgctaacgcttcggggacaattacctttctcccttggcaacggtcagaagtgctgaatatctacgtcctggatgatgatatcccggagctcaacgagtatttccgagtaaccttagtgagtgctatccctggcgacggaaagctgggttctaccccaacctccggagccagcatagaccccgaaaaggagactacggatattacaatcaaagccagcgatcatccatacggcttgctgcagttctccaccggcctgccaccgcaaccgaaggacgccatgacactgcccgcatcctcagtgccccatatcacagtagaagaggaggacggggagatcagactcctagtgatccgcgcccagggactgttgggcagagtgacggctgagtttagaaccgtttcactgacagcgttttcccccgaagactatcaaaacgtggcaggcacactggaatttcaaccaggggagcgctataagtacatatttatcaacatcaccgacaattccatcccagaactggaaaagtcattcaaggtcgagctccttaacctcgaaggtggtgtagcggagctctttagggttgacggatcaggttctggagatggggacatggagttcttcttacccactatccataaacgggccagcctcggagtggcttcccaaatcttagtgacaatcgcagcctccgaccacgcccacggggtgtttgagttttctccagagtctttgtttgtctccggtactgaacccgaggacggctattccactgtgaccttgaatgttataagacaccacgggaccctgtcccctgtcacgctccactggaatatcgactctgacccagacggcgaccttgcattcacttctggcaacatcactttcgaaatcgggcagacatccgcgaatataactgtcgaaatcctgcccgatgaagatcctgagctagataaagcattctcagtctcagtgttgagcgtctcaagtgggtctttgggagcccacatcaacgcaacactgacagtgcttgcttctgatgatccctacggaatttttatcttctctgagaaaaacagaccagttaaagttgaagaggctacgcaaaatattacactgtccatcataagattaaagggcttaatgggcaaagtgcttgtgagctacgcaactctagacgacatggaaaaacctccctactttcccccaaatctcgccagagcaacccagggtcgcgactacattccggcatcaggcttcgccctatttggagcaaatcagtccgaagcgacaattgcgatctctatcttggacgacgatgagccagaaagatcagagagtgtgtttatcgagctgctaaattcgactctggtggccaaggtgcagtctcgatccattcccaacagtccaaggttaggccctaaagtggagacaatcgcacaacttattatcattgccaatgatgatgcctttggcacgcttcagctgagcgcccccatcgtgagagtcgccgagaaccacgtgggccctatcatcaacgttacacgcactggcggagcattcgcagacgtgtcagtgaagttcaaggcagtccctattactgcaattgctggggaggattactctatagccagttctgatgttgttctgctggaaggggagacttcaaaagctgttccaatctacgtcatcaatgacatataccccgagttggaggagtccttcttggtgcaattaatgaatgaaaccactggaggagccagactcggggcgcttactgaggctgtcattatcattgaggcttcagacgatccctatggactattcgggtttcagattactaaacttatcgtagaggagcccgaatttaacagcgttaaggtgaatcttcctattatcagaaactctgggacgctgggaaacgttactgtgcagtgggtggccacaatcaatggacaacttgctaccggggacttaagagtcgtgtcgggtaacgtaaccttcgccccaggagagaccatccaaaccttgctgcttgaagtactggcagatgacgtgccagagatcgaggaggtcatccaggttcagctgacagacgcctccggaggcggaactatcggactggatagaatcgccaacatcattatccctgcaaatgacgatccctacgggaccgtggccttcgcccagatggtgtacagggttcaagagccattggaacgatctagctgtgctaatattacggtgagacggtcagggggtcattttggcaggctgctgctcttctactccaccagtgacatcgacgtcgtcgctctcgctatggaggagggacaagatctcctgtcatactatgagtctccaatacaaggcgtacccgacccattgtggcgtacttggatgaacgtttctgccgtcggcgagcccctgtatacatgtgcaacgctgtgtctcaaggagcaggcctgttcggccttcagctttttttctgcttctgaggggccgcagtgcttctggatgacatcctggatttcaccagcagtaaacaactctgatttctggacatatcgtaagaatatgacacgcgtcgccagtttattctcggggcaggctgtcgccggttcagattatgaacctgtgaccagacagtgggcgatcatgcaggagggcgatgaatttgctaacttgactgttagtattttgccagacgacttccccgaaatggacgagagctttttgatttccctgctggaagtgcacctgatgaatatctccgcctcacttaaaaatcagccaacgatcgggcagcccaacatttccactgtggtcatcgctctgaacggcgacgcattcggggtgtttgtgatttacaatattagcccaaatacctctgaagacggactgtttgttgaagtgcaggagcagccacagactcttgtagagttgatgatacacaggaccggcggctccctgggccaggttgcagttgagtggagagtggtgggtggcacagctaccgaaggactggattttatcggtgctggcgaaatcctcacttttgctgaaggcgagacaaaaaaaacagtaattctaaccattctggatgatagtgagcccgaagacgatgagtctatcattgtatcactcgtctatacagaaggaggatctcgtatcttaccatcgtctgacacggtgcgtgtgaatattctggccaacgacaatgtggccggcatcgtgagctttcaaacagcctctcgctccgtgatcggacatgaaggtgagatactgcaatttcacgtgatcagaacctttcctggaagaggcaacgtaactgtcaattggaagattattgggcagaatctggaattgaatttcgcaaactttagtggccagctcttctttcctgaaggctccctcaacactacgctatttgtccatctattggatgacaacattcctgaagaaaaagaggtctaccaggtcatactgtacgatgtccggacgcagggcgtgccccctgctgggatcgctctgctagacgcccagggatacgcagcagtattgactgtggaagcaagcgacgaaccccatggagtgttgaattttgccctttcaagtaggttcgtcttgcttcaggaagccaacattacgattcagttattcattaatcgggaatttggctctttaggagcaatcaatgtcacatacactaccgtgcctggtatgctgtcactgaaaaatcagactgtcggtaacctcgcagagcccgaggtggacttcgtcccaatcatcggatttctgatactggaggagggtgagaccgctgccgcgatcaacatcacaattctcgaggatgacgtgccagagctggaagaatattttctcgtcaacctcacgtatgtgggcctgacaatggccgccagtaccagcttcccccccagactcgatagtgagggactgacagcccaagtgatcattgacgccaacgacggggcgcgcggcgttatagaatggcaacagtctcggttcgaggttaatgagactcacggatcactgaccctggtcgctcagagaagtcgagagccactgggccatgtcagcctgtttgtgtacgctcagaatttagaagcccaggtaggactcgattatatttttacgcccatgatccttcattttgctgacggagaacggtacaagaacgtgaacataatgattcttgatgatgatattccagaaggtgacgagaaattccagctcatccttaccaacccgtccccaggcctggaactggggaagaacactatcgccctgatcattgtgctggcaaacgatgatggaccaggagtgctcagcttcaacaattccgagcacttttttcttagagagcctaccgctttgtatgtccaggaatctgttgctgtgttgtatattgtcagggagcccgctcagggactcttcggaactgttacggtgcagtttatcgtcaccgaggttaactcttcaaatgagagcaaagacttgactccatcaaaaggctatatcgtgttagaggaaggggtgaggttcaaagcattgcagatcagcgctattctggacacagaacccgagatggacgagtattttgtctgcaccttgttcaatccaactgggggggccaggcttggcgtccacgtacaaaccctgataacagttctgcaaaatcaggcaccgctgggtctctttagtattagcgcagtggaaaacagagcgacatcaatagacatcgaggaagcaaataggaccgtttatctgaatgtcagcaggacaaatggaattgaccttgcagtatccgtgcagtgggaaactgtgtccgagacagcgtttggcatgcgaggaatggacgtcgtgtttagtgtgtttcaatccttcttagatgagtctgcttcgggctggtgcttctttacacttgaaaacctcatctacggcatcatgctacgcaaatccagtgtgactgtgtatcgctggcaaggaatctttatccccgttgaggacctgaatatcgagaaccctaaaacgtgcgaagcttttaatattggttttagtccatacttcgttattactcacgaagagagaaacgaggaaaaaccttcccttaacagcgtgtttacctttacctctggtttcaaactgttcctggtgcagactatcattatccttgaaagctctcaggtacggtactttactagtgactcacaggattatctgatcattgcctcccagcgggatgactccgaactgacacaggtatttcgatggaacggaggaagctttgttttgcatcagaaactccccgttaggggagtcctaacagtagccctgttcaacaaaggcggatctgtattccttgccatatcacaagccaatgcacggcttaattctcttctgtttaggtggtctggatcgggctttattaatttccaagaagtgccagtgtccggaactaccgaggtggaagccctgagctcagctaacgacatttatctaatcttcgccgagaacgtgttcctgggcgatcagaatagtattgatatctttatatgggaaatgggccagtcctcattccgttacttccagtcggttgatttcgctgcagtcaataggatccactcattcacacccgccagtgggatcgctcacatcctgctcatcggtcaagatatgagcgccctatactgttggaattcagaaagaaaccagttttcgttcgtgctggaagtccctagtgcttacgatgtagcatctgttaccgtcaagtcgctgaattcctccaagaacctgattgccctcgtgggcgctcattctcacatttacgaactcgcgtatattagtagccatagcgacttcatccccagttccggagaacttattttcgaaccaggggagagggaggccactatcgccgtgaatatcctcgatgatacggtgcctgagaaggaagagagttttaaggtacagcttaaaaacccgaaggggggtgccgagatagggattaacgacagtgtgacaattaccattctgagtaacgacgatgcatacgggatcgtggctttcgcacaaaatagtctttataagcaggtggaggagatggaacaggattcactcgttaccctgaatgttgaaagactgaaaggcacgtacggacggatcactattgcctgggaggcggatggatcaatctccgatattttcccaacatcaggagtgattctgttcaccgagggtcaggtgttatccaccataacgctgacgatcctggcagacaacattcctgagctgtcagaggtggttatagttaccctcactcggatcaccaccgaaggggtggaagattcctacaaaggtgccactattgaccaagaccgctccaagtcagtcataacaacactgccgaacgacagtccattcggacttgttggctggcgagcagcgagtgtgtttattcgcgtggcagaaccgaaggaaaataccacaactctccagttgcaaattgctagagacaaaggactcctcggcgacattgccatccacttaagggctcaacccaattttctgctccacgtcgataaccaggcgacagagaacgaggattacgtgctacaggagactattattatcatgaaggaaaacattaaggaagcacatgccgaggtgtcaattctgcccgatgacttgccagagctggaggaaggcttcatcgtaactatcaccgaggtgaatctggtaaacagcgatttcagcacggggcagccttctgttcggcgccctggcatggagattgctgagattatgattgaagaaaatgacgatcctcgcggaatttttatgttccacgtaacgcggggggccggagaggtcattacagcctatgaagttcctcccccccttaatgtgctccaggttcctgttgtacgcctcgccggatcatttggcgccgtgaatgtctactggaaggcaagccctgactcagccggtctggaagacttcaagccatcacacgggattctggagttcgccgataagcaggtgacagcaatgattgagatcaccataatcgatgacgccgagtttgagctaactgaaacatttaatatctccttgatatctgttgctggcggagggaggctgggtgacgacgttgtcgtgaccgtggtaatccctcagaacgatagtccttttggcgttttcgggtttgaggaaaaaactgtcatgattgatgaatcactcagttctgacgatccggattcctacgtaacgctaactgtggttcgatcacccggaggtaagggcacggtgcgtctggagtggactattgatgaaaaggcaaaacacaacctgtctccgctgaatggtaccttacattttgacgagacagaatctcagaaaaccattgtccttcatacccttcaggacaccgtgttggaggaggatcgcaggttcaccatccagctcatcagtattgatgaggtcgaaatctctcccgtcaaggggtcagcctccatcattatacgcggggacaaacgggcaagtggagaagttggcatcgcccctagcagccggcatatcctgataggagagccctccgctaagtacaacgggacagcaatcatttcattagtgagaggacccgggattctcggtgaggttacagtcttctggcgaattttcccaccttctgtcggagagttcgccgagaccagcggaaagctaacgatgcgcgatgagcagagcgccgtgatcgttgttattcaggcactgaacgatgacatcccagaggagaagtctttttatgagtttcagctgactgctgtgagcgaaggcggcgtgctgtccgaaagtagtagcaccgccaatattacagtagtggcgtccgacagtccttacgggcgcttcgcattctctcacgagcagttgagggtgtctgaagctcaacgggtcaatattacaatcatccgctcttcaggggacttcgggcacgttagactgtggtacaagaccatgtcaggcactgctgaagccggtcttgattttgtccccgccgccggtgagcttttattcgaggctggcgagatgagaaagagtctccatgtcgaaatcctcgacgacgactacccagagggccccgaggaatttagtcttacgattaccaaagttgaactccaggggagagggtatgatttcactattcaggagaacggcctgcagatcgatcagcccccagaaatcggcaacatcagcatcgtgagaatcatcattatgaagaatgacaacgctgagggaataatagagttcgatccgaagtataccgcatttgaggtggaggaggatgttgggttgatcatgatccctgtggtcagacttcacgggacctacggctatgtcaccgccgatttcatcagtcagagctcctccgccagccctggaggggtggattacatccttcatgggtccacagtgactttccagcatggtcaaaacctatccttcatcaacatttccatcattgacgataatgagtccgagtttgaggaacccatcgagattctcttaacgggggcaaccgggggagctgtgcttgggcgccacctggtgtcacgaattataatagccaagagcgactctcctttcggcgtgatccgttttttgaaccagtcaaagatctccattgccaaccctaactcaactatgatcctttccttggtgttggagcggactggcggccttctcggtgaaattcaggttaactgggagaccgtagggcctaacagccaggaggcattgctgccacagaatagggatatcgcagatcctgtttccggcctcttctatttcggtgagggagaaggcggcgtaaggactattattttgaccatttacccacacgaggaaattgaagtggaggaaacatttatcattaagctgcacctcgtcaagggcgaagcaaagctggatagcagagctaaggatgtgacgttaaccatccaggaattcggggaccctaatggcgtcgtccaatttgccccagagacactatctaaaaagacctattctgagccattggccctcgagggccctctcttaattactttttttgtaagacgggtgaagggcacctttggggagatcatggtgtattgggaattgtcctccgaattcgatattactgaagactttctgtcaacatcaggttttttcactatcgcagatggtgaatccgaggcatccttcgacgtacacttgttaccagatgaggtcccagaaattgaggaagactatgtcattcaactagtgagcgtggaagggggcgctgagctagacctcgagaagtctattacctggttctccgtgtatgcgaatgacgatccccatggcgtgttcgcattgtactccgatcggcaaagtatcttgataggacagaacttaatcaggtcaattcagatcaatataacacgattagccggcaccttcggtgacgttgccgtaggattacggatctcctctgatcacaaggaacaacccatcgtgaccgaaaacgcagaaaggcagcttgtcgttaaggatggggccacatataaggtcgacgtggtgcctattaagaaccaggtcttcctgagcctgggctcaaacttcacactgcaactcgtgactgttatgctggtgggaggtcgcttttacgggatgcctaccatcttacaggaagcaaagtctgctgtgctgcctgttagtgaaaaagctgctaatagccaggttggtttcgagtcaaccgctttccagttgatgaatatcacggccgggacgtcccatgttatgatttcccgacgggggacttatggcgctctgtccgttgcctggaccaccggctacgcacccgggcttgagattcctgagttcatcgttgtgggaaacatgacgcccacactcggcagcctatcattctcccacggtgagcagcggaagggggtgttcctctggacttttccctctccagggtggccagaggccttcgtccttcatttgtcaggtgttcaatcctcggctcccggcggggctcagctccggtcaggcttcatagtggccgagatcgagccaatgggtgtgtttcagttcagcaccagctctcgaaatatcatcgtgagtgaggacacccagatgatccgactgcatgtgcagcgacttttcggatttcacagtgacctgatcaaggtcagctatcagacgaccgcgggcagtgctaaacccctggaggacttcgaaccagttcagaacggcgaactattttttcaaaagtttcaaacggaggtggattttgagatcactatcattaacgaccagctcagtgaaatagaggaatttttttacatcaatctgacgagtgtggagattcggggtttgcagaagttcgacgtaaattggtcccctcggctcaatctggactttagtgtagcagtgatcacaatcttagacaacgacgatctggccggaatggatatctcctttccagagactaccgtcgcagtcgccgttgacaccactctgattcccgttgaaactgaatctacgacatatctgtccacatctaagactaccacgatcctgcagcctaccaacgttgttgccatcgtcaccgaggccacaggagtttcagctatccctgagaaactggtcaccttacacgggacccctgccgtgtcagagaagcctgacgtggccaccgtaacagctaatgtgtctatccatggaactttctcactgggacccagcatcgtgtacattgaagaagagatgaagaacggcaccttcaatacagctgaagttctgattagacgcacggggggatttactggaaatgtatcaatcacagttaaaacatttggggagcggtgtgctcagatggaaccaaacgccttacctttcagaggaatctacggtatttcgaatttgacctgggccgtagaagaagaagacttcgaagagcaaactctcacgcttatcttcctggatggagaacgcgagagaaaggtaagtgtgcaaatcctggacgacgacgaacccgaaggccaggaattcttttacgtctttctgaccaatccccaaggcggggcgcagatcgtggaggaaaaggatgacaccggattcgcagccttcgccatggtgattatcactggatcagatctgcacaacggaataatcggattttcagaggagtcacaatcaggactggaactgcgggagggcgctgtgatgcgccgcctgcacctcattgtgacccgacaacccaatagggcgtttgaggatgtcaaagtgttctggcgagtcacgctaaacaagactgtggtggtgcttcagaaagacggcgtcaacctcgtcgaagaactccagtccgtttcagggactaccacctgcaccatggggcaaaccaaatgttttatctcaatagaacttaaacccgagaaagtcccccaggtggaggtctatttcttcgtggaactgtatgaggcaaccgccggcgcagcaatcaacaacagtgcacgctttgcgcagatcaaaatcctggagagcgatgaatcccagagcttggtttacttcagcgtgggctctcgtctagctgtcgcccacaagaaggccactctgatcagcctgcaggttgccagagattccgggacaggcctaatgatgtctgtcaactttagtacccaggagctcagatcggccgaaactattggaagaacaattatcagccccgctatctctgggaaagacttcgtaattacagagggaaccctcgtgttcgagcctggacagagaagcacggtgctggatgtcatactcacaccagaaactggtagcttaaactcattccctaagagattccagatcgtcctgtttgatcctaagggcggcgctcggatcgacaaggtttacggaacagccaatatcactttggtgtcggacgctgattctcaggccatttggggcctcgcagaccagctccaccagcccgtcaacgacgacatactgaatcgcgttctgcatacaattagcatgaaagtagcaaccgagaataccgacgagcaactttccgcaatgatgcaccttattgagaaaattacgaccgagggaaaaatacaggctttctcagtggcttccagaacgttgttttatgagatcctgtgcagccttattaaccctaaaagaaaggatacccggggattttcgcatttcgctgaagtgaccgagaattttgctttcagcttgctcacaaacgtcacgtgcggatctccgggcgaaaaatcaaaaaccatcctggattcttgtccttatctgtcaattctggctctccactggtacccccagcagatcaacgggcataaatttgaaggaaaagaaggggactacatccggatccctgaacgcttgcttgatgtgcaggatgcagagatcatggccggcaaatcaacctgtaagcttgtgcaatttaccgagtattcttctcaacagtggttcatctccggcaacaacctgcctaccctgaagaacaaagtgctgtccctctccgtcaagggacagagttcacaactcttgacaaacgataacgaagtattgtacagaatctatgccgccgagccccggatcatcccacagacgagcctctgtttgttgtggaatcaggctgcggcctcttggttgtccgacagccagttctgcaaggtcgtcgaggagacggccgactatgtggaatgtgcttgtagtcatatgtctgtgtatgctgtttacgcaaggactgataacctgtcctcatataatgaagcattcttcacaagcggtttcatctgcatcagcggactatgtctagcagtgctcagccacattttctgcgccaggtactccatgtttgctgccaaactgctgacacacatgatggccgcaagcttgggaacacagatactatttctggcttccgcttatgcctcacctcagctcgctgaggaatcctgctccgcgatggccgctgtaacccactacctttacctgtgccagttttcatggatgttgatacaaagtgttaatttctggtacgtgctggtaatgaatgacgagcataccgagcgacgctacctgctctttttcctcttgtcatggggtcttcccgcgtttgtcgtgatccttctgatagtgattctgaagggaatttatcatcagagtatgtcccagatctacgggctaattcacggagatttatgcttcatccccaatgtctacgccgcgctgtttacggcagcgcttgtccccctgacatgccttgtggttgtctttgtggtattcatccacgcttatcaggtgaaaccgcaatggaaggcatacgatgacgtattccgcgggcgcactaacgcagccgaaattccccttatcctttatctcttcgctctaatctccgtgacttggttatggggtggcctccacatggcataccgacatttctggatgttggtcctcttcgtgatatttaacagcctccagggactgtacgtgtttatggtctatttcatcttgcataatcagatgtgctgccctatgaaagcctcctacactgtggagatgaacggacaccctggaccgagcacggcattcttcaccccagggtctggaatgccgccggcgggcggtgaaattagtaaatcaacccagaatctgatcggagctatggaggaggtcccaccagactgggagcgggctagttttcagcaaggctcccaggcatcccccgaccttaaaccatctccccaaaatggagcaactttcccatcctctgggggctatggccaaggatctctgatcgcggatgaggaatcccaggaattcgacgacctcatctttgccctgaaaaccggagcaggcttgtctgtctccgacaacgaatccggtcaggggtctcaagaaggaggaactctgacggactcacaaattgtggaactcaggagaatccccatcgctgatacccacctatag

SEQ ID NO: 222907 - DNA, 18921 bp, Artificial Sequence
  derived and/or modified sequence
atgagtgtttttcttggccccggtatgccctccgcctccctgctggtgaatctgctcagcgctctactaattctcttcgtatttggggaaactgaaattcgctttaccggtcagaccgaattcgtggtgaatgagaccagcactactgttatccgactcatcattgagcgtatcggagagcctgccaatgtcactgcaattgtgtccctgtacggagaggacgcgggggacttctttgacacatacgccgccgcctttattcctgcgggcgaaactaatcggactgtttatattgccgtatgtgatgatgacctacctgaacccgatgaaacatttatttttcacctgactctgcaaaagccaagcgccaatgttaagctggggtggcccagaactgtgaccgtgactattctgtctaacgacaacgctttcggcattattagctttaacatgctgccctcaattgctgtgagcgagccaaaaggtcgcaacgagagcatgccccttacgctcattcgggagaaaggaacctacggtatggtgatggtcaccttcgaagtggaagggggacccaaccctccagatgaagatctgtccccggtgaaaggtaacattaccttccctccggggcgcgccacagttatttacaatttaactgttttagacgatgaggtgcccgaaaatgacgagatctttctaatccaactgaaatccgtggaaggcggagctgagataaacacgtctcggaactctatcgagataattatcaagaaaaatgactctcctgttaggttcttacaatccatctatttggttccggaggaggaccacatcctcatcattcctgtggtgcgcggaaaggataacaatggcaatctcatcggctccgatgaatacgaggtgtcaatttcctacgccgtcactactggcaacagtacagcccatgctcagcagaacctagatttcattgacttacaacccaatactacagtggtttttccccccttcatccacgaatcccatcttaagtttcagatcgtggacgacactataccagagatcgcggaaagttttcacattatgctgctgaaagatacactccagggcgatgccgtgttaattagcccttccgtggtgcaagttacgataaaaccaaatgacaagccctatggggtactgagtttcaattcagtgctgttcgagcggaccgttataatcgacgaagaccggatttctcgctacgaggaaataaccgtggtaagaaacggcggaacgcacgggaacgtcagtgcaaattgggttcttacaaggaactccactgacccttctcctgtcacggccgacattcgacccagctctggcgtgttgcatttcgcgcagggccagatgcttgccacaatccccctgacagtcgtagatgacgacttgcccgaggaagccgaagcatacctgctccagatcctgccccataccatccgtgggggagcagaagtcagcgaacccgctgaattgttattctacatccaagacagtgatgatgtatatgggctgattacatttttccctatggaaaaccagaaaattgaaagcagtccgggggagaggtacttgtccctgagtttcacaaggctcggaggtacaaagggcgacgtcagactgctatattcagttctttatatcccagccggggctgtggaccctctgcaggctaaagaagggattctgaatatctccagaagaaacgacctgatcttccctgaacagaagacccaggttacgacgaagctgccaattagaaacgacgctttcttgcaaaatggtgcgcacttccttgtgcaactggagactgtggaattgctgaatattatccctctaatcccacccatatcccctcgctttggggagatttgcaatatctccctcctggtcactccggccatagctaacggagaaatcggtttccttagtaacctgcctataatcttacacgaaccagaggactttgccgctgaggtcgtgtatatccccctgcaccgcgatggcaccgatggacaggccacagtatactggagcttaaagccgagtggctttaactctaaggccgttaccccagatgatatcggacctttcaatggaagcgttctgttcttgagcggacaaagtgatactacgattaatataacgatcaaaggagacgacattcccgagatgaacgagactgtgaccctgtcactggaccgagtgaatgtggagaatcaggttctcaagtctgggtatacatctcgggatctgatcatcctagaaaatgatgatcctggcggcgtgttcgagttctctccagcttcacgtggaccgtacgtgattaaagagggcgagtccgtagaacttcatatcataagatctcgaggcagcctggtgaagcagttcctgcactacagggtcgagccaagggatagtaatgaattctacggtaacacgggggtcctcgagttcaagcccggagaacgcgagattgtcatcacattgctggctcggcttgacggcataccagaactggacgagcattattgggtggtgctttcatcccacggggagagagaatccaagctaggcagtgcgaccattgtcaacattaccattctaaagaatgacgatccccacggcattattgaattcgtgagcgacggcctgatcgttatgattaacgagtccaaaggcgacgcaatatactccgccgtctatgacgtggtacgcaaccgtgggaacttcggcgatgtcagcgtgtcatgggtggtgtcccccgatttcacccaagacgttttccccgttcagggtaccgtggtgttcggcgatcaagaatttagtaagaatattaccatttattccctgccagacgagatccccgaagaaatggaggagtttactgtcatactcttgaacggtacaggcggggccaaagtcggaaacaggaccacagccactctgagaatcagaaggaatgatgaccccatttactttgccgagcctcgggtggtgcgggtgcaggagggtgagaccgcgaacttcaccgttttacgcaatggttctgttgatgttacttgtatggtgcagtatgctaccaaggatgggaaagccaccgcccgcgagcgggatttcattcctgtggagaagggggagacactgatctttgaggtaggctctcgacagcagagtatttctatttttgtaaatgaggacggaatccctgaaaccgacgagcctttctacatcattctattaaactcaacaggtgacacggtagtctatcaatacggcgtagccactgttattatcgaggctaatgacgatcccaacggcattttcagcctcgagccaattgataaagccgtggaagagggcaagacaaatgcattttggatcttgaggcatagggggtattttgggagcgtgagtgtgtcctggcagctctttcagaacgatagtgcactgcagccaggacaggagttctacgagaccagcggcacagttaactttatggatggagaagaagctaagcctatcatcctgcatgctttcccagataaaatcccggagtttaatgaattctactttttgaagctcgtcaacatctcaggtggatcaccagggcccggtggccagctcgccgagaccaaccttcaggtcacggtgatggttccattcaacgatgatccatttggcgtctttattctggatcccgaatgcctagagagagaagtcgccgaagacgttctctctgaagacgacatgtcctatatcaccaattttacaatcttgcggcagcagggcgtctttggtgacgtgcagttgggctgggaaattttaagctccgaattcccagccggcctgccccctatgatcgatttcctcttggtggggatctttcccaccactgtacaccttcaacagcacatgagacgacaccactccggaacagacgctttgtatttcaccggacttgagggggctttcgggactgtaaacccgaagtatcacccttccaggaacaatacgattgctaattttaccttctccgcttgggtaatgccgaacgccaatactaatggattcattatcgccaaagacgatgggaacggttcaatatactatggtgtgaaaattcagactaatgaatcccacgtgacgctgagcctacactataagacactcggaagcaacgccacttatattgccaagacaactgtcatgaaatacctcgaggagtctgtgtggctccatctcctcataattcttgaagacggtatcattgagttctatttggacggtaatgccatgcccagggggatcaagtccctgaagggcgaagccatcaccgacggtcctgggatcttgcgcatcggggcagggattaatggaaacgataggttcactggtctgatgcaggatgttaggtcttatgagcgcaagctgacactggaggagatttacgaattacacgccatgccggctaagagcgatttgcatcccatatcaggatacctggaattccggcagggtgaaacgaacaagtcttttattatcagcgctcgcgacgacaatgacgaggaaggcgaagagctgttcattctgaagctcgtgtctgtatacggaggggctcggattagtgaggagaacaccaccgcgaggctcaccatacagaaaagcgataatgctaatggactgttcgggtttaccggcgcgtgcatccccgaaattgccgaggagggctcaacaattagctgcgtagtcgagcgaacgagaggcgccctcgattatgtacatgtattctacactatatcacagatagaaactgatggcataaactacctcgttgatgactttgccaatgcaagcggtaccatcacctttttgccctggcagcgctccgaggtccttaatatctatgtgctagacgatgatattcctgaattgaatgagtattttagggtgacccttgtgtccgccatcccaggcgatggtaagctgggctccacccccacctcgggcgccagtatcgaccccgaaaaggaaacgacagacatcaccatcaaagcaagcgaccacccctatggattgctccagttcagtaccgggttacctccgcagcccaaggatgcgatgactcttcctgccagctcagtgccgcacatcactgtggaagaggaggatggcgaaatccgacttctggtgattcgtgcccagggcctgctcgggcgagtaacagcggagttccgcacagtgagcctgaccgctttctcgccagaggactatcagaatgttgctgggacactggagttccagcccggagaaagatacaagtacatattcatcaacatcaccgataactcaatccccgagcttgaaaagtctttcaaggtggaattgctgaatttagaaggcggagttgcagaactcttccgcgttgatggctccggttcaggggatggggacatggagtttttccttccaaccatacacaaaagagccagcttgggcgtggctagccagatcctggttactattgctgcctccgaccacgcacatggggtatttgagttcagccccgaatcactatttgtgtcaggaacggagcccgaagacggctatagtactgtaactcttaacgtaattcgacatcatgggacattatcacctgtgaccctccattggaacattgatagcgaccccgatggcgacctcgctttcacgtccggcaacattacctttgaaattggacagacgtcagcaaacattacagtggagatactgccagatgaagacccagagctggataaagcgttttctgtaagcgtgctgagcgtttctagcggtagcctgggagcccatatcaacgctaccttgacagtccttgccagtgatgacccttatggcatttttattttctccgagaaaaatcgccctgtcaaggttgaggaggccacacagaacatcacgctgtccattattaggctaaaaggactcatggggaaggtgctggtgtcgtatgctactctcgatgatatggaaaaacctccgtacttccccccaaatcttgcgagggcgacccaaggtagagattatataccagccagcggctttgccctgttcggtgcaaatcaaagcgaagccaccatcgcgatttcaatccttgacgacgacgaacctgagaggtccgagtccgtgtttatagaactcctcaactctactttggtcgccaaggtgcagtcccgctccattcctaattcacccagacttggtcctaaggtcgaaaccattgctcagctcataataatcgctaacgacgacgctttcggaaccctccagctgagcgcccccatcgttagagtcgcagagaatcatgtggggccaatcataaatgtcaccagaactggcggcgcttttgccgatgtgagcgtgaagtttaaggctgtgcctatcactgctatcgcaggagaagattactccatcgcgtcaagcgatgtggtacttttagaaggggaaacgtcgaaagcagtgccaatttacgtgattaacgacatatacccagagctggaagagtcttttcttgtgcaactgatgaacgaaactaccggtggtgctcgcttgggggccctgacggaggccgtgattattatagaagccagcgacgatccctatggattgtttggctttcagattaccaaactgatagtcgaggagcctgagtttaattcagtgaaagttaacctccctattattaggaacagtggcactcttggcaacgtcactgtacagtgggtggcaaccatcaacggacagctagccaccggggacttgcgggtggtcagtgggaatgtgacctttgcacctggcgagaccatccagaccctgctcttggaagtcctggcagacgacgtccccgagatcgaagaggtgattcaggtgcagctgaccgacgcgagtgggggaggcaccattggcttggatcggatcgcgaatattattatccccgccaacgacgacccttatgggacagttgctttcgcccagatggtatacagggtgcaagagcccctagagcgaagctcctgtgccaatatcaccgtgagacggtccgggggtcattttggcagattactgctcttctacagcacatccgatatcgacgtggtggcacttgctatggaagagggtcaggacctgctgtcctactacgaaagcccgattcagggcgtacctgatcctttgtggagaacttggatgaacgtgagtgctgtgggggagcccctgtatacctgtgcgacactctgtttaaaggagcaggcgtgtagcgccttctccttctttagcgcttccgagggtcctcagtgcttttggatgacaagctggattagccccgccgtcaataattctgacttctggacttaccgtaaaaacatgacacgagtggcctccctcttctccggccaggcagtcgctgggtcagactacgagcctgtgacaagacagtgggcaataatgcaagagggggacgagttcgcaaaccttacagtgtctatcttacctgacgactttcccgaaatggacgaaagcttcctcataagtctgctggaagtgcacctcatgaacatctccgccagcctcaagaatcagcccactatcgggcagcctaatatctctactgtggttatagcactgaatggcgatgctttcggtgtcttcgtgatatacaatatctcgcctaacacgtctgaggatggcctcttcgtagaggtccaggaacagccacaaaccctagttgagctaatgatacacagaactgggggatctctgggtcaggtggctgttgaatggagggtggtcggcggtaccgcaacagagggattggattttattggggccggtgagatcctgacattcgctgagggggaaactaagaaaacagtgatcctgactattttggatgacagcgagccagaggacgacgagtccataatcgtgagtcttgtatatacagagggcggatccaggatccttcccagctctgacactgtcagagtgaatattctcgccaatgacaatgtggctggtatcgtgtccttccagactgcctccagaagtgtcattggacacgagggcgagattctccaattccacgtgattaggacttttccgggtcggggtaatgttaccgttaattggaaaataattgggcaaaacctcgagctgaattttgctaatttctcaggccagctgttttttccagaaggctccctgaataccacactgtttgtgcatctgctggatgataatattcccgaagaaaaggaggtgtaccaagtcatcctgtacgacgtgagaacgcagggagtgccccctgccggaattgcactcctggacgcacaagggtatgcagctgtactcacagtcgaggcaagcgacgagccacacggggtgctgaatttcgcactgtctagcaggtttgtgctgctgcaagaggccaatattaccatccaacttttcatcaatcgggaatttggctctctcggcgccatcaatgtgacatatacaaccgttcctggcatgctgagcctcaagaaccaaacagtggggaatttggcagaacctgaagtggactttgtgccgattatcggcttccttatccttgaagaaggcgaaactgcagcagccattaatattactatactggaagacgatgtgccggagctcgaggagtacttcctggtaaacctaacctatgtagggctgaccatggcggcctctacatcattcccacctcgtctcgatagcgaaggactgacagcccaggtgatcattgacgcaaacgacggcgctcgcggcgtgatagagtggcagcagtcaaggtttgaagtcaatgaaacccacgggtccctaaccctggtggcccaacgatcgcgcgaacctctgggacatgtcagcttgtttgtctacgcacagaatctcgaagcccaggtcgggttagattatatcttcacgcccatgatactgcattttgcggacggcgagcgatacaaaaacgtgaacatcatgattctcgatgatgacattcctgaaggcgatgagaaattccagctcattctgacaaatccttcaccaggcctggagctgggaaagaacaccatcgcgctcattattgtcctggcgaacgacgacggccccggagtactgtctttcaataactccgaacattttttcctacgagaacctaccgcgctgtatgtgcaggaatccgtggccgtactctacatcgtccgagagcctgctcaggggctgttcgggacggtcaccgtgcagtttattgttactgaggtcaactcctccaacgaatctaaggatctgacaccaagcaaaggatacatagttctggaagagggggtgcggtttaaagcgctccagatctcagctatcctggacactgagcccgagatggatgaatacttcgtgtgcactctgtttaaccccacaggcggggctagactcggcgtgcacgttcagaccctgatcacggtgctccagaaccaggccccgttggggctgtttagcattagtgcggtggaaaaccgggccacctctatcgacattgaggaagcaaatagaactgtttatctcaacgtcagtcgtaccaacggcatcgacctggctgtctctgtccagtgggaaacagtctcggaaacggcttttggaatgagggggatggacgttgtgttcagcgtgtttcagagcttcctcgacgagagcgcttctggctggtgcttcttcaccctggaaaatcttatatatggaataatgcttagaaagtcaagcgttaccgtgtacaggtggcagggaatatttatcccagtggaagatctcaatatagagaaccccaagacctgcgaggcttttaacattggcttctctccatattttgttataacccacgaggagcgcaacgaagagaagcccagcctcaacagcgtgtttacattcacctccggctttaaactttttctggtgcagaccatcatcatcctggagtcgagccaggttaggtactttacatcagactctcaggactacctgatcattgcctcacagcgggatgactctgaattgactcaggtttttaggtggaatggaggctctttcgtcctgcaccagaagctccccgtgcgcggcgtacttaccgtggccttgttcaacaaaggtggaagtgtttttctcgcaatttcccaggccaacgctcgcctgaactccctattatttcgctggagcggttccggattcatcaactttcaagaagttcccgtgtcgggaactaccgaggtggaggcgttgtcctctgccaatgacatctatctgatttttgccgagaacgtctttttgggagatcagaactccatcgatatctttatttgggaaatgggccagtcttctttccggtatttccagagcgtggatttcgcggctgttaacagaatccacagttttacacctgcttcggggattgctcatattcttctgattggtcaagatatgtcagcactgtattgctggaatagtgagaggaatcagttctctttcgtgttggaggttccctctgcctatgacgttgcatccgtgactgtgaaatccctaaacagctctaaaaatttgatagctcttgtgggcgctcacagtcatatctatgagctagcctacatctctagccactctgacttcattccatcatctggtgaactaatatttgagccaggggagcgtgaggccacgatcgctgttaacattcttgatgatacagtccccgagaaagaagagtctttcaaggttcagctgaagaacccaaaaggcggtgccgagattgggatcaatgatagcgtcacaatcactatcctctccaatgacgacgcctatggtatcgttgcattcgcccagaacagtctatataagcaggtagaagagatggagcaggacagcttggtcaccctgaacgtggagcggctgaaaggtacctacggaaggattaccatagcctgggaagccgatggttctatcagtgacatcttccctaccagcggcgtgattctgttcacagagggccaggtgctgtccacaatcaccctgacaattctcgccgataatatcccagagctgagtgaggttgtgatcgtgacacttactaggatcacaaccgagggggtggaggacagttacaaaggcgctaccatcgatcaggatcggtcaaagtctgtaattaccactcttcccaatgatagcccatttggtctggtggggtggagagccgcctctgtgttcattagagtggccgagcccaaggagaacaccaccacgcttcagcttcaaattgcacgggacaagggcctcctaggcgatatagctatccacctacgcgcccaacctaactttttactccacgtcgacaatcaagccacggagaatgaggattatgttctccaagaaaccattatcataatgaaggaaaacatcaaagaggcccatgcagaggtcagtattctacctgatgatctccccgagctcgaggaaggcttcatagtaacgatcaccgaagtgaaccttgtcaacagtgacttttccactggacagccctctgtccgccggccaggcatggagattgccgagattatgatagaagaaaatgatgatccccgaggaatctttatgtttcatgtaactcgcggcgccggggaagtaattacagcttatgaggtgccaccgccgttaaacgtgcttcaggttcccgtcgtgaggctggctggatctttcggagcagtgaatgtctattggaaagccagcccagacagcgccggactggaggattttaaacctagccacgggattctggaattcgctgacaaacaggtgacagccatgatcgagattaccatcatagatgacgccgagttcgagctgacagaaacgttcaacatttctttgatctcagttgccggcggaggtagacttggagacgacgttgtggtgacggtggtgattcctcaaaatgacagcccattcggcgtgttcgggtttgaagagaagaccgtcatgatcgatgaatccttgagcagcgatgacccagattcatacgtgacccttactgtcgttcgtagtccaggagggaaggggacagtgaggctcgagtggacaatcgatgaaaaagccaaacacaacctcagccctttgaatgggacactgcattttgatgagaccgaatcgcagaagaccatagtactgcacacccttcaggacactgttcttgaggaagaccgccggtttactattcagctgatcagcatcgatgaagttgaaataagtccggtcaaggggtccgcctcgattattattaggggtgacaagagggcttcaggagaagttggtatcgcccccagcagcaggcacatccttatcggtgagccatcagccaagtacaatgggacagccattattagcttggtccgcggtccaggaattctgggcgaagttacggtcttttggaggatctttcccccatccgtgggcgagtttgcggaaacctccggcaaattaaccatgagggatgagcagtctgctgttatagtggtcatccaggcacttaatgacgacatacccgaagagaagtctttctacgagttccagctgacagctgtgagcgagggcggcgttctatctgagtcttctagcactgccaatatcacagtggtagcgtctgatagtccctatgggcgatttgccttcagtcatgagcagttgcgggtctccgaggcgcaacgcgttaacatcacaatcataagatcctccggcgacttcgggcatgttcgcctgtggtacaagactatgtctggaacagctgaggcggggctggacttcgtccccgcagcaggagagctgctttttgaagccggcgagatgcggaagagcctccacgtagaaatcctcgatgacgactacccggagggtccggaggaattctctctcacaattaccaaggtcgagctccaaggccgcggatatgatttcaccattcaggagaatggcctacaaatagaccagcctcctgaaatcggcaatatctccattgtccgcatcatcatcatgaaaaacgataacgccgaaggtatcatcgaattcgatccaaagtacaccgcattcgaggtggaagaagacgtaggattgataatgatcccagtggtccgcctgcacggcacatatggctatgtgactgctgattttatcagtcagagctcctcagcctcacccggtggggtggactatatcctccacgggagcacagtcactttccagcatgggcagaacttatcgtttattaacataagcattattgacgacaacgaaagtgaatttgaggagcccatcgaaatcctgttaacaggagcgaccggcggggcagttctcgggaggcacctggtgtcaaggatcatcattgccaagagcgattccccttttggagttattaggtttctcaatcagagcaagatctccattgctaatcccaactctacaatgatcctctcactcgtactcgagcggaccgggggtctgctgggcgaaatccaagtgaactgggagactgtcggaccaaattcacaggaggccttactgccacaaaatagggacatagcagatcctgtcagtggtcttttttattttggcgagggagagggtggagtgcgcacaatcatactgaccatatatccccatgaggagattgaagtcgaggaaaccttcatcatcaagctacatttggttaaaggcgaagcaaaactggacagcagggctaaggacgtgaccctgaccatccaggaattcggcgaccccaacggagtggtccagtttgcccctgagacactgtcgaagaaaacttactctgagccgcttgctctggagggccccctgctaatcacgttctttgtgcgacgggttaagggtacatttggcgaaatcatggtctactgggagcttagcagtgaattcgatatcacagaggactttctgagcacctcagggtttttcacgatcgccgacggtgagtccgaagcttcattcgatgtgcaccttctgccggatgaggtacctgaaatcgaggaagactacgttattcaactggtgtcagtcgagggcggcgccgaacttgacctggagaagtccatcacttggttttccgtctatgccaatgacgacccacatggagttttcgccttgtacagcgaccggcagtctattctgatcgggcagaatctcattaggagtatccagatcaacataacacgcctggcgggtacttttggcgatgttgctgttggactcagaattagcagcgaccacaaagagcagcccatcgtgacagagaatgcggaaaggcaattagtcgtgaaggacggagccacctataaagttgacgtagtacccatcaagaaccaggtgtttttgtcactcggctccaactttaccttacagctggtaacagtgatgcttgtgggtgggcgcttttacggcatgccaacgatcctccaagaggctaaatcagcagttctgcctgtgtcagagaaggcagctaacagccaggtggggttcgagagcacagcattccagttgatgaacattaccgccggcacttcccacgtcatgattagccgccggggtacctatggcgcactgtctgtcgcttggacgacaggctatgctcccggcctggaaatccctgaatttattgtagtgggtaacatgacacccaccttgggcagcctatcctttagccacggcgaacagcgaaagggcgtgttcctgtggacatttccttcaccagggtggcctgaggccttcgtgttgcacctctcaggcgtgcaaagctctgcccctggaggcgcccagctcagatccggtttcattgtggcagaaattgaaccaatgggggtatttcagttttccacatcttctcgcaacatcattgtgagcgaggatactcagatgatccggttacacgtgcagaggctctttggattccatagtgatctgatcaaagtctcctaccagacaactgctggcagtgccaagccgcttgaggactttgaacccgtacagaatggtgagctgttcttccagaaatttcagactgaagtggacttcgagatcacaattattaacgatcaactatctgaaattgaggagtttttctacatcaacttgacatcagtggagatcaggggcctgcagaagttcgacgtcaactggagtcctagactcaacctcgacttttctgtcgctgtcataacgatactggataacgatgatctggccggcatggatattagcttccctgagaccactgtggcagtggctgtcgacactactttaatcccagtggagaccgagtccaccacctatctgagcacctctaagaccaccacaattctccaaccgacaaacgtcgtcgctatagtgacggaagccacaggggtttctgctattcctgagaaacttgtgacactgcatggtactccagccgtaagcgaaaagcctgatgtggccaccgttactgccaacgtttctatacacggaacctttagtctgggacctagtatcgtctatattgaggaagaaatgaagaacgggacattcaatacagcagaggtgctgatccgaagaaccgggggtttcaccgggaacgtgtcaataactgtaaagactttcggggaacggtgtgcacagatggaacccaacgccttgccattccgaggaatctacggaatctccaatctcacctgggccgtcgaggaggaggacttcgaggaacaaaccctgacactcatttttttggacggggaacgggaaagaaaagtgtcagttcagatcctcgatgacgacgagccagaagggcaggaattcttttatgtgtttttgaccaacccccagggtggcgcccagatcgtggaggaaaaagatgatacggggttcgcagcctttgcaatggtgatcataaccggctcagatctccacaatggcattattgggttttctgaagagagccagagcggattggaattgagggagggagcagtcatgcggcgcctgcatctaattgtcaccaggcagcccaatagagccttcgaggatgtgaaagtgttttggagagtgacacttaacaaaactgtggtggtcctccagaaggatggagtgaacttggtggaagaactgcagagtgtatccggaacaacaacttgtaccatgggccaaacgaaatgcttcatctcgattgagctgaaacccgagaaggtgccccaggttgaggtctacttcttcgttgagctgtacgaggctaccgccggagctgcaatcaacaactccgccaggttcgcccagataaaaatccttgaatcggatgagtcacagtctctggtatacttcagtgtcggatctcgtctcgctgtggcccacaagaaagccactctgatttctcttcaggtggccagggatagtggcactggcctgatgatgtctgtgaacttcagcacccaggagttgcgcagcgctgagacaatcgggcgcacgattatttctccagctatcagtggcaaggacttcgtgatcaccgaggggaccctagtgtttgaaccaggtcaacggtccacagtgctggatgtgattttgactccagaaacgggctctctgaactccttccccaagcgcttccagattgtgctgtttgatcccaaaggaggggctcgtattgataaggtctatggaacagccaatatcaccttggtcagtgacgccgacagtcaagcaatttggggcctggcggaccagctgcaccaacccgtgaatgatgacattctgaaccgcgtgctgcacacgatcagtatgaaggtggccacagagaacaccgacgagcagctgtcggccatgatgcatctaatcgaaaaaattaccaccgagggaaagatccaggcattctctgtggcaagccggacactgttttatgagatcctgtgctctcttataaaccccaaaaggaaggacacacgaggtttcagccactttgcagaagtaaccgagaacttcgcatttagtttactgacaaacgtgacatgcggctctccaggagaaaagagcaagaccattcttgactcatgtccgtatttatccattttggctcttcactggtaccctcagcagatcaatgggcacaaattcgaggggaaggagggagattatatacgcattcccgaacggctgttggacgtacaagatgccgagatcatggccggcaagtccacgtgtaaattggttcagtttaccgaatactctagtcaacagtggtttatttcaggcaataacctcccaactctgaagaacaaggtgctaagtctgtccgtgaagggccagtcatcacaattactcacaaatgacaacgaggtgttataccgaatctacgccgccgagccacgaatcatcccacagacatccctttgtctgctgtggaatcaggccgccgcctcctggctgtccgattctcagttctgcaaggtcgttgaagaaaccgccgactatgtggaatgtgcttgttcgcatatgtccgtctacgccgtatatgccaggactgataacttgtcgagctataacgaggccttctttacctccggcttcatttgtatttcgggcctctgcctcgctgttctatctcatatattttgcgcccgatactctatgtttgctgccaaactcctgacccacatgatggcagcttcactgggcacacagatcctgtttttagccagcgcatatgcatccccgcagctggcagaggagagttgttctgccatggcagccgtcactcattatctctatctctgtcagttctcctggatgcttatccagagcgtgaacttctggtacgttcttgtcatgaatgacgaacacaccgaacgtaggtacctactgtttttcctcctttcctggggactgcccgctttcgtggtgatcctcctgatcgtcattctgaagggcatctaccaccaatctatgagccagatctatggtctcatacacggcgacctatgcttcatcccaaatgtgtacgcagccctcttcacggcagctctcgtaccacttacatgcctggtcgtcgtctttgtggtttttatccatgcctaccaagtcaagccccagtggaaggcttacgatgatgtgtttcgaggccgaactaacgccgctgaaattcccctgattctctatttgttcgcactaatcagtgtgacctggttgtggggcggcctgcacatggcgtatcggcatttctggatgctggtactgttcgtcatattcaattctctgcaaggtttatacgtgttcatggtctactttattctacataatcagatgtgctgtcccatgaaggcctcctacactgtcgaaatgaacggccatccaggtccgtccacggctttctttacacctgggtccggtatgccacctgctggtggggagatatctaaaagcacgcagaatttgatcggagcaatggaggaagtgcctcccgattgggaaagagcttctttccagcagggaagtcaagcctctcctgatctgaaaccttctccacaaaatggggccacattcccttcttcaggaggctacgggcagggatcactgattgcggacgaagagtcccaggagttcgatgatctgattttcgcactgaaaaccggtgccggcctgtcagtgtccgacaatgaatccgggcagggatcacaggagggtgggaccctcactgactcacaaatagttgaactcagacgaattccaatagccgatacccatctttag

SEQ ID NO: 222908 - DNA, 18921 bp, Artificial Sequence
  derived and/or modified sequence
atggacatcttcctggtgctgggcatgcccagcgccagcctgctggtgaacctgctgagcgccctgctgatcctgtttgtgtttggagaaacagagatccgcttcaccggccagacagaatttgtggtgaatgagaccagcaccaccgtcatccgcctcatcatcgagcgcatcggggagcccgccaacgtgacagccatcgtgtccctgtatggagaagatgctggggacttctttgacacctatgctgctgccttcatcccagctggggagaccaacagaacagtgtacatcgctgtgtgtgatgatgacctgcctgagccagatgagaccttcatcttccacctgaccctgcagaagcccagcgccaacgtgaagctgggctggcccaggacagtgacagtgaccatcctgagcaatgacaatgccttcggcatcatctccttcaacatgctgcccagcattgctgtgtctgagcccaagggcagaaatgaatccatgcccctgaccctcatccgggagaagggcacctacggcatggtgatggtgacctttgaggtggagggcggccccaaccccccagatgaggacctgagccctgtgaagggcaacatcaccttccccccaggccgggccaccgtcatctacaacctgactgtgctggatgatgaggtgcctgaaaatgatgagatcttcctgatccagctgaagtctgtggagggcggcgctgagatcaacaccagcagaaattccattgagatcatcatcaagaagaatgacagccctgtgcgcttcctgcagagcatctacctggtgcctgaggaggaccacatcctgatcatccctgtggtgcggggcaaggacaacaacggcaacctgattggaagtgatgaatatgaggtgtccatctcctatgctgtgaccactggaaacagcacagcccacgcccagcagaacctggacttcatcgacctgcagcccaacaccaccgtggtgttcccccccttcatccacgagagccacctgaagttccagatcgtggatgacaccatccctgagattgctgagagcttccacatcatgctgctgaaggacaccctgcagggagatgctgtgctgatcagccccagcgtggtgcaggtgaccatcaagcccaatgacaagccctacggcgtgctgtccttcaacagcgtgctgtttgagaggacagtcatcattgatgaggaccgcatcagccgctatgaggagatcaccgtggtgagaaatggaggcacccacggcaatgtgtctgccaactgggtgctgaccaggaacagcacagaccccagccctgtgacagctgacatccggcccagcagtggagtgctgcactttgcccagggccagatgctggccaccatccccctgactgtggtggatgatgacctgcctgaggaggccgaggcctacctgctgcagatcctgccccacaccatccggggcggcgctgaggtgtctgagcctgctgagctgctcttctacatccaggacagtgatgatgtgtatggcctcatcaccttcttccccatggagaaccagaagattgagagcagccctggagagcgctacctgagcctgtccttcacccggctgggcggcaccaagggagatgtgcggctgctgtacagcgtgctgtacatcccagctggagctgtggaccccctgcaggccaaggagggcatcctgaacatcagcagaagaaatgacctgatcttccctgagcagaagacccaggtgaccaccaagctgcccatcagaaatgatgccttcctgcagaatggagcccacttcctggtgcagctggagaccgtggagctgctgaacatcatccccctcatcccccccatcagccccaggtttggagagatctgcaacatcagcctgctggtgaccccagccatcgccaatggagagatcggcttcctgagcaacctgcccatcatcctgcacgagcctgaggactttgctgctgaggtggtgtacatccccctgcacagagatggaacagatggccaggccaccgtgtactggagcctgaagcccagcggcttcaacagcaaggctgtgaccccagatgacatcggccccttcaatggatctgtgctcttcctgagcggccagagcgacaccaccatcaacatcaccatcaagggagatgacatccctgagatgaatgagaccgtgaccctgagcctggacagagtgaatgtggagaaccaggtgctgaagagcggctacaccagccgggacctgatcatcctggagaatgatgaccccggcggcgtgtttgagttcagccctgccagccggggcccctacgtgatcaaggagggggagagcgtggagctgcacatcatccgcagccggggcagcctggtgaagcagttcctgcactacagagtggagccccgggacagcaatgagttctacggcaacacaggagtgctggagttcaagccaggagagcgggagatcgtcatcaccctgctggcccggctggatggcatccctgagctggatgagcactactgggtggtgctgagcagccatggagagcgggagagcaagctgggcagcgccaccatcgtgaacatcaccatcctgaagaatgatgacccccacggcatcatcgagtttgtgtctgatggcctcatcgtgatgatcaatgaaagcaaaggagatgccatctacagcgctgtgtatgatgtggtgaggaacagaggcaactttggagatgtgtctgtgtcctgggtggtgtccccagacttcacccaggatgtgtttcctgtgcagggcaccgtggtgtttggagaccaggagttcagcaagaacatcaccatctacagcctgcctgatgagatccctgaggagatggaggagttcaccgtcatcctgctgaatggcaccggcggggccaaggtgggcaacagaaccacagccaccctgcgcatcagaagaaatgatgaccccatctactttgctgagccccgggtggtgcgggtgcaggagggggagacagccaacttcaccgtgctgagaaatggatctgtggatgtgacctgcatggtgcagtatgccaccaaggatggcaaggccacagcccgggagcgggacttcatccctgtggagaagggggagaccctcatctttgaggtgggcagccggcagcagagcatcagcatctttgtgaatgaagatggcatccctgagacagatgagcccttctacatcatcctgctgaacagcactggagacacagtggtgtaccagtatggagtggccaccgtcatcatcgaggccaatgatgaccccaacggcatcttcagcctggagcccatcgacaaggctgtggaggagggcaagaccaatgccttctggatcctgcggcaccggggctactttggatctgtgtctgtgtcctggcagctgttccagaatgattctgccctgcagcccggccaggagttctatgagaccagcggcaccgtgaacttcatggatggagaggaggccaagcccatcatcctgcacgccttcccagacaagatccctgagttcaatgagttctacttcctgaagctggtgaacatcagcggcggcagccctggccctgggggccagctggccgagaccaacctgcaggtgacagtgatggtgcccttcaatgatgacccctttggagtcttcatcctggaccctgaatgtctggagcgggaggtggctgaagatgtgctgtctgaagatgacatgagctacatcaccaacttcaccatcctgcggcagcagggcgtgtttggagatgtgcagctgggctgggagatcctgagcagcgagttccctgctggcctgccccccatgattgacttcctgctggtgggcatcttccccaccaccgtgcacctgcagcagcacatgagaagacaccacagcggcacagatgccctgtacttcaccggcctggagggcgcctttggaacagtgaaccccaagtaccaccccagcaggaacaacaccatcgccaacttcaccttcagcgcctgggtgatgcccaatgccaacaccaacggcttcatcatcgccaaggatgatggaaatggcagcatctactatggagtgaagatccagaccaatgaaagccacgtgaccctgagcctgcactacaagaccctgggcagcaatgccacctacatcgccaagaccaccgtgatgaagtacctggaggagagcgtgtggctgcacctgctgatcatcctggaggatggcatcatcgagttctacctggatggaaatgccatgccccggggcatcaagagcctgaagggggaggccatcacagatggccctggcatcctgcgcatcggggccggcatcaatggaaatgaccgcttcaccggcctgatgcaggatgtgcgctcctatgaaaggaagctgaccctggaggagatctatgagctgcacgccatgcctgccaagagtgacctgcaccccatcagcggctacctggagttccggcagggcgagaccaacaagagcttcatcatcagcgccagagatgacaatgatgaggagggggaggagctgttcatcctgaagctggtgtctgtgtatggaggagcccgcatcagcgaggagaacaccacagcccggctgaccatccagaagagtgacaatgccaacggcctgtttggcttcaccggggcctgcatccctgagattgctgaggagggcagcaccatcagctgtgtggtggagaggaccaggggggccctggactatgtgcacgtgttctacaccatcagccagattgaaacagatggcatcaactacctggtggatgactttgccaatgccagcggcaccatcaccttcctgccctggcagaggtctgaggtgctgaacatctacgtgctggatgatgacatccctgagctgaatgagtacttccgggtgaccctggtgtctgccatccctggagatggcaagctgggcagcacccccaccagcggggccagcattgatcctgagaaggagaccacagacatcaccatcaaggccagtgaccacccctacggcctgctgcagttcagcacaggcctgcccccccagcccaaggatgccatgaccctgcctgccagctctgtgccccacatcaccgtggaggaggaggatggagagatccggctgctggtgatccgggcccagggcctgctgggccgggtgacagctgagttcagaacagtgtccctgacagccttcagccctgaggactaccagaatgtggccggcaccctggagttccagcctggagagcgctacaagtacatcttcatcaacatcacagacaacagcatccctgagctggagaagagcttcaaggtggagctgctgaacctggagggcggcgtggccgagctgttccgggtggatggcagcggcagcggagatggagacatggagttcttcctgcccaccatccacaagagggccagcctgggcgtggccagccagatcctggtgaccatcgccgccagtgaccacgcccatggagtgtttgagttcagccctgagagcctgtttgtgtctggaacagagccagaagatggctacagcacagtgaccctgaatgtcatccgccaccacggcaccctgagccctgtgaccctgcactggaacatcgacagcgaccctgatggagacctggccttcaccagcggcaacatcacctttgagatcggccagaccagcgccaacatcaccgtggagatcctgcctgatgaagatcctgagctggacaaggccttctctgtgtctgtgctgtctgtgagcagcggcagcctgggcgcccacatcaatgccaccctgactgtgctggccagtgatgacccctacggcatcttcatcttcagcgagaagaacagacctgtgaaggtggaggaggccacccagaacatcaccctgagcatcatccggctgaagggcctgatgggcaaggtgctggtgtcctatgccaccctggatgacatggagaagccaccctacttcccccccaacctggcccgggccacccagggccgggactacatcccagccagcggctttgccctgtttggagccaaccagagcgaggccaccatcgccatcagcatcctggatgatgatgagcctgagaggtctgagagcgtcttcatcgagctgctgaacagcaccctggtggccaaggtgcagagccgcagcatccccaacagcccccggctgggccccaaggtggagaccatcgcccagctgatcatcatcgccaatgatgatgccttcggcaccctgcagctgagcgcccccatcgtgcgggtggctgaaaatcatgtgggccccatcatcaacgtgaccaggactggaggagcctttgctgatgtgtctgtgaagttcaaggctgtgcccatcacagccatcgccggggaggactacagcatcgccagcagtgatgtggtgctgctggagggggagaccagcaaggctgtgcccatctacgtgatcaatgacatctacccagagctggaggagagcttcctggtgcagctgatgaatgagaccaccggcggggcccggctgggcgccctgacagaagctgtgatcatcatcgaggccagtgatgacccctacggcctgtttggcttccagatcaccaagctgattgtggaggagcctgagttcaacagcgtgaaggtgaacctgcccatcatccggaacagcggcaccctgggcaatgtgacagtgcagtgggtggccaccatcaatggccagctggccaccggggacctgcgggtggtgtctggaaatgtgacctttgcccctggagagaccatccagaccctgctgctggaggtgctggctgatgatgtgcctgagattgaggaggtgatccaggtgcagctgacagatgccagcggcggcggcaccatcggcctggacagaattgccaacatcatcatcccagccaatgatgacccctatggaacagtggcctttgcccagatggtgtacagagtgcaggagcccctggagaggagcagctgtgccaacatcaccgtgcggcgcagcggcggccacttcggccgcctgctgctcttctacagcaccagtgacattgatgtggtggccctggccatggaggagggccaggacctgctgagctactatgagagccccatccagggcgtgcctgaccccctgtggaggacctggatgaatgtgtctgctgtgggggagcccctgtacacctgtgccaccctgtgcctgaaggagcaggcctgcagcgccttctccttcttcagcgccagcgagggcccccagtgcttctggatgacctcctggatcagccctgctgtgaacaacagcgacttctggacctacaggaagaacatgaccagggtggccagcctcttcagcggccaggccgtggccggcagtgactatgagcctgtgacccggcagtgggccatcatgcaggagggagatgaatttgccaacctgactgtgtccatcctgcctgatgacttccctgagatggatgagagcttcctgatcagcctgctggaggtgcacctgatgaacatcagcgccagcctgaagaaccagcccaccatcggccagcccaacatcagcacagtggtgattgccctgaatggagatgcctttggagtgtttgtgatctacaacatcagccccaacaccagtgaagatggcctgtttgtggaggtgcaggagcagccccagaccctggtggagctgatgatccacaggactggaggcagcctgggccaggtggccgtggagtggagggtggtgggcggcacagccacagagggcctggacttcatcggggccggggagatcctgacctttgctgagggggagaccaagaagacagtcatcctgaccatcctggatgattctgagccagaagatgatgagagcatcatcgtgtccctggtgtacacagagggcggcagccgcatcctgcccagcagtgacacagtgcgggtgaacatcctggccaatgacaacgtggccggcatcgtgtccttccagacagccagccgctctgtgattggacatgaaggagagatcctgcagttccacgtgatccgcaccttccctggaagaggaaatgtgacagtgaactggaagatcatcggccagaacctggagctgaactttgccaacttcagcggccagctgttcttccctgagggcagcctgaacaccaccctgtttgtgcacctgctggatgacaacatccctgaggagaaggaggtgtaccaggtgatcctgtatgatgtgaggacccagggcgtgcccccagctggcatcgccctgctggatgcccagggctatgctgctgtgctgactgtggaggccagtgatgagccccatggagtgctgaactttgccctgagcagcagatttgtgctgctgcaggaggccaacatcaccatccagctgttcatcaaccgggagtttggcagcctgggcgccatcaacgtgacctacaccaccgtgcccggcatgctgagcctgaagaaccagacagtgggcaacctggccgagcctgaggtggactttgtgcccatcatcggcttcctgatcctggaggagggggagacagctgctgccatcaacatcaccatcctggaggatgatgtgcctgagctggaggagtacttcctggtgaacctgacctacgtgggcctgaccatggccgccagcaccagcttccccccccggctggacagcgagggcctgacagcccaggtgatcattgatgccaatgatggagcccggggcgtcatcgagtggcagcagagcagatttgaggtgaatgagacccacggcagcctgaccctggtggcccagaggagccgggagcccctgggccacgtgtccctgtttgtgtatgcccagaacctggaggcccaggtgggcctggactacatcttcacccccatgatcctgcactttgctgatggagagcgctacaagaatgtgaacatcatgatcctggatgatgacatcccagaaggagatgagaagttccagctgatcctgaccaaccccagccctggcctggagctgggcaagaacaccatcgccctgatcatcgtgctggccaatgatgatggccctggggtgctgtccttcaacaacagcgagcacttcttcctgcgggagcccacagccctgtatgtgcaggagagcgtggccgtgctgtacatcgtgcgggagcccgcccagggcctgtttggcaccgtgacagtgcagttcatcgtgacagaggtgaacagcagcaatgaaagcaaggacctgacccccagcaagggctacatcgtgctggaggagggcgtgcgcttcaaggccctgcagatcagcgccatcctggacacagagcctgagatggatgagtactttgtgtgcaccctcttcaaccccactggaggagcccggctgggcgtgcacgtgcagaccctcatcaccgtgctgcagaaccaggcccccctgggcctcttcagcatctctgctgtggagaacagagccaccagcattgacatcgaggaggccaacagaacagtgtacctgaatgtgtccaggaccaatggaattgacctggccgtgtctgtgcagtgggagaccgtgtctgaaacagccttcggcatgaggggcatggatgtggtgttttctgtgttccagagcttcctggatgagagcgccagcggctggtgcttcttcaccctggagaacctgatctacggcatcatgctgaggaagagctctgtgacagtgtaccgctggcagggcatcttcatccctgtggaggacctgaacatcgagaaccccaagacctgtgaggccttcaacatcggcttcagcccctactttgtgatcacccatgaggagagaaatgaggagaagcccagcctgaacagcgtcttcaccttcaccagcggcttcaagctgttcctggtgcagaccatcatcatcctggagagcagccaggtgcgctacttcaccagtgacagccaggactacctgatcatcgccagccagagagatgattctgagctgacccaggtgttccgctggaatggaggcagctttgtgctgcaccagaagctgcctgtgcggggcgtgctgactgtggccctcttcaacaagggcggcagcgtcttcctggccatcagccaggccaatgcccggctgaacagcctgctcttccgctggagcggcagcggcttcatcaacttccaggaggtgcctgtgtctggcaccacagaggtggaggccctgagcagcgccaatgacatctacctgatctttgctgaaaatgtgttcctgggggaccagaacagcattgacatcttcatctgggagatgggccagagcagcttccgctacttccagagcgtggactttgctgctgtgaaccgcatccacagcttcaccccagccagcggcatcgcccacatcctgctgattggccaggacatgtctgccctgtactgctggaacagcgagaggaaccagttctcctttgtgctggaggtgcccagcgcctatgatgtggcctctgtgacagtgaagagcctgaacagcagcaagaacctgattgccctggtgggcgcccacagccacatctatgagctggcctacatcagcagccacagcgacttcatccccagcagtggagagctgatctttgagcccggggagcgggaggccaccatcgctgtgaacatcctggatgacacagtgcctgagaaggaggagagcttcaaggtgcagctgaagaaccccaagggcggcgctgagatcggcatcaatgattctgtgaccatcaccatcctgagcaatgatgatgcctatggaattgtggcctttgcccagaacagcctgtacaagcaggtggaggagatggagcaggacagcctggtgaccctgaatgtggagcggctgaagggcacctacggccgcatcaccatcgcctgggaggctgatggcagcatcagtgacatcttccccaccagcggggtcatcctcttcacagagggccaggtgctgagcaccatcaccctgaccatcctggccgacaacatccctgagctgtctgaggtggtgattgtgaccctgacccgcatcaccacagagggcgtggaggacagctacaagggggccaccatcgaccaggacaggagcaagagcgtcatcaccaccctgcccaatgacagccccttcggcctggtgggctggagggctgcctctgtgttcatccgggtggccgagcccaaggagaacaccaccaccctgcagctgcagatcgcccgggacaagggcctgctgggggacatcgccatccacctgcgggcccagcccaacttcctgctgcacgtggacaaccaggccacagaaaatgaagattatgtgctgcaggagaccatcatcatcatgaaggagaacatcaaggaggcccacgccgaggtgtccatcctgcctgatgacctgcctgagctggaggagggcttcatcgtgaccatcacagaggtgaacctggtgaacagcgacttcagcacaggccagcccagcgtgcggcggcccggcatggagattgctgagatcatgattgaagaaaatgatgacccccggggcatcttcatgttccacgtgaccagaggagctggggaggtgatcacagcctatgaggtgcccccacccctgaatgtgctgcaggtgcctgtggtgcggctggccggcagctttggagctgtgaatgtgtactggaaggccagcccagattctgctggcctggaggacttcaagcccagccacggcatcctggagtttgctgacaagcaggtgacagccatgattgagatcaccatcattgatgatgctgagtttgagctgacagagaccttcaacatcagcctcatctctgtggccggcggcggccgcctgggagatgatgtggtggtgacagtggtgatcccccagaatgacagcccctttggagtgtttggatttgaggagaagacagtgatgattgatgagagcctgagcagtgatgatcctgacagctatgtgaccctgactgtggtgcgcagccctgggggcaaaggaacagtgcggctggagtggaccattgatgagaaggccaagcacaacctgagccccctgaatggcaccctgcactttgatgaaacagagagccagaagaccatcgtgctgcacaccctgcaggacacagtgctggaggaggaccggcgcttcaccatccagctgatcagcattgatgaggtggagatcagccctgtgaagggcagcgccagcatcatcatccggggggacaagagggccagcggggaggtgggcatcgcccccagcagccgccacatcctgattggagagcccagcgccaagtacaacggcacagccatcatcagcctggtgcggggccctggcatcctgggggaggtgaccgtcttctggaggatcttccccccatctgtgggggagtttgctgagaccagcggcaagctgaccatgagagatgagcagagcgctgtgattgtggtgatccaggccctgaatgatgacatccctgaggagaagagcttctatgagttccagctgacagctgtgtctgagggcggcgtgctgtctgagagcagcagcacagccaacatcaccgtggtggccagtgacagcccctacggccgctttgccttcagccatgagcagctgcgggtgtctgaggcccagagggtgaacatcaccatcatccgcagcagcggggactttggacatgtgcggctgtggtacaagaccatgagcggcacagctgaggccggcctggactttgtgcctgctgctggggagctgctgtttgaggccggggagatgaggaagagcctgcacgtggagatcctggatgatgactacccagagggccctgaggagttcagcctgaccatcaccaaggtggagctgcagggccggggctatgacttcaccatccaggagaatggcctgcagattgaccagcccccagagatcggcaacatcagcatcgtgcgcatcatcatcatgaagaatgacaatgctgagggcatcatcgagtttgaccccaagtacacagcctttgaggtggaggaggatgtgggcctcatcatgatccctgtggtgcggctgcacggcacctacggctacgtgacagctgacttcatcagccagagcagcagcgccagccctggaggagtggactacatcctgcacggcagcacagtgaccttccagcacggccagaacctgtccttcatcaacatcagcatcattgatgacaatgaaagtgaatttgaggagcccatcgagatcctgctgactggagccaccggcggcgctgtgctgggccgccacctggtgagccgcatcatcatcgccaagagtgacagcccctttggagtcatccgcttcctgaaccagagcaagatcagcatcgccaaccccaacagcaccatgatcctgagcctggtgctggagaggactggaggcctgctgggggagatccaggtgaactgggagaccgtgggccccaacagccaggaggccctgctgccccagaacagagacattgctgaccctgtgtctggcctcttctactttggagagggggagggcggcgtgaggaccatcatcctgaccatctacccccatgaggagattgaggtggaggagaccttcatcatcaagctgcacctggtgaagggggaggccaagctggacagccgggccaaggatgtgaccctgaccatccaggagtttggagaccccaatggagtggtgcagtttgcccctgagaccctgagcaagaagacctacagcgagcccctggccctggagggccccctgctgatcaccttctttgtgagaagagtgaagggcacctttggagagatcatggtgtactgggagctgagcagcgagtttgacatcacagaggacttcctgagcaccagcggcttcttcaccatcgcagatggagagagcgaggccagctttgatgtgcacctgctgcctgatgaggtgcctgagattgaggaggactatgtgatccagctggtgtctgtggagggcggcgctgagctggacctggagaagagcatcacctggttctctgtgtatgccaatgatgacccccatggagtgtttgccctgtacagcgaccggcagagcatcctgattggccagaacctgatccgcagcatccagatcaacatcacccggctggccggcacctttggagatgtggccgtgggcctgcgcatcagcagtgaccacaaggagcagcccatcgtgacagaaaatgctgagcggcagctggtggtgaaggatggagccacctacaaggtggatgtggtgcccatcaagaaccaggtgttcctgagcctgggcagcaacttcaccctgcagctggtgacagtgatgctggtgggcggccgcttctacggcatgcccaccatcctgcaggaggccaagtctgctgtgctgcctgtgtctgagaaggccgccaacagccaggtgggctttgagagcacagccttccagctgatgaacatcacagctggcaccagccacgtgatgatcagcagaagaggcacctatggagccctgtctgtggcctggaccaccggctacgcccctggcctggagatccctgagttcatcgtggtgggcaacatgacccccaccctgggcagcctgtccttcagccacggggagcagaggaaaggagtcttcctgtggaccttccccagccctggctggccagaggcctttgtgctgcacctgagcggcgtgcagagcagcgcccctggaggagcccagctgcggagcggcttcatcgtggccgagattgagcccatgggcgtcttccagttcagcaccagcagcaggaacatcatcgtgtctgaggacacccagatgatccggctgcacgtgcagaggctgtttggcttccacagcgacctgatcaaggtgtcctaccagaccacagctggcagcgccaagcccctggaggactttgagcctgtgcagaatggagagctgttcttccagaagttccagacagaggtggactttgagatcaccatcatcaatgaccagctgtctgaaattgaggagttcttctacatcaacctgacctctgtggagatccggggcctgcagaagtttgatgtgaactggagcccccggctgaacctggacttctctgtggccgtcatcaccatcctggacaatgatgacctggccggcatggacatctccttccctgagaccaccgtggccgtggccgtggacaccaccctcatccctgtggagacagagagcaccacctacctgagcaccagcaagaccaccaccatcctgcagcccaccaacgtggtggccatcgtgacagaggccactggagtgtctgccatccctgagaagctggtgaccctgcacggcaccccagctgtgtctgagaagccagatgtggccaccgtgacagccaacgtgtccatccacggcaccttcagcctgggccccagcatcgtgtacatcgaggaggagatgaagaatggcaccttcaacacagctgaggtgctgatccggaggactggaggcttcaccggaaatgtgtccatcaccgtgaagaccttcggggagcgctgtgcccagatggagcccaatgccctgcccttccggggcatctacggcatcagcaacctgacctgggccgtggaggaggaggactttgaggagcagaccctgaccctcatcttcctggatggagagcgggagaggaaggtgtctgtgcagatcctggatgatgatgagcctgagggccaggagttcttctacgtgttcctgaccaacccccagggcggggcccagatcgtggaggagaaggatgacaccggctttgctgcctttgccatggtgatcatcactggaagtgacctgcacaacggcatcatcggcttcagcgaggagagccagagcggcctggagctgcgggagggcgctgtgatgaggcggctgcacctgattgtgacccggcagcccaacagagcctttgaagatgtgaaggtgttctggagggtgaccctgaacaagacagtggtggtgctgcagaaggatggagtgaacctggtggaggagctgcagagcgtgtctggcaccaccacctgcaccatgggccagaccaagtgcttcatcagcattgagctgaagccagagaaggtgccccaggtggaggtgtacttctttgtggagctgtatgaggccacagctggagctgccatcaacaacagcgccaggtttgcccagatcaagatcctggagagtgatgagagccagagcctggtgtacttctctgtgggcagccggctggccgtggcccacaagaaggccaccctcatcagcctgcaggtggcccgggacagcggcaccggcctgatgatgtctgtgaacttcagcacccaggagctgcggtctgctgagaccatcggccgcaccatcatcagccctgccatcagcggcaaggactttgtgatcacagagggcaccctggtgtttgagcccggccagaggagcacagtgctggatgtgatcctgaccccagagaccggcagcctgaacagcttccccaagcgcttccagatcgtgctgtttgaccccaagggcggggccagaattgacaaggtgtatggaacagccaacatcaccctggtgtctgatgctgacagccaggccatctggggcctggccgaccagctgcaccagcctgtgaatgatgacatcctgaacagagtgctgcacaccatctccatgaaggtggccacagagaacacagatgagcagctgagcgccatgatgcacctgattgagaagatcaccacagagggcaagatccaggccttctctgtggccagcaggaccctcttctatgagatcctgtgcagcctcatcaaccccaagaggaaggacacccggggcttcagccactttgctgaggtgacagaaaattttgccttcagcctgctgaccaacgtgacctgtggcagccctggagagaagagcaagaccatcctggacagctgcccctacctgagcatcctggccctgcactggtacccccagcagatcaatggccacaagtttgagggcaaggagggggactacatccgcatccctgagcggctgctggatgtgcaggatgctgagatcatggccggcaagagcacctgcaagctggtgcagttcacagagtacagcagccagcagtggttcatcagcggcaacaacctgcccaccctgaagaacaaggtgctgagcctgtctgtgaagggccagagcagccagctgctgaccaatgacaatgaggtgctgtaccgcatctatgctgctgagccccgcatcatcccccagaccagcctgtgcctgctgtggaaccaggccgccgcctcctggctgagtgacagccagttctgcaaggtggtggaggagacagctgactatgtggagtgtgcctgcagccacatgtctgtgtatgctgtgtatgccaggacagacaacctgagcagctacaatgaggccttcttcaccagcggcttcatctgcatcagcggcctgtgcctggccgtgctgagccacatcttctgtgcccgctacagcatgtttgctgccaagctgctgacccacatgatggccgccagcctgggcacccagatcctcttcctggccagcgcctatgccagcccccagctggccgaggagagctgcagcgccatggctgctgtgacccactacctgtacctgtgccagttctcctggatgctgatccagagcgtgaacttctggtacgtgctggtgatgaatgatgagcacacagagcggcgctacctgctcttcttcctgctgtcctggggcctgcctgcctttgtggtgatcctgctgattgtcatcctgaagggcatctaccaccagagcatgagccagatctacggcctcatccacggggacctgtgcttcatccccaacgtgtatgctgccctcttcaccgctgccctggtgcccctgacctgcctggtggtggtgtttgtggtgttcatccacgcctaccaggtgaagccccagtggaaggcctatgatgatgtgttccggggccgcaccaatgctgctgagatccccctcatcctgtacctgtttgccctgatctctgtgacctggctgtggggcggcctgcacatggcctaccgccacttctggatgctggtgctgtttgtgatcttcaacagcctgcagggcctgtatgtgttcatggtgtacttcatcctgcacaaccagatgtgctgccccatgaaggccagctacacagtggagatgaatggccaccctggccccagcacagccttcttcaccccaggcagcggcatgcctcctgctggaggagagatcagcaagagcacccagaacctgattggagccatggaggaggtgcccccagactgggagcgggccagcttccagcagggcagccaggccagcccagacctgaagcccagcccccagaatggagccaccttccccagcagcggcggctacggccagggcagcctgattgctgatgaggagagccaggagtttgatgacctgatctttgccctgaagacaggagctggcctgtctgtgtctgacaatgaaagtggccagggcagccaggagggcggcaccctgacagacagccagatcgtggagctgcggcgcatccccatcgctgacacccacctgtag

SEQ ID NO: 222909 - DNA, 18921 bp, Artificial Sequence
  derived and/or modified sequence
atgtctgtgttcctgggccctggcatgcccagcgccagcctgctggtgaacctgctgagcgccctgctgatcctgtttgtgtttggagaaacagagatccgcttcaccggccagacagaatttgtggtgaatgagaccagcaccaccgtcatccgcctcatcatcgagcgcatcggggagcccgccaacgtgacagccatcgtgtccctgtatggagaagatgctggggacttctttgacacctatgctgctgccttcatcccagctggggagaccaacagaacagtgtacatcgctgtgtgtgatgatgacctgcctgagccagatgagaccttcatcttccacctgaccctgcagaagcccagcgccaacgtgaagctgggctggcccaggacagtgacagtgaccatcctgagcaatgacaatgccttcggcatcatctccttcaacatgctgcccagcattgctgtgtctgagcccaagggcagaaatgaatccatgcccctgaccctcatccgggagaagggcacctacggcatggtgatggtgacctttgaggtggagggcggccccaaccccccagatgaggacctgagccctgtgaagggcaacatcaccttccccccaggccgggccaccgtcatctacaacctgactgtgctggatgatgaggtgcctgaaaatgatgagatcttcctgatccagctgaagtctgtggagggcggcgctgagatcaacaccagcagaaattccattgagatcatcatcaagaagaatgacagccctgtgcgcttcctgcagagcatctacctggtgcctgaggaggaccacatcctgatcatccctgtggtgcggggcaaggacaacaacggcaacctgattggaagtgatgaatatgaggtgtccatctcctatgctgtgaccactggaaacagcacagcccacgcccagcagaacctggacttcatcgacctgcagcccaacaccaccgtggtgttcccccccttcatccacgagagccacctgaagttccagatcgtggatgacaccatccctgagattgctgagagcttccacatcatgctgctgaaggacaccctgcagggagatgctgtgctgatcagccccagcgtggtgcaggtgaccatcaagcccaatgacaagccctacggcgtgctgtccttcaacagcgtgctgtttgagaggacagtcatcattgatgaggaccgcatcagccgctatgaggagatcaccgtggtgagaaatggaggcacccacggcaatgtgtctgccaactgggtgctgaccaggaacagcacagaccccagccctgtgacagctgacatccggcccagcagtggagtgctgcactttgcccagggccagatgctggccaccatccccctgactgtggtggatgatgacctgcctgaggaggccgaggcctacctgctgcagatcctgccccacaccatccggggcggcgctgaggtgtctgagcctgctgagctgctcttctacatccaggacagtgatgatgtgtatggcctcatcaccttcttccccatggagaaccagaagattgagagcagccctggagagcgctacctgagcctgtccttcacccggctgggcggcaccaagggagatgtgcggctgctgtacagcgtgctgtacatcccagctggagctgtggaccccctgcaggccaaggagggcatcctgaacatcagcagaagaaatgacctgatcttccctgagcagaagacccaggtgaccaccaagctgcccatcagaaatgatgccttcctgcagaatggagcccacttcctggtgcagctggagaccgtggagctgctgaacatcatccccctcatcccccccatcagccccaggtttggagagatctgcaacatcagcctgctggtgaccccagccatcgccaatggagagatcggcttcctgagcaacctgcccatcatcctgcacgagcctgaggactttgctgctgaggtggtgtacatccccctgcacagagatggaacagatggccaggccaccgtgtactggagcctgaagcccagcggcttcaacagcaaggctgtgaccccagatgacatcggccccttcaatggatctgtgctcttcctgagcggccagagcgacaccaccatcaacatcaccatcaagggagatgacatccctgagatgaatgagaccgtgaccctgagcctggacagagtgaatgtggagaaccaggtgctgaagagcggctacaccagccgggacctgatcatcctggagaatgatgaccccggcggcgtgtttgagttcagccctgccagccggggcccctacgtgatcaaggagggggagagcgtggagctgcacatcatccgcagccggggcagcctggtgaagcagttcctgcactacagagtggagccccgggacagcaatgagttctacggcaacacaggagtgctggagttcaagccaggagagcgggagatcgtcatcaccctgctggcccggctggatggcatccctgagctggatgagcactactgggtggtgctgagcagccatggagagcgggagagcaagctgggcagcgccaccatcgtgaacatcaccatcctgaagaatgatgacccccacggcatcatcgagtttgtgtctgatggcctcatcgtgatgatcaatgaaagcaaaggagatgccatctacagcgctgtgtatgatgtggtgaggaacagaggcaactttggagatgtgtctgtgtcctgggtggtgtccccagacttcacccaggatgtgtttcctgtgcagggcaccgtggtgtttggagaccaggagttcagcaagaacatcaccatctacagcctgcctgatgagatccctgaggagatggaggagttcaccgtcatcctgctgaatggcaccggcggggccaaggtgggcaacagaaccacagccaccctgcgcatcagaagaaatgatgaccccatctactttgctgagccccgggtggtgcgggtgcaggagggggagacagccaacttcaccgtgctgagaaatggatctgtggatgtgacctgcatggtgcagtatgccaccaaggatggcaaggccacagcccgggagcgggacttcatccctgtggagaagggggagaccctcatctttgaggtgggcagccggcagcagagcatcagcatctttgtgaatgaagatggcatccctgagacagatgagcccttctacatcatcctgctgaacagcactggagacacagtggtgtaccagtatggagtggccaccgtcatcatcgaggccaatgatgaccccaacggcatcttcagcctggagcccatcgacaaggctgtggaggagggcaagaccaatgccttctggatcctgcggcaccggggctactttggatctgtgtctgtgtcctggcagctgttccagaatgattctgccctgcagcccggccaggagttctatgagaccagcggcaccgtgaacttcatggatggagaggaggccaagcccatcatcctgcacgccttcccagacaagatccctgagttcaatgagttctacttcctgaagctggtgaacatcagcggcggcagccctggccctgggggccagctggccgagaccaacctgcaggtgacagtgatggtgcccttcaatgatgacccctttggagtcttcatcctggaccctgaatgtctggagcgggaggtggctgaagatgtgctgtctgaagatgacatgagctacatcaccaacttcaccatcctgcggcagcagggcgtgtttggagatgtgcagctgggctgggagatcctgagcagcgagttccctgctggcctgccccccatgattgacttcctgctggtgggcatcttccccaccaccgtgcacctgcagcagcacatgagaagacaccacagcggcacagatgccctgtacttcaccggcctggagggcgcctttggaacagtgaaccccaagtaccaccccagcaggaacaacaccatcgccaacttcaccttcagcgcctgggtgatgcccaatgccaacaccaacggcttcatcatcgccaaggatgatggaaatggcagcatctactatggagtgaagatccagaccaatgaaagccacgtgaccctgagcctgcactacaagaccctgggcagcaatgccacctacatcgccaagaccaccgtgatgaagtacctggaggagagcgtgtggctgcacctgctgatcatcctggaggatggcatcatcgagttctacctggatggaaatgccatgccccggggcatcaagagcctgaagggggaggccatcacagatggccctggcatcctgcgcatcggggccggcatcaatggaaatgaccgcttcaccggcctgatgcaggatgtgcgctcctatgaaaggaagctgaccctggaggagatctatgagctgcacgccatgcctgccaagagtgacctgcaccccatcagcggctacctggagttccggcagggcgagaccaacaagagcttcatcatcagcgccagagatgacaatgatgaggagggggaggagctgttcatcctgaagctggtgtctgtgtatggaggagcccgcatcagcgaggagaacaccacagcccggctgaccatccagaagagtgacaatgccaacggcctgtttggcttcaccggggcctgcatccctgagattgctgaggagggcagcaccatcagctgtgtggtggagaggaccaggggggccctggactatgtgcacgtgttctacaccatcagccagattgaaacagatggcatcaactacctggtggatgactttgccaatgccagcggcaccatcaccttcctgccctggcagaggtctgaggtgctgaacatctacgtgctggatgatgacatccctgagctgaatgagtacttccgggtgaccctggtgtctgccatccctggagatggcaagctgggcagcacccccaccagcggggccagcattgatcctgagaaggagaccacagacatcaccatcaaggccagtgaccacccctacggcctgctgcagttcagcacaggcctgcccccccagcccaaggatgccatgaccctgcctgccagctctgtgccccacatcaccgtggaggaggaggatggagagatccggctgctggtgatccgggcccagggcctgctgggccgggtgacagctgagttcagaacagtgtccctgacagccttcagccctgaggactaccagaatgtggccggcaccctggagttccagcctggagagcgctacaagtacatcttcatcaacatcacagacaacagcatccctgagctggagaagagcttcaaggtggagctgctgaacctggagggcggcgtggccgagctgttccgggtggatggcagcggcagcggagatggagacatggagttcttcctgcccaccatccacaagagggccagcctgggcgtggccagccagatcctggtgaccatcgccgccagtgaccacgcccatggagtgtttgagttcagccctgagagcctgtttgtgtctggaacagagccagaagatggctacagcacagtgaccctgaatgtcatccgccaccacggcaccctgagccctgtgaccctgcactggaacatcgacagcgaccctgatggagacctggccttcaccagcggcaacatcacctttgagatcggccagaccagcgccaacatcaccgtggagatcctgcctgatgaagatcctgagctggacaaggccttctctgtgtctgtgctgtctgtgagcagcggcagcctgggcgcccacatcaatgccaccctgactgtgctggccagtgatgacccctacggcatcttcatcttcagcgagaagaacagacctgtgaaggtggaggaggccacccagaacatcaccctgagcatcatccggctgaagggcctgatgggcaaggtgctggtgtcctatgccaccctggatgacatggagaagccaccctacttcccccccaacctggcccgggccacccagggccgggactacatcccagccagcggctttgccctgtttggagccaaccagagcgaggccaccatcgccatcagcatcctggatgatgatgagcctgagaggtctgagagcgtcttcatcgagctgctgaacagcaccctggtggccaaggtgcagagccgcagcatccccaacagcccccggctgggccccaaggtggagaccatcgcccagctgatcatcatcgccaatgatgatgccttcggcaccctgcagctgagcgcccccatcgtgcgggtggctgaaaatcatgtgggccccatcatcaacgtgaccaggactggaggagcctttgctgatgtgtctgtgaagttcaaggctgtgcccatcacagccatcgccggggaggactacagcatcgccagcagtgatgtggtgctgctggagggggagaccagcaaggctgtgcccatctacgtgatcaatgacatctacccagagctggaggagagcttcctggtgcagctgatgaatgagaccaccggcggggcccggctgggcgccctgacagaagctgtgatcatcatcgaggccagtgatgacccctacggcctgtttggcttccagatcaccaagctgattgtggaggagcctgagttcaacagcgtgaaggtgaacctgcccatcatccggaacagcggcaccctgggcaatgtgacagtgcagtgggtggccaccatcaatggccagctggccaccggggacctgcgggtggtgtctggaaatgtgacctttgcccctggagagaccatccagaccctgctgctggaggtgctggctgatgatgtgcctgagattgaggaggtgatccaggtgcagctgacagatgccagcggcggcggcaccatcggcctggacagaattgccaacatcatcatcccagccaatgatgacccctatggaacagtggcctttgcccagatggtgtacagagtgcaggagcccctggagaggagcagctgtgccaacatcaccgtgcggcgcagcggcggccacttcggccgcctgctgctcttctacagcaccagtgacattgatgtggtggccctggccatggaggagggccaggacctgctgagctactatgagagccccatccagggcgtgcctgaccccctgtggaggacctggatgaatgtgtctgctgtgggggagcccctgtacacctgtgccaccctgtgcctgaaggagcaggcctgcagcgccttctccttcttcagcgccagcgagggcccccagtgcttctggatgacctcctggatcagccctgctgtgaacaacagcgacttctggacctacaggaagaacatgaccagggtggccagcctcttcagcggccaggccgtggccggcagtgactatgagcctgtgacccggcagtgggccatcatgcaggagggagatgaatttgccaacctgactgtgtccatcctgcctgatgacttccctgagatggatgagagcttcctgatcagcctgctggaggtgcacctgatgaacatcagcgccagcctgaagaaccagcccaccatcggccagcccaacatcagcacagtggtgattgccctgaatggagatgcctttggagtgtttgtgatctacaacatcagccccaacaccagtgaagatggcctgtttgtggaggtgcaggagcagccccagaccctggtggagctgatgatccacaggactggaggcagcctgggccaggtggccgtggagtggagggtggtgggcggcacagccacagagggcctggacttcatcggggccggggagatcctgacctttgctgagggggagaccaagaagacagtcatcctgaccatcctggatgattctgagccagaagatgatgagagcatcatcgtgtccctggtgtacacagagggcggcagccgcatcctgcccagcagtgacacagtgcgggtgaacatcctggccaatgacaacgtggccggcatcgtgtccttccagacagccagccgctctgtgattggacatgaaggagagatcctgcagttccacgtgatccgcaccttccctggaagaggaaatgtgacagtgaactggaagatcatcggccagaacctggagctgaactttgccaacttcagcggccagctgttcttccctgagggcagcctgaacaccaccctgtttgtgcacctgctggatgacaacatccctgaggagaaggaggtgtaccaggtgatcctgtatgatgtgaggacccagggcgtgcccccagctggcatcgccctgctggatgcccagggctatgctgctgtgctgactgtggaggccagtgatgagccccatggagtgctgaactttgccctgagcagcagatttgtgctgctgcaggaggccaacatcaccatccagctgttcatcaaccgggagtttggcagcctgggcgccatcaacgtgacctacaccaccgtgcccggcatgctgagcctgaagaaccagacagtgggcaacctggccgagcctgaggtggactttgtgcccatcatcggcttcctgatcctggaggagggggagacagctgctgccatcaacatcaccatcctggaggatgatgtgcctgagctggaggagtacttcctggtgaacctgacctacgtgggcctgaccatggccgccagcaccagcttccccccccggctggacagcgagggcctgacagcccaggtgatcattgatgccaatgatggagcccggggcgtcatcgagtggcagcagagcagatttgaggtgaatgagacccacggcagcctgaccctggtggcccagaggagccgggagcccctgggccacgtgtccctgtttgtgtatgcccagaacctggaggcccaggtgggcctggactacatcttcacccccatgatcctgcactttgctgatggagagcgctacaagaatgtgaacatcatgatcctggatgatgacatcccagaaggagatgagaagttccagctgatcctgaccaaccccagccctggcctggagctgggcaagaacaccatcgccctgatcatcgtgctggccaatgatgatggccctggggtgctgtccttcaacaacagcgagcacttcttcctgcgggagcccacagccctgtatgtgcaggagagcgtggccgtgctgtacatcgtgcgggagcccgcccagggcctgtttggcaccgtgacagtgcagttcatcgtgacagaggtgaacagcagcaatgaaagcaaggacctgacccccagcaagggctacatcgtgctggaggagggcgtgcgcttcaaggccctgcagatcagcgccatcctggacacagagcctgagatggatgagtactttgtgtgcaccctcttcaaccccactggaggagcccggctgggcgtgcacgtgcagaccctcatcaccgtgctgcagaaccaggcccccctgggcctcttcagcatctctgctgtggagaacagagccaccagcattgacatcgaggaggccaacagaacagtgtacctgaatgtgtccaggaccaatggaattgacctggccgtgtctgtgcagtgggagaccgtgtctgaaacagccttcggcatgaggggcatggatgtggtgttttctgtgttccagagcttcctggatgagagcgccagcggctggtgcttcttcaccctggagaacctgatctacggcatcatgctgaggaagagctctgtgacagtgtaccgctggcagggcatcttcatccctgtggaggacctgaacatcgagaaccccaagacctgtgaggccttcaacatcggcttcagcccctactttgtgatcacccatgaggagagaaatgaggagaagcccagcctgaacagcgtcttcaccttcaccagcggcttcaagctgttcctggtgcagaccatcatcatcctggagagcagccaggtgcgctacttcaccagtgacagccaggactacctgatcatcgccagccagagagatgattctgagctgacccaggtgttccgctggaatggaggcagctttgtgctgcaccagaagctgcctgtgcggggcgtgctgactgtggccctcttcaacaagggcggcagcgtcttcctggccatcagccaggccaatgcccggctgaacagcctgctcttccgctggagcggcagcggcttcatcaacttccaggaggtgcctgtgtctggcaccacagaggtggaggccctgagcagcgccaatgacatctacctgatctttgctgaaaatgtgttcctgggggaccagaacagcattgacatcttcatctgggagatgggccagagcagcttccgctacttccagagcgtggactttgctgctgtgaaccgcatccacagcttcaccccagccagcggcatcgcccacatcctgctgattggccaggacatgtctgccctgtactgctggaacagcgagaggaaccagttctcctttgtgctggaggtgcccagcgcctatgatgtggcctctgtgacagtgaagagcctgaacagcagcaagaacctgattgccctggtgggcgcccacagccacatctatgagctggcctacatcagcagccacagcgacttcatccccagcagtggagagctgatctttgagcccggggagcgggaggccaccatcgctgtgaacatcctggatgacacagtgcctgagaaggaggagagcttcaaggtgcagctgaagaaccccaagggcggcgctgagatcggcatcaatgattctgtgaccatcaccatcctgagcaatgatgatgcctatggaattgtggcctttgcccagaacagcctgtacaagcaggtggaggagatggagcaggacagcctggtgaccctgaatgtggagcggctgaagggcacctacggccgcatcaccatcgcctgggaggctgatggcagcatcagtgacatcttccccaccagcggggtcatcctcttcacagagggccaggtgctgagcaccatcaccctgaccatcctggccgacaacatccctgagctgtctgaggtggtgattgtgaccctgacccgcatcaccacagagggcgtggaggacagctacaagggggccaccatcgaccaggacaggagcaagagcgtcatcaccaccctgcccaatgacagccccttcggcctggtgggctggagggctgcctctgtgttcatccgggtggccgagcccaaggagaacaccaccaccctgcagctgcagatcgcccgggacaagggcctgctgggggacatcgccatccacctgcgggcccagcccaacttcctgctgcacgtggacaaccaggccacagaaaatgaagattatgtgctgcaggagaccatcatcatcatgaaggagaacatcaaggaggcccacgccgaggtgtccatcctgcctgatgacctgcctgagctggaggagggcttcatcgtgaccatcacagaggtgaacctggtgaacagcgacttcagcacaggccagcccagcgtgcggcggcccggcatggagattgctgagatcatgattgaagaaaatgatgacccccggggcatcttcatgttccacgtgaccagaggagctggggaggtgatcacagcctatgaggtgcccccacccctgaatgtgctgcaggtgcctgtggtgcggctggccggcagctttggagctgtgaatgtgtactggaaggccagcccagattctgctggcctggaggacttcaagcccagccacggcatcctggagtttgctgacaagcaggtgacagccatgattgagatcaccatcattgatgatgctgagtttgagctgacagagaccttcaacatcagcctcatctctgtggccggcggcggccgcctgggagatgatgtggtggtgacagtggtgatcccccagaatgacagcccctttggagtgtttggatttgaggagaagacagtgatgattgatgagagcctgagcagtgatgatcctgacagctatgtgaccctgactgtggtgcgcagccctgggggcaaaggaacagtgcggctggagtggaccattgatgagaaggccaagcacaacctgagccccctgaatggcaccctgcactttgatgaaacagagagccagaagaccatcgtgctgcacaccctgcaggacacagtgctggaggaggaccggcgcttcaccatccagctgatcagcattgatgaggtggagatcagccctgtgaagggcagcgccagcatcatcatccggggggacaagagggccagcggggaggtgggcatcgcccccagcagccgccacatcctgattggagagcccagcgccaagtacaacggcacagccatcatcagcctggtgcggggccctggcatcctgggggaggtgaccgtcttctggaggatcttccccccatctgtgggggagtttgctgagaccagcggcaagctgaccatgagagatgagcagagcgctgtgattgtggtgatccaggccctgaatgatgacatccctgaggagaagagcttctatgagttccagctgacagctgtgtctgagggcggcgtgctgtctgagagcagcagcacagccaacatcaccgtggtggccagtgacagcccctacggccgctttgccttcagccatgagcagctgcgggtgtctgaggcccagagggtgaacatcaccatcatccgcagcagcggggactttggacatgtgcggctgtggtacaagaccatgagcggcacagctgaggccggcctggactttgtgcctgctgctggggagctgctgtttgaggccggggagatgaggaagagcctgcacgtggagatcctggatgatgactacccagagggccctgaggagttcagcctgaccatcaccaaggtggagctgcagggccggggctatgacttcaccatccaggagaatggcctgcagattgaccagcccccagagatcggcaacatcagcatcgtgcgcatcatcatcatgaagaatgacaatgctgagggcatcatcgagtttgaccccaagtacacagcctttgaggtggaggaggatgtgggcctcatcatgatccctgtggtgcggctgcacggcacctacggctacgtgacagctgacttcatcagccagagcagcagcgccagccctggaggagtggactacatcctgcacggcagcacagtgaccttccagcacggccagaacctgtccttcatcaacatcagcatcattgatgacaatgaaagtgaatttgaggagcccatcgagatcctgctgactggagccaccggcggcgctgtgctgggccgccacctggtgagccgcatcatcatcgccaagagtgacagcccctttggagtcatccgcttcctgaaccagagcaagatcagcatcgccaaccccaacagcaccatgatcctgagcctggtgctggagaggactggaggcctgctgggggagatccaggtgaactgggagaccgtgggccccaacagccaggaggccctgctgccccagaacagagacattgctgaccctgtgtctggcctcttctactttggagagggggagggcggcgtgaggaccatcatcctgaccatctacccccatgaggagattgaggtggaggagaccttcatcatcaagctgcacctggtgaagggggaggccaagctggacagccgggccaaggatgtgaccctgaccatccaggagtttggagaccccaatggagtggtgcagtttgcccctgagaccctgagcaagaagacctacagcgagcccctggccctggagggccccctgctgatcaccttctttgtgagaagagtgaagggcacctttggagagatcatggtgtactgggagctgagcagcgagtttgacatcacagaggacttcctgagcaccagcggcttcttcaccatcgcagatggagagagcgaggccagctttgatgtgcacctgctgcctgatgaggtgcctgagattgaggaggactatgtgatccagctggtgtctgtggagggcggcgctgagctggacctggagaagagcatcacctggttctctgtgtatgccaatgatgacccccatggagtgtttgccctgtacagcgaccggcagagcatcctgattggccagaacctgatccgcagcatccagatcaacatcacccggctggccggcacctttggagatgtggccgtgggcctgcgcatcagcagtgaccacaaggagcagcccatcgtgacagaaaatgctgagcggcagctggtggtgaaggatggagccacctacaaggtggatgtggtgcccatcaagaaccaggtgttcctgagcctgggcagcaacttcaccctgcagctggtgacagtgatgctggtgggcggccgcttctacggcatgcccaccatcctgcaggaggccaagtctgctgtgctgcctgtgtctgagaaggccgccaacagccaggtgggctttgagagcacagccttccagctgatgaacatcacagctggcaccagccacgtgatgatcagcagaagaggcacctatggagccctgtctgtggcctggaccaccggctacgcccctggcctggagatccctgagttcatcgtggtgggcaacatgacccccaccctgggcagcctgtccttcagccacggggagcagaggaaaggagtcttcctgtggaccttccccagccctggctggccagaggcctttgtgctgcacctgagcggcgtgcagagcagcgcccctggaggagcccagctgcggagcggcttcatcgtggccgagattgagcccatgggcgtcttccagttcagcaccagcagcaggaacatcatcgtgtctgaggacacccagatgatccggctgcacgtgcagaggctgtttggcttccacagcgacctgatcaaggtgtcctaccagaccacagctggcagcgccaagcccctggaggactttgagcctgtgcagaatggagagctgttcttccagaagttccagacagaggtggactttgagatcaccatcatcaatgaccagctgtctgaaattgaggagttcttctacatcaacctgacctctgtggagatccggggcctgcagaagtttgatgtgaactggagcccccggctgaacctggacttctctgtggccgtcatcaccatcctggacaatgatgacctggccggcatggacatctccttccctgagaccaccgtggccgtggccgtggacaccaccctcatccctgtggagacagagagcaccacctacctgagcaccagcaagaccaccaccatcctgcagcccaccaacgtggtggccatcgtgacagaggccactggagtgtctgccatccctgagaagctggtgaccctgcacggcaccccagctgtgtctgagaagccagatgtggccaccgtgacagccaacgtgtccatccacggcaccttcagcctgggccccagcatcgtgtacatcgaggaggagatgaagaatggcaccttcaacacagctgaggtgctgatccggaggactggaggcttcaccggaaatgtgtccatcaccgtgaagaccttcggggagcgctgtgcccagatggagcccaatgccctgcccttccggggcatctacggcatcagcaacctgacctgggccgtggaggaggaggactttgaggagcagaccctgaccctcatcttcctggatggagagcgggagaggaaggtgtctgtgcagatcctggatgatgatgagcctgagggccaggagttcttctacgtgttcctgaccaacccccagggcggggcccagatcgtggaggagaaggatgacaccggctttgctgcctttgccatggtgatcatcactggaagtgacctgcacaacggcatcatcggcttcagcgaggagagccagagcggcctggagctgcgggagggcgctgtgatgaggcggctgcacctgattgtgacccggcagcccaacagagcctttgaagatgtgaaggtgttctggagggtgaccctgaacaagacagtggtggtgctgcagaaggatggagtgaacctggtggaggagctgcagagcgtgtctggcaccaccacctgcaccatgggccagaccaagtgcttcatcagcattgagctgaagccagagaaggtgccccaggtggaggtgtacttctttgtggagctgtatgaggccacagctggagctgccatcaacaacagcgccaggtttgcccagatcaagatcctggagagtgatgagagccagagcctggtgtacttctctgtgggcagccggctggccgtggcccacaagaaggccaccctcatcagcctgcaggtggcccgggacagcggcaccggcctgatgatgtctgtgaacttcagcacccaggagctgcggtctgctgagaccatcggccgcaccatcatcagccctgccatcagcggcaaggactttgtgatcacagagggcaccctggtgtttgagcccggccagaggagcacagtgctggatgtgatcctgaccccagagaccggcagcctgaacagcttccccaagcgcttccagatcgtgctgtttgaccccaagggcggggccagaattgacaaggtgtatggaacagccaacatcaccctggtgtctgatgctgacagccaggccatctggggcctggccgaccagctgcaccagcctgtgaatgatgacatcctgaacagagtgctgcacaccatctccatgaaggtggccacagagaacacagatgagcagctgagcgccatgatgcacctgattgagaagatcaccacagagggcaagatccaggccttctctgtggccagcaggaccctcttctatgagatcctgtgcagcctcatcaaccccaagaggaaggacacccggggcttcagccactttgctgaggtgacagaaaattttgccttcagcctgctgaccaacgtgacctgtggcagccctggagagaagagcaagaccatcctggacagctgcccctacctgagcatcctggccctgcactggtacccccagcagatcaatggccacaagtttgagggcaaggagggggactacatccgcatccctgagcggctgctggatgtgcaggatgctgagatcatggccggcaagagcacctgcaagctggtgcagttcacagagtacagcagccagcagtggttcatcagcggcaacaacctgcccaccctgaagaacaaggtgctgagcctgtctgtgaagggccagagcagccagctgctgaccaatgacaatgaggtgctgtaccgcatctatgctgctgagccccgcatcatcccccagaccagcctgtgcctgctgtggaaccaggccgccgcctcctggctgagtgacagccagttctgcaaggtggtggaggagacagctgactatgtggagtgtgcctgcagccacatgtctgtgtatgctgtgtatgccaggacagacaacctgagcagctacaatgaggccttcttcaccagcggcttcatctgcatcagcggcctgtgcctggccgtgctgagccacatcttctgtgcccgctacagcatgtttgctgccaagctgctgacccacatgatggccgccagcctgggcacccagatcctcttcctggccagcgcctatgccagcccccagctggccgaggagagctgcagcgccatggctgctgtgacccactacctgtacctgtgccagttctcctggatgctgatccagagcgtgaacttctggtacgtgctggtgatgaatgatgagcacacagagcggcgctacctgctcttcttcctgctgtcctggggcctgcctgcctttgtggtgatcctgctgattgtcatcctgaagggcatctaccaccagagcatgagccagatctacggcctcatccacggggacctgtgcttcatccccaacgtgtatgctgccctcttcaccgctgccctggtgcccctgacctgcctggtggtggtgtttgtggtgttcatccacgcctaccaggtgaagccccagtggaaggcctatgatgatgtgttccggggccgcaccaatgctgctgagatccccctcatcctgtacctgtttgccctgatctctgtgacctggctgtggggcggcctgcacatggcctaccgccacttctggatgctggtgctgtttgtgatcttcaacagcctgcagggcctgtatgtgttcatggtgtacttcatcctgcacaaccagatgtgctgccccatgaaggccagctacacagtggagatgaatggccaccctggccccagcacagccttcttcaccccaggcagcggcatgcctcctgctggaggagagatcagcaagagcacccagaacctgattggagccatggaggaggtgcccccagactgggagcgggccagcttccagcagggcagccaggccagcccagacctgaagcccagcccccagaatggagccaccttccccagcagcggcggctacggccagggcagcctgattgctgatgaggagagccaggagtttgatgacctgatctttgccctgaagacaggagctggcctgtctgtgtctgacaatgaaagtggccagggcagccaggagggcggcaccctgacagacagccagatcgtggagctgcggcgcatccccatcgctgacacccacctgtag

SEQ ID NO: 222910 - DNA, 18921 bp, Artificial Sequence
  derived and/or modified sequence
atggacatcttcctggtgctgggcatgcccagcgccagcctgctggtaaacctactgtctgccctgctgatcctgtttgtcttcggcgagactgagatacgcttcacgggacagactgagttcgtggtgaacgagacctcaacgaccgtaatcaggttgattattgagaggatcggtgagccagctaacgtaactgcgatcgtctcactgtacggtgaggatgcaggagatttttttgacacttacgcggcagcttttattcccgctggggagactaaccggacagtgtatatagccgtctgtgacgacgacctgcccgagcctgacgagaccttcatcttccatctcactctgcaaaaacccagtgctaacgtgaaactgggctggccccgaactgtcacagtcacaatactgtctaatgacaacgcattcggcatcatttcctttaacatgctgccctccatcgcagtgtccgaacctaaaggccgaaatgaatctatgcccctgactctgatcagagagaaagggacctacggcatggtgatggtgacgtttgaggtggagggggggcccaaccctcctgatgaagatttgagccccgtcaaggggaacatcaccttcccccccgggcgcgcaactgtgatctataacctcacagtcttggacgatgaggtccccgaaaatgacgagatcttcctcatccagcttaaaagtgttgaaggaggggcagagattaacaccagtagaaacagtatagaaataatcattaagaagaatgactcgccagtgcgattcctgcaaagtatctatttggtgcccgaggaagaccatatcctgataattccagtcgtacgcggcaaggacaataatggcaatttgatcggctctgatgaatatgaggtatctatctcatatgctgtgaccactggaaattcaaccgctcatgcccaacagaatctcgacttcatcgatcttcaaccgaataccactgtcgtctttccccccttcattcacgagtcacatttgaaattccagatcgtggacgatacaatacctgagatcgccgaatccttccacataatgctcttgaaggacacgctacagggggacgctgtcttgatcagccccagcgtcgtgcaagttacaattaagcccaacgacaagccctacggagtgttgtccttcaactcggttctctttgagcgcacggttatcatcgacgaggaccgaattagtagatatgaagagattactgtggtcagaaatggtggcacccatggaaatgtaagtgctaattgggtgttaaccaggaattcgaccgatccttctccggttactgccgatatacgaccaagttccggcgtattacacttcgcccaaggtcagatgctcgctactatcccactgaccgtggttgacgacgatctccccgaagaggccgaagcttacttgctgcaaatactgccgcacactatcagaggtggcgctgaggtgagcgagccagcagagctactattctatatccaggactcagatgacgtgtacggattaatcaccttcttccctatggagaaccagaagatcgagagctctccaggagagagatacctgtccctctccttcacacgtctgggaggtactaaaggcgacgttagattgctttatagtgtgctgtacatacctgcaggcgccgttgatcccctgcaggccaaggaaggcatcctgaacatttccaggagaaatgacctgatcttccccgagcagaagacacaggttacaaccaagctcccgatccgcaacgacgcttttctacagaacggagcccacttcctggtgcaactggagacagtggagctgttgaacattatcccgttgataccaccgattagtcctagatttggcgagatctgtaatataagcttacttgtgaccccagccatcgctaacggggagatcggctttctttctaacttgccgattatactgcatgagcctgaggatttcgcagcggaggtggtgtacattccactgcatagagacggaacagacgggcaagctaccgtgtactggagcctaaaaccttccggctttaacagcaaagccgttacccccgacgacattggacctttcaatggatccgttcttttcttatctgggcagagcgatacgactatcaatataaccatcaaaggcgacgatattcccgagatgaatgaaactgtcacgctgtccttggacagggttaacgttgaaaatcaggttcttaaatccggatacaccagtcgcgacctgatcatcttggaaaacgatgaccccggcggagtgttcgaattctcacccgcatctagggggccttatgttatcaaggaaggcgagtcagtggagctgcatataattcgttcccggggctcactcgtcaaacagttcctgcattaccgcgttgagccacgggactccaacgagttctacggtaacacgggcgtcttggagtttaaaccgggcgagcgcgaaattgtgataaccctcctggcacgtctggacggaataccagaactggacgagcactattgggttgtcctgtccagtcacggagagcgcgagtcaaagctgggtagtgcgacgatcgtgaatattacaattctcaagaatgacgacccacacggcatcatagaatttgtaagtgatgggcttatcgtgatgatcaatgagagtaaaggggatgctatctatagtgcggtgtacgatgttgttagaaataggggaaacttcggcgatgtgtctgtgtcatgggttgtgtctcctgacttcacacaggatgtattccccgtgcagggaaccgtcgtgtttggcgatcaagaattcagcaaaaacatcaccatatattctctgccggatgagattcctgaggagatggaggaatttacggtgattctcctgaacggaacaggaggggccaaggtgggaaaccggacaactgcaacactgcgcatccggcgcaacgacgatcccatctatttcgccgaaccccgggttgttagagtgcaggaaggagagactgccaattttaccgtgctccgcaacggctcagtggacgtcacctgtatggtgcagtatgccacgaaggacgggaaggccacagctcgagagcgggatttcatcccggtagaaaaaggagaaacactcatatttgaggtggggtcgcgacagcagtccatcagtatatttgttaatgaggatgggattcccgagacagacgaacccttttacatcatcctactcaatagcaccggcgacactgtggtgtatcaatacggcgtcgccaccgtgattatagaggcgaatgacgaccccaacgggatcttcagcctcgaaccaatagataaggctgtcgaggagggcaagacaaatgcattctggatcctaaggcatcgcggttatttcggcagtgtgtccgttagttggcagctgttccaaaatgacagcgcccttcagccaggtcaggagttctacgaaacttctggaactgttaacttcatggacggcgaagaggctaaacctattatcctccacgcattcccagacaaaatacctgaatttaacgaattctacttcttgaagctggtgaatattagcggcgggagccccggccctggcggccaactcgcagagacaaacctccaggtgaccgtaatggtccccttcaatgacgatccattcggggtctttatcctcgaccctgagtgtttggagagggaggtggctgaagatgttctcagcgaggatgatatgagctatattactaactttactatcctccgccagcagggtgtgttcggtgacgtacaattggggtgggagattttgagctcagaattcccagctggcctgcctcctatgattgactttctcttggttggaattttcccaacgacagtacacctgcaacaacatatgcgccggcaccattctggtacagacgccctgtactttaccggcttggagggcgcatttggcaccgtcaaccctaagtaccaccctagtcggaacaatactattgccaactttacttttagcgcttgggtaatgccgaatgcaaataccaatggtttcattatcgccaaggatgacggcaatgggtcaatttattatggagtaaagattcagaccaacgagtctcacgttaccctttcactccattacaaaaccctcgggagcaacgctacctacatcgctaagaccactgtcatgaagtatttagaggagagcgtgtggctgcacctgttgattatcctcgaggatggcatcattgagttctacctggatggaaacgctatgcctagaggtatcaaaagcctaaaaggcgaggcaataaccgatgggccgggcattctgcggataggcgccggcattaacgggaacgaccgttttacaggactgatgcaggacgtgcgcagctatgagaggaaactgaccctggaagagatttacgagctgcatgccatgcctgccaagtctgatttacacccaatctcaggatacttggaatttcgccagggcgaaactaataagagcttcatcatttctgcacgagacgataatgatgaggaaggggaggagctgtttatactcaaactggtgtccgtctatggtggcgcgagaatctccgaggagaacactacagccaggctgacaatccaaaagagtgataacgccaatgggctattcgggtttacaggcgcatgcatccctgagatcgctgaagagggctctaccatttcatgcgttgttgagcgcactcggggcgcactggattatgttcacgttttctacaccatttcacagatcgaaaccgatggtattaactatctcgtggacgatttcgccaatgcctcaggtactatcacattcctgccctggcaacgctcagaagttctgaacatatacgtgctcgacgatgacatacctgaactgaacgaatactttcgggtcaccctagtatcagccatacctggagacggcaaattgggatccacccccacaagtggcgcaagtattgaccccgagaaggagaccacggatataaccatcaaagcgtcggatcacccctatggcctcctgcaattttccactgggctccctcctcagcctaaggatgccatgacactgcccgcgagttcagtgccacacatcacagttgaagaagaagatggcgaaatcagactcctcgtgattcgtgcccagggtttgcttggtagggtcaccgccgaatttcggaccgtgagcttaactgccttcagccctgaggactaccagaatgtggccggaactctggaatttcagcccggtgagagatacaagtacatctttatcaacataactgataatagtattccagaactggagaagtcctttaaagtggagctgcttaacttggagggcggggtggcggagctgttccgcgtggacggttctggtagcggtgatggtgacatggaattctttctcccaactattcacaagcgcgcatcactgggtgttgcatcccagatcctggtgactatagccgccagcgaccacgcccatggcgtctttgagttcagtcccgagtccctgtttgtgagtggcaccgagcctgaagacggttattctacggtcacccttaatgtcattagacaccacggcactcttagcccagtaactctacactggaatattgactctgatccagatggagatcttgctttcacttccggaaatatcaccttcgagataggccagactagtgccaatatcacagtggaaatactgcccgacgaagatcccgagcttgataaggccttctcggtctcagttctgtcagtttccagcggctcattaggggcacacattaatgcaactcttactgtgctggcctcggatgacccgtacggcatcttcattttttccgagaagaatcgcccagtgaaagttgaggaagccacccagaacatcactctttccataatcaggctgaaggggctgatgggcaaggtcttagtctcctacgccactctggatgatatggagaaacctccgtattttcctccgaacttggctcgcgccacacagggccgggattacatccctgcctccgggttcgctttgtttggagcaaatcaatccgaagcaaccatagctatatctatcctcgacgacgacgagcctgagcggtctgagtctgttttcatcgaactgctcaactccactctcgtcgcgaaggtacagtcacgaagtatcccaaatagccctcgcttagggcccaaagtcgagactatcgcccagctgataattatcgctaacgacgacgcgtttggaaccttacaactgagcgccccgatcgttcgcgtggccgagaaccacgtcggtcccatcattaacgtcacgcgaaccgggggcgccttcgctgatgtgagcgtgaagtttaaagcagtgccaataaccgccattgcgggtgaggattattcgattgcatccagcgatgttgtgttgctagagggagaaacgagtaaggctgtaccaatttacgtgataaacgacatctacccagagctggaagaatcctttcttgtgcaactgatgaatgagaccacaggtggagctagactcggcgcactgactgaagctgtcataatcattgaagcgagcgatgatccatatggcttgttcgggttccagatcacaaagctgatagtggaggaacccgagttcaattccgtaaaggtgaatctcccgattattagaaactctggcaccctaggaaacgtgactgtccagtgggttgccactataaacggtcagttggcaaccggggatcttcgtgttgtctctgggaatgtgacatttgcgccgggtgagacaatacagactctgctgctcgaggtcctggccgacgacgttccagaaatcgaagaagtgatccaggtacagctgactgacgcctccggaggagggaccataggcctcgacagaatagccaacatcatcatcccagccaacgacgacccctatgggacagttgcatttgcgcagatggtgtaccgggtgcaggagcctctcgagaggtctagctgcgctaacattactgtcaggcgctcagggggccattttgggcgcttgctgctgttctatagcaccagcgacatagatgtggtggcacttgctatggaggaggggcaagatttgctgtcctattacgagtcccccattcagggcgtgcctgatcctttatggcgcacctggatgaacgtgtccgccgtgggcgaaccgctttacacatgcgctacactgtgcttgaaggagcaggcctgctctgccttctcttttttctctgcttctgaagggccacagtgcttctggatgacatcatggatcagcccggcggtgaacaactcagacttttggacatacagaaagaacatgacgagggtggccagcctgtttagcgggcaagctgtggccggctctgactacgagccagtgacccgccagtgggctattatgcaggagggagatgaattcgcaaatctgactgtgtcaattttacctgatgactttccagagatggatgagagcttcctcatttctctcctagaggtgcacctgatgaatataagcgcctcactcaagaatcagccgaccattggccagcccaacataagcactgtggtgatcgctttaaacggggacgcattcggagtttttgtgatatacaacatttccccgaacacttccgaggacggcttattcgttgaagttcaggagcagccccagacgcttgtcgagctgatgattcatcgtacaggtggctccctcggccaggtcgccgtcgaatggagggtggttgggggcacagccaccgaggggctcgactttatcggggccggggagattcttaccttcgctgaaggggagaccaaaaagaccgtgattctgactattcttgacgactccgagcccgaggacgacgagtccattattgtctcgctggtctataccgaaggaggttctagaatcctcccctcttccgacaccgtccgggtcaacattcttgctaatgacaacgtcgcaggaatcgtttccttccaaactgctagtcgatctgtgattggtcacgaaggcgaaatcctgcaattccacgttattcgcacctttccaggtagaggtaatgtgaccgtcaactggaaaatcataggccagaacttggaactcaatttcgcaaatttctccgggcagctatttttcccagagggcagccttaacaccactctcttcgtgcacctcttggacgacaacattcccgaggagaaggaggtgtatcaagttatattatacgacgtgagaacacaaggcgtacctcctgcaggcattgccctgcttgacgcccagggctatgctgctgtgctgacagtggaagcttccgatgaaccccacggcgttctgaatttcgcgttgtccagccggttcgtgcttctgcaagaagcaaatattacaatacaattgtttatcaatcgggaatttggctcccttggtgccatcaatgtgacctacacaacggtgcccgggatgctctcgctgaagaaccagacagtgggcaacctcgcagaacccgaagtggatttcgtgcctatcatcggctttttaatcttggaagaaggggagacggccgccgccatcaatataaccattctggaagatgacgtaccggaattggaagaatatttcctcgtaaatctaacatatgtcggattgacaatggccgctagcacctcttttcccccgcggctcgactctgaggggctgacagctcaggtcataatagatgctaatgacggcgcaagaggggtcattgagtggcagcagagcaggtttgaagtgaacgaaacccacggttccttgactctggtcgcccagcgttccagggaacccttgggacatgtgtccctctttgtctacgcgcaaaacttggaggcacaagttggcctcgattacattttcaccccgatgatcctccatttcgctgatggcgaaaggtacaagaacgtgaatataatgatcttggacgatgacatccccgagggagatgagaagtttcagttgattctaaccaacccaagccccggtctggagttaggtaagaacactatcgccctcattatagtgttggctaacgatgatggaccgggcgtcctatcattcaataacagcgagcacttcttcctgagagaacccaccgcattgtacgtgcaagagtctgtcgccgttttatatatcgtacgtgagcccgcccagggtctcttcggtactgtcacggtacagtttatcgttactgaggtaaattctagtaatgagtccaaggatctgaccccctccaagggctatattgtactggaagagggagtgcgatttaaagctctgcagatctcagccatcctggacaccgagccagagatggatgagtacttcgtgtgtaccctgtttaatccaaccggtggggcaagactgggcgttcacgtccaaaccctgatcacagtccttcaaaatcaggctcctcttggactgttctcaatatcggccgtggagaatcgagctacaagcatcgacatcgaggaggcaaaccgaacagtgtatttgaacgtgagccggacaaacggcattgaccttgctgtctccgtgcagtgggagactgtcagtgagacagcattcggcatgagaggaatggatgttgtcttttcagtgtttcagtcctttttggatgagtccgcaagcggctggtgcttctttaccctggaaaacttaatctatggtatcatgctgaggaagtcctccgtgacagtgtacagatggcaaggcatatttattccagtggaagatctgaacatagagaaccctaagacatgtgaggcctttaatatcggctttagcccatactttgtgatcacccacgaggagcggaatgaggagaaacctagcctcaacagtgtgtttacattcacatctggatttaagctttttttagttcagacgataatcattttagagtcctctcaagtgcggtatttcacctctgatagtcaggattaccttattatcgccagccagcgggacgacagtgagttgacccaggtgtttcgctggaatgggggatcatttgtgctccaccagaagctgcctgtgaggggcgtgctgaccgtggctttgttcaataaaggaggcagtgtctttctagcaatctctcaggctaatgcaaggttaaacagcttactcttccgctggagtggaagcgggttcattaactttcaggaagtgcccgtgagtggcaccactgaggtggaagccctcagctcagctaacgacatttatctgatttttgcggaaaacgtattcctgggagatcagaacagcatcgacatcttcatctgggaaatgggtcagagctccttcagatatttccagtcagtggatttcgccgccgtgaatcggattcacagttttactccggcatccggaattgcacatattctcttgatcggacaggatatgtccgcactgtactgctggaacagtgagcgaaatcagttcagttttgtactggaagttcccagtgcttatgacgtggcctctgtgaccgtgaaaagcttgaactctagtaaaaacctgatcgcactggtaggggcacatagtcacatctacgaattagcttacatcagttcacacagtgactttatcccaagctccggtgaactcatatttgagcctggggaacgggaggccacaatcgcagtgaacatactggatgacaccgtgcctgaaaaggaagaatctttcaaagtgcagctgaagaacccaaaggggggcgccgagatcgggattaacgacagcgtcacgattactattctttcaaacgatgacgcgtacgggatcgtggccttcgcccaaaactccctctacaaacaggtggaggagatggaacaggacagcctagtcactctcaacgtggaacgtttgaagggaacctatggccgcatcaccatcgcttgggaagctgatggatccatcagtgacatctttcctacaagcggtgtaatcttatttacagagggacaggtcctcagcactataaccttaactattctggctgacaatattccggaactatccgaggtagtaatcgtgactctaacacgcataaccaccgaaggtgtcgaagattcctataagggagccaccattgatcaggatcgcagcaagtccgtgattaccactctgcccaatgatagtccattcggcctagttggatggagagccgctagcgtattcatccgggtcgccgagcctaaagaaaacaccaccacactacagctacaaattgcgcgcgataagggactgctaggggacattgccatccaccttcgggcccagcccaactttctcttgcacgtcgacaaccaggctactgagaatgaggattatgttcttcaggagacaatcataatcatgaaagagaatataaaagaggcacacgcagaggtgagtattttaccagatgacctcccagagcttgaagagggcttcatcgtgactatcaccgaagtcaatttagtgaactccgattttagtacagggcagccttcagtccggcgtccaggtatggagattgcggaaattatgattgaggaaaatgatgatccacggggaatcttcatgttccacgtgacaaggggggcgggggaagtaattaccgcttatgaagttcctcccccactcaacgtccttcaggtcccagtggtgaggctcgctgggagctttggtgctgtcaacgtgtattggaaggcaagtcccgactcagccggactcgaagactttaaaccctcgcacggtattcttgagtttgcagataaacaggtgaccgcgatgatcgaaattacaatcatcgacgacgccgagtttgagctgacagagacatttaacatcagcctcatttctgttgcaggaggaggacgcctcggggatgatgtcgtggttacggtcgtcatacctcagaacgattctccctttggtgtgtttggctttgaggagaagacggtgatgatcgacgagtcgctgtccagcgacgaccctgattcttacgtcaccctgacggtggttaggtctcctggtggaaaaggcacagtgcgacttgaatggacaatagacgagaaggctaaacataacctttctccactaaacggaacgttgcacttcgacgaaactgaatctcaaaaaactatagtactgcacaccctgcaggatacagtattggaagaggaccgccggttcactatccagttaatctctatcgatgaagtggagatatcacccgtcaaaggctctgctagtataattattcggggtgataagagagccagcggagaggttggcatcgcgccatcttcaagacatatcctgattggggaaccttccgctaagtacaacggcactgcaatcatttctttagtgcgaggccctggtattctcggggaggtgaccgtgttctggagaatatttccaccgagcgtaggggagtttgcagagacaagtggtaaactgaccatgagggacgaacagagcgcagtgatcgtagtcatccaagctctcaacgatgacatccccgaagagaaatcattctatgaattccagctgacagcagtctcagagggaggggtgctgtcagagtcttcatccactgctaatatcaccgtggtcgccagcgactcaccctatggtcggtttgccttctctcatgagcagctgcgagtgagcgaggcccaaagggtgaacatcacaatcatccggagttccggcgactttgggcacgtccggctctggtacaagactatgtcagggactgcagaggctggattggattttgtcccggcagctggggagttgctcttcgaagccggggaaatgcgcaagtccctgcacgtggagattcttgatgacgattaccccgagggacccgaagagttctctttgacgataactaaagtcgagctacaaggccgagggtacgactttactatccaagagaacggactccagatcgaccagcccccggaaattggaaatatttctatcgtgcgaataattataatgaaaaacgacaatgctgaagggattatcgagttcgatccaaaatacacagcattcgaggtggaggaggatgtaggcctgatcatgatccctgtagtgaggcttcacggaacatatggttacgtgaccgccgactttatcagccagtcaagttctgctagtcccggcggggtggattacatactgcatgggtcaacggtcacgttccagcatggacaaaatttatcattcatcaacatctctatcatcgatgacaacgagtccgagttcgaagaacctattgagattttactcacgggggctactggaggtgcagtcctggggagacacctagtgtctagaattatcatagcaaaaagcgactcaccctttggcgtcattcgatttcttaatcagtccaagatctcaattgcgaatccaaattcaacgatgatcctgagccttgttctggaacgaacagggggactcctgggcgagatccaggtgaattgggaaacagtgggccccaacagccaggaagctctgctgcctcagaatagggatatagcagacccagtttctgggctgttctactttggggaaggggagggtggcgttcgcaccataatcctaacaatctacccccacgaggaaatagaagtagaggaaacgtttatcattaaacttcatcttgtgaaaggtgaggccaagttggacagccgggccaaggacgtgactttgactatccaggagtttggggaccctaatggggtggtgcaatttgctcctgagaccttgagtaaaaaaacgtacagcgagcctctggctctggagggacccctgttaatcacattcttcgtgaggagggtcaagggtacgttcggtgaaatcatggtctactgggaattaagctctgagtttgacattacagaagactttttgtccacctcaggattttttaccattgccgacggtgagtccgaagcctcctttgacgttcatctgcttccagacgaagtgccagagattgaggaggactacgtgatacagttggtgtccgtggaaggcggcgctgagcttgacctggagaagtcaatcacctggttctcagtttatgccaacgatgacccacacggcgtcttcgctttgtactctgatcgccagtccattctgataggtcagaatctcatcagaagcattcagataaacataacacgcctcgccgggacatttggggatgtagcggtgggtctgcgcattagcagtgaccacaaggagcagcccattgtgacagagaatgccgagaggcagctggtggtgaaggacggggcaacatacaaggtggacgtcgtgcctataaagaaccaggtgtttctgtctttggggtctaattttacgctgcaactggtcacggtcatgctcgtagggggccggttctacgggatgccaacgatcctgcaggaggccaagtcagctgtgctgccggtgtctgaaaaggctgcaaactctcaagtgggtttcgagtctaccgcctttcagctgatgaacatcaccgctggtacttcacacgtgatgattagcagaagaggcacctatggggccctcagcgtcgcctggacaaccggctacgctccgggcctcgaaatccctgaatttatagtagtcggtaacatgacacccacgcttggaagcctttcttttagccacggcgagcaacgaaagggcgtattcctgtggacctttccaagccccggctggcccgaagcctttgttctgcacttgtcaggagtccagtcgagtgctcccggcggagcccaactgaggagcgggttcatcgttgctgaaatcgaacccatgggagtttttcagttttccacatcctcccgtaacattatcgtgtcggaggacacccaaatgatacgactgcacgttcagcgcctcttcggattccattctgatttaatcaaggtcagttaccaaacaacagccggaagcgcaaaaccactggaggacttcgagccagtacaaaacggcgaacttttcttccaaaaatttcagaccgaagtagacttcgagataacaatcattaatgatcagctctcagaaatcgaggaatttttttacattaatctaacttctgtcgaaatccggggtttgcagaagtttgacgtcaactggtcaccccggctgaacctggatttctctgtggctgtaattaccatcttggacaacgatgacctcgcaggaatggatataagcttcccagaaaccacagttgctgtggcggtcgataccacattaatccctgtagagactgaatccacaacttacctgtccactagtaaaacaactacgatacttcagcctacaaatgtagtcgcaattgtaacggaagctacaggggtcagtgccatcccagagaagcttgtgacgcttcacggtacccccgctgtatcagagaagcccgatgtcgccactgtcactgctaatgtttccattcacggcacattttcgctggggccatcgatcgtctacattgaagaggagatgaaaaatgggactttcaatactgccgaagtcctaatacgccgcaccggagggtttaccgggaacgtgtctattaccgtcaaaactttcggcgaacgctgcgcccaaatggagccaaacgccctcccatttcggggtatctacggcatttctaatctgacatgggccgttgaggaggaggactttgaagagcagacccttaccctgatatttctggatggagagcgagagcgcaaagtatcagtgcagatcttggatgatgacgagcctgaaggtcaggaattcttttacgtgttcttgacaaacccccagggaggcgcccagattgtggaagagaaggatgatactggctttgcagctttcgctatggttatcataacaggatctgatctccacaacggtattattggcttcagcgaggagtcgcagtctggtttagagcttcgcgaaggggccgtgatgcgcagactccacctcatagtaacacgccagccgaatagagcctttgaggacgtgaaggttttctggagggttactctcaacaagaccgtggtagttttacagaaggatggcgtcaaccttgtggaggagctgcagagcgtctctggcaccacaacttgtaccatgggccaaactaaatgttttatatccattgagttgaaacccgagaaggtgccgcaggtcgaagtgtacttcttcgtagagctctacgaggctactgctggcgctgcgattaataattcagcgcgctttgcgcagatcaaaatcttggagtccgatgaaagccagagcctagtatacttctcagtcggttcacgcctggccgtcgcccataaaaaggccacacttatctctcttcaagttgcgcgggactctggcacaggcctcatgatgtctgtgaacttttcaacacaggaactgcgatccgcagagacaatcggaaggactattatatctccagctatatcaggaaaagacttcgtgataacagagggcacactggtgtttgaacctggtcagagatccaccgtgttagatgttattctcactccagagacgggttcactcaattcattcccaaagaggtttcagattgtgctgtttgaccccaagggcggcgcacggatagacaaagtgtatggcaccgccaacataaccctagtgagcgacgccgattctcaggctatctggggcctcgcagatcaactgcaccagccagtaaatgacgatattctcaatagggtgctccatactatctccatgaaggtggccacagagaataccgatgaacagctgtctgccatgatgcatttaatagaaaagataactacagaggggaagatccaggcctttagcgtggccagtcggactttgttttacgaaattctgtgctccctgatcaatcctaagcgcaaagatacccgcggtttttctcacttcgccgaggtaacagaaaactttgcattcagtctgttaaccaatgtcacctgtggcagcccaggcgagaaatctaagacaatcctcgatagctgcccatacctcagtatattagccctgcactggtatccacagcaaataaacgggcacaagttcgaaggcaaggagggcgactatatcaggatcccggagagactcctggatgtgcaggacgccgagatcatggccgggaagagcacatgcaaactcgtgcagttcacagagtactccagtcagcagtggttcatctccggtaacaatctacccaccttgaagaataaggtcctgtctctttctgtaaaggggcagagctcccagctgctcactaatgacaatgaagtgctgtacagaatctacgcagccgaaccccgcattataccacagaccagcttgtgcctcctgtggaaccaagccgccgcatcttggctctccgattcacagttttgcaaggttgtggaagagactgcagattatgtggaatgtgcgtgttcacatatgtctgtgtatgcagtgtatgcgcgtaccgacaatctgtcatcttacaacgaagccttctttacctctgggttcatctgcatatccggcctctgtctggccgtcctctcacacatcttctgtgcacgatactctatgtttgccgccaaacttttgacccacatgatggcagcatcgctcggcacgcaaattcttttcctggcctctgcgtatgcttcgccacagctcgccgaggagtcgtgcagcgctatggcagctgtgacccactacctgtatctttgtcaattctcctggatgctgattcagagcgttaatttttggtacgtgctggtcatgaatgatgagcacacggaaaggagatacctccttttttttctcctttcgtggggtcttccagccttcgtcgttatcctgctgatcgttattctgaaaggtatctatcatcagagcatgagccagatctatggcctgatccacggcgatctatgcttcatccccaatgtgtatgctgcgcttttcactgccgctctggtgccgttaacttgcctggtggtcgtcttcgtggttttcattcatgcctatcaagttaaaccccagtggaaggcctacgatgacgtttttcgcggcaggacaaatgccgctgaaataccgcttatcttgtatctttttgcccttatttctgtcacttggctatgggggggcctgcacatggcgtatcgtcacttttggatgctggtgctctttgtgatctttaattccctgcagggactttacgtcttcatggtgtatttcatcctgcataaccagatgtgctgccctatgaaggccagctacactgtggagatgaacggacatccgggtccctccaccgcattcttcacccctggcagtggcatgcccccggccgggggcgagatctcgaaaagtacgcaaaaccttatcggcgccatggaagaggtgccacctgactgggaacgggccagcttccaacagggctctcaggcttctccagatttaaagccgtctccccaaaatggagctacttttccctcaagcggcggctacggacagggatccctaatcgccgacgaagaatctcaagagtttgacgatcttattttcgccctgaaaactggcgctggtctgagcgtctccgacaatgaatccggacagggttcacaggagggagggaccctgactgacagccagattgtcgagcttaggaggatccccatcgctgatacacatctgtag

SEQ ID NO: 222911 - DNA, 18921 bp, Artificial Sequence
  derived and/or modified sequence
atgagcgtgttcctgggccccggcatgcccagcgccagcctgctggtgaacctcctttccgcactgctgatcctgtttgtcttcggcgaaacagagatccgtttcaccgggcagaccgagttcgtggtgaacgaaacaagcacaacagttatacggttgattatcgaaaggataggcgagccagcaaacgtgacagccatagtgtccctgtatggggaagacgcaggcgacttcttcgatacttatgccgccgcttttatccctgctggcgaaacaaatagaaccgtttacattgccgtgtgtgacgacgacctgcccgagccagacgaaaccttcatctttcacctgacgttacagaaaccttccgccaacgtcaagctgggatggccccgcacagtaacagtgactatcctgtcaaacgacaacgctttcggtattattagtttcaatatgttgcctagcatcgccgtgagcgagcccaagggccgtaacgagagcatgcctctgacgctaatccgtgaaaagggcacatatggaatggtgatggtgactttcgaggttgaagggggcccaaatccgcccgatgaagatctaagtcctgtcaaggggaatatcacttttcctccaggtcgcgccacggtgatctataacctcacggtgctagatgatgaagtgcccgagaacgatgagatcttcctgatccagttgaagagcgtggaggggggggctgagatcaacacctccagaaactccatcgaaatcattattaagaagaacgacagcccagtacgattcctgcagagcatttacttagtccccgaagaggatcacatcctaatcataccagtggtgcgaggaaaagataacaatggcaacctcataggctccgatgaatacgaggttagtatctcttacgcagtgacaacggggaactcgacagcacacgcccagcagaacctcgatttcattgacttgcaaccaaatactactgttgtatttcctcccttcattcatgagtctcacctgaaatttcagatcgtggacgatacaattcctgaaatcgctgaatctttccacatcatgcttttgaaggacacactgcagggcgacgccgtcctgatttcacccagtgtggtacaggtcaccattaagcctaacgacaagccatacggagtgctctctttcaactccgttttatttgaaagaacagtgattatcgacgaggaccgcattagccgatacgaagaaatcaccgtggtgagaaacggcgggacgcacgggaacgtgtctgccaattgggtactgactcggaattctacagatccttctcctgtgacagccgacattcggccctccagcggcgtccttcacttcgcacagggacagatgctcgcaaccattcccttgacagttgtggacgacgatctgcccgaggaggccgaggcttacctgctacagatacttcctcacactatccgtggcggcgcggaggttagcgaacctgcagagttgctcttttacattcaggatagcgacgacgtgtacgggttgattacgttttttccaatggaaaatcaaaaaatcgaaagttctcccggggagaggtatctgtccctgagctttacacgtttgggcgggactaagggggatgttagactcctatatagcgtgctctacattccagctggtgccgttgacccattgcaggccaaagagggcatcctcaacatttctcgccggaatgatctcatttttcctgagcaaaagactcaggtcactacaaaattgccaattcggaatgacgcttttcttcaaaacggggcccacttcctggtgcagctggaaaccgtggagctgctaaatattattcccctcatcccaccaatctccccgcgtttcggtgaaatctgcaatattagtctgcttgtaacacccgccatcgccaacggcgagattgggtttcttagcaatctgcccatcatactgcacgaacctgaagacttcgccgccgaagttgtctacatccctttgcatcgggacggcaccgacggtcaggccaccgtgtactggtccctgaaaccctcaggcttcaactccaaagccgtgacacctgatgatattggacctttcaacggttcagttctgtttctgtctgggcagagcgacaccaccattaatattaccattaagggtgacgacattcccgaaatgaacgagacagtgaccctttcgcttgatcgggtaaatgtcgaaaatcaagtattgaaatctggatacacaagtagggacctcataatactggaaaatgacgatccaggaggggtattcgagttctcacctgcaagcagaggaccctacgtgattaaggaaggcgaaagcgtggagctccacatcatccgcagccggggatcactagtgaaacaatttctgcactaccgtgttgaacctcgagacagcaacgaattctatgggaatacaggcgtcttggaatttaaacccggggagcgcgagattgtgatcaccctgttagcccggctagatgggatcccggagttggacgaacactattgggtcgtattatcgtctcatggcgagcgggagagcaagctggggtcagctacaattgtaaatattactattttaaagaatgacgacccccatgggatcattgagttcgtgagcgacggactaattgtgatgatcaatgaatcgaagggcgacgccatctatagcgccgtgtatgatgtggtgaggaatcgcggaaacttcggcgacgtgagtgtaagttgggtggtgagtcctgactttacccaagacgtgtttccagtccaaggaaccgtcgtatttggtgaccaagagttttccaagaacatcactatctacagtttgcctgacgagatccctgaagagatggaggagtttacagtgatccttctcaatggcaccggaggcgcgaaagtgggcaaccgcactactgctactctgcggatcagaaggaatgatgaccccatctatttcgcagagccccgcgtggtgcgtgtccaggaaggtgagactgctaatttcaccgttctgcgcaacggctctgtcgacgttacatgcatggtccagtatgccactaaagatggaaaggcgaccgccagagagagagactttattcccgttgagaaaggggaaaccctgatctttgaagtggggagtcggcagcaatcaatcagcatcttcgtgaacgaagacggcatcccagaaactgatgaaccgttttacattatactgcttaattccaccggagatacagtcgtgtaccagtatggcgtcgctacagtgatcattgaagcaaatgatgaccccaacggaatattcagtttggaacccatcgataaagccgttgaggagggaaagactaatgctttctggatcctgcggcaccgaggttacttcggctcagtatcagttagctggcaactcttccagaacgatagcgcattgcagcccgggcaggagttttacgaaacatcaggtaccgtgaatttcatggatggcgaagaagctaagcctatcatcctgcacgcctttcctgataaaatcccggagtttaatgagttctatttcctgaaattggtgaacatctcaggtgggagccccggccccggaggccagctggccgaaacaaacctgcaggtgacagtgatggtgcccttcaacgacgaccctttcggcgtcttcattctggaccctgagtgcctcgagcgggaagtggccgaagatgtgctgtctgaagacgatatgtcctatattacaaattttacaatcctgcgacagcagggagtcttcggcgatgttcagctgggttgggagatcctttcatccgaatttcccgctggtctccctcccatgattgattttcttctcgttggaatcttccccactacggtccatctccaacagcatatgcggcggcaccactccggaactgatgctctgtattttaccggtctggagggcgcatttgggactgtcaatcccaaataccatccgtctaggaacaacacaatcgctaattttaccttcagcgcttgggtcatgcccaatgcaaacaccaacgggtttattatcgccaaagacgacggaaacggatccatttattatggcgtcaagatacagacaaacgagagccacgtgaccctctctctgcattataagactctgggctcaaacgctacctacatcgcgaagaccacggtgatgaagtacttggaagagagcgtttggctccacctgcttataattctggaggatggaatcatcgagttctacctcgatggcaacgccatgccaaggggcattaagtccctcaaaggcgaagcgatcaccgacggtccaggcattcttcgaattggggccgggatcaatggtaacgacaggttcactggactgatgcaggacgttaggagctatgagaggaaactcaccctggaagagatttacgagcttcatgctatgccagcaaaaagcgacctgcaccctatcagcggctatctggaatttcgacagggagagactaataagagcttcataatctctgcaagagatgacaacgacgaagagggcgaggaacttttcatcctgaagttagtcagtgtatatggcggtgcccgtatttcggaggagaacaccaccgcccggcttactatccagaagagcgataatgcaaacgggctttttgggtttacaggtgcatgcattccagagatcgcagaggagggaagcacaatatcatgtgtcgtggagcggactagaggcgccctggactatgtccatgtgttctacactatatcacagattgagaccgacggcatcaattatctcgtggacgactttgccaacgcttctggaaccatcacttttctcccctggcaaagatcagaggtcttgaacatctacgtgctggacgacgatatccctgagctgaacgagtacttccgagtcactcttgtgtcagcaattcctggtgatggaaagctgggaagcacaccaacatctggtgcatcgattgaccctgaaaaggaaactactgatatcacgatcaaggcctctgatcacccctacggactcttgcagttttccactggacttcctccacagccaaaggatgctatgacgttacctgcttcatccgtgcctcacatcacagtggaggaggaggacggagaaatccgactcctggtgatcagagcacaggggttgttaggtagggtgacggcagaattccgcacagttagtttgaccgcattcagtcccgaggattatcagaatgtagcaggtactctggaatttcaacccggagagcgttacaaatacattttcatcaacataactgacaactccatccctgagctggagaaaagtttcaaagtggaactcctgaacctggaaggcggggtggccgagctattccgagttgatggttctgggagtggggatggcgatatggaatttttcctgccgaccatccataaacgggcttccctgggcgtggcctcccagattctggtaacaatcgcggcaagcgaccatgctcacggggtgtttgagttctcacccgagtctctgttcgtctccggcaccgagcccgaagacggctatagtacggtaaccttaaacgtaattcggcaccatgggacactttccccagtgactctacattggaatatcgattcagatccggacggtgatttggcattcacttccggaaacatcactttcgagattggccagacttctgctaacattactgtggagatcctacccgacgaggatcctgagcttgataaagcgttctccgtctctgtgctcagcgtttccagtggaagcctgggcgcccatatcaacgcaaccttgacagtgctggcctccgacgacccgtacggaatttttatattcagcgagaagaacaggcctgtaaaggtggaggaggccacccaaaacatcaccctgagcatcatccgactgaagggcctgatggggaaggtcctcgtaagctatgcaacattagacgacatggaaaaacccccttattttcctcccaacctggccagggcaacacaaggtagggactatattcccgcctctgggtttgcactttttggcgctaaccagtccgaggcaacaattgccatctctatccttgacgatgatgagcctgaaaggagtgaaagcgtgtttattgagctgctgaattctacgttagtggccaaggtacagtcacgaagcatcccaaatagcccaagacttggtccaaaagtggaaacaatagcacagttgattatcatcgctaacgatgatgccttcggcacgctgcagctgtcagcgcctatcgtcagagtggcagagaatcacgtgggtcctattatcaacgtcaccaggactggcggcgcctttgcagatgtgagcgtgaagttcaaggcagttcccataaccgccatcgctggagaagactacagtatcgcctcttctgatgtggtgttactggagggagagacctcaaaagccgtgcctatctatgttattaacgatatatacccagaactggaggagagcttccttgtccagctcatgaacgagacaaccggcggcgctaggttaggtgcgttaacagaggccgtcatcattatagaagcctcagacgatccatacggattatttggcttccagattactaaattgatcgtcgaggagcccgagtttaacagcgtcaaggtcaatctgcctattatccggaacagcggaacactgggcaatgtcactgtgcagtgggtggctactattaatggacaactggccactggggacctgagggtagtgagcgggaatgtcacattcgctcccggagagacgatacaaacactactcttagaggtgctcgcagatgatgtgcccgaaatcgaagaggtaattcaggtccagctcacagatgcaagtggcggaggaacaattggcctcgatcggatcgctaacataatcattcctgccaatgacgacccctatggaactgtggcttttgcacagatggtttacagggtgcaggaacccctcgaacggtcctcttgcgctaacattactgtgaggcgaagcggggggcatttcgggagactgctgctgttttatagtacctcagacattgacgtcgttgccttagcgatggaggagggacaggatctcctttcatactatgagtcaccaatccagggagtgccagaccctctgtggaggacctggatgaacgtaagcgccgtgggcgagcctttatacacatgtgccaccctatgtctgaaggaacaggcatgttctgctttttcatttttctctgccagcgaaggcccacaatgtttttggatgacaagctggattagtccagccgttaataattccgatttctggacctaccgcaagaacatgacccgcgtggcatccttattctcagggcaagctgtggctggttctgattatgagccagtgacgcgacaatgggcaatcatgcaagagggcgacgagtttgctaacctcactgtcagtatcctgccagacgacttccctgagatggatgaatccttcctcatttcactgttggaggtgcacttgatgaacatcagcgcttcactgaagaaccagcctacaatcgggcagccgaacatctctaccgtggtgatcgctctgaatggagatgccttcggcgtttttgtgatatataacatttccccaaataccagcgaggacggactctttgtcgaggtgcaggagcaaccgcagacactggtggagctgatgatacatcgcacggggggttctctggggcaggtcgctgtcgaatggcgggtggtaggtgggaccgccaccgaaggtcttgatttcatcggagcaggggaaattctgacctttgctgagggtgaaacaaaaaagacggtgattctcacaattctcgatgacagtgagcctgaagacgacgaatcgatcatcgtgtcattagtctacacagaggggggatccaggatcttacccagcagcgacacagtcagggtgaacatactcgctaacgacaacgtggccgggatagtctctttccagacagcttccaggtccgtcatcgggcacgaaggcgaaatactgcagttccacgtcattagaactttcccaggacgtggtaatgttaccgtgaattggaagattatcggtcagaatcttgagctcaacttcgccaatttttcggggcaattattttttccagaggggtcactgaatactacgctgttcgtacacttgctcgatgacaacattcctgaagaaaaggaagtgtatcaagtgatactatatgacgtgagaacacagggggtgcctcctgccggaatcgcgctgctggacgctcaggggtatgcggcagtcctgaccgtcgaggccagcgatgaaccccatggagtattgaactttgctttgagtagtagatttgtgctgcttcaggaagcgaacatcactattcagctgttcatcaaccgagagttcggctccctgggggccatcaatgttacatataccaccgtccctgggatgctttcactgaaaaaccagacagtagggaatctcgctgaaccagaagtcgattttgtacctatcattggcttcttgatcctggaggaaggcgaaaccgctgccgccattaatattaccatactcgaggatgacgtcccggaactggaagaatactttcttgtgaaccttacatacgtggggctcacaatggccgcgtcaacgtctttcccaccacgactggattctgagggactgacagcccaggtcattattgatgctaatgacggggcccgcggtgttatagagtggcaacaatccagattcgaggttaatgagacccacggttccctgacactggttgctcaaaggtccagggagccgttggggcatgttagcctgtttgtgtacgcccagaacctggaggcgcaggttggacttgattacattttcacccccatgattcttcattttgcagacggcgagcgatacaagaacgttaacatcatgatactggacgatgacatacccgaaggtgacgaaaagtttcaactgattctcacaaacccctcacctggcctggagctcgggaagaacacaatagccctgattatagtgctcgccaacgatgacgggcccggcgttttatcatttaataatagcgaacacttcttcctaagggaaccgaccgcactgtatgtccaggagtcggttgcagtgctgtatattgtaagagagcccgcccagggtctgttcgggaccgtaacagtccagtttatcgtgacggaagtcaactcttccaatgagtccaaggatctaacaccgagtaaagggtatatcgttctggaggaaggggtgcgtttcaaggctctgcagatttccgctatcctggacaccgagcccgaaatggatgagtacttcgtttgcaccctcttcaatccaacgggcggagcacgactcggcgtccacgtgcagaccttgattactgtcctgcagaatcaggccccactcggcctcttcagtatatccgcagttgagaatcgagcgacctctatcgatatagaggaggccaaccgaacagtatatctcaatgtatctcggactaatgggatcgatctggccgtctctgtgcagtgggagacagtttctgagactgctttcggaatgcgcgggatggatgtcgtgttcagcgtgtttcagtcattcctggatgaatcagcttctggatggtgctttttcactttggagaacttaatctacggaatcatgctgcgtaagagctccgtaaccgtgtatcgatggcagggcattttcatacccgtggaggacctaaacatcgaaaatcctaagacgtgcgaagcttttaacatcgggttcagtccctatttcgtgatcacccacgaggaaagaaacgaagaaaaaccctccctgaattccgtctttacattcacatcggggtttaaattgttcctcgtccaaacaatcattatcctggagagcagtcaggtcagatactttacatccgatagccaagactatctgatcatcgcaagccagcgagatgattccgagctgacccaggtcttccgatggaatgggggaagcttcgtactgcatcagaagttgccagtccgtggagtcctgaccgtggccttgtttaacaaaggaggatctgttttcttggctattagccaggccaacgcccggctgaacagcctcctctttcgctggtccgggtccggattcatcaactttcaagaagtacccgtctccggaaccactgaggttgaagcactgtcaagcgctaatgacatatatctgatttttgcagagaatgtgtttcttggggatcaaaatagtatcgatattttcatttgggagatgggccaaagctccttcagatacttccagagcgtggactttgccgcagtcaatcgcattcactccttcacaccagccagtggcattgcccacatcctcctaatcggacaggacatgagtgccctttactgttggaattctgaacgaaatcaattttcttttgtgctggaggtcccttccgcatacgacgtggccagcgtcacagtgaaatccctgaatagttccaaaaatttaatcgccttggtgggagcgcatagtcatatttatgagttagcatacatctcctcacacagcgatttcattcctagctctggggagcttatttttgagccaggcgagcgcgaagccactattgctgtgaatatactcgatgacaccgttcctgagaaagaggagtcctttaaagtgcagctgaagaatcctaagggaggagctgagatcggaattaatgactcagtcacgatcactattctatccaacgacgacgcctacgggattgtggctttcgcacaaaacagtctgtacaaacaggtggaggagatggaacaagattctctggttaccttgaatgtagagcggctcaagggcacctacgggaggatcacaatagcctgggaggccgacggatcaatcagcgatatttttcctactagcggagtgatcctctttactgagggccaggttctctccaccattaccctgacaatcctcgccgataatataccagaactgtcagaggtagtaattgttactctcaccagaattacaactgaaggagtggaggatagttataaaggcgcaactatagaccaggatcgttccaagtcggtgatcacaacccttcccaacgactctccgtttggactggtgggctggcgggccgcttctgtgttcatccgggtggccgaaccaaaagaaaataccaccactttacagctgcagattgccagagataagggtctgctcggagatattgcaatccaccttcgtgcacagcctaatttcctgctgcacgtcgacaaccaggcaactgaaaatgaagactatgtccttcaggagacgattatcattatgaaagagaatattaaagaggctcacgcggaagtgtcgattctccctgacgatctgcccgaactggaagaagggtttattgtaacgatcaccgaagtaaatctggtcaattcggacttcagcacagggcagccatcagtacggaggcctggcatggaaattgcagagatcatgatcgaagaaaatgatgatccaaggggaatcttcatgtttcatgttacccggggtgccggagaagtgatcaccgcatatgaggtgccccctccactgaatgtattgcaagtgcccgtagtgaggctagccggtagcttcggggctgttaacgtctactggaaagcatctcccgattctgccggtctggaagactttaagcctagccacggcatactggaatttgccgataaacaggtgactgccatgattgaaatcaccattattgacgacgcagagtttgagctaaccgagacatttaacatctccttaatttctgtcgctggcgggggcagactgggcgacgacgtggttgtgaccgtggtgattcctcagaacgacagcccctttggggtgtttgggttcgaggaaaaaactgtgatgattgacgaaagcctctccagtgatgaccctgacagctatgtcaccctgacagttgtgaggtccccaggtgggaaggggacagtccgcctggagtggacgatcgacgagaaggcaaaacacaatctctcccccctgaatggcactctgcattttgacgagacagaatctcaaaaaaccatagtactgcacacactacaggacaccgtgcttgaagaggataggcggtttaccatccagctgatctccatagacgaggtggagatctctccagtgaaaggcagcgcttcaataattatccggggcgataaacgcgcctctggagaggtcggtattgctccgagtagtcgtcatatcctgatcggcgagcctagcgccaaatacaatggcacggctattatctcgcttgtccgggggcccggtatcttaggtgaagtcaccgtgttctggcgcattttcccgccatctgtgggggaattcgcagagacatccggaaagctgaccatgcgggatgagcagagcgctgtgatagtggtgattcaggctctgaatgacgacattccagaagagaagagtttctatgagttccagctgactgcagtgtctgaaggcggcgtgttgtcagagtccagttctactgctaacattacggtggtggcctccgattcaccctatggccgattcgcattcagccatgaacagttacgtgttagcgaggcgcagcgagtgaatattaccataattaggtcctccggtgactttgggcacgttcgactctggtacaaaaccatgagtgggaccgccgaagctggcttagacttcgtcccggccgctggcgaactcctttttgaggctggcgagatgcgtaagagccttcatgtcgagattttggatgacgactacccagaaggacccgaggagttcagtctaactataaccaaggtcgagctccaagggagggggtacgattttactattcaggagaacggactgcagatcgatcaacctcccgagatcggaaacatctcaattgttcggattatcataatgaagaatgacaacgctgagggcataatcgaatttgaccccaagtatacagctttcgaggtcgaggaggatgtgggactgattatgattcccgtagtgagacttcatggaacgtacggctatgttacagccgacttcatcagtcagtctagcagcgcctcacctggaggagtggattatatccttcacggctccacagtgacatttcaacatgggcagaacctgtcttttatcaatattagtattattgatgataatgagtccgaatttgaagagcctatagaaatcctgttgacaggcgcaactggtggagctgtgctaggccggcacctcgtctccagaataatcattgccaaatccgactcccctttcggcgtgatacgattcctgaatcagtctaagatcagcatagctaatcccaactccaccatgatcctcagcctggtccttgagagaacagggggtcttcttggggaaatccaggtgaattgggaaacagtcggacccaactcccaggaggccctcctcccacagaatcgggacatcgcagaccccgtgagcggtttattctatttcggagaaggggaaggtggcgtgcgcactattatcctcacaatttaccctcatgaggaaatcgaggtggaagaaacctttatcatcaaattgcacctcgtcaaaggggaagctaagcttgactcacgtgcaaaggacgtgactcttaccattcaagagttcggagatcctaacggggtagtgcagttcgcacccgagacactgtccaagaaaacctactcagagccactggccctggaaggccctcttctcattacatttttcgtcaggagagtaaagggtacctttggggaaattatggtttattgggaactatcgtccgagtttgatatcactgaggatttcttgagtacatctgggttctttaccatagctgacggggaaagcgaagctagtttcgacgtgcacctcctgcctgacgaggtcccagaaatcgaggaggactatgttatccagctggtctcggtggaggggggcgccgagcttgacctggagaagtccatcacctggttttcagtatacgccaatgacgaccctcacggtgtctttgccttgtacagcgatcgtcaatctattctgatcggccagaacctgattagatcaatacaaatcaacataactagactggctggaacctttggagacgtggcagtgggcctgcggattagctctgatcataaagagcagcccatcgtcacggagaacgccgaacggcagctagtggtgaaagacggcgcaacatataaagtagacgttgtgcctatcaaaaaccaggtgttcctgtcacttggcagtaatttcacgctccagttggttaccgtcatgcttgtgggtggacgtttctatggcatgcctaccattctgcaggaagccaaatctgccgtgctgcccgtatcagagaaggccgcaaactcacaggtgggattcgaatccactgcctttcagttgatgaacattaccgctggaacgagtcacgtgatgattagtcgcagaggcacatacggggccctcagtgtcgcttggacaaccgggtacgcccctggcttggagattcccgaatttatcgttgtggggaacatgacgcctacattgggctctctcagcttttcccacggcgaacaacggaaaggtgtgttcctttggacattccctagcccagggtggccagaagcttttgtactgcatctatcgggggtacagtccagcgctccagggggagcccagttgcggagtgggttcatcgtcgccgaaattgagcccatgggtgtattccaattcagcacgtcctccaggaatatcatcgtatccgaggatactcagatgattagactgcacgtgcagcgcctgtttggatttcactccgacctgatcaaagtctcataccagactactgctggcagtgccaaaccgttagaggatttcgaaccagtgcagaacggtgagctgttttttcagaagttccagacggaagtggacttcgagatcactatcatcaatgaccaactgagcgagatagaggaattcttttacatcaacctgacaagcgtggagattcggggcctccagaaattcgacgtaaattggtcaccccgcttgaacctggactttagcgtcgccgtgattaccatccttgacaatgatgacctagccggaatggatattagcttccccgaaacaactgttgccgtggccgttgataccacactaattcccgtcgaaactgagagcacaacttacctgtctactagtaaaactaccaccatcctgcaaccgaccaatgttgtcgctatcgtgaccgaggccacaggcgtgtcagcaatcccggaaaaactggtgactctgcatggaacacctgctgtaagtgaaaagcccgacgtggccacagtcacggcgaatgtgtctatccatggcactttttccctcgggccttccatcgtgtacattgaagaggagatgaaaaatggcacctttaacaccgccgaagtcctgatccggcggactggcgggtttacagggaacgtgagcataaccgtcaagacctttggagaaagatgcgcgcagatggagccaaatgccttgccatttcgagggatctacggtatctctaaccttacatgggcagtggaagaggaggatttcgaggaacagaccctaacactcatctttctggacggggagagggaacgcaaggtcagcgtccaaatcctagacgacgacgaacccgaaggacaagaatttttctatgtgttccttacaaatccacagggtggagcccagattgttgaggaaaaggacgacactgggttcgcggcctttgcaatggtcatcattacaggcagcgacctgcataacggtattatcggtttctccgaagaaagtcagagtggcttagaactgcgggagggcgctgtgatgagacggttacacctaatcgttacccggcaaccaaacagggcttttgaagatgtgaaggttttttggagggtcacattaaataagacagtggtggttctgcagaaagacggagtgaacctggttgaagagctgcagagcgtgagcggaacaaccacatgcactatgggccagaccaagtgtttcatctcaatagaacttaaacccgagaaggttccgcaggtagaggtctattttttcgtggagctctatgaagccaccgccggtgcagctattaataactcagctcggttcgcgcagatcaaaatactggagtccgacgaaagccagtccctggtgtactttagcgtcggttccaggctcgctgtcgcccacaagaaggctacattgatcagtctccaggtggctcgtgattccggaactggtttaatgatgtcagtgaacttcagcactcaggaactgcgatccgccgaaaccattggaagaaccatcatttcacccgcaatctccggaaaagattttgttataacggaaggcactctggtgttcgaacccggacagagatccactgtgctcgacgtgatcctgaccccagagactggctccctgaactcattccctaaaagatttcagatcgtgctcttcgacccaaagggcggggcgcggatcgacaaggtgtatggtaccgcaaacattactcttgtttctgacgcagattcccaggcgatttgggggctagcagatcagcttcaccagccagtcaatgacgatatcctaaatagggtgcttcatacaatcagtatgaaggtggccaccgaaaatacagatgagcagctctctgccatgatgcatctcattgagaagattaccactgagggcaaaatccaggccttttctgtggcatctcgcaccctattttatgagatactgtgctcactgatcaatcctaagaggaaagatactaggggcttttcgcactttgctgaggtgactgagaactttgcattttctctcttaacgaatgttacatgtggatctcctggcgagaaatcaaagaccatacttgatagctgcccatacctgagcatattagccctccattggtatccgcagcaaatcaatggccacaagttcgagggtaaagaaggtgattatatccggatcccagaacgtctgctggatgtgcaggacgctgagatcatggccggcaagagcacgtgcaaactcgtgcagttcaccgagtattcgagccagcaatggtttatttctgggaacaacctgccaactctgaaaaataaagtcctgtcattgagtgtgaaaggtcaatcttctcagctactgacgaacgacaatgaggttctgtaccggatctacgccgccgagccccgcatcatcccgcagacatcgctttgtctgttgtggaatcaagccgcagcttcctggctgtcggattcccagttctgcaaggtcgtggaggagactgctgattacgtcgagtgtgcctgttcacacatgtcggtatatgctgtctacgcaagaacagataatctaagcagttacaacgaggctttcttcacctccgggtttatctgcatctcagggctgtgcttagccgtgctatcccacatattctgtgctaggtacagtatgtttgccgccaaactcctcacccatatgatggccgcgagtctggggacccagatcctctttctggcgtccgcctatgctagccctcaactggctgaggaatcttgttcggcgatggccgctgtgacacactatctttacctgtgccagttctcgtggatgctcatacagtcagtcaacttctggtatgttctggtgatgaacgacgaacatactgagagacggtacttactgttctttctgctctcctggggcctcccggctttcgttgtgatcctgttgatcgtgatactaaaaggaatctaccaccaatccatgtcgcaaatttacggcctcatacacggcgatctgtgttttattccgaatgtgtacgcggcgctctttaccgcggcattggtccccctcacgtgcttggtagtcgtatttgtggttttcatacatgcctaccaggtcaagccacaatggaaggcctacgacgacgtatttcgcggaaggactaacgccgccgaaattccgctcatcttgtatctttttgctctgatatcagtaacctggctatggggcggccttcacatggcatatcggcatttctggatgcttgtcttgtttgtcatttttaactcccttcagggactctatgtgttcatggtctattttattctccacaaccaaatgtgttgccccatgaaggcttcctacacggttgagatgaacggccatccggggccgtctaccgcatttttcacgcctggcagtggaatgccccctgccggtggcgaaatttctaaaagtacacagaacctgataggggccatggaggaagtcccccctgattgggagagggcttcctttcagcaaggctctcaagcctcacccgacctcaagcccagcccacagaacggggcgacatttccatcaagcggaggatatggacagggctccctcatcgcggatgaggaatcgcaggagtttgatgacttaatctttgcgctgaagacgggagcaggcctcagtgtaagcgacaacgaatccggccaaggcagccaggaagggggcacactgaccgacagtcagatcgtcgaactgaggaggattcctatcgcggatacacatctctag

SEQ ID NO: 222912 - DNA, 18920 bp, Artificial Sequence
  derived and/or modified sequence
atggatatcttcttggtcctgggcatgcccagcgcctctttgcttgtgaatcttctgagcgccctccttatcctgttcgtgtttggagagaccgagattcgattcaccggccagactgagttcgtggtaaacgagacctctactacggtcattcggttaataattgagcggatcggtgagccagctaatgtgactgccatagtgtcactgtacggagaggatgctggcgattttttcgatacatacgccgctgcttttattcccgctggcgaaacaaaccgaaccgtgtatatcgccgtgtgtgatgacgatctccctgagccagatgagactttcattttccacctgacactccagaagcctagtgctaatgtcaagctcgggtggccgagaaccgtgaccgtgacaattctgagtaacgataacgcattcgggattatttctttcaacatgctgccctccatagctgtctccgaaccaaaaggacgaaacgaatctatgccactgacattgatccgagagaagggcacgtatggaatggtgatggtgacatttgaagtggagggcggaccaaaccctcccgacgaggatttatccccagttaagggaaatattacattccccccaggcagggccacagtgatttacaacctcacagtactggatgacgaagtaccagagaacgacgaaatctttctgattcagctgaaatctgtggagggaggcgcagagatcaacactagccgtaatagtattgagattattattaagaagaatgacagccccgttaggttccttcagagcatctatctggtcccggaggaagatcacatacttatcataccggtcgtgagaggaaaagacaataatggtaatctcatcgggtccgatgagtacgaggtgtcaatatcttatgccgtcaccacaggtaactcaaccgctcatgctcagcagaatctagatttcattgacctccagcctaacacaacagtggtcttccctccattcatacatgagtcgcacctgaaatttcagatcgtcgatgacactatccctgagattgccgagtcgtttcacatcatgttattaaaagacacgctgcagggtgacgccgtgctcatctctccgtccgtggtccaggtcacaatcaaaccaaatgacaaaccgtacggggtgctatctttcaacagcgttctcttcgagcgaacggtcataatcgatgaggatagaatcagtcggtacgaggagatcacggtcgtgcggaacgggggaacccacggcaatgtctctgccaactgggtgctgaccaggaatagcaccgacccgtctcctgttactgctgacatcaggcccagtagcggagtcctgcattttgcacaaggccagatgctggcgacaatcccacttacagtcgtggatgatgatctcccagaagaagcagaagcctacttgctgcaaattcttccgcatacaatccgcggtggagcagaagtgtcggagcccgctgagctgcttttctacattcaagatagcgacgatgtgtacgggttgatcactttcttcccaatggagaaccagaaaattgaaagctcacccggtgagagatacctgtcactgtcattcacgaggctgggcggaacaaagggggatgtccggcttctttattccgttctgtacatcccagctggcgctgtcgatccattacaagccaaagaaggtatcctcaacatctcacgaagaaacgatctgatcttccccgaacagaagacacaagtgaccaccaaattaccaatcaggaacgacgcgtttctgcagaatggggcacattttctggtgcagttagagacggtggaattactcaatatcattcctcttattccccctatttcacctagatttggagaaatttgtaacatttcactcctggttacaccggcaattgccaatggtgagatcggtttcctgtcaaatctccccattatattgcacgagccagaagatttcgctgcagaggtcgtgtacatcccgttgcacagagatggcacagacggccaagctaccgtatattggtccctcaaaccgtcggggttcaacagtaaagctgttactcctgatgacattggcccattcaacggcagcgtgctgttcctgagcggccagtccgacactacaattaacattacaataaaaggcgacgatattcctgagatgaatgagacagtgacattaagcctcgaccgtgtcaacgtagagaatcaagtgctgaaaagcggatacacctccagagatcttattatcctcgaaaacgacgacccgggaggtgtgttcgagttctccccggcatcaagaggtccttatgtgattaaagagggcgagagcgtcgaattgcacattatccggtcccgaggctcacttgtaaagcagtttctccactaccgcgtcgagccgagagacagcaacgaattctatggaaacactggagtcctggagtttaaacctggagaacgggagatcgtgatcactctattagcacggctcgatgggatccctgagcttgatgaacattattgggtggtgctgagctcgcacggtgaacgggagagcaagctcggaagcgcaacaattgtcaacatcaccatcttaaagaacgacgatccacacggcatcattgaattcgtttccgatggactcattgtcatgatcaacgaaagtaagggtgacgccatctacagtgcagtctatgacgtggtgcggaacaggggaaatttcggtgatgtaagcgtgtcttgggtggtctctcccgacttcacccaagatgtgttccccgttcagggcacagttgtattcggcgaccaggaattcagcaagaatatcacgatttacagtcttccggatgaaatccctgaggagatggaagagttcactgtcatcctgctcaacggcacgggaggggctaaagtgggcaatcgtaccaccgccacacttaggattcgaaggaacgacgacccaatttattttgccgaaccaagagttgttagagtccaagagggagagaccgcaaatttcactgtccttcgaaacgggtcggtagacgtgacatgcatggtacaatacgctacaaaggacgggaaagccaccgccagagaaagggattttataccggtcgagaaaggagagaccttgatcttcgaggtcggctcccgccagcagtcaatcagcatattcgtgaatgaggacggcattccagaaacagatgaacccttttatatcattctactgaactccactggcgatactgttgtataccaatacggcgtcgctacagtgatcatcgaagccaatgacgatccaaatgggatcttctcactcgagcctattgacaaagcggtcgaagagggcaagaccaacgctttttggatactcaggcatagaggctacttcggaagcgtctccgtgagctggcagctgtttcagaatgactcagctctgcagcctgggcaggagttttacgagaccagcggcacagttaatttcatggatggcgaggaggcaaagcctattattttgcatgcattcccagataagatcccagaattcaacgaattctatttcttaaaactggtgaacatttcaggcggatccccaggacctggaggccaactggctgagactaatctccaggtaaccgttatggtgccttttaacgacgatccgttcggtgtgttcatcttggatcccgaatgcctggaaagggaagtggccgaggacgtgctctctgaagacgatatgtcctacattaccaatttcacgatccttcgccagcagggtgtcttcggagatgttcaattgggctgggaaatcctcagttccgagtttcctgctgggctccctccaatgatcgacttcctgctggtggggattttcccaaccactgtgcatctgcagcagcacatgcggagacatcattccgggaccgacgcactgtacttcacagggttggaaggagctttcggaacggtgaatccaaagtatcacccgtccagaaataatactatcgccaacttcaccttcagcgcttgggttatgcctaatgccaacactaatggcttcatcattgcgaaggatgatggaaatggttctatctattacggagtgaaaattcagacaaacgaaagtcatgtgacactcagcctgcactacaagacactggggagcaatgccacctacattgctaaaacgaccgtgatgaagtatctggaggagtcagtctggctgcacctcctgattatattggaagatggcataattgagttctacctggatgggaatgccatgcctcggggtatcaaatctctcaagggtgaagccatcactgacggcccaggcatacttcgcatcggcgcagggatcaatgggaatgatcggttcaccggactgatgcaagacgtgcgcagctatgagcggaagctcactctagaagagatatatgaactgcacgctatgcctgcgaaaagcgacctgcacccgatctcagggtatctcgagttccgccagggcgagactaacaagtcgtttatcatttccgcccgagacgataatgatgaggagggcgaagagctgtttattttgaaacttgtaagtgtctacggaggagctaggatttcagaagagaacaccactgcccgactgactatccaaaagagcgacaacgcgaacggattgttcggatttactggcgcttgtatacccgaaatcgccgaagaggggtcaaccatcagttgcgtagtggaaaggaccagaggggcactagattatgtgcatgtgttctacaccatttcgcagatagaaactgacgggattaattacttggttgatgatttcgccaacgcgagcggcactatcacgtttctcccttggcagagaagcgaggtgctgaacatctacgtgctggacgatgacattcccgaactgaacgaatattttcgggtgacgcttgtttctgcgatccctggcgacggaaagctcggatcgacccccaccagtggtgctagtattgacccagaaaaagagacaactgatattacaattaaggcaagtgatcatccctatgggctactccagttttctacagggttaccccctcagcctaaagacgctatgacgctccccgcttcttcggtgccacacataactgtggaggaagaggacggcgagatccggctcttagtgattcgggctcagggactgttgggcagagtcaccgctgaattcaggactgtgtccctgacagctttctcccctgaggattaccagaatgtggctggaactcttgagttccagcccggtgagcgttataagtatattttcatcaatatcaccgataatagtattcccgagcttgagaaaagctttaaggtggagcttctcaacctggaaggcggagtggccgaactttttagagtcgacgggagtggctccggagacggggatatggagttcttccttcccaccattcataagcgcgctagtttaggcgtcgccagccaaatattggtcactatcgccgcaagcgaccacgcacacggcgtctttgaattcagtccggagtccctttttgtgtctggaactgaaccagaggacgggtattctacagtcactctgaacgtgatccgtcatcatggcacactgagcccagtcactctgcactggaatatagattctgacccagatggggatctcgccttcacctctggaaacatcacgtttgaaatcggccagacgtctgccaacatcaccgtcgaaattctccccgatgaggatcccgagcttgataaggcttttagcgtgtctgtgctgtcggtttcatcagggtccctgggggcacatatcaacgccacattgaccgtgttagcttcagacgacccctacgggattttcatattctccgagaagaaccggcctgttaaggtggaggaagctacacagaatattacactctccatcatccggctaaaggggttgatgggcaaggttctcgtaagctatgccacgctggatgacatggagaagccaccatattttccccctaatttggcacgggctactcagggaagggattacattccagcctctggatttgcattgttcggtgccaaccagagtgaggctacaatcgccataagtatcctggacgatgacgaaccagagcgttctgagtctgttttcatcgagctgctgaactctacccttgtggctaaggttcagagccggtctattcccaatagccctagactcggtcctaaagtggagaccattgcccaactgataatcatcgctaatgacgatgcatttgggacactgcagctgagcgcgccaatcgtccgggttgccgaaaaccatgtcgggccaatcataaacgtgacaaggaccggaggcgcttttgcagatgtatcggtgaaatttaaagctgtaccaataactgccatcgcaggggaggattacagcattgcctccagtgatgttgtacttttggagggagaaacgagtaaagcagtccctatctatgtcatcaacgacatctatcctgagcttgaagagtccttcttagttcagttaatgaacgagacaaccggtggcgcacgtctgggggcactcaccgaagcggtgattattattgaagcttctgatgatccttatgggttgttcgggttccagatcaccaaactgattgtcgaagaacccgaattcaactccgttaaagtaaacctgccaatcataagaaacagcggcacgcttgggaatgtaaccgtccagtgggtggccaccattaatggccagcttgcaaccggtgacctgagggtggtgtctgggaacgtgactttcgcccctggcgagactattcagaccttactgctcgaagtcctggctgacgacgtgcctgaaattgaagaagtgattcaggttcagctcacagatgcttcagggggaggtacgatcggcttagatcgaatcgccaatataatcatcccagctaacgacgacccgtacggcactgtggcattcgcccagatggtgtatagggtgcaggagcctttagagcggtcatcctgtgcaaacatcactgtgagaagatctggcggtcacttcggccgtctactgcttttctacagcacgtcagatattgatgtggtcgccctcgccatggaagaggggcaggacctgctgtcctactatgagagtccaatccagggtgttccagatccactctggcgcacttggatgaacgtctcagcagttggagaacctctctatacgtgtgcgaccctgtgccttaaggagcaagcctgttctgctttctcgttcttttccgccagcgagggtcctcaatgtttttggatgacttcatggatctcgccggcagtgaacaattccgacttctggacctacaggaagaatatgacacgggtggcatcgttgttttccgggcaagcagtggccggttctgactatgaacccgtgacccgccagtgggcgatcatgcaagaaggagacgagtttgccaacctcactgtgagcatactgccagatgactttcccgagatggacgaaagcttcctgatatctctgctggaggtccatttaatgaacattagcgctagcctgaagaaccagccgacgatcgggcagcctaacatctcaaccgtcgttatcgcccttaatggagatgcttttggggtgttcgtcatttacaacatttccccaaatacttctgaggacggtctattcgtcgaggtacaagagcaacctcagacactggtcgagttgatgattcaccgcaccggcggatcgttggggcaggtggccgtggaatggcgtgtcgtaggaggaaccgccactgaaggactagactttattggagccggagaaatcctcactttcgcagaaggcgaaacaaaaaagacagtaatcctcacaatcctggacgatagtgaacctgaggacgatgaaagcatcatcgtttccctcgtctatactgaggggggatcccgcattcttcccagctctgacactgtgcgcgttaacatcctggcaaatgacaatgtggctgggattgtcagcttccaaactgcttcccggtcagtgatcggccacgaaggcgagatcctgcaattccatgtgatccgcacattccccggacgcggaaacgtaactgtaaactggaaaatcattggccaaaacttggagctaaacttcgcgaatttttcaggccagcttttttttcctgaagggtctcttaacactacactgttcgtgcacctattggatgacaatatccccgaagagaaagaggtttatcaagtgatcctgtacgatgtacggacccagggcgtgcccccagccggaatcgctctgctggacgcacaagggtatgccgcagtgctgactgtcgaggcttctgacgaaccccacggcgtcttgaacttcgcactgtcaagccggtttgtgttgctccaggaagctaacattacaatccaactgtttatcaatcgcgagtttggatccctgggagcaatcaatgtcacatatactacagtccctggcatgctgtctcttaagaaccagaccgtgggcaatcttgcagaacctgaagtcgacttcgtcccgatcatcggatttctgatcctggaggagggcgagaccgccgcagccataaacattacgatcctcgaagacgatgttcccgaactggaggaatatttcctggtgaacctgacatacgtgggcctgacgatggccgcatctactagtttcccacctcgtctggacagtgaaggactcacagcccaggtgataattgatgccaacgatggcgctagaggggtgattgaatggcagcagagcaggtttgaagtgaacgaaacacacggctctctgactctggttgctcaaaggtcccgcgaaccgctaggccatgtcagtctgttcgtgtatgcacaaaatctcgaagcacaggtggggctggattacatcttcacacctatgatcctccatttcgcagatggtgaaaggtataagaatgttaacattatgattctcgacgatgatattccagagggtgacgagaaatttcagttaattttgacaaatcctagtcccggtcttgagctgggtaagaatacaatcgcactgatcatcgtgctggctaacgatgacggaccaggcgtgctctcgttcaacaatagcgagcatttcttcttgagggaaccaacggccctatatgttcaagaatctgtggcagtgctgtacatcgtgagggaacccgctcagggcctgttcgggaccgtgacagtgcaattcattgttaccgaagtcaactcaagcaatgaatccaaagacctcacaccatctaagggatacattgtgctggaagaaggggtgcggttcaaagctctccaaatctctgccatcctcgacacagaacctgaaatggacgagtactttgtctgcaccctctttaacccaactgggggagcccgactgggagtgcacgtgcagaccctcataactgttctccaaaatcaggcccctttaggcctattttcgatttctgcggtcgaaaatcgagccacaagcatcgacattgaagaagcaaatcgcactgtctatttgaacgtgtccagaaccaacggtatagatttggcagtttccgttcagtgggagaccgtgtctgagactgcattcggaatgcggggtatggacgtggtttttagcgtattccagtctttcctcgacgaatctgccagtgggtggtgcttctttaccttggagaacctcatctatggcattatgctccggaaatcatcggttactgtgtaccgatggcaggggatattcatcccagttgaggaccttaacattgaaaacccgaaaacctgtgaagcctttaatattggattcagcccttatttcgtaattacacatgaagagcgaaacgaggaaaaacctagtctgaattccgtttttacatttacctcaggatttaaattgttcctagtgcagaccataatcattctagagtcaagccaggtcagatactttacttctgactctcaggactaccttataattgctagccagcgcgatgattcagaactgacgcaggtctttcgatggaatgggggatcattcgttttgcaccaaaagttgcccgtgcggggagtcctcaccgtggcgcttttcaataagggaggatcagtgttcttagctattagccaggctaatgctcgactgaattcactactgttcagatggagcggcagtgggtttatcaacttccaagaagtgcctgtaagcggaaccactgaagtcgaagctctcagctcagcaaacgacatttacctgattttcgccgagaatgttttcctaggcgaccagaacagcatcgacatttttatctgggaaatgggacaaagctcttttaggtactttcagagtgttgactttgctgccgtcaacagaatacacagtttcacaccagccagcggtatcgctcatatcttgctgataggtcaggacatgagcgccctgtactgttggaattctgagcgtaaccagtttagttttgtgctcgaggttccctccgcatacgacgtcgcctcagtaaccgtgaaaagcctgaattcgtccaagaacctgatagcacttgtaggagcccactcccacatctacgaactggcctacatttcctctcattcagactttataccatcatccggagagttgatctttgaaccaggtgagagggaggccaccatagcggttaatatccttgatgatacagtgcccgagaaggaggagagtttcaaggtccagttgaagaatcctaaaggaggtgccgaaatcggaattaacgactctgtcactattaccatcttatccaatgatgatgcctatggtattgttgcttttgcacagaactcattgtacaagcaggtggaggagatggaacaggacagcctggtgaccttgaacgtcgagcgtttaaaagggacttatggacgaataacaatcgcctgggaagccgatgggtcgataagcgacatattcccaacttctggggtaatcctgttcactgaaggacaggtgctgagcactattacactaacaattttggcagacaacattcctgaactctcagaggtggtcatcgttactctcacaaggatcactaccgagggagtggaagacagctacaagggagccactattgatcaggaccggagtaagagtgtcataaccaccctgcctaacgatagcccctttggcctggtgggatggcgggctgcctcggttttcatccgggtggctgagcctaaagaaaatactaccacgttacagcttcagatcgccagggacaaggggctgctgggggatatcgctatccatttacgggcacaacccaattttcttctgcatgttgataatcaagcgacagaaaacgaagattatgtgctgcaggagaccatcataattatgaaggagaacatcaaggaggctcacgcagaagtgagcatccttccagatgacctgccagagctggaagaggggttcatagtcaccattaccgaggtcaatctggtgaacagtgatttctctactggacagccctcagtgcggagaccgggaatggagatcgccgaaataatgattgaggagaacgatgacccaagggggatcttcatgttccacgttacgaggggtgcaggcgaggtcattaccgcatatgaggtgccgcctcccctcaacgtcctccaggtgccagtagtccggttggcaggctcttttggggctgtcaacgtgtattggaaagcatcaccagactcagccggactcgaggactttaaaccttctcatgggatcctggaattcgcagacaaacaggttacagctatgattgaaatcactataatcgatgacgcagaattcgaacttactgagaccttcaacatttccctgatcagcgtagccggaggcggacggctcggcgacgatgttgtggtcacagtcgtcatccctcaaaatgacagtcctttcggagtgttcggatttgaggaaaaaacggtaatgatcgacgaatctctgagctctgacgacccggactcatatgtgacattgactgtggtcagatcccccggtggcaagggcacagttagactggaatggactatcgacgaaaaggccaagcacaatctatctcccctgaatgggactctgcatttcgatgaaaccgaatctcagaagactatcgttctgcacaccttacaggataccgttttggaagaggacaggcgctttacgattcaacttatctctatagatgaggtcgagatttcaccagtcaagggttcagctagcatcatcataagaggcgacaaaagggcatccggggaggtcggcatagccccaagttccagacatatcctgattggtgagccctctgccaagtataatggtacagccattatcagcttggtgcgtgggccaggcatcttgggagaggttacagttttttggaggatattccccccatccgtcggcgaattcgccgaaacatccggtaagttgacaatgagagacgaacaaagcgccgtgattgtcgtaatacaggccctgaacgacgatattcctgaagagaagtccttctacgaatttcaacttaccgccgtgtccgaaggaggggtactaagcgaaagctccagtactgctaacatcactgtggtggctagtgacagcccatacggcagattcgcctttagtcacgaacagttgagggtttccgaagcccagagagtgaatattacaatcatcagaagctcgggcgacttcggccatgtgcgcctttggtataagaccatgtccggcaccgccgaggccggactggactttgttccggcagccggtgaactgctctttgaggcaggtgagatgaggaagagtttgcatgtcgagattctggacgacgattaccctgagggccctgaggaattctcattgactattacaaaagtggagttgcagggaagaggttacgattttacaattcaggagaatggccttcagatcgaccagcctccagagatcggcaacatctcaatagtgagaatcatcatcatgaagaacgataatgcagaagggatcatcgagttcgacccgaagtacaccgcctttgaggttgaggaagacgttggcctgattatgatcccggtggttcgattgcacggcacatacgggtatgtgacggctgattttatttctcaaagctcctcagcgtcccctggtggcgtggactacatcttgcacggaagcaccgtgacatttcaacacggtcaaaacttatccttcatcaatataagtatcatagacgacaatgaaagcgagttcgaggaacctattgaaatcctgttgactggcgctaccggaggggcagtgcttggcaggcacctggtatccagaatcatcattgccaaaagtgattctcccttcggggtgatacgctttctgaaccagtcaaaaatcagtatagcaaaccccaactcaactatgatactctcactcgttctggagcgcaccggcggactcctaggagagatccaagttaattgggagacagttggacctaactcccaggaggcactgctgccgcagaacagggacattgcagatccagtgagcggactcttttattttggagagggggagggcggtgtccgaacaattatcttaacaatttaccctcacgaagagatcgaagtcgaggaaacatttatcattaagctgcacctggtaaagggagaggcaaaattggactctcgagccaaggatgtgacccttacgatccaggaattcggtgatcctaacggggtggtgcagtttgcccctgagactttgtcaaaaaaaacgtactcagaacctctggccctggaagggcctcttctaataactttctttgtacgcagagtaaagggtacattcggggaaattatggtctattgggaactgagcagcgaattcgatataacggaagatttcctgtcaaccagcggattctttacaatcgccgatggggaaagtgaggccagttttgatgtacatctcctgcctgatgaggtgcccgaaatcgaagaagactacgtgattcagctcgtaagcgtcgagggtggggctgaactcgacctcgagaagtctataacatggttcagtgtatacgctaatgacgacccgcacggtgtgtttgccctgtactctgacaggcagagcatactcatcggccagaatctcatcaggtcaattcaaattaacattacaagactggccggaaccttcggcgacgtggccgtgggactccggatctcatcggaccataaagagcagcctatcgttaccgagaatgccgaacggcagctcgtggtgaaagacggtgcaacttacaaagtggatgttgtgcccattaagaatcaagtgtttcttagccttggctcaaattttacactccaactggtgaccgtcatgttggtcggagggcgtttctatggtatgcctacaatcctacaggaggccaaatccgccgtgttgccagtgagcgaaaaggcagctaattctcaagtaggcttcgaatccacagctttccagctgatgaatataacagccggaacgtcacacgtgatgatttcacgtcggggaacatacggcgcactgagcgttgcttggaccacgggctatgccccaggtctggagatccctgaattcattgtggtagggaacatgacccccaccctgggctccctgagcttcagtcacggcgagcagcgaaagggagtgttcctgtggactttccctagcccaggctggccagaggcttttgtacttcacctctccggtgttcagtcgtccgctcctgggggagcacaactcagaagcggttttattgtggccgagattgaacccatgggagtgtttcagttcagtacatcctcacgaaatatcatagtgtccgaagatacgcagatgatacggctgcacgtgcagagactatttggcttccactccgaccttatcaaagtttcttatcagaccacggctggctccgccaagccgctggaggacttcgaacccgtccaaaatggcgagcttttctttcagaagtttcagaccgaagtggacttcgagattactataatcaacgatcagctcagtgagatagaggagttcttctatatcaacctgacctctgtggaaatcagaggcctgcagaaattcgatgtcaactggagtccacgtcttaaccttgattttagtgtcgctgtaatcacaattctcgataatgatgacctggctgggatggacatttcttttcctgagaccaccgtcgcggtggccgtggacaccactttgatcccagtggaaacagaatcaaccacataccttagcacaagcaagaccacaactatcttgcaacccacgaacgtggtggccatcgtgacagaagcaacgggcgtatccgcaatccctgaaaagttggtgacgctacacggaacacccgctgtttccgagaagcctgatgtcgcaaccgtgacagccaacgtgagtatccacggcactttcagccttggtccatccatagtttacatcgaggaagagatgaaaaatgggacgtttaataccgctgaggttctcatacgacgcacaggaggattcacgggcaacgtctccataacagtgaaaacctttggggagcgctgcgcccagatggagccaaacgcacttcccttcagagggatatacgggatttcaaatctgacgtgggcggttgaggaagaggacttcgaagagcagacacttaccctgatttttttggacggagagagggagaggaaagtgtcggtccagatattggatgatgacgagccggagggtcaagaatttttttatgtctttttaaccaacccacaggggggtgcccagatcgtcgaggaaaaagacgacacagggtttgccgcattcgcgatggtgatcatcacagggagtgacctccacaacggcataattgggttttctgaagagtctcagtctggattagagcttcgtgagggagccgtcatgaggaggcttcatctgatcgtgacacgccaacctaatagggctttcgaagacgttaaagtgttctggagagtcaccttaaacaagacagttgtggtgctgcagaaagatggcgtgaacttagtcgaggaactgcagagcgtgagcggcacaacaacgtgcaccatggggcagacaaagtgcttcatttcaattgaactgaagccagagaaagtgccccaagttgaggtgtatttctttgtggagctctatgaggcaactgctggtgccgcaattaataattcagcgcgattcgcccagatcaagatcctcgagagcgatgagtcccagtcactggtctattttagcgtagggtccagattggcagttgcgcataagaaggcaacgttaatctctctgcaggtggctcgcgatagcggaactggcctgatgatgagcgtaaacttctccacacaggagctacggtccgccgaaactattgggaggaccatcatttcgccagcaataagcggcaaggactttgtcatcacagaaggcacgttggtttttgagcctggtcagagatccaccgtactcgacgttatcctcacccccgagaccgggtccttaaatagtttccccaagcgcttccagatagtattattcgatccaaaaggcggagccagaatcgataaagtctacggaactgccaacattacactcgtgagcgatgctgacagtcaggctatctggggtctggcagaccagttacatcagccagttaacgatgacattctgaaccgggtcttgcacacgatttccatgaaagtcgcgactgagaacaccgatgaacagctgagcgcaatgatgcacctcatagagaaaatcacaacagaaggaaaaatacaggcattttctgtcgcttcccgcacactgttttacgaaattctgtgcagcttaatcaacccaaagagaaaagacacgcggggattttcacatttcgctgaggtaacagagaatttcgctttctccctcttgacaaatgttacatgtgggtcgcctggagagaagagcaagacgattttagattcttgtccttacctttccattctggctctacactggtaccctcagcaaataaatggacataagtttgaggggaaggagggggattatatccgaattccagagcgccttctcgatgtacaggatgctgagatcatggcagggaagtccacctgtaagcttgtgcagtttacagaatactcctctcaacagtggtttataagtggcaataaccttcctactctgaagaataaagtcctctctctctccgtaaaaggccaatcaagccaactgctgactaacgataatgaagtgctgtatagaatttacgcagccgaaccccgaattatcccacagacgagtttgtgtcttttgtggaaccaggctgccgcttcatggctgtctgatagtcagttctgcaaggtggttgaggagacggcagattacgtagagtgcgcctgttcccacatgtctgtctatgctgtgtacgctagaaccgataatttgtcttcctataatgaagcctttttcacgtcgggatttatctgtatttccggtctgtgtttggccgtgctgagtcacatcttttgcgcgcgatactccatgttcgccgctaagctgctgacccacatgatggctgcatccctcggaacccagatcctcttcctggcttcagcgtacgccagcccccaactggctgaagagtcctgctcggctatggccgctgtgacccactacttatacctttgtcagttctcctggatgctcatccagtctgtgaatttctggtatgtgctcgtaatgaacgacgaacacactgagagacgctatctactcttctttctgctgtcctgggggctgcctgccttcgtggtgatcctactcatcgtcatacttaaggggatctatcatcagtccatgtcccagatctatgggctcatccacggagacctatgtttcatcccgaacgtgtacgcagccctctttaccgcagctctcgtcccgttaacttgcttggtcgtcgtgtttgtggtgttcatccacgcatatcaggtgaagccacagtggaaagcctacgacgatgtctttaggggaagaactaacgccgctgaaattcctctcatcctgtacttatttgccctgatctccgttacttggctatgggggggtttacatatggcatatcgacatttctggatgctggtcctttttgtgatatttaactctctgcagggcctatacgtgtttatggtgtattttatattacataaccagatgtgttgccccatgaaggcctcctacaccgtggaaatgaacggtcaccctggaccgagcacagccttcttcacacccggttccgggatgcctcccgctggtggggagatctcgaaatctactcagaatttaatcggagcgatggaagaagtgcctcccgattgggaacgggcttcgttccagcagggaagccaagctagtcccgacctgaaaccatcgccccagaacggagccaccttcccatctagcggagggtacggccaaggaagtttaatagccgacgaagagtcacaagaattcgatgatctaatttttgctctaaaaacgggagccggactgtcagtctccgacaatgagagtggccagggaagccaggaaggcggtacactgacggatagccagattgtggagcttaggaggattccaattgctgatactcatttgta

SEQ ID NO: 222913 - DNA, 18920 bp, Artificial Sequence
  derived and/or modified sequence
atgagcgtttttctcgggccaggcatgccctctgcctctctgctggtaaacctgctgtcagctctcctgatcttgttcgtgttcggtgagactgagatccgatttaccgggcagacagagttcgtggtcaatgagacaagcaccactgtcattagattaattatcgaacgaattggcgagccagctaacgtaaccgctatagtgagcttgtatggcgaggacgccggtgattttttcgatacatatgccgcagcctttatacctgctggcgagactaatagaaccgtgtacattgctgtgtgtgacgacgatttgccggaacctgacgagacgttcattttccacctcaccctacagaaaccttctgcaaacgttaagctgggctggcccagaaccgtgactgtgactatcttgtctaatgacaacgcatttgggatcatctcattcaacatgctgccttctatcgcggtttcagaacccaaggggagaaacgaaagcatgcctctgactctgatccgagaaaagggtacctacggcatggtgatggtgacattcgaagtggaaggagggccaaatccgcctgatgaggacctctctccggttaagggcaatattacctttcctcctggccgtgctacagtaatctacaatcttacggttctggatgatgaggtaccagaaaacgacgagatctttcttatccaactgaagtccgtagagggcggtgccgagattaacaccagtagaaacagcatagaaataataatcaagaagaacgatagcccagttcgatttttacagagcatctaccttgtgcccgaggaggaccacatattgatcattccagttgtccgcggaaaggacaacaatgggaacctgataggctctgacgagtacgaggtgagtatctcatatgctgtgaccacaggtaactccactgcgcatgcccaacagaatctcgactttatagatcttcagcccaataccactgtcgtcttcccgccatttattcacgaaagtcatctgaagttccagatagtggacgacaccattcctgaaattgcagagagttttcacatcatgctgctcaaagacactcttcagggcgacgccgtgctgatctcgccaagtgtagtacaggtcactattaagcccaacgacaagccttacggagtcctctctttcaacagtgtactctttgaaaggacagtaatcatcgacgaggacagaatttctaggtatgaagaaatcacagtggtcaggaacggaggcactcatggtaacgtcagcgccaattgggtgttgacaagaaacagtacagatccatcccccgtgacagccgacattaggcccagttcgggagtcttacactttgcccagggtcagatgcttgctacaattccactgactgtagtcgatgacgacctaccagaggaggccgaagcctacttgctacagatactgccacacacaatcaggggaggagccgaggtgagcgagcccgcagagctgctcttttacattcaggacagtgatgacgtttacgggctcattaccttctttcctatggagaatcaaaagattgagagttccccgggtgagaggtacttatcactgtctttcacccgtttggggggaactaaaggcgatgtcaggctcctctatagtgtcctctatattcctgccggtgcggtcgaccccctacaggccaaggagggtattctcaacatcagccggcgtaacgatctgatctttccagaacaaaaaacacaggtcacaaccaagctgccaattcggaatgacgctttcctccagaatggcgctcacttcctggttcagttggagacagtggagctgttaaacatcattccactgatcccccctatttcgcctcgatttggcgaaatctgcaacatctccctgctcgtgacaccagccatagccaacggtgaaattggattcctgagcaatctgccaatcattcttcacgaacctgaagactttgctgcagaggttgtctacattcccctccaccgggacgggacggatggccaagcgactgtgtactggagccttaaaccatcgggcttcaattcaaaagccgtgacccccgatgacattgggccattcaacggctccgtgctgttcctgagtggccagagcgacaccacaatcaacattaccatcaaaggagacgacataccggaaatgaacgagaccgtgaccttgagtctcgaccgggtgaacgtggaaaaccaggtgttaaagagcgggtacacgagcagggacttgatcatcttggaaaatgatgatccgggaggggtttttgaattctcgccagcctccagggggccttacgttatcaaagagggcgagagtgtcgaattgcacatcatccgctcccggggatctctagtcaagcagttcctgcattatcgcgttgaacccagagactctaatgaattctatggcaataccggcgtgctggaatttaaaccaggggagcgagagatcgtgattactctgctcgctcgcctggacggcatcccagagcttgacgaacactactgggtcgtcctcagcagtcatggagaacgtgagagtaaactggggagtgcgaccattgtgaatatcaccattctgaagaacgacgacccgcacggaattatcgagtttgtgtcagatgggctgatcgtgatgattaatgaatccaaaggggatgcaatttattcggccgtgtatgacgtggtcaggaatagagggaatttcggagacgtgtcagtatcctgggtggtatcaccagattttacccaggatgtgttccccgttcagggtaccgtggtcttcggcgaccaggaattcagcaagaacataacaatttatagcctgccagacgaaattcccgaggaaatggaagagttcaccgtgatcctactaaacgggaccggcggtgcaaaggtgggcaatagaacaacagccaccctgaggatcaggcgaaatgatgatcccatctacttcgccgagccaagagtggtgagagtacaggagggagagacagccaacttcaccgtgctgcggaacggatccgtcgacgtcacctgtatggtccagtatgcgaccaaggatggtaaggctacagcacgggagcgcgattttattcctgtcgagaagggcgaaaccctgattttcgaggtagggagtcggcagcagtcaattagcatcttcgtcaacgaagacggcatcccggaaactgatgagccattttatattattctgctgaactccaccggcgataccgtcgtgtaccaatatggtgttgctacagttatcatagaggcaaacgacgacccgaatggcatcttctccttagaacctatcgacaaagcagtcgaagagggcaagacgaacgccttttggattctgaggcacagaggctacttcggtagcgtcagcgtgtcctggcagttgttccagaatgacagtgcgctgcagccgggtcaggagttctacgagacatctggcactgtgaatttcatggacggcgaggaggctaaacctatcatattgcacgctttccctgataagattcctgagttcaatgaattctatttcctgaagttggtcaacatttctggcggaagccccggaccaggtggacagctggccgaaaccaatcttcaggtaaccgtgatggtccccttcaacgacgatccattcggggttttcatcctggatccagagtgcttggagagagaggtggcagaagacgttctgagcgaggatgacatgagctacattacgaacttcacgattctgcgccagcagggcgtgtttggcgacgttcagctcggatgggagatcctatccagtgagtttcccgctggtcttcccccaatgatcgattttctgctggtgggaatcttcccaactactgttcacctccaacagcacatgcgcaggcaccactctggcaccgacgctctctactttacagggttagagggggcatttgggaccgttaatcctaaataccacccttctcgaaacaataccattgccaactttacattctctgcctgggtaatgcctaacgctaacacaaacgggtttatcatagccaaggacgatggaaacggatccatttattatggcgtcaaaattcagactaacgagtctcatgtcactctgagcctgcactataaaaccctgggcagtaatgccacctatatagctaaaactacagtaatgaagtacctagaggaaagtgtctggctgcatttactgataattctcgaagatggtatcatagaattctatctggacgggaacgccatgccacgcggaattaagagtctgaagggagaggctattactgatgggcctgggattctgagaatcggcgctggcataaacggaaatgaccgatttactgggctgatgcaggatgtccgatcttatgaacgtaaactgactctggaggagatttatgagcttcacgctatgcctgccaagtctgacctacacccaattagtggatatctggaattccgacagggggagacaaataaatctttcatcatctcagcaagggacgataacgatgaggaaggggaagaactgtttatcctcaagctcgtttctgtgtacggcggtgccaggatctcagaagaaaatactaccgctcgactgacgatacaaaagtctgacaacgcaaacggtctctttgggttcacaggcgcttgcattcctgaaatagccgaggagggatctaccattagctgtgttgttgaacgtaccaggggggctcttgattacgtccacgtgttttataccataagtcagattgagaccgatgggattaactatcttgtggatgacttcgccaatgcaagtggcaccattacctttctcccatggcagaggtctgaagtgctcaacatatacgtgttagacgatgatattccggagttgaacgagtattttcgggtgacactggttagtgcaatacccggagacggcaagctaggatctacacccactagcggggcatccatagaccctgaaaaggaaaccaccgacatcactattaaagctagtgaccacccgtacggactgctgcagttcagtaccggcctgcctccgcagcctaaggatgccatgactctgccagcttccagtgtgccccacattacagtggaggaggaggatggtgaaataaggctcctagtgatccgggcacagggccttttgggccgagtgactgccgaatttcgaaccgttagcctcacagcattctcgccggaagactatcagaacgtggcaggtactctggaattccagcccggagaacgatacaaatacattttcatcaatatcactgacaatagtatccccgaactggaaaagtctttcaaggtggagctcctgaatctggaagggggagtagccgaactgttcagggtcgatggcagcggatctggcgacggcgacatggagttctttctcccaacaatccataaaagggcatctctcggagtcgcttcccagattcttgtgacaatcgccgcttccgaccacgcccatggcgttttcgaattcagtccagagagcctgttcgtcagtgggactgagccagaagacgggtactcaacagtaactttaaatgtgattcggcaccacgggaccctttctcctgtgacattgcattggaatattgattctgatcccgacggtgacttggcattcacaagcggcaatattacattcgaaattgggcagacttcagctaatattactgttgaaatcctgccagatgaagatcctgagttagacaaggcattcagtgtatcagtgttatctgtttcttcggggtcccttggcgctcacattaatgctaccttgacagtgctcgcctccgatgatccctacggcatcttcatattctctgagaagaatcgcccagtcaaagtcgaggaggccacccaaaacattaccttgtctatcatccgacttaaaggacttatgggtaaagtgttggtcagctatgccacactggatgacatggagaaacccccatatttcccaccaaacctagctagggcaacccaaggacgcgattacatcccggctagcgggttcgcattgttcggcgctaaccagtctgaggctactatcgctatctccatacttgacgatgatgagcccgagaggtctgaaagcgttttcattgaactgctgaatagtactctggtggctaaggtgcaatcacgttctattcccaacagtcccagactgggcccaaaagtcgaaaccattgctcagctcatcataattgccaatgacgatgccttcggtacattgcaactgtctgctcccatcgtcagggtcgctgagaaccatgttggacccattatcaatgtgaccaggactgggggtgcctttgccgacgtcagcgtcaagttcaaggcggtgcctattaccgcgatcgccggtgaggattattccattgccagtagcgatgtcgtcctgctcgaaggcgaaacctcaaaggcagtccctatctatgtcatcaatgatatataccctgagctggaagaatcttttctggtccagctgatgaacgaaaccacgggaggggctcgtctcggggcactgacggaggccgtgattatcatagaggccagtgacgatccttatgggctttttggtttccagattactaaacttatcgtagaagagcccgaatttaactccgtgaaggtgaatctgcccattatccgcaactctgggactctcggtaatgtgaccgtacagtgggtggctacgattaatgggcagctggctacaggggatctgagagtggtgtcgggcaatgtcactttcgctccaggagaaacaatccaaaccttgcttctggaagtgctggcagatgacgtgcccgaaatcgaagaagtcatccaggtacagcttactgatgcctctgggggaggcactattggactcgaccggatcgctaacataatcatccctgcgaacgacgacccgtatggaacagtcgccttcgctcagatggtttaccgagtccaggagccactggagcgatccagctgcgccaacattacagttcggagatccggaggccactttgggaggctcctcttgttctattcaacctcagacatcgatgtggtggccttggctatggaggagggacaggacctgctctcatattacgaatctcctattcaaggggtcccggacccgttatggcggacctggatgaatgtgagcgccgtgggcgagcccttgtacacgtgtgccaccttatgtctgaaagagcaggcatgtagcgcatttagcttcttttccgccagtgaaggaccccagtgcttctggatgactagttggattagccccgcagtgaataacagcgacttctggacatatagaaagaatatgacacgggtggcctcgctattcagcggacaggccgtggccggttctgattacgaaccagttacccgccagtgggctatcatgcaggaaggagatgaatttgccaatttgacagttagcattctccccgacgattttcctgaaatggatgagtcctttctgatatctctgctagaagttcaccttatgaacatcagcgcaagcctcaagaatcagccaactataggccagccaaatatctcgacagtggtgattgccctcaatggggacgccttcggagtattcgtgatctacaacatttccccaaacaccagcgaggatggactgtttgtcgaagtgcaggagcagccacagacacttgttgagctgatgatccacagaaccgggggatccctggggcaagtggccgtggaatggagggtggtgggtgggactgctaccgaggggctcgatttcatcggcgctggggagattctcacctttgccgagggagagacaaagaagaccgtcatcttaactatcctggatgactccgagcctgaagatgatgaatctatcatagtgtccctagtgtataccgaaggcggttctcgtatcctcccatcaagtgacacagtcagagtcaatattcttgccaatgacaatgtggccggtattgtgagcttccagactgcaagtcgaagcgtgatcggccatgaaggcgaaatactgcagttccacgtgattaggacttttcccggaagagggaacgtgacagtgaactggaagattattggccaaaatctggaactgaactttgccaacttttcgggtcaactattttttccagaagggtccctcaacaccacactttttgtccacttactcgacgacaatatcccggaggagaaggaggtgtatcaggttatcctttatgacgtacgcacccagggggtgcctcccgcaggaatcgctctgcttgatgctcaggggtacgctgctgtcttgactgtcgaggccagcgacgagccacacggtgtgctgaacttcgcattaagttcaaggttcgtgttattgcaggaggctaacatcactatacagctgttcatcaatcgcgaatttggtagcctgggggcaataaacgtgacatacacaaccgtcccaggcatgctgagcctgaaaaatcagaccgttggtaacctggcggaaccagaagttgactttgtgcccatcattggttttctgatccttgaggagggagagactgccgcagctattaacattactatccttgaggatgacgtgccagagctggaagagtactttttggtcaatctcacatatgttggtctcaccatggccgcaagcacctctttccctcctaggctggactcggagggtctcaccgcacaagtcataattgatgcaaatgacggcgctcgtggcgtaattgaatggcagcagtcacggttcgaggtcaatgaaacccacggtagcctgaccctggtcgctcagcggtctcgcgagccattgggacacgtttcattattcgtgtatgcacagaacctggaggctcaggtgggcctcgattacatcttcactccaatgatcctacatttcgcggatggcgagcgctacaagaatgtgaacattatgatactcgacgatgacattccagagggcgatgagaagttccagttgatcttgaccaacccctctcccggactggagctgggcaagaatacaattgctctgatcatagtattagctaacgacgacgggcctggcgtgctgagcttcaataattccgagcatttctttctcagagaaccaacagccctgtatgtgcaagaaagcgtggccgtcctatacatcgttagagagccagcccaagggctgtttggcacagtgacagtacaatttatagttacggaggtgaactcatccaatgagagtaaggacctcacacccagcaaagggtatatagtgcttgaggagggggtgcgcttcaaggcgctccaaatttccgccatcctggatacagagcccgagatggacgaatactttgtctgcactctattcaatccaacaggcggagccagactgggagtgcatgtgcagacactgatcactgtgctgcagaaccaggcacccctgggcctcttctccatttctgcagtagaaaatagagcaacatccatcgacatagaggaggcaaatagaacagtctacctgaatgtgagccgcacaaatggcatcgatctggctgtgagtgtgcaatgggaaacagtgagcgaaactgccttcggtatgcggggaatggacgtggtgttttccgtgtttcagtccttcctggatgagtctgcaagcggttggtgctttttcacactggagaatctgatttatggaatcatgctgcgaaagagcagcgtgacagtgtatcggtggcagggaatctttatccccgtcgaggatctgaacatcgagaacccaaagacttgtgaagccttcaacatagggttcagtccctattttgtaatcacacatgaagagaggaacgaggagaagccgtcgcttaactctgtgtttacattcacctcagggttcaagctcttcctagttcagacaatcattatcctggagtcatcccaggtgcgatattttacttccgactcccaggactatctcattatcgcatctcagcgcgatgactccgaattgacccaggtgtttagatggaatggcggttcatttgtgctccaccagaagttaccagtacgcggagtacttacagtcgccttgtttaacaagggcggaagcgtgtttctggccattagtcaggccaacgcaagactaaattcactgctgttcaggtggagtggtagcggatttattaattttcaagaagtacccgtgagtggaacaactgaagtagaagctttaagctccgctaatgatatctacctgatattcgccgaaaatgtgttcctcggagatcagaacagtattgatatattcatctgggaaatgggtcagtcatcgttccgctattttcagtccgtcgatttcgccgctgtcaatagaatccactcgttcacccctgcgtccggaatcgcccacattcttctgatcggacaggatatgtcagccctctactgctggaattccgaaaggaaccagttctcgtttgtgcttgaggtcccctcagcatatgatgtcgccagcgtgacagttaaatcactaaatagttctaaaaacctgattgcccttgttggtgcacatagccatatctacgagctagcttacatttccagtcactcagatttcatcccttctagtggagagttgattttcgaacctggagaaagggaagccactatcgctgtgaatatcctcgacgataccgtccccgagaaggaagagtctttcaaagtgcagctcaaaaatcctaagggtggggcagaaatcggcataaacgatagtgtgaccatcacaatcctgtccaatgatgatgcttacgggattgtggcctttgcccagaactcactatataagcaggtcgaggaaatggagcaagattccctggtgactctaaacgtggagcgactgaaagggacttatggcaggatcacgatagcgtgggaggcagacggttccatttcagatatcttcccaactagtggcgtgattctgtttacggaaggccaggtgttaagtacgattaccttaacaattcttgccgacaatatccccgaactgagcgaggtcgttattgtgacattgacacggattacgactgagggcgtggaagacagttataagggagccacaatcgaccaggacaggtctaagtctgtcataaccactctgccgaacgatagtccttttggactcgtggggtggagagcagctagcgtgtttatcagggtcgccgagcctaaggaaaacacaaccactctacagcttcagatagctcgtgacaaagggcttttaggggacattgcgattcacttgcgggcacagccgaacttcctgttgcacgttgataatcaggccaccgagaacgaggactatgtgctgcaggaaacaatcatcatcatgaaggagaacattaaagaggcccacgccgaggtgtctatactgccagacgatctcccagagctcgaggaggggtttattgtcactatcactgaagtgaatctagtcaatagtgacttttccacaggccaaccttcagtacgcaggcctggcatggaaatcgccgagatcatgatcgaagaaaatgatgacccaagaggtatctttatgtttcacgtcactagaggggctggagaagtcatcactgcctacgaggtacctcccccactaaacgtactgcaggttccagtcgttaggctcgccggaagtttcggagctgttaacgtttactggaaagcaagcccggacagtgcagggctggaggattttaagccatcacatggtatcttagaatttgctgataagcaagtcacagccatgatagagattaccatcattgatgatgcggagtttgaacttacagagacctttaacatttcactcatatcagtggcgggtgggggacgcttgggagatgacgtggtcgtgacggtggtgatcccccagaacgactcacctttcggcgtttttggcttcgaggaaaaaacagtgatgatcgatgagtccctcagctccgatgatcccgattcctatgtgaccctgacagttgtcaggtcccccggaggaaaaggtacagttcgattggaatggacaattgatgagaaagccaaacacaatctgagtcccctaaacgggactttgcactttgacgagactgaaagtcagaagaccatcgtgctgcacaccctacaggataccgtgttagaagaggatcgacgatttaccattcagctgattagtatcgatgaggtcgagatttccccagttaaggggtcagccagcattatcatccgcggagacaaaagagcctctggagaagttgggattgctccatccagtcgccacattctcattggcgagccaagcgccaagtataacggcactgcgattatatccctggtaagagggccaggtatattgggtgaggtaacagtgttttggagaatcttccctccttctgtcggtgagtttgcggaaacctccggtaaactgaccatgagagatgagcaatctgccgtgattgtagttatccaggccctcaacgacgatattcctgaagaaaagtcattctatgagtttcagctgactgctgtgagcgaaggtggcgtcctttccgaaagctcaagtaccgccaatatcacagtggtggcatccgactcgccgtatgggcgattcgccttcagtcacgagcagctgcgcgtaagtgaagctcagagagtcaatataactataatacgcagttctggggactttgggcacgtccgtttatggtacaagactatgtccggtactgcagaagcgggtctggacttcgtacccgctgccggagagctacttttcgaggccggtgagatgaggaaaagcctgcatgtcgagattttagatgatgactatcctgagggccctgaggagttttcgctgacaattaccaaggttgagttgcagggacggggatatgatttcacaattcaggaaaacggactgcagattgaccaaccccctgaaattggtaacatctccatcgtgcgaatcattataatgaagaacgacaatgctgaaggaatcattgagttcgacccgaagtacacagccttcgaagtggaggaagatgtggggttgatcatgattcccgttgtacgactgcacgggacttacggctatgtcactgccgattttatttcacaaagctccagtgcctcacctggaggcgtggactatatactccatggttctacagtgactttccagcacggacagaatctgtcctttataaatattagcattatcgacgataacgagagcgagtttgaagagcccatcgaaattctgctgaccggggcaaccggcggagccgtccttgggagacatctcgtgtcacgcatcatcatcgccaagagcgatagtccctttggggtgatcaggtttctaaatcagtccaaaattagtattgctaatccaaactctacgatgattctatcgctcgtgctggaacggacaggcggtctgctgggcgaaatccaagttaattgggagaccgtgggccctaactcccaagaggcactgctgccccagaatagggacatcgctgatcccgtgagtggtcttttttactttggtgagggggagggaggggtgcgaaccatcatcttaacaatatacccccacgaggaaatcgaggttgaggaaacgttcataataaaattacacctcgtgaaaggcgaagcaaagctggattcgcgcgcaaaggatgttactctcaccattcaggagttcggggaccccaatggcgttgtccaattcgcccctgaaactctttctaaaaagacttattctgagcccctggcactcgagggtcccttattaattacctttttcgtgaggcgcgtgaaaggcaccttcggggagattatggtctactgggaattgagcagcgagttcgacattactgaggacttcctgagcaccagcggattcttcaccatcgctgacggtgagtcggaagcctccttcgatgttcacttgttgcccgacgaggtgcctgaaattgaagaggactatgtcatccaactggtgtctgtggaggggggagcagaactagacctggagaagagtatcacttggttctctgtttacgccaacgatgaccctcacggcgtgtttgcactctactctgatcgccagtcgatactaataggacagaacctgatccggagcattcagattaacataacccgcctggcagggacattcggggatgtggcggtgggcctgcggatttcttctgatcacaaagaacaacctatagtgactgagaacgcggagcggcagcttgtggtgaaagacggagccacatacaaggtagatgtcgtacctatcaagaaccaggtgtttttgtctctgggctctaattttacgctacaattagtgactgtgatgcttgtcggcggtcgcttttacggcatgccaacaattctgcaggaagccaagagtgccgtgcttcctgtgtctgagaaggcagcaaactctcaggtcggattcgaaagtactgcatttcagctgatgaatatcaccgccggaacctcccatgtcatgatttcacgccgtggaacctatggcgcactgtccgtggcctggacgactggctatgctcctgggctggaaatccctgaatttatcgtcgtgggtaacatgacccccaccctgggatccttgagtttttcacacggtgagcaaagaaaaggcgtctttttatggacctttccatctccaggatggcccgaggcatttgttctgcacctgagcggcgttcagagctctgctccagggggtgcgcagctgaggtccggtttcatcgtggcggagattgagccaatgggggtttttcagttctcaacctcctcaaggaatatcattgttagcgaagacactcagatgatccgactccatgtacagcggctgtttggattccattcagacctgatcaaagtaagctatcagactacagcaggcagtgccaagccattggaggattttgaaccagttcaaaatggggaactctttttccagaagtttcagacggaggtggatttcgaaatcactatcattaacgaccagctgtccgagatagaagaatttttttatatcaatctgactagtgttgaaatccgtggactccagaagttcgatgttaactggtctcctcgattgaacctggattttagtgtggccgtgatcacaatcctcgacaacgacgatctggcgggtatggacatatccttccccgaaacaacagtagctgttgccgtcgataccaccctcattccagtggaaacggagagtactacatacctgagcacctcaaaaaccactactatattacagcctaccaatgtcgtagccattgtgacagaagcaaccggggtgtccgccatccctgaaaagctggtgacattgcacggaactccagcggtcagcgagaagcccgacgttgctacagtgacagcaaatgtatctatccatgggaccttctcgttgggcccttctattgtttatatcgaagaagagatgaagaacggaacattcaataccgccgaggtcctgattaggaggacagggggatttaccggcaatgtgtccattactgtgaagacgttcggggagcgctgtgcccagatggaacctaacgctctgcccttccgtggcatctacgggatttcaaatctaacttgggcagttgaggaagaggacttcgaggagcagactctgaccctgatcttcctggacggggaaagggagcggaaagtgagcgtgcagatactagatgacgatgagccagaaggccaggagtttttttatgtgttcctgacgaacccgcagggaggggctcagatagtcgaagagaaggatgataccggatttgccgcttttgcgatggtgatcataaccggctcagatttgcataatggcatcatcgggttcagcgaagagtctcagtctggactggaactcagagagggggcagtgatgaggcggttgcacctgatcgtgacacgacagcccaacagggctttcgaggacgtcaaagtgttctggagagtcacactaaacaaaactgtggtcgtgctgcagaaagacggtgtcaatctcgtggaagagttgcagtcagtcagtggaaccaccacctgtactatgggccagacaaaatgctttatcagtattgagctgaaacctgaaaaagtcccccaggtagaggtatatttcttcgtggaactgtacgaggcaacagccggtgcagcaatcaataattctgccagatttgcccagattaagatcctggagtccgatgaatcacagagtctggtgtacttctctgtgggcagccggctggctgtggcgcataaaaaagctactctgataagtcttcaagtggctagggactccgggaccggcttaatgatgtccgtcaatttctcaactcaagagttgaggtctgccgagacaatcggtcggacaatcatttcacctgccatttcagggaaagattttgtgataactgaaggaaccctggtctttgagcctggccagcggtccactgtgctcgacgtgatactgacacctgaaaccggcagcctgaactcatttccaaagcgatttcagatcgtgctcttcgaccccaagggcggagccaggattgacaaggtgtatggaactgctaatattactttagtgtctgatgcggactctcaagccatttggggcctggccgaccagctgcaccaacctgtgaatgacgacatcttaaacagggtcctgcatacgattagcatgaaggttgcaaccgaaaataccgacgagcaattgtctgccatgatgcacctcatcgagaaaattactacagagggcaaaattcaggccttttctgtggcaagccgaaccctgttctacgagattctgtgcagtctgataaacccaaaacggaaggacacaaggggattcagccactttgcagaggtaaccgagaattttgcattctctttgctgacgaatgtcacttgcggtagtccgggagagaagtcaaaaacaatattagacagctgcccttacttaagtatattggcactgcattggtatccccagcagattaacgggcacaagttcgaaggcaaggagggggactatatacgcattcctgagagactcttggatgtacaggatgccgagattatggctggcaagtccacatgtaaactcgttcagttcacagagtatagtagccaacagtggttcatttctggtaacaacttacccacccttaagaataaggttctctccctctcagtgaaagggcagagctcccagttgctgaccaacgacaacgaagtcctgtatcggatatacgctgcggaacctcggatcataccccaaacatctctgtgccttttatggaaccaggcagctgcttcatggctgagcgatagtcagttttgcaaggtggtggaggagaccgcagactatgttgagtgcgcttgctcccacatgtccgtgtacgccgtttacgcccgtaccgacaatttgtctagttacaatgaagcgttctttacttccggctttatatgcatatctggattatgtctagccgtcctctcccacatcttttgtgctcgctacagcatgtttgcggcaaaactgctcactcacatgatggccgcatctctcggtacccagattctgtttctggcaagcgcctatgcctcgccacaattagctgaggagagctgctcagccatggccgcagtaacacactatctgtacctgtgccaattctcttggatgctgattcagtccgtgaatttttggtatgtgctcgtgatgaatgacgaacatacagaaaggagatacctcttatttttcctgctgtcctggggtttgcctgcgttcgtcgttatcctgctcatcgtcattttgaaaggcatctatcatcagagcatgtcccagatctatggtttaatacacggcgatttatgttttatcccgaacgtttatgccgctttgttcacagccgcactggttcccctgacttgcctcgtggtggtgtttgtcgtttttatccacgcataccaggttaagccacagtggaaggcttacgacgacgttttccggggacgcactaatgcagcggaaatcccgctgatcctgtacctctttgccttaataagcgtcacctggttgtggggtgggctccatatggcctaccggcacttttggatgctggtcctcttcgttatctttaacagcttgcagggactatatgtcttcatggtctactttattctgcacaatcagatgtgctgccctatgaaggctagctacacagttgaaatgaacggccacccaggaccgagcactgcattctttactccgggatcgggcatgcctcctgccggaggggagatttccaagtcgacgcagaacttgatcggagctatggaagaggttcccccagactgggagagagcctccttccaacagggctcacaagcctccccagatttgaaacctagcccccaaaacggggcaacatttccaagctcaggcggatatggtcagggtagcctgattgccgacgaagaatcccaggaatttgacgaccttattttcgccctcaagaccggtgcaggactctccgtgtctgacaacgagtcaggacagggttcccaggaggggggaacactgaccgacagccagatcgttgaactgcggagaataccgatcgctgatacccatctgta

SEQ ID NO: 222914 - DNA, 18921 bp, Artificial Sequence
  derived and/or modified sequence
atggacatcttcctggtgctgggcatgcccagcgccagcctgctggtgaacctgctgagcgccctgctgatcctgttcgtgttcggcgagaccgagatcagattcaccggccagaccgagttcgtggtgaacgagaccagcaccaccgtgatcagactgatcatcgagagaatcggcgagcccgccaacgtgaccgccatcgtgagcctgtacggcgaggacgccggcgacttcttcgacacctacgccgccgccttcatccccgccggcgagaccaacagaaccgtgtacatcgccgtgtgcgacgacgacctgcccgagcccgacgagaccttcatcttccacctgaccctgcagaagcccagcgccaacgtgaagctgggctggcccagaaccgtgaccgtgaccatcctgagcaacgacaacgccttcggcatcatcagcttcaacatgctgcccagcatcgccgtgagcgagcccaagggcagaaacgagagcatgcccctgaccctgatcagagagaagggcacctacggcatggtgatggtgaccttcgaggtggagggcggccccaacccccccgacgaggacctgagccccgtgaagggcaacatcaccttcccccccggcagagccaccgtgatctacaacctgaccgtgctggacgacgaggtgcccgagaacgacgagatcttcctgatccagctgaagagcgtggagggcggcgccgagatcaacaccagcagaaacagcatcgagatcatcatcaagaagaacgacagccccgtgagattcctgcagagcatctacctggtgcccgaggaggaccacatcctgatcatccccgtggtgagaggcaaggacaacaacggcaacctgatcggcagcgacgagtacgaggtgagcatcagctacgccgtgaccaccggcaacagcaccgcccacgcccagcagaacctggacttcatcgacctgcagcccaacaccaccgtggtgttcccccccttcatccacgagagccacctgaagttccagatcgtggacgacaccatccccgagatcgccgagagcttccacatcatgctgctgaaggacaccctgcagggcgacgccgtgctgatcagccccagcgtggtgcaggtgaccatcaagcccaacgacaagccctacggcgtgctgagcttcaacagcgtgctgttcgagagaaccgtgatcatcgacgaggacagaatcagcagatacgaggagatcaccgtggtgagaaacggcggcacccacggcaacgtgagcgccaactgggtgctgaccagaaacagcaccgaccccagccccgtgaccgccgacatcagacccagcagcggcgtgctgcacttcgcccagggccagatgctggccaccatccccctgaccgtggtggacgacgacctgcccgaggaggccgaggcctacctgctgcagatcctgccccacaccatcagaggcggcgccgaggtgagcgagcccgccgagctgctgttctacatccaggacagcgacgacgtgtacggcctgatcaccttcttccccatggagaaccagaagatcgagagcagccccggcgagagatacctgagcctgagcttcaccagactgggcggcaccaagggcgacgtgagactgctgtacagcgtgctgtacatccccgccggcgccgtggaccccctgcaggccaaggagggcatcctgaacatcagcagaagaaacgacctgatcttccccgagcagaagacccaggtgaccaccaagctgcccatcagaaacgacgccttcctgcagaacggcgcccacttcctggtgcagctggagaccgtggagctgctgaacatcatccccctgatcccccccatcagccccagattcggcgagatctgcaacatcagcctgctggtgacccccgccatcgccaacggcgagatcggcttcctgagcaacctgcccatcatcctgcacgagcccgaggacttcgccgccgaggtggtgtacatccccctgcacagagacggcaccgacggccaggccaccgtgtactggagcctgaagcccagcggcttcaacagcaaggccgtgacccccgacgacatcggccccttcaacggcagcgtgctgttcctgagcggccagagcgacaccaccatcaacatcaccatcaagggcgacgacatccccgagatgaacgagaccgtgaccctgagcctggacagagtgaacgtggagaaccaggtgctgaagagcggctacaccagcagagacctgatcatcctggagaacgacgaccccggcggcgtgttcgagttcagccccgccagcagaggcccctacgtgatcaaggagggcgagagcgtggagctgcacatcatcagaagcagaggcagcctggtgaagcagttcctgcactacagagtggagcccagagacagcaacgagttctacggcaacaccggcgtgctggagttcaagcccggcgagagagagatcgtgatcaccctgctggccagactggacggcatccccgagctggacgagcactactgggtggtgctgagcagccacggcgagagagagagcaagctgggcagcgccaccatcgtgaacatcaccatcctgaagaacgacgacccccacggcatcatcgagttcgtgagcgacggcctgatcgtgatgatcaacgagagcaagggcgacgccatctacagcgccgtgtacgacgtggtgagaaacagaggcaacttcggcgacgtgagcgtgagctgggtggtgagccccgacttcacccaggacgtgttccccgtgcagggcaccgtggtgttcggcgaccaggagttcagcaagaacatcaccatctacagcctgcccgacgagatccccgaggagatggaggagttcaccgtgatcctgctgaacggcaccggcggcgccaaggtgggcaacagaaccaccgccaccctgagaatcagaagaaacgacgaccccatctacttcgccgagcccagagtggtgagagtgcaggagggcgagaccgccaacttcaccgtgctgagaaacggcagcgtggacgtgacctgcatggtgcagtacgccaccaaggacggcaaggccaccgccagagagagagacttcatccccgtggagaagggcgagaccctgatcttcgaggtgggcagcagacagcagagcatcagcatcttcgtgaacgaggacggcatccccgagaccgacgagcccttctacatcatcctgctgaacagcaccggcgacaccgtggtgtaccagtacggcgtggccaccgtgatcatcgaggccaacgacgaccccaacggcatcttcagcctggagcccatcgacaaggccgtggaggagggcaagaccaacgccttctggatcctgagacacagaggctacttcggcagcgtgagcgtgagctggcagctgttccagaacgacagcgccctgcagcccggccaggagttctacgagaccagcggcaccgtgaacttcatggacggcgaggaggccaagcccatcatcctgcacgccttccccgacaagatccccgagttcaacgagttctacttcctgaagctggtgaacatcagcggcggcagccccggccccggcggccagctggccgagaccaacctgcaggtgaccgtgatggtgcccttcaacgacgaccccttcggcgtgttcatcctggaccccgagtgcctggagagagaggtggccgaggacgtgctgagcgaggacgacatgagctacatcaccaacttcaccatcctgagacagcagggcgtgttcggcgacgtgcagctgggctgggagatcctgagcagcgagttccccgccggcctgccccccatgatcgacttcctgctggtgggcatcttccccaccaccgtgcacctgcagcagcacatgagaagacaccacagcggcaccgacgccctgtacttcaccggcctggagggcgccttcggcaccgtgaaccccaagtaccaccccagcagaaacaacaccatcgccaacttcaccttcagcgcctgggtgatgcccaacgccaacaccaacggcttcatcatcgccaaggacgacggcaacggcagcatctactacggcgtgaagatccagaccaacgagagccacgtgaccctgagcctgcactacaagaccctgggcagcaacgccacctacatcgccaagaccaccgtgatgaagtacctggaggagagcgtgtggctgcacctgctgatcatcctggaggacggcatcatcgagttctacctggacggcaacgccatgcccagaggcatcaagagcctgaagggcgaggccatcaccgacggccccggcatcctgagaatcggcgccggcatcaacggcaacgacagattcaccggcctgatgcaggacgtgagaagctacgagagaaagctgaccctggaggagatctacgagctgcacgccatgcccgccaagagcgacctgcaccccatcagcggctacctggagttcagacagggcgagaccaacaagagcttcatcatcagcgccagagacgacaacgacgaggagggcgaggagctgttcatcctgaagctggtgagcgtgtacggcggcgccagaatcagcgaggagaacaccaccgccagactgaccatccagaagagcgacaacgccaacggcctgttcggcttcaccggcgcctgcatccccgagatcgccgaggagggcagcaccatcagctgcgtggtggagagaaccagaggcgccctggactacgtgcacgtgttctacaccatcagccagatcgagaccgacggcatcaactacctggtggacgacttcgccaacgccagcggcaccatcaccttcctgccctggcagagaagcgaggtgctgaacatctacgtgctggacgacgacatccccgagctgaacgagtacttcagagtgaccctggtgagcgccatccccggcgacggcaagctgggcagcacccccaccagcggcgccagcatcgaccccgagaaggagaccaccgacatcaccatcaaggccagcgaccacccctacggcctgctgcagttcagcaccggcctgcccccccagcccaaggacgccatgaccctgcccgccagcagcgtgccccacatcaccgtggaggaggaggacggcgagatcagactgctggtgatcagagcccagggcctgctgggcagagtgaccgccgagttcagaaccgtgagcctgaccgccttcagccccgaggactaccagaacgtggccggcaccctggagttccagcccggcgagagatacaagtacatcttcatcaacatcaccgacaacagcatccccgagctggagaagagcttcaaggtggagctgctgaacctggagggcggcgtggccgagctgttcagagtggacggcagcggcagcggcgacggcgacatggagttcttcctgcccaccatccacaagagagccagcctgggcgtggccagccagatcctggtgaccatcgccgccagcgaccacgcccacggcgtgttcgagttcagccccgagagcctgttcgtgagcggcaccgagcccgaggacggctacagcaccgtgaccctgaacgtgatcagacaccacggcaccctgagccccgtgaccctgcactggaacatcgacagcgaccccgacggcgacctggccttcaccagcggcaacatcaccttcgagatcggccagaccagcgccaacatcaccgtggagatcctgcccgacgaggaccccgagctggacaaggccttcagcgtgagcgtgctgagcgtgagcagcggcagcctgggcgcccacatcaacgccaccctgaccgtgctggccagcgacgacccctacggcatcttcatcttcagcgagaagaacagacccgtgaaggtggaggaggccacccagaacatcaccctgagcatcatcagactgaagggcctgatgggcaaggtgctggtgagctacgccaccctggacgacatggagaagcccccctacttcccccccaacctggccagagccacccagggcagagactacatccccgccagcggcttcgccctgttcggcgccaaccagagcgaggccaccatcgccatcagcatcctggacgacgacgagcccgagagaagcgagagcgtgttcatcgagctgctgaacagcaccctggtggccaaggtgcagagcagaagcatccccaacagccccagactgggccccaaggtggagaccatcgcccagctgatcatcatcgccaacgacgacgccttcggcaccctgcagctgagcgcccccatcgtgagagtggccgagaaccacgtgggccccatcatcaacgtgaccagaaccggcggcgccttcgccgacgtgagcgtgaagttcaaggccgtgcccatcaccgccatcgccggcgaggactacagcatcgccagcagcgacgtggtgctgctggagggcgagaccagcaaggccgtgcccatctacgtgatcaacgacatctaccccgagctggaggagagcttcctggtgcagctgatgaacgagaccaccggcggcgccagactgggcgccctgaccgaggccgtgatcatcatcgaggccagcgacgacccctacggcctgttcggcttccagatcaccaagctgatcgtggaggagcccgagttcaacagcgtgaaggtgaacctgcccatcatcagaaacagcggcaccctgggcaacgtgaccgtgcagtgggtggccaccatcaacggccagctggccaccggcgacctgagagtggtgagcggcaacgtgaccttcgcccccggcgagaccatccagaccctgctgctggaggtgctggccgacgacgtgcccgagatcgaggaggtgatccaggtgcagctgaccgacgccagcggcggcggcaccatcggcctggacagaatcgccaacatcatcatccccgccaacgacgacccctacggcaccgtggccttcgcccagatggtgtacagagtgcaggagcccctggagagaagcagctgcgccaacatcaccgtgagaagaagcggcggccacttcggcagactgctgctgttctacagcaccagcgacatcgacgtggtggccctggccatggaggagggccaggacctgctgagctactacgagagccccatccagggcgtgcccgaccccctgtggagaacctggatgaacgtgagcgccgtgggcgagcccctgtacacctgcgccaccctgtgcctgaaggagcaggcctgcagcgccttcagcttcttcagcgccagcgagggcccccagtgcttctggatgaccagctggatcagccccgccgtgaacaacagcgacttctggacctacagaaagaacatgaccagagtggccagcctgttcagcggccaggccgtggccggcagcgactacgagcccgtgaccagacagtgggccatcatgcaggagggcgacgagttcgccaacctgaccgtgagcatcctgcccgacgacttccccgagatggacgagagcttcctgatcagcctgctggaggtgcacctgatgaacatcagcgccagcctgaagaaccagcccaccatcggccagcccaacatcagcaccgtggtgatcgccctgaacggcgacgccttcggcgtgttcgtgatctacaacatcagccccaacaccagcgaggacggcctgttcgtggaggtgcaggagcagccccagaccctggtggagctgatgatccacagaaccggcggcagcctgggccaggtggccgtggagtggagagtggtgggcggcaccgccaccgagggcctggacttcatcggcgccggcgagatcctgaccttcgccgagggcgagaccaagaagaccgtgatcctgaccatcctggacgacagcgagcccgaggacgacgagagcatcatcgtgagcctggtgtacaccgagggcggcagcagaatcctgcccagcagcgacaccgtgagagtgaacatcctggccaacgacaacgtggccggcatcgtgagcttccagaccgccagcagaagcgtgatcggccacgagggcgagatcctgcagttccacgtgatcagaaccttccccggcagaggcaacgtgaccgtgaactggaagatcatcggccagaacctggagctgaacttcgccaacttcagcggccagctgttcttccccgagggcagcctgaacaccaccctgttcgtgcacctgctggacgacaacatccccgaggagaaggaggtgtaccaggtgatcctgtacgacgtgagaacccagggcgtgccccccgccggcatcgccctgctggacgcccagggctacgccgccgtgctgaccgtggaggccagcgacgagccccacggcgtgctgaacttcgccctgagcagcagattcgtgctgctgcaggaggccaacatcaccatccagctgttcatcaacagagagttcggcagcctgggcgccatcaacgtgacctacaccaccgtgcccggcatgctgagcctgaagaaccagaccgtgggcaacctggccgagcccgaggtggacttcgtgcccatcatcggcttcctgatcctggaggagggcgagaccgccgccgccatcaacatcaccatcctggaggacgacgtgcccgagctggaggagtacttcctggtgaacctgacctacgtgggcctgaccatggccgccagcaccagcttcccccccagactggacagcgagggcctgaccgcccaggtgatcatcgacgccaacgacggcgccagaggcgtgatcgagtggcagcagagcagattcgaggtgaacgagacccacggcagcctgaccctggtggcccagagaagcagagagcccctgggccacgtgagcctgttcgtgtacgcccagaacctggaggcccaggtgggcctggactacatcttcacccccatgatcctgcacttcgccgacggcgagagatacaagaacgtgaacatcatgatcctggacgacgacatccccgagggcgacgagaagttccagctgatcctgaccaaccccagccccggcctggagctgggcaagaacaccatcgccctgatcatcgtgctggccaacgacgacggccccggcgtgctgagcttcaacaacagcgagcacttcttcctgagagagcccaccgccctgtacgtgcaggagagcgtggccgtgctgtacatcgtgagagagcccgcccagggcctgttcggcaccgtgaccgtgcagttcatcgtgaccgaggtgaacagcagcaacgagagcaaggacctgacccccagcaagggctacatcgtgctggaggagggcgtgagattcaaggccctgcagatcagcgccatcctggacaccgagcccgagatggacgagtacttcgtgtgcaccctgttcaaccccaccggcggcgccagactgggcgtgcacgtgcagaccctgatcaccgtgctgcagaaccaggcccccctgggcctgttcagcatcagcgccgtggagaacagagccaccagcatcgacatcgaggaggccaacagaaccgtgtacctgaacgtgagcagaaccaacggcatcgacctggccgtgagcgtgcagtgggagaccgtgagcgagaccgccttcggcatgagaggcatggacgtggtgttcagcgtgttccagagcttcctggacgagagcgccagcggctggtgcttcttcaccctggagaacctgatctacggcatcatgctgagaaagagcagcgtgaccgtgtacagatggcagggcatcttcatccccgtggaggacctgaacatcgagaaccccaagacctgcgaggccttcaacatcggcttcagcccctacttcgtgatcacccacgaggagagaaacgaggagaagcccagcctgaacagcgtgttcaccttcaccagcggcttcaagctgttcctggtgcagaccatcatcatcctggagagcagccaggtgagatacttcaccagcgacagccaggactacctgatcatcgccagccagagagacgacagcgagctgacccaggtgttcagatggaacggcggcagcttcgtgctgcaccagaagctgcccgtgagaggcgtgctgaccgtggccctgttcaacaagggcggcagcgtgttcctggccatcagccaggccaacgccagactgaacagcctgctgttcagatggagcggcagcggcttcatcaacttccaggaggtgcccgtgagcggcaccaccgaggtggaggccctgagcagcgccaacgacatctacctgatcttcgccgagaacgtgttcctgggcgaccagaacagcatcgacatcttcatctgggagatgggccagagcagcttcagatacttccagagcgtggacttcgccgccgtgaacagaatccacagcttcacccccgccagcggcatcgcccacatcctgctgatcggccaggacatgagcgccctgtactgctggaacagcgagagaaaccagttcagcttcgtgctggaggtgcccagcgcctacgacgtggccagcgtgaccgtgaagagcctgaacagcagcaagaacctgatcgccctggtgggcgcccacagccacatctacgagctggcctacatcagcagccacagcgacttcatccccagcagcggcgagctgatcttcgagcccggcgagagagaggccaccatcgccgtgaacatcctggacgacaccgtgcccgagaaggaggagagcttcaaggtgcagctgaagaaccccaagggcggcgccgagatcggcatcaacgacagcgtgaccatcaccatcctgagcaacgacgacgcctacggcatcgtggccttcgcccagaacagcctgtacaagcaggtggaggagatggagcaggacagcctggtgaccctgaacgtggagagactgaagggcacctacggcagaatcaccatcgcctgggaggccgacggcagcatcagcgacatcttccccaccagcggcgtgatcctgttcaccgagggccaggtgctgagcaccatcaccctgaccatcctggccgacaacatccccgagctgagcgaggtggtgatcgtgaccctgaccagaatcaccaccgagggcgtggaggacagctacaagggcgccaccatcgaccaggacagaagcaagagcgtgatcaccaccctgcccaacgacagccccttcggcctggtgggctggagagccgccagcgtgttcatcagagtggccgagcccaaggagaacaccaccaccctgcagctgcagatcgccagagacaagggcctgctgggcgacatcgccatccacctgagagcccagcccaacttcctgctgcacgtggacaaccaggccaccgagaacgaggactacgtgctgcaggagaccatcatcatcatgaaggagaacatcaaggaggcccacgccgaggtgagcatcctgcccgacgacctgcccgagctggaggagggcttcatcgtgaccatcaccgaggtgaacctggtgaacagcgacttcagcaccggccagcccagcgtgagaagacccggcatggagatcgccgagatcatgatcgaggagaacgacgaccccagaggcatcttcatgttccacgtgaccagaggcgccggcgaggtgatcaccgcctacgaggtgcccccccccctgaacgtgctgcaggtgcccgtggtgagactggccggcagcttcggcgccgtgaacgtgtactggaaggccagccccgacagcgccggcctggaggacttcaagcccagccacggcatcctggagttcgccgacaagcaggtgaccgccatgatcgagatcaccatcatcgacgacgccgagttcgagctgaccgagaccttcaacatcagcctgatcagcgtggccggcggcggcagactgggcgacgacgtggtggtgaccgtggtgatcccccagaacgacagccccttcggcgtgttcggcttcgaggagaagaccgtgatgatcgacgagagcctgagcagcgacgaccccgacagctacgtgaccctgaccgtggtgagaagccccggcggcaagggcaccgtgagactggagtggaccatcgacgagaaggccaagcacaacctgagccccctgaacggcaccctgcacttcgacgagaccgagagccagaagaccatcgtgctgcacaccctgcaggacaccgtgctggaggaggacagaagattcaccatccagctgatcagcatcgacgaggtggagatcagccccgtgaagggcagcgccagcatcatcatcagaggcgacaagagagccagcggcgaggtgggcatcgcccccagcagcagacacatcctgatcggcgagcccagcgccaagtacaacggcaccgccatcatcagcctggtgagaggccccggcatcctgggcgaggtgaccgtgttctggagaatcttcccccccagcgtgggcgagttcgccgagaccagcggcaagctgaccatgagagacgagcagagcgccgtgatcgtggtgatccaggccctgaacgacgacatccccgaggagaagagcttctacgagttccagctgaccgccgtgagcgagggcggcgtgctgagcgagagcagcagcaccgccaacatcaccgtggtggccagcgacagcccctacggcagattcgccttcagccacgagcagctgagagtgagcgaggcccagagagtgaacatcaccatcatcagaagcagcggcgacttcggccacgtgagactgtggtacaagaccatgagcggcaccgccgaggccggcctggacttcgtgcccgccgccggcgagctgctgttcgaggccggcgagatgagaaagagcctgcacgtggagatcctggacgacgactaccccgagggccccgaggagttcagcctgaccatcaccaaggtggagctgcagggcagaggctacgacttcaccatccaggagaacggcctgcagatcgaccagccccccgagatcggcaacatcagcatcgtgagaatcatcatcatgaagaacgacaacgccgagggcatcatcgagttcgaccccaagtacaccgccttcgaggtggaggaggacgtgggcctgatcatgatccccgtggtgagactgcacggcacctacggctacgtgaccgccgacttcatcagccagagcagcagcgccagccccggcggcgtggactacatcctgcacggcagcaccgtgaccttccagcacggccagaacctgagcttcatcaacatcagcatcatcgacgacaacgagagcgagttcgaggagcccatcgagatcctgctgaccggcgccaccggcggcgccgtgctgggcagacacctggtgagcagaatcatcatcgccaagagcgacagccccttcggcgtgatcagattcctgaaccagagcaagatcagcatcgccaaccccaacagcaccatgatcctgagcctggtgctggagagaaccggcggcctgctgggcgagatccaggtgaactgggagaccgtgggccccaacagccaggaggccctgctgccccagaacagagacatcgccgaccccgtgagcggcctgttctacttcggcgagggcgagggcggcgtgagaaccatcatcctgaccatctacccccacgaggagatcgaggtggaggagaccttcatcatcaagctgcacctggtgaagggcgaggccaagctggacagcagagccaaggacgtgaccctgaccatccaggagttcggcgaccccaacggcgtggtgcagttcgcccccgagaccctgagcaagaagacctacagcgagcccctggccctggagggccccctgctgatcaccttcttcgtgagaagagtgaagggcaccttcggcgagatcatggtgtactgggagctgagcagcgagttcgacatcaccgaggacttcctgagcaccagcggcttcttcaccatcgccgacggcgagagcgaggccagcttcgacgtgcacctgctgcccgacgaggtgcccgagatcgaggaggactacgtgatccagctggtgagcgtggagggcggcgccgagctggacctggagaagagcatcacctggttcagcgtgtacgccaacgacgacccccacggcgtgttcgccctgtacagcgacagacagagcatcctgatcggccagaacctgatcagaagcatccagatcaacatcaccagactggccggcaccttcggcgacgtggccgtgggcctgagaatcagcagcgaccacaaggagcagcccatcgtgaccgagaacgccgagagacagctggtggtgaaggacggcgccacctacaaggtggacgtggtgcccatcaagaaccaggtgttcctgagcctgggcagcaacttcaccctgcagctggtgaccgtgatgctggtgggcggcagattctacggcatgcccaccatcctgcaggaggccaagagcgccgtgctgcccgtgagcgagaaggccgccaacagccaggtgggcttcgagagcaccgccttccagctgatgaacatcaccgccggcaccagccacgtgatgatcagcagaagaggcacctacggcgccctgagcgtggcctggaccaccggctacgcccccggcctggagatccccgagttcatcgtggtgggcaacatgacccccaccctgggcagcctgagcttcagccacggcgagcagagaaagggcgtgttcctgtggaccttccccagccccggctggcccgaggccttcgtgctgcacctgagcggcgtgcagagcagcgcccccggcggcgcccagctgagaagcggcttcatcgtggccgagatcgagcccatgggcgtgttccagttcagcaccagcagcagaaacatcatcgtgagcgaggacacccagatgatcagactgcacgtgcagagactgttcggcttccacagcgacctgatcaaggtgagctaccagaccaccgccggcagcgccaagcccctggaggacttcgagcccgtgcagaacggcgagctgttcttccagaagttccagaccgaggtggacttcgagatcaccatcatcaacgaccagctgagcgagatcgaggagttcttctacatcaacctgaccagcgtggagatcagaggcctgcagaagttcgacgtgaactggagccccagactgaacctggacttcagcgtggccgtgatcaccatcctggacaacgacgacctggccggcatggacatcagcttccccgagaccaccgtggccgtggccgtggacaccaccctgatccccgtggagaccgagagcaccacctacctgagcaccagcaagaccaccaccatcctgcagcccaccaacgtggtggccatcgtgaccgaggccaccggcgtgagcgccatccccgagaagctggtgaccctgcacggcacccccgccgtgagcgagaagcccgacgtggccaccgtgaccgccaacgtgagcatccacggcaccttcagcctgggccccagcatcgtgtacatcgaggaggagatgaagaacggcaccttcaacaccgccgaggtgctgatcagaagaaccggcggcttcaccggcaacgtgagcatcaccgtgaagaccttcggcgagagatgcgcccagatggagcccaacgccctgcccttcagaggcatctacggcatcagcaacctgacctgggccgtggaggaggaggacttcgaggagcagaccctgaccctgatcttcctggacggcgagagagagagaaaggtgagcgtgcagatcctggacgacgacgagcccgagggccaggagttcttctacgtgttcctgaccaacccccagggcggcgcccagatcgtggaggagaaggacgacaccggcttcgccgccttcgccatggtgatcatcaccggcagcgacctgcacaacggcatcatcggcttcagcgaggagagccagagcggcctggagctgagagagggcgccgtgatgagaagactgcacctgatcgtgaccagacagcccaacagagccttcgaggacgtgaaggtgttctggagagtgaccctgaacaagaccgtggtggtgctgcagaaggacggcgtgaacctggtggaggagctgcagagcgtgagcggcaccaccacctgcaccatgggccagaccaagtgcttcatcagcatcgagctgaagcccgagaaggtgccccaggtggaggtgtacttcttcgtggagctgtacgaggccaccgccggcgccgccatcaacaacagcgccagattcgcccagatcaagatcctggagagcgacgagagccagagcctggtgtacttcagcgtgggcagcagactggccgtggcccacaagaaggccaccctgatcagcctgcaggtggccagagacagcggcaccggcctgatgatgagcgtgaacttcagcacccaggagctgagaagcgccgagaccatcggcagaaccatcatcagccccgccatcagcggcaaggacttcgtgatcaccgagggcaccctggtgttcgagcccggccagagaagcaccgtgctggacgtgatcctgacccccgagaccggcagcctgaacagcttccccaagagattccagatcgtgctgttcgaccccaagggcggcgccagaatcgacaaggtgtacggcaccgccaacatcaccctggtgagcgacgccgacagccaggccatctggggcctggccgaccagctgcaccagcccgtgaacgacgacatcctgaacagagtgctgcacaccatcagcatgaaggtggccaccgagaacaccgacgagcagctgagcgccatgatgcacctgatcgagaagatcaccaccgagggcaagatccaggccttcagcgtggccagcagaaccctgttctacgagatcctgtgcagcctgatcaaccccaagagaaaggacaccagaggcttcagccacttcgccgaggtgaccgagaacttcgccttcagcctgctgaccaacgtgacctgcggcagccccggcgagaagagcaagaccatcctggacagctgcccctacctgagcatcctggccctgcactggtacccccagcagatcaacggccacaagttcgagggcaaggagggcgactacatcagaatccccgagagactgctggacgtgcaggacgccgagatcatggccggcaagagcacctgcaagctggtgcagttcaccgagtacagcagccagcagtggttcatcagcggcaacaacctgcccaccctgaagaacaaggtgctgagcctgagcgtgaagggccagagcagccagctgctgaccaacgacaacgaggtgctgtacagaatctacgccgccgagcccagaatcatcccccagaccagcctgtgcctgctgtggaaccaggccgccgccagctggctgagcgacagccagttctgcaaggtggtggaggagaccgccgactacgtggagtgcgcctgcagccacatgagcgtgtacgccgtgtacgccagaaccgacaacctgagcagctacaacgaggccttcttcaccagcggcttcatctgcatcagcggcctgtgcctggccgtgctgagccacatcttctgcgccagatacagcatgttcgccgccaagctgctgacccacatgatggccgccagcctgggcacccagatcctgttcctggccagcgcctacgccagcccccagctggccgaggagagctgcagcgccatggccgccgtgacccactacctgtacctgtgccagttcagctggatgctgatccagagcgtgaacttctggtacgtgctggtgatgaacgacgagcacaccgagagaagatacctgctgttcttcctgctgagctggggcctgcccgccttcgtggtgatcctgctgatcgtgatcctgaagggcatctaccaccagagcatgagccagatctacggcctgatccacggcgacctgtgcttcatccccaacgtgtacgccgccctgttcaccgccgccctggtgcccctgacctgcctggtggtggtgttcgtggtgttcatccacgcctaccaggtgaagccccagtggaaggcctacgacgacgtgttcagaggcagaaccaacgccgccgagatccccctgatcctgtacctgttcgccctgatcagcgtgacctggctgtggggcggcctgcacatggcctacagacacttctggatgctggtgctgttcgtgatcttcaacagcctgcagggcctgtacgtgttcatggtgtacttcatcctgcacaaccagatgtgctgccccatgaaggccagctacaccgtggagatgaacggccaccccggccccagcaccgccttcttcacccccggcagcggcatgccccccgccggcggcgagatcagcaagagcacccagaacctgatcggcgccatggaggaggtgccccccgactgggagagagccagcttccagcagggcagccaggccagccccgacctgaagcccagcccccagaacggcgccaccttccccagcagcggcggctacggccagggcagcctgatcgccgacgaggagagccaggagttcgacgacctgatcttcgccctgaagaccggcgccggcctgagcgtgagcgacaacgagagcggccagggcagccaggagggcggcaccctgaccgacagccagatcgtggagctgagaagaatccccatcgccgacacccacctgtag

SEQ ID NO: 222915 - DNA, 18921 bp, Artificial Sequence
  derived and/or modified sequence
atgagcgtgttcctgggccccggcatgcccagcgccagcctgctggtgaacctgctgagcgccctgctgatcctgttcgtgttcggcgagaccgagatcagattcaccggccagaccgagttcgtggtgaacgagaccagcaccaccgtgatcagactgatcatcgagagaatcggcgagcccgccaacgtgaccgccatcgtgagcctgtacggcgaggacgccggcgacttcttcgacacctacgccgccgccttcatccccgccggcgagaccaacagaaccgtgtacatcgccgtgtgcgacgacgacctgcccgagcccgacgagaccttcatcttccacctgaccctgcagaagcccagcgccaacgtgaagctgggctggcccagaaccgtgaccgtgaccatcctgagcaacgacaacgccttcggcatcatcagcttcaacatgctgcccagcatcgccgtgagcgagcccaagggcagaaacgagagcatgcccctgaccctgatcagagagaagggcacctacggcatggtgatggtgaccttcgaggtggagggcggccccaacccccccgacgaggacctgagccccgtgaagggcaacatcaccttcccccccggcagagccaccgtgatctacaacctgaccgtgctggacgacgaggtgcccgagaacgacgagatcttcctgatccagctgaagagcgtggagggcggcgccgagatcaacaccagcagaaacagcatcgagatcatcatcaagaagaacgacagccccgtgagattcctgcagagcatctacctggtgcccgaggaggaccacatcctgatcatccccgtggtgagaggcaaggacaacaacggcaacctgatcggcagcgacgagtacgaggtgagcatcagctacgccgtgaccaccggcaacagcaccgcccacgcccagcagaacctggacttcatcgacctgcagcccaacaccaccgtggtgttcccccccttcatccacgagagccacctgaagttccagatcgtggacgacaccatccccgagatcgccgagagcttccacatcatgctgctgaaggacaccctgcagggcgacgccgtgctgatcagccccagcgtggtgcaggtgaccatcaagcccaacgacaagccctacggcgtgctgagcttcaacagcgtgctgttcgagagaaccgtgatcatcgacgaggacagaatcagcagatacgaggagatcaccgtggtgagaaacggcggcacccacggcaacgtgagcgccaactgggtgctgaccagaaacagcaccgaccccagccccgtgaccgccgacatcagacccagcagcggcgtgctgcacttcgcccagggccagatgctggccaccatccccctgaccgtggtggacgacgacctgcccgaggaggccgaggcctacctgctgcagatcctgccccacaccatcagaggcggcgccgaggtgagcgagcccgccgagctgctgttctacatccaggacagcgacgacgtgtacggcctgatcaccttcttccccatggagaaccagaagatcgagagcagccccggcgagagatacctgagcctgagcttcaccagactgggcggcaccaagggcgacgtgagactgctgtacagcgtgctgtacatccccgccggcgccgtggaccccctgcaggccaaggagggcatcctgaacatcagcagaagaaacgacctgatcttccccgagcagaagacccaggtgaccaccaagctgcccatcagaaacgacgccttcctgcagaacggcgcccacttcctggtgcagctggagaccgtggagctgctgaacatcatccccctgatcccccccatcagccccagattcggcgagatctgcaacatcagcctgctggtgacccccgccatcgccaacggcgagatcggcttcctgagcaacctgcccatcatcctgcacgagcccgaggacttcgccgccgaggtggtgtacatccccctgcacagagacggcaccgacggccaggccaccgtgtactggagcctgaagcccagcggcttcaacagcaaggccgtgacccccgacgacatcggccccttcaacggcagcgtgctgttcctgagcggccagagcgacaccaccatcaacatcaccatcaagggcgacgacatccccgagatgaacgagaccgtgaccctgagcctggacagagtgaacgtggagaaccaggtgctgaagagcggctacaccagcagagacctgatcatcctggagaacgacgaccccggcggcgtgttcgagttcagccccgccagcagaggcccctacgtgatcaaggagggcgagagcgtggagctgcacatcatcagaagcagaggcagcctggtgaagcagttcctgcactacagagtggagcccagagacagcaacgagttctacggcaacaccggcgtgctggagttcaagcccggcgagagagagatcgtgatcaccctgctggccagactggacggcatccccgagctggacgagcactactgggtggtgctgagcagccacggcgagagagagagcaagctgggcagcgccaccatcgtgaacatcaccatcctgaagaacgacgacccccacggcatcatcgagttcgtgagcgacggcctgatcgtgatgatcaacgagagcaagggcgacgccatctacagcgccgtgtacgacgtggtgagaaacagaggcaacttcggcgacgtgagcgtgagctgggtggtgagccccgacttcacccaggacgtgttccccgtgcagggcaccgtggtgttcggcgaccaggagttcagcaagaacatcaccatctacagcctgcccgacgagatccccgaggagatggaggagttcaccgtgatcctgctgaacggcaccggcggcgccaaggtgggcaacagaaccaccgccaccctgagaatcagaagaaacgacgaccccatctacttcgccgagcccagagtggtgagagtgcaggagggcgagaccgccaacttcaccgtgctgagaaacggcagcgtggacgtgacctgcatggtgcagtacgccaccaaggacggcaaggccaccgccagagagagagacttcatccccgtggagaagggcgagaccctgatcttcgaggtgggcagcagacagcagagcatcagcatcttcgtgaacgaggacggcatccccgagaccgacgagcccttctacatcatcctgctgaacagcaccggcgacaccgtggtgtaccagtacggcgtggccaccgtgatcatcgaggccaacgacgaccccaacggcatcttcagcctggagcccatcgacaaggccgtggaggagggcaagaccaacgccttctggatcctgagacacagaggctacttcggcagcgtgagcgtgagctggcagctgttccagaacgacagcgccctgcagcccggccaggagttctacgagaccagcggcaccgtgaacttcatggacggcgaggaggccaagcccatcatcctgcacgccttccccgacaagatccccgagttcaacgagttctacttcctgaagctggtgaacatcagcggcggcagccccggccccggcggccagctggccgagaccaacctgcaggtgaccgtgatggtgcccttcaacgacgaccccttcggcgtgttcatcctggaccccgagtgcctggagagagaggtggccgaggacgtgctgagcgaggacgacatgagctacatcaccaacttcaccatcctgagacagcagggcgtgttcggcgacgtgcagctgggctgggagatcctgagcagcgagttccccgccggcctgccccccatgatcgacttcctgctggtgggcatcttccccaccaccgtgcacctgcagcagcacatgagaagacaccacagcggcaccgacgccctgtacttcaccggcctggagggcgccttcggcaccgtgaaccccaagtaccaccccagcagaaacaacaccatcgccaacttcaccttcagcgcctgggtgatgcccaacgccaacaccaacggcttcatcatcgccaaggacgacggcaacggcagcatctactacggcgtgaagatccagaccaacgagagccacgtgaccctgagcctgcactacaagaccctgggcagcaacgccacctacatcgccaagaccaccgtgatgaagtacctggaggagagcgtgtggctgcacctgctgatcatcctggaggacggcatcatcgagttctacctggacggcaacgccatgcccagaggcatcaagagcctgaagggcgaggccatcaccgacggccccggcatcctgagaatcggcgccggcatcaacggcaacgacagattcaccggcctgatgcaggacgtgagaagctacgagagaaagctgaccctggaggagatctacgagctgcacgccatgcccgccaagagcgacctgcaccccatcagcggctacctggagttcagacagggcgagaccaacaagagcttcatcatcagcgccagagacgacaacgacgaggagggcgaggagctgttcatcctgaagctggtgagcgtgtacggcggcgccagaatcagcgaggagaacaccaccgccagactgaccatccagaagagcgacaacgccaacggcctgttcggcttcaccggcgcctgcatccccgagatcgccgaggagggcagcaccatcagctgcgtggtggagagaaccagaggcgccctggactacgtgcacgtgttctacaccatcagccagatcgagaccgacggcatcaactacctggtggacgacttcgccaacgccagcggcaccatcaccttcctgccctggcagagaagcgaggtgctgaacatctacgtgctggacgacgacatccccgagctgaacgagtacttcagagtgaccctggtgagcgccatccccggcgacggcaagctgggcagcacccccaccagcggcgccagcatcgaccccgagaaggagaccaccgacatcaccatcaaggccagcgaccacccctacggcctgctgcagttcagcaccggcctgcccccccagcccaaggacgccatgaccctgcccgccagcagcgtgccccacatcaccgtggaggaggaggacggcgagatcagactgctggtgatcagagcccagggcctgctgggcagagtgaccgccgagttcagaaccgtgagcctgaccgccttcagccccgaggactaccagaacgtggccggcaccctggagttccagcccggcgagagatacaagtacatcttcatcaacatcaccgacaacagcatccccgagctggagaagagcttcaaggtggagctgctgaacctggagggcggcgtggccgagctgttcagagtggacggcagcggcagcggcgacggcgacatggagttcttcctgcccaccatccacaagagagccagcctgggcgtggccagccagatcctggtgaccatcgccgccagcgaccacgcccacggcgtgttcgagttcagccccgagagcctgttcgtgagcggcaccgagcccgaggacggctacagcaccgtgaccctgaacgtgatcagacaccacggcaccctgagccccgtgaccctgcactggaacatcgacagcgaccccgacggcgacctggccttcaccagcggcaacatcaccttcgagatcggccagaccagcgccaacatcaccgtggagatcctgcccgacgaggaccccgagctggacaaggccttcagcgtgagcgtgctgagcgtgagcagcggcagcctgggcgcccacatcaacgccaccctgaccgtgctggccagcgacgacccctacggcatcttcatcttcagcgagaagaacagacccgtgaaggtggaggaggccacccagaacatcaccctgagcatcatcagactgaagggcctgatgggcaaggtgctggtgagctacgccaccctggacgacatggagaagcccccctacttcccccccaacctggccagagccacccagggcagagactacatccccgccagcggcttcgccctgttcggcgccaaccagagcgaggccaccatcgccatcagcatcctggacgacgacgagcccgagagaagcgagagcgtgttcatcgagctgctgaacagcaccctggtggccaaggtgcagagcagaagcatccccaacagccccagactgggccccaaggtggagaccatcgcccagctgatcatcatcgccaacgacgacgccttcggcaccctgcagctgagcgcccccatcgtgagagtggccgagaaccacgtgggccccatcatcaacgtgaccagaaccggcggcgccttcgccgacgtgagcgtgaagttcaaggccgtgcccatcaccgccatcgccggcgaggactacagcatcgccagcagcgacgtggtgctgctggagggcgagaccagcaaggccgtgcccatctacgtgatcaacgacatctaccccgagctggaggagagcttcctggtgcagctgatgaacgagaccaccggcggcgccagactgggcgccctgaccgaggccgtgatcatcatcgaggccagcgacgacccctacggcctgttcggcttccagatcaccaagctgatcgtggaggagcccgagttcaacagcgtgaaggtgaacctgcccatcatcagaaacagcggcaccctgggcaacgtgaccgtgcagtgggtggccaccatcaacggccagctggccaccggcgacctgagagtggtgagcggcaacgtgaccttcgcccccggcgagaccatccagaccctgctgctggaggtgctggccgacgacgtgcccgagatcgaggaggtgatccaggtgcagctgaccgacgccagcggcggcggcaccatcggcctggacagaatcgccaacatcatcatccccgccaacgacgacccctacggcaccgtggccttcgcccagatggtgtacagagtgcaggagcccctggagagaagcagctgcgccaacatcaccgtgagaagaagcggcggccacttcggcagactgctgctgttctacagcaccagcgacatcgacgtggtggccctggccatggaggagggccaggacctgctgagctactacgagagccccatccagggcgtgcccgaccccctgtggagaacctggatgaacgtgagcgccgtgggcgagcccctgtacacctgcgccaccctgtgcctgaaggagcaggcctgcagcgccttcagcttcttcagcgccagcgagggcccccagtgcttctggatgaccagctggatcagccccgccgtgaacaacagcgacttctggacctacagaaagaacatgaccagagtggccagcctgttcagcggccaggccgtggccggcagcgactacgagcccgtgaccagacagtgggccatcatgcaggagggcgacgagttcgccaacctgaccgtgagcatcctgcccgacgacttccccgagatggacgagagcttcctgatcagcctgctggaggtgcacctgatgaacatcagcgccagcctgaagaaccagcccaccatcggccagcccaacatcagcaccgtggtgatcgccctgaacggcgacgccttcggcgtgttcgtgatctacaacatcagccccaacaccagcgaggacggcctgttcgtggaggtgcaggagcagccccagaccctggtggagctgatgatccacagaaccggcggcagcctgggccaggtggccgtggagtggagagtggtgggcggcaccgccaccgagggcctggacttcatcggcgccggcgagatcctgaccttcgccgagggcgagaccaagaagaccgtgatcctgaccatcctggacgacagcgagcccgaggacgacgagagcatcatcgtgagcctggtgtacaccgagggcggcagcagaatcctgcccagcagcgacaccgtgagagtgaacatcctggccaacgacaacgtggccggcatcgtgagcttccagaccgccagcagaagcgtgatcggccacgagggcgagatcctgcagttccacgtgatcagaaccttccccggcagaggcaacgtgaccgtgaactggaagatcatcggccagaacctggagctgaacttcgccaacttcagcggccagctgttcttccccgagggcagcctgaacaccaccctgttcgtgcacctgctggacgacaacatccccgaggagaaggaggtgtaccaggtgatcctgtacgacgtgagaacccagggcgtgccccccgccggcatcgccctgctggacgcccagggctacgccgccgtgctgaccgtggaggccagcgacgagccccacggcgtgctgaacttcgccctgagcagcagattcgtgctgctgcaggaggccaacatcaccatccagctgttcatcaacagagagttcggcagcctgggcgccatcaacgtgacctacaccaccgtgcccggcatgctgagcctgaagaaccagaccgtgggcaacctggccgagcccgaggtggacttcgtgcccatcatcggcttcctgatcctggaggagggcgagaccgccgccgccatcaacatcaccatcctggaggacgacgtgcccgagctggaggagtacttcctggtgaacctgacctacgtgggcctgaccatggccgccagcaccagcttcccccccagactggacagcgagggcctgaccgcccaggtgatcatcgacgccaacgacggcgccagaggcgtgatcgagtggcagcagagcagattcgaggtgaacgagacccacggcagcctgaccctggtggcccagagaagcagagagcccctgggccacgtgagcctgttcgtgtacgcccagaacctggaggcccaggtgggcctggactacatcttcacccccatgatcctgcacttcgccgacggcgagagatacaagaacgtgaacatcatgatcctggacgacgacatccccgagggcgacgagaagttccagctgatcctgaccaaccccagccccggcctggagctgggcaagaacaccatcgccctgatcatcgtgctggccaacgacgacggccccggcgtgctgagcttcaacaacagcgagcacttcttcctgagagagcccaccgccctgtacgtgcaggagagcgtggccgtgctgtacatcgtgagagagcccgcccagggcctgttcggcaccgtgaccgtgcagttcatcgtgaccgaggtgaacagcagcaacgagagcaaggacctgacccccagcaagggctacatcgtgctggaggagggcgtgagattcaaggccctgcagatcagcgccatcctggacaccgagcccgagatggacgagtacttcgtgtgcaccctgttcaaccccaccggcggcgccagactgggcgtgcacgtgcagaccctgatcaccgtgctgcagaaccaggcccccctgggcctgttcagcatcagcgccgtggagaacagagccaccagcatcgacatcgaggaggccaacagaaccgtgtacctgaacgtgagcagaaccaacggcatcgacctggccgtgagcgtgcagtgggagaccgtgagcgagaccgccttcggcatgagaggcatggacgtggtgttcagcgtgttccagagcttcctggacgagagcgccagcggctggtgcttcttcaccctggagaacctgatctacggcatcatgctgagaaagagcagcgtgaccgtgtacagatggcagggcatcttcatccccgtggaggacctgaacatcgagaaccccaagacctgcgaggccttcaacatcggcttcagcccctacttcgtgatcacccacgaggagagaaacgaggagaagcccagcctgaacagcgtgttcaccttcaccagcggcttcaagctgttcctggtgcagaccatcatcatcctggagagcagccaggtgagatacttcaccagcgacagccaggactacctgatcatcgccagccagagagacgacagcgagctgacccaggtgttcagatggaacggcggcagcttcgtgctgcaccagaagctgcccgtgagaggcgtgctgaccgtggccctgttcaacaagggcggcagcgtgttcctggccatcagccaggccaacgccagactgaacagcctgctgttcagatggagcggcagcggcttcatcaacttccaggaggtgcccgtgagcggcaccaccgaggtggaggccctgagcagcgccaacgacatctacctgatcttcgccgagaacgtgttcctgggcgaccagaacagcatcgacatcttcatctgggagatgggccagagcagcttcagatacttccagagcgtggacttcgccgccgtgaacagaatccacagcttcacccccgccagcggcatcgcccacatcctgctgatcggccaggacatgagcgccctgtactgctggaacagcgagagaaaccagttcagcttcgtgctggaggtgcccagcgcctacgacgtggccagcgtgaccgtgaagagcctgaacagcagcaagaacctgatcgccctggtgggcgcccacagccacatctacgagctggcctacatcagcagccacagcgacttcatccccagcagcggcgagctgatcttcgagcccggcgagagagaggccaccatcgccgtgaacatcctggacgacaccgtgcccgagaaggaggagagcttcaaggtgcagctgaagaaccccaagggcggcgccgagatcggcatcaacgacagcgtgaccatcaccatcctgagcaacgacgacgcctacggcatcgtggccttcgcccagaacagcctgtacaagcaggtggaggagatggagcaggacagcctggtgaccctgaacgtggagagactgaagggcacctacggcagaatcaccatcgcctgggaggccgacggcagcatcagcgacatcttccccaccagcggcgtgatcctgttcaccgagggccaggtgctgagcaccatcaccctgaccatcctggccgacaacatccccgagctgagcgaggtggtgatcgtgaccctgaccagaatcaccaccgagggcgtggaggacagctacaagggcgccaccatcgaccaggacagaagcaagagcgtgatcaccaccctgcccaacgacagccccttcggcctggtgggctggagagccgccagcgtgttcatcagagtggccgagcccaaggagaacaccaccaccctgcagctgcagatcgccagagacaagggcctgctgggcgacatcgccatccacctgagagcccagcccaacttcctgctgcacgtggacaaccaggccaccgagaacgaggactacgtgctgcaggagaccatcatcatcatgaaggagaacatcaaggaggcccacgccgaggtgagcatcctgcccgacgacctgcccgagctggaggagggcttcatcgtgaccatcaccgaggtgaacctggtgaacagcgacttcagcaccggccagcccagcgtgagaagacccggcatggagatcgccgagatcatgatcgaggagaacgacgaccccagaggcatcttcatgttccacgtgaccagaggcgccggcgaggtgatcaccgcctacgaggtgcccccccccctgaacgtgctgcaggtgcccgtggtgagactggccggcagcttcggcgccgtgaacgtgtactggaaggccagccccgacagcgccggcctggaggacttcaagcccagccacggcatcctggagttcgccgacaagcaggtgaccgccatgatcgagatcaccatcatcgacgacgccgagttcgagctgaccgagaccttcaacatcagcctgatcagcgtggccggcggcggcagactgggcgacgacgtggtggtgaccgtggtgatcccccagaacgacagccccttcggcgtgttcggcttcgaggagaagaccgtgatgatcgacgagagcctgagcagcgacgaccccgacagctacgtgaccctgaccgtggtgagaagccccggcggcaagggcaccgtgagactggagtggaccatcgacgagaaggccaagcacaacctgagccccctgaacggcaccctgcacttcgacgagaccgagagccagaagaccatcgtgctgcacaccctgcaggacaccgtgctggaggaggacagaagattcaccatccagctgatcagcatcgacgaggtggagatcagccccgtgaagggcagcgccagcatcatcatcagaggcgacaagagagccagcggcgaggtgggcatcgcccccagcagcagacacatcctgatcggcgagcccagcgccaagtacaacggcaccgccatcatcagcctggtgagaggccccggcatcctgggcgaggtgaccgtgttctggagaatcttcccccccagcgtgggcgagttcgccgagaccagcggcaagctgaccatgagagacgagcagagcgccgtgatcgtggtgatccaggccctgaacgacgacatccccgaggagaagagcttctacgagttccagctgaccgccgtgagcgagggcggcgtgctgagcgagagcagcagcaccgccaacatcaccgtggtggccagcgacagcccctacggcagattcgccttcagccacgagcagctgagagtgagcgaggcccagagagtgaacatcaccatcatcagaagcagcggcgacttcggccacgtgagactgtggtacaagaccatgagcggcaccgccgaggccggcctggacttcgtgcccgccgccggcgagctgctgttcgaggccggcgagatgagaaagagcctgcacgtggagatcctggacgacgactaccccgagggccccgaggagttcagcctgaccatcaccaaggtggagctgcagggcagaggctacgacttcaccatccaggagaacggcctgcagatcgaccagccccccgagatcggcaacatcagcatcgtgagaatcatcatcatgaagaacgacaacgccgagggcatcatcgagttcgaccccaagtacaccgccttcgaggtggaggaggacgtgggcctgatcatgatccccgtggtgagactgcacggcacctacggctacgtgaccgccgacttcatcagccagagcagcagcgccagccccggcggcgtggactacatcctgcacggcagcaccgtgaccttccagcacggccagaacctgagcttcatcaacatcagcatcatcgacgacaacgagagcgagttcgaggagcccatcgagatcctgctgaccggcgccaccggcggcgccgtgctgggcagacacctggtgagcagaatcatcatcgccaagagcgacagccccttcggcgtgatcagattcctgaaccagagcaagatcagcatcgccaaccccaacagcaccatgatcctgagcctggtgctggagagaaccggcggcctgctgggcgagatccaggtgaactgggagaccgtgggccccaacagccaggaggccctgctgccccagaacagagacatcgccgaccccgtgagcggcctgttctacttcggcgagggcgagggcggcgtgagaaccatcatcctgaccatctacccccacgaggagatcgaggtggaggagaccttcatcatcaagctgcacctggtgaagggcgaggccaagctggacagcagagccaaggacgtgaccctgaccatccaggagttcggcgaccccaacggcgtggtgcagttcgcccccgagaccctgagcaagaagacctacagcgagcccctggccctggagggccccctgctgatcaccttcttcgtgagaagagtgaagggcaccttcggcgagatcatggtgtactgggagctgagcagcgagttcgacatcaccgaggacttcctgagcaccagcggcttcttcaccatcgccgacggcgagagcgaggccagcttcgacgtgcacctgctgcccgacgaggtgcccgagatcgaggaggactacgtgatccagctggtgagcgtggagggcggcgccgagctggacctggagaagagcatcacctggttcagcgtgtacgccaacgacgacccccacggcgtgttcgccctgtacagcgacagacagagcatcctgatcggccagaacctgatcagaagcatccagatcaacatcaccagactggccggcaccttcggcgacgtggccgtgggcctgagaatcagcagcgaccacaaggagcagcccatcgtgaccgagaacgccgagagacagctggtggtgaaggacggcgccacctacaaggtggacgtggtgcccatcaagaaccaggtgttcctgagcctgggcagcaacttcaccctgcagctggtgaccgtgatgctggtgggcggcagattctacggcatgcccaccatcctgcaggaggccaagagcgccgtgctgcccgtgagcgagaaggccgccaacagccaggtgggcttcgagagcaccgccttccagctgatgaacatcaccgccggcaccagccacgtgatgatcagcagaagaggcacctacggcgccctgagcgtggcctggaccaccggctacgcccccggcctggagatccccgagttcatcgtggtgggcaacatgacccccaccctgggcagcctgagcttcagccacggcgagcagagaaagggcgtgttcctgtggaccttccccagccccggctggcccgaggccttcgtgctgcacctgagcggcgtgcagagcagcgcccccggcggcgcccagctgagaagcggcttcatcgtggccgagatcgagcccatgggcgtgttccagttcagcaccagcagcagaaacatcatcgtgagcgaggacacccagatgatcagactgcacgtgcagagactgttcggcttccacagcgacctgatcaaggtgagctaccagaccaccgccggcagcgccaagcccctggaggacttcgagcccgtgcagaacggcgagctgttcttccagaagttccagaccgaggtggacttcgagatcaccatcatcaacgaccagctgagcgagatcgaggagttcttctacatcaacctgaccagcgtggagatcagaggcctgcagaagttcgacgtgaactggagccccagactgaacctggacttcagcgtggccgtgatcaccatcctggacaacgacgacctggccggcatggacatcagcttccccgagaccaccgtggccgtggccgtggacaccaccctgatccccgtggagaccgagagcaccacctacctgagcaccagcaagaccaccaccatcctgcagcccaccaacgtggtggccatcgtgaccgaggccaccggcgtgagcgccatccccgagaagctggtgaccctgcacggcacccccgccgtgagcgagaagcccgacgtggccaccgtgaccgccaacgtgagcatccacggcaccttcagcctgggccccagcatcgtgtacatcgaggaggagatgaagaacggcaccttcaacaccgccgaggtgctgatcagaagaaccggcggcttcaccggcaacgtgagcatcaccgtgaagaccttcggcgagagatgcgcccagatggagcccaacgccctgcccttcagaggcatctacggcatcagcaacctgacctgggccgtggaggaggaggacttcgaggagcagaccctgaccctgatcttcctggacggcgagagagagagaaaggtgagcgtgcagatcctggacgacgacgagcccgagggccaggagttcttctacgtgttcctgaccaacccccagggcggcgcccagatcgtggaggagaaggacgacaccggcttcgccgccttcgccatggtgatcatcaccggcagcgacctgcacaacggcatcatcggcttcagcgaggagagccagagcggcctggagctgagagagggcgccgtgatgagaagactgcacctgatcgtgaccagacagcccaacagagccttcgaggacgtgaaggtgttctggagagtgaccctgaacaagaccgtggtggtgctgcagaaggacggcgtgaacctggtggaggagctgcagagcgtgagcggcaccaccacctgcaccatgggccagaccaagtgcttcatcagcatcgagctgaagcccgagaaggtgccccaggtggaggtgtacttcttcgtggagctgtacgaggccaccgccggcgccgccatcaacaacagcgccagattcgcccagatcaagatcctggagagcgacgagagccagagcctggtgtacttcagcgtgggcagcagactggccgtggcccacaagaaggccaccctgatcagcctgcaggtggccagagacagcggcaccggcctgatgatgagcgtgaacttcagcacccaggagctgagaagcgccgagaccatcggcagaaccatcatcagccccgccatcagcggcaaggacttcgtgatcaccgagggcaccctggtgttcgagcccggccagagaagcaccgtgctggacgtgatcctgacccccgagaccggcagcctgaacagcttccccaagagattccagatcgtgctgttcgaccccaagggcggcgccagaatcgacaaggtgtacggcaccgccaacatcaccctggtgagcgacgccgacagccaggccatctggggcctggccgaccagctgcaccagcccgtgaacgacgacatcctgaacagagtgctgcacaccatcagcatgaaggtggccaccgagaacaccgacgagcagctgagcgccatgatgcacctgatcgagaagatcaccaccgagggcaagatccaggccttcagcgtggccagcagaaccctgttctacgagatcctgtgcagcctgatcaaccccaagagaaaggacaccagaggcttcagccacttcgccgaggtgaccgagaacttcgccttcagcctgctgaccaacgtgacctgcggcagccccggcgagaagagcaagaccatcctggacagctgcccctacctgagcatcctggccctgcactggtacccccagcagatcaacggccacaagttcgagggcaaggagggcgactacatcagaatccccgagagactgctggacgtgcaggacgccgagatcatggccggcaagagcacctgcaagctggtgcagttcaccgagtacagcagccagcagtggttcatcagcggcaacaacctgcccaccctgaagaacaaggtgctgagcctgagcgtgaagggccagagcagccagctgctgaccaacgacaacgaggtgctgtacagaatctacgccgccgagcccagaatcatcccccagaccagcctgtgcctgctgtggaaccaggccgccgccagctggctgagcgacagccagttctgcaaggtggtggaggagaccgccgactacgtggagtgcgcctgcagccacatgagcgtgtacgccgtgtacgccagaaccgacaacctgagcagctacaacgaggccttcttcaccagcggcttcatctgcatcagcggcctgtgcctggccgtgctgagccacatcttctgcgccagatacagcatgttcgccgccaagctgctgacccacatgatggccgccagcctgggcacccagatcctgttcctggccagcgcctacgccagcccccagctggccgaggagagctgcagcgccatggccgccgtgacccactacctgtacctgtgccagttcagctggatgctgatccagagcgtgaacttctggtacgtgctggtgatgaacgacgagcacaccgagagaagatacctgctgttcttcctgctgagctggggcctgcccgccttcgtggtgatcctgctgatcgtgatcctgaagggcatctaccaccagagcatgagccagatctacggcctgatccacggcgacctgtgcttcatccccaacgtgtacgccgccctgttcaccgccgccctggtgcccctgacctgcctggtggtggtgttcgtggtgttcatccacgcctaccaggtgaagccccagtggaaggcctacgacgacgtgttcagaggcagaaccaacgccgccgagatccccctgatcctgtacctgttcgccctgatcagcgtgacctggctgtggggcggcctgcacatggcctacagacacttctggatgctggtgctgttcgtgatcttcaacagcctgcagggcctgtacgtgttcatggtgtacttcatcctgcacaaccagatgtgctgccccatgaaggccagctacaccgtggagatgaacggccaccccggccccagcaccgccttcttcacccccggcagcggcatgccccccgccggcggcgagatcagcaagagcacccagaacctgatcggcgccatggaggaggtgccccccgactgggagagagccagcttccagcagggcagccaggccagccccgacctgaagcccagcccccagaacggcgccaccttccccagcagcggcggctacggccagggcagcctgatcgccgacgaggagagccaggagttcgacgacctgatcttcgccctgaagaccggcgccggcctgagcgtgagcgacaacgagagcggccagggcagccaggagggcggcaccctgaccgacagccagatcgtggagctgagaagaatccccatcgccgacacccacctgtag

SEQ ID NO: 222916 - protein, 367 aa, Artificial Sequence
  derived and/or modified sequence
MRKGKGPICLFSRPTLRPSRSKVSLIEGRGANMAARWRFWCVSVTMVVALLIVCDVPSASAQRKKEMVLSEKVSQLMEWTNKRPVIRMNGDKFRRLVKAPPRNYSVIVMFTALQLHRQCVVCKQADEEFQILANSWRYSSAFTNRIFFAMVDFDEGSDVFQMLNMNSAPTFINFPAKGKPKRGDTYELQVRGFSAEQIARWIADRTDVNIRVIRPPNYAGPLMLGLLLAVIGGLVYLRRSNMEFLFNKTGWAFAALCFVLAMTSGQMWNHIRGPPYAHKNPHTGHVNYIHGSSQAQFVAETHIVLLFNGGVTLGMVLLCEAATSDMDIGKRKIMCVAGIGLVVLFFSWMLSIFRSKYHGYPYSFLMS

SEQ ID NO: 222917 - protein, 218 aa, Artificial Sequence
  derived and/or modified sequence
MVDFDEGSDVFQMLNMNSAPTFINFPAKGKPKRGDTYELQVRGFSAEQIARWIADRTDVNIRVIRPPNYAGPLMLGLLLAVIGGLVYLRRSNMEFLFNKTGWAFAALCFVLAMTSGQMWNHIRGPPYAHKNPHTGHVNYIHGSSQAQFVAETHIVLLFNGGVTLGMVLLCEAATSDMDIGKRKIMCVAGIGLVVLFFSWMLSIFRSKYHGYPYSFLMS

SEQ ID NO: 222918 - DNA, 1104 bp, Artificial Sequence
  derived and/or modified sequence
atgcgtaaagggaaaggccctatctgtctcttcagcaggcctacgcttaggccaagccgctctaaagtgtccctgattgagggccggggagccaacatggctgcccgttggcggttctggtgcgtgtccgtgacaatggtggtggctcttctcattgtctgtgatgttccgtccgcttcagcccagagaaaaaaagagatggtcctgtctgagaaggtctcccaactcatggaatggacaaataagaggccggttatacggatgaatggtgacaaatttcggagattggtgaaagcaccgccgcgtaattatagcgttattgtgatgttcaccgcactacagttacacagacagtgcgtggtgtgcaaacaagccgatgaggaatttcagattttagcaaactcttggcgatactcctctgcatttacaaacaggatatttttcgcaatggtggattttgatgaaggaagcgacgtttttcagatgcttaatatgaattcagcccctacattcatcaactttccggcaaaggggaagccaaaacgtggagacacttatgagctgcaggtgagaggcttctccgccgaacaaattgcgcggtggattgccgacagaaccgacgttaacatccgggtcatcaggccaccaaactatgctggccccctgatgctaggactcctgctcgccgtgattggaggcctcgtgtacctcagacggtctaacatggagttcctcttcaataaaaccgggtgggccttcgccgctttgtgcttcgtccttgcgatgacgtccggccagatgtggaaccatattaggggaccaccttacgcccacaagaatccccacacaggacacgttaattacattcacgggagctctcaagcccagttcgtggctgagacccatatagtgctactgttcaatggtggcgttactctgggcatggtgttattgtgcgaagccgcaacctctgatatggacatcggtaaacgcaagattatgtgcgtggccggcatcgggctagtggtgctgtttttttcctggatgctgtcaatatttagatcaaagtaccacgggtacccatattcttttctgatgagttag

SEQ ID NO: 222919 - DNA, 657 bp, Artificial Sequence
  derived and/or modified sequence
atggtggactttgatgaggggtcagacgtgtttcaaatgctgaatatgaacagcgccccgacattcataaattttccagccaagggaaagcccaaacgtggggacacctacgagcttcaggtccggggatttagcgctgaacagatcgcccgctggattgccgaccgcacagatgtgaatatcagggttattagacctcccaactatgcgggtcctctcatgttgggcctgctgctggcggtgattgggggccttgtgtacctgcgtagaagcaacatggaattcctgttcaataagacagggtgggccttcgctgccctgtgctttgtgctggccatgacatcaggacagatgtggaaccacattcgaggtcccccgtatgcgcataaaaacccccacacaggacatgtgaattacattcatggcagcagccaggcccagttcgttgctgagacccacatcgtcttattgttcaatgggggggtaacccttggaatggttctgctttgcgaagccgccaccagtgacatggacatcggtaaacgcaagattatgtgtgtcgcgggaatcggcctcgtggtgcttttctttagctggatgcttagcatctttcgtagtaagtatcacggctacccctactcattcctcatgtcctag

SEQ ID NO: 222920 - DNA, 1104 bp, Artificial Sequence
  derived and/or modified sequence
atgaggaagggcaagggccccatctgcctcttcagccggcccaccctgcggcccagccgcagcaaggtgtccctcatcgagggccgcggggccaacatggccgcccgctggaggttctggtgtgtgtctgtgaccatggtggtggccctgctgattgtgtgtgatgtgcccagcgccagcgcccagaggaagaaggagatggtgctgtctgagaaggtgtcccagctgatggagtggaccaacaagaggcctgtgatccgcatgaatggagacaagttccggcggctggtgaaggccccacccaggaactacagcgtgattgtgatgttcaccgccctgcagctgcaccggcagtgtgtggtgtgcaagcaggctgatgaggagttccagatcctggccaacagctggagatacagcagcgccttcaccaaccgcatcttctttgccatggtggactttgatgagggcagtgatgtgttccagatgctgaacatgaacagcgcccccaccttcatcaacttccctgccaagggcaagcccaagagaggagacacctatgagctgcaggtgcggggcttctctgctgagcagatcgcccgctggattgctgacagaacagatgtgaacatccgggtcatccggccccccaactatgccggccccctgatgctgggcctgctgctggccgtgattggaggcctggtgtacctgcggcgcagcaacatggagttcctgttcaacaagacaggctgggcctttgctgccctgtgctttgtgctggccatgaccagcggccagatgtggaaccacatccggggccccccctatgcccacaagaacccccacactggacatgtgaactacatccacggcagcagccaggcccagtttgtggccgagacccacatcgtgctgctcttcaacggcggcgtgaccctgggcatggtgctgctgtgtgaggccgccaccagtgacatggacatcggcaagaggaagatcatgtgtgtggccggcatcggcctggtggtgctcttcttctcctggatgctgagcatcttccgcagcaagtaccacggctacccctacagcttcctgatgtcctag

SEQ ID NO: 222921 - DNA, 657 bp, Artificial Sequence
  derived and/or modified sequence
atggtggactttgatgagggcagtgatgtgttccagatgctgaacatgaacagcgcccccaccttcatcaacttccctgccaagggcaagcccaagagaggagacacctatgagctgcaggtgcggggcttctctgctgagcagatcgcccgctggattgctgacagaacagatgtgaacatccgggtcatccggccccccaactatgccggccccctgatgctgggcctgctgctggccgtcatcggcggcctggtgtacctgcggcgcagcaacatggagttcctgttcaacaagacaggctgggcctttgctgccctgtgctttgtgctggccatgaccagcggccagatgtggaaccacatccggggccccccctatgcccacaagaacccccacacaggccacgtgaactacatccacggcagcagccaggcccagtttgtggccgagacccacatcgtgctgctcttcaatggaggagtgaccctgggcatggtgctgctgtgtgaggccgccaccagtgacatggacatcggcaagaggaagatcatgtgtgtggccggcatcggcctggtggtgctcttcttctcctggatgctgagcatcttccgcagcaagtaccacggctacccctacagcttcctgatgtcctag

SEQ ID NO: 222922 - DNA, 4047 bp, Artificial Sequence
  derived and/or modified sequence
agaaatcaaccttcttttagcgggcgtgtagcgccagcgcgctgtgacgtaatgtgaggggtctcccggcagggctgagctggaccaatgaggaaaggcaaggggccgatttgcctgttctcacgccccaccctcagacctagccggagcaaagtttcacttatagaagggagaggagcgaacatggcagcgcgttggcggttttggtgtgtctctgtgaccatggtggtggcgctgctcatcgtttgcgacgttccctcagcctctgcccaaagaaagaaggagatggtgttatctgaaaaggttagtcagctgatggaatggactaacaaaagacctgtaataagaatgaatggagacaagttccgtcgccttgtgaaagccccaccgagaaattactccgttatcgtcatgttcactgctctccaactgcatagacagtgtgtcgtttgcaagcaagctgatgaagaattccagatcctggcaaactcctggcgatactccagtgcattcaccaacaggatattttttgccatggtggattttgatgaaggctctgatgtatttcagatgctaaacatgaattcagctccaactttcatcaactttcctgcaaaagggaaacccaaacggggtgatacatatgagttacaggtgcggggtttttcagctgagcagattgcccggtggatcgccgacagaactgatgtcaatattagagtgattagacccccaaattatgctggtccccttatgttgggattgcttttggctgttattggtggacttgtgtatcttcgaagaagtaatatggaatttctctttaataaaactggatgggcttttgcagctttgtgttttgtgcttgctatgacatctggtcaaatgtggaaccatataagaggaccaccatatgcccataagaatccccacacgggacatgtgaattatatccatggaagcagtcaagcccagtttgtagctgaaacacacattgttcttctgtttaatggtggagttaccttaggaatggtgcttttatgtgaagctgctacctctgacatggatattggaaagcgaaagataatgtgtgtggctggtattggacttgttgtattattcttcagttggatgctctctatttttagatctaaatatcatggctacccatacagctttctgatgagttaaaaaggtcccagagatatatagacactggagtactggaaattgaaaaacgaaaatcgtgtgtgtttgaaaagaagaatgcaacttgtatattttgtattacctctttttttcaagtgatttaaatagttaatcatttaaccaaagaagatgtgtagtgccttaacaagcaatcctctgtcaaaatctgaggtatttgaaaataattatcctcttaaccttctcttcccagtgaactttatggaacatttaatttagtacaattaagtatattataaaaattgtaaaactactactttgttttagttagaacaaagctcaaaactactttagttaacttggtcatctgattttatattgccttatccaaagatggggaaagtaagtcctgaccaggtgttcccacatatgcctgttacagataactacattaggaattcattcttagcttcttcatctttgtgtggatgtgtatactttacgcatctttccttttgagtagagaaattatgtgtgtcatgtggtcttctgaaaatggaacaccattcttcagagcacacgtctagccctcagcaagacagttgtttctcctcctccttgcatatttcctactgaaatacagtgctgtctatgattgtttttgttttgttgtttttttgagacggtctcgctgtgtcacacaggctggagtgcagtggcgtgagctcggctgactgcaaactctgcctcccaggtttaagcgattctcctgtcacagcttcccaagtagctgggatttacaggtgtgcaccgccatgccaggctaatttttgtgtttttagtagagacagggtttcgccaagttgtccaggctggtcttgaactcctgggctcaagtgatccgcccgcctcagtctcccaaagtgcgaggatgacatgtgtgagctaccacaccagcaatgtctatgcttctcgatagctgtgaacatgaaaagacatctattgggagtccgaggcaggtggattgcttgaggccaggagttagagaccagcctggccaacaaggcaaaaccccgtctctactaaaaatatgaaaattagctgggcttggtggctcatgcctataatcctagctacttgggaggctgaggcacgagacttgcttaatacctgggaggcggagattgcagtgagccgagatcacgctactgcgctccagcctgagtgatagagtgagactctgtctcaaaaaaaagtatctctaaatacaggattataatttctgcttgagtatggtgttaactaccttgtatttagaaagatttcagattcattccatctccttagttttcttttaaggtgacccatctgtgataaaaatatagcttagtgctaaaatcagtgtaacttatacatggcctaaaatgtttctacaaattagagtttgtcacttattccatttgtacctaagagaaaaataggctcagttagaaaaggactccctggccaggcgcagtgacttacgcctgtaatctcagcactttgggaggccaaggcaggcagatcacgaggtcaggagttcgagaccatcctggccaacatggtgaaaccccgtctctactaaaaatataaaaattagctgggtgtggtggcaggagcctgtaatcccagctacacaggaggctgaggcacgagaatcacttgaactcaggagatggaggtttcagtgagccaagatcacaccactgcactccagcctggcaacagagcgagactccatctcaaaaaaaaaaaaaaaagtaagaaagaaaaggactcccttagaatgggaaagaaaaatcataaaatattgagctgatgcctgtatatagaaattaagcgtttctcgaaagctgttctatgttttgctgttattttagtctttattctcttcctttaggtggagaaacaaagtaccaatttgaagggattttttttattttgtcttttggtttctgtcagtagaaataaccatatgtgctaaccaaatttctgtgaagaatgttttcatggttatcattatatctaactataacctcccccatagttatgaagagtaacctgaaatgccactattgtggaaataggataattgtaattgtgaaaaaataattttaaggaaatcttacaagtattacattaaaaagatactatgactgccacctgccatttaccttctaataaccctgccatgtggtttgcagaaagagatggatatagtagcctcagaagaaatattttatgtgggttttttgtttttcgttactagatttcatggatgaggggatatggttgaccttttactttttaatggagcagccagtttttgttaattactcacttgtaaattgtgagattctgaattccttacctgctattcttgtacttgtctcaggccaaatctatgctgtggttcttatgagacttgtatgaagatgccctgatttgtacagattgaccacgggaatactactgccatgtaatctgtatagttccagataatttgtcatgaacattgacagaatgacaattttttgtatttgctttttctccctttaagagcacattcttctgtaaggagaaaggcagcattctggctaaaatgtgtagaaggtaatttactacacttataaaatagtgtgacttttgtgaaaattttgaattagctttcatatgaagtgccttaagtagactcttcatttacttttctggtaatggtttaaatatcatttgttatgcatttttaagatacagttcagaatgacacattgtagtggcaaagataaccaaatgtctggctgtttgctttttgaccatatcaataaacttttacaatctaaa

SEQ ID NO: 222923 - DNA, 3016 bp, Artificial Sequence
  derived and/or modified sequence
cattcaccaacaggatattttttgccatggtggattttgatgaaggctctgatgtatttcagatgctaaacatgaattcagctccaactttcatcaactttcctgcaaaagggaaacccaaacggggtgatacatatgagttacaggtgcggggtttttcagctgagcagattgcccggtggatcgccgacagaactgatgtcaatattagagtgattagacccccaaattatgctggtccccttatgttgggattgcttttggctgttattggtggacttgtgtatcttcgaagaagtaatatggaatttctctttaataaaactggatgggcttttgcagctttgtgttttgtgcttgctatgacatctggtcaaatgtggaaccatataagaggaccaccatatgcccataagaatccccacacgggacatgtgaattatatccatggaagcagtcaagcccagtttgtagctgaaacacacattgttcttctgtttaatggtggagttaccttaggaatggtgcttttatgtgaagctgctacctctgacatggatattggaaagcgaaagataatgtgtgtggctggtattggacttgttgtattattcttcagttggatgctctctatttttagatctaaatatcatggctacccatacagctttctgatgagttaaaaaggtcccagagatatatagacactggagtactggaaattgaaaaacgaaaatcgtgtgtgtttgaaaagaagaatgcaacttgtatattttgtattacctctttttttcaagtgatttaaatagttaatcatttaaccaaagaagatgtgtagtgccttaacaagcaatcctctgtcaaaatctgaggtatttgaaaataattatcctcttaaccttctcttcccagtgaactttatggaacatttaatttagtacaattaagtatattataaaaattgtaaaactactactttgttttagttagaacaaagctcaaaactactttagttaacttggtcatctgattttatattgccttatccaaagatggggaaagtaagtcctgaccaggtgttcccacatatgcctgttacagataactacattaggaattcattcttagcttcttcatctttgtgtggatgtgtatactttacgcatctttccttttgagtagagaaattatgtgtgtcatgtggtcttctgaaaatggaacaccattcttcagagcacacgtctagccctcagcaagacagttgtttctcctcctccttgcatatttcctactgaaatacagtgctgtctatgattgtttttgttttgttgtttttttgagacgctactgcgctccagcctgagtgatagagtgagactctgtctcaaaaaaaagtatctctaaatacaggattataatttctgcttgagtatggtgttaactaccttgtatttagaaagatttcagattcattccatctccttagttttcttttaaggtgacccatctgtgataaaaatatagcttagtgctaaaatcagtgtaacttatacatggcctaaaatgtttctacaaattagagtttgtcacttattccatttgtacctaagagaaaaataggctcagttagaaaaggactccctggccaggcgcagtgacttacgcctgtaatctcagcactttgggaggccaaggcaggcagatcacgaggtcaggagttcgagaccatcctggccaacatggtgaaaccccgtctctactaaaaatataaaaattagctgggtgtggtggcaggagcctgtaatcccagctacacaggaggctgaggcacgagaatcacttgaactcaggagatggaggtttcagtgagccaagatcacaccactgcactccagcctggcaacagagcgagactccatctcaaaaaaaaaaaaaaaagtaagaaagaaaaggactcccttagaatgggaaagaaaaatcataaaatattgagctgatgcctgtatatagaaattaagcgtttctcgaaagctgttctatgttttgctgttattttagtctttattctcttcctttaggtggagaaacaaagtaccaatttgaagggattttttttattttgtcttttggtttctgtcagtagaaataaccatatgtgctaaccaaatttctgtgaagaatgttttcatggttatcattatatctaactataacctcccccatagttatgaagagtaacctgaaatgccactattgtggaaataggataattgtaattgtgaaaaaataattttaaggaaatcttacaagtattacattaaaaagatactatgactgccacctgccatttaccttctaataaccctgccatgtggtttgcagaaagagatggatatagtagcctcagaagaaatattttatgtgggttttttgtttttcgttactagatttcatggatgaggggatatggttgaccttttactttttaatggagcagccagtttttgttaattactcacttgtaaattgtgagattctgaattccttacctgctattcttgtacttgtctcaggccaaatctatgctgtggttcttatgagacttgtatgaagatgccctgatttgtacagattgaccacgggaatactactgccatgtaatctgtatagttccagataatttgtcatgaacattgacagaatgacaattttttgtatttgctttttctccctttaagagcacattcttctgtaaggagaaaggcagcattctggctaaaatgtgtagaaggtaatttactacacttataaaatagtgtgacttttgtgaaaattttgaattagctttcatatgaagtgccttaagtagactcttcatttacttttctggtaatggtttaaatatcatttgttatgcatttttaagatacagttcagaatgacacattgtagtggcaaagataaccaaatgtctggctgtttgctttttgaccatatcaataaacttttacaatct

SEQ ID NO: 222924 - DNA, 1104 bp, Artificial Sequence
  derived and/or modified sequence
atgcggaagggcaagggccccatctgcctgttcagccggcccaccctccgcccatcccggtccaaggtatccctgatcgaaggtcgcggggcaaacatggcggcgaggtggaggttttggtgtgtctcagtgactatggtggtggcacttctgattgtatgtgacgtcccaagcgcctcagctcagcgcaagaaagaaatggtgctcagcgagaaggtgtcgcagctgatggaatggacaaataagcggcctgtcattcgtatgaacggagacaagttcaggcggctggtcaaagccccccctagaaactatagtgtcatcgttatgttcacagctcttcagttgcatcggcagtgtgttgtatgcaaacaggccgacgaagaattccagatattagccaacagttggcgctattcgagcgcgttcaccaatcggatcttttttgctatggtggacttcgatgaagggagcgatgtgttccagatgctgaacatgaattctgcacccacttttattaacttcccggccaaggggaagccaaaacgcggcgacacctatgaacttcaggtcagaggatttagcgccgaacaaattgcgagatggatagctgacaggaccgacgtgaacatacgcgttattcgcccgccaaactatgcagggcctctcatgcttggactgttgctggctgtcatcggcgggttggtgtatctccgtaggtccaatatggagttcctgtttaacaaaactgggtgggcttttgctgccttgtgtttcgtgcttgccatgaccagcggccagatgtggaatcatatccgcggtccaccatatgcccacaagaatccacacacagggcacgtgaattacattcatgggagttcccaagcacagtttgtggccgaaacacacatagttttgctattcaatggaggtgtcaccttggggatggtcttgttatgcgaagccgcaaccagcgacatggatattggtaagcgcaagatcatgtgtgtggccggcatcgggcttgtagtcctcttcttttcatggatgctaagcattttccggtctaaatatcacggttacccatactccttcctgatgtcttag

SEQ ID NO: 222925 - DNA, 657 bp, Artificial Sequence
  derived and/or modified sequence
atggtggacttcgacgagggcagcgacgtgttccagatgctgaacatgaattctgcacccacatttatcaacttccccgctaagggaaaaccaaaaagaggcgacacctatgaactccaggtgcgaggatttagtgcggagcagatagcccgctggattgcggaccggactgacgtcaatattagagtgatcaggccaccgaactacgcaggccctctgatgctcggactactgctagccgtgattggcggactggtgtaccttaggcgctccaatatggaatttctatttaataagaccggctgggcttttgccgctctttgctttgttttggcaatgacaagtggacagatgtggaaccacatacgaggtcctccgtacgcccataagaatccacacacgggccacgttaactacatccacgggtcctctcaggcacagtttgtggctgaaactcacattgtgctgttgtttaatggtggcgtcaccctgggtatggtcctgctgtgcgaggctgccactagtgatatggacattggtaaaagaaaaatcatgtgtgtcgcaggaattggcttggtcgttctgttcttttcctggatgcttagcatcttccgatctaagtatcacggctatccctatagcttcctcatgtcctag

SEQ ID NO: 222926 - DNA, 1104 bp, Artificial Sequence
  derived and/or modified sequence
atgagaaaaggaaagggtcctatatgtctgtttagtagacccacactcaggcccagtcggagtaaagtgtcgctgatagagggaagaggcgctaatatggccgctcggtggcgattttggtgtgtatcagttacaatggtggtggctctgctgatcgtgtgtgacgtccctagcgcttctgcccagaggaaaaaggagatggtattaagcgaaaaggtctctcagttgatggagtggaccaacaaaaggccagttattcgaatgaatggggacaaattcagacgtttggtgaaagcaccacctagaaattattccgtgattgtcatgttcacggcgctccaattgcatcgtcagtgcgtcgtttgtaagcaggcagacgaagaattccaaatcttggctaatagctggcgctattcatctgctttcacgaatcgaatttttttcgcaatggttgacttcgacgagggatcagatgtcttccagatgcttaatatgaactccgcccctacgttcattaacttcccagccaagggtaagcccaaaagaggcgatacatacgaacttcaggtgagaggattcagtgccgagcagattgcacgctggatcgcggaccggaccgatgtaaacattagagtaatcagaccccctaattacgctggccctctgatgctaggactgctgctggctgtgattggcggactcgtgtatctgcgcaggtccaacatggagttcctgtttaacaaaacaggctgggcttttgcagctctgtgctttgtcctggccatgacaagcgggcagatgtggaaccacattcgcggaccgccatatgcacataaaaacccgcacaccgggcacgtcaattatatccacgggagctctcaggctcagtttgtcgctgagactcacatcgtgttgttgttcaatggcggagtgacattaggaatggtccttctctgcgaagccgcaacctcagacatggatatcggaaagcgtaagattatgtgtgtagctggcatcggtcttgtcgtcctcttttttagttggatgttgagtatttttaggtccaaataccatggttacccctactccttcttaatgagttag

SEQ ID NO: 222927 - DNA, 657 bp, Artificial Sequence
  derived and/or modified sequence
atggtggacttcgacgagggatctgacgtcttccagatgctgaacatgaatagcgcccctacatttatcaactttccagctaagggcaagcctaagcgcggagacacctatgagttgcaggttcgcggtttctccgcggaacagattgccaggtggatagcggatcgaactgacgtaaatataagagtgattcggcctccaaattatgccggacccctcatgcttggactgctcctcgccgtcatcggcggtctcgtctatctgcgacggtccaacatggaattcctgtttaacaagactggatgggctttcgctgcattgtgcttcgtattagccatgacctccgggcaaatgtggaaccatatcagaggcccaccctatgcacataaaaatccccacaccgggcatgtgaactatattcacggttcgtcacaggcacagttcgtggccgagacacacatagtgttgttatttaatggtggagtgaccctgggtatggtgttgttatgtgaagcagcaactagcgacatggacatcggaaagaggaagattatgtgtgtggccggaatcggtctggtggtgttgtttttctcgtggatgctctctatctttaggagcaagtatcacggctatccgtattccttcctcatgagctag

SEQ ID NO: 222928 - DNA, 1104 bp, Artificial Sequence
  derived and/or modified sequence
atgagaaagggcaagggccccatctgcctgttcagcagacccaccctgagacccagcagaagcaaggtgagcctgatcgagggcagaggcgccaacatggccgccagatggagattctggtgcgtgagcgtgaccatggtggtggccctgctgatcgtgtgcgacgtgcccagcgccagcgcccagagaaagaaggagatggtgctgagcgagaaggtgagccagctgatggagtggaccaacaagagacccgtgatcagaatgaacggcgacaagttcagaagactggtgaaggccccccccagaaactacagcgtgatcgtgatgttcaccgccctgcagctgcacagacagtgcgtggtgtgcaagcaggccgacgaggagttccagatcctggccaacagctggagatacagcagcgccttcaccaacagaatcttcttcgccatggtggacttcgacgagggcagcgacgtgttccagatgctgaacatgaacagcgcccccaccttcatcaacttccccgccaagggcaagcccaagagaggcgacacctacgagctgcaggtgagaggcttcagcgccgagcagatcgccagatggatcgccgacagaaccgacgtgaacatcagagtgatcagaccccccaactacgccggccccctgatgctgggcctgctgctggccgtgatcggcggcctggtgtacctgagaagaagcaacatggagttcctgttcaacaagaccggctgggccttcgccgccctgtgcttcgtgctggccatgaccagcggccagatgtggaaccacatcagaggccccccctacgcccacaagaacccccacaccggccacgtgaactacatccacggcagcagccaggcccagttcgtggccgagacccacatcgtgctgctgttcaacggcggcgtgaccctgggcatggtgctgctgtgcgaggccgccaccagcgacatggacatcggcaagagaaagatcatgtgcgtggccggcatcggcctggtggtgctgttcttcagctggatgctgagcatcttcagaagcaagtaccacggctacccctacagcttcctgatgagctag

SEQ ID NO: 222929 - DNA, 657 bp, Artificial Sequence
  derived and/or modified sequence
atggtggacttcgacgagggcagcgacgtgttccagatgctgaacatgaacagcgcccccaccttcatcaacttccccgccaagggcaagcccaagagaggcgacacctacgagctgcaggtgagaggcttcagcgccgagcagatcgccagatggatcgccgacagaaccgacgtgaacatcagagtgatcagaccccccaactacgccggccccctgatgctgggcctgctgctggccgtgatcggcggcctggtgtacctgagaagaagcaacatggagttcctgttcaacaagaccggctgggccttcgccgccctgtgcttcgtgctggccatgaccagcggccagatgtggaaccacatcagaggccccccctacgcccacaagaacccccacaccggccacgtgaactacatccacggcagcagccaggcccagttcgtggccgagacccacatcgtgctgctgttcaacggcggcgtgaccctgggcatggtgctgctgtgcgaggccgccaccagcgacatggacatcggcaagagaaagatcatgtgcgtggccggcatcggcctggtggtgctgttcttcagctggatgctgagcatcttcagaagcaagtaccacggctacccctacagcttcctgatgagctag

SEQ ID NO: 222930 - protein, 351 aa, Artificial Sequence
  derived and/or modified sequence
MLETLRERLLSVQQDFTSGLKTLSDKSREAKVKSKPRTVPFLPKYSAGLELLSRYEDTWAALHRRAKDCASAGELVDSEVVMLSAHWEKKKTSLVELQEQLQQLPALIADLESMTANLTHLEASFEEVENNLLHLEDLCGQCELERCKHMQSQQLENYKKNKRKELETFKAELDAEHAQKVLEMEHTQQMKLKERQKFFEEAFQQDMEQYLSTGYLQIAERREPIGSMSSMEVNVDMLEQMDLMDISDQEALDVFLNSGGEENTVLSPALGPESSTCQNEITLQVPNPSELRAKPPSSSSTCTDSATRDISEGGESPVVQSDEEEVQVDTALATSHTDREATPDGGEDSDS

SEQ ID NO: 222931 - protein, 352 aa, Artificial Sequence
  derived and/or modified sequence
MLETLRERLLSVQQDFTSGLKTLSDKSREAKVKSKPRTVPFLPKYSAGLELLSRYEDTWAALHRRAKDCASAGELVDSEVVMLSAHWEKKKTSLVELQEQLQQLPALIADLESMTANLTHLEASFEEVENNLLHLEDLCGQCELERCKHMQSQQLENYKKNKRKELEVTFRSELDAEHAQKVLEMEHTQQMKLKERQKFFEEAFQQDMEQYLSTGYLQIAERREPIGSMSSMEVNVDMLEQMDLMDISDQEALDVFLNSGGEENTVLSPALGPESSTCQNEITLQVPNPSELRAKPPSSSSTCTDSATRDISEGGESPVVQSDEEEVQVDTALATSHTDREATPDGGEDSDS

SEQ ID NO: 222932 - DNA, 1056 bp, Artificial Sequence
  derived and/or modified sequence
atgttggaaacactgcgggagcgactcttgagcgtgcaacaggactttaccagtgggctgaaaacactgtcagacaagtctagggaggcaaaagtgaagagtaagcccagaactgtccctttcttacccaagtatagcgctgggctggaactgctgagccgctatgaagacacctgggccgctctgcatcgacgggctaaagactgcgctagtgcaggcgagcttgtggacagcgaggtggtgatgctgagtgcgcactgggagaagaagaagacctcacttgtagagctgcaggaacagctgcagcagctgcctgcgttgatagccgacttggagagcatgaccgctaatctgacacacctcgaagcctccttcgaggaggtggagaacaatcttctgcacttggaagatctgtgcgggcaatgtgagctggagcggtgtaagcacatgcagtcccaacaattggagaattataaaaaaaacaagcgaaaggagctggagacctttaaggcggaactggacgccgagcacgcccaaaaagtgctggagatggaacatacacaacagatgaagctgaaagagaggcaaaaattttttgaggaggctttccaacaagacatggagcaatacttatccaccgggtaccttcagatagcagagcggcgagagcccattggctcaatgagctcaatggaagtcaacgtcgacatgctggaacagatggacctgatggatatctccgaccaagaggccttagacgtgttcctaaacagcgggggtgaggaaaacaccgtcttgtctcccgcgctcggccccgagagctcaacctgtcagaacgagatcacattacaggtccctaatccatccgagttgcgggctaagcccccctcttcctcctccacatgtaccgactcagctaccagggacatctctgaagggggagaatcgccagtggtgcagtctgacgaggaggaggttcaggtcgacacagcgctggctacttcccataccgacagggaagctacacctgacggaggcgaggacagcgactcttag

SEQ ID NO: 222933 - DNA, 1059 bp, Artificial Sequence
  derived and/or modified sequence
atgttggaaaccctgcgggaacgccttctgagcgttcagcaggactttacctctggactgaagacattgtctgataagagcagagaggccaaagttaaatccaaaccccgtactgtgccctttctcccgaaatacagtgccggccttgaactactgagtcgctacgaagacacttgggctgccctgcaccgaagggccaaggattgcgcctccgcaggggagctggtcgatagtgaggttgtgatgctcagcgctcactgggagaaaaagaaaacttctctggtggagctgcaggagcagctgcagcagctccctgccctgattgcggacctggagagcatgacagcaaaccttactcatttggaagcatcatttgaagaagtggaaaataatctcctgcatttagaggacctttgcggccagtgcgagttggagcgctgcaagcatatgcagtcacagcagctggaaaactataagaagaataagagaaaggagctcgaggtcacgtttcgctccgagctagatgccgagcacgcgcagaaggtgttggagatggagcatacccaacagatgaaacttaaggaaaggcaaaagttttttgaagaggcttttcagcaggatatggaacaatatctcagtacaggctatctgcagatcgcagagcggagggagcctatcggtagcatgtcgagtatggaagtcaatgttgacatgctcgaacagatggacctgatggacatctccgatcaagaggcactggatgttttcctgaacagcggaggggaggaaaacaccgtgctgtccccagcactggggcccgaatcatcaacgtgtcagaacgagatcacacttcaggtccccaatccaagcgaattgagagccaagccgccaagcagtagtagtacctgtacggattcggctacgcgggacattagcgagggcggcgagagtccagtggtccagtctgacgaagaagaagtgcaggtggacacagccctcgccacaagtcacaccgaccgcgaggcgactcctgacggaggtgaagactccgactcctag

SEQ ID NO: 222934 - DNA, 1056 bp, Artificial Sequence
  derived and/or modified sequence
atgctggagaccctgcgggagcggctgctgtctgtgcagcaggacttcaccagcggcctgaagaccctgagtgacaagagccgggaggccaaggtgaagagcaagcccaggacagtgcccttcctgcccaagtacagcgctggcctggagctgctgagccgctatgaggacacctgggccgccctgcaccggcgggccaaggactgtgccagcgctggggagctggtggacagcgaggtggtgatgctgagcgcccactgggagaagaagaagaccagcctggtggagctgcaggagcagctgcagcagctgcctgccctgattgctgacctggagagcatgacagccaacctgacccacctggaggccagctttgaggaggtggagaacaacctgctgcacctggaggacctgtgtggccagtgtgagctggagcgctgcaagcacatgcagagccagcagctggagaactacaagaagaacaagaggaaggagctggagaccttcaaggccgagctggatgctgagcacgcccagaaggtgctggagatggagcacacccagcagatgaagctgaaggagcggcagaagttctttgaggaggccttccagcaggacatggagcagtacctgagcacaggctacctgcagattgctgagcggcgggagcccatcggctccatgagctccatggaggtgaatgtggacatgctggagcagatggacctgatggacatcagtgaccaggaggccctggatgtgttcctgaacagcggcggggaggagaacacagtgctgagccctgccctgggccctgagagcagcacctgccagaatgagatcaccctgcaggtgcccaaccccagcgagctgcgggccaagccacccagcagcagcagcacctgcacagattctgccacccgggacatcagcgagggcggggagagccctgtggtgcagagtgatgaggaggaggtgcaggtggacacagccctggccaccagccacacagaccgggaggccaccccagatggaggagaagattctgacagctag

SEQ ID NO: 222935 - DNA, 1059 bp, Artificial Sequence
  derived and/or modified sequence
atgctggagaccctgcgggagcggctgctgtctgtgcagcaggacttcaccagcggcctgaagaccctgagtgacaagagccgggaggccaaggtgaagagcaagcccaggacagtgcccttcctgcccaagtacagcgctggcctggagctgctgagccgctatgaggacacctgggccgccctgcaccggcgggccaaggactgtgccagcgctggggagctggtggacagcgaggtggtgatgctgagcgcccactgggagaagaagaagaccagcctggtggagctgcaggagcagctgcagcagctgcctgccctgattgctgacctggagagcatgacagccaacctgacccacctggaggccagctttgaggaggtggagaacaacctgctgcacctggaggacctgtgtggccagtgtgagctggagcgctgcaagcacatgcagagccagcagctggagaactacaagaagaacaagaggaaggagctggaggtgaccttccgctctgagctggatgctgagcacgcccagaaggtgctggagatggagcacacccagcagatgaagctgaaggagcggcagaagttctttgaggaggccttccagcaggacatggagcagtacctgagcacaggctacctgcagattgctgagcggcgggagcccatcggctccatgagctccatggaggtgaatgtggacatgctggagcagatggacctgatggacatcagtgaccaggaggccctggatgtgttcctgaacagcggcggggaggagaacacagtgctgagccctgccctgggccctgagagcagcacctgccagaatgagatcaccctgcaggtgcccaaccccagcgagctgcgggccaagccacccagcagcagcagcacctgcacagacagcgccacccgggacatcagcgagggcggggagagccctgtggtgcagagtgatgaggaggaggtgcaggtggacacagccctggccaccagccacacagaccgggaggccaccccagatggaggagaggacagcgacagctag

SEQ ID NO: 222936 - DNA, 1056 bp, Artificial Sequence
  derived and/or modified sequence
atgctggagaccctgcgggagcggctgctgagcgtgcagcaggactttacctccggactcaaaacacttagtgataagtccagagaggctaaggtaaaatcaaagccccgcacagtgcctttcttaccaaagtattctgccggcctggagctcctgtcgaggtacgaagatacctgggctgccctgcaccgccgtgctaaagattgcgcatcagcaggggaactagtggacagcgaagttgtgatgttaagcgcccactgggaaaaaaagaagacgagcctggtcgagcttcaggaacagctccagcagttacctgccctcatcgcagatctcgagtctatgacagcaaatcttacccacttggaagcttccttcgaggaggtggagaacaatttattgcatctcgaggacctatgtgggcagtgcgagcttgaacggtgcaagcacatgcagtcgcagcagctcgagaactacaagaaaaacaagaggaaagagttagagacctttaaagcagagctggacgctgagcacgctcagaaggtactggagatggagcatacacagcagatgaagctgaaggaacggcagaaattctttgaggaggccttccaacaggatatggagcagtaccttagtacaggttacctgcagattgccgaacgtagagagcctatcggcagcatgtcaagcatggaggtcaatgtggacatgctggaacaaatggatctcatggacatcagcgaccaggaagctttggacgtgtttctcaatagtggaggggaggaaaataccgtgctgagtcccgccctaggacccgaatcctccacctgccagaatgagattaccctacaggttcccaatcccagcgaactgagggccaaaccaccatcatcctcgagcacgtgtactgactccgctactcgcgatatttcagagggaggcgagtcccctgtagtgcaatctgatgaagaggaagtccaggttgacacagccctggcaacgtcacacacagaccgcgaggccacccctgatggcggagaagactccgactcctag

SEQ ID NO: 222937 - DNA, 1059 bp, Artificial Sequence
  derived and/or modified sequence
atgctggagaccctgcgggagcggctgctgagcgtgcagcaggacttcaccagcggcctgaaaaccctctcggacaaaagccgggaggctaaagttaagagcaagccgcgcacggtccctttcctgccgaagtattcagccgggctcgagctgctcagcaggtacgaggacacatgggcagcacttcacaggcgagctaaggattgtgcatcagcaggtgaacttgtggactccgaggtcgtgatgctatctgctcattgggaaaaaaagaaaacatccctggttgaactgcaggaacagctacagcagctgccagcgctcatcgccgacctggagagcatgacggccaatctgacgcaccttgaagcgagttttgaggaagtcgagaataatttgctgcacctggaggacctctgtggccagtgtgagctcgagcgatgtaagcatatgcagtctcagcaattagaaaattacaagaagaacaaaagaaaagagctcgaggtcacatttcggagtgaactagatgccgagcatgctcaaaaggtgctcgaaatggagcacactcagcagatgaaactgaaggagcggcagaagttctttgaggaagcgtttcaacaggacatggaacagtatttatcaaccgggtatctccagattgcagagcggcgcgaacctatcggctctatgtcgtcaatggaggtcaacgtagacatgcttgagcagatggacctgatggacatttcggaccaggaggccttagatgtgtttctgaatagcggcggggaggaaaatacagtcctgagccctgcactgggccctgaatcttccacgtgtcagaatgaaatcacccttcaagtgccgaatccttcagagctgcgggctaagcccccctcatcttcctccacttgtaccgacagcgccactcgggacatctctgaaggtggagagtctcccgtcgttcagtccgatgaggaggaggtgcaagtcgacaccgctttggctacttcccacaccgacagagaagccacacctgacgggggcgaagacagcgactcatag

SEQ ID NO: 222938 - DNA, 1056 bp, Artificial Sequence
  derived and/or modified sequence
atgctcgaaaccttacgcgagcgactgctttcagtgcagcaggactttacaagcggcctgaagactctgtccgataaatctcgtgaggctaaggtgaagtctaaacctagaaccgtccctttcctccccaagtacagcgccggtctggaactacttagccgctatgaagatacctgggccgcactccaccggagagcaaaagactgtgctagtgcgggagagctggttgattccgaagtggtgatgttatcagcacattgggaaaagaagaagacctctttagtggaacttcaagagcagttacagcagttacctgccctcatcgctgacctcgaatcaatgacggcaaacttgactcacctcgaagcttcctttgaagaagtcgaaaacaatttacttcatctcgaagatctgtgtgggcagtgtgagcttgaaaggtgcaagcacatgcagtcacaacagttggagaattacaaaaaaaacaagagaaaagaactggaaaccttcaaagccgagctggacgccgagcacgctcagaaagttctggagatggagcacactcagcaaatgaagctgaaagaacggcagaagttcttcgaagaggcctttcaacaggacatggagcagtatttaagcaccggttatttacaaatagccgaacggagggaacccatcggaagcatgtcatcgatggaggtgaatgtggatatgctggaacaaatggatctgatggatatttctgaccaggaggcacttgatgtgttcctgaattcaggtggagaggaaaatacagtgctgagccctgccctggggccagaaagctcaacttgccagaatgagataaccctgcaagttccaaaccccagcgaattgcgcgctaagccacccagtagcagctccacatgcaccgacagtgctacccgggacataagcgagggtggtgaaagcccagtggttcagtcagacgaggaggaggtgcaggtggataccgcccttgctactagccataccgatagggaagccacgcctgacggcggagaagattcagactcatag

SEQ ID NO: 222939 - DNA, 1059 bp, Artificial Sequence
  derived and/or modified sequence
atgttagaaacgcttagagagcgactgctgtctgtacaacaggactttacctcgggcctaaaaacactcagtgataaaagccgcgaagctaaggtaaaaagcaaacctagaacagtaccctttctgcccaaatactcggctggactggaactcctttcaagatatgaagacacgtgggcggctctccacagacgggctaaagactgcgcctccgcaggtgagctggtggactcagaggtcgtgatgctgtctgcacactgggagaaaaaaaagacgtccctggtggagctacaggagcagcttcagcagctgcccgctttaatcgccgacctcgagagcatgactgccaacctcactcatctggaggcttcgttcgaagaagtagagaacaatctccttcacttagaggatctgtgtggccaatgtgagttagaaagatgcaagcacatgcagagtcagcagctggagaattataaaaaaaacaagcgcaaggaactcgaggtgacattccggtccgaactggatgcagaacacgcccaaaaggtcttggagatggaacacacacagcagatgaagctaaaagagcgtcagaagtttttcgaggaagccttccaacaggacatggaacagtaccttagcaccggctacctacagatcgccgaaagacgggaaccgattggtagcatgtcgtctatggaggttaatgtcgacatgcttgaacaaatggacctgatggatatatccgatcaggaagctttggacgttttcctcaattctggtggcgaggagaataccgtcttatcaccggctctgggtcccgaatcttcaacttgccagaatgaaatcactctgcaggtgccgaacccaagcgagctgagagccaaacctccttctagttctagcacgtgtactgatagcgcaacaagggacatctccgaaggaggcgagtccccagtggtgcagtcagacgaagaggaagtccaagtggatactgcgctggctactagccacactgatcgggaagctactcccgatgggggtgaagactcagatagttag

SEQ ID NO: 222940 - DNA, 1056 bp, Artificial Sequence
  derived and/or modified sequence
atgctggagaccctgagagagagactgctgagcgtgcagcaggacttcaccagcggcctgaagaccctgagcgacaagagcagagaggccaaggtgaagagcaagcccagaaccgtgcccttcctgcccaagtacagcgccggcctggagctgctgagcagatacgaggacacctgggccgccctgcacagaagagccaaggactgcgccagcgccggcgagctggtggacagcgaggtggtgatgctgagcgcccactgggagaagaagaagaccagcctggtggagctgcaggagcagctgcagcagctgcccgccctgatcgccgacctggagagcatgaccgccaacctgacccacctggaggccagcttcgaggaggtggagaacaacctgctgcacctggaggacctgtgcggccagtgcgagctggagagatgcaagcacatgcagagccagcagctggagaactacaagaagaacaagagaaaggagctggagaccttcaaggccgagctggacgccgagcacgcccagaaggtgctggagatggagcacacccagcagatgaagctgaaggagagacagaagttcttcgaggaggccttccagcaggacatggagcagtacctgagcaccggctacctgcagatcgccgagagaagagagcccatcggcagcatgagcagcatggaggtgaacgtggacatgctggagcagatggacctgatggacatcagcgaccaggaggccctggacgtgttcctgaacagcggcggcgaggagaacaccgtgctgagccccgccctgggccccgagagcagcacctgccagaacgagatcaccctgcaggtgcccaaccccagcgagctgagagccaagccccccagcagcagcagcacctgcaccgacagcgccaccagagacatcagcgagggcggcgagagccccgtggtgcagagcgacgaggaggaggtgcaggtggacaccgccctggccaccagccacaccgacagagaggccacccccgacggcggcgaggacagcgacagctag

SEQ ID NO: 222941 - DNA, 1059 bp, Artificial Sequence
  derived and/or modified sequence
atgctggagaccctgagagagagactgctgagcgtgcagcaggacttcaccagcggcctgaagaccctgagcgacaagagcagagaggccaaggtgaagagcaagcccagaaccgtgcccttcctgcccaagtacagcgccggcctggagctgctgagcagatacgaggacacctgggccgccctgcacagaagagccaaggactgcgccagcgccggcgagctggtggacagcgaggtggtgatgctgagcgcccactgggagaagaagaagaccagcctggtggagctgcaggagcagctgcagcagctgcccgccctgatcgccgacctggagagcatgaccgccaacctgacccacctggaggccagcttcgaggaggtggagaacaacctgctgcacctggaggacctgtgcggccagtgcgagctggagagatgcaagcacatgcagagccagcagctggagaactacaagaagaacaagagaaaggagctggaggtgaccttcagaagcgagctggacgccgagcacgcccagaaggtgctggagatggagcacacccagcagatgaagctgaaggagagacagaagttcttcgaggaggccttccagcaggacatggagcagtacctgagcaccggctacctgcagatcgccgagagaagagagcccatcggcagcatgagcagcatggaggtgaacgtggacatgctggagcagatggacctgatggacatcagcgaccaggaggccctggacgtgttcctgaacagcggcggcgaggagaacaccgtgctgagccccgccctgggccccgagagcagcacctgccagaacgagatcaccctgcaggtgcccaaccccagcgagctgagagccaagccccccagcagcagcagcacctgcaccgacagcgccaccagagacatcagcgagggcggcgagagccccgtggtgcagagcgacgaggaggaggtgcaggtggacaccgccctggccaccagccacaccgacagagaggccacccccgacggcggcgaggacagcgacagctag

SEQ ID NO: 222942 - DNA, 1403 bp, Artificial Sequence
  derived and/or modified sequence
acgcggaaggggctggggttgcggcgcggcggcgaggaccagaccgggggcggggccggtagtgggagtgcggggcgcgcggtgacagcgcggggttggcggcgtgggacccagggggcgacagaggcagcagcagcccgaggcctgaggagaggagaccggcggcggcggcaatgctggagacccttcgcgagcggctgctgagcgtgcagcaggatttcacctccgggctgaagactttaagtgacaagtcaagagaagcaaaagtgaaaagcaaacccaggactgttccatttttgccaaagtactctgctggattagaattacttagcaggtatgaggatacatgggctgcacttcacagaagagccaaagactgtgcaagtgctggagagctggtggatagcgaggtggtcatgctttctgcgcactgggagaagaaaaagacaagcctcgtggagctgcaagagcagctccagcagctcccagctttaatcgcagacttagaatccatgacagcaaatctgactcatttagaggcgagttttgaggaggtagagaacaacctgctgcatctggaagacttatgtgggcagtgtgaattagaaagatgcaaacatatgcagtcccagcaactggagaattacaagaaaaataagaggaaggaacttgaaaccttcaaagctgaactagatgcagagcacgcccagaaggtcctggaaatggagcacacccagcaaatgaagctgaaggagcggcagaagttttttgaggaagccttccagcaggacatggagcagtacctgtccactggctacctgcagattgcagagcggcgagagcccataggcagcatgtcatccatggaagtgaacgtggacatgctggagcagatggacctgatggacatatcggaccaggaggccctggacgtcttcctgaactctggaggagaagagaacactgtgctgtcccccgccttagggcctgaatccagtacctgtcagaatgagattaccctccaggttccaaatccctcagaattaagagccaagccaccttcttcttcctccacctgcaccgactcggccacccgggacatcagtgagggtggggagtcccccgttgttcagtccgatgaggaggaagttcaggtggacactgccctggccacatcacacactgacagagaggccactccggatggtggtgaggacagcgactcttaaattgggacatgggcgttgtctggccacactggaatccagttttggctgtatgcggaattccacctggaaagccaggttgttttatagaggttcttgatttttacataattgccaataatgtgtgagaaacttaaagaacagctaacaataaagtgtgaggacggtaaactgaga

SEQ ID NO: 222943 - DNA, 1395 bp, Artificial Sequence
  derived and/or modified sequence
gcggaaggggctggggttgcggcgcggcggcgaggaccagaccgggggcggggccggtagtgggagtgcggggcgcgcggtgacagcgcggggttggcggcgtgggacccagggggcgacagaggcagcagcagcccgaggcctgaggagaggagaccggcggcggcggcaatgctggagacccttcgcgagcggctgctgagcgtgcagcaggatttcacctccgggctgaagactttaagtgacaagtcaagagaagcaaaagtgaaaagcaaacccaggactgttccatttttgccaaagtactctgctggattagaattacttagcaggtatgaggatacatgggctgcacttcacagaagagccaaagactgtgcaagtgctggagagctggtggatagcgaggtggtcatgctttctgcgcactgggagaagaaaaagacaagcctcgtggagctgcaagagcagctccagcagctcccagctttaatcgcagacttagaatccatgacagcaaatctgactcatttagaggcgagttttgaggaggtagagaacaacctgctgcatctggaagacttatgtgggcagtgtgaattagaaagatgcaaacatatgcagtcccagcaactggagaattacaagaaaaataagagaaaagaactggaggtgaccttccgatctgaactagatgcagagcacgcccagaaggtcctggaaatggagcacacccagcaaatgaagctgaaggagcggcagaagttttttgaggaagccttccagcaggacatggagcagtacctgtccactggctacctgcagattgcagagcggcgagagcccataggcagcatgtcatccatggaagtgaacgtggacatgctggagcagatggacctgatggacatatcggaccaggaggccctggacgtcttcctgaactctggaggagaagagaacactgtgctgtcccccgccttagggcctgaatccagtacctgtcagaatgagattaccctccaggttccaaatccctcagaattaagagccaagccaccttcttcttcctccacctgcaccgactcggccacccgggacatcagtgagggtggggagtcccccgttgttcagtccgatgaggaggaagttcaggtggacactgccctggccacatcacacactgacagagaggccactccggatggtggtgaggacagcgactcttaaattgggacatgggcgttgtctggccacactggaatccagttttggctgtatgcggaattccacctggaaagccaggttgttttatagaggttcttgatttttacataattgccaataatgtgtgagaaacttaaagaacagctaacaataaagtgtgaggacggt

SEQ ID NO: 222944 - DNA, 1392 bp, Artificial Sequence
  derived and/or modified sequence
gcggaaggggctggggttgcggcgcggcggcgaggaccagaccgggggcggggccggtagtgggagtgcggggcgcgcggtgacagcgcggggttggcggcgtgggacccagggggcgacagaggcagcagcagcccgaggcctgaggagaggagaccggcggcggcggcaatgctggagacccttcgcgagcggctgctgagcgtgcagcaggatttcacctccgggctgaagactttaagtgacaagtcaagagaagcaaaagtgaaaagcaaacccaggactgttccatttttgccaaagtactctgctggattagaattacttagcaggtatgaggatacatgggctgcacttcacagaagagccaaagactgtgcaagtgctggagagctggtggatagcgaggtggtcatgctttctgcgcactgggagaagaaaaagacaagcctcgtggagctgcaagagcagctccagcagctcccagctttaatcgcagacttagaatccatgacagcaaatctgactcatttagaggcgagttttgaggaggtagagaacaacctgctgcatctggaagacttatgtgggcagtgtgaattagaaagatgcaaacatatgcagtcccagcaactggagaattacaagaaaaataagaggagaagattgagaacattcaaaactgaactagatgcagagcacgcccagaaggtcctggaaatggagcacacccagcaaatgaagctgaaggagcggcagaagttttttgaggaagccttccagcaggacatggagcagtacctgtccactggctacctgcagattgcagagcggcgagagcccataggcagcatgtcatccatggaagtgaacgtggacatgctggagcagatggacctgatggacatatcggaccaggaggccctggacgtcttcctgaactctggaggagaagagaacactgtgctgtcccccgccttagggcctgaatccagtacctgtcagaatgagattaccctccaggttccaaatccctcagaattaagagccaagccaccttcttcttcctccacctgcaccgactcggccacccgggacatcagtgagggtggggagtcccccgttgttcagtccgatgaggaggaagttcaggtggacactgccctggccacatcacacactgacagagaggccactccggatggtggtgaggacagcgactcttaaattgggacatgggcgttgtctggccacactggaatccagttttggctgtatgcggaattccacctggaaagccaggttgttttatagaggttcttgatttttacataattgccaataatgtgtgagaaacttaaagaacagctaacaataaagtgtgaggacggt

SEQ ID NO: 222945 - DNA, 1404 bp, Artificial Sequence
  derived and/or modified sequence
ggaccagaccgggggcggggccggtagtgggagtgcggggcgcgcggtgacagcgcggggttggcggcgtgggacccagggggcgacagaggcagcagcagcccgaggcctgaggagaggagaccggcggcggcggcaatgctggagacccttcgcgagcggctgctgagcgtgcagcaggatttcacctccgggctgaagactttaagtgacaagtcaagagaagcaaaagtgaaaagcaaacccagttggctaaatcaagaacagttttaataagtgtttcttttgggcaggactgttccatttttgccaaagtactctgctggattagaattacttagcaggtatgaggatacatgggctgcacttcacagaagagccaaagactgtgcaagtgctggagagctggtggatagcgaggtggtcatgctttctgcgcactgggagaagaaaaagacaagcctcgtggagctgcaagagcagctccagcagctcccagctttaatcgcagacttagaatccatgacagcaaatctgactcatttagaggcgagttttgaggaggtagagaacaacctgctgcatctggaagacttatgtgggcagtgtgaattagaaagatgcaaacatatgcagtcccagcaactggagaattacaagaaaaataagaggaaggaacttgaaaccttcaaagctgaactagatgcagagcacgcccagaaggtcctggaaatggagcacacccagcaaatgaagctgaaggagcggcagaagttttttgaggaagccttccagcaggacatggagcagtacctgtccactggctacctgcagattgcagagcggcgagagcccataggcagcatgtcatccatggaagtgaacgtggacatgctggagcagatggacctgatggacatatcggaccaggaggccctggacgtcttcctgaactctggaggagaagagaacactgtgctgtcccccgccttagggcctgaatccagtacctgtcagaatgagattaccctccaggttccaaatccctcagaattaagagccaagccaccttcttcttcctccacctgcaccgactcggccacccgggacatcagtgagggtggggagtcccccgttgttcagtccgatgaggaggaagttcaggtggacactgccctggccacatcacacactgacagagaggccactccggatggtggtgaggacagcgactcttaaattgggacatgggcgttgtctggccacactggaatccagttttggctgtatgcggaattccacctggaaagccaggttgttttatagaggttcttgatttttacataattgccaataatgtgtgagaaacttaaagaacagctaacaataaagtgtgaggacggt

SEQ ID NO: 222946 - protein, 633 aa, Artificial Sequence
  derived and/or modified sequence
MLRMRVPALLVLLFCFRGRAGPSPHFLQQPEDLVVLLGEEARLPCALGAYWGLVQWTKSGLALGGQRDLPGWSRYWISGNAANGQHDLHIRPVELEDEASYECQATQAGLRSRPAQLHVLVPPEAPQVLGGPSVSLVAGVPANLTCRSRGDARPTPELLWFRDGVLLDGATFHQTLLKEGTPGSVESTLTLTPFSHDDGATFVCRARSQALPTGRDTAITLSLQYPPEVTLSASPHTVQEGEKVIFLCQATAQPPVTGYRWAKGGSPVLGARGPRLEVVADASFLTEPVSCEVSNAVGSANRSTALDVLFGPILQAKPEPVSVDVGEDASFSCAWRGNPLPRVTWTRRGGAQVLGSGATLRLPSVGPEDAGDYVCRAEAGLSGLRGGAAEARLTVNAPPVVTALHSAPAFLRGPARLQCLVFASPAPDAVVWSWDEGFLEAGSQGRFLVETFPAPESRGGLGPGLISVLHISGTQESDFSRSFNCSARNRLGEGGAQASLGRRDLLPTVRIVAGVAAATTTLLMVITGVALCCWRHSKASASFSEQKNLMRIPGSSDGSSSRGPEEEETGSREDRGPIVHTDHSDLVLEEKGTLETKDPTNGYYKVRGVSPPASPDSRVTSFQWKSPGISNLP

SEQ ID NO: 222947 - DNA, 1902 bp, Artificial Sequence
  derived and/or modified sequence
atgcttcgcatgcgcgttcccgcactgctggtgctgctgttttgctttcgggggcgcgctgggccatccccgcatttcctacagcagcccgaggatctggtcgtgctgctgggcgaggaagctcggttgccctgcgcacttggcgcttattggggtctggtacagtggacaaagagtggcctggcattggggggccaacgagatctcccaggatggtcccgttactggatatcgggcaatgcggctaacggccagcacgaccttcacatccggccagtcgagcttgaagacgaggcttcttacgagtgtcaggccacacaggcaggcctccgcagccgtccagcacagcttcacgttctggtaccacctgaggcacctcaggtactcggcggtccaagcgtgagtttggttgccggggtgcctgccaacctcacatgccgcagccgtggagacgctcgacctacacccgagctactgtggttcagagatggggtgctcttggacggagctacgttccaccagacccttcttaaagagggcacacctggaagcgtggaaagcactctgaccctgaccccttttagccacgatgacggcgcaacctttgtgtgccgcgcacgctcccaggccctgcctacagggagagacacggcgataacacttagccttcagtaccctcccgaagtgactctatccgctagccctcacactgtccaagaaggcgagaaggtaatctttctgtgccaggccaccgctcaaccccccgtgactgggtaccgctgggcaaaaggaggctcgcccgtacttggcgcgcggggacctcgtctggaggtcgtggccgacgcatcttttctcacagaacctgtgtcttgcgaggtgtccaacgctgtgggcagcgctaatagatctaccgccctggatgtcctatttgggcctatcctacaagctaaacccgaaccagtttcggtcgacgtcggagaggacgcatccttctcctgtgcgtggcgcggcaaccccttgcctcgagtcacctggaccagacgaggaggggctcaagtgctaggatccggtgccactctaagacttccaagcgttggaccggaggacgccggtgattacgtgtgtcgcgctgaagccggactttcgggcttgagggggggggctgctgaagccagactgaccgtgaacgccccacccgtggtcactgcactgcacagcgcccctgcgttcctcagggggccagctcgactccagtgtttagtgttcgcgagtcctgctcctgatgcagtggtctggtcctgggatgaaggcttcctcgaagcaggaagccagggcaggtttctggtggaaaccttcccagcacccgagtcaaggggcggcttaggcccagggcttatatcagtcttgcacatttccggaactcaggagtcagacttcagcagatccttcaattgctcagccagaaaccgcctgggggaaggcggggcacaggcctctttaggtcgccgtgatctattgcccaccgtgcgcattgtagcaggagtggccgcagcgacaacaaccctcttgatggttattactggcgtggccctttgttgctggcgccactccaaggctagtgcttccttcagcgagcagaagaatcttatgcggattccaggatcctcagatgggtcctcctcacggggacccgaagaggaggagacagggagtcgggaagatcgcggcccaattgtccataccgaccacagcgaccttgtgctggaggagaaaggcaccctggagaccaaagatcctaccaatggctactacaaggtgcgtggtgtcagcccaccggcaagccccgactccagagtgacctcattccagtggaagtccccaggtatttccaatctgccctag

SEQ ID NO: 222948 - DNA, 2724 bp, Artificial Sequence
  derived and/or modified sequence
cccagagacccaggccgcggaactggcaggcgtttcagagcgtcagaggctgcggatgagcagacttggaggactccaggccagagactaggctgggcgaagagtcgagcgtgaagggggctccgggccagggtgacaggaggcgtgcttgagaggaagaagttgacgggaaggccagtgcgacggcaaatctcgtgaaccttgggggacgaatgctcaggatgcgggtccccgccctcctcgtcctcctcttctgcttcagagggagagcaggcccgtcgccccatttcctgcaacagccagaggacctggtggtgctgctgggggaggaagcccggctgccgtgtgctctgggcgcctactgggggctagttcagtggactaagagtgggctggccctagggggccaaagggacctaccagggtggtcccggtactggatatcagggaatgcagccaatggccagcatgacctccacattaggcccgtggagctagaggatgaagcatcatatgaatgtcaggctacacaagcaggcctccgctccagaccagcccaactgcacgtgctggtccccccagaagccccccaggtgctgggcggcccctctgtgtctctggttgctggagttcctgcgaacctgacatgtcggagccgtggggatgcccgccctacccctgaattgctgtggttccgagatggggtcctgttggatggagccaccttccatcagaccctgctgaaggaagggacccctgggtcagtggagagcaccttaaccctgacccctttcagccatgatgatggagccacctttgtctgccgggcccggagccaggccctgcccacaggaagagacacagctatcacactgagcctgcagtaccccccagaggtgactctgtctgcttcgccacacactgtgcaggagggagagaaggtcattttcctgtgccaggccacagcccagcctcctgtcacaggctacaggtgggcaaaagggggctctccggtgctcggggcccgcgggccaaggttagaggtcgtggcagacgcctcgttcctgactgagcccgtgtcctgcgaggtcagcaacgccgtgggtagcgccaaccgcagtactgcgctggatgtgctgtttgggccgattctgcaggcaaagccggagcccgtgtccgtggacgtgggggaagacgcttccttcagctgcgcctggcgcgggaacccgcttccacgggtaacctggacccgccgcggtggcgcgcaggtgctgggctctggagccacactgcgtcttccgtcggtggggcccgaggacgcaggcgactatgtgtgcagagctgaggctgggctatcgggcctgcggggcggcgccgcggaggctcggctgactgtgaacgctcccccagtagtgaccgccctgcactctgcgcctgccttcctgaggggccctgctcgcctccagtgtctggttttcgcctctcccgccccagatgccgtggtctggtcttgggatgagggcttcctggaggcggggtcgcagggccggttcctggtggagacattccctgccccagagagccgcgggggactgggtccgggcctgatctctgtgctacacatttcggggacccaggagtctgactttagcaggagctttaactgcagtgcccggaaccggctgggcgagggaggtgcccaggccagcctgggccgtagagacttgctgcccactgtgcggatagtggccggagtggccgctgccaccacaactctccttatggtcatcactggggtggccctctgctgctggcgccacagcaaggcctcagcctctttctccgagcaaaagaacctgatgcgaatccctggcagcagcgacggctccagttcacgaggtcctgaagaagaggagacaggcagccgcgaggaccggggccccattgtgcacactgaccacagtgatctggttctggaggagaaagggactctggagaccaaggacccaaccaacggttactacaaggtccgaggagtcagtccacccgcgtctccagactcacgtgtgacatctttccaatggaagagtcctgggatctccaacttgccataatggattgttctgatttctgaggagccaggacaagttggcgaccttactcctccaaaactgaacacaaggggagggaaagatcattacatttgtcaggagcatttgtatacagtcagctcagccaaaggagatgccccaagtgggagcaacatggccacccaatatgcccacctattccccggtgtaaaagagattcaagatggcaggtaggccctttgaggagagatggggacagggcagtgggtgttgggagtttggggccgggatggaagttgtttctagccactgaaagaagatatttcaagatgaccatctgcattgagaggaaaggtagcataggatagatgaagatgaagagcataccaggccccaccctggctctccctgaggggaactttgctcggccaatggaaatgcagccaagatggccatatactccctaggaacccaagatggccaccatcttgattttactttccttaaagactcagaaagacttggacccaaggagtggggatacagtgagaattaccactgttggggcaaaatattgggataaaaatatttatgtttaataataaaaaaaagtcaaagaggcaagtgtgtctta

SEQ ID NO: 222949 - DNA, 1902 bp, Artificial Sequence
  derived and/or modified sequence
atgctgaggatgagggtgcctgccctgctggtgctgctcttctgcttccggggccgggccggccccagcccccacttcctgcagcagcctgaggacctggtggtgctgctgggggaggaggcccggctgccctgtgccctgggcgcctactggggcctggtgcagtggaccaagagcggcctggccctgggcggccagagggacctgcccggctggagccgctactggatctctggaaatgctgccaacggccagcacgacctgcacatccggcctgtggagctggaggatgaggccagctatgagtgccaggccacccaggccggcctgcggagcaggcctgcccagctgcacgtgctggtgcccccagaggccccccaggtgctgggcggccccagcgtgtccctggtggccggcgtgcctgccaacctgacctgccgcagcagaggagatgcccggcccaccccagagctgctgtggttcagagatggagtgctgctggatggagccaccttccaccagaccctgctgaaggagggcaccccaggctctgtggagagcaccctgaccctgacccccttcagccatgatgatggagccacctttgtgtgccgggcccggagccaggccctgcccaccggccgggacacagccatcaccctgagcctgcagtacccacctgaggtgaccctgagcgccagcccccacacagtgcaggagggggagaaggtgatcttcctgtgccaggccacagcccagccccctgtgacaggctaccgctgggccaagggcggcagccctgtgctgggcgcccggggcccccggctggaggtggtggctgatgccagcttcctgacagagcctgtgtcctgtgaggtgtccaatgctgtgggcagcgccaacagaagcacagccctggatgtgctgtttggccccatcctgcaggccaagccagagcctgtgtctgtggatgtgggagaagatgccagcttcagctgtgcctggaggggcaaccccctgccccgggtgacctggaccaggagaggaggagcccaggtgctgggcagcggggccaccctgcggctgcccagcgtgggcccagaagatgctggggactatgtgtgcagagctgaggccggcctgagcggcctgcggggcggcgctgctgaggcccggctgactgtgaatgcccctcctgtggtgacagccctgcacagcgccccagccttcctgcggggccctgcccggctgcagtgcctggtgtttgccagccctgccccagatgctgtggtgtggagctgggatgagggcttcctggaggccggcagccagggccgcttcctggtggagaccttccctgcccctgagagcagaggaggcctgggccctggcctcatctctgtgctgcacatcagcggcacccaggagagtgacttcagccgctccttcaactgcagcgccaggaaccggctgggggagggcggggcccaggccagcctgggccggcgggacctgctgcccaccgtgagaattgtggccggcgtggccgccgccaccaccaccctgctgatggtgatcactggagtggccctgtgctgctggaggcacagcaaggccagcgccagcttcagcgagcagaagaacctgatgagaattcctggcagcagtgatggcagcagcagccggggccctgaggaggaggagaccggcagcagagaagatcggggccccatcgtgcacacagaccacagcgacctggtgctggaggagaagggcaccctggagaccaaggaccccaccaacggctactacaaggtgcggggcgtgtccccaccagccagcccagacagccgggtgaccagcttccagtggaagagccctggcatcagcaacctgccctag

SEQ ID NO: 222950 - DNA, 1902 bp, Artificial Sequence
  derived and/or modified sequence
atgctgcggatgcgggtgcccgccctgctggtgctgctgttctgcttccgcggccgggccggcccttcgccacactttcttcagcagccagaagacctggtggtcttattgggagaggaagctaggctgccctgtgccctgggcgcatattgggggctagtgcagtggactaaaagtggcctggcccttggcggtcagcgtgatctgccaggctggtcccgatactggattagcggaaacgctgccaatggccagcacgacctccacatcagaccagttgaactcgaggacgaggctagctacgagtgccaagccacccaggccggcctacgatcccgaccggcacaattgcacgttctggtgcctccagaagcgcctcaggtgctcggaggcccctctgtctcactggtggcaggggtccccgcaaatctgacatgtcggtcccggggtgatgccaggccaacacccgaattgttgtggttcagggatggagtgctcctggacggcgccacgttccatcaaactctgctcaaagaagggacacccgggtccgtcgagtctacattgactctaacgccattttcccatgacgatggcgctaccttcgtgtgtagggccaggagccaggcccttcccaccggccgagacacagcgataactctgtccctgcagtaccctccagaggtcacactatccgcatccccccacacagtccaagaaggcgagaaggtgatctttctgtgccaggctactgctcagcccccggtgacagggtataggtgggcaaaagggggctccccggtgctgggagctagagggcctcggctggaagtagtcgcagatgcaagctttctgaccgagcccgtgagttgtgaagttagtaatgccgtcggatcagcaaataggagtacggctctggacgtgctgtttggaccaatcctgcaggccaagcccgaacctgtgagtgttgatgtgggtgaggacgcctcattcagttgcgcgtggcgggggaatccgctgccacgggtgacatggacccggcgagggggagcccaggtgctggggtcgggcgccacactgaggcttccatccgtgggcccagaagatgcaggggattatgtatgcagagctgaagccggcctgtcaggcctgagaggaggagcagctgaggcccgcctaactgttaatgcccctccagtggtcaccgcactgcactccgcccccgcttttctgcgcgggccagctcgactccagtgcctggtttttgctagccctgccccagatgcagtggtatggtcgtgggacgaagggttcttggaagctggctcccaaggaaggttcctcgtggagacctttccagcccccgaatcacgaggtggtctcggcccaggactgatttcagtgctgcatatcagtggtacacaggaatccgatttctcacgatcctttaattgttctgcacggaataggctgggcgaaggtggcgcccaggcaagcctgggacggagagacctgctccctaccgttcggattgtggctggcgttgccgctgctaccactactcttttaatggtcattactggggtggccctgtgttgctggcggcactctaaagcttctgcatccttttcagaacagaaaaacctgatgcgcatcccaggctctagtgacggatcctcttcacgtgggcccgaggaagaggagaccggatcaagagaggaccgcggtccgatcgtgcacaccgaccatagtgacttggttctggaggaaaagggcaccctcgagaccaaggatccaaccaatggctactataaggtccggggtgtaagccctcctgcctcaccggactccagggtgacttcgttccaatggaaatcccccggcatcagtaaccttccatag

SEQ ID NO: 222951 - DNA, 1902 bp, Artificial Sequence
  derived and/or modified sequence
atgctgcggatgagagtgcccgctctgctcgtgttgctgttctgttttcggggtcgcgcagggccatctccacactttctgcagcagcccgaagatctggttgtgctgttaggcgaggaagcgaggcttccatgtgctctgggcgcttattggggacttgtccagtggactaagagcggcctcgccctggggggacagcgggatctaccagggtggagccgctattggatctccgggaacgcagctaatggccagcacgatctccacatacggcctgtcgaactggaggacgaggcgagctatgaatgccaggctacccaggcaggtttgagatcaaggcctgcacagttgcacgtgctggttccccctgaagctcctcaggtgctgggcggaccttcggtgtcactggtggccggtgtgccagcgaatctgacctgtaggtccagaggcgatgctcgtccaacacctgagctgctgtggtttagggatggagtcctgttagacggggcaactttccaccagactctcctcaaagagggcacgccaggcagcgtggagagtacactgaccctcacaccatttagccacgacgatggtgccaccttcgtatgccgggctcgaagccaagcactgccaaccggacgggatactgccatcaccctgagcctacaatacccacctgaggtgactctatcggccagcccccacacagttcaggaaggcgagaaggttattttcctgtgccaggccacagcccagcctccagtaacggggtaccggtgggccaaaggaggatcccccgtgcttggagcaaggggtccaaggttggaagtggtagccgatgcctccttcctgaccgaaccggtgagctgtgaagtgtccaacgctgtgggatctgccaataggagtaccgcccttgacgtcctgttcggccctatcttgcaggctaagcctgaacccgtatctgtcgacgtgggagaagatgccagcttctcctgcgcgtggagaggaaacccccttccgagggtgacctggacccgtcggggaggggcacaggttctgggtagcggcgctactctgaggcttccatccgtgggccctgaagacgccggtgattacgtttgtcgcgcagaggcaggtctgagcggcctccggggaggcgcagccgaagctcgcctgacagttaatgctcccccagttgtgactgcactacatagcgctccagcttttttgagaggcccagctcgcctgcaatgtctcgtgtttgcatcccctgctcctgacgccgtggtgtggagctgggacgaggggttcctggaagctgggtcacagggccgattcctggtcgagaccttccccgcacccgaaagccggggaggcctgggacccggtttaatctccgtcctgcacataagcggaacacaggaatccgatttttccagaagcttcaactgtagcgcgcgtaatagactcggagaggggggtgcccaggcctctctaggtcgccgagatttgctaccaacagtgagaatcgttgccggtgtcgccgctgcaacgaccacactgctgatggtgatcacaggagtggccctttgctgctggcgccactccaaggcctcagctagctttagtgaacagaagaatctgatgcgcattcccggatcttccgacggatccagttccagaggacctgaagaggaagaaacaggctctagagaagaccggggtcccatagttcacaccgaccacagcgatctggtgctagaagagaagggcactttggaaaccaaagaccccaccaacggttactacaaggttagaggagtcagtcctcctgcttcccctgattcacgcgtgacctctttccagtggaagtcccctggcattagcaatctcccctag

SEQ ID NO: 222952 - DNA, 1902 bp, Artificial Sequence
  derived and/or modified sequence
atgctgagaatgagagtgcccgccctgctggtgctgctgttctgcttcagaggcagagccggccccagcccccacttcctgcagcagcccgaggacctggtggtgctgctgggcgaggaggccagactgccctgcgccctgggcgcctactggggcctggtgcagtggaccaagagcggcctggccctgggcggccagagagacctgcccggctggagcagatactggatcagcggcaacgccgccaacggccagcacgacctgcacatcagacccgtggagctggaggacgaggccagctacgagtgccaggccacccaggccggcctgagaagcagacccgcccagctgcacgtgctggtgccccccgaggccccccaggtgctgggcggccccagcgtgagcctggtggccggcgtgcccgccaacctgacctgcagaagcagaggcgacgccagacccacccccgagctgctgtggttcagagacggcgtgctgctggacggcgccaccttccaccagaccctgctgaaggagggcacccccggcagcgtggagagcaccctgaccctgacccccttcagccacgacgacggcgccaccttcgtgtgcagagccagaagccaggccctgcccaccggcagagacaccgccatcaccctgagcctgcagtacccccccgaggtgaccctgagcgccagcccccacaccgtgcaggagggcgagaaggtgatcttcctgtgccaggccaccgcccagccccccgtgaccggctacagatgggccaagggcggcagccccgtgctgggcgccagaggccccagactggaggtggtggccgacgccagcttcctgaccgagcccgtgagctgcgaggtgagcaacgccgtgggcagcgccaacagaagcaccgccctggacgtgctgttcggccccatcctgcaggccaagcccgagcccgtgagcgtggacgtgggcgaggacgccagcttcagctgcgcctggagaggcaaccccctgcccagagtgacctggaccagaagaggcggcgcccaggtgctgggcagcggcgccaccctgagactgcccagcgtgggccccgaggacgccggcgactacgtgtgcagagccgaggccggcctgagcggcctgagaggcggcgccgccgaggccagactgaccgtgaacgccccccccgtggtgaccgccctgcacagcgcccccgccttcctgagaggccccgccagactgcagtgcctggtgttcgccagccccgcccccgacgccgtggtgtggagctgggacgagggcttcctggaggccggcagccagggcagattcctggtggagaccttccccgcccccgagagcagaggcggcctgggccccggcctgatcagcgtgctgcacatcagcggcacccaggagagcgacttcagcagaagcttcaactgcagcgccagaaacagactgggcgagggcggcgcccaggccagcctgggcagaagagacctgctgcccaccgtgagaatcgtggccggcgtggccgccgccaccaccaccctgctgatggtgatcaccggcgtggccctgtgctgctggagacacagcaaggccagcgccagcttcagcgagcagaagaacctgatgagaatccccggcagcagcgacggcagcagcagcagaggccccgaggaggaggagaccggcagcagagaggacagaggccccatcgtgcacaccgaccacagcgacctggtgctggaggagaagggcaccctggagaccaaggaccccaccaacggctactacaaggtgagaggcgtgagcccccccgccagccccgacagcagagtgaccagcttccagtggaagagccccggcatcagcaacctgccctag

SEQ ID NO: 222953 - protein, 179 aa, Artificial Sequence
  derived and/or modified sequence
MDKDFDKLHEFVEIMKEMQKDMDEKMDILINTQKNYKLPLRRAPKEQQELRLMGKTHREPQLRPKKMDGASGVNGAPCALHKKTMAPQKTKQGSLDPLHHCGTCCEKCLLCALKNNYNRAAPLKEARHLLTANSIDPSAALVLLIEFLLLTLVTGAAAPGLDACGHQRNMRDEINSERR

SEQ ID NO: 222954 - protein, 233 aa, Artificial Sequence
  derived and/or modified sequence
MSAKRAELKKTHLSKNYKAVCLELKPEPTKTFDYKAVKQEGRFTKAGVTQDLKNELREVREELKEKMEEIKQIKDLMDKDFDKLHEFVEIMKEMQKDMDEKMDILINTQKNYKLPLRRAPKEQQELRLMGKTHREPQLRPKKMDGASGVNGAPCALHKKTMAPQKTKQGSLDPLHHCGTCCEKCLLCALKNNYNRGNIPSEASGLYKGGEEPVTTQPSVGHAVPAPKSQTEGR

SEQ ID NO: 222955 - protein, 201 aa, Artificial Sequence
  derived and/or modified sequence
MSAKRAELKKTHLSKNYKAVCLELKPEPTKTFDYKAVKQEGRFTKAGVTQDLKNELREVREELKEKMEEIKQIKDLMDKDFDKLHEFVEIMKEMQKDMDEKMDILINTQKNYKLPLRRAPKEQQELRLMGKTHREPQLRPKKMDGASGVNGAPCALHKKTMAPQKTKQGSLDPLHHCGTCCVSETLPEPSTGARPLAPAPW

SEQ ID NO: 222956 - DNA, 702 bp, Artificial Sequence
  derived and/or modified sequence
atgagcgctaagcgagctgaactcaaaaagacacacctttcgaagaattacaaggcagtctgcctggagctaaagccggagcccaccaagacttttgattacaaggccgtgaagcaggaggggcgatttaccaaagcaggggtcactcaggacctgaagaatgaactcagggaagtgagggaggagctgaaagaaaaaatggaagaaatcaagcagatcaaagacctaatggacaaggatttcgataagctgcacgagtttgtggaaatcatgaaggaaatgcagaaagacatggacgagaaaatggacatactgataaatactcagaagaactacaaattgccattgcggcgcgctcccaaggaacaacaggaattaaggttaatggggaagacccaccgcgagcctcagctccgcccgaaaaagatggacggggccagcggagtgaacggcgccccatgcgctcttcacaagaagaccatggctccccaaaaaacaaaacagggcagtcttgaccctctgcaccactgcgggacctgttgtgagaagtgcttgctttgcgcactcaaaaacaattacaatagggggaacatcccaagtgaagcgtccggtctttacaaggggggcgaagaacctgttacaacccaaccgtctgtaggacacgctgtccctgcccctaagtcccaaactgaaggacggtag

SEQ ID NO: 222957 - DNA, 702 bp, Artificial Sequence
  derived and/or modified sequence
atgtctgccaagagagctgagctgaagaagacccacctgagcaagaactacaaggctgtgtgcctggagctgaagccagagcccaccaagacctttgactacaaggctgtgaagcaggagggccgcttcaccaaggccggcgtgacccaggacctgaagaatgagctgcgggaggtgcgggaggagctgaaggagaagatggaggagatcaagcagatcaaggacctgatggacaaggactttgacaagctgcatgaatttgtggagatcatgaaggagatgcagaaggacatggatgagaagatggacatcctgatcaacacccagaagaactacaagctgcccctgcggcgggcccccaaggagcagcaggagctgcggctgatgggcaagacccaccgggagccccagctgcggcccaagaagatggatggagccagcggcgtgaatggagccccctgtgccctgcacaagaagaccatggccccccagaagaccaagcagggcagcctggaccccctgcaccactgcggcacctgctgtgagaagtgcctgctgtgtgccctgaagaacaactacaacagaggcaacatccccagcgaggccagcggcctgtacaagggcggggaggagcctgtgaccacccagcccagcgtgggccatgctgtgcctgcccccaagagccagacagagggccgctag

SEQ ID NO: 222958 - DNA, 702 bp, Artificial Sequence
  derived and/or modified sequence
atgagcgccaagcgggccgagctgaagaagacccacctgagcaagaactataaggcggtgtgtctggagctaaagcccgagcccacaaaaacgtttgactacaaggctgttaagcaggaagggcgcttcacaaaggccggagtcacacaagatttgaaaaacgaactgagggaggtcagagaggaattaaaggaaaaaatggaggagatcaaacagatcaaggacctcatggacaaagatttcgacaaactacacgagtttgtggaaattatgaaggagatgcagaaggatatggacgagaagatggatatcttgatcaatacgcaaaaaaattacaaacttccactccgccgggccccgaaggagcagcaggagctccgcctaatgggaaagactcatagggagccgcaactgcgccccaagaaaatggacggcgcttctggagtgaatggcgccccttgcgcactacataagaaaactatggcacctcaaaagactaagcagggctccctggatcctctgcaccactgtgggacgtgttgcgaaaagtgcctactttgcgcacttaagaacaactataacagaggcaatattcccagtgaggcaagcggactgtacaaggggggcgaggaacctgtaaccacacagccatcagtgggccatgctgtgcccgcccccaagtcgcagaccgaagggaggtag

SEQ ID NO: 222959 - DNA, 702 bp, Artificial Sequence
  derived and/or modified sequence
atgtccgctaagcgagcagaattgaaaaagacccacctgtcaaaaaactacaaagctgtatgcctggaattgaagccagaacctactaaaacttttgattataaagccgtgaaacaggagggtagattcaccaaagccggagtgacacaggatctcaaaaatgagctgcgggaagttagagaggagcttaaagagaagatggaggaaatcaagcagatcaaggatcttatggataaagactttgacaagttacatgaattcgtggagatcatgaaagagatgcagaaggacatggatgagaaaatggatatcctgatcaacacacagaaaaactataagctccctctaaggcgggcacccaaggagcagcaggagctgcgtttgatgggcaaaacccatcgggagcctcaactcaggcctaagaaaatggatggtgcctctggggtgaatggcgcaccttgtgcgctgcacaaaaagaccatggcaccccagaagaccaagcagggcagcctggatcctttgcaccactgcgggacatgttgcgaaaaatgtcttttatgcgctctgaagaataattacaacaggggtaacattccaagcgaagcttctggcctctataaagggggtgaggaacctgttaccacccagccatcagtgggacatgcagtccccgcacccaaatcgcagacagaaggaagatag

SEQ ID NO: 222960 - DNA, 1023 bp, Artificial Sequence
  derived and/or modified sequence
acacaaaggggtggtcaccctgccctcaccttgacctgtaagttgcctaggacagtggcctggtcccaggggctgttgtggggagttgaagaacaccctggcctcctccatcatgtcggccaagagggcagaattgaagaaaacacatctgagcaagaactacaaggcagtttgcctggaattgaagccagagccgaccaaaacatttgattacaaagcagttaaacaagaagggcggtttaccaaagcaggagtgacacaggacctaaagaatgaactcagggaagtgagagaagagctcaaggagaaaatggaggagataaaacagataaaggatctaatggacaaggattttgataaacttcacgaatttgtggaaattatgaaggaaatgcagaaagatatggatgagaagatggacattttaataaatacacagaagaactataagcttccccttagaagagcaccaaaggagcagcaggaactcaggctgatgggaaagactcacagagaaccacagctcaggcccaagaaaatggatggagccagtggagtcaatggagcaccctgtgctcttcacaagaagacgatggcaccacaaaaaacaaaacagggctcactggatccccttcatcactgtgggacctgctgcgagaaatgtttgttgtgtgctctaaagaacaactacaatcgggggaacattccttcagaggcctcaggcctttacaaaggtggagaggagccagtgaccacccaaccttctgtgggccacgctgtgcctgccccaaagtcccagactgagggaaggtgaagcttaactgccagcttgaaatgagagtaaagaagatacagagcaaacagtgtttcagaaactgtcctgccctgggtgtgattctttggcttcaatttgaaggacgaggaatgatgggatttcatattttatttcacaccagttcctccttgtttcatctctttgctaagctggctgcttctaccatctaataaataattggccaagtt

SEQ ID NO: 222961 - DNA, 702 bp, Artificial Sequence
  derived and/or modified sequence
atgagcgccaagagagccgagctgaagaagacccacctgagcaagaactacaaggccgtgtgcctggagctgaagcccgagcccaccaagaccttcgactacaaggccgtgaagcaggagggcagattcaccaaggccggcgtgacccaggacctgaagaacgagctgagagaggtgagagaggagctgaaggagaagatggaggagatcaagcagatcaaggacctgatggacaaggacttcgacaagctgcacgagttcgtggagatcatgaaggagatgcagaaggacatggacgagaagatggacatcctgatcaacacccagaagaactacaagctgcccctgagaagagcccccaaggagcagcaggagctgagactgatgggcaagacccacagagagccccagctgagacccaagaagatggacggcgccagcggcgtgaacggcgccccctgcgccctgcacaagaagaccatggccccccagaagaccaagcagggcagcctggaccccctgcaccactgcggcacctgctgcgagaagtgcctgctgtgcgccctgaagaacaactacaacagaggcaacatccccagcgaggccagcggcctgtacaagggcggcgaggagcccgtgaccacccagcccagcgtgggccacgccgtgcccgcccccaagagccagaccgagggcagatag

SEQ ID NO: 222962 - protein, 159 aa, Artificial Sequence
  derived and/or modified sequence
MRLLERMRKDWFMVGIVLAIAGAKLEPSIGVNGGPLKPEITVSYIAVATIFFNSGLSLKTEELTSALVHLKLHLFIQIFTLAFFPATIWLFLQLLSITPINEWLLKGLQTVGCMPPPVSSAVILTKAVGGNEAAAIFNSAFGSFLVSKHSLTCLLQLLL

SEQ ID NO: 222963 - DNA, 480 bp, Artificial Sequence
  derived and/or modified sequence
atgagactgctggagagaatgagaaaggactggttcatggtgggcatcgtgctggccatcgccggcgccaagctggagcccagcatcggcgtgaacggcggccccctgaagcccgagatcaccgtgagctacatcgccgtggccaccatcttcttcaacagcggcctgagcctgaagaccgaggagctgaccagcgccctggtgcacctgaagctgcacctgttcatccagatcttcaccctggccttcttccccgccaccatctggctgttcctgcagctgctgagcatcacccccatcaacgagtggctgctgaagggcctgcagaccgtgggctgcatgcccccccccgtgagcagcgccgtgatcctgaccaaggccgtgggcggcaacgaggccgccgccatcttcaacagcgccttcggcagcttcctggtgagcaagcacagcctgacctgcctgctgcagctgctgctgtag

SEQ ID NO: 222964 - DNA, 480 bp, Artificial Sequence
  derived and/or modified sequence
atgcgtttgctggaaagaatgcgcaaagactggttcatggtgggaatcgtgctcgctattgccggcgcgaagttagaaccgtccataggggtcaacggcgggcctcttaagccagagattacagtgtcttatattgccgtggctactattttttttaattctggactatctcttaagaccgaagagctgacctcagcactggtgcacctcaaactccacttgttcatccagatcttcactctcgcttttttcccggccactatctggctgttcctacagcttctctccatcactccaattaacgaatggttgttgaaaggactccagaccgtggggtgtatgccacctccagtaagctctgcggtgattcttaccaaggcagtgggcggcaatgaggcggccgccatcttcaattctgctttcggatcctttttggtatccaagcatagtttgacctgtctgttgcaactcctattgtag

SEQ ID NO: 222965 - DNA, 480 bp, Artificial Sequence
  derived and/or modified sequence
atgaggctgctggagaggatgaggaaggactggttcatggtgggcatcgtgctggccatcgccggggccaagctggagcccagcattggagtgaatggaggccccctgaagccagagatcaccgtgtcctacatcgctgtggccaccatcttcttcaacagcggcctgagcctgaagacagaggagctgaccagcgccctggtgcacctgaagctgcacctgttcatccagatcttcaccctggccttcttccctgccaccatctggctgttcctgcagctgctgagcatcacccccatcaatgagtggctgctgaagggcctgcagacagtgggctgcatgcctcctcctgtgagcagcgctgtgatcctgaccaaggctgtgggcggcaatgaagctgctgccatcttcaacagcgccttcggcagcttcctggtgtccaagcacagcctgacctgcctgctgcagctgctgctgtag

SEQ ID NO: 222966 - DNA, 480 bp, Artificial Sequence
  derived and/or modified sequence
atgcggctgctggagcggatgcggaaggactggttcatggtgggcattgtgctcgcaatcgctggggctaagcttgaaccctccatcggcgttaatggcggccctcttaagcccgaaataacagtgagttatatcgccgtggcaaccatcttttttaactccgggttgagtctcaaaactgaggaactaactagcgcgttagttcacctaaagttgcacctcttcattcagatcttcaccctggcctttttccctgccaccatttggttgtttctacaactactgagtattaccccgattaacgaatggctgctgaagggcctccagaccgtcggctgcatgccgccccctgtgtcgagtgctgtaattttgacgaaggcagtgggtgggaatgaggccgccgccattttcaactcggcgttcggatcctttctggtttccaagcacagcttgacctgcctactgcaattgctgctgtag

SEQ ID NO: 222967 - DNA, 480 bp, Artificial Sequence
  derived and/or modified sequence
atgcgcttattagagagaatgcggaaggactggttcatggtcgggattgtgttggctattgctggagccaagttagaaccctctattggggtcaacgggggacccctaaagcccgagatcacagtgtcctatatcgcagtggccaccatcttcttcaacagcggtcttagcttgaagaccgaggaattaacctcggcgctggtgcacctgaagctgcatctcttcatacagatttttaccttggcattctttcctgcaacaatctggctgtttcttcagctgttgagcatcacccccattaacgagtggctgctcaaaggactgcagacagttggctgcatgccgcctccagtatcttcagccgtaattctgacaaaggcagtgggtggtaacgaggctgccgcaatattcaactccgcgttcggaagttttctggtgtcaaaacactctctgacctgcctgctccaacttctcctgtag

SEQ ID NO: 222968 - DNA, 1730 bp, Artificial Sequence
  derived and/or modified sequence
tcctcaaagccgccggagcaacccccaggtctttactttacaatcggcaatttgacttgctctgctgcatgtctggagggaccaaggaaagtgtggagacgctccaaggattaggtgatcggagcttgaaaagaaaaaaagccaaacaaataaacaaaacccacccaccctaacaaatatgaggctgctggagagaatgaggaaagactggttcatggtcggaatagtgctggcgatcgctggagctaaactggagccgtccataggggtgaatgggggaccactgaagccagaaataactgtatcctacattgctgttgcaacaatattctttaacagtggactatcattgaaaacagaggagctgaccagtgctttggtgcatctaaaactgcatctttttattcagatctttactcttgcattcttcccagcaacaatatggctttttcttcagcttttatcaatcacacccatcaacgaatggcttttaaaaggtttgcagacagtaggttgcatgcctccgcctgtgtcttctgcagtgattttaaccaaggcagttggtggaaatgaggcagctgcaatatttaattcagcctttggaagttttttggtaagtaaacatagtttaacttgtctattacaacttttgctgtgatattgtgtatatgaaagatttagtgaaagctggatttgttttactctttggttaagtataaaaattgttgaatcttttcatgtgccagtatccataccctgaagaaaagtagttaatgaataaagcaaatgttctcttacaatatattttggaggtttgggttttaaaattccatttaatgaattcaaggaatcaattaaaacactatgtgtctccttatagaggttatgtcaatatattgatcatttaatgaggtcttttagattattattattttgtatcatgggactgaggattttgaaaaggaaacatgacccagctggtcagaaagggaatgctaatttacttgttgacatgccatttattttgtacatttcactgtcaaagaagctactggcttggatgcttctgagaaatctatgtgaaaaaaaatttgaaaggaagatatgactaatgagtaatttgcaagtaaatgttgtatctatatatatatatatataaagattcaaaagtagttcagctttcataagtagaaccaatataaggacgttgttttagcatttttaatcattatttttaaataaatgatgtaacagaggcttgatttgtgttatgaaagattgagaaactaaattttctgttgatttaatttttttgtgccttaaaactttgttaaattcctgaagttaattatcatattgtattttttggggcataactcattagcagatatgtagtgcagtgatttacaaataattgagagtaaaatcagtgatgtataaactagttcatgagtctaggtaaaatatcaattacctctgtttaaaatgctctgttaattattattgtatgtatttaaatgtagttaaagcttttaaacatgttgttacatagtgttaattctacatagtgctacacagcttttagtgtcacatagccttacagagtttataatgatgtagcatctgcaaaatatatgcatagcttatatcctatttttatagagccagtaatggtttttgtgatgctgtattacttctgggttttagacaataaagtctgtttaacaaaa

SEQ ID NO: 222969 - protein, 702 aa, Artificial Sequence
  derived and/or modified sequence
MMGDSMVKINGIYLTKSNAICHLKSHPLQLTDDGGFSEIKEQEMFKGTTSLPSHLKNGGDQGKRHARASSCPSSSDLSRLQTKAVPKADLQEEDAEIEVDEVFWNTRIVPILRELEKEENIETVCAACTQLHHALEEGNMLGNKFKGRSILLKTLCKLVDVGSDSLSLKLAKIILALKVSRKNLLNVCKLIFKISRNEKNDSLIQNDSILESLLEVLRSEDLQTNMEAFLYCMGSIKFISGNLGFLNEMISKGAVEILINLIKQINENIKKCGTFLPNSGHLLVQVTATLRNLVDSSLVRSKFLNISALPQLCTAMEQYKGDKDVCTNIARIFSKLTSYRDCCTALASYSRCYALFLNLINKYQKKQDLVVRVVFILGNLTAKNNQAREQFSKEKGSIQTLLSLFQTFHQLDLHSQKPVGQRGEQHRAQRPPSEAEDVLIKLTRVLANIAIHPGVGPVLAANPGIVGLLLTTLEYKSLDDCEELVINATATINNLSYYQVKNSIIQDKKLYIAELLLKLLVSNNMDGILEAVRVFGNLSQDHDVCDFIVQNNVHRFMMALLDAQHQDICFSACGVLLNLTVDKDKRVILKEGGGIKKLVDCLRDLGPTDWQLACLVCKTLWNFSENITNASSCFGNEDTNTLLLLLSSFLDEELALDGSFDPDLKNYHKLHWETEFKPVAQQLLNRIQRHHTFLEPLPIPSF

SEQ ID NO: 222970 - protein, 867 aa, Artificial Sequence
  derived and/or modified sequence
MLSPNDKMLGKLDPFYQPSVSKQKTSAEIISEARNALRTVRTQRPFTPQEAQRKLFGPASSRTSENRPPSSFSLHASSFESSDSRPISGTRLSPLELKPKVPASPTREEDSCFSFPKPPVDPAKIRRVSNARARLFRAASQRALLPDRSLPPSDSKKTVESKETVMMGDSMVKINGIYLTKSNAICHLKSHPLQLTDDGGFSEIKEQEMFKGTTSLPSHLKNGGDQGKRHARASSCPSSSDLSRLQTKAVPKADLQEEDAEIEVDEVFWNTRIVPILRELEKEENIETVCAACTQLHHALEEGNMLGNKFKGRSILLKTLCKLVDVGSDSLSLKLAKIILALKVSRKNLLNVCKLIFKISRNEKNDSLIQNDSILESLLEVLRSEDLQTNMEAFLYCMGSIKFISGNLGFLNEMISKGAVEILINLIKQINENIKKCGTFLPNSGHLLVQVTATLRNLVDSSLVRSKFLNISALPQLCTAMEQYKGDKDVCTNIARIFSKLTSYRDCCTALASYSRCYALFLNLINKYQKKQDLVVRVVFILGNLTAKNNQAREQFSKEKGSIQTLLSLFQTFHQLDLHSQKPVGQRGEQHRAQRPPSEAEDVLIKLTRVLANIAIHPGVGPVLAANPGIVGLLLTTLEYKSLDDCEELVINATATINNLSYYQVKNSIIQDKKLYIAELLLKLLVSNNMDGILEAVRVFGNLSQDHDVCDFIVQNNVHRFMMALLDAQHQDICFSACGVLLNLTVDKDKRVILKEGGGIKKLVDCLRDLGPTDWQLACLVCKTLWNFSENITNASSCFGNEDTNTLLLLLSSFLDEELALDGSFDPDLKNYHKLHWETEFKPVAQQLLNRIQRHHTFLEPLPIPSF

SEQ ID NO: 222971 - DNA, 2109 bp, Artificial Sequence
  derived and/or modified sequence
atgatgggcgacagcatggtgaagatcaacggcatctacctgaccaagagcaacgccatctgccacctgaagagccaccccctgcagctgaccgacgacggcggcttcagcgagatcaaggagcaggagatgttcaagggcaccaccagcctgcccagccacctgaagaacggcggcgaccagggcaagagacacgccagagccagcagctgccccagcagcagcgacctgagcagactgcagaccaaggccgtgcccaaggccgacctgcaggaggaggacgccgagatcgaggtggacgaggtgttctggaacaccagaatcgtgcccatcctgagagagctggagaaggaggagaacatcgagaccgtgtgcgccgcctgcacccagctgcaccacgccctggaggagggcaacatgctgggcaacaagttcaagggcagaagcatcctgctgaagaccctgtgcaagctggtggacgtgggcagcgacagcctgagcctgaagctggccaagatcatcctggccctgaaggtgagcagaaagaacctgctgaacgtgtgcaagctgatcttcaagatcagcagaaacgagaagaacgacagcctgatccagaacgacagcatcctggagagcctgctggaggtgctgagaagcgaggacctgcagaccaacatggaggccttcctgtactgcatgggcagcatcaagttcatcagcggcaacctgggcttcctgaacgagatgatcagcaagggcgccgtggagatcctgatcaacctgatcaagcagatcaacgagaacatcaagaagtgcggcaccttcctgcccaacagcggccacctgctggtgcaggtgaccgccaccctgagaaacctggtggacagcagcctggtgagaagcaagttcctgaacatcagcgccctgccccagctgtgcaccgccatggagcagtacaagggcgacaaggacgtgtgcaccaacatcgccagaatcttcagcaagctgaccagctacagagactgctgcaccgccctggccagctacagcagatgctacgccctgttcctgaacctgatcaacaagtaccagaagaagcaggacctggtggtgagagtggtgttcatcctgggcaacctgaccgccaagaacaaccaggccagagagcagttcagcaaggagaagggcagcatccagaccctgctgagcctgttccagaccttccaccagctggacctgcacagccagaagcccgtgggccagagaggcgagcagcacagagcccagagaccccccagcgaggccgaggacgtgctgatcaagctgaccagagtgctggccaacatcgccatccaccccggcgtgggccccgtgctggccgccaaccccggcatcgtgggcctgctgctgaccaccctggagtacaagagcctggacgactgcgaggagctggtgatcaacgccaccgccaccatcaacaacctgagctactaccaggtgaagaacagcatcatccaggacaagaagctgtacatcgccgagctgctgctgaagctgctggtgagcaacaacatggacggcatcctggaggccgtgagagtgttcggcaacctgagccaggaccacgacgtgtgcgacttcatcgtgcagaacaacgtgcacagattcatgatggccctgctggacgcccagcaccaggacatctgcttcagcgcctgcggcgtgctgctgaacctgaccgtggacaaggacaagagagtgatcctgaaggagggcggcggcatcaagaagctggtggactgcctgagagacctgggccccaccgactggcagctggcctgcctggtgtgcaagaccctgtggaacttcagcgagaacatcaccaacgccagcagctgcttcggcaacgaggacaccaacaccctgctgctgctgctgagcagcttcctggacgaggagctggccctggacggcagcttcgaccccgacctgaagaactaccacaagctgcactgggagaccgagttcaagcccgtggcccagcagctgctgaacagaatccagagacaccacaccttcctggagcccctgcccatccccagcttctag

SEQ ID NO: 222972 - DNA, 2604 bp, Artificial Sequence
  derived and/or modified sequence
atgctgagccccaacgacaagatgctgggcaagctggaccccttctaccagcccagcgtgagcaagcagaagaccagcgccgagatcatcagcgaggccagaaacgccctgagaaccgtgagaacccagagacccttcaccccccaggaggcccagagaaagctgttcggccccgccagcagcagaaccagcgagaacagaccccccagcagcttcagcctgcacgccagcagcttcgagagcagcgacagcagacccatcagcggcaccagactgagccccctggagctgaagcccaaggtgcccgccagccccaccagagaggaggacagctgcttcagcttccccaagccccccgtggaccccgccaagatcagaagagtgagcaacgccagagccagactgttcagagccgccagccagagagccctgctgcccgacagaagcctgccccccagcgacagcaagaagaccgtggagagcaaggagaccgtgatgatgggcgacagcatggtgaagatcaacggcatctacctgaccaagagcaacgccatctgccacctgaagagccaccccctgcagctgaccgacgacggcggcttcagcgagatcaaggagcaggagatgttcaagggcaccaccagcctgcccagccacctgaagaacggcggcgaccagggcaagagacacgccagagccagcagctgccccagcagcagcgacctgagcagactgcagaccaaggccgtgcccaaggccgacctgcaggaggaggacgccgagatcgaggtggacgaggtgttctggaacaccagaatcgtgcccatcctgagagagctggagaaggaggagaacatcgagaccgtgtgcgccgcctgcacccagctgcaccacgccctggaggagggcaacatgctgggcaacaagttcaagggcagaagcatcctgctgaagaccctgtgcaagctggtggacgtgggcagcgacagcctgagcctgaagctggccaagatcatcctggccctgaaggtgagcagaaagaacctgctgaacgtgtgcaagctgatcttcaagatcagcagaaacgagaagaacgacagcctgatccagaacgacagcatcctggagagcctgctggaggtgctgagaagcgaggacctgcagaccaacatggaggccttcctgtactgcatgggcagcatcaagttcatcagcggcaacctgggcttcctgaacgagatgatcagcaagggcgccgtggagatcctgatcaacctgatcaagcagatcaacgagaacatcaagaagtgcggcaccttcctgcccaacagcggccacctgctggtgcaggtgaccgccaccctgagaaacctggtggacagcagcctggtgagaagcaagttcctgaacatcagcgccctgccccagctgtgcaccgccatggagcagtacaagggcgacaaggacgtgtgcaccaacatcgccagaatcttcagcaagctgaccagctacagagactgctgcaccgccctggccagctacagcagatgctacgccctgttcctgaacctgatcaacaagtaccagaagaagcaggacctggtggtgagagtggtgttcatcctgggcaacctgaccgccaagaacaaccaggccagagagcagttcagcaaggagaagggcagcatccagaccctgctgagcctgttccagaccttccaccagctggacctgcacagccagaagcccgtgggccagagaggcgagcagcacagagcccagagaccccccagcgaggccgaggacgtgctgatcaagctgaccagagtgctggccaacatcgccatccaccccggcgtgggccccgtgctggccgccaaccccggcatcgtgggcctgctgctgaccaccctggagtacaagagcctggacgactgcgaggagctggtgatcaacgccaccgccaccatcaacaacctgagctactaccaggtgaagaacagcatcatccaggacaagaagctgtacatcgccgagctgctgctgaagctgctggtgagcaacaacatggacggcatcctggaggccgtgagagtgttcggcaacctgagccaggaccacgacgtgtgcgacttcatcgtgcagaacaacgtgcacagattcatgatggccctgctggacgcccagcaccaggacatctgcttcagcgcctgcggcgtgctgctgaacctgaccgtggacaaggacaagagagtgatcctgaaggagggcggcggcatcaagaagctggtggactgcctgagagacctgggccccaccgactggcagctggcctgcctggtgtgcaagaccctgtggaacttcagcgagaacatcaccaacgccagcagctgcttcggcaacgaggacaccaacaccctgctgctgctgctgagcagcttcctggacgaggagctggccctggacggcagcttcgaccccgacctgaagaactaccacaagctgcactgggagaccgagttcaagcccgtggcccagcagctgctgaacagaatccagagacaccacaccttcctggagcccctgcccatccccagcttctag

SEQ ID NO: 222973 - DNA, 2109 bp, Artificial Sequence
  derived and/or modified sequence
atgatgggcgattccatggtaaagatcaacgggatctatctcaccaagtccaacgcaatatgtcatctgaaaagccatcctctgcagcttaccgacgacggcggcttttctgagataaaggaacaagaaatgtttaagggaactacttctctgccctcacacttgaaaaatggcggggaccagggcaagagacacgcgcgcgcatctagctgcccatcgtccagcgacttgtcaaggctgcagacgaaggctgtccctaaggcagacctgcaagaggaggacgccgaaattgaagtcgacgaagtattttggaacactcgaatcgtgccaatcctcagagaactggaaaaggaagaaaacattgaaaccgtgtgcgcggcctgcacccagcttcaccacgctttggaagagggtaatatgttgggcaataaattcaagggtagatctatactcttgaaaacgctttgcaaactggtagacgtgggcagtgatagtctgagcttgaaactggctaagatcatcctggcattaaaggtgtccagaaaaaacttactgaacgtgtgcaaactgattttcaagattagtcgaaacgagaagaacgacagtcttatccagaacgactccatcctggagtctttgctcgaggtactccgcagtgaagaccttcagacaaacatggaagctttcctctattgcatgggctctatcaagtttatcagcggaaatctcgggttcctcaacgaaatgattagtaaaggagctgtggagattcttatcaacctcatcaagcagatcaacgagaatatcaagaaatgcggcacttttctgccgaatagcggacatctgcttgtacaggtgacggctacgctgagaaacctggtagatagcagtttagttcgaagtaaatttctgaatatcagtgcactgccccagctttgtaccgcaatggaacagtataagggggacaaagacgtctgcaccaacattgcccggattttctcaaaactgaccagttatcgggactgctgcacagcgctcgcatcgtatagcagatgctatgccctgtttcttaacctaatcaataagtaccagaagaaacaggatcttgtcgttagagttgtctttatcctgggcaacctaacagcaaaaaataatcaggcccgcgaacagtttagtaaggagaagggttcaatccagactctcctgtctcttttccagacgttccatcaattggatcttcacagtcagaaacccgttggacagaggggggaacagcaccgcgcacagcggccaccttcggaggcagaggatgtgctgatcaaacttaccagggtactggccaacatcgcaattcacccaggcgtcggacccgtcctggcggcgaatccaggaatcgtcggactactgctgacaaccctcgaatacaaatccctggacgattgtgaggagctggtgataaacgctactgctactatcaataatttatcttactaccaggttaaaaactctatcatacaggataagaagctttatatcgctgagctcctgcttaagctgctggtgagcaataacatggacggaatcctggaagcggttcgggttttcgggaatctgtctcaggatcacgatgtatgcgacttcatagttcagaataatgtgcatcggttcatgatggctctcctggatgcccaacaccaggatatctgcttctctgcttgcggcgtcctcctgaatttaaccgtcgacaaagataaacgagtgatcttgaaagagggcggcggaatcaagaagctggtcgactgtcttcgggaccttggcccaaccgactggcagttggcctgtttggtctgcaaaaccctctggaatttcagtgagaacatcaccaatgccagttcgtgttttggaaacgaagatactaatacgcttctcctgcttctgagttcattcctggacgaagagctggccttggatggatcttttgaccctgacttaaagaactaccataagctgcattgggagacagaattcaaacccgtggcacaacagttgctgaacaggatccaacgccaccacacattcctggaacctctacccatcccttccttttag

SEQ ID NO: 222974 - DNA, 2604 bp, Artificial Sequence
  derived and/or modified sequence
atgctgtccccaaacgataaaatgctcggcaagctcgatcccttctaccaaccaagcgtcagtaagcagaagaccagcgccgaaattatttccgaggctcgcaacgccctgaggactgtcaggacccagcggccttttacaccccaggaggcacagcgtaaactattcggcccagcatctagcagaacttctgagaaccgacctccctcctctttcagtcttcatgcctcttcattcgagtcaagcgactccagaccgataagtggaactagactcagccccctcgagctcaagcccaaggtacctgcgagtccaacaagggaggaagattcctgcttcagcttccccaaaccccccgtggacccagccaagattcgccgagtgtcaaacgcgcgggcccgtcttttccgagccgcctcacagagggcacttttgcctgacaggtcactgcctccctccgactccaaaaagacagtggagtctaaggagacagtaatgatgggcgatagtatggtaaaaataaatggtatctacctgacaaaatcaaatgccatttgtcaccttaaatctcatcctttgcaactgacagatgacggtggcttctctgaaataaaggagcaggaaatgtttaagggaacaacctcacttccctctcacttaaagaacgggggagaccagggaaaaaggcatgcccgggccagctcatgcccttctagtagcgatctgtccagactacagactaaggctgtgccgaaagctgacctgcaggaagaagacgccgagatcgaagttgacgaagttttctggaacacacgtatcgtccccatactgcgggagctggaaaaggaagagaatatagaaacagtttgtgcagcttgcacccagctgcatcatgcgctcgaagaaggtaatatgctgggtaataaattcaaggggcgcagcatcctgctgaaaactctgtgcaaactagtggacgtggggtcggattcgttgtccttgaagctggccaagatcatcctggcattgaaggtgtctcgaaaaaaccttctgaatgtctgtaagctgatatttaaaatatcacgtaacgagaagaatgattcgctaatccagaatgacagcattctcgagtcgctcctggaagtcctgcggagcgaggatttacaaacaaatatggaggcatttttatactgcatgggatctataaagtttattagcggcaacttaggatttctcaatgagatgatctctaagggggccgtggagattctcattaacctgatcaagcaaatcaatgaaaatatcaaaaagtgcggcacgtttctgcctaactctgggcatctgctggtacaggtgactgctactctgcggaatctggtagattcttccctggtgcggtcaaaattcctgaatattagcgccctgccacagctgtgcacagctatggagcaatacaaaggggataaagatgtatgtacgaatatcgcacggatattcagtaaactcacatcttatagggattgctgcacggccctagcctcttactccagatgctacgcattattcctaaatcttatcaacaagtaccagaagaaacaggaccttgtggtccgcgtggtgtttattctgggaaaccttacagctaagaataatcaggcccgggagcaattctcgaaggagaagggctccatccagacgcttctctcactcttccaaactttccaccagctggatttgcacagccagaaacctgtgggccagaggggagagcagcacagagcacagcgcccgccatctgaagccgaggacgtgctgatcaagctaacacgcgtcttggctaacatagctattcatcccggcgtcggacccgttctagccgcaaacccaggaattgtaggacttctattaaccaccctcgaatacaagagcctcgatgattgcgaggaattggtgataaacgccactgctaccatcaacaatctgagctactatcaggtcaagaactcgattatccaagacaaaaaactgtatatcgccgaactcctgctgaagctgctagtgtccaataacatggatggtatcctggaggctgtgagagtttttggcaatttgtcccaggaccacgacgtctgtgatttcattgtgcaaaataatgttcatagattcatgatggcgctgttggatgcacaacatcaggatatctgcttttcagcctgtggtgttctcctgaatctgactgtggataaggacaaacgcgtcatattaaaagaaggcggcggaataaagaaactggtggactgcttaagggatcttgggcctacggattggcagctggcgtgcctggtttgtaagaccctgtggaatttcagtgaaaatattacgaacgcaagttcttgctttgggaatgaagacacaaacactctcttactgctgctctcctcctttctggacgaagaactggccctggacgggagctttgatccggatctcaaaaactatcataagcttcactgggaaaccgagtttaagccggttgcccagcaacttctgaacagaattcagaggcaccatacttttttggagcccctccccataccgtctttttag

SEQ ID NO: 222975 - DNA, 2109 bp, Artificial Sequence
  derived and/or modified sequence
atgatgggagacagcatggtgaagatcaatggcatctacctgaccaagagcaatgccatctgccacctgaagagccaccccctgcagctgacagatgatggcggcttcagcgagatcaaggagcaggagatgttcaagggcaccaccagcctgcccagccacctgaagaatggaggagaccagggcaagagacatgcccgggccagcagctgccccagcagcagtgacctgagccggctgcagaccaaggctgtgcccaaggctgacctgcaggaggaggatgctgagattgaggtggatgaggtgttctggaacacccgcatcgtgcccatcctgcgggagctggagaaggaggagaacattgaaacagtgtgtgccgcctgcacccagctgcaccacgccctggaggagggcaacatgctgggcaacaagttcaagggccgcagcatcctgctgaagaccctgtgcaagctggtggatgtgggcagtgacagcctgagcctgaagctggccaagatcatcctggccctgaaggtgtccaggaagaacctgctgaatgtgtgcaagctgatcttcaagatcagcagaaatgagaagaatgacagcctcatccagaatgacagcatcctggagagcctgctggaggtgctgcggtctgaggacctgcagaccaacatggaggccttcctgtactgcatgggcagcatcaagttcatcagcggcaacctgggcttcctgaatgagatgatcagcaaaggagctgtggagatcctgatcaacctgatcaagcagatcaatgaaaacatcaagaagtgtggcaccttcctgcccaacagcggccacctgctggtgcaggtgacagccaccctgaggaacctggtggacagcagcctggtgcgcagcaagttcctgaacatcagcgccctgccccagctgtgcacagccatggagcagtacaagggggacaaggatgtgtgcaccaacatcgcccgcatcttcagcaagctgaccagctacagagactgctgcacagccctggccagctacagccgctgctacgccctcttcctgaacctgatcaacaagtaccagaagaagcaggacctggtggtgcgggtggtgttcatcctgggcaacctgacagccaagaacaaccaggcccgggagcagttcagcaaggagaagggcagcatccagaccctgctgagcctcttccagaccttccaccagctggacctgcacagccagaagcctgtgggccagagaggagagcagcaccgggcccagaggcctccttctgaggccgaggatgtgctgatcaagctgaccagggtgctggccaacatcgccatccaccctggggtgggccctgtgctggccgccaaccctggcatcgtgggcctgctgctgaccaccctggagtacaagagcctggatgactgtgaggagctggtgatcaatgccacagccaccatcaacaacctgagctactaccaggtgaagaacagcatcatccaggacaagaagctgtacatcgccgagctgctgctgaagctgctggtgagcaacaacatggatggcatcctggaggccgtgcgggtgtttggaaacctgagccaggaccatgatgtgtgtgacttcatcgtgcagaacaacgtgcaccgcttcatgatggccctgctggatgcccagcaccaggacatctgcttcagcgcctgtggggtgctgctgaacctgactgtggacaaggacaagagggtcatcctgaaggagggcggcggcatcaagaagctggtggactgcctgcgggacctgggccccacagactggcagctggcctgcctggtgtgcaagaccctgtggaacttcagcgagaacatcaccaatgccagcagctgctttggaaatgaagacaccaacaccctgctgctgctgctgagcagcttcctggatgaggagctggccctggatggcagctttgatcctgacctgaagaactaccacaagctgcactgggagacagagttcaagcctgtggcccagcagctgctgaaccgcatccagaggcaccacaccttcctggagcccctgcccatccccagcttctag

SEQ ID NO: 222976 - DNA, 2604 bp, Artificial Sequence
  derived and/or modified sequence
atgctgagccccaatgacaagatgctgggcaagctggaccccttctaccagcccagcgtgtccaagcagaagaccagcgctgagatcatcagcgaggccagaaatgccctgaggacagtgaggacccagaggcccttcaccccccaggaggcccagaggaagctgtttggacctgccagcagcaggaccagtgaaaatcggccccccagcagcttcagcctgcacgccagcagctttgagagcagtgacagccggcccatcagcggcacccggctgagccccctggagctgaagcccaaggtgcctgccagccccacccgggaggaggacagctgcttctccttccccaagccccctgtggaccctgccaagatccggcgggtgtccaatgcccgggcccggctcttccgggccgccagccagagggccctgctgcctgacaggagcctgcccccaagtgacagcaagaagacagtggagagcaaggagaccgtgatgatgggagacagcatggtgaagatcaatggcatctacctgaccaagagcaatgccatctgccacctgaagagccaccccctgcagctgacagatgatggcggcttcagcgagatcaaggagcaggagatgttcaagggcaccaccagcctgcccagccacctgaagaatggaggagaccagggcaagagacatgcccgggccagcagctgccccagcagcagtgacctgagccggctgcagaccaaggctgtgcccaaggctgacctgcaggaggaggatgctgagattgaggtggatgaggtgttctggaacaccagaattgtgcccatcctgcgggagctggagaaggaggagaacatcgagaccgtgtgtgccgcctgcacccagctgcaccacgccctggaggagggcaacatgctgggcaacaagttcaagggccgcagcatcctgctgaagaccctgtgcaagctggtggatgtgggcagtgacagcctgagcctgaagctggccaagatcatcctggccctgaaggtgtccaggaagaacctgctgaatgtgtgcaagctgatcttcaagatcagcagaaatgagaagaatgacagcctcatccagaatgacagcatcctggagagcctgctggaggtgctgcggtctgaggacctgcagaccaacatggaggccttcctgtactgcatgggcagcatcaagttcatcagcggcaacctgggcttcctgaatgagatgatcagcaaaggagctgtggagatcctgatcaacctgatcaagcagatcaatgaaaacatcaagaagtgtggcaccttcctgcccaacagcggccacctgctggtgcaggtgacagccaccctgaggaacctggtggacagcagcctggtgcgcagcaagttcctgaacatcagcgccctgccccagctgtgcacagccatggagcagtacaagggggacaaggatgtgtgcaccaacatcgcccgcatcttcagcaagctgaccagctacagagactgctgcacagccctggccagctacagccgctgctacgccctcttcctgaacctgatcaacaagtaccagaagaagcaggacctggtggtgcgggtggtgttcatcctgggcaacctgacagccaagaacaaccaggcccgggagcagttcagcaaggagaagggcagcatccagaccctgctgagcctcttccagaccttccaccagctggacctgcacagccagaagcctgtgggccagagaggagagcagcaccgggcccagaggcctcccagcgaggctgaagatgtgctgatcaagctgaccagggtgctggccaacatcgccatccaccctggggtgggccctgtgctggccgccaaccctggcatcgtgggcctgctgctgaccaccctggagtacaagagcctggatgactgtgaggagctggtgatcaatgccacagccaccatcaacaacctgagctactaccaggtgaagaacagcatcatccaggacaagaagctgtacatcgccgagctgctgctgaagctgctggtgagcaacaacatggatggcatcctggaggccgtgcgggtgtttggaaacctgagccaggaccatgatgtgtgtgacttcatcgtgcagaacaacgtgcaccgcttcatgatggccctgctggatgcccagcaccaggacatctgcttcagcgcctgtggggtgctgctgaacctgactgtggacaaggacaagagggtcatcctgaaggagggcggcggcatcaagaagctggtggactgcctgcgggacctgggccccacagactggcagctggcctgcctggtgtgcaagaccctgtggaacttcagcgagaacatcaccaatgccagcagctgctttggaaatgaagacaccaacaccctgctgctgctgctgagcagcttcctggatgaggagctggccctggatggcagctttgatcctgacctgaagaactaccacaagctgcactgggagacagagttcaagcctgtggcccagcagctgctgaaccgcatccagaggcaccacaccttcctggagcccctgcccatccccagcttctag

SEQ ID NO: 222977 - DNA, 2109 bp, Artificial Sequence
  derived and/or modified sequence
atgatgggcgacagcatggtgaagatcaacggcatctacctgaccaagtcaaacgccatctgccatttaaaatctcacccactgcagttgacagacgatgggggcttctctgagatcaaagaacaggagatgttcaaaggcaccacgagtttgccatcccacttgaagaatggtggggatcagggaaagcgccatgcaagagcttcttcgtgccctagtagttccgatctttctagattgcaaaccaaagccgtgccaaaagccgacctccaagaggaggatgcagagattgaagttgatgaggttttctggaacaccaggattgtgccgattctgagagaattggaaaaagaggagaatattgagaccgtttgcgcagcctgtactcagctgcatcacgccctcgaagagggcaatatgctcggaaataagttcaaaggtcgcagtatcctcctcaagactctttgcaaacttgtggatgtgggctcggatagcttgtctctgaaactagctaaaattatactcgcacttaaggtatcacggaagaacctgctgaacgtatgcaaacttatctttaaaatctcccggaacgaaaagaacgacagtctcatccaaaatgattccatcttggagtcactattggaggtgcttcggtccgaagacctacagactaatatggaggccttcctgtattgtatgggatccattaagtttatcagtggcaatctcggatttctgaatgagatgatttctaagggggctgtggaaattctcatcaatttaatcaaacagatcaatgagaatatcaaaaaatgcggtacattcctgccaaacagcggacatcttctggtccaggtcactgccacgcttaggaacctagtggacagttccctggtgaggtctaagtttcttaacatcagcgcccttccccagctgtgcactgccatggagcagtataaaggcgacaaggacgtgtgcacaaacattgccaggatcttctccaagcttacctcttatagggactgttgcacagctctcgctagttacagcaggtgctacgctctatttctgaacctaatcaataagtaccaaaagaaacaggacctcgttgtgcgtgtggtttttatattgggcaatcttacagcaaagaataatcaagcccgtgagcaattttccaaagagaaaggctctatccagactctgctgtccttgtttcagacctttcaccagctggacttgcatagccagaagcctgtgggacagaggggagaacagcatagagcccagaggcccccttctgaggccgaggacgtacttattaagctgacccgcgtgctggccaatatcgctatccaccctggagtcggcccagtgttggccgcaaacccaggcatcgtgggactacttctcactaccttggagtataagtccctggacgactgcgaggaactcgtgatcaatgccacagccacaattaacaacctatcctactaccaagtgaagaattccattatccaagataagaagctgtacatcgcggaattgttgctgaaactacttgtcagcaataatatggacggcattctcgaagcggttcgcgtgtttgggaatttgagtcaggaccacgacgtgtgcgactttatcgtccagaacaatgtccatagattcatgatggccctgctggatgcacagcatcaggacatatgctttagtgcctgtggggtactccttaacctaacggtcgacaaagacaaacgtgttatcctgaaagagggaggtggcatcaaaaagcttgtggattgtctacgagatctggggccaactgactggcagcttgcgtgtctagtttgcaagactctctggaacttttctgagaatattaccaacgcgagcagttgttttggcaatgaagacacaaataccttactattgctgctcagtagttttctcgacgaggaactggcacttgacggctcatttgacccagacctcaagaactaccacaagctgcactgggagactgagtttaaaccagtcgcccagcagctgctgaataggatccagcggcatcacactttcctggagcccctgcctattcctagtttctag

SEQ ID NO: 222978 - DNA, 2604 bp, Artificial Sequence
  derived and/or modified sequence
atgctgagccccaacgacaagatgctgggcaagctggaccccttctatcagccttctgtttctaaacagaagacttccgctgagatcatctcagaggcccgtaacgccctgcgaacagtaaggacccagcgtccatttactccacaagaggctcaaagaaagcttttcggccctgcgagttccaggacatcagagaataggccaccttcctctttttctctacatgcttcaagttttgaatcatctgattcgcgtccaatttcagggacaagactgagcccactagagcttaaacctaaagtgccggcgtctccaaccagagaagaggattcctgcttcagtttccccaaacctcctgtggacccggcaaaaatccgtagggtgagcaacgctcgtgcccggctgttccgagcagcgtctcagcgagcccttttgcctgaccggagtctgcccccctcagatagcaaaaagacagtggaatctaaagagacagtgatgatgggtgactcgatggtgaaaataaatggcatctatctgaccaaatctaacgccatttgtcacctgaaaagccaccctttgcagttgaccgatgacggaggtttttcagagatcaaggaacaggagatgttcaaggggacaacttcccttccgtctcacctgaagaacggaggcgatcaggggaagcgtcacgccagggccagcagttgcccatcctccagtgacctgtcacgcctccagactaaagccgtccccaaagccgacctgcaggaagaggatgctgagatcgaggtggatgaagttttttggaataccagaatcgtgccgatcttacgcgaactggagaaggaggagaatatagagaccgtgtgtgctgcctgcacccagttacaccatgcattggaggagggcaatatgttagggaacaagtttaaggggagaagtattctgctgaagaccttgtgtaaattagtggacgttggctcagacagtctgagtctcaagctggcgaagatcattcttgctctgaaggtgagccgcaagaacctgctcaacgtttgcaagcttatattcaaaatctccaggaacgagaaaaatgacagtctgattcagaacgattccatcctggaaagccttctcgaagtgcttagaagcgaggatctccagaccaacatggaagctttcttgtattgcatgggcagtataaaattcatctccggaaatcttggctttcttaatgagatgatttcaaaaggcgcagtcgaaatattaattaatcttataaaacaaatcaatgaaaatatcaagaaatgtgggacatttctaccgaacagcggtcacctactggtgcaggtgacagccacactgcgcaatctagtggattccagcttggttcgaagcaagttcctaaatattagcgcactaccacagctgtgtacagcaatggaacagtacaagggagataaggatgtctgcactaacatcgcaagaattttttcaaaactgaccagttaccgcgactgctgcactgcattggcatcatattcccgttgctacgccctgttcttaaatctgattaataaataccagaagaagcaagatctggtggttcgtgtagtatttatactgggcaacttaactgccaagaacaaccaggctagggaacaatttagtaaagaaaaggggagcatccaaaccctccttagtctgtttcagacatttcaccagctcgacttacactcccagaaaccagtcggccagcgcggcgaacagcacagagcccagcgtcctcccagtgaagccgaggatgttttaataaaacttacacgggtgctcgctaatattgctatccacccaggcgtgggacccgtcttggccgccaatccaggcatagtgggcctgctgttgactactctggaatacaagagcctggacgattgcgaagagttggtaatcaacgccaccgctaccataaacaacctgtcgtattaccaggtgaaaaactcaatcattcaggacaagaaactatacattgcagagctgttgctgaaactgctcgtctccaacaatatggacggaatcctggaagccgtgcgggtgttcggaaatctgtcacaagatcacgacgtatgtgattttatagtgcagaacaacgtgcacaggttcatgatggctctgctggacgcccagcatcaggacatctgcttttctgcctgcggcgtgctgctcaacttgaccgttgataaagataagcgcgtgatattgaaagagggcggcggaatcaaaaaacttgtggattgcctgagggatctaggaccaacggattggcagttggcatgtctcgtgtgtaagaccctttggaattttagtgagaacattactaacgccagtagctgtttcggcaatgaggacaccaataccctcttattactgctgagttcctttcttgatgaggaactcgcccttgacggaagtttcgatccagatcttaaaaactatcacaagctgcactgggagaccgagttcaaaccagttgcacagcagctgttaaacaggatacagagacatcacacattcctggagcctttgccaattccttcgttttag

SEQ ID NO: 222979 - DNA, 2109 bp, Artificial Sequence
  derived and/or modified sequence
atgatgggcgacagtatggttaagattaatggcatctaccttacaaagagtaatgcaatttgtcacctaaagagccaccccctgcagctcaccgacgacgggggtttctctgaaattaaggaacaggagatgttcaaaggaaccactagtctcccatctcatctgaagaatgggggagaccagggaaagcgacatgcaagggcttcttcatgcccatcctcctcagatctcagtagactgcaaaccaaagctgtacccaaggcggatttacaggaagaagatgccgaaattgaggttgacgaggtcttttggaacacaagaattgttcccatactcagggaattagagaaagaggagaacatcgaaactgtctgtgccgcttgcacacaactccaccacgcgttggaagagggcaacatgctcggaaacaagttcaagggcagatcgattttattaaaaactctgtgcaagctggtggatgtcggatctgactcgctctctctcaagctcgccaagattatcctcgcgctgaaagtgtcgagaaaaaatcttctgaacgtctgcaaactaatcttcaagatcagtcgaaacgagaagaacgattctctgatccaaaatgactcaatcctggagtcgctgctcgaggttcttcgctctgaagacctgcaaacaaatatggaagcttttctctactgcatgggatcgatcaagtttatatcaggcaatcttggcttcctcaacgaaatgattagcaaaggcgctgttgagatccttattaatctaatcaagcagataaacgagaatattaaaaagtgcggcacattcctgcctaatagcggccacctactggtccaggttactgccaccctgaggaatctggtcgatagcagcttggtacgaagcaaatttctgaacatcagcgccttgccacagctgtgtacagccatggaacaatataaaggtgacaaggatgtttgtacaaacattgccaggatatttagtaaactcacaagctatcgggactgctgtactgctctcgcttcctatagcaggtgctatgccctgtttctgaatcttatcaataagtatcagaagaagcaggacctggtcgtacgggtggtgttcattctagggaatcttaccgcgaagaacaaccaggccagggagcagttttcaaaagagaagggctccatccaaacactattaagcctcttccagacatttcatcagctcgacttgcatagccagaagcccgttggccagaggggcgaacaacatagagcccaaaggccgcctagtgaagcagaggacgtactgatcaaactgactcgggtgttggcaaacatagccattcatccaggggtgggccctgtgctggccgcaaatccaggcattgtgggactgctcctgaccacattggagtataagtctctcgatgattgcgaagaattggtaataaatgcgactgcaacaattaacaacctgagctattatcaagttaagaatagcattatccaagataaaaaactctacattgccgagttgctgctgaaacttctggtgtccaacaacatggatggaatattagaggctgtccgtgtgtttggaaatttatcacaggatcacgatgtctgtgattttattgtgcaaaacaatgtgcaccggttcatgatggcattactggacgcccaacatcaggatatatgtttctcggcctgcggagtgctcctgaacctgaccgtcgataaggacaaacgtgtgattctcaaagagggcggaggcatcaagaaactggtggattgcctccgtgatttagggccaaccgattggcaattggcctgtttagtttgtaagaccttgtggaacttctctgaaaacattaccaacgcatcgagctgtttcggcaacgaagataccaacacattgctgttgctgctgtctagtttcctcgacgaagagcttgcactggatgggtctttcgatccagacctcaagaattatcataagttgcactgggaaactgagtttaagccggtggcacaacagctgctcaatagaatacagcgtcaccacacatttcttgagccgctgcctatacccagcttctag

SEQ ID NO: 222980 - DNA, 2604 bp, Artificial Sequence
  derived and/or modified sequence
atgctttctcctaacgacaagatgttggggaaattagatcctttctaccagcccagcgtgtccaaacagaaaaccagtgctgagatcatctccgaggccaggaacgcactgcggaccgtgcgaacacagcggccatttactcctcaggaagcccagaggaagctgtttggccctgccagttctcggacctcagaaaaccgcccacccagtagtttcagccttcatgcatcatctttcgagtcttccgatagtagacccatctccggtacccgcctgtccccattggagctgaagccaaaggtccccgcttctcctaccagggaggaggattcatgtttctcatttcctaagcctccggttgatcctgcgaagattcgtagagtcagcaatgctcgggcacgactgttccgcgctgcctcacaaagggctttactcccggaccggagccttcccccaagtgactctaaaaagactgtggagtccaaggagactgttatgatgggtgattccatggtcaagataaatggaatctatctgactaagtcgaacgccatctgccatctgaagagccatccactgcagctgactgacgacgggggattctcggagatcaaggagcaagagatgttcaagggcactacatcactgcccagtcacttaaagaacgggggagaccagggtaaacgacatgctcgggcatcatcatgtccgtcgtctagcgacctttcaaggctccagaccaaagctgtccccaaggcggatctccaagaagaggatgctgaaatagaagtggatgaggtgttctggaacacacgaattgtcccaatcctcagagagttagagaaagaagaaaatattgaaactgtttgcgcagcatgtacacaactgcaccacgcgctggaggaggggaatatgctcggaaacaaattcaaggggaggagcattcttcttaaaaccctgtgcaagttggttgacgtagggagcgactccttatcgctgaaattagcgaaaataatcctggcccttaaggtttcaaggaaaaacctgttgaatgtgtgtaaacttatttttaagattagccggaatgagaagaatgacagtctgatacaaaacgacagcattttagagtccctgttggaagtcctccgcagcgaagatttgcaaacgaatatggaagctttcctgtactgtatgggttccatcaagttcattagcggcaacctcggcttcctgaacgagatgatctctaagggagctgtggaaattctgatcaacttgataaagcagatcaacgaaaatataaagaaatgtggcacatttctgccaaatagtgggcatctgctagtccaggtgaccgccacccttcgcaatttagtcgacagttccctggtgcggtcgaagttccttaacataagtgccctgcctcagttgtgcacagccatggaacagtataaaggtgacaaagatgtatgtactaacatagcacggatcttttcaaaactgacttcttacagagactgctgcaccgctcttgcttcctattcccgttgctacgctctctttctgaacttaattaacaagtatcagaagaagcaggatctggtggtgcgtgtagtcttcatcctcggcaacctcactgccaaaaataaccaggcacgggagcaattcagcaaagagaagggaagtatccaaacactgctcagcctgtttcagacctttcaccagcttgatttgcacagccaaaaacctgtcggccagagaggtgagcaacacagggcgcagagacctccatctgaagcggaggatgtgctaatcaagctgactagggttctggctaacattgccatacatcccggagtaggacccgtgttggccgcaaacccaggaattgttgggctgctcctgaccaccctggagtataaaagtctcgacgactgcgaagagttggtgatcaacgctaccgccacgataaacaatctgtcctactaccaggtgaaaaattcgatcatccaagacaaaaaactttacattgcggagctactgctaaagcttctggtctcaaataacatggacggcatcctggaagccgtccgtgtcttcggaaacctgagtcaggatcacgacgtttgtgatttcattgtccagaataatgtccatcgatttatgatggcactgctggacgcacaacatcaggacatttgcttttctgcctgtggcgtcctactcaacctcacagttgataaggacaaaagggtgatcctaaaggagggaggcggtatcaaaaaactggtcgattgcctcagggatttaggccctaccgattggcagcttgcctgcttagtgtgtaagacattatggaacttctctgaaaacatcaccaatgcatctagctgctttggcaatgaagacaccaacactttgctgcttttgttatccagcttcttggatgaagagctcgccctggacggtagcttcgatcctgacttaaagaactatcataagctgcactgggagaccgaattcaaaccagtcgcacagcagctgctaaacagaattcaacgacaccacaccttcctggaacctctgccaatcccttcattttag

SEQ ID NO: 222981 - DNA, 2973 bp, Artificial Sequence
  derived and/or modified sequence
aggcccagtggccgagcggcgtcgtggggttaccccgcccgcgccagcgctgcatccctggccgctacccggggagagccggaggatgaattgaacctcgcagccgctgctatctccagtgctcatcacagggtgtggtgtctatctgaagaatattttactttcaaaggaaagatgctgtctccaaatgataaaatgttaggaaaactggatccattttatcaaccttcagtgtccaagcagaagaccagtgcagaaatcataagtgaagcaagaaatgcattaagaacagttagaacccaaagaccatttacaccacaggaggctcaaagaaaactattcggacctgcatcctcaagaacatcagaaaatagacctccttcctccttcagaaaccgaaagttccagcatctcccaccagagaggaggattcctgcttttcctttcctaagcccccagtggaccctgcgaagattagaagagtaagcaacgccagggctcgcttattcagggctgcctcccagcgggcccttctgccggacagatcccttcctccctccgactcaaagaagacagtggaatccaaagaaacagttatgatgggggactctatggtgaaaataaatgggatttatttaacaaaatcaaatgctatttgccacttaaagagtcacccacttcagctaactgatgatggaggcttcagtgaaataaaggagcaagaaatgttcaaaggaacaacatctttaccatctcatctcaagaatggaggggaccaggggaagagacatgcgagggcctcatcatgccccagtagctcagacctgagcaggctgcaaaccaaagcagtcccaaaagctgacctgcaagaagaggacgcagaaatagaagtagacgaagtcttttggaatacaaggattgtaccgattttgcgtgaattagaaaaggaagaaaacattgaaacggtttgtgctgcttgcacacaacttcatcatgctttagaggaaggaaacatgcttggaaataaatttaagggaagaagtattctcctgaagaccctgtgtaaactagttgatgttggttcagactcgctcagccttaaacttgcaaaaataattctagcacttaaagtgagtagaaagaatcttcttaatgtctgcaaacttatatttaaaattagcaggaatgagaagaatgattctttgattcaaaatgacagcattctggaatcattattggaggtactaagaagtgaagacctgcaaactaacatggaagcttttttatactgtatggggtctataaagttcatttctggaaatctgggatttcttaatgaaatgatcagcaaaggtgctgtggaaatactgataaatttgataaaacaaataaatgagaacatcaagaaatgtggtacatttttgcctaattcgggccacttgctagtccaggtgactgctacattgagaaacttggttgattcatcattagtaagaagtaagttcctaaacatcagtgcccttccccagctctgcacggcaatggaacagtacaagggtgacaaggacgtctgtaccaatattgccagaatattcagcaaacttacttcttaccgtgactgctgcacagccttggccagctattccagatgttatgccttatttctgaatctaattaacaaataccagaagaagcaggatttagtcgtccgtgttgtttttattcttggcaacctgacggcaaaaaataaccaggctcgtgaacaattttccaaagagaaagggagcatccaaactctgctgtcattattccagacgttccatcagctggatctgcattcccagaagccggtgggccaacgaggcgagcagcacagggcgcagaggccgccgtcagaggcagaggacgtgctcatcaagctgactcgtgtgctggccaacattgccatccacccgggcgtgggcccggtgctggccgccaacccggggatagtgggcctgctcctgaccacgctggaatacaagtcacttgatgattgtgaggagctggtgatcaatgctacagcgacaatcaacaatttatcttactaccaagtgaagaattccataattcaagacaaaaagctatatattgctgaattgctcttaaagcttcttgtcagtaacaacatggatggaatcctggaggctgtgcgtgttttcggaaatctctcccaggaccatgatgtctgcgatttcattgtgcagaacaatgtccacaggttcatgatggcgctgctggatgctcagcatcaggatatctgcttttctgcctgtggtgttctcctcaatctcactgtggataaagacaagcgtgtcatcttgaaagaaggaggtggcattaaaaagttagtggactgtttaagagatttgggtcctactgattggcagctggcctgcttggtttgtaaaactttatggaacttcagtgaaaacatcactaatgcttcgtcatgttttggaaatgaagacaccaacacactcttactcttgctctcatcatttttagatgaagaactagcactggatggcagttttgatccagacctaaaaaactatcacaaactccattgggaaacagaattcaaacctgtggcacagcagcttctaaaccgaattcagagacatcacaccttcctggaacccctgcccattccctctttctaacatgatgcagattaacagtagaaacgagaactcacgtctccctcattcttaagaactggtaacaaacgtgaacatttttttcagcattaacaaatgtggaaagtttttcaagaactggttttagtgagtagctgaagtattttttaaaattaagcatttcttcttgttaggtattatggaaaaatgaatatacacattatatttcctgttgagagaaatgtaagatgaaaatatgtgcattttcaagtaaatgactttttcttctatt

SEQ ID NO: 222982 - DNA, 3241 bp, Artificial Sequence
  derived and/or modified sequence
agtggccgagcggcgtcgtggggttaccccgcccgcgccagcgctgcatccctggccgctacccggggagagccggaggatgaattgaacctcgcagccgctgctatctccagtgctcatcacagggtgtggtgtctatctgaagaatattttactttcaaaggaaagatgctgtctccaaatgataaaatgttaggaaaactggatccattttatcaaccttcagtgtccaagcagaagaccagtgcagaaatcataagtgaagcaagaaatgcattaagaacagttagaacccaaagaccatttacaccacaggaggctcaaagaaaactattcggacctgcatcctcaagaacatcagaaaatagacctccttcctccttcagcctccatgcatccagttttgagtcatctgattccaggcctatctctggcacacgtcttagtccactagagctgaaaccgaaagttccagcatctcccaccagagaggaggattcctgcttttcctttcctaagcccccagtggaccctgcgaagattagaagagtaagcaacgccagggctcgcttattcagggctgcctcccagcgggcccttctgccggacagatcccttcctccctccgactcaaagaagacagtggaatccaaagaaacagttatgatgggggactctatggtgaaaataaatgggatttatttaacaaaatcaaatgctatttgccacttaaagagtcacccacttcagctaactgatgatggaggcttcagtgaaataaaggagcaagaaatgttcaaaggaacaacatctttaccatctcatctcaagaatggaggggaccaggggaagagacatgcgagggcctcatcatgccccagtagctcagacctgagcaggctgcaaaccaaagcagtcccaaaagctgacctgcaagaagaggacgcagaaatagaagtagacgaagtcttttggaatacaaggattgtaccgattttgcgtgaattagaaaaggaagaaaacattgaaacggtttgtgctgcttgcacacaacttcatcatgctttagaggaaggaaacatgcttggaaataaatttaagggaagaagtattctcctgaagaccctgtgtaaactagttgatgttggttcagactcgctcagccttaaacttgcaaaaataattctagcacttaaagtgagtagaaagaatcttcttaatgtctgcaaacttatatttaaaattagcaggaatgagaagaatgattctttgattcaaaatgacagcattctggaatcattattggaggtactaagaagtgaagacctgcaaactaacatggaagcttttttatactgtatggggtctataaagttcatttctggaaatctgggatttcttaatgaaatgatcagcaaaggtgctgtggaaatactgataaatttgataaaacaaataaatgagaacatcaagaaatgtggtacatttttgcctaattcgggccacttgctagtccaggtgactgctacattgagaaacttggttgattcatcattagtaagaagtaagttcctaaacatcagtgcccttccccagctctgcacggcaatggaacagtacaagggtgacaaggacgtctgtaccaatattgccagaatattcagcaaacttacttcttaccgtgactgctgcacagccttggccagctattccagatgttatgccttatttctgaatctaattaacaaataccagaagaagcaggatttagtcgtccgtgttgtttttattcttggcaacctgacggcaaaaaataaccaggctcgtgaacaattttccaaagagaaagggagcatccaaactctgctgtcattattccagacgttccatcagctggatctgcattcccagaagccggtgggccaacgaggcgagcagcacagggcgcagaggccgccgtcagaggcagaggacgtgctcatcaagctgactcgtgtgctggccaacattgccatccacccgggcgtgggcccggtgctggccgccaacccggggatagtgggcctgctcctgaccacgctggaatacaagtcacttgatgattgtgaggagctggtgatcaatgctacagcgacaatcaacaatttatcttactaccaagtgaagaattccataattcaagacaaaaagctatatattgctgaattgctcttaaagcttcttgtcagtaacaacatggatggaatcctggaggctgtgcgtgttttcggaaatctctcccaggaccatgatgtctgcgatttcattgtgcagaacaatgtccacaggttcatgatggcgctgctggatgctcagcatcaggatatctgcttttctgcctgtggtgttctcctcaatctcactgtggataaagacaagcgtgtcatcttgaaagaaggaggtggcattaaaaagttagtggactgtttaagagatttgggtcctactgattggcagctggcctgcttggtttgtaaaactttatggaacttcagtgaaaacatcactaatgcttcgtcatgttttggaaatgaagacaccaacacactcttactcttgctctcatcatttttagatgaagaactagcactggatggcagttttgatccagacctaaaaaactatcacaaactccattgggaaacagaattcaaacctgtggcacagcagcttctaaaccgaattcagagacatcacaccttcctggaacccctgcccattccctctttctaacatgatgcagattaacagtagaaacgagaactcacgtctccctcattcttaagaactggtaacaaacgtgaacatttttttcagcattaacaaatgtggaaagtttttcaagaactggttttagtgagtagctgaagtattttttaaaattaagcatttcttcttgttaggtattatggaaaaatgaatatacacattatatttcctgttgagagaaatgtaagatgaaaatatgtgcattttcaagtaaatgactttttcttctattctctattaaacaatttagttctagtcttaaaatcttgatttaacaattttggaattgaagtgttcataagttaaatgaactgtgcaatgaaggctgttagattatatagaaagaagggtaggcaacatgagtggaacacgttacaacataggatctgtactaattcttactatgtcaaataataaatgctctcattaggta

SEQ ID NO: 222983 - protein, 984 aa, Artificial Sequence
  derived and/or modified sequence
MRAPARGTGCCGRSGGRWLAGAAQPRCLWAGGAGQRFMVPGGTMKSLKKDSRLRITPTRLLEASENVKEKKRAKGPEQPTPTIQEEPEPVSNVLQGDDILALAIKKEDLKEQHIPRLTEKEDKRVITQKFIIRKLKPMDPRRKVCHLVARPANPDEATKPLDYSGPGDSFDGSDQILPHHILGSLQDFKRIALARGNTQLAERIPTSPCLMTLISAEGESKQKAPKEEKRPPWAPPPQHNFLKNWQRNTALRKKQQEALSEHLKKPVSELLMHTGETYRRIQEERELIDCTLPTRRDRKSWENSGFWSRLEYLGDEMTGLVMTKTKTQRGLMEPITHIRKPHSIRVETGLPAQRDASYRYTWDRSLFLIYRRKELQRIMEELDFSQQDIDGLEVVGKGWPFSAVTVEDYTVFERSQGSSSEDTAYLGTLASSSDVSMPILGPSLLFCGKPACWIRGSNPQDKRQVGIAAHLTFETLEGEKTSSELTVVNNGTVAIWYDWRRQHQPDTFQDLKKNRMQRFYFDNREGVILPGEIKTFTFFFKSLTAGVFREFWEFRTHPTLLGGAILQVNLHAVSLTQDVFEDERKVLESKLTAHEAVTVVREVLQELLMGVLTPERTPSPVDAYLTEEDLFRHRNPPLHYEHQVVQSLHQLWRQYMTLPAKAEEARPGDKEHVSPIATEKASVNAELLPRFRSPISETQVPRPENEALRESGSQKARVGTKSPQRKSIMEEILVEESPDVDSTKSPWEPDGLPLLEWNLCLEDFRKAVMVLPDENHREDALMRLNKAALELCQKPRPLQSNLLHQMCLQLWRDVIDSLVGHSMWLRSVLGLPEKETIYLNVPEEQDQKSPPIMEVKVPVGKAGKEERKGAAQEKKQLGIKDKEDKKGAKLLGKEDRPNSKKHKAKDDKKVIKSASQDRFSLEDPTPDIILSSQEPIDPLVMGKYTQSLHSEVRGLLDTLVTDLMVLADELSPIKNVEEALRLCR

SEQ ID NO: 222984 - protein, 942 aa, Artificial Sequence
  derived and/or modified sequence
MVPGGTMKSLKKDSRLRITPTRLLEASENVKEKKRAKGPEQPTPTIQEEPEPVSNVLQGDDILALAIKKEDLKEQHIPRLTEKEDKRVITQKFIIRKLKPMDPRRKVCHLVARPANPDEATKPLDYSGPGDSFDGSDQILPHHILGSLQDFKRIALARGNTQLAERIPTSPCLMTLISAEGESKQKAPKEEKRPPWAPPPQHNFLKNWQRNTALRKKQQEALSEHLKKPVSELLMHTGETYRRIQEERELIDCTLPTRRDRKSWENSGFWSRLEYLGDEMTGLVMTKTKTQRGLMEPITHIRKPHSIRVETGLPAQRDASYRYTWDRSLFLIYRRKELQRIMEELDFSQQDIDGLEVVGKGWPFSAVTVEDYTVFERSQGSSSEDTAYLGTLASSSDVSMPILGPSLLFCGKPACWIRGSNPQDKRQVGIAAHLTFETLEGEKTSSELTVVNNGTVAIWYDWRRQHQPDTFQDLKKNRMQRFYFDNREGVILPGEIKTFTFFFKSLTAGVFREFWEFRTHPTLLGGAILQVNLHAVSLTQDVFEDERKVLESKLTAHEAVTVVREVLQELLMGVLTPERTPSPVDAYLTEEDLFRHRNPPLHYEHQVVQSLHQLWRQYMTLPAKAEEARPGDKEHVSPIATEKASVNAELLPRFRSPISETQVPRPENEALRESGSQKARVGTKSPQRKSIMEEILVEESPDVDSTKSPWEPDGLPLLEWNLCLEDFRKAVMVLPDENHREDALMRLNKAALELCQKPRPLQSNLLHQMCLQLWRDVIDSLVGHSMWLRSVLGLPEKETIYLNVPEEQDQKSPPIMEVKVPVGKAGKEERKGAAQEKKQLGIKDKEDKKGAKLLGKEDRPNSKKHKAKDDKKVIKSASQDRFSLEDPTPDIILSSQEPIDPLVMGKYTQSLHSEVHPGRCVPWENTMQGAFPSTTRCGGSCL

SEQ ID NO: 222985 - DNA, 2955 bp, Artificial Sequence
  derived and/or modified sequence
atgagagctcctgctagaggaacagggtgctgcggccggagcggcggacggtggctggcaggagccgcgcagccgcgatgcttatgggcaggaggcgccggacaaaggttcatggtgcctggtgggaccatgaagagtcttaagaaagacagtagattgcgaatcacccctactaggcttctggaggcaagtgagaacgtcaaggaaaagaagcgcgccaaaggtccagaacagcctacccccactatccaggaagagccagagccagtgtctaacgtgttgcagggtgatgacattctggccctggccatcaagaaggaagatctgaaagagcagcatattccacgattgaccgaaaaggaagataagagggtgattactcagaagttcatcatccgcaagctcaaacctatggaccccaggagaaaagtgtgccatttagtggcacggcccgccaacccagacgaggcaactaaaccactcgattactccggccccggagactcttttgacggatcagatcagatactgccacaccacatattgggcagcctgcaggacttcaaacggattgccctcgcccggggcaatactcagctggccgaacgtatcccaacatctccatgccttatgacactgatctcagccgaaggggaatcaaaacaaaaggcccccaaggaggagaagcggccgccctgggcgcctccaccgcagcacaactttttgaagaattggcagaggaataccgcgctccggaagaagcagcaggaggccctgtcagagcacttgaagaagcctgtttctgaacttttgatgcacacaggagaaacctataggcgcattcaggaggaacgcgaattgattgactgcactctccctacgaggagggataggaaaagttgggaaaattccggtttctggtcacgtttggaatacctgggcgacgaaatgaccggcctggtcatgactaagaccaagactcagcggggcctcatggagcctatcacccacattcgaaagccgcatagcatccgtgtcgagaccggattgcccgcccagcgggacgcctcgtaccggtacacctgggacaggagcctgttccttatttataggaggaaggagctccaaaggattatggaggagctcgatttttctcaacaggatattgacggtctcgaggtggttggtaagggctggccattcagcgcagtaacagttgaagactacactgtgttcgagcgcagtcagggctcatcaagtgaagacaccgcctacctagggactcttgcttctagctccgacgtttccatgcccattctagggccctcactactgttctgcgggaagcctgcatgctggataagaggatcgaatcctcaggataagcgacaggtcggtattgccgcccacctgacttttgagaccttagaaggagagaaaacatccagcgaactcacagtagtgaacaacgggaccgtcgccatctggtatgattggcgccggcagcatcagccagatacattccaagatcttaagaaaaatagaatgcagcgcttctattttgacaaccgcgagggagttatactgcccggggagatcaagacttttactttctttttcaaatctttaaccgccggagtttttagggaattctgggagttcagaactcatccgactctactgggcggcgccatattgcaggtgaacctccacgccgttagcctgacccaggacgtgttcgaagatgaaagaaaggtgctagagtctaagttgaccgcccacgaggctgtgactgttgtaagagaagtcctgcaggagctgctgatgggtgtcctgaccccagagcggacaccttcaccagtggacgcctacctgactgaagaagacctgttccgccacaggaatccccctctgcattatgagcaccaggtggtccagagtctgcatcaactttggaggcaatacatgacattgcccgctaaagctgaggaggcccggccaggggacaaggagcatgtgtctccaattgcgacggagaaagctagcgtgaatgcagagttgctcccgcgcttcagatcccccatttcggaaacgcaagttcctcggcccgagaatgaggcacttcgggagagcgggtcacaaaaggcaagagtggggacaaagtccccacagcggaaatcaattatggaagagatcttggtcgaggaatctccagatgtggatagtacaaagagcccatgggagcctgatggactccccttgctggaatggaacctgtgtcttgaggactttagaaaagcggtgatggtgctgccagatgagaatcaccgagaggacgccctgatgaggctgaacaaagcagccttagagttgtgccagaagccccgacccctacagtccaacctgctgcatcagatgtgcttacaactgtggagggacgtcatcgactctctcgtcggccacagcatgtggctccgctcggtcctaggactgcccgaaaaagaaacgatatatttgaacgttccagaagaacaggaccagaaatctccccccatcatggaagtgaaggtaccggtgggcaaggctgggaaagaagaaaggaaaggcgctgctcaggagaaaaagcagttaggaatcaaagataaggaggataaaaagggtgctaagctgctggggaaggaggaccgccccaactctaagaaacacaaggctaaggatgacaagaaagttataaagtctgccagccaggacagattctctttggaggaccctactcccgatatcatcctcagcagccaagaaccaattgacccgctagtgatggggaaatatactcaatccctgcactcggaagttaggggactgctcgacactctggttactgacctcatggtgcttgccgacgagttgtccccgatcaaaaacgttgaggaagccctcaggctgtgcagatag

SEQ ID NO: 222986 - DNA, 2829 bp, Artificial Sequence
  derived and/or modified sequence
atggttcctggcgggaccatgaaaagcttaaagaaggatagccgcctgcgcattacacctaccagactgctggaagcctcagagaacgtgaaggagaagaagagagccaaaggcccagaacagcctacacccactatacaggaggagcccgaaccagttagtaacgtgcttcaaggggatgatattctggccctggctataaagaaggaagatctgaaggagcagcatatcccacggttaactgaaaaggaggacaagagggtgatcacccagaagttcatcattcgaaagctcaagccaatggaccctcgccgcaaagtctgtcacctggtggcccgccctgccaaccctgatgaagccactaagccactcgactattccggccctggagattcatttgatggctccgaccagatccttccacaccacatcctggggtcactccaagattttaagcgtatagcgctggctaggggcaatacacagcttgcagagcgcatcccaacatctccgtgtctgatgacccttatctctgccgagggggagtcaaaacagaaggcccctaaggaggaaaagcggcctccatgggcgcctcctcctcagcacaacttcctaaaaaattggcagcgcaataccgctctgaggaagaaacaacaagaggccctgtccgagcatctaaaaaagccagttagcgagctactcatgcatacgggggaaacttaccgcaggattcaagaagagagggaactgatcgactgtaccctgcctaccaggcgagatagaaagtcatgggagaattctgggttctggagtagactggaatacctgggcgacgagatgactggactggtgatgaccaagacaaagactcaacgaggtctgatggagccgattacccacattagaaagccgcactcaattagggtcgagaccgggctgcctgctcagagagacgcgtcatacaggtacacatgggaccggtcgctgtttctgatctatagaagaaaggagctccagcggataatggaggaactagacttttcccaacaggatatcgacggccttgaggtggtgggtaaaggctggcctttttctgcggtcaccgttgaagattacaccgtgttcgaaagatcccaaggctcctccagcgaagatacagcttacctcgggacactggccagttcatctgacgtctctatgcccatccttggacccagcctgctgttttgcggaaagcccgcctgctggatcagaggaagtaaccctcaggacaagcgtcaagttggcattgcggctcacctgactttcgaaaccctcgagggggagaaaacaagctcggagctcactgtggtgaataatgggacggtggctatttggtacgactggcgcaggcagcaccagcctgatacttttcaagatctgaaaaaaaatcgcatgcaaagattctatttcgataatcgagagggagttatactcccaggcgaaatcaagacatttacattcttctttaaaagtctgaccgccggtgtgtttagggaattctgggaatttaggacccaccctactttgttaggcggggcgatccttcaagtaaatctacacgctgtctcattgacacaagacgtcttcgaagatgagcgaaaagtgctggagtccaaactgactgcccacgaggccgtgacagtggtcagggaggtgctgcaggaactgctgatgggcgtgctgaccccagagaggaccccttcaccagtggacgcttatctgactgaggaggatctctttcgccataggaaccccccactacattacgagcaccaagtggttcagagtctgcatcaactgtggagacagtacatgaccctcccggcgaaagccgaggaagcccgaccaggggacaaggagcatgtgtcaccaatcgctacagaaaaggcctctgtcaacgctgaacttcttcccagatttaggtctcccatctctgaaacacaagtgccccgacctgaaaacgaagcgctcagagaaagcggctctcagaaggctagggtcggaactaaatcaccccagaggaaaagcatcatggaagagattctcgtagaggagagtcccgatgttgactctaccaagagcccctgggaacctgacggactgccactgttggaatggaatctgtgcctggaggacttcaggaaagccgttatggtcctgcccgacgaaaatcatcgcgaggatgctttgatgcggctcaacaaggccgctcttgaactttgtcagaaaccacgcccactgcagtcaaatctgctgcaccagatgtgtctgcagttatggcgggacgtcattgactctctagttggccatagcatgtggctgcgttccgtgcttggtctccccgagaaagaaactatctacttaaacgtcccagaggagcaggaccagaagagtcctcccatcatggaggtgaaggtccccgtcgggaaggctggcaaggaggagcgtaagggagctgcccaggagaagaagcagctcggaattaaagataaggaagacaaaaaaggagcgaagctgctagggaaggaagacagaccaaactcaaagaagcacaaagccaaagatgacaagaaagtgataaaaagcgcttcgcaagaccggttctcccttgaagaccctacccctgacatcattctatcttcgcaggagcccatcgaccctttagtgatgggtaagtatactcagtccctgcatagtgaggtgcacccaggcagatgtgttccctgggaaaacaccatgcagggcgcctttccatccaccacccggtgtggcggttcctgcctgtag

SEQ ID NO: 222987 - DNA, 2955 bp, Artificial Sequence
  derived and/or modified sequence
atgagggccccagcccggggcaccggctgctgcggccgcagcggcggccgctggctggccggggccgcccagccccgctgcctgtgggccggcggggccggccagcgcttcatggtgcctgggggcaccatgaagagcctgaagaaggacagccggctgcgcatcacccccacccggctgctggaggcctctgaaaatgtgaaggagaagaagagggccaagggccctgagcagcccacccccaccatccaggaggagcctgagcctgtgtccaatgtgctgcagggagatgacatcctggccctggccatcaagaaggaggacctgaaggagcagcacatcccccggctgacagagaaggaggacaagagggtcatcacccagaagttcatcatcaggaagctgaagcccatggaccccaggaggaaggtgtgccacctggtggcccggcctgccaacccagatgaggccaccaagcccctggactacagcggccctggggacagctttgatggcagtgaccagatcctgccccaccacatcctgggcagcctgcaggacttcaagagaattgccctggcccggggcaacacccagctggccgagcgcatccccaccagcccctgcctgatgaccctcatctctgctgagggggagagcaagcagaaggcccccaaggaggagaagaggcctccctgggcccccccaccccagcacaacttcctgaagaactggcagaggaacacagccctgaggaagaagcagcaggaggccctgtctgagcacctgaagaagcctgtgtctgagctgctgatgcacactggagagacctaccgccgcatccaggaggagcgggagctgattgactgcaccctgcccacccggcgggacaggaagtcctgggagaacagcggcttctggagccggctggagtacctgggagatgagatgacaggcctggtgatgaccaagaccaagacccagaggggcctgatggagcccatcacccacatcaggaagccccacagcatccgggtggagaccggcctgcctgcccagagagatgccagctaccgctacacctgggacaggagcctcttcctgatctacagaaggaaggagctgcagaggatcatggaggagctggacttcagccagcaggacattgatggcctggaggtggtgggcaagggctggcccttctctgctgtgacagtggaggactacacagtgtttgagaggagccagggcagcagcagcgaggacacagcctacctgggcaccctggccagcagcagtgatgtgtccatgcccatcctgggccccagcctgctcttctgtgggaagccagcctgctggatccggggcagcaacccccaggacaagaggcaggtgggcattgctgcccacctgacctttgagaccctggagggggagaagaccagcagcgagctgactgtggtgaacaacggcaccgtggccatctggtatgactggaggcggcagcaccagcctgacaccttccaggacctgaagaagaacaggatgcagcgcttctactttgacaaccgggagggcgtcatcctgcccggggagatcaagaccttcaccttcttcttcaagagcctgacagctggggtcttccgggagttctgggagttccgcacccaccccaccctgctgggcggggccatcctgcaggtgaacctgcatgctgtgtccctgacccaggatgtgtttgaagatgagaggaaggtgctggagagcaagctgacagcccacgaggccgtgacagtggtgcgggaggtgctgcaggagctgctgatgggcgtgctgaccccagagaggacccccagccctgtggatgcctacctgacagaggaggacctcttccgccacaggaacccccccctgcactatgagcaccaggtggtgcagagcctgcaccagctgtggaggcagtacatgaccctgcctgccaaggccgaggaggcccggcctggggacaaggagcacgtgagccccatcgccacagagaaggcctctgtgaatgctgagctgctgccccgcttccgcagccccatcagcgagacccaggtgcccaggccagaaaatgaggccctgcgggagagcggcagccagaaggcccgggtgggcaccaagagcccccagaggaagagcatcatggaggagatcctggtggaggagagcccagatgtggacagcaccaagagcccctgggagccagatggcctgcccctgctggagtggaacctgtgcctggaggacttcaggaaggctgtgatggtgctgcctgatgagaaccaccgggaggatgccctgatgaggctgaacaaggccgccctggagctgtgccagaagccccggcccctgcagagcaacctgctgcaccagatgtgcctgcagctgtggagagatgtgattgacagcctggtgggccacagcatgtggctgcggtctgtgctgggcctgcctgagaaggagaccatctacctgaatgtgcctgaggagcaggaccagaagagcccccccatcatggaggtgaaggtgcctgtgggcaaggccggcaaggaggagaggaagggggccgcccaggagaagaagcagctgggcatcaaggacaaggaggacaagaagggggccaagctgctgggcaaggaggaccggcccaacagcaagaagcacaaggccaaggatgacaagaaggtgatcaagagcgccagccaggaccgcttcagcctggaggaccccaccccagacatcatcctgagcagccaggagcccatcgaccccctggtgatgggcaagtacacccagagcctgcacagcgaggtgcggggcctgctggacaccctggtgacagacctgatggtgctggctgatgagctgagccccatcaagaatgtggaggaggccctgcggctgtgcaggtag

SEQ ID NO: 222988 - DNA, 2829 bp, Artificial Sequence
  derived and/or modified sequence
atggtgcctgggggcaccatgaagagcctgaagaaggacagccggctgcgcatcacccccacccggctgctggaggcctctgaaaatgtgaaggagaagaagagggccaagggccctgagcagcccacccccaccatccaggaggagcctgagcctgtgtccaatgtgctgcagggagatgacatcctggccctggccatcaagaaggaggacctgaaggagcagcacatcccccggctgacagagaaggaggacaagagggtcatcacccagaagttcatcatcaggaagctgaagcccatggaccccaggaggaaggtgtgccacctggtggcccggcctgccaacccagatgaggccaccaagcccctggactacagcggccctggggacagctttgatggcagtgaccagatcctgccccaccacatcctgggcagcctgcaggacttcaagagaattgccctggcccggggcaacacccagctggccgagcgcatccccaccagcccctgcctgatgaccctcatctctgctgagggggagagcaagcagaaggcccccaaggaggagaagaggcctccctgggcccccccaccccagcacaacttcctgaagaactggcagaggaacacagccctgaggaagaagcagcaggaggccctgtctgagcacctgaagaagcctgtgtctgagctgctgatgcacactggagagacctaccgccgcatccaggaggagcgggagctgattgactgcaccctgcccacccggcgggacaggaagtcctgggagaacagcggcttctggagccggctggagtacctgggagatgagatgacaggcctggtgatgaccaagaccaagacccagaggggcctgatggagcccatcacccacatcaggaagccccacagcatccgggtggagaccggcctgcctgcccagagagatgccagctaccgctacacctgggacaggagcctcttcctgatctacagaaggaaggagctgcagaggatcatggaggagctggacttcagccagcaggacattgatggcctggaggtggtgggcaagggctggcccttctctgctgtgacagtggaggactacacagtgtttgagaggagccagggcagcagcagcgaggacacagcctacctgggcaccctggccagcagcagtgatgtgtccatgcccatcctgggccccagcctgctcttctgtgggaagccagcctgctggatccggggcagcaacccccaggacaagaggcaggtgggcattgctgcccacctgacctttgagaccctggagggggagaagaccagcagcgagctgactgtggtgaacaatggaacagtggccatctggtatgactggaggcggcagcaccagcctgacaccttccaggacctgaagaagaacaggatgcagcgcttctactttgacaaccgggagggcgtcatcctgcctggagagatcaagaccttcaccttcttcttcaagagcctgacagctggggtcttccgggagttctgggagttccgcacccaccccaccctgctgggcggggccatcctgcaggtgaacctgcatgctgtgtccctgacccaggatgtgtttgaagatgagaggaaggtgctggagagcaagctgacagcccatgaagctgtgacagtggtgcgggaggtgctgcaggagctgctgatgggcgtgctgaccccagagaggacccccagccctgtggatgcctacctgacagaagaagatctcttccgccacagaaatccacccctgcactatgagcaccaggtggtgcagagcctgcaccagctgtggaggcagtacatgaccctgcctgccaaggccgaggaggcccggcctggggacaaggagcacgtgagccccatcgccacagagaaggcctctgtgaatgctgagctgctgccccgcttccgcagccccatcagcgagacccaggtgcccaggccagaaaatgaggccctgcgggagagcggcagccagaaggcccgggtgggcaccaagagcccccagaggaagagcatcatggaggagatcctggtggaggagagcccagatgtggacagcaccaagagcccctgggagccagatggcctgcccctgctggagtggaacctgtgcctggaggacttcaggaaggctgtgatggtgctgcctgatgagaaccacagagaagatgccctgatgaggctgaacaaggccgccctggagctgtgccagaagccccggcccctgcagagcaacctgctgcaccagatgtgcctgcagctgtggagagatgtgattgacagcctggtgggccacagcatgtggctgcggtctgtgctgggcctgcctgagaaggagaccatctacctgaatgtgcctgaggagcaggaccagaagagcccccccatcatggaggtgaaggtgcctgtgggcaaggccggcaaggaggagaggaaaggagctgcccaggagaagaagcagctgggcatcaaggacaaggaggacaagaagggggccaagctgctgggcaaggaggaccggcccaacagcaagaagcacaaggccaaggatgacaagaaggtgatcaagagcgccagccaggaccgcttcagcctggaggaccccaccccagacatcatcctgagcagccaggagcccatcgaccccctggtgatgggcaagtacacccagagcctgcacagcgaggtgcaccctggccgctgtgtgccctgggagaacaccatgcagggcgccttccccagcaccacccgctgtggcggcagctgcctgtag

SEQ ID NO: 222989 - DNA, 3186 bp, Artificial Sequence
  derived and/or modified sequence
tggtgacgtcacggcgctcgtcggcgccgcctgtggcgtcacaggccgggcccgcagggctttctaggggtccgtcgctcttgaagccgccggcggcgggcgcgtgcgcggcccgatgaagaaggaggtttccaagccgtctccgcccaagttgatcggtggatgcgcgcccccgcgcggggcaccggttgctgtggacgcagtggcggccgttggctggcgggtgcggcgcagcctcggtgtctctgggccggcggtgcagggcaacgtttcatggtgccgggcggcaccatgaagtctctaaagaaggattcccgcctcagaataactccgaccagattattagaggcctcagagaatgtcaaagaaaagaagcgggcaaagggacctgaacaacccacacccacaattcaggaagagcctgaacctgttagcaatgtcctacaaggagatgacattcttgccttggccattaagaaggaagacttgaaggagcaacacattcctcgccttactgaaaaggaagataaacgtgtcatcacccagaaatttatcatccgtaaactcaaacccatggatcctaggaggaaggtctgccaccttgtagcacgtcctgcgaatcctgatgaagccacaaagcctctggactactccggtcccggtgacagcttcgatggcagtgaccagatcctgccccaccacatcttggggagtctccaggattttaagagaattgcacttgctcgagggaacacccagctggctgagcggatacctacctcaccctgtctgatgaccctcatctctgctgaaggagagtcaaagcaaaaagccccaaaagaagagaagagacctccctgggccccacctcctcagcacaactttctgaaaaactggcagcgtaacacagccctgcggaagaagcagcaggaagccctcagcgaacacctaaagaagccagtgagtgagctgctcatgcacaccggggagacctacagacggatccaggaggagcgggagctcattgactgcacacttccaacccggcgtgataggaaaagctgggagaacagtgggttctggagtcgactggaatacttgggagatgagatgacaggtctggtcatgaccaagacaaaaactcagcgtggcctcatggagcccatcactcacatcaggaagccccactccatccgggtggagacaggattaccagcccagagggacgcttcataccgctacacctgggatcggagtctgtttctgatctaccgacgcaaggagctgcagagaatcatggaagagctggatttcagccagcaggatattgatggcctggaggtggtgggcaaagggtggcccttctcggctgttactgtggaagactacacagtgtttgaaagaagtcagggaagctcctctgaagacacagcatacttaggcacattggccagttcctctgatgtctccatgcctattctcggcccttctctgctgttctgtgggaagccagcttgctggatcagaggcagtaatccacaggacaagaggcaggttgggattgctgctcacttgacctttgaaaccctagaaggcgagaaaacctcctcagaactgactgtggtcaataatggcaccgtggccatttggtatgactggcgacggcagcaccagccggacactttccaagaccttaagaaaaacaggatgcagcgattttactttgacaaccgggaaggtgtgattctgcctggagaaattaaaacatttaccttcttcttcaagtctttgactgctggggtcttcagggaattttgggagtttcgaacccatcctactctattaggaggtgctatactgcaggtcaatctccacgcggtctccctgacccaggacgtttttgaggatgagaggaaagtactggagagcaagctgactgcccatgaggcagtcaccgtcgttcgcgaagtgctgcaggagctgctgatgggggtcttgaccccggagcgcacaccatcacctgtggatgcctatctcaccgaggaagacttgttccggcacagaaatcctccgctgcattatgagcaccaagtggtgcaaagcctgcaccaactgtggcgccagtacatgaccctgcccgccaaggctgaggaggccaggccaggggacaaggagcacgtcagccccatagccacagagaaggcctctgtgaatgctgagctgttaccacgctttaggagccccatctccgaaactcaagtgccccggcctgagaacgaggccctcagggaatccgggtcccagaaggccagagtggggaccaagagtcctcagcggaagagcatcatggaggagatcctggtggaggaaagcccagatgtggacagcaccaagagcccctgggagccggatggccttcccctgctggagtggaacctctgcttggaggacttcagaaaggcagtgatggtgctccctgatgagaaccacagagaggatgcgttgatgaggctcaacaaagcagccctggagctgtgccagaagccaaggccattgcagtccaacctcctgcaccagatgtgtttgcagctgtggcgagatgtgattgacagcctggtgggccattccatgtggctgaggtctgtgctgggcctgcctgagaaggagaccatctatttgaatgtgcctgaagagcaagatcaaaaatcacctcctatcatggaagtgaaggtacctgtggggaaagctgggaaggaggagcggaaaggagcagcccaggaaaagaagcaactggggatcaaagacaaagaagacaagaaaggagccaagctgctcgggaaagaggaccgtcccaacagcaagaagcacaaggcaaaggatgacaagaaagtcataaaatctgcaagtcaggacaggttttctttggaagaccctacccctgacatcatcctctcttctcaagaacccatagaccccctggtcatggggaaatacacccagagcctgcacagtgaggtccgtgggctgctggacaccctggtgactgacctgatggtcctggctgatgagctcagccccataaagaatgtcgaggaggctttgcgcctctgcaggtgactctcgggcccaagcaaccttctggaaaacgggttaataaataaatcaataaagaaccttcaagtttct

SEQ ID NO: 222990 - DNA, 3111 bp, Artificial Sequence
  derived and/or modified sequence
ggtgtctctgggccggcggtgcagggcaacgtttcatggtgccgggcggcaccatgaagtctctaaagaaggattcccgcctcagaataactccgaccagattattagaggcctcagagaatgtcaaagaaaagaagcgggcaaagggacctgaacaacccacacccacaattcaggaagagcctgaacctgttagcaatgtcctacaaggagatgacattcttgccttggccattaagaaggaagacttgaaggagcaacacattcctcgccttactgaaaaggaagataaacgtgtcatcacccagaaatttatcatccgtaaactcaaacccatggatcctaggaggaaggtctgccaccttgtagcacgtcctgcgaatcctgatgaagccacaaagcctctggactactccggtcccggtgacagcttcgatggcagtgaccagatcctgccccaccacatcttggggagtctccaggattttaagagaattgcacttgctcgagggaacacccagctggctgagcggatacctacctcaccctgtctgatgaccctcatctctgctgaaggagagtcaaagcaaaaagccccaaaagaagagaagagacctccctgggccccacctcctcagcacaactttctgaaaaactggcagcgtaacacagccctgcggaagaagcagcaggaagccctcagcgaacacctaaagaagccagtgagtgagctgctcatgcacaccggggagacctacagacggatccaggaggagcgggagctcattgactgcacacttccaacccggcgtgataggaaaagctgggagaacagtgggttctggagtcgactggaatacttgggagatgagatgacaggtctggtcatgaccaagacaaaaactcagcgtggcctcatggagcccatcactcacatcaggaagccccactccatccgggtggagacaggattaccagcccagagggacgcttcataccgctacacctgggatcggagtctgtttctgatctaccgacgcaaggagctgcagagaatcatggaagagctggatttcagccagcaggatattgatggcctggaggtggtgggcaaagggtggcccttctcggctgttactgtggaagactacacagtgtttgaaagaagtcagggaagctcctctgaagacacagcatacttaggcacattggccagttcctctgatgtctccatgcctattctcggcccttctctgctgttctgtgggaagccagcttgctggatcagaggcagtaatccacaggacaagaggcaggttgggattgctgctcacttgacctttgaaaccctagaaggcgagaaaacctcctcagaactgactgtggtcaataatggcaccgtggccatttggtatgactggcgacggcagcaccagccggacactttccaagaccttaagaaaaacaggatgcagcgattttactttgacaaccgggaaggtgtgattctgcctggagaaattaaaacatttaccttcttcttcaagtctttgactgctggggtcttcagggaattttgggagtttcgaacccatcctactctattaggaggtgctatactgcaggtcaatctccacgcggtctccctgacccaggacgtttttgaggatgagaggaaagtactggagagcaagctgactgcccatgaggcagtcaccgtcgttcgcgaagtgctgcaggagctgctgatgggggtcttgaccccggagcgcacaccatcacctgtggatgcctatctcaccgaggaagacttgttccggcacagaaatcctccgctgcattatgagcaccaagtggtgcaaagcctgcaccaactgtggcgccagtacatgaccctgcccgccaaggctgaggaggccaggccaggggacaaggagcacgtcagccccatagccacagagaaggcctctgtgaatgctgagctgttaccacgctttaggagccccatctccgaaactcaagtgccccggcctgagaacgaggccctcagggaatccgggtcccagaaggccagagtggggaccaagagtcctcagcggaagagcatcatggaggagatcctggtggaggaaagcccagatgtggacagcaccaagagcccctgggagccggatggccttcccctgctggagtggaacctctgcttggaggacttcagaaaggcagtgatggtgctccctgatgagaaccacagagaggatgcgttgatgaggctcaacaaagcagccctggagctgtgccagaagccaaggccattgcagtccaacctcctgcaccagatgtgtttgcagctgtggcgagatgtgattgacagcctggtgggccattccatgtggctgaggtctgtgctgggcctgcctgagaaggagaccatctatttgaatgtgcctgaagagcaagatcaaaaatcacctcctatcatggaagtgaaggtacctgtggggaaagctgggaaggaggagcggaaaggagcagcccaggaaaagaagcaactggggatcaaagacaaagaagacaagaaaggagccaagctgctcgggaaagaggaccgtcccaacagcaagaagcacaaggcaaaggatgacaagaaagtcataaaatctgcaagtcaggacaggttttctttggaagaccctacccctgacatcatcctctcttctcaagaacccatagaccccctggtcatggggaaatacacccagagcctgcacagtgaggtgcatcctggcagatgcgttccttgggagaacaccatgcagggtgcattcccatcaactaccaggtgcggtggctcgtgcctgtaatcccagcactttgggaggccaaggtgggcagattgcctgagctcaggagttcaagaccagcctgggcaacatggtccgtgggctgctggacaccctggtgactgacctgatggtcctggctgatgagctcagccccataaagaatgtcgaggaggctttgcgcctctgcaggtgactctcgggcccaagcaaccttctggaaaacgggttaataaataaatcaataaagaaccttcaagtttctact

SEQ ID NO: 222991 - DNA, 2955 bp, Artificial Sequence
  derived and/or modified sequence
atgcgggcccccgcccggggcaccggctgctgcggccggagcggcggccggtggttggccggcgccgcacagccccgctgcttatgggccggtggtgcaggccaacgcttcatggtgcccggtggaacaatgaaatctcttaaaaaggattcccggcttcggataacccccacaaggctgctggaagctagcgagaatgtaaaggagaagaaaagagcgaaaggtccggagcagcccacgccaaccatacaggaagagcccgaacccgttagtaacgtgttgcagggcgatgacatactggcgcttgccataaaaaaggaggatctgaaagaacaacacattcccagactgacggagaaagaggacaaacgcgtgatcacacaaaagttcattatccgcaagctgaaaccaatggatccacggcggaaggtgtgtcatctggtcgcccggcccgctaatcccgacgaagcaactaaaccactcgattattccgggccaggagactcctttgacggctctgatcagattctcccccatcatatccttggcagcttgcaggattttaaacggatcgctctcgccagaggtaatacgcaactggcagagagaatccccacaagcccctgcctcatgaccctgatctccgccgaaggcgagagcaaacaaaaggcccctaaggaagaaaagcgccctccatgggccccaccgccccagcacaatttcctcaagaactggcagaggaatactgcattgagaaaaaagcaacaggaggccctgagcgagcacttgaagaagcctgtgagtgaacttctgatgcacacaggcgaaacttatcggcggattcaagaggaaagagaactaatcgactgcactttaccaacacgcagagatagaaagtcctgggaaaacagtggtttttggtccagactggaataccttggagacgaaatgactggcttagtcatgacaaaaacgaaaacccagcgtgggttgatggagccaataacacacatccgaaaacctcacagtattagagtggaaacgggcctgccagctcagagggatgcaagctaccggtacacctgggacaggagtttgtttttgatttataggcgcaaggaactccagcgtatcatggaggaactagacttctcacagcaagacatcgatggcctcgaggtggttggcaaagggtggccgttcagtgccgtaaccgtcgaagactatacagtcttcgaaagatcacaaggtagctcctcagaggacacggcctatctcggcactttagctagctcctctgatgtctcaatgcctatcttgggcccttccctcctattctgtggcaagcctgcctgctggatccgaggtagtaacccacaggacaaaagacaggtagggattgccgcacatcttacattcgagacgctggaaggcgagaagacgagcagtgaattgaccgtagtgaacaacggcaccgtggccatctggtatgactggcgtagacagcatcaacctgatacatttcaggacctgaagaaaaacaggatgcagaggttctattttgataaccgagaaggagtcatcctgccaggtgagatcaagactttcactttctttttcaagtcactcaccgccggtgtcttccgcgaattctgggaatttagaacacaccccacccttctgggaggggccatcttacaggtcaacctccatgccgtgtcactgactcaggacgtgtttgaggacgaacggaaggtacttgagagcaaacttacagctcacgaagccgtaactgtagtgcgggaagtgctgcaggagctgcttatgggcgttctcacaccggagaggactccttctccagtggacgcctacctgacggaggaggatcttttcaggcacagaaaccccccactccactatgaacatcaggtcgtccagagcttgcaccagctttggcgccaatatatgacactcccagcaaaagctgaagaagcccgcccgggcgacaaggaacacgtttcccccatcgctaccgagaaggcgagtgtgaacgccgaacttctgccgaggttccggtcgccaatctctgagactcaggttccacgaccagagaacgaggctcttcgggagagtggctcacagaaagcccgcgtgggtacaaaaagtccccagcgcaaaagcatcatggaagagattcttgtcgaggaatcacccgatgttgactctactaagtccccttgggaaccggacgggctacccttattggaatggaacctgtgtctggaagacttcagaaaagcagttatggtgctacccgacgaaaaccatagggaagatgccctcatgcgattgaataaagccgccctggagctgtgccagaaacccagaccacttcaatcgaacctccttcaccagatgtgcctacagttatggagagatgtgatcgacagcctggtgggacactccatgtggctgagatctgtcttggggctgccagagaaggagacaatttacctgaacgtgcccgaggaacaggaccaaaagtcccctccaattatggaggtgaaagtgccggttgggaaggctgggaaggaagagagaaagggcgcagcccaggagaaaaaacagctagggatcaaagacaaggaagataaaaaaggcgctaagctgctgggaaaggaggatagacccaatagtaagaagcacaaggccaaggatgacaaaaaggtcataaagagcgcaagtcaggatcggttttcactggaagatccaaccccagacattatcctttcttcccaggaacccattgatcccctcgtgatgggaaagtatacgcagtcactgcattccgaagtgaggggcctgttggacacactggttactgacctgatggtgttggccgatgagctgtccccaattaagaatgtcgaggaagccctgcgattgtgtcggtag

SEQ ID NO: 222992 - DNA, 2829 bp, Artificial Sequence
  derived and/or modified sequence
atggtgcccggcggcaccatgaagagcctgaagaaggacagccggctgagaataactccaacaaggctgctggaagcatcggagaacgtcaaagaaaaaaaacgcgccaaaggaccggaacagcccacacctaccatacaggaagagcctgagccggtgtccaatgttcttcaaggcgacgacatcctggctctggccatcaagaaagaggacctgaaggaacagcacattcctaggctgacagagaaagaggacaagcgagtcattacccagaaattcataattcggaagctaaaacccatggatccgcgacgcaaagtgtgccacctggttgcgagacctgcgaaccctgatgaggctaccaagcccctcgactactccggaccgggagattccttcgatggttctgatcagatcctgcctcatcatatcctgggatcgctccaggactttaaaaggatcgccctggctagggggaatacccaactcgcagaacggattcccacaagcccctgtctgatgactctgatttctgcggagggggaaagcaaacaaaaggcccccaaagaggagaagcgtcctccttgggctcccccaccccagcacaactttcttaagaattggcagcggaatacagcactgaggaagaagcaacaggaagctctatccgagcacttaaaaaagcctgtgtctgagctgcttatgcatacaggggaaacgtaccgtaggatccaggaagagagagaactgatcgactgcaccctccctacccggagagatcgaaagagttgggagaattccggcttctggagcaggttggaatatctcggagatgagatgaccggcttggtgatgacaaagactaagacacagagaggcctgatggagcccatcacccatatccggaagccacactccattagagtggagacgggcctgccggctcagagggacgccagttatagatatacctgggaccgctcactgttcttgatatatcgcagaaaagagcttcagaggattatggaagaacttgacttttcgcagcaggacatagatggacttgaggtcgtcggcaaaggttggcccttctctgccgtgaccgtcgaggactataccgtctttgaacgtagccaggggagcagtagtgaggacactgcctacctgggcacactggcaagcagtagcgacgtgtccatgccaatcctaggcccgtccctcctcttctgcgggaaacccgcatgttggatccgggggagtaatccacaggataagcgacaggtgggaatagccgcacatctaacattcgagacactggagggggaaaaaacttcctctgaactgactgtggttaacaatgggaccgttgcgatatggtatgattggcgcagacagcatcaacctgacactttccaggaccttaaaaagaacagaatgcagagattctatttcgacaatcgggagggcgttatcctgccaggcgaaattaagacatttaccttcttctttaaaagtctgacagccggcgtgtttcgggaattctgggagttccggacccaccccactcttttgggcggtgctatcctgcaggtcaatcttcacgccgtttcacttacacaggatgtgtttgaggatgagcggaaagtgcttgagagcaagctgactgcacatgaggccgttaccgtggttcgcgaggtgcttcaggagttactcatgggcgtgctcacccctgagaggacccctagcccagtggatgcatatctgacagaagaggacctgttccgccaccggaatccaccgctgcactacgaacaccaggtcgttcagtcgttacatcagctttggaggcagtacatgaccttacctgccaaggccgaagaagctcgacctggagacaaagagcacgtttccccaatcgccacggaaaaggcctctgttaatgctgagttactgcctaggtttaggagccccatttcagaaacacaggtccctcggcccgaaaacgaggctctgcgcgagagcggctctcaaaaagccagggttggcactaagtccccccaacgcaaaagtatcatggaagagattctagtggaggagtcaccggatgtggacagtacaaagagcccctgggaaccagatggtttgcctctcctggaatggaatctttgtctagaggattttcgtaaagctgtaatggtcctacccgatgagaaccacagggaagacgctctgatgaggctcaacaaagccgctcttgagctgtgtcagaagccgcggcctctgcagagcaacctgttgcaccagatgtgccttcagctgtggagagatgttattgattcattagtcgggcactctatgtggttacgtagtgttttggggctgccggaaaaagaaacaatttacctgaatgtgcccgaagagcaggaccagaagagcccaccaatcatggaggtgaaggtgcctgttggcaaggccggaaaggaggaacgtaagggggctgcccaggaaaaaaaacagctcgggatcaaggacaaggaggacaagaagggtgcgaagttattgggtaaggaagacagacctaactctaagaagcacaaggccaaggacgataagaaggttatcaaaagcgcttctcaggaccggttctcacttgaagaccccacccctgacatcattttgtcttcccaggaacccatcgatcccctggtcatgggaaagtatacacaatccctacactctgaggtccacccagggcgctgcgtaccttgggaaaatacaatgcagggcgcctttccttctaccacacggtgcggtggctcatgcctgtag

SEQ ID NO: 222993 - DNA, 2955 bp, Artificial Sequence
  derived and/or modified sequence
atgagagcacctgctagaggcacaggctgctgtggacgcagcgggggtagatggctagcgggagctgcccagcccaggtgtctttgggctggcggagcagggcagcgatttatggtgcctggaggcaccatgaagtccctgaaaaaagatagccgtctgcgaatcacacccacccgtttgctggaggcaagcgagaatgtcaaggagaaaaaaagggctaagggcccagagcagcctaccccaaccatccaagaggaacccgagccagtttccaatgtactccaaggcgatgacattctggctcttgctattaaaaaggaggaccttaaggaacagcatattccaagactcactgagaaagaggacaagagagtgatcactcaaaaattcatcatcaggaaactcaagcctatggatccgcgaagaaaggtgtgccatctggtggcgaggcctgctaaccctgatgaagctactaaaccactggattattccgggccaggggattcattcgatggatcagaccaaattctgcctcatcatatactgggcagcctacaggacttcaaacgcatcgcgttggcacgagggaacacacaactcgccgaacgtattcccacaagcccctgtttgatgaccctgatttcagccgagggagagagcaagcaaaaagcccctaaggaggagaagcgaccaccttgggctccccctccgcaacacaacttcttaaaaaattggcaacggaataccgcgctgcgtaaaaagcagcaagaggccttgtctgaacacttgaagaagcccgtcagtgaactgctgatgcataccggggaaacttaccggcgtatacaagaggaaagggagttgattgattgcactctcccaacgaggcgggaccgaaagagttgggaaaatagtggcttttggagcagactggagtatctgggggatgagatgacgggcctggtaatgacgaaaactaagacacagcgaggtctaatggagccgatcacacacatccgtaaaccacattcaattagagtagagacagggcttcctgcccagagagacgcctcctaccgctacacgtgggacagatcactgttcctcatctataggcgcaaagagctccagaggatcatggaggagttggattttagccagcaagacatagacggcctcgaggtcgtgggcaaaggatggccatttagcgcagtgaccgtagaggattacactgtgtttgagaggtcccaggggagcagctcagaggacacggcttacctgggcactttagcctcatcctctgacgtgagtatgcccatcctggggcctagcctactgttctgcggtaagcccgcatgctggatcagggggtcaaacccacaagataaacgccaggttggaatagctgctcacctgaccttcgaaacattagaaggagagaaaactagttcagaactgaccgttgtgaataatggcacagtggccatttggtacgactggagacgccagcatcagcccgacacttttcaggacctcaagaagaatagaatgcagagattttactttgacaatagagagggcgtcatcctgccaggagagattaagacgtttacctttttctttaaatccctcactgccggtgtgttccgggaattttgggaatttcggacgcacccaaccctactaggcggagctatccttcaagttaatctgcacgctgtgagcttgactcaagacgtgtttgaagacgaaaggaaggtgcttgagtccaaacttacagcacacgaagcggtcaccgtggtgagagaagtcctacaggagctccttatgggagtcctcactcccgaacgtaccccctctcccgtggatgcctatctgaccgaggaagacttattcagacacagaaaccctcccctgcactacgaacatcaggtggtgcagtctcttcatcagctgtggaggcagtatatgaccttgccggcaaaggctgaagaagcaagacccggagacaaagagcacgtttcacccatcgccactgagaaggcctctgtaaatgctgaactgctcccgaggtttaggtcccctatctccgagactcaggttccacgtcccgagaatgaagctctgagagagagcggatcccaaaaggccagagtgggtaccaaaagcccgcagagaaaatcaatcatggaagaaatcctggttgaggagtcacccgacgtggatagcacgaagagcccctgggagcccgacgggttgcctttattagagtggaacttatgcctggaggactttcgtaaggccgtcatggtgctgcccgacgaaaatcaccgcgaggacgccttgatgcggcttaacaaagccgctctggaactctgtcagaaacccaggcccttgcagtctaacctcctccaccaaatgtgtctccaactctggagagacgtcatcgattcactggtcgggcacagtatgtggctgaggtctgttctcggcctgcccgagaaagagacaatttatctgaacgtcccggaggagcaagatcaaaaatccccgcctattatggaagtgaaggtccctgttggcaaagccggaaaagaagagaggaaaggagccgcacaggagaagaaacagctgggcattaaggataaggaggataaaaaaggtgccaagcttttgggcaaggaggatcgtccaaactccaagaaacacaaggctaaggacgacaagaaggttattaaaagcgcctcccaggatagattctcactggaagacccgacgccagatataatactcagtagccaagaaccgatcgatcctctggttatggggaaatatacacaatctctccattcagaggtgcgcggattactcgatactctggtgaccgatcttatggtgctggcggacgagctatcacccatcaaaaatgtggaggaagcactcagactgtgccgatag

SEQ ID NO: 222994 - DNA, 2829 bp, Artificial Sequence
  derived and/or modified sequence
atggtgcctgggggtacaatgaagtcattgaagaaggattcgcgattgagaattacacccaccagattattagaagctagtgagaacgtgaaggaaaagaagcgggcaaagggtccagagcagcctacacccactatccaggaggagccagaacccgtcagtaacgtgctgcagggtgacgatatattggcattagcaatcaaaaaagaggacctcaaggagcaacacatccccagattgaccgagaaagaggataaacgggtgatcactcagaagtttatcattagaaaactgaagcctatggatccacggaggaaggtctgtcacctggtggcaagacccgcaaacccggacgaagcgacaaagcccctagattatagtggcccaggggacagctttgatggatctgatcaaatactgccacaccatatcctgggatcacttcaggactttaagaggatcgccctggccaggggaaacacgcagctcgccgagcggatccctaccagcccctgcctgatgacactcatatccgcagaaggagagtcaaagcaaaaggcacctaaggaagaaaaacgtcccccatgggcccctccgcctcagcacaacttcttgaaaaattggcagcgtaataccgccttgaggaaaaagcaacaggaggcactttccgagcacctgaaaaagccagtgtcagagctactgatgcataccggggaaacatataggcgcattcaggaggagcgtgaactaatcgattgcaccctgcccaccagacgtgatcggaaaagttgggaaaattccggtttctggagcagactcgagtatctgggagacgaaatgacaggcctcgtgatgacaaaaaccaagacacagagagggcttatggaacccattacgcatattaggaagccacattccattagggtggaaacaggtttaccagcccagcgcgacgccagttaccgatatacctgggatagatcactgtttctaatttaccgcaggaaggaactgcaacgtattatggaagagctggacttctctcagcaggatattgatggactagaagtcgtcggtaaagggtggcccttttctgctgtgactgtggaagattatacggtctttgagaggtcccaggggagctcttctgaggacactgcatacctgggcaccctggcaagctccagcgatgtgagcatgcccattcttggaccctcgttgcttttttgtggcaaacccgcatgctggatcagaggttccaaccctcaagataagagacaagtgggtatcgccgctcacctgaccttcgagaccttagagggagagaagacaagctccgagttaactgtagtgaataacggtactgttgccatttggtacgactggcggcgacaacatcagcctgatacctttcaggacctgaagaagaacagaatgcaaaggttctactttgataatagggagggcgttatattgcctggagagataaagaccttcaccttcttcttcaaatcactgaccgcgggtgtcttccgagagttttgggaatttcgtactcacccgacactcttgggcggtgcaattctgcaggttaaccttcacgcagtaagcctgactcaggatgttttcgaggatgaaaggaaggtactcgaaagtaaactgacagcccatgaggctgtcaccgtggttcgggaggttctgcaagaactcctcatgggagtcctgactcccgagcgtacccctagtcccgtggacgcttatctgaccgaggaagatctgttcaggcatcgaaatccacccttgcactatgagcaccaggtagtgcagtccctgcatcagctgtggagacagtatatgaccctccctgcaaaggccgaggaagcacggcctggagacaaagaacatgtcagtccaatcgccactgagaaggcatctgttaacgcagaattgctgcctcgctttcggtctcctatttccgaaacccaggtgccgcgacccgaaaatgaggccttgcgtgagtccggcagccagaaggccagggtggggaccaagagtccccagagaaagagcattatggaagaaatcctggtggaggaatcccctgatgtcgactctacaaaatctccttgggagccagacgggctgcctttattagagtggaacctgtgcctcgaggacttcagaaaggccgtgatggtcctccccgatgaaaatcaccgggaggatgctctgatgaggctgaacaaggcggctttagaactctgtcaaaaaccccgtcccttgcaaagcaatcttctgcaccagatgtgtttacagctgtggcgtgatgtgatcgattctctggtgggccattctatgtggttgcggtccgtgctgggtttaccagaaaaggaaactatatatctgaacgtgcccgaagagcaggatcagaagagccctcccataatggaggtaaaagtgcccgtcggaaaagcagggaaggaagagcgaaaaggagccgctcaggagaagaagcagctggggattaaagataaggaagacaagaagggggctaagcttcttggaaaggaagatagaccgaattccaagaaacacaaggctaaggatgataagaaggtcataaaatcagcatcccaggatcgattctccttggaagatccgactcctgacattatcctctcttcgcaagagccaatagaccccctggtgatgggaaagtacacgcagagtctccatagcgaggtacatcctgggagatgcgttccatgggagaataccatgcagggagcattcccatctacgactcgttgcgggggttcatgtctgtag

SEQ ID NO: 222995 - DNA, 2955 bp, Artificial Sequence
  derived and/or modified sequence
atgagagcccccgccagaggcaccggctgctgcggcagaagcggcggcagatggctggccggcgccgcccagcccagatgcctgtgggccggcggcgccggccagagattcatggtgcccggcggcaccatgaagagcctgaagaaggacagcagactgagaatcacccccaccagactgctggaggccagcgagaacgtgaaggagaagaagagagccaagggccccgagcagcccacccccaccatccaggaggagcccgagcccgtgagcaacgtgctgcagggcgacgacatcctggccctggccatcaagaaggaggacctgaaggagcagcacatccccagactgaccgagaaggaggacaagagagtgatcacccagaagttcatcatcagaaagctgaagcccatggaccccagaagaaaggtgtgccacctggtggccagacccgccaaccccgacgaggccaccaagcccctggactacagcggccccggcgacagcttcgacggcagcgaccagatcctgccccaccacatcctgggcagcctgcaggacttcaagagaatcgccctggccagaggcaacacccagctggccgagagaatccccaccagcccctgcctgatgaccctgatcagcgccgagggcgagagcaagcagaaggcccccaaggaggagaagagacccccctgggccccccccccccagcacaacttcctgaagaactggcagagaaacaccgccctgagaaagaagcagcaggaggccctgagcgagcacctgaagaagcccgtgagcgagctgctgatgcacaccggcgagacctacagaagaatccaggaggagagagagctgatcgactgcaccctgcccaccagaagagacagaaagagctgggagaacagcggcttctggagcagactggagtacctgggcgacgagatgaccggcctggtgatgaccaagaccaagacccagagaggcctgatggagcccatcacccacatcagaaagccccacagcatcagagtggagaccggcctgcccgcccagagagacgccagctacagatacacctgggacagaagcctgttcctgatctacagaagaaaggagctgcagagaatcatggaggagctggacttcagccagcaggacatcgacggcctggaggtggtgggcaagggctggcccttcagcgccgtgaccgtggaggactacaccgtgttcgagagaagccagggcagcagcagcgaggacaccgcctacctgggcaccctggccagcagcagcgacgtgagcatgcccatcctgggccccagcctgctgttctgcggcaagcccgcctgctggatcagaggcagcaacccccaggacaagagacaggtgggcatcgccgcccacctgaccttcgagaccctggagggcgagaagaccagcagcgagctgaccgtggtgaacaacggcaccgtggccatctggtacgactggagaagacagcaccagcccgacaccttccaggacctgaagaagaacagaatgcagagattctacttcgacaacagagagggcgtgatcctgcccggcgagatcaagaccttcaccttcttcttcaagagcctgaccgccggcgtgttcagagagttctgggagttcagaacccaccccaccctgctgggcggcgccatcctgcaggtgaacctgcacgccgtgagcctgacccaggacgtgttcgaggacgagagaaaggtgctggagagcaagctgaccgcccacgaggccgtgaccgtggtgagagaggtgctgcaggagctgctgatgggcgtgctgacccccgagagaacccccagccccgtggacgcctacctgaccgaggaggacctgttcagacacagaaacccccccctgcactacgagcaccaggtggtgcagagcctgcaccagctgtggagacagtacatgaccctgcccgccaaggccgaggaggccagacccggcgacaaggagcacgtgagccccatcgccaccgagaaggccagcgtgaacgccgagctgctgcccagattcagaagccccatcagcgagacccaggtgcccagacccgagaacgaggccctgagagagagcggcagccagaaggccagagtgggcaccaagagcccccagagaaagagcatcatggaggagatcctggtggaggagagccccgacgtggacagcaccaagagcccctgggagcccgacggcctgcccctgctggagtggaacctgtgcctggaggacttcagaaaggccgtgatggtgctgcccgacgagaaccacagagaggacgccctgatgagactgaacaaggccgccctggagctgtgccagaagcccagacccctgcagagcaacctgctgcaccagatgtgcctgcagctgtggagagacgtgatcgacagcctggtgggccacagcatgtggctgagaagcgtgctgggcctgcccgagaaggagaccatctacctgaacgtgcccgaggagcaggaccagaagagcccccccatcatggaggtgaaggtgcccgtgggcaaggccggcaaggaggagagaaagggcgccgcccaggagaagaagcagctgggcatcaaggacaaggaggacaagaagggcgccaagctgctgggcaaggaggacagacccaacagcaagaagcacaaggccaaggacgacaagaaggtgatcaagagcgccagccaggacagattcagcctggaggaccccacccccgacatcatcctgagcagccaggagcccatcgaccccctggtgatgggcaagtacacccagagcctgcacagcgaggtgagaggcctgctggacaccctggtgaccgacctgatggtgctggccgacgagctgagccccatcaagaacgtggaggaggccctgagactgtgcagatag

SEQ ID NO: 222996 - DNA, 2829 bp, Artificial Sequence
  derived and/or modified sequence
atggtgcccggcggcaccatgaagagcctgaagaaggacagcagactgagaatcacccccaccagactgctggaggccagcgagaacgtgaaggagaagaagagagccaagggccccgagcagcccacccccaccatccaggaggagcccgagcccgtgagcaacgtgctgcagggcgacgacatcctggccctggccatcaagaaggaggacctgaaggagcagcacatccccagactgaccgagaaggaggacaagagagtgatcacccagaagttcatcatcagaaagctgaagcccatggaccccagaagaaaggtgtgccacctggtggccagacccgccaaccccgacgaggccaccaagcccctggactacagcggccccggcgacagcttcgacggcagcgaccagatcctgccccaccacatcctgggcagcctgcaggacttcaagagaatcgccctggccagaggcaacacccagctggccgagagaatccccaccagcccctgcctgatgaccctgatcagcgccgagggcgagagcaagcagaaggcccccaaggaggagaagagacccccctgggccccccccccccagcacaacttcctgaagaactggcagagaaacaccgccctgagaaagaagcagcaggaggccctgagcgagcacctgaagaagcccgtgagcgagctgctgatgcacaccggcgagacctacagaagaatccaggaggagagagagctgatcgactgcaccctgcccaccagaagagacagaaagagctgggagaacagcggcttctggagcagactggagtacctgggcgacgagatgaccggcctggtgatgaccaagaccaagacccagagaggcctgatggagcccatcacccacatcagaaagccccacagcatcagagtggagaccggcctgcccgcccagagagacgccagctacagatacacctgggacagaagcctgttcctgatctacagaagaaaggagctgcagagaatcatggaggagctggacttcagccagcaggacatcgacggcctggaggtggtgggcaagggctggcccttcagcgccgtgaccgtggaggactacaccgtgttcgagagaagccagggcagcagcagcgaggacaccgcctacctgggcaccctggccagcagcagcgacgtgagcatgcccatcctgggccccagcctgctgttctgcggcaagcccgcctgctggatcagaggcagcaacccccaggacaagagacaggtgggcatcgccgcccacctgaccttcgagaccctggagggcgagaagaccagcagcgagctgaccgtggtgaacaacggcaccgtggccatctggtacgactggagaagacagcaccagcccgacaccttccaggacctgaagaagaacagaatgcagagattctacttcgacaacagagagggcgtgatcctgcccggcgagatcaagaccttcaccttcttcttcaagagcctgaccgccggcgtgttcagagagttctgggagttcagaacccaccccaccctgctgggcggcgccatcctgcaggtgaacctgcacgccgtgagcctgacccaggacgtgttcgaggacgagagaaaggtgctggagagcaagctgaccgcccacgaggccgtgaccgtggtgagagaggtgctgcaggagctgctgatgggcgtgctgacccccgagagaacccccagccccgtggacgcctacctgaccgaggaggacctgttcagacacagaaacccccccctgcactacgagcaccaggtggtgcagagcctgcaccagctgtggagacagtacatgaccctgcccgccaaggccgaggaggccagacccggcgacaaggagcacgtgagccccatcgccaccgagaaggccagcgtgaacgccgagctgctgcccagattcagaagccccatcagcgagacccaggtgcccagacccgagaacgaggccctgagagagagcggcagccagaaggccagagtgggcaccaagagcccccagagaaagagcatcatggaggagatcctggtggaggagagccccgacgtggacagcaccaagagcccctgggagcccgacggcctgcccctgctggagtggaacctgtgcctggaggacttcagaaaggccgtgatggtgctgcccgacgagaaccacagagaggacgccctgatgagactgaacaaggccgccctggagctgtgccagaagcccagacccctgcagagcaacctgctgcaccagatgtgcctgcagctgtggagagacgtgatcgacagcctggtgggccacagcatgtggctgagaagcgtgctgggcctgcccgagaaggagaccatctacctgaacgtgcccgaggagcaggaccagaagagcccccccatcatggaggtgaaggtgcccgtgggcaaggccggcaaggaggagagaaagggcgccgcccaggagaagaagcagctgggcatcaaggacaaggaggacaagaagggcgccaagctgctgggcaaggaggacagacccaacagcaagaagcacaaggccaaggacgacaagaaggtgatcaagagcgccagccaggacagattcagcctggaggaccccacccccgacatcatcctgagcagccaggagcccatcgaccccctggtgatgggcaagtacacccagagcctgcacagcgaggtgcaccccggcagatgcgtgccctgggagaacaccatgcagggcgccttccccagcaccaccagatgcggcggcagctgcctgtag

SEQ ID NO: 222997 - protein, 825 aa, Artificial Sequence
  derived and/or modified sequence
MVGKSQQTDVIEKKKHMAIPKSSSPKATHRIGNTSGSKGSYSAKAYESIRVSSELQQTWTKRKHGQEMTSKSLQTDTIVEEKKEVKLVEETVVPEEKSADVREAAIELPESVQDVEIPPNIPSVQLKMDRSQQTSRTGYWTMMNIPPVEKVDKEQQTYFSESEIVVISRPDSSSTKSKEDALKHKSSGKIFASEHPEFQPATNSNEEIGQKNISRTSFTQETKKGPPVLLEDELREEVTVPVVQEGSAVKKVASAEIEPPSTEKFPAKIQPPLVEEATAKAEPRPAEETHVQVQPSTEETPDAEAATAVAENSVKVQPPPAEEAPLVEFPAEIQPPSAEESPSVELLAEILPPSAEESPSEEPPAEILPPPAEKSPSVELLGEIRSPSAQKAPIEVQPLPAEGALEEAPAKVEPPTVEETLADVQPLLPEEAPREEARELQLSTAMETPAEEAPTEFQSPLPKETTAEEASAEIQLLAATEPPADETPAEARSPLSEETSAEEAHAEVQSPLAEETTAEEASAEIQLLAAIEAPADETPAEAQSPLSEETSAEEAPAEVQSPSAKGVSIEEAPLELQPPSGEETTAEEASAAIQLLAATEASAEEAPAEVQPPPAEEAPAEVQPPPAEEAPAEVQPPPAEEAPAEVQPPPAEEAPAEVQPPPAEEAPAEVQPPPAEEAPAEVQSLPAEETPIEETLAAVHSPPADDVPAEEASVDKHSPPADLLLTEEFPIGEASAEVSPPPSEQTPEDEALVENVSTEFQSPQVAGIPAVKLGSVVLEGEAKFEEVSKINSVLKDLSNTNDGQAPTLEIESVFHIELKQRPPEL

SEQ ID NO: 222998 - protein, 718 aa, Artificial Sequence
  derived and/or modified sequence
MVGKSQQTDVIEKKKHMAIPKSSSPKATHRIGNTSGSKGSYSAKAYESIRVSSELQQTWTKRKHGQEMTSKSLQTDTIVEEKKEVKLVEETVVPEEKSADVREAAIELPESVQDVEIPPNIPSVQLKMDRSQQTSRTGYWTMMNIPPVEKVDKEQQTYFSESEIVVISRPDSSSTKSKEDALKHKSSGKIFASEHPEFQPATNSNEEIGQKNISRTSFTQETKKGPPVLLEDELREEVTVPVVQEGSAVKKVASAEIEPPSTEKFPAKIQPPLVEEATAKAEPRPAEETHVQVQPSTEETPDAEAATAVAENSVKVQPPPAEEAPLVEFPAEIQPPSAEESPSVELLAEILPPSAEESPSEEPPAEILPPPAEKSPSVELLGEIRSPSAQKAPIEVQPLPAEGALEEAPAKVEPPTVEETLADVQPLLPEEAPREEARELQLSTAMETPAEEAPTEFQSPLPKETTAEEASAEIQLLAATETSAEEAPAEVQSPSAEEAPAEVQPPPAEEAPAEVQPPPAEEAPAEVQPPPAEEAPAEVQPPPAEEAPAEVQPPPAEEAPAEVQPPPAEEAPAEVQSLPAEETPIEETLAAVHSPPADDVPAEEASVDKHSPPADLLLTEEFPIGEASAEVSPPPSEQTPEDEALVENVSTEFQSPQVAGIPAVKLGSVVLEGEAKFEEVSKINSVLKDLSNTNDGQAPTLEIESVFHIELKQRPPEL

SEQ ID NO: 222999 - DNA, 2938 bp, Artificial Sequence
  derived and/or modified sequence
ataacagagactaaagaagaaagacgcttactgaataaggtgggatccaacaagagtgtagtatggaatgcaatagcttatgaattactttttttctgagggagctcaacagaatgacacctaagaaagggaaagtctttgacacttggtacgtttgtgatttttggtcattacttgaaaattaataagtttgaaatcactactcttagaaatggaagaaagtgatgactctaatcagcctatctcagcgtgtaggcaagaaattcgaaagagaagatgacccagcaaaccaatggtaggcaaatcccagcaaactgatgtaatagagaaaaagaaacacatggccataccaaaatcatctagccccaaagctacccatcgtattggtaatacttctggaagcaaaggcagctactctgccaaagcctatgagtctattagagtatcttctgagcttcagcaaacttggacaaagagaaagcatggacaggaaatgactagtaagtctctccagacagacaccattgtagaagagaaaaaagaagtcaagttagttgaggaaaccgtggtacctgaagaaaagtcagctgatgttagagaagctgctattgaattgccagagagtgttcaggatgtagaaattccaccaaacataccttcagttcaactaaaaatggacagatctcagcagaccagccgtacaggatactggaccatgatgaacatcccccctgtagaaaaagtggacaaggaacaacagacatactttagtgaatcagaaatagtggttatttccaggccagatagttcttctacaaagtcaaaggaagatgccctgaaacataaatcgtcgggaaagatttttgctagtgaacaccctgaatttcaaccagcaacaaacagcaatgaagaaattgggcagaaaaatatcagcagaacttcatttactcaggagactaaaaaaggtcccccggtacttttagaagatgagcttagggaagaagtaactgtacctgttgtacaagaaggttctgctgttaaaaaagtggcttctgctgaaatagagcctccatcaacagaaaaattcccagctaaaatacagcctccattagttgaagaggccactgctaaagcggagcccagacctgctgaagagacccatgtccaagtacagccatcaactgaagagactcctgatgctgaggcagccactgcagttgcggagaattctgttaaagttcagcctccacctgctgaagaggcccctttagtggagtttcctgctgaaattcagcctccatcagctgaagagtctccttctgtagagcttctggctgaaattctgcctccatcagctgaagagtccccttcagaagagcctcctgctgaaattctgcctccaccagctgaaaagtctccttcagtagagcttcttggtgaaattcggtctccctcagcacaaaaggctcccattgaagtacagcctttaccagctgagggcgcccttgaagaggccccagctaaagtagagcctcccactgttgaagagacccttgctgatgttcagcctctattacctgaagaggctcctagagaagaggctcgagaacttcagctttcaacagctatggagacccctgcagaagaggctcctactgaatttcagtctccattacctaaagagaccactgcagaagaggcctctgctgaaattcagcttctagcagctacggagcctcctgcagatgaaactcctgccgaagctcggtctccactatctgaggagacttctgcagaagaggctcatgctgaagttcaatctccattagctgaagagaccactgcagaagaggcctctgctgaaattcagcttctagcagctatagaggctcctgcagatgaaactcctgctgaagctcagtctccactatctgaggagacttctgcagaagaggctcctgctgaagttcagtctccatcagctaagggagtttctatagaagaggcccctcttgagcttcagcctccatcaggtgaagagaccactgcagaagaggcctctgctgcaattcagcttctagcagctacagaggcttctgcagaagaggctcctgctgaagttcagcctccaccagctgaggaggcccccgctgaagttcagcctccaccagctgaggaggcccccgctgaagttcagcctccaccagctgaggaggcccccgctgaagttcagcctccaccagctgaggaggcccccgctgaagttcagcctccaccagctgaggaggcccccgctgaagttcagcctccaccagctgaggaggcccctgctgaagttcagtctctaccagctgaggagactcctatagaagagacccttgctgcagtacactctcccccagctgatgatgtccctgcagaagaggcctccgttgacaaacattccccaccagctgatttgcttctgactgaggagtttcctataggagaggcctctgctgaagtttcacctccaccatctgaacaaacccctgaagatgaggctctggtagagaatgtgtctacagaatttcagtcaccgcaggtggcaggaattccagcagtaaaattaggatcggttgttttggaaggtgaagcaaaatttgaagaggtttcaaaaatcaattctgtccttaaagatttgtctaataccaatgatggacaggctcccactcttgaaatagaaagtgtttttcatatagaattaaaacaacgtcctcctgaactgtagtcaggttgtacctaagctagcaatcagaagctacatggttttggaagaacatactttagaaaagggtgggcagcgggaagtagctttgtcaataaggcaaattaaaggggaccccaagacttggaatacaggttggaaaatgaacaataaaaactgtagcagcataaa

SEQ ID NO: 223000 - DNA, 2157 bp, Artificial Sequence
  derived and/or modified sequence
atggtaggcaaatcccagcaaactgatgtaatagagaaaaagaaacacatggccataccaaaatcatctagccccaaagctacccatcgtattggtaatacttctggaagcaaaggcagctactctgccaaagcctatgagtctattagagtatcttctgagcttcagcaaacttggacaaagagaaagcatggacaggaaatgactagtaagtctctccagacagacaccattgtagaagagaaaaaagaagtcaagttagttgaggaaaccgtggtacctgaagaaaagtcagctgatgttagagaagctgctattgaattgccagagagtgttcaggatgtagaaattccaccaaacataccttcagttcaactaaaaatggacagatctcagcagaccagccgtacaggatactggaccatgatgaacatcccccctgtagaaaaagtggacaaggaacaacagacatactttagtgaatcagaaatagtggttatttccaggccagatagttcttctacaaagtcaaaggaagatgccctgaaacataaatcgtcgggaaagatttttgctagtgaacaccctgaatttcaaccagcaacaaacagcaatgaagaaattgggcagaaaaatatcagcagaacttcatttactcaggagactaaaaaaggtcccccggtacttttagaagatgagcttagggaagaagtaactgtacctgttgtacaagaaggttctgctgttaaaaaagtggcttctgctgaaatagagcctccatcaacagaaaaattcccagctaaaatacagcctccattagttgaagaggccactgctaaagcggagcccagacctgctgaagagacccatgtccaagtacagccatcaactgaagagactcctgatgctgaggcagccactgcagttgcggagaattctgttaaagttcagcctccacctgctgaagaggcccctttagtggagtttcctgctgaaattcagcctccatcagctgaagagtctccttctgtagagcttctggctgaaattctgcctccatcagctgaagagtccccttcagaagagcctcctgctgaaattctgcctccaccagctgaaaagtctccttcagtagagcttcttggtgaaattcggtctccctcagcacaaaaggctcccattgaagtacagcctttaccagctgagggcgcccttgaagaggccccagctaaagtagagcctcccactgttgaagagacccttgctgatgttcagcctctattacctgaagaggctcctagagaagaggctcgagaacttcagctttcaacagctatggagacccctgcagaagaggctcctactgaatttcagtctccattacctaaagagaccactgcagaagaggcctctgctgaaattcagcttctagcagctacggagacttctgcagaagaggctcctgctgaagttcagtctccatcagcagaagaggctcctgctgaagttcagcctccaccagctgaggaggcccccgctgaagttcagcctccaccagctgaggaggcccccgctgaagttcagcctccaccagctgaggaggcccccgctgaagttcagcctccaccagctgaggaggcccccgctgaagttcagcctccaccagctgaggaggcccccgctgaagttcagcctccaccagctgaggaggcccctgctgaagttcagtctctaccagctgaggagactcctatagaagagacccttgctgcagtacactctcccccagctgatgatgtccctgcagaagaggcctccgttgacaaacattccccaccagctgatttgcttctgactgaggagtttcctataggagaggcctctgctgaagtttcacctccaccatctgaacaaacccctgaagatgaggctctggtagagaatgtgtctacagaatttcagtcaccgcaggtggcaggaattccagcagtaaaattaggatcggttgttttggaaggtgaagcaaaatttgaagaggtttcaaaaatcaattctgtccttaaagatttgtctaataccaatgatggacaggctcccactcttgaaatagaaagtgtttttcatatagaattaaaacaacgtcctcctgaactgtag

SEQ ID NO: 223001 - DNA, 2478 bp, Artificial Sequence
  derived and/or modified sequence
atggttggcaagtcccagcagacggatgtaatagaaaaaaaaaagcacatggcaattcctaaaagcagctcccctaaggccacacatcggatcgggaatacgtcgggttccaaggggagctatagtgcaaaagcatatgagtcaattcgggtgtcaagtgagcttcagcagacatggaccaagaggaagcacgggcaggaaatgacatcgaagtccctccaaactgacaccattgtagaggaaaaaaaggaggttaagctggtagaggagacagtcgtgccagaggagaagtcggccgatgtcagagaggcagctattgagctccctgaatccgtccaggacgtcgagattccgcccaacatacctagcgtgcagctgaagatggacagaagccaacaaacaagtagaaccggatactggaccatgatgaatatccctccagtcgagaaagtggataaagagcagcagacatacttctccgagtcagagattgtggtgatttcgaggcctgatagcagttcaaccaagtctaaggaagacgcgctcaagcataagtcctcaggtaagatctttgcctccgagcatcctgagttccagccggctaccaatagcaatgaggaaatcggacaaaaaaatatctcccggacttcatttacacaggagactaaaaagggccccccagtcttattagaagacgaactcagggaagaggtcacggtccccgtcgtacaggaggggtccgcagtcaagaaggtagcgtccgcagaaatcgaacccccttccacagagaaatttccagcgaagatccagcctcccctggtggaagaggcgacggctaaagcggagccacgccctgccgaggaaacacacgtccaggttcagccgagcactgaagagacacctgacgccgaagcagctacggcggttgccgagaacagtgtcaaagtgcagccccccccagccgaggaggcaccactagtggaattccccgccgaaatccagcctccttctgctgaggaaagcccttctgtcgagcttcttgccgagatcctcccccccagcgcagaggaatctccatcagaggagcccccagctgaaattttaccgcctcccgcagaaaaatcgccctccgtggagttactgggtgaaatccggagcccgtctgcccagaaagcaccaatcgaggtacaacccttacctgccgagggagccctcgaagaggcccctgccaaggtggagccccctactgttgaggagaccctggctgatgttcagccgttgctgcccgaagaggctccaagagaagaggcacgcgaactccagctgagcactgcaatggagacccctgcggaggaggcaccaacagagttccagtccccactgcctaaagagaccacagcagaggaagcatcagcagaaatccaactgctagccgcaacagagccacccgccgatgaaaccccggccgaagccagatctcctctgtctgaagagacatctgccgaggaagctcacgctgaagtgcagagtcctttggcagaggaaaccaccgcagaggaggcttccgcggagatccagttgctggcggccattgaggctcccgctgacgaaacacccgccgaagcccagagccccttatccgaggagacttcagctgaggaagctccagctgaagtgcaatcaccaagtgctaagggggtatcaatcgaggaggctcccctggaactccagccaccttccggcgaagaaacaacagccgaggaagccagtgctgcaattcaattgctagccgctacagaggcttctgctgaggaggcaccggcagaggtgcaacctccacctgccgaagaagctccagctgaggttcaacctccgccagcagaagaggcccctgcagaggttcagcctccccccgccgaagaagctccagccgaggtccagcctccccccgcagaagaagctcctgccgaagttcagccaccaccagcagaggaggccccagctgaggtgcagcctcctcccgccgaggaggcgcccgccgaggtgcagtctctccctgctgaagaaacacctattgaggaaacactcgccgccgtacattcacccccagcggacgatgtgcccgctgaggaggcctccgtcgacaagcactcgccgccggcagacttgctgttgaccgaggagtttccaattggtgaggccagtgcggaggtttctccgcctccgagtgaacagacacccgaggacgaggccctggtggagaacgttagtactgagtttcagagcccccaggtcgcaggtatccctgccgtgaagctggggtccgtagtgcttgaaggcgaggcgaaatttgaggaggtgagtaaaatcaactcggttctaaaggacctcagcaacaccaatgacggacaggcgccgacactggagatcgagtcagtctttcacatcgagctcaaacagaggccaccagaactatag

SEQ ID NO: 223002 - DNA, 2157 bp, Artificial Sequence
  derived and/or modified sequence
atggtgggcaagagtcagcagactgatgtcattgagaagaaaaagcacatggcaattcccaaatcctcttcccccaaggctacccatcgcattgggaataccagcgggagcaagggtagttacagtgccaaagcctacgagtcaatcagggtctcgtccgaactgcagcaaacatggaccaaaaggaagcacggacaggagatgaccagcaagagcttgcagactgacaccatcgttgaggaaaagaaagaagttaagctggtggaagagacagtagtcccagaagagaaatccgccgacgtacgagaagctgccatcgagcttccggaatctgtccaagacgtcgaaatcccacctaacatcccaagcgtgcagttaaaaatggaccgctcgcagcagacttcccgcactggctactggactatgatgaatatcccacctgtggaaaaagttgataaagagcagcagacttatttttcggaatccgagatcgtcgtcatttccagaccggattccagttccactaaaagtaaggaggacgcactgaaacataagagtagtgggaaaatttttgcgagtgagcaccctgagttccagccagcgactaacagtaacgaggagatcggccagaagaacatatcccggacctcattcacacaggaaacgaaaaagggaccccctgtcctgctcgaggacgagctgcgcgaagaggtaaccgtgcccgtagtccaggaggggagtgcagttaagaaggtcgcatcagccgaaattgagcccccatctaccgagaaattcccagccaagatccaaccccctcttgtagaggaggccacggccaaggcggaaccacgcccagccgaagaaacccacgtgcaagtgcagccctcgactgaggaaacgcccgacgcggaggctgctactgcagtggcggaaaatagtgtgaaggtgcagcctcctccagctgaagaggctccactggtagagttccccgccgagatccagcctccgtccgcagaggagagccccagcgtggaattactggccgagatcctgcctccatctgcagaagaatccccatccgaagaacctccagctgagattctgccaccacccgctgaaaagtccccatctgtggagttgctgggggaaattcgcagcccctccgcacagaaggcccctatcgaggtgcagcccctgccagctgagggggctctggaagaagcacccgcaaaagtggagcctcccacggttgaagaaacactcgcagatgtccaacccttgctgccagaggaggcacctcgagaagaagctagggaactccagcttagcacggccatggaaaccccggcagaggaggctccaactgagttccagtcaccgctccccaaggagacaacagccgaagaggcaagcgccgagatccaactgctagcagcgacagagacctcagccgaggaggccccggcagaagtgcagtcaccctcggccgaggaagctcctgccgaggtacagccccccccagccgaagaagccccagccgaggtacagccacctcctgcagaggaggcccctgccgaagtgcagcctccgccagctgaggaagctcccgccgaggtgcagcccccaccagctgaggaagcacccgcagaggtgcaaccaccccctgctgaggaggcccctgccgaagtgcaaccccctcccgccgaggaggcaccagctgaggtgcaatcattgccagccgaggaaacccctatcgaagaaaccctggctgccgttcattccccccccgctgacgacgtgcccgccgaggaggcctcagtcgacaagcactcccccccagctgacctgctgctgaccgaggagttccctatcggggaagctagtgccgaagtgtcccctccaccttctgagcagactccagaggacgaggcattggtggagaacgttagtactgagttccagtccccacaggttgccgggatccccgccgtcaagctggggtcagttgtgcttgaaggagaggccaaatttgaagaagtgtcaaaaattaactctgtgctgaaggacctgtccaacacaaacgacggacaagcaccgacacttgagattgagtcggtgttccatatagagctgaaacaacggccgcccgaactgtag

SEQ ID NO: 223003 - DNA, 2478 bp, Artificial Sequence
  derived and/or modified sequence
atggtgggcaagagccagcagacagatgtgattgagaagaagaagcacatggccatccccaagagcagcagccccaaggccacccacagaattggcaacaccagcggcagcaagggcagctacagcgccaaggcctatgagagcatccgggtgtcctctgagctgcagcagacctggaccaagaggaagcacggccaggagatgaccagcaagagcctgcagacagacaccatcgtggaggagaagaaggaggtgaagctggtggaggagaccgtggtgcctgaggagaagtctgcagatgtgcgggaggccgccatcgagctgcctgagagcgtgcaggatgtggagatcccccccaacatccccagcgtgcagctgaagatggacaggagccagcagaccagcaggacaggctactggaccatgatgaacatcccccctgtggagaaggtggacaaggagcagcagacctacttcagcgagagcgagatcgtggtgatcagcaggccagacagcagcagcaccaagagcaaagaagatgccctgaagcacaagagcagcggcaagatctttgccagcgagcaccctgagttccagcctgccaccaacagcaatgaggagatcggccagaagaacatcagcaggaccagcttcacccaggagaccaagaagggcccccctgtgctgctggaggatgagctgcgggaggaggtgacagtgcctgtggtgcaggagggcagcgctgtgaagaaggtggccagcgctgagattgagccccccagcacagagaagtttcctgccaagatccagccccccctggtggaggaggccacagccaaggccgagcccaggcctgctgaggagacccacgtgcaggtgcagcccagcacagaggagaccccagatgctgaggccgccacagctgtggctgaaaattctgtgaaggtgcagcccccacctgctgaggaggcccccctggtggagttccctgctgagatccagcccccatctgctgaggagagccccagcgtggagctgctggccgagatcctgccccccagcgctgaggagagccccagcgaggagcccccagctgagatcctgcccccacctgctgagaagagccccagcgtggagctgctgggggagatccgcagccccagcgcccagaaggcccccatcgaggtgcagcccctgcctgctgagggcgccctggaggaggccccagccaaggtggagccccccaccgtggaggagaccctggctgatgtgcagcccctgctgcctgaggaggccccccgggaggaggcccgggagctgcagctgagcacagccatggagaccccagctgaggaggcccccacagagttccagagccccctgcccaaggagaccacagctgaggaggccagcgctgagatccagctgctggccgccacagagcccccagcagatgagaccccagctgaggcccggagccccctgtctgaggagaccagcgctgaggaggcccacgccgaggtgcagagccccctggccgaggagaccacagctgaggaggccagcgctgagatccagctgctggccgccatcgaggccccagcagatgagaccccagctgaggcccagagccccctgtctgaggagaccagcgctgaggaggccccagctgaggtgcagagccccagcgccaagggcgtgtccattgaggaggcccccctggagctgcagccccccagcggggaggagaccacagctgaggaggccagcgctgccatccagctgctggccgccacagaggccagcgctgaggaggccccagctgaggtgcagcccccacctgctgaggaggccccagctgaggtgcagcccccacctgctgaggaggccccagctgaggtgcagcccccacctgctgaggaggccccagctgaggtgcagcccccacctgctgaggaggccccagctgaggtgcagcccccacctgctgaggaggccccagctgaggtgcagcccccacctgctgaggaggccccagctgaggtgcagagcctgcctgctgaggagacccccatcgaggagaccctggccgctgtgcacagccccccagcagatgatgtgcctgctgaggaggcctctgtggacaagcacagccccccagctgacctgctgctgacagaggagttccccatcggggaggccagcgctgaggtgagccccccaccttctgagcagaccccagaagatgaggccctggtggagaatgtgtccacagagttccagagcccccaggtggccggcatcccagctgtgaagctgggctctgtggtgctggagggggaggccaagtttgaggaggtgtccaagatcaacagcgtgctgaaggacctgagcaacaccaatgatggccaggcccccaccctggagattgagagcgtcttccacatcgagctgaagcagaggcctcctgagctgtag

SEQ ID NO: 223004 - DNA, 2157 bp, Artificial Sequence
  derived and/or modified sequence
atggtgggcaagagccagcagacagatgtgattgagaagaagaagcacatggccatccccaagagcagcagccccaaggccacccacagaattggcaacaccagcggcagcaagggcagctacagcgccaaggcctatgagagcatccgggtgtcctctgagctgcagcagacctggaccaagaggaagcacggccaggagatgaccagcaagagcctgcagacagacaccatcgtggaggagaagaaggaggtgaagctggtggaggagaccgtggtgcctgaggagaagtctgcagatgtgcgggaggccgccatcgagctgcctgagagcgtgcaggatgtggagatcccccccaacatccccagcgtgcagctgaagatggacaggagccagcagaccagcaggacaggctactggaccatgatgaacatcccccctgtggagaaggtggacaaggagcagcagacctacttcagcgagagcgagatcgtggtgatcagcaggccagacagcagcagcaccaagagcaaagaagatgccctgaagcacaagagcagcggcaagatctttgccagcgagcaccctgagttccagcctgccaccaacagcaatgaggagatcggccagaagaacatcagcaggaccagcttcacccaggagaccaagaagggcccccctgtgctgctggaggatgagctgcgggaggaggtgacagtgcctgtggtgcaggagggcagcgctgtgaagaaggtggccagcgctgagattgagccccccagcacagagaagtttcctgccaagatccagccccccctggtggaggaggccacagccaaggccgagcccaggcctgctgaggagacccacgtgcaggtgcagcccagcacagaggagaccccagatgctgaggccgccacagctgtggctgaaaattctgtgaaggtgcagcccccacctgctgaggaggcccccctggtggagttccctgctgagatccagcccccatctgctgaggagagccccagcgtggagctgctggccgagatcctgccccccagcgctgaggagagccccagcgaggagcccccagctgagatcctgcccccacctgctgagaagagccccagcgtggagctgctgggggagatccgcagccccagcgcccagaaggcccccatcgaggtgcagcccctgcctgctgagggcgccctggaggaggccccagccaaggtggagccccccaccgtggaggagaccctggctgatgtgcagcccctgctgcctgaggaggccccccgggaggaggcccgggagctgcagctgagcacagccatggagaccccagctgaggaggcccccacagagttccagagccccctgcccaaggagaccacagctgaggaggccagcgctgagatccagctgctggccgccacagagaccagcgctgaggaggccccagctgaggtgcagagccccagcgctgaggaggccccagctgaggtgcagcccccacctgctgaggaggccccagctgaggtgcagcccccacctgctgaggaggccccagctgaggtgcagcccccacctgctgaggaggccccagctgaggtgcagcccccacctgctgaggaggccccagctgaggtgcagcccccacctgctgaggaggccccagctgaggtgcagcccccacctgctgaggaggccccagctgaggtgcagagcctgcctgctgaggagacccccatcgaggagaccctggccgctgtgcacagccccccagcagatgatgtgcctgctgaggaggcctctgtggacaagcacagccccccagctgacctgctgctgacagaggagttccccatcggggaggccagcgctgaggtgtccccaccacccagcgagcagaccccagaagatgaggccctggtggagaatgtgtccacagagttccagagcccccaggtggccggcatcccagctgtgaagctgggctctgtggtgctggagggggaggccaagtttgaggaggtgtccaagatcaacagcgtgctgaaggacctgagcaacaccaatgatggccaggcccccaccctggagattgaatctgtgttccacatcgagctgaagcagaggcctcctgagctgtag

SEQ ID NO: 223005 - DNA, 2478 bp, Artificial Sequence
  derived and/or modified sequence
atggtgggcaagagccagcagaccgacgtgatcgagaagaagaagcacatggcaatacccaaatcctctagccctaaggccacacaccggatagggaataccagcggaagtaaggggtcatatagtgctaaagcatatgagtctataagagtgagcagcgagctgcagcagacctggacaaaacgcaagcacggtcaggaaatgacgagcaagtcacttcaaaccgacacaatcgtagaagagaagaaggaggtaaagctggtggaggagacagtggttcctgaggaaaagtctgcagatgttagagaagccgcaatcgaactgcctgagtccgtgcaggacgttgaaatccctccaaatatcccatcagtgcagctaaagatggataggagccagcagactagtaggaccggctattggacgatgatgaacattccaccagtggaaaaggtcgacaaagaacaacagacctactttagtgagagtgaaatcgtagtcatctctcgacccgactcttcttctaccaaatctaaggaagacgcactgaaacacaaaagcagcggtaaaatcttcgcgagcgaacacccagagttccagccagccacgaactcaaacgaagagattggccaaaaaaacatcagccgcactagtttcactcaggaaaccaagaaggggcctcccgttctgctggaagacgagttgcgggaggaggtaaccgttcctgtggtgcaggaaggtagtgcagtgaagaaagtcgcttctgcggaaatcgagccaccctcaacggagaagttcccggccaagatccaacctcccctggtggaggaagccaccgctaaggctgaacctaggcccgccgaggagacacacgttcaagtccagccgagtacagaggagactccagatgctgaggccgccacggccgtggcggagaactcggtcaaagtgcagccacctccggcagaggaagcgcccctggtggagtttccggctgaaatccaaccacccagtgcagaagaatctccatcagtggaattattggccgagatcctcccaccctctgccgaggagtctccctcggaggagccaccagctgagatcttgcccccgcctgccgaaaagagtccttcagtggagctgttgggagagattcgctcccctagtgctcagaaagcacccatcgaggtccagccccttcctgctgagggcgcgctcgaggaagctccggcaaaagtggaacctcctacagtggaggagacactcgccgacgtgcagccgctgctcccagaagaggctccaagggaggaagcgagggagctccagctcagcaccgcgatggagacacccgcggaggaagctcctacagaatttcagagtccattgcccaaggagacaaccgctgaggaggcctctgccgaaatccagctgctcgccgcaacagagccgcccgcagacgagacacctgcagaggccaggagtccgttgagtgaagaaacatcagctgaggaggctcatgccgaagttcagagcccactcgcggaggagaccaccgcagaagaagcttctgccgagattcagctgctggctgctattgaggctcctgccgacgaaaccccagcagaagcccagagcccactctctgaggagacatccgcagaggaggcgcctgcagaagtccagtcaccatcagccaagggcgtgtcgatcgaagaagcccccctcgagctgcaacccccatccggcgaagagacgacagccgaggaggcgtccgccgccattcagttgctggccgctacagaagcttctgcagaggaagcacccgccgaggttcagccaccacccgctgaagaggcgcccgctgaggtgcaaccccccccggcagaggaagctcccgccgaggtgcaacctccccccgctgaagaggcccccgcagaagtgcagccacctcccgccgaggaagctcctgctgaagtgcagccacccccggccgaggaagccccggccgaagtgcagccgcctcctgcagaggaggccccagcagaagtacaatctcttcccgcagaggaaacacctattgaagaaaccctcgcggccgttcattctcctccagccgatgacgtcccagccgaagaggcctctgttgacaagcattcgcccccagcagacttgttgctaaccgaggaatttccaattggcgaagcgtcagccgaagtcagcccaccgcctagcgagcagacgcccgaagacgaggccctcgtcgagaatgtgtctacagagtttcagtccccccaggtggccgggatccctgctgttaaactggggtctgtagtgctagaaggggaggccaaatttgaggaggtgagcaaaatcaactcagtactcaaggacctctccaacactaacgacggccaagcccctaccctagaaattgagtccgtgtttcacatagagctgaagcagcgccccccggagctgtag

SEQ ID NO: 223006 - DNA, 2157 bp, Artificial Sequence
  derived and/or modified sequence
atggtgggcaagagccagcagaccgacgtgatcgagaagaagaagcatatggcgatccctaaaagcagcagcccaaaagccacacaccgaattgggaatacctcagggagtaaaggtagctacagtgccaaagcatatgagagcatcagagtttcatcagaactgcagcagacatggaccaagaggaaacatgggcaggaaatgacgtctaagagtctccaaaccgacacgatcgtggaggaaaaaaaggaggtgaagcttgtcgaagaaacggtggtgccagaagagaaaagcgcagacgtccgcgaagctgcgatcgagttaccagagagcgtccaggacgtggagatccccccaaacattccttctgtgcagctgaagatggatcggagccagcaaacaagccgcacaggatattggactatgatgaacatcccgcctgtcgaaaaagtggataaagagcagcaaacctatttcagcgaatcagagatagtcgttatttctcgccccgattcctcctctacaaaatcgaaggaggatgccctgaaacacaagtcgtcaggtaagatctttgcttctgaacaccccgagtttcaacccgcaaccaatagcaatgaggaaattggacagaagaatatatcacgaacctctttcactcaggagaccaagaagggacctcctgtgcttctcgaagacgaactgcgggaggaggtgaccgtgcccgtagtccaggagggcagcgccgtaaagaaagtagcatctgctgaaatcgaacctccgtctaccgagaagttcccagctaagatccagccgccacttgtggaagaggctacagccaaagccgaacctcgccccgctgaggaaactcacgttcaggtacaaccttccaccgaggagactcctgacgcagaggcagctaccgctgtggctgaaaatagcgtgaaggtgcagccacctcctgctgaggaagcccctctggttgagttcccagctgaaatccaaccccccagcgccgaagagtcaccttccgttgagctactggcggaaatcttgccaccctctgccgaagagtctccgtccgaagagccgccagcagagatcctaccaccgcccgcagagaaatcaccaagcgtcgagctgcttggcgagattcggtctcccagcgcccagaaggcccctattgaagtgcaaccactcccggcggaaggagcgctcgaagaagctcctgccaaagtggaacctcccaccgtggaggaaaccctagccgatgtgcagccattactgcctgaggaggctcctagagaggaggcaagagaactccagctgagcacggccatggaaacacctgccgaagaggcaccaactgagtttcaaagtccactccccaaagagacaacggctgaggaggccagtgcagaaatccaattgctggccgccaccgagacttctgcggaggaggctccagcagaagttcagtccccctcagcggaagaagcgccagcggaggtgcagcctccacccgccgaagaagcccctgcagaggttcaacccccaccagcggaggaagcgccagcggaagtgcagcccccccccgccgaggaggcacctgccgaagttcagcctccacccgccgaggaggcgcccgcggaggtccagcctccacccgctgaggaagcaccagctgaggtccaacccccgcctgctgaggaggcgcctgctgaagtgcagagcctcccagccgaagagacccccatcgaggagactctggctgctgtccacagtcctccagccgacgatgtgcccgccgaggaggcgtcagtggacaagcatagcccacccgccgaccttttgctaacagaagagttcccaatcggagaggcaagtgccgaggtcagccctcccccatcggagcagaccccggaagacgaggccctagtggagaacgtttcaacagagtttcagtccccccaagtggctggcatcccagccgtgaaactgggcagcgtggttctggaaggggaagccaagttcgaggaggtgagcaaaatcaattctgtcctgaaagacctgagtaataccaacgatggacaggctccaactctggagattgaatccgttttccacatcgagctgaagcaaagaccacccgaactatag

SEQ ID NO: 223007 - DNA, 2478 bp, Artificial Sequence
  derived and/or modified sequence
atggttggcaaatctcagcagaccgacgttatagaaaaaaaaaagcatatggctatccccaagagctccagcccgaaagcgacccatcggatcggtaacacatcaggttccaagggaagttatagcgcaaaagcatatgagtcaatacgggtctcctccgagctccagcagacttggacaaagcgaaaacacggccaggagatgacaagcaaatccctccagactgacaccattgtcgaggaaaagaaggaggtcaagctcgtcgaggagactgtggtaccagaggaaaagtcagcagacgtaagagaggccgctatcgagctgcctgaaagcgtgcaggacgttgaaataccccctaacatcccctcagttcagcttaagatggaccgttcacagcagacttccagaacagggtactggactatgatgaatatcccaccagttgagaaggtggataaggaacagcagacatatttctctgagtcagaaatagtagtcatcagtagaccggacagctccagtacaaagtctaaggaggacgccctgaagcacaagtctagtggcaaaatttttgcgtctgagcaccccgaattccagccagctacaaatagcaatgaggagatcgggcaaaaaaacatctctcgaacctccttcacccaagagaccaaaaaagggccaccggtgttgctagaggatgaactgagggaggaagttacagttcctgtggtgcaagaagggagcgccgttaagaaggttgcaagcgcagaaattgaaccaccatctaccgagaaatttccagctaaaatccagccgccactcgtggaggaagccacggcgaaagcagaaccacgccctgcagaggagacgcatgtccaggtgcagccaagcacggaagagactcctgacgccgaagcagctaccgccgtcgcggaaaattcggtgaaggtacaacccccaccggcagaagaagcgccactggtggaatttccagcggaaatccaaccgcctagtgccgaagagtctcccagcgtggaattgctggcagagattctacccccttctgcagaggaaagcccatccgaggagccacccgcagaaattcttccacccccagctgagaagtccccatcagttgaactactgggggagataaggagccctagcgcgcaaaaggcaccgattgaggtgcaaccgctccccgcagagggagccctggaagaggctcccgcaaaggtcgagccaccgacagtggaagagacactggcggacgtgcaaccgctccttcctgaagaagctccgagagaagaggctcgggagctccaattaagcacggccatggagacgcctgctgaggaggcacctactgaattccagtcacccttgccgaaagagactacggctgaggaagctagcgccgaaatccagctcctcgccgcaaccgaaccacccgcagacgaaaccccagctgaggccaggtccccgctgtccgaagaaaccagcgccgaagaggcccacgccgaagttcaaagtcccctagcagaagagaccactgccgaggaagcttctgccgaaattcaattgctggcagcaattgaagctcccgctgacgagacaccagccgaggcccagtctccactgagcgaagagacgtctgccgaggaggcgccagctgaggtccagagcccctctgccaagggagtttccatcgaagaagcacccctggagctgcagcccccttctggcgaggagactactgcagaagaagccagtgctgccatccagctgctggcagccaccgaagcctcggccgaagaggcccctgccgaggtgcagccaccgccagccgaagaggctcccgcagaggtgcaacctcctcccgcagaggaagctccagccgaggtgcagcctccccctgcggaggaagccccagcagaggtgcagccaccacctgccgaagaggcccctgcagaggtccagccgccaccggctgaggaggccccagcagaggtgcaaccaccgccagcagaagaagcacctgcggaggtacaatccctccctgctgaagagacgcctatcgaggagacattggccgcagtgcactctccgcctgcggacgacgtgcctgcagaagaagcctcagtggacaaacattccccacccgcagacctgctcctgaccgaagagtttcccataggtgaggcatccgcagaagtgagtccacccccatcagaacagactccagaggatgaagccttggtcgagaatgtgagcactgagttccagagcccccaagtcgctggtatcccagcagtcaagttagggagcgtcgtccttgaaggggaggcaaagttcgaagaagtctcaaagatcaatagtgttctcaaggacctgagtaacaccaatgatggccaggcacctaccttagagatcgagtcagtatttcatatcgagctgaagcagcgccctcccgaattgtag

SEQ ID NO: 223008 - DNA, 2157 bp, Artificial Sequence
  derived and/or modified sequence
atggtggggaagtcacagcagaccgacgtgattgaaaagaagaagcacatggctattcccaaatcttcttcccccaaagctactcaccgtatcggtaacaccagcggatccaagggcagctactcagctaaagcatacgagtccatccgtgtcagcagcgaactgcagcagacttggaccaaaagaaaacacggtcaggagatgacgagtaaatctctgcagacagacactattgttgaggagaaaaaagaggtgaaactggtggaggaaacggtcgttcctgaggagaaaagcgctgatgtgcgcgaggccgcaatcgagttgccggagagcgtgcaggacgttgagatcccccctaacataccatccgtgcaattgaaaatggacaggtcccagcagacttcccgaacggggtactggaccatgatgaacatccccccagtggaaaaggttgataaagagcagcaaacctacttttctgaaagcgagatcgtcgtgataagccgaccggatagttcatccaccaaatcaaaggaagatgcactgaaacacaaatcaagcggcaagatctttgccagtgagcacccagagtttcagccggcaacgaattccaatgaggagattggccagaaaaacatcagcagaacatccttcactcaggaaacaaagaaggggccacctgtgctgctcgaagatgaactccgggaggaggtcacagttcctgtggtgcaagaagggagcgcagtgaagaaagttgcatccgctgaaatcgagcctccaagcacagagaagttcccagcaaagattcaacccccactggtggaagaagctacagccaaggccgagcctcgccctgcagaagaaacccacgttcaggtccaaccttccacggaagagacacctgacgccgaggctgctacagctgtcgccgagaacagcgttaaagtgcaaccccctcccgctgaagaagcacccctggtagaattcccagccgagattcaacctccatcggcggaggagagtcctagtgtggagctcctggctgaaatcctgccgccaagcgccgaggaaagcccatcagaggaacctcccgctgaaattcttcctcctcctgccgaaaaaagcccttcagttgaactgctgggagaaattcgctcacccagtgcccagaaggccccaatcgaagttcagccattaccagccgaaggggcacttgaggaggcaccggctaaagtggagcctccaacagtagaggagacacttgcagacgtgcagccgcttctacctgaggaggcacccagagaggaagccagagagctgcagctctccacggccatggagacccccgcagaggaggcacctaccgagttccaaagcccattaccgaaagagacaaccgccgaagaggcatcagccgaaatccagctcttggccgctaccgaaacctcagcggaagaggcacccgcagaggtccagtctcctagtgctgaagaggccccagctgaggtccagcctcccccagctgaagaggcaccagccgaggtgcaacccccaccagccgaagaggctccagcggaagttcagccccctccagctgaagaagcccctgccgaggtgcagcctcccccagctgaagaagcccctgccgaagtccagcctccccctgcagaagaggccccagccgaggtccagcctccgccagctgaggaagcacctgcagaagtgcagtccctgccagccgaggagacacctatcgaggagactctagccgctgtgcacagcccacctgcagatgacgtgcccgctgaggaggccagtgtggataaacacagcccccctgcagatctgctccttactgaggagtttccgataggcgaggcctcagctgaagtatccccgcctcccagcgagcagacaccggaggatgaggccctggtcgaaaacgtctccactgaatttcaatctccacaggttgctgggatcccagccgtgaagctcgggtccgtcgtgctggagggcgaggccaagttcgaagaagtgtctaagatcaattctgtgttaaaggatctttccaatacaaacgatgggcaagcccctacattggagatcgagtctgtgttccatattgagcttaaacagcggccaccggaactttag

SEQ ID NO: 223009 - DNA, 2478 bp, Artificial Sequence
  derived and/or modified sequence
atggtgggcaagagccagcagaccgacgtgatcgagaagaagaagcacatggccatccccaagagcagcagccccaaggccacccacagaatcggcaacaccagcggcagcaagggcagctacagcgccaaggcctacgagagcatcagagtgagcagcgagctgcagcagacctggaccaagagaaagcacggccaggagatgaccagcaagagcctgcagaccgacaccatcgtggaggagaagaaggaggtgaagctggtggaggagaccgtggtgcccgaggagaagagcgccgacgtgagagaggccgccatcgagctgcccgagagcgtgcaggacgtggagatcccccccaacatccccagcgtgcagctgaagatggacagaagccagcagaccagcagaaccggctactggaccatgatgaacatcccccccgtggagaaggtggacaaggagcagcagacctacttcagcgagagcgagatcgtggtgatcagcagacccgacagcagcagcaccaagagcaaggaggacgccctgaagcacaagagcagcggcaagatcttcgccagcgagcaccccgagttccagcccgccaccaacagcaacgaggagatcggccagaagaacatcagcagaaccagcttcacccaggagaccaagaagggcccccccgtgctgctggaggacgagctgagagaggaggtgaccgtgcccgtggtgcaggagggcagcgccgtgaagaaggtggccagcgccgagatcgagccccccagcaccgagaagttccccgccaagatccagccccccctggtggaggaggccaccgccaaggccgagcccagacccgccgaggagacccacgtgcaggtgcagcccagcaccgaggagacccccgacgccgaggccgccaccgccgtggccgagaacagcgtgaaggtgcagcccccccccgccgaggaggcccccctggtggagttccccgccgagatccagccccccagcgccgaggagagccccagcgtggagctgctggccgagatcctgccccccagcgccgaggagagccccagcgaggagccccccgccgagatcctgcccccccccgccgagaagagccccagcgtggagctgctgggcgagatcagaagccccagcgcccagaaggcccccatcgaggtgcagcccctgcccgccgagggcgccctggaggaggcccccgccaaggtggagccccccaccgtggaggagaccctggccgacgtgcagcccctgctgcccgaggaggcccccagagaggaggccagagagctgcagctgagcaccgccatggagacccccgccgaggaggcccccaccgagttccagagccccctgcccaaggagaccaccgccgaggaggccagcgccgagatccagctgctggccgccaccgagccccccgccgacgagacccccgccgaggccagaagccccctgagcgaggagaccagcgccgaggaggcccacgccgaggtgcagagccccctggccgaggagaccaccgccgaggaggccagcgccgagatccagctgctggccgccatcgaggcccccgccgacgagacccccgccgaggcccagagccccctgagcgaggagaccagcgccgaggaggcccccgccgaggtgcagagccccagcgccaagggcgtgagcatcgaggaggcccccctggagctgcagccccccagcggcgaggagaccaccgccgaggaggccagcgccgccatccagctgctggccgccaccgaggccagcgccgaggaggcccccgccgaggtgcagcccccccccgccgaggaggcccccgccgaggtgcagcccccccccgccgaggaggcccccgccgaggtgcagcccccccccgccgaggaggcccccgccgaggtgcagcccccccccgccgaggaggcccccgccgaggtgcagcccccccccgccgaggaggcccccgccgaggtgcagcccccccccgccgaggaggcccccgccgaggtgcagagcctgcccgccgaggagacccccatcgaggagaccctggccgccgtgcacagcccccccgccgacgacgtgcccgccgaggaggccagcgtggacaagcacagcccccccgccgacctgctgctgaccgaggagttccccatcggcgaggccagcgccgaggtgagccccccccccagcgagcagacccccgaggacgaggccctggtggagaacgtgagcaccgagttccagagcccccaggtggccggcatccccgccgtgaagctgggcagcgtggtgctggagggcgaggccaagttcgaggaggtgagcaagatcaacagcgtgctgaaggacctgagcaacaccaacgacggccaggcccccaccctggagatcgagagcgtgttccacatcgagctgaagcagagaccccccgagctgtag

SEQ ID NO: 223010 - DNA, 2157 bp, Artificial Sequence
  derived and/or modified sequence
atggtgggcaagagccagcagaccgacgtgatcgagaagaagaagcacatggccatccccaagagcagcagccccaaggccacccacagaatcggcaacaccagcggcagcaagggcagctacagcgccaaggcctacgagagcatcagagtgagcagcgagctgcagcagacctggaccaagagaaagcacggccaggagatgaccagcaagagcctgcagaccgacaccatcgtggaggagaagaaggaggtgaagctggtggaggagaccgtggtgcccgaggagaagagcgccgacgtgagagaggccgccatcgagctgcccgagagcgtgcaggacgtggagatcccccccaacatccccagcgtgcagctgaagatggacagaagccagcagaccagcagaaccggctactggaccatgatgaacatcccccccgtggagaaggtggacaaggagcagcagacctacttcagcgagagcgagatcgtggtgatcagcagacccgacagcagcagcaccaagagcaaggaggacgccctgaagcacaagagcagcggcaagatcttcgccagcgagcaccccgagttccagcccgccaccaacagcaacgaggagatcggccagaagaacatcagcagaaccagcttcacccaggagaccaagaagggcccccccgtgctgctggaggacgagctgagagaggaggtgaccgtgcccgtggtgcaggagggcagcgccgtgaagaaggtggccagcgccgagatcgagccccccagcaccgagaagttccccgccaagatccagccccccctggtggaggaggccaccgccaaggccgagcccagacccgccgaggagacccacgtgcaggtgcagcccagcaccgaggagacccccgacgccgaggccgccaccgccgtggccgagaacagcgtgaaggtgcagcccccccccgccgaggaggcccccctggtggagttccccgccgagatccagccccccagcgccgaggagagccccagcgtggagctgctggccgagatcctgccccccagcgccgaggagagccccagcgaggagccccccgccgagatcctgcccccccccgccgagaagagccccagcgtggagctgctgggcgagatcagaagccccagcgcccagaaggcccccatcgaggtgcagcccctgcccgccgagggcgccctggaggaggcccccgccaaggtggagccccccaccgtggaggagaccctggccgacgtgcagcccctgctgcccgaggaggcccccagagaggaggccagagagctgcagctgagcaccgccatggagacccccgccgaggaggcccccaccgagttccagagccccctgcccaaggagaccaccgccgaggaggccagcgccgagatccagctgctggccgccaccgagaccagcgccgaggaggcccccgccgaggtgcagagccccagcgccgaggaggcccccgccgaggtgcagcccccccccgccgaggaggcccccgccgaggtgcagcccccccccgccgaggaggcccccgccgaggtgcagcccccccccgccgaggaggcccccgccgaggtgcagcccccccccgccgaggaggcccccgccgaggtgcagcccccccccgccgaggaggcccccgccgaggtgcagcccccccccgccgaggaggcccccgccgaggtgcagagcctgcccgccgaggagacccccatcgaggagaccctggccgccgtgcacagcccccccgccgacgacgtgcccgccgaggaggccagcgtggacaagcacagcccccccgccgacctgctgctgaccgaggagttccccatcggcgaggccagcgccgaggtgagccccccccccagcgagcagacccccgaggacgaggccctggtggagaacgtgagcaccgagttccagagcccccaggtggccggcatccccgccgtgaagctgggcagcgtggtgctggagggcgaggccaagttcgaggaggtgagcaagatcaacagcgtgctgaaggacctgagcaacaccaacgacggccaggcccccaccctggagatcgagagcgtgttccacatcgagctgaagcagagaccccccgagctgtag

SEQ ID NO: 223011 - protein, 626 aa, Artificial Sequence
  derived and/or modified sequence
MMANDAKPDVKTVQVLRDTANRLRIHSIRATCASGSGQLTSCCSAAEVVSVLFFHTMKYKQTDPEHPDNDRFILSRGHAAPILYAAWVEVGDISESDLLNLRKLHSDLERHPTPRLPFVDVATGSLGQGLGTACGMAYTGKYLDKASYRVFCLMGDGESSEGSVWEAFAFASHYNLDNLVAVFDVNRLGQSGPAPLEHGADIYQNCCEAFGWNTYLVDGHDVEALCQAFWQASQVKNKPTAIVAKTFKGRGIPNIEDAENWHGKPVPKERADAIVKLIESQIQTNENLIPKSPVEDSPQISITDIKMTSPPAYKVGDKIATQKTYGLALAKLGRANERVIVLSGDTMNSTFSEIFRKEHPERFIECIIAEQNMVSVALGCATRGRTIAFAGAFAAFFTRAFDQLRMGAISQANINLIGSHCGVSTGEDGVSQMALEDLAMFRSIPNCTVFYPSDAISTEHAIYLAANTKGMCFIRTSQPETAVIYTPQENFEIGQAKVVRHGVNDKVTVIGAGVTLHEALEAADHLSQQGISVRVIDPFTIKPLDAATIISSAKATGGRVITVEDHYREGGIGEAVCAAVSREPDILVHQLAVSGVPQRGKTSELLDMFGISTRHIIAAVTLTLMK

SEQ ID NO: 223012 - DNA, 1881 bp, Artificial Sequence
  derived and/or modified sequence
atgatggcaaacgacgcgaaacccgacgtgaagactgtgcaggtattaagggacaccgctaataggttgagaatccactctattcgggcaacctgtgcaagcggttctggccagctcacttcttgttgttccgctgccgaggttgtcagtgtcctgtttttccataccatgaaatacaaacagaccgatccagagcatcccgataatgaccgcttcatcctgtcccggggtcatgctgcgccaattctttacgcagcttgggtcgaggtgggggatatcagcgagagtgaccttctaaaccttcgcaagctgcactccgacttggaaaggcatcccacccctcgcctcccctttgtggacgtcgccactgggagccttgggcagggtttgggaaccgcttgcggcatggcatataccgggaagtatctggataaagcttcataccgtgttttttgcctgatgggcgacggtgaaagttccgaggggagcgtgtgggaagcctttgcctttgctagccactacaatctcgacaacctcgtggccgtcttcgacgtgaacagactggggcaatctggtcctgcccccctcgagcacggggcggatatttatcaaaactgctgcgaggcttttggctggaatacctaccttgtggatgggcacgatgtggaggccctctgccaggcgttttggcaggcatcacaggtaaagaacaagccgacggctattgtggccaaaactttcaaaggcagggggatcccaaatattgaggatgccgaaaattggcacggtaaacccgttccaaaggagcgcgccgacgctatcgtgaaactcatcgagtcccaaatccagaccaatgagaatttaatcccaaaatctcctgttgaggatagtccccaaatctccatcacagatattaaaatgacttctccacctgcgtacaaggttggcgacaagattgccacccagaaaacctatggcttagccctggcaaagttgggaagggcaaatgagcgcgtgatcgtgctgtctggagataccatgaactctaccttcagtgaaatctttaggaaagagcatcctgaaaggttcattgaatgcatcatcgccgagcagaacatggtgtccgttgctctgggctgtgcaactagagggcgcactatcgcattcgcgggggcgttcgcagccttcttcactcgcgctttcgaccagctgcggatgggggccatatcacaagcaaacattaacctcattggttcacactgcggggtctccaccggagaagatggggtttcccagatggcccttgaggatttggctatgttcagaagcattccaaactgtacagtgttttacccttctgacgccatcagtaccgaacacgccatctacctggctgccaacactaaaggaatgtgtttcattagaacatcgcagccggaaaccgccgtgatttatacaccccaagagaacttcgagattggccaagctaaagtggtgaggcacggtgttaacgataaggtgacagtaataggcgccggcgtgaccttacatgaggccctggaagccgcagatcacctttctcagcaaggcataagtgtgagggtcatcgacccatttactattaaaccattagatgcagccaccataatcagctctgccaaagccacgggaggacgagttatcaccgtcgaggaccattacagggagggaggcatcggcgaagccgtgtgtgctgcggtttccagggaaccggatattctggtgcaccaattagccgtgagcggcgtgccccagcgggggaagacaagcgagctgctggatatgtttggtatctctactaggcacattattgctgccgtcaccctaacgctgatgaagtag

SEQ ID NO: 223013 - DNA, 1881 bp, Artificial Sequence
  derived and/or modified sequence
atgatggccaatgatgccaagccagatgtgaagacagtgcaggtgctgcgggacacagccaaccggctgcgcatccacagcatccgggccacctgtgccagcggcagcggccagctgaccagctgctgcagcgctgctgaggtggtgtctgtgctcttcttccacaccatgaagtacaagcagacagatcctgagcacccagacaatgaccgcttcatcctgagccggggccatgctgcccccatcctgtatgctgcctgggtggaggtgggggacatcagcgagagtgacctgctgaacctgaggaagctgcacagcgacctggagcggcaccccaccccccggctgccctttgtggatgtggccaccggcagcctgggccagggcctgggcacagcctgtggcatggcctacacaggcaagtacctggacaaggccagctacagagtcttctgcctgatgggagatggagagagcagcgagggctctgtgtgggaggcctttgcctttgccagccactacaacctggacaacctggtggccgtgtttgatgtgaaccggctgggccagagcggccctgcccccctggagcacggggctgacatctaccagaactgctgtgaggccttcggctggaacacctacctggtggatggccatgatgtggaggccctgtgccaggccttctggcaggccagccaggtgaagaacaagcccacagccatcgtggccaagaccttcaagggccggggcatccccaacattgaagatgctgagaactggcacggcaagcctgtgcccaaggagcgggcagatgccatcgtgaagctgattgagagccagatccagaccaatgaaaacctgatccccaagagccctgtggaggacagcccccagatcagcatcacagacatcaagatgaccagccccccagcctacaaggtgggggacaagatcgccacccagaagacctacggcctggccctggccaagctgggccgggccaatgaaagagtcatcgtgctgagcggggacaccatgaacagcaccttcagcgagatcttcaggaaggagcaccctgagcgcttcatcgagtgcatcatcgccgagcagaacatggtgtctgtggccctgggctgtgccacccggggccgcaccatcgcctttgctggggcctttgctgccttcttcacccgggcctttgaccagctgaggatgggcgccatcagccaggccaacatcaacctgattggcagccactgcggcgtgtccactggagaagatggagtgtcccagatggccctggaggacctggccatgttccgcagcatccccaactgcaccgtcttctaccccagtgatgccatcagcacagagcacgccatctacctggccgccaacaccaagggcatgtgcttcatccgcaccagccagcctgagacagctgtgatctacaccccccaggagaactttgaaattggccaggccaaggtggtgagacatggagtgaatgacaaggtgaccgtcatcggggccggcgtgaccctgcacgaggccctggaggccgctgaccacctgagccagcagggcatctctgtgcgggtcatcgaccccttcaccatcaagcccctggatgctgccaccatcatcagcagcgccaaggccaccggcggccgggtcatcaccgtggaggaccactaccgggagggcggcatcggggaggccgtgtgtgccgctgtgtcccgggagccagacatcctggtgcaccagctggccgtgtctggagtgccccagaggggcaagaccagcgagctgctggacatgtttggcatcagcaccaggcacatcatcgctgctgtgaccctgaccctgatgaagtag

SEQ ID NO: 223014 - DNA, 1881 bp, Artificial Sequence
  derived and/or modified sequence
atgatggccaacgacgccaagcccgacgtgaagaccgtgcaggtgctgagagacaccgcaaatcgactcagaattcactcgattcgcgcaacttgcgcctcgggttccggacaacttacttcgtgctgcagcgcggctgaggtggtatccgtgctgtttttccatacaatgaaatataagcaaacggacccagaacaccccgacaacgatcgttttatcctttcgcgggggcacgccgcccccatcctgtatgctgcttgggtggaggtgggggatatcagcgagagtgacctgctaaatcttcggaaactccatagcgacttggaacgacaccccaccccccgactgccctttgtcgacgtggcaaccggctccttagggcaggggctcggcaccgcgtgtggaatggcatatacgggtaagtacctggacaaggcatcctatcgggtcttctgtctcatgggggatggtgagtctagcgagggctcggtgtgggaggcgttcgcatttgcatctcactacaaccttgacaacctcgtggcagtttttgacgtcaataggctaggacagagcggacccgcccccctggaacacggagccgatatctaccagaattgttgcgaggctttcggctggaatacgtatctcgtcgacggacatgatgttgaagccttgtgccaggccttctggcaggcgtcccaagtgaaaaacaagcccacagctattgtcgccaaaactttcaagggccgcggtatacctaatatcgaggacgcggaaaattggcatggcaaaccagtgccaaaagaacgcgcagacgctattgtcaagctcatcgagtcgcagatccagactaacgagaacttaatccctaaatcacccgtggaagattccccgcagatcagcataacggacataaaaatgactagcccccccgcctataaggtaggggataagatagccacccagaaaacttatggattagctttggctaagctgggcagggcaaacgagcgcgtgatcgtattatccggtgacacaatgaactcgacattttccgagatcttccgcaaagagcatccagaacgatttattgaatgcatcatagccgagcaaaatatggttagcgtggcgctcggatgtgccacaagaggccggaccattgcttttgcgggcgcattcgccgcctttttcaccagggcattcgatcagttacgcatgggtgcaattagccaggcaaacattaacctgatagggtcccactgtggagtgagcacaggcgaggacggcgtaagccagatggccctcgaggatttggccatgttccggtctatcccgaattgcaccgtcttttacccaagtgacgccatcagcacagaacacgccatctacctggctgcaaatactaagggaatgtgtttcatccgtacaagtcagcctgaaactgctgttatttacacaccccaggagaatttcgagatcggacaggccaaagtggtccggcacggcgtgaacgataaagtcacagttatcggggccggcgtcactctgcatgaagctttggaggcagccgatcatctgtcccagcaaggcatctccgtccgggtgattgaccctttcactatcaagcctctcgacgccgctactatcatctccagcgcaaaggccacgggcggcagggtcattaccgtcgaggaccactatcgggagggaggaatcggtgaggctgtctgtgctgcagtgagccgagagccagatatcctggtccaccagttagccgtgagcggcgtgccccagcgcggaaagacctcagagctcttggacatgtttggcatatctactagacacattatcgcagcggtgacattgacgctcatgaagtag

SEQ ID NO: 223015 - DNA, 1881 bp, Artificial Sequence
  derived and/or modified sequence
atgatggccaatgacgccaaaccggacgtgaagactgtacaggttctgagggacacggcaaatagactgagaatccattccatcagggcaacctgcgcgagcgggagcggccagctgacttcttgttgtagcgctgccgaagtggtcagtgtgctgttttttcacactatgaagtataaacagaccgatccggaacaccccgacaacgaccggttcatcctgagccgcggacacgcagcccctattctgtatgcggcatgggtcgaggtaggggacatctctgagagcgatctcctcaatctgaggaagctccattctgatctcgagaggcaccctacacccagacttccattcgtggacgtggctaccggcagccttgggcaaggtttaggcactgcttgcggtatggcctacacaggtaagtatttagacaaggcgagttatcgcgtcttctgcctcatgggagatggcgaatcctcggaggggtccgtctgggaagcattcgctttcgctagccactacaacctggacaatctcgtggctgtgtttgacgttaatcgcttagggcagagtggtcccgcacccctggaacatggtgccgacatttatcagaattgctgcgaggcatttggctggaatacatatcttgtggatggtcatgatgtcgaggccttgtgccaagctttctggcaagcctcacaggtgaaaaacaaacccacagcaatagtagcaaaaactttcaaaggtcgcggaatccctaacatagaggacgcggagaactggcatgggaaacctgtgcctaaggaacgcgcagacgccattgtcaaactcatcgagtctcagatccagactaacgaaaacctgattcccaaaagtcccgtggaagatagcccccaaatatcaatcacggatatcaaaatgaccagtcccccagcctacaaggtgggtgataagattgctacccagaagacatacggccttgctcttgcaaaactggggcgtgctaacgagagggtgatcgtgcttagcggagacaccatgaacagtacgttctctgagattttcaggaaggagcatcctgagaggttcatcgagtgtatcatagcggaacagaatatggtctccgtcgccctcgggtgtgccaccagaggccgtacaattgccttcgccggagcctttgccgctttctttaccagggcctttgatcaactgcgtatgggagcgatcagccaggctaacatcaatctcataggatcacactgtggtgtgtcgactggagaagacggagtatcacaaatggctctggaggacctcgccatgtttaggtccatccccaactgcacggtgttctacccttccgatgccatttccaccgagcacgccatttacctcgccgctaataccaagggcatgtgtttcatccgcacctctcaaccggagacggccgtaatttatactccccaggagaattttgaaataggacaggcaaaagtcgtccgtcacggagtaaatgacaaagttaccgtcataggggcaggcgttaccctgcacgaggccttggaggcagcggatcacctctcacagcaaggcatcagtgtccgagttatcgatcccttcaccatcaaacccctggatgccgcaaccattatatcctccgctaaggccacagggggacgagtaattacggtagaggaccactatagagaaggtggaattggagaggccgtctgcgctgcagtgtcccgtgagcctgatatcttggtccaccaacttgcagtgagtggagtaccccagaggggcaaaacctcagaacttttggatatgttcggtatttcgactagacacattatcgccgctgtgacgctgacgttaatgaaatag

SEQ ID NO: 223016 - DNA, 2791 bp, Artificial Sequence
  derived and/or modified sequence
agtctcgcgggaagctccgttgtgggcgccccggctggtggctgagctcaggccttcaggcagaggggaggcgagggcggggcggtcacgtgagagcactgccgcggtgggttgtgggggtgctgcggcgccgtttgctttgccaaaccgacaaaagagagatgatggccaacgacgccaagcccgacgtgaagaccgtgcaggtgctgcgggacacagccaaccgcctgcggatccattccatcagggccacgtgtgcctctggttctggccagctcacgtcgtgctgcagtgcagcggaggtcgtgtctgtcctcttcttccacacgatgaagtataaacagacagacccagaacacccggacaacgaccggttcatcctctccaggggacatgctgctcctatcctctatgctgcttgggtggaggtgggtgacatcagtgaatctgacttgctgaacctgaggaaacttcacagcgacttggagagacaccctaccccccgattgccgtttgttgacgtggcaacagggtccctaggtcagggattaggtactgcatgtggaatggcttatactggcaagtaccttgacaaggccagctaccgggtgttctgccttatgggagatggcgaatcctcagaaggctctgtgtgggaggcttttgcttttgcctcccactacaacttggacaatctcgtggcggtcttcgacgtgaaccgcttgggacaaagtggccctgcaccccttgagcatggcgcagacatctaccagaattgctgtgaagcctttggatggaatacttacttagtggatggccatgatgtggaggccttgtgccaagcattttggcaagcaagtcaagtgaagaacaagcctactgctatagttgccaagaccttcaaaggtcggggtattccaaatattgaggatgcagaaaattggcatggaaagccagtgccaaaagaaagagcagatgcaattgtcaaattaattgagagtcagatacagaccaatgagaatctcataccaaaatcgcctgtggaagactcacctcaaataagcatcacagatataaaaatgacctccccacctgcttacaaagttggtgacaagatagctactcagaaaacatatggtttggctctggctaaactgggccgtgcaaatgaaagagttattgttctgagtggtgacacgatgaactccaccttttctgagatattcaggaaagaacaccctgagcgtttcatagagtgtattattgctgaacaaaacatggtaagtgtggcactaggctgtgctacacgtggtcgaaccattgcttttgctggtgcttttgctgccttttttactagagcattcgatcagctccgaatgggagccatttctcaagccaatatcaaccttattggttcccactgtggggtatccactggagaagatggagtctcccagatggccctggaggatctagccatgttccgaagcattcccaattgtactgttttctatccaagtgatgccatctcgacagagcatgctatttatctagccgccaataccaagggaatgtgcttcattcgaaccagccaaccagaaactgcagttatttataccccacaagaaaattttgagattggccaggccaaggtggtccgccacggtgtcaatgataaagtcacagtaattggagctggagttactctccatgaagccttagaagctgctgaccatctttctcaacaaggtatttctgtccgtgtcatcgacccatttaccattaaacccctggatgccgccaccatcatctccagtgcaaaagccacaggcggccgagttatcacagtggaggatcactacagggaaggtggcattggagaagctgtttgtgcagctgtctccagggagcctgatatccttgttcatcaactggcagtgtcaggagtgcctcaacgtgggaaaactagtgaattgctggatatgtttggaatcagtaccagacacattatagcagccgtaacacttactttaatgaagtaaactaggcttatttctaaaaagtcaagtctattggctttggcccaaaagcactggtatctttgtattaaattcatgtttattgtcacaaaaccattatttatacctatacagttgtactgtttcttttaaagcaaagccatttaacatctttcttcattcctaatttggaaattaaagtttacctttctgttaatctatgtataaatgttactctgagttattaatgtggattttaaaattgtaagcaatagaataggaaataaaacaactacctaatacaaatatttctgataagactacaaatatctgactgagctggggattaaagtagaggtaactgtatcttaaatgagtatgatttccttgtaagttaaaaaaattgaaatttaattgtagacttcaatagtccaagttttgaaggatgtttgagcttttgtataatgccatttatacctgcagttttacagataatgtttgactgcagttgccttggaaattcctccaaagtttgccttcatctctcctctacagtttggaggtgatggtgcagcagtggaacatctcttgatgcaccacactacttgtgttctgtgaagtgatgaaagtataactggttctagtttgcacactacacacatagttttgtgaagcttcagaaatgttttttcttttccttgtggccaaaccagtttgttaatctgattatattcatctgctaatgatactaaagttaatgtaataaagcattt

SEQ ID NO: 223017 - DNA, 1881 bp, Artificial Sequence
  derived and/or modified sequence
atgatggccaacgacgccaagcccgacgtgaagaccgtgcaggtgctgagagacaccgccaacagactgagaatccacagcatcagagccacctgcgccagcggcagcggccagctgaccagctgctgcagcgccgccgaggtggtgagcgtgctgttcttccacaccatgaagtacaagcagaccgaccccgagcaccccgacaacgacagattcatcctgagcagaggccacgccgcccccatcctgtacgccgcctgggtggaggtgggcgacatcagcgagagcgacctgctgaacctgagaaagctgcacagcgacctggagagacaccccacccccagactgcccttcgtggacgtggccaccggcagcctgggccagggcctgggcaccgcctgcggcatggcctacaccggcaagtacctggacaaggccagctacagagtgttctgcctgatgggcgacggcgagagcagcgagggcagcgtgtgggaggccttcgccttcgccagccactacaacctggacaacctggtggccgtgttcgacgtgaacagactgggccagagcggccccgcccccctggagcacggcgccgacatctaccagaactgctgcgaggccttcggctggaacacctacctggtggacggccacgacgtggaggccctgtgccaggccttctggcaggccagccaggtgaagaacaagcccaccgccatcgtggccaagaccttcaagggcagaggcatccccaacatcgaggacgccgagaactggcacggcaagcccgtgcccaaggagagagccgacgccatcgtgaagctgatcgagagccagatccagaccaacgagaacctgatccccaagagccccgtggaggacagcccccagatcagcatcaccgacatcaagatgaccagcccccccgcctacaaggtgggcgacaagatcgccacccagaagacctacggcctggccctggccaagctgggcagagccaacgagagagtgatcgtgctgagcggcgacaccatgaacagcaccttcagcgagatcttcagaaaggagcaccccgagagattcatcgagtgcatcatcgccgagcagaacatggtgagcgtggccctgggctgcgccaccagaggcagaaccatcgccttcgccggcgccttcgccgccttcttcaccagagccttcgaccagctgagaatgggcgccatcagccaggccaacatcaacctgatcggcagccactgcggcgtgagcaccggcgaggacggcgtgagccagatggccctggaggacctggccatgttcagaagcatccccaactgcaccgtgttctaccccagcgacgccatcagcaccgagcacgccatctacctggccgccaacaccaagggcatgtgcttcatcagaaccagccagcccgagaccgccgtgatctacaccccccaggagaacttcgagatcggccaggccaaggtggtgagacacggcgtgaacgacaaggtgaccgtgatcggcgccggcgtgaccctgcacgaggccctggaggccgccgaccacctgagccagcagggcatcagcgtgagagtgatcgaccccttcaccatcaagcccctggacgccgccaccatcatcagcagcgccaaggccaccggcggcagagtgatcaccgtggaggaccactacagagagggcggcatcggcgaggccgtgtgcgccgccgtgagcagagagcccgacatcctggtgcaccagctggccgtgagcggcgtgccccagagaggcaagaccagcgagctgctggacatgttcggcatcagcaccagacacatcatcgccgccgtgaccctgaccctgatgaagtag

SEQ ID NO: 223018 - protein, 904 aa, Artificial Sequence
  derived and/or modified sequence
MSYIKSNLELYQQYTAMAPKLLARISKLLMICQNAGISVPKGIRNIFEFTWEELISDPSVPTPSDILGLEVSFGAPLVVLMEPTFVQVPTLKKPLPPPPPAPPRPVLLATTGAAKRSTLSPTMARQVRTHQETLNRFQQQSIHLLTELLRLKMKAMVESMSVGANPLDITRRFVEASQLLHLNAKEMAFNCLISTAGRSGYSSGQLWKESLANMSAIGVNSPYQLIYHSSTACLSFSLSAGKEAKKKIGKSRTTEDVSMPPLHRGVGTPANSLEFSDPCPEAREKLQELCRHIEAERATWKGRNISYPMILRNYKAKMPSHLMLARKGDSQTPGLHYPPTAGAQTLSPTSHPSSANHHFSQHCQEGKAPKKAFKFHYTFYDGSSFVYYPSGNVAVCQIPTCCRGRTITCLFNDIPGFSLLALFNTEGQGCVHYNLKTSCPYVLILDEEGGTTNDQQGYVVHKWSWTSRTETLLSLEYKVNEEMKLKVLGQDSITVTFTSLNETVTLTVSANNCPHGMAYDKRLNRRISNMDDKVYKMSRALAEIKKRFQKTVTQFINSILLAAGLFTIEYPTKKEEEEFVRFKMRSRTHPERLPKLSLYSGESLLRSQSGHLESSIAETLKDEPESAPVSPVRKTTKIHTKAKVTSRGKAREGRSPTRWAALPSDCPLVLRKLMLKEDTRAGCKCLVKAPLVSDVELERFLLAPRDPSQVLVFGIISSQNYTSTGQLQWLLNTLYNHQQRGRGSPCIQCRYDSYRLLQYDLDSPLQEDPPLMVKKNSVVQGMILMFAGGKLIFGGRVLNGYGLSKQNLLKQIFRSQQDYKMGYFLPDDYKFSVPNSVLSLEDSESVKKAESEDIQGSSSSLALEDYVEKELSLEAEKTREPEVELHPLSRDSKITSWKKQASKK

SEQ ID NO: 223019 - protein, 782 aa, Artificial Sequence
  derived and/or modified sequence
MARQVRTHQETLNRFQQQSIHLLTELLRLKMKAMVESMSVGANPLDITRRFVEASQLLHLNAKEMAFNCLISTAGRSGYSSGQLWKESLANMSAIGVNSPYQLIYHSSTACLSFSLSAGKEAKKKIGKSRTTEDVSMPPLHRGVGTPANSLEFSDPCPEAREKLQELCRHIEAERATWKGRNISYPMILRNYKAKMPSHLMLARKGDSQTPGLHYPPTAGAQTLSPTSHPSSANHHFSQHCQEGKAPKKAFKFHYTFYDGSSFVYYPSGNVAVCQIPTCCRGRTITCLFNDIPGFSLLALFNTEGQGCVHYNLKTSCPYVLILDEEGGTTNDQQGYVVHKWSWTSRTETLLSLEYKVNEEMKLKVLGQDSITVTFTSLNETVTLTVSANNCPHGMAYDKRLNRRISNMDDKVYKMSRALAEIKKRFQKTVTQFINSILLAAGLFTIEYPTKKEEEEFVRFKMRSRTHPERLPKLSLYSGESLLRSQSGHLESSIAETLKDEPESAPVSPVRKTTKIHTKAKVTSRGKAREGRSPTRWAALPSDCPLVLRKLMLKEDTRAGCKCLVKAPLVSDVELERFLLAPRDPSQVLVFGIISSQNYTSTGQLQWLLNTLYNHQQRGRGSPCIQCRYDSYRLLQYDLDSPLQEDPPLMVKKNSVVQGMILMFAGGKLIFGGRVLNGYGLSKQNLLKQIFRSQQDYKMGYFLPDDYKFSVPNSVLSLEDSESVKKAESEDIQGSSSSLALEDYVEKELSLEAEKTREPEVELHPLSRDSKITSWKKQASKK

SEQ ID NO: 223020 - DNA, 3326 bp, Artificial Sequence
  derived and/or modified sequence
agtagagtttagaatttggaacggggatgggtactggtctttacagttaacacaacctggagtagcccatgccatactgtgtccttttaagtcagtaaattgaactaagtcggttattcggcaagcagttcctataaaaaactacatggctaagatgtacacgttggataattccatgcccatcttggcattgcgaccaggagcttctgcatcccttgcttccaaagcgaaccagtgaaacatctttttattcttgcaggttcttaatgattgaccacaagcagatctttcaccctcggatctctagctacaaaaggaaccactggctcaatgacctgtaagggccgtttcagcacatccattctgtccatctccaagccttcaccgtagggaagaacttttgctctcagtcacctctcagagagctctctttatagctgaaggtccctctcatgagttacatcaagagtaacctagaattatatcagcaatacacagccatggcccccaagctactggcccgcatctccaaactcctcatgatctgccagaatgcaggcatttctgtaccaaaaggcatcagaaacatctttgagttcacttgggaagagctcatcagtgacccttcagtgcctaccccgtccgacatcttgggcctggaggtcagctttggagcccccctggtggtgctcatggaacccacctttgtgcaggtccccacactgaagaagccactacctccaccaccaccagcaccaccacgtccagtgctgctggcaaccactggggcagccaagcgctccaccctctctcccaccatggcccgtcaggtgcgcacccaccaggagaccctgaacaggtttcagcagcagtccatccacctgctgacggagctcctcagactgaagatgaaggccatggtggagtctatgtcggtgggtgccaaccccttggacatcaccaggcgctttgtggaggccagccagctcctccacctcaatgccaaggagatggccttcaactgcctgatcagcacagccgggagaagtggctacagcagcggacagttgtggaaagagtccctcgcaaacatgtccgccattggggtgaactcgccttaccagctgatctaccactcttccacagcctgtctgagcttttctctctctgctggaaaagaagccaagaagaaaataggcaaatctagaactacagaagatgtcagcatgccgcccctgcatcgaggagtgggaacccctgccaacagcctggagttcagcgacccctgccctgaggcccgggagaagctgcaggagttgtgtcgccacatagaagctgaaagggccacatggaaagggaggaatatctcctaccccatgatcttacgaaactacaaggcaaagatgccctctcatctaatgttggcccgcaaaggagactctcagaccccgggtttacattaccctcccactgcaggtgctcagactctcagccccacctctcacccatcttctgccaaccatcatttcagtcagcattgtcaagaggggaaggcacccaagaaggccttcaagtttcattacaccttctatgatggctcctccttcgtttactatccctctggaaacgtcgctgtatgtcagatccccacatgctgcagagggagaaccatcacctgcctctttaatgacatacctggattctccttgctggccctattcaatactgaaggccagggctgtgttcactacaacctaaaaaccagttgcccatatgtcttaatcttggatgaggaaggtgggaccaccaatgaccagcagggctatgtagtccacaagtggagctggacttccaggacagagaccctgctttccctggaatacaaggtgaatgaggaaatgaaactaaaggtactgggacaggactccatcacagtcaccttcacctccctgaatgagacagtaacactcactgtgtcggccaacaattgtccccatggaatggcatatgacaaacggctgaaccgcagaatcagcaacatggacgacaaggtgtataagatgagccgagccctggctgagatcaagaagcggtttcagaagacagtgactcagttcattaattctatcttgctggccgcaggtctgtttaccattgaatatcccaccaaaaaggaggaggaagaatttgttcggttcaagatgagatccagaactcatcccgagcggctccccaagctaagtttatactcaggagaaagtcttttacgatctcagtcaggccacctggaatcctcaattgcagagactttgaaggatgagcctgagtctgctcctgtgagcccagttcggaagaccaccaaaatccacaccaaagccaaggtcacatccagagggaaggcccgcgaggggcgcagccccaccaggtgggcggccttgccctcagactgcccgctggtgctgcggaagctcatgctcaaggaagacacccgtgctggctgcaagtgcctggtgaaggcgcccctggtctctgacgtggagctggagcgcttcctgttggcgccccgagaccccagccaagtgctggtgtttgggatcatctcaagccagaactacaccagcactgggcagctccagtggctgctgaacactctctacaaccaccagcagcggggccgtggctccccctgcatccagtgccggtatgactcctaccgcctgctgcagtatgacctggacagccccctgcaggaggaccctcccctgatggtgaagaagaactctgtggtgcaggggatgattctgatgtttgccggggggaagctcatttttgggggccgtgttttgaatggatatggcctcagcaagcagaatctgctgaaacagatcttccggtctcaacaggattacaagatgggctacttcctgccggatgactacaaattcagtgttcccaactctgtcctgagcctggaggattctgaatcagtcaagaaagccgagtcagaagatatccaaggaagcagctcctcattggccctggaagactatgtggagaaggagttatctctggaggctgagaagacaagagagcctgaagtggagctacatcctctcagcagggacagcaagataactagttggaagaagcaggcctccaagaagtagcgccatcctggcagcagccaagtgagccaggccccggcccggggtgctggggcttcttgccagcccagccctgcctccccggtctcccaccctgtcctccaagcttctataataaaccagcgggcctccagcattggggtgaggctctggggaaggaca

SEQ ID NO: 223021 - DNA, 2744 bp, Artificial Sequence
  derived and/or modified sequence
gtccttttaagtcagtaaattgaactaagtcggttattcggcaagcagttcctataaaaaactacatggctaaggttcttaatgattgaccacaagcagatctttcaccctcggatctctagctacaaaaggtccccacactgaagaagccactacctccaccaccaccagcaccaccacgtccagtgctgctggcaaccactggggcagccaagcgctccaccctctctcccaccatggcccgtcaggtgcgcacccaccaggagaccctgaacaggtttcagcagcagtccatccacctgctgacggagctcctcagactgaagatgaaggccatggtggagtctatgtcggtgggtgccaaccccttggacatcaccaggcgctttgtggaggccagccagctcctccacctcaatgccaaggagatggccttcaactgcctgatcagcacagccgggagaagtggctacagcagcggacagttgtggaaagagtccctcgcaaacatgtccgccattggggtgaactcgccttaccagctgatctaccactcttccacagcctgtctgagcttttctctctctgctggaaaagaagccaagaagaaaataggcaaatctagaactacagaagatgtcagcatgccgcccctgcatcgaggagtgggaacccctgccaacagcctggagttcagcgacccctgccctgaggcccgggagaagctgcaggagttgtgtcgccacatagaagctgaaagggccacatggaaagggaggaatatctcctaccccatgatcttacgaaactacaaggcaaagatgccctctcatctaatgttggcccgcaaaggagactctcagaccccgggtttacattaccctcccactgcaggtgctcagactctcagccccacctctcacccatcttctgccaaccatcatttcagtcagcattgtcaagaggggaaggcacccaagaaggccttcaagtttcattacaccttctatgatggctcctccttcgtttactatccctctggaaacgtcgctgtatgtcagatccccacatgctgcagagggagaaccatcacctgcctctttaatgacatacctggattctccttgctggccctattcaatactgaaggccagggctgtgttcactacaacctaaaaaccagttgcccatatgtcttaatcttggatgaggaaggtgggaccaccaatgaccagcagggctatgtagtccacaagtggagctggacttccaggacagagaccctgctttccctggaatacaaggtgaatgaggaaatgaaactaaaggtactgggacaggactccatcacagtcaccttcacctccctgaatgagacagtaacactcactgtgtcggccaacaattgtccccatggaatggcatatgacaaacggctgaaccgcagaatcagcaacatggacgacaaggtgtataagatgagccgagccctggctgagatcaagaagcggtttcagaagacagtgactcagttcattaattctatcttgctggccgcaggtctgtttaccattgaatatcccaccaaaaaggaggaggaagaatttgttcggttcaagatgagatccagaactcatcccgagcggctccccaagctaagtttatactcaggagaaagtcttttacgatctcagtcaggccacctggaatcctcaattgcagagactttgaaggatgagcctgagtctgctcctgtgagcccagttcggaagaccaccaaaatccacaccaaagccaaggtcacatccagagggaaggcccgcgaggggcgcagccccaccaggtgggcggccttgccctcagactgcccgctggtgctgcggaagctcatgctcaaggaagacacccgtgctggctgcaagtgcctggtgaaggcgcccctggtctctgacgtggagctggagcgcttcctgttggcgccccgagaccccagccaagtgctggtgtttgggatcatctcaagccagaactacaccagcactgggcagctccagtggctgctgaacactctctacaaccaccagcagcggggccgtggctccccctgcatccagtgccggtatgactcctaccgcctgctgcagtatgacctggacagccccctgcaggaggaccctcccctgatggtgaagaagaactctgtggtgcaggggatgattctgatgtttgccggggggaagctcatttttgggggccgtgttttgaatggatatggcctcagcaagcagaatctgctgaaacagatcttccggtctcaacaggattacaagatgggctacttcctgccggatgactacaaattcagtgttcccaactctgtcctgagcctggaggattctgaatcagtcaagaaagccgagtcagaagatatccaaggaagcagctcctcattggccctggaagactatgtggagaaggagttatctctggaggctgagaagacaagagagcctgaagtggagctacatcctctcagcagggacagcaagataactagttggaagaagcaggcctccaagaagtagcgccatcctggcagcagccaagtgagccaggccccggcccggggtgctggggcttcttgccagcccagccctgcctccccggtctcccaccctgtcctccaagcttctataataaaccagcgggcctccagcattggggtgaggctctggggaaggaca

SEQ ID NO: 223022 - DNA, 2858 bp, Artificial Sequence
  derived and/or modified sequence
acagttaacacaacctggagtagcccatgccatactgtgtccttttaagtcagtaaattgaactaagtcggttattcggcaagcagttcctataaaaaactacatggctaagatgtacacgttggataattccatgcccatcttggcattgcgaccaggagcttctgcatcccttgcttccaaagcgaaccagtgaaacatctttttattcttgcaggttcttaatgattgaccacaagcagatctttcaccctcggatctctagctacaaaaggtccccacactgaagaagccactacctccaccaccaccagcaccaccacgtccagtgctgctggcaaccactggggcagccaagcgctccaccctctctcccaccatggcccgtcaggtgcgcacccaccaggagaccctgaacaggtttcagcagcagtccatccacctgctgacggagctcctcagactgaagatgaaggccatggtggagtctatgtcggtgggtgccaaccccttggacatcaccaggcgctttgtggaggccagccagctcctccacctcaatgccaaggagatggccttcaactgcctgatcagcacagccgggagaagtggctacagcagcggacagttgtggaaagagtccctcgcaaacatgtccgccattggggtgaactcgccttaccagctgatctaccactcttccacagcctgtctgagcttttctctctctgctggaaaagaagccaagaagaaaataggcaaatctagaactacagaagatgtcagcatgccgcccctgcatcgaggagtgggaacccctgccaacagcctggagttcagcgacccctgccctgaggcccgggagaagctgcaggagttgtgtcgccacatagaagctgaaagggccacatggaaagggaggaatatctcctaccccatgatcttacgaaactacaaggcaaagatgccctctcatctaatgttggcccgcaaaggagactctcagaccccgggtttacattaccctcccactgcaggtgctcagactctcagccccacctctcacccatcttctgccaaccatcatttcagtcagcattgtcaagaggggaaggcacccaagaaggccttcaagtttcattacaccttctatgatggctcctccttcgtttactatccctctggaaacgtcgctgtatgtcagatccccacatgctgcagagggagaaccatcacctgcctctttaatgacatacctggattctccttgctggccctattcaatactgaaggccagggctgtgttcactacaacctaaaaaccagttgcccatatgtcttaatcttggatgaggaaggtgggaccaccaatgaccagcagggctatgtagtccacaagtggagctggacttccaggacagagaccctgctttccctggaatacaaggtgaatgaggaaatgaaactaaaggtactgggacaggactccatcacagtcaccttcacctccctgaatgagacagtaacactcactgtgtcggccaacaattgtccccatggaatggcatatgacaaacggctgaaccgcagaatcagcaacatggacgacaaggtgtataagatgagccgagccctggctgagatcaagaagcggtttcagaagacagtgactcagttcattaattctatcttgctggccgcaggtctgtttaccattgaatatcccaccaaaaaggaggaggaagaatttgttcggttcaagatgagatccagaactcatcccgagcggctccccaagctaagtttatactcaggagaaagtcttttacgatctcagtcaggccacctggaatcctcaattgcagagactttgaaggatgagcctgagtctgctcctgtgagcccagttcggaagaccaccaaaatccacaccaaagccaaggtcacatccagagggaaggcccgcgaggggcgcagccccaccaggtgggcggccttgccctcagactgcccgctggtgctgcggaagctcatgctcaaggaagacacccgtgctggctgcaagtgcctggtgaaggcgcccctggtctctgacgtggagctggagcgcttcctgttggcgccccgagaccccagccaagtgctggtgtttgggatcatctcaagccagaactacaccagcactgggcagctccagtggctgctgaacactctctacaaccaccagcagcggggccgtggctccccctgcatccagtgccggtatgactcctaccgcctgctgcagtatgacctggacagccccctgcaggaggaccctcccctgatggtgaagaagaactctgtggtgcaggggatgattctgatgtttgccggggggaagctcatttttgggggccgtgttttgaatggatatggcctcagcaagcagaatctgctgaaacagatcttccggtctcaacaggattacaagatgggctacttcctgccggatgactacaaattcagtgttcccaactctgtcctgagcctggaggattctgaatcagtcaagaaagccgagtcagaagatatccaaggaagcagctcctcattggccctggaagactatgtggagaaggagttatctctggaggctgagaagacaagagagcctgaagtggagctacatcctctcagcagggacagcaagataactagttggaagaagcaggcctccaagaagtagcgccatcctggcagcagccaagtgagccaggccccggcccggggtgctggggcttcttgccagcccagccctgcctccccggtctcccaccctgtcctccaagcttctataataaaccagcgggcctcca

SEQ ID NO: 223023 - DNA, 2715 bp, Artificial Sequence
  derived and/or modified sequence
atgagctacatcaagagcaacctggagctgtaccagcagtacaccgccatggcccccaagctgctggccagaatcagcaagctgctgatgatctgccagaacgccggcatcagcgtgcccaagggcatcagaaacatcttcgagttcacctgggaggagctgatcagcgaccccagcgtgcccacccccagcgacatcctgggcctggaggtgagcttcggcgcccccctggtggtgctgatggagcccaccttcgtgcaggtgcccaccctgaagaagcccctgcccccccccccccccgccccccccagacccgtgctgctggccaccaccggcgccgccaagagaagcaccctgagccccaccatggccagacaggtgagaacccaccaggagaccctgaacagattccagcagcagagcatccacctgctgaccgagctgctgagactgaagatgaaggccatggtggagagcatgagcgtgggcgccaaccccctggacatcaccagaagattcgtggaggccagccagctgctgcacctgaacgccaaggagatggccttcaactgcctgatcagcaccgccggcagaagcggctacagcagcggccagctgtggaaggagagcctggccaacatgagcgccatcggcgtgaacagcccctaccagctgatctaccacagcagcaccgcctgcctgagcttcagcctgagcgccggcaaggaggccaagaagaagatcggcaagagcagaaccaccgaggacgtgagcatgccccccctgcacagaggcgtgggcacccccgccaacagcctggagttcagcgacccctgccccgaggccagagagaagctgcaggagctgtgcagacacatcgaggccgagagagccacctggaagggcagaaacatcagctaccccatgatcctgagaaactacaaggccaagatgcccagccacctgatgctggccagaaagggcgacagccagacccccggcctgcactacccccccaccgccggcgcccagaccctgagccccaccagccaccccagcagcgccaaccaccacttcagccagcactgccaggagggcaaggcccccaagaaggccttcaagttccactacaccttctacgacggcagcagcttcgtgtactaccccagcggcaacgtggccgtgtgccagatccccacctgctgcagaggcagaaccatcacctgcctgttcaacgacatccccggcttcagcctgctggccctgttcaacaccgagggccagggctgcgtgcactacaacctgaagaccagctgcccctacgtgctgatcctggacgaggagggcggcaccaccaacgaccagcagggctacgtggtgcacaagtggagctggaccagcagaaccgagaccctgctgagcctggagtacaaggtgaacgaggagatgaagctgaaggtgctgggccaggacagcatcaccgtgaccttcaccagcctgaacgagaccgtgaccctgaccgtgagcgccaacaactgcccccacggcatggcctacgacaagagactgaacagaagaatcagcaacatggacgacaaggtgtacaagatgagcagagccctggccgagatcaagaagagattccagaagaccgtgacccagttcatcaacagcatcctgctggccgccggcctgttcaccatcgagtaccccaccaagaaggaggaggaggagttcgtgagattcaagatgagaagcagaacccaccccgagagactgcccaagctgagcctgtacagcggcgagagcctgctgagaagccagagcggccacctggagagcagcatcgccgagaccctgaaggacgagcccgagagcgcccccgtgagccccgtgagaaagaccaccaagatccacaccaaggccaaggtgaccagcagaggcaaggccagagagggcagaagccccaccagatgggccgccctgcccagcgactgccccctggtgctgagaaagctgatgctgaaggaggacaccagagccggctgcaagtgcctggtgaaggcccccctggtgagcgacgtggagctggagagattcctgctggcccccagagaccccagccaggtgctggtgttcggcatcatcagcagccagaactacaccagcaccggccagctgcagtggctgctgaacaccctgtacaaccaccagcagagaggcagaggcagcccctgcatccagtgcagatacgacagctacagactgctgcagtacgacctggacagccccctgcaggaggacccccccctgatggtgaagaagaacagcgtggtgcagggcatgatcctgatgttcgccggcggcaagctgatcttcggcggcagagtgctgaacggctacggcctgagcaagcagaacctgctgaagcagatcttcagaagccagcaggactacaagatgggctacttcctgcccgacgactacaagttcagcgtgcccaacagcgtgctgagcctggaggacagcgagagcgtgaagaaggccgagagcgaggacatccagggcagcagcagcagcctggccctggaggactacgtggagaaggagctgagcctggaggccgagaagaccagagagcccgaggtggagctgcaccccctgagcagagacagcaagatcaccagctggaagaagcaggccagcaagaagtag

SEQ ID NO: 223024 - DNA, 2715 bp, Artificial Sequence
  derived and/or modified sequence
atgagctacattaaatctaatctggaactctatcaacagtacactgctatggccccaaaactgttagcccggatctctaaactccttatgatctgtcagaatgccgggattagtgtgccgaaggggattagaaatatcttcgaatttacttgggaagaactcataagcgatccatcagtcccaacaccctcagacatcctcggcctggaggtttcctttggcgccccactcgtggtgctgatggagcccactttcgtgcaagtccccactctcaaaaagcccctgcctcctccccccccagccccacctcgacctgtgctcctggccactaccggggctgccaaacgcagcactctttcccctacgatggcccgtcaggtacggacccaccaggagactctcaaccggttccagcagcagagcatccacctgttgactgaattgctgaggcttaaaatgaaggccatggtggaatcgatgtctgttggggccaatccactagacatcactcggagattcgtagaagccagccagctgctgcatctgaatgcgaaggaaatggccttcaattgtctgatcagcacagcagggcggtccgggtacagctctgggcaactttggaaggagtcactcgctaacatgtctgctattggagttaactctccgtaccagctgatatatcacagtagcacagcttgcttgagcttttcgctgtctgctggcaaagaggctaagaagaagataggtaagagtaggactaccgaggacgttagcatgccacccttgcacagaggagtggggactcccgctaactctcttgagttctccgatccctgccccgaagctagggaaaagctgcaagaattgtgtaggcatatagaggccgaaagggctacatggaagggacggaacatctcctatcctatgatcttgaggaactataaggcaaaaatgccctctcatctcatgctggcaaggaagggagatagccagacgccaggcttgcactatccacctactgccggagctcaaaccctcagccccacctcacatccgagcagtgccaaccatcactttagtcagcactgccaggaggggaaggctcccaaaaaagctttcaagtttcattatacattctacgacggcagcagcttcgtgtactaccctagcgggaacgtggcagtatgtcagattcctacgtgttgccgggggcgcaccataacatgtctgtttaatgacatccctggattttcactgctggctctcttcaatacggaaggacagggctgtgtacactacaatcttaaaacttcttgcccctacgtcctcatcctggatgaggaagggggcactacaaacgatcagcaggggtacgtcgtccacaagtggtcatggacctcccgcacggagacactgctaagcctggaatacaaagtgaacgaggagatgaaattgaaagtgctcgggcaggattcaataacggtgaccttcacatcactaaatgagactgtgacgctgaccgtgtctgcgaataactgccctcatggaatggcatacgacaagcggttaaatcgacggatcagcaatatggacgacaaggtgtataagatgagtcgcgctttagctgaaatcaaaaaaagattccagaaaacggtcactcagtttatcaatagtattctgttagctgccggactcttcaccattgaataccctacaaaaaaagaagaggaggagttcgttagattcaagatgagatcacgaacccatcccgagagacttcccaaactgtcgctctatagcggggagagtctcttaagatctcaaagcggtcatcttgaaagctccatcgccgagaccctgaaggacgagcccgagagcgcaccggtgtcacctgtgagaaagacaacaaaaatacacaccaaggctaaggtgacgtcccgggggaaagcgagagagggacgctctcccacaaggtgggccgcactccccagtgattgtcctttggttctgcgcaaacttatgttgaaagaagacacccgggcagggtgcaaatgcctggtaaaggctcctctggtcagtgacgtcgagctggagagatttctactggcgcctagggacccatctcaggtgctcgtgttcggtatcatctctagccagaattatacgtccacaggccagttgcagtggctgctgaatacgttatacaaccatcagcaaagggggcggggttccccttgcattcagtgtaggtatgactcttatcgcctactgcagtacgacttggactctcccctgcaggaagaccctccactgatggtgaaaaagaacagcgtggtgcaaggcatgatactcatgttcgccggggggaagctgatattcggaggacgtgttctgaatgggtacggactgtcaaagcagaacctgctgaagcagatttttagatcacagcaggactataaaatgggctattttctgcccgatgactataagttcagcgtgcctaactctgtcctgtctctggaagatagcgagtcagtaaagaaggcagagtctgaggacatccaaggaagcagctcctccctagcacttgaggattacgtcgagaaggagctgtcactggaggctgagaaaacgcgtgagccagaggtggagttgcaccctctttcgcgagattccaaaattacatcatggaaaaaacaggcctctaagaagtag

SEQ ID NO: 223025 - DNA, 2715 bp, Artificial Sequence
  derived and/or modified sequence
atgagctacatcaagagcaacctggagctgtaccagcagtacacagccatggcccccaagctgctggcccgcatcagcaagctgctgatgatctgccagaatgccggcatctctgtgcccaagggcatccggaacatctttgagttcacctgggaggagctgatcagtgaccccagcgtgcccacccccagcgacatcctgggcctggaggtgtcctttggagcccccctggtggtgctgatggagcccacctttgtgcaggtgcccaccctgaagaagcccctgcccccacctcctccagccccacccaggcctgtgctgctggccaccactggagctgccaagaggagcaccctgagccccaccatggcccggcaggtgaggacccaccaggagaccctgaaccgcttccagcagcagagcatccacctgctgacagagctgctgcggctgaagatgaaggccatggtggagagcatgtctgtgggcgccaaccccctggacatcaccaggagatttgtggaggccagccagctgctgcacctgaatgccaaggagatggccttcaactgcctgatcagcacagctggccgcagcggctacagcagcggccagctgtggaaggagagcctggccaacatgtctgccatcggcgtgaacagcccctaccagctgatctaccacagcagcacagcctgcctgtccttcagcctgtctgctgggaaggaggccaagaagaagattggcaagagcaggaccacagaagatgtgtccatgccacccctgcacagaggagtgggcaccccagccaacagcctggagttcagtgacccctgcccagaggcccgggagaagctgcaggagctgtgccgccacattgaagctgagcgggccacctggaagggcaggaacatctcctaccccatgatcctgaggaactacaaggccaagatgcccagccacctgatgctggccaggaaaggagacagccagaccccaggcctgcactacccacccacagctggggcccagaccctgagccccaccagccaccccagcagcgccaaccaccacttcagccagcactgccaggagggcaaggcccccaagaaggccttcaagttccactacaccttctatgatggcagcagctttgtgtactaccccagcggaaatgtggccgtgtgccagatccccacctgctgccggggccgcaccatcacctgcctcttcaatgacatccctggcttcagcctgctggccctcttcaacacagagggccagggctgtgtgcactacaacctgaagaccagctgcccctacgtgctgatcctggatgaggagggcggcaccaccaatgaccagcagggctacgtggtgcacaagtggagctggaccagcaggacagagaccctgctgagcctggagtacaaggtgaatgaggagatgaagctgaaggtgctgggccaggacagcatcaccgtgaccttcaccagcctgaatgaaacagtgaccctgactgtgtctgccaacaactgcccccacggcatggcctatgacaagaggctgaacagacgcatcagcaacatggatgacaaggtgtacaagatgagccgggccctggccgagatcaagaagcgcttccagaagacagtgacccagttcatcaacagcatcctgctggccgccggcctcttcaccatcgagtaccccaccaagaaggaggaggaggagtttgtgcgcttcaagatgaggagcaggacccaccctgagcggctgcccaagctgagcctgtacagcggggagagcctgctgcggagccagagcggccacctggagagcagcattgctgagaccctgaaggatgagcctgagagcgcccctgtgtcccctgtgaggaagaccaccaagatccacaccaaggccaaggtgaccagccggggcaaggcccgggagggccgcagccccacccgctgggccgccctgcccagcgactgccccctggtgctgaggaagctgatgctgaaggaggacaccagggctggctgcaagtgcctggtgaaggcccccctggtgtctgatgtggagctggagcgcttcctgctggccccccgggaccccagccaggtgctggtgtttggcatcatcagcagccagaactacaccagcacaggccagctgcagtggctgctgaacaccctgtacaaccaccagcagaggggccggggcagcccctgcatccagtgccgctatgacagctaccgcctgctgcagtatgacctggacagccccctgcaggaggacccccccctgatggtgaagaagaacagcgtggtgcagggcatgatcctgatgtttgctgggggcaagctgatctttggaggccgggtgctgaatggctacggcctgagcaagcagaacctgctgaagcagatcttccgcagccagcaggactacaagatgggctacttcctgcctgatgactacaagttctctgtgcccaacagcgtgctgagcctggaggacagcgagagcgtgaagaaggccgagagcgaggacatccagggcagcagcagcagcctggccctggaggactatgtggagaaggagctgagcctggaggccgagaagacccgggagcctgaggtggagctgcaccccctgagccgggacagcaagatcacctcctggaagaagcaggccagcaagaagtag

SEQ ID NO: 223026 - DNA, 2715 bp, Artificial Sequence
  derived and/or modified sequence
atgagctacatcaagagcaacctggagctgtaccagcagtacaccgccatggctcctaaattgctggcaaggataagtaagttgctgatgatttgtcagaacgccggcatcagtgtcccgaagggaatcagaaacatctttgagtttacatgggaagagctcatatcggatccttccgtcccaacccccagcgacattttgggactcgaggtttcattcggagctcccctggtggtgctgatggagccaacattcgtgcaagtccctacattaaaaaagcctcttccccctcccccaccagccccaccgagacccgtactactagcaactacaggggcagctaagaggtctactctcagtcctactatggccaggcaagtaagaacccaccaggagacattgaatagattccagcaacagtcaattcaccttctgaccgagctactgcggctcaagatgaaagccatggtcgagtccatgtcggtgggcgcaaatccactggatatcactcgcaggttcgtggaggcctctcagctcttgcacctgaacgcgaaagagatggcattcaactgcctcatttctacggcagggcgcagtgggtactcaagcggccagctgtggaaggagagcctcgccaatatgtccgcaatcggagtgaactcgccctaccaactaatataccactcgagcacggcctgcctgagtttctcattaagcgccggaaaagaggctaagaaaaagatcggcaagtccaggaccacagaggacgtttcaatgcctccccttcaccgcggagtgggcactccagctaactcgctggagttctcggacccctgtcctgaggctcgggaaaaattacaagaactctgcagacacatcgaggctgaaagggccacctggaaaggaaggaatatctcttatcccatgatcctacgtaactacaaggctaagatgcccagccatctaatgcttgccaggaagggagactcacaaacccccggtctacactacccccccacagctggtgcacagaccctatcacccacttctcacccatccagtgcaaaccaccacttttctcaacattgtcaagaaggtaaggcgcctaaaaaggcatttaaattccactatactttttacgacggaagctcttttgtttattatccttctgggaacgttgccgtgtgtcagatacctacctgttgtcgggggcgtactatcacatgcctcttcaatgatatccccggttttagcctgctggccctgttcaataccgaaggccagggttgtgtgcactacaacctaaaaacatcttgtccttatgtcctgattctagatgaggaaggaggtacaactaatgatcagcaagggtatgtggtgcataagtggtcatggacgtcaaggacagagactttattgtctttggagtataaagttaatgaggagatgaagcttaaggtcctgggccaggactcgatcaccgtgacctttacctctttgaacgagaccgttactctcaccgtttcggcaaataactgccctcacggaatggcttatgataaacggctgaatcggcgcatctccaacatggacgataaagtctataaaatgagccgcgctctcgctgaaatcaagaagagatttcagaagaccgtgacccagtttatcaattctattctcctagccgcgggcctgttcaccatagagtacccaaccaagaaagaagaggaggagttcgtgcgctttaagatgcgttcacgaactcatcctgaaagactgccaaagctgtctctgtacagtggcgagtcgctgcttcgatctcaaagcggccaccttgaatcttctatcgctgagacgttgaaggatgagccagagtcggccccagtaagccctgtgcgcaagaccaccaagatccatacaaaggccaaagtgacctccagaggaaaggctagggaaggtcgtagccctacaagatgggctgctttgccttctgactgtccccttgtactcaggaaactgatgttgaaggaggatacccgcgccggatgtaaatgcctggtgaaagctcccctggttagcgatgtggagctcgaacgattcctgttagctcccagggatcccagtcaggtgttggtttttggcatcatctctagtcaaaactatactagcaccggccagctgcaatggttacttaatactctatataatcatcagcaacgtggaagggggagcccttgtattcagtgccggtatgacagttaccggcttcttcagtacgatctggattcacccctgcaagaggatcctcccctgatggtgaagaagaactcagttgtacagggtatgatcttaatgtttgccggtggaaaactgatctttggagggagggtcttgaacgggtatgggctgtccaagcagaacctactgaaacaaatttttcgatcccaacaggattacaaaatgggttattttcttccagacgattataaattcagcgttccaaattcagttctgtccctcgaggactcggagagcgttaaaaaagctgaatccgaagatatccaaggttcatcatctagcctggcgctagaggactacgtggagaaggagttgtctttagaagctgagaaaacacgcgagccagaggtggagctacacccattgagccgcgattccaagattacgagttggaagaaacaggcatccaaaaagtag

SEQ ID NO: 223027 - DNA, 2715 bp, Artificial Sequence
  derived and/or modified sequence
atgtcgtacattaaatccaatctagagctctaccaacagtacaccgcaatggcccctaaattattggctcgcatctctaagctgctgatgatctgtcaaaatgccggaattagcgtgccgaagggcatcaggaacatcttcgagtttacttgggaggagctcatcagcgacccttcagtgcctacacctagtgacatcctgggcctagaggtttcttttggagcccctctcgtggtccttatggagcccacgttcgttcaggtacctacccttaagaaaccattaccgcctcccccacccgctcctccacgtccagttctcctggccacgactggtgccgctaagaggtcaaccctgagccctacaatggccagacaggtccggactcatcaggaaaccctgaaccgttttcaacagcagtcaatccacctcctgactgagctactgaggctcaagatgaaggccatggtggaatccatgtctgtgggagccaacccgttagatatcacccggcgtttcgtcgaagcaagtcagctcctccacttgaatgccaaagagatggccttcaattgtctgataagcactgcaggaagaagcggctacagcagcgggcagctgtggaaggaaagtctagccaacatgtccgcaatcggcgtgaatagtccctaccagctgatctatcacagttcgaccgcctgcctttcattctccctgagcgccggaaaggaggctaagaaaaaaattggaaagagtcgtaccaccgaggacgtgtcaatgccacccctgcaccgcggagtaggcacgcctgccaactcccttgagttcagcgatccgtgccccgaggcgagggaaaaacttcaggagctttgcagacacatagaggcagagcgagccacttggaagggcaggaatatcagctaccccatgatcctgcgcaactataaagctaaaatgccttcccacctgatgctggcacggaagggcgatagtcagacccccggattgcactatccaccgaccgcaggtgctcaaaccctttcccctaccagtcatcctagctccgccaaccaccacttcagccaacactgtcaggaggggaaggcaccgaagaaggctttcaaattccattacaccttttacgacgggtcatctttcgtgtactacccaagtgggaatgtggctgtctgtcagatccctacatgctgccgaggacgcacaataacctgcctctttaacgacatccctggattcagcctgctagctctatttaatacagaagggcagggctgcgtgcactataatctcaaaacgtcgtgcccctacgtcttgatccttgatgaagaaggaggaactaccaatgatcagcaaggttatgtggttcataaatggtcttggacatcccgaacagaaaccttgctcagcctggagtacaaagtgaacgaggagatgaagctcaaagtcctcggacaggattctattactgtgacattcacatcccttaatgagaccgttactctgaccgtttcagcgaacaactgcccccatggcatggcatacgacaaacgactgaatcgcaggatcagtaacatggatgacaaagtctacaaaatgtccagagctctcgcggagataaagaagaggttccagaagaccgtcacccagtttatcaatagtattcttctggccgctggattatttacaatcgagtatcccactaaaaaggaggaagaggaattcgtacggttcaaaatgcggtcaagaacgcatcctgagcggttgcccaagctgtcactgtactctggagaaagcctgctgaggagtcaaagtggacatctcgaaagcagcattgctgagacacttaaggacgagccagagtctgctccagtctctcccgtacggaagacaacaaagatccatactaaggccaaagtaacttcccgcggtaaggccagggagggaaggagcccaacccgctgggccgcactcccttctgactgcccactagttctccgtaagctgatgttgaaagaggatactagggccggttgtaagtgtctggtcaaggcccctttggtgtccgacgtggagttagagagatttctgctagcacctagagacccgagtcaagtgcttgtgtttggtataatttcttctcagaattacacatcaaccggacaactgcaatggctgcttaataccttgtataaccaccagcagagagggaggggaagtccttgcatccagtgccgttacgatagctatcggctgctgcagtacgatctggactccccactacaggaggatccgcctctaatggtgaaaaaaaatagcgtggtgcagggaatgatactcatgttcgccggaggcaaactgatattcggaggtcgcgtgctgaacggctatgggctttccaaacagaacctcttaaaacagatcttcagatcccagcaggactataagatgggatatttcctgccagacgattacaaattctctgtccccaactccgtgctttccctggaagactccgagagtgtaaagaaggctgaaagcgaagacatccaggggagctcttcatccctggcccttgaggactacgtggaaaaagagctgtcgttggaagccgagaaaactcgagagcctgaggtggagctgcatcctcttagtagggattcgaaaattacaagttggaaaaagcaggcctcaaagaagtag

SEQ ID NO: 223028 - protein, 558 aa, Artificial Sequence
  derived and/or modified sequence
MAIPGRQYGLILPKKTQQLHPVLQKPSVFGNDSDDDDETSVSESLQREAAKKQAMKQTKLEIQKALAEDATVYEYDSIYDEMQKKKEENNPKLLLGKDRKPKYIHNLLKAVEIRKKEQEKRMEKKIQREREMEKGEFDDKEAFVTSAYKKKLQERAEEEEREKRAAALEACLDVTKQKDLSGFYRHLLNQAVGEEEVPKCSFREARSGIKEEKSRGFSNEVSSKNRIPQEKCILQTDVKVEENPDADSDFDAKSSADDEIEETRVNCRREKVIETPENDFKHHRSQNHSRSPSEERGHSTRHHTKGSRTSRGHEKREDQHQQKQSRDQENHYTDRDYRKERDSHRHREASHRDSHWKRHEQEDKPRARDQRERSDRVWKREKDREKYSQREQERDRQQNDQNRPSEKGEKEEKSKAKEEHMKVRKERYENNDKYRDREKREVGVQSSERNQDRKESSPNSRAKDKFLDQERSNKMRNMAKDKERNQEKPSNSESSLGAKHRLTEEGQEKGKEQERPPEAVSKFAKRNNEETVMSARDRYLARQMARVNAKTYIEKEDD

SEQ ID NO: 223029 - DNA, 1677 bp, Artificial Sequence
  derived and/or modified sequence
atggccattccaggtcgacagtatggactaatcctgccaaagaagacccagcaactgcatcccgtgctgcagaaaccctccgttttcggcaatgactccgatgatgacgatgaaacgtcggtaagcgagagcctccaacgcgaagcggctaagaaacaggcaatgaagcagacgaagcttgaaatccagaaagcactggcggaagatgcgacggtttatgaatacgattctatctacgacgaaatgcaaaagaaaaaagaggaaaacaaccccaaactgctcctgggaaaagacagaaagcccaaatacattcacaatctgttaaaggccgtcgagatccggaaaaaggagcaagaaaagcgcatggaaaaaaagatccagagagaaagggagatggaaaagggtgaatttgacgataaagaagcttttgtaacatccgcgtataagaagaagctccaggagcgcgccgaggaggaagagagagagaaaagggcggcggcattggaggcctgtctggatgtgactaagcagaaggacttgtcagggttttaccgccatctactcaatcaggcagtcggcgaagaggaagttcccaagtgcagttttcgcgaggcaaggtccggaattaaggaggagaaatcaagaggtttcagtaatgaagtgtccagtaaaaacaggattccgcaagaaaaatgcatactccagacagacgtgaaagtggaggagaatcctgatgctgattccgacttcgacgccaaaagttcagccgacgacgagatcgaggagacccgtgtcaactgccgaagagaaaaggtcatcgagactcccgaaaatgacttcaaacaccaccgttcccagaatcactcccggtcaccctccgaggagcggggccactccactaggcaccacaccaagggatctcgcacaagccggggccacgaaaagcgcgaagaccagcaccagcagaagcagagccgggatcaggaaaatcactacaccgatagagactataggaaagaacgcgactcccatagacaccgagaagcttctcatagggacagtcactggaagaggcacgagcaggaggataaacctcgcgcacgcgatcagcgtgagcgcagcgatagagtttggaagagggagaaagatagagagaagtattcccagcgcgagcaagaacgggaccgccaacagaatgaccagaatcggccatcggagaaaggagaaaaggaagagaaatctaaagccaaggaagaacatatgaaggtccggaaggagagatatgaaaacaacgacaaataccgagaccgcgagaaaagagaagttggtgtgcagagcagtgagagaaatcaggacagaaaagaatccagtccgaacagccgggctaaagacaaattcctcgaccaagagcggagtaataagatgaggaatatggcgaaagataaagaacggaaccaagagaagccaagcaactctgagtcttctctgggtgctaaacaccggctgacagaggaggggcaagaaaaggggaaagaacaggagcgccccccagaggcagttagcaagtttgctaaacgtaataacgaagagacggttatgtctgccagagataggtacctggcacggcagatggcccgcgtgaacgccaaaacatatatcgagaaggaagacgactag

SEQ ID NO: 223030 - DNA, 2541 bp, Artificial Sequence
  derived and/or modified sequence
cgtgacgacatcggcgtcagcgtcacggaggcgtcggccacgttcagcggacacgggagcaagatggcgattccgggcaggcagtatgggcttattttgccaaagaaaacacagcagttgcaccctgttttgcaaaaaccatcagtgtttgggaatgattctgatgatgatgatgagacctctgtgagtgaaagccttcagagggaagctgctaagaagcaggccatgaaacagaccaaactggaaatccagaaggcccttgcagaagatgctactgtgtatgaatatgacagtatttatgatgaaatgcagaaaaaaaaggaggaaaataatcccaaattgcttttggggaaagacagaaagcccaagtatattcacaacttgctaaaagcagttgagatcagaaaaaaggaacaggaaaaaagaatggaaaagaaaatacagagagaacgagaaatggaaaagggggagtttgatgataaagaagcatttgtgacatctgcatataagaaaaaactgcaagagagagctgaagaagaagaaagagaaaagagggctgctgcactggaagcatgtttggatgtaaccaagcagaaagatctcagtggattttataggcacctattaaatcaagcagttggtgaagaggaagtacctaaatgcagctttcgtgaagccagatctggtataaaggaagaaaaatcaaggggcttctccaatgaagtaagttcaaaaaacagaataccacaagagaaatgcattcttcaaactgatgtgaaagtagaggaaaacccagatgcagacagtgacttcgatgctaagagcagtgcggatgatgaaatagaagaaactagagtgaactgcagaagggaaaaggtcatagagacccctgagaatgacttcaagcaccacaggagtcaaaaccactctcggtcacctagtgaagaaagagggcacagtaccaggcaccacacgaaaggatcacgaacgtcgagaggacatgagaaaagggaagatcagcaccagcagaagcaatccagagaccaagagaaccattacactgaccgtgattaccggaaagaaagggattctcataggcacagagaggccagtcatagagattcccattggaagaggcatgaacaggaagataaaccaagggcgagggaccaaagagaaagaagtgacagagtatggaaaagggagaaagatagggagaaatattcccaaagagaacaagaaagagatagacaacaaaatgatcagaaccgacccagtgagaaaggagagaaggaagagaaaagcaaagcaaaggaagagcatatgaaagtaaggaaggaaagatatgaaaataatgataaatacagagatagagaaaaacgagaggtaggtgttcagtcttcagaaagaaatcaagacagaaaggaaagcagcccaaattctagggcaaaggataaatttcttgaccaagaaagatccaacaaaatgagaaacatggcaaaggacaaagaaagaaaccaagagaaaccctctaattctgaatcatcactgggagcaaaacacagactcacagaggaagggcaagagaagggtaaagaacaagagagaccacctgaggcagtgagcaagtttgcaaagcggaacaatgaagaaactgtaatgtcagctagagacaggtacttggccaggcagatggcgcgggttaatgcaaagacctatattgagaaagaagatgattgatggctaccccaagagaaagatttaaggaagcacagaaaactgtaattcctggaacctgctgcgtaaaaccataaaggagtgtgttaccagtagtttggagggcatttttaaatttattttcaaaattttaagttaaaagtcagtcttacagcttggatgtttggatgtggatgtttggctgaatttatatatagtgtgtactcatcaataccacattctttgttgtattcaagaaccgttaagagtgtgctaattccctgtaggtacataatgaggaaaatttgctccactacaaccattaaaaaataattttggccagatacggtagctcgtgcctgtaataccaacattttgggaggccaaggcagaaggatattgaggctaggcattcaagaccagcctaggcaggataataagaccttgtctctatttaaaaaacaaaaagcctagcatggtagtccatgcctgtagtcccagctgttcgagaggctgaggcaagaagatcacttgagcctaggaatttgatgttacagtgaggtatgatcatgccactgcactccaacctgggcaacagaatgagaccctgtctctaaaaaattttttttaaataaataatttaactcttctaataatgttttgttgcaggaaatgtatttcagataaaatatggatttgaaaaacagaaaatatactttatgttctgaaatttgtatttaagtataaaatgtgaatcatcttgtctaaatagcttacagcatagttggcttaaatgaaaataaaatgatatgcttatacatttta

SEQ ID NO: 223031 - DNA, 1677 bp, Artificial Sequence
  derived and/or modified sequence
atggccatccctggccggcagtatggcctcatcctgcccaagaagacccagcagctgcaccctgtgctgcagaagcccagcgtgtttggaaatgacagtgatgatgatgatgagacctctgtgtctgagagcctgcagcgggaggccgccaagaagcaggccatgaagcagaccaagctggagatccagaaggccctggccgaggatgccaccgtgtatgaatatgacagcatctatgatgagatgcagaagaagaaggaggagaacaaccccaagctgctgctgggcaaggacaggaagcccaagtacatccacaacctgctgaaggctgtggagatcaggaagaaggagcaggagaagaggatggagaagaagatccagcgggagcgggagatggagaagggggagtttgatgacaaggaggcctttgtgaccagcgcctacaagaagaagctgcaggagcgggcagaggaggaggagcgggagaagagagctgctgccctggaggcctgcctggatgtgaccaagcagaaggacctgagcggcttctaccgccacctgctgaaccaggccgtgggggaggaggaggtgcccaagtgcagcttccgggaggcccggagcggcatcaaggaggagaagagccggggcttcagcaatgaggtgagcagcaagaaccgcatcccccaggagaagtgcatcctgcagacagatgtgaaggtggaggagaacccagatgctgacagcgactttgatgccaagagcagcgcagatgatgaaattgaggagaccagggtgaactgccggcgggagaaggtgattgagaccccagaaaatgacttcaagcaccacaggagccagaaccacagccgcagccccagcgaggagcggggccacagcaccaggcaccacaccaagggcagcaggaccagccggggccacgagaagcgggaggaccagcaccagcagaagcagagccgggaccaggagaaccactacacagaccgggactacaggaaggagcgggacagccaccgccaccgggaggccagccaccgggacagccactggaagagacatgagcaggaggacaagccccgggcccgggaccagcgggagaggagtgacagagtgtggaagcgggagaaggaccgggagaagtacagccagcgggagcaggagcgggaccggcagcagaatgaccagaaccggcccagcgagaagggggagaaggaggagaagagcaaggccaaggaggagcacatgaaggtgaggaaggagagatatgaaaataatgacaagtacagagaccgggagaagcgggaggtgggcgtgcagagcagcgagaggaaccaggacaggaaggagagcagccccaacagccgggccaaggacaagttcctggaccaggagaggagcaacaagatgaggaacatggccaaggacaaggagaggaaccaggagaagcccagcaacagcgagagcagcctgggcgccaagcaccggctgacagaggagggccaggagaagggcaaggagcaggagcggcccccagaggccgtgtccaagtttgccaagaggaacaatgaggagaccgtgatgtctgcccgggaccgctacctggcccggcagatggcccgggtgaatgccaagacctacatcgagaaggaggatgactag

SEQ ID NO: 223032 - DNA, 1677 bp, Artificial Sequence
  derived and/or modified sequence
atggccatccccggccggcagtacggcctgatcctgcccaagaagacacagcagcttcatccagtactccagaaaccttccgtgttcggcaatgattcggacgacgacgatgaaacttctgtgtcagaaagtctgcagcgggaagccgccaagaagcaggcaatgaagcaaacaaaacttgagatacagaaggctctcgccgaggacgccacggtgtacgaatacgattctatctacgatgaaatgcaaaaaaaaaaggaagaaaataaccccaaacttttactgggcaaggatcgaaagccaaagtacatacacaatctgctgaaggctgtcgagattaggaaaaaagagcaggaaaagcgaatggaaaaaaagatacaaagggagcgtgaaatggagaaaggcgaatttgacgacaaggaagcattcgtcacaagcgcctacaaaaagaagctccaagagcgggccgaagaggaggagagggagaagcgggcagctgctctggaagcttgtctggatgtgaccaagcaaaaggatttgagcggcttctatcggcacttactgaaccaagcggttggcgaggaggaggtgccaaagtgctcctttagagaagctcgatcaggtataaaggaggagaagtccaggggctttagcaacgaagtttccagcaaaaaccggattcctcaagaaaaatgcattctgcagacagatgtgaaggtggaggagaaccctgacgccgactcagacttcgatgccaagtctagtgccgatgacgaaatcgaggaaacccgtgtgaattgtcggagagaaaaagtgatagagacacctgagaatgacttcaagcaccaccggtcgcagaaccactctcgatctcccagtgaggaacgcggacactcaacccggcaccatactaaagggagtcgtacgagtcggggccacgagaagagagaagatcagcatcagcagaagcagtcgcgcgaccaagagaaccattatacagatagagactaccggaaagaacgggactcccaccgacatcgggaagcctcacatagagacagtcattggaagcgacacgaacaggaagacaagcctagggcacgggaccagagagaaaggtcggacagagtttggaagagagagaaggatagagagaaatactcacagcgggagcaagagagagaccgccagcagaatgatcagaaccgccctagcgagaagggggaaaaggaggaaaaaagcaaagccaaggaggaacatatgaaagtccgcaaagaacgatatgaaaataatgacaagtaccgcgacagagaaaaacgcgaagtgggcgtgcagagcagtgagaggaaccaggaccgcaaagagtcctctccgaacagccgtgctaaagacaaattcctggaccaggaacgctctaacaaaatgagaaacatggccaaggataaagagaggaatcaggagaaaccttccaactctgagtcatctctcggagctaagcaccggctgactgaggagggccaagaaaagggcaaagagcaggagcgcccacccgaagcagtcagtaaattcgctaagcgcaataacgaggaaacagtgatgtccgcacgagaccgatacctggcacgccagatggctagggtgaatgccaagacctacatcgagaaagaagatgattag

SEQ ID NO: 223033 - DNA, 1677 bp, Artificial Sequence
  derived and/or modified sequence
atggcgatccctgggagacaatacgggctcatcctgccgaaaaagacccaacagctacatccagtgctgcaaaaaccaagcgtgttcgggaacgatagcgacgacgatgatgaaacatccgttagcgagagccttcagagagaggccgctaagaagcaggcgatgaagcagaccaaactggagatccagaaagctctagcggaagacgccacagtctacgaatatgatagtatctacgatgaaatgcaaaagaaaaaagaagagaacaaccctaagctcctcctcggaaaagatcgaaaacccaagtatattcacaacctgctcaaagccgtcgagattagaaaaaaagaacaggagaagagaatggagaaaaagattcaacgggagcgagagatggagaagggagagtttgacgacaaagaagcgtttgtgacctcagcctataagaaaaaactgcaagaacgagccgaggaggaggaaagagaaaagagagccgcagcgcttgaggcttgtctcgatgtaactaagcagaaggatttgagtgggttttaccgtcacctgctgaaccaagccgtaggcgaggaggaggtgcctaagtgttcattcagggaagcaaggtctggaataaaagaagagaaaagcaggggttttagtaacgaagtttcttcaaaaaacagaatcccccaagagaagtgtatcctgcagaccgacgtaaaggtggaggagaacccggatgcagattctgactttgacgctaaatccagcgctgacgatgagattgaagaaacacgggtgaactgccggagggaaaaagtcatcgaaactccagaaaacgattttaaacaccaccggagccagaatcactcccgctctccttcagaagaaagaggccactcaaccagacaccacaccaagggtagcagaacaagtagaggccacgagaagcgcgaagatcagcatcaacaaaagcagtcccgcgatcaggagaaccactataccgatagagactaccgaaaagagcgcgacagccaccgacatcgggaagcctcccaccgcgacagtcattggaagaggcacgaacaggaggacaagccccgagcccgagatcagagagaacgctctgacagggtgtggaagcgtgagaaggatcgagaaaagtattcacagagagagcaggagagggatagacaacagaatgatcagaataggccatctgaaaaaggagaaaaagaagaaaagtccaaggctaaggaggagcatatgaaggttaggaaggagcgctatgagaacaatgataaatatagggatagggagaagcgggaggtcggcgtacagtctagtgaacgcaaccaggatcggaaggagagttccccaaactctagggcgaaagacaaatttctcgaccaagagcgatccaataagatgcgcaatatggctaaagacaaagaacgcaatcaggagaaaccgagtaactccgagagcagccttggagccaaacataggctcacggaagaaggccaagaaaaggggaaggaacaagagcggcctccggaagctgtatccaagttcgcaaagcggaacaacgaagagaccgttatgtctgcccgagatagatatcttgcaaggcaaatggcgcgtgtcaatgcgaagacgtatatagagaaagaggatgattag

SEQ ID NO: 223034 - DNA, 1677 bp, Artificial Sequence
  derived and/or modified sequence
atggccatccccggcagacagtacggcctgatcctgcccaagaagacccagcagctgcaccccgtgctgcagaagcccagcgtgttcggcaacgacagcgacgacgacgacgagaccagcgtgagcgagagcctgcagagagaggccgccaagaagcaggccatgaagcagaccaagctggagatccagaaggccctggccgaggacgccaccgtgtacgagtacgacagcatctacgacgagatgcagaagaagaaggaggagaacaaccccaagctgctgctgggcaaggacagaaagcccaagtacatccacaacctgctgaaggccgtggagatcagaaagaaggagcaggagaagagaatggagaagaagatccagagagagagagagatggagaagggcgagttcgacgacaaggaggccttcgtgaccagcgcctacaagaagaagctgcaggagagagccgaggaggaggagagagagaagagagccgccgccctggaggcctgcctggacgtgaccaagcagaaggacctgagcggcttctacagacacctgctgaaccaggccgtgggcgaggaggaggtgcccaagtgcagcttcagagaggccagaagcggcatcaaggaggagaagagcagaggcttcagcaacgaggtgagcagcaagaacagaatcccccaggagaagtgcatcctgcagaccgacgtgaaggtggaggagaaccccgacgccgacagcgacttcgacgccaagagcagcgccgacgacgagatcgaggagaccagagtgaactgcagaagagagaaggtgatcgagacccccgagaacgacttcaagcaccacagaagccagaaccacagcagaagccccagcgaggagagaggccacagcaccagacaccacaccaagggcagcagaaccagcagaggccacgagaagagagaggaccagcaccagcagaagcagagcagagaccaggagaaccactacaccgacagagactacagaaaggagagagacagccacagacacagagaggccagccacagagacagccactggaagagacacgagcaggaggacaagcccagagccagagaccagagagagagaagcgacagagtgtggaagagagagaaggacagagagaagtacagccagagagagcaggagagagacagacagcagaacgaccagaacagacccagcgagaagggcgagaaggaggagaagagcaaggccaaggaggagcacatgaaggtgagaaaggagagatacgagaacaacgacaagtacagagacagagagaagagagaggtgggcgtgcagagcagcgagagaaaccaggacagaaaggagagcagccccaacagcagagccaaggacaagttcctggaccaggagagaagcaacaagatgagaaacatggccaaggacaaggagagaaaccaggagaagcccagcaacagcgagagcagcctgggcgccaagcacagactgaccgaggagggccaggagaagggcaaggagcaggagagaccccccgaggccgtgagcaagttcgccaagagaaacaacgaggagaccgtgatgagcgccagagacagatacctggccagacagatggccagagtgaacgccaagacctacatcgagaaggaggacgactag

SEQ ID NO: 223035 - protein, 1941 aa, Artificial Sequence
  derived and/or modified sequence
MKTSDLVPSFGYFIRSPEKREPIALIRKSDVSRGNLEKEMAHLNHDLYSGDLNEQSQAQLSEGSITLQVEAVESTSQVDENDVTLTADKGKTEDTFFMSNKPQRYKDKLPDSGDSMLRISTIASAIAEASVNTDPSQLAAMIKALSNKTRDKTFQEDEKQKDYSHVRHFLPNDLEKSNGSNALDMEKYLKKTEVSRYESALENFSRASMSDTWDLSLPKEQTTQDIHPVDLSATSVSVRAPEENTAAIVYVENGESENQESFRTINSSNSVTNRENNSAVVDVKTCSIDNKLQDVGNDEKATSISTPSDSYSSVRNPRITSLCLLKDCEEIRDNRENQRQNECVSEISNSEKHVTFENHRIVSPKNSDLKNTSPEHGGRGSEDEQESFRPSTSPLSHSSPSEISGTSSSGCALESFGSAAQQQQPPCEQELSPLVCSPAGVSRLTYVSEPESSYPTTATDDALEDRKSDITSELSTTIIQGSPAALEERAMEKLREKVPFQNRGKGTLSSIIQNNSDTRKATETTSLSSKPEYVKPDFRWSKDPSSKSGNLLETSEVGWTSNPEELDPIRLALLGKSGLSCQVGSATSHPVSCQEPIDEDQRISPKDKSTAGREFSGQVSHQTTSENQCTPIPSSTVHSSVADMQNMPAAVHALLTQPSLSAAPFAQRYLGTLPSTGSTTLPQCHAGNATVCGFSGGLPYPAVAGEPVQNSVAVGICLGSNIGSGWMGTSSLCNPYSNTLNQNLLSTTKPFPVPSVGTNCGIEPWDSGVTSGLGSVRVPEELKLPHACCVGIASQTLLSVLNPTDRWLQVSIGVLSISVNGEKVDLSTYRCLVFKNKAIIRPHATEEIKVLFIPSSPGVFRCTFSVASWPCSTDAETIVQAEALASTVTLTAIAESPVIEVETEKKDVLDFGDLTYGGWKALPLKLINRTHATVPIRLIINANAVAWRCFTFSKESVRAPVEVAPCADVVTRLAGPSVVNHMMPASYDGQDPEFLMIWVLFHSPKKQISSSDILDSAEEFSAKVDIEVDSPNPTPVLRSVSLRARAGIARIHAPRDLQTMHFLAKVASSRKQHLPLKNAGNIEVYLDIKVPEQGSHFSVDPKNLLLKPGEEHEVIVSFTPKDPEACEERILKIFVQPFGPQYEVVLKGEVISSGSKPLSPGPCLDIPSILSNKQFLAWGGVPLGRTQLQKLALRNNSASTTQHLRLLIRGQDQDCFQLQNTFGSEQRLTSNCEIRIHPKEDIFISVLFAPTRLSCMLARLEIKQLGNRSQPGIKFTIPLSGYGGTSNLILEGVKKLSDSYMVTVNGLVPGKESKIVFSVRNTGSRAAFVKAVGFKDSQKKVLLDPKVLRIFPDKFVLKERTQENVTLIYNPSDRGINNKTATELSTVYLFGGDEISRQQYRRALLHKPEMIKQILPEHSVLQNINFVEAFQDELLVTEVYDLPQRPNDVQLFYGSMCKIILSVIGEFRDCISSREFLQPSSKASLESTSDLGASGKHGGNVSLDVLPVKGPQGSPLLSRAARPPLDQLASEEPWTVLPEHLILVAPSPCDMAKTGRFQIVNNSVRLLRFELCWPAHCLTVTPQHGCVAPESKLQILVSPNSSLSTKQSMFPWSGLIYIHCDDGQKKIVKVQIREDLTQVELLTRLTSKPFGILSPVSEPSVSHLVKPMTKPPSTKVEIRNKSITFPTTEPGETSESCLELENHGTTDVKWHLSSLAPPYVKGVDESGDVFRATYAAFRCSPISGLLESHGIQKVSITFLPRGRGDYAQFWDVECHPLKEPHMKHTLRFQLSGQSIEAENEPENACLSTDSLIKIDHLVKPRRQAVSEASARIPEQLDVTARGVYAPEDVYRFRPTSVGESRTLKVNLRNNSFITHSLKFLSPREPFYVKHSKYSLRAQHYINMPVQFKPKSAGKFEALLVIQTDEGKSIAIRLIGEALGKN

SEQ ID NO: 223036 - protein, 2537 aa, Artificial Sequence
  derived and/or modified sequence
MEDFRGIAEESFPSFLTNSLFGNSGILENVTLSSNLGLPVAVSTLARDRSSTDNRYPDIQASYLVEGRFSVPSGSSPGSQSDAEPRERLQLSFQDDDSISRKKSYVESQRLSNALSKQSALQMETAGPEEEPAGATESLQGQDLFNRASPLEQAQDSPIDFHLQSWMNNKEPKIVVLDAGKHFEDKTLKSDLSHTSLLENEKLILPTSLEDSSDDDIDDEMFYDDHLEAYFEQLAIPGMIYEDLEGPEPPEKGFKLPTNGLRQANENGSLNCKFQSENNSSLISLDSHSSETTHKESEESQVICLPGTSNSIGTGDSRRYTDGMLPFSSGTWGTEKEIENLKGIVPDLNSECASKDVLVKTLRAIDVKLNSDNFHDANANRGGFDLTDPVKQGAECPHQNKTVLHMDGCLDTETPTVSIQENVDVASLKPISDSGINFTDAIWSPTCERRTCECHESIEKNKDKTDLPQSVVYQNEEGRWVTDLAYYTSFNSKQNLNVSLSDEMNEDFRSGSEAFDLIAQDEEEFNKEHQFIQEENIDAHNTSVALGDTSWGATINYSLLRKSRSTSDLDKDDASYLRLSLGEFFAQRSEALGCLGGGNNVKRPSFGYFIRSPEKREPIALIRKSDVSRGNLEKEMAHLNHDLYSGDLNEQSQAQLSEGSITLQVEAVESTSQVDENDVTLTADKGKTEDTFFMSNKPQRYKDKLPDSGDSMLRISTIASAIAEASVNTDPSQLAAMIKALSNKTRDKTFQEDEKQKDYSHVRHFLPNDLEKSNGSNALDMEKYLKKTEVSRYESALENFSRASMSDTWDLSLPKEQTTQDIHPVDLSATSVSVRAPEENTAAIVYVENGESENQESFRTINSSNSVTNRENNSAVVDVKTCSIDNKLQDVGNDEKATSISTPSDSYSSVRNPRITSLCLLKDCEEIRDNRENQRQNECVSEISNSEKHVTFENHRIVSPKNSDLKNTSPEHGGRGSEDEQESFRPSTSPLSHSSPSEISGTSSSGCALESFGSAAQQQQPPCEQELSPLVCSPAGVSRLTYVSEPESSYPTTATDDALEDRKSDITSELSTTIIQGSPAALEERAMEKLREKVPFQNRGKGTLSSIIQNNSDTRKATETTSLSSKPEYVKPDFRWSKDPSSKSGNLLETSEVGWTSNPEELDPIRLALLGKSGLSCQVGSATSHPVSCQEPIDEDQRISPKDKSTAGREFSGQVSHQTTSENQCTPIPSSTVHSSVADMQNMPAAVHALLTQPSLSAAPFAQRYLGTLPSTGSTTLPQCHAGNATVCGFSGGLPYPAVAGEPVQNSVAVGICLGSNIGSGWMGTSSLCNPYSNTLNQNLLSTTKPFPVPSVGTNCGIEPWDSGVTSGLGSVRVPEELKLPHACCVGIASQTLLSVLNPTDRWLQVSIGVLSISVNGEKVDLSTYRCLVFKNKAIIRPHATEEIKVLFIPSSPGVFRCTFSVASWPCSTDAETIVQAEALASTVTLTAIAESPVIEVETEKKDVLDFGDLTYGGWKALPLKLINRTHATVPIRLIINANAVAWRCFTFSKESVRAPVEVAPCADVVTRLAGPSVVNHMMPASYDGQDPEFLMIWVLFHSPKKQISSSDILDSAEEFSAKVDIEVDSPNPTPVLRSVSLRARAGIARIHAPRDLQTMHFLAKVASSRKQHLPLKNAGNIEVYLDIKVPEQGSHFSVDPKNLLLKPGEEHEVIVSFTPKDPEACEERILKIFVQPFGPQYEVVLKGEVISSGSKPLSPGPCLDIPSILSNKQFLAWGGVPLGRTQLQKLALRNNSASTTQHLRLLIRGQDQDCFQLQNTFGSEQRLTSNCEIRIHPKEDIFISVLFAPTRLSCMLARLEIKQLGNRSQPGIKFTIPLSGYGGTSNLILEGVKKLSDSYMVTVNGLVPGKESKIVFSVRNTGSRAAFVKAVGFKDSQKKVLLDPKVLRIFPDKFVLKERTQENVTLIYNPSDRGINNKTATELSTVYLFGGDEISRQQYRRALLHKPEMIKQILPEHSVLQNINFVEAFQDELLVTEVYDLPQRPNDVQLFYGSMCKIILSVIGEFRDCISSREFLQPSSKASLESTSDLGASGKHGGNVSLDVLPVKGPQGSPLLSRAARPPLDQLASEEPWTVLPEHLILVAPSPCDMAKTGRFQIVNNSVRLLRFELCWPAHCLTVTPQHGCVAPESKLQILVSPNSSLSTKQSMFPWSGLIYIHCDDGQKKIVKVQIREDLTQVELLTRLTSKPFGILSPVSEPSVSHLVKPMTKPPSTKVEIRNKSITFPTTEPGETSESCLELENHGTTDVKWHLSSLAPPYVKGVDESGDVFRATYAAFRCSPISGLLESHGIQKVSITFLPRGRGDYAQFWDVECHPLKEPHMKHTLRFQLSGQSIEAENEPENACLSTDSLIKIDHLVKPRRQAVSEASARIPEQLDVTARGVYAPEDVYRFRPTSVGESRTLKVNLRNNSFITHSLKFLSPREPFYVKHSKYSLRAQHYINMPVQFKPKSAGKFEALLVIQTDEGKSIAIRLIGEALGKN

SEQ ID NO: 223037 - protein, 541 aa, Artificial Sequence
  derived and/or modified sequence
MRALLHKPEMIKQILPEHSVLQNINFVEAFQDELLVTEVYDLPQRPNDVQLFYGSMCKIILSVIGEFRDCISSREFLQPSSKASLESTSDLGASGKHGGNVSLDVLPVKGPQGSPLLSRAARPPLDQLASEEPWTVLPEHLILVAPSPCDMAKTGRFQIVNNSVRLLRFELCWPAHCLTVTPQHGCVAPESKLQILVSPNSSLSTKQSMFPWSGLIYIHCDDGQKKIVKVQIREDLTQVELLTRLTSKPFGILSPVSEPSVSHLVKPMTKPPSTKVEIRNKSITFPTTEPGETSESCLELENHGTTDVKWHLSSLAPPYVKGVDESGDVFRATYAAFRCSPISGLLESHGIQKVSITFLPRGRGDYAQFWDVECHPLKEPHMKHTLRFQLSGQSIEAENEPENACLSTDSLIKIDHLVKPRRQAVSEASARIPEQLDVTARGVYAPEDVYRFRPTSVGESRTLKVNLRNNSFITHSLKFLSPREPFYVKHSKYSLRAQHYINMPVQFKPKSAGKFEALLVIQTDEGKSIAIRLIGEALGKN

SEQ ID NO: 223038 - DNA, 5826 bp, Artificial Sequence
  derived and/or modified sequence
ctgctgaccagcgtgctgatgcccagcttcggctacttcatcagaagccccgagaagagagagcccatcgccctgatcagaaagagcgacgtgagcagaggcaacctggagaaggagatggcccacctgaaccacgacctgtacagcggcgacctgaacgagcagagccaggcccagctgagcgagggcagcatcaccctgcaggtggaggccgtggagagcaccagccaggtggacgagaacgacgtgaccctgaccgccgacaagggcaagaccgaggacaccttcttcatgagcaacaagccccagagatacaaggacaagctgcccgacagcggcgacagcatgctgagaatcagcaccatcgccagcgccatcgccgaggccagcgtgaacaccgaccccagccagctggccgccatgatcaaggccctgagcaacaagaccagagacaagaccttccaggaggacgagaagcagaaggactacagccacgtgagacacttcctgcccaacgacctggagaagagcaacggcagcaacgccctggacatggagaagtacctgaagaagaccgaggtgagcagatacgagagcgccctggagaacttcagcagagccagcatgagcgacacctgggacctgagcctgcccaaggagcagaccacccaggacatccaccccgtggacctgagcgccaccagcgtgagcgtgagagcccccgaggagaacaccgccgccatcgtgtacgtggagaacggcgagagcgagaaccaggagagcttcagaaccatcaacagcagcaacagcgtgaccaacagagagaacaacagcgccgtggtggacgtgaagacctgcagcatcgacaacaagctgcaggacgtgggcaacgacgagaaggccaccagcatcagcacccccagcgacagctacagcagcgtgagaaaccccagaatcaccagcctgtgcctgctgaaggactgcgaggagatcagagacaacagagagaaccagagacagaacgagtgcgtgagcgagatcagcaacagcgagaagcacgtgaccttcgagaaccacagaatcgtgagccccaagaacagcgacctgaagaacaccagccccgagcacggcggcagaggcagcgaggacgagcaggagagcttcagacccagcaccagccccctgagccacagcagccccagcgagatcagcggcaccagcagcagcggctgcgccctggagagcttcggcagcgccgcccagcagcagcagcccccctgcgagcaggagctgagccccctggtgtgcagccccgccggcgtgagcagactgacctacgtgagcgagcccgagagcagctaccccaccaccgccaccgacgacgccctggaggacagaaagagcgacatcaccagcgagctgagcaccaccatcatccagggcagccccgccgccctggaggagagagccatggagaagctgagagagaaggtgcccttccagaacagaggcaagggcaccctgagcagcatcatccagaacaacagcgacaccagaaaggccaccgagaccaccagcctgagcagcaagcccgagtacgtgaagcccgacttcagatggagcaaggaccccagcagcaagagcggcaacctgctggagaccagcgaggtgggctggaccagcaaccccgaggagctggaccccatcagactggccctgctgggcaagagcggcctgagctgccaggtgggcagcgccaccagccaccccgtgagctgccaggagcccatcgacgaggaccagagaatcagccccaaggacaagagcaccgccggcagagagttcagcggccaggtgagccaccagaccaccagcgagaaccagtgcacccccatccccagcagcaccgtgcacagcagcgtggccgacatgcagaacatgcccgccgccgtgcacgccctgctgacccagcccagcctgagcgccgcccccttcgcccagagatacctgggcaccctgcccagcaccggcagcaccaccctgccccagtgccacgccggcaacgccaccgtgtgcggcttcagcggcggcctgccctaccccgccgtggccggcgagcccgtgcagaacagcgtggccgtgggcatctgcctgggcagcaacatcggcagcggctggatgggcaccagcagcctgtgcaacccctacagcaacaccctgaaccagaacctgctgagcaccaccaagcccttccccgtgcccagcgtgggcaccaactgcggcatcgagccctgggacagcggcgtgaccagcggcctgggcagcgtgagagtgcccgaggagctgaagctgccccacgcctgctgcgtgggcatcgccagccagaccctgctgagcgtgctgaaccccaccgacagatggctgcaggtgagcatcggcgtgctgagcatcagcgtgaacggcgagaaggtggacctgagcacctacagatgcctggtgttcaagaacaaggccatcatcagaccccacgccaccgaggagatcaaggtgctgttcatccccagcagccccggcgtgttcagatgcaccttcagcgtggccagctggccctgcagcaccgacgccgagaccatcgtgcaggccgaggccctggccagcaccgtgaccctgaccgccatcgccgagagccccgtgatcgaggtggagaccgagaagaaggacgtgctggacttcggcgacctgacctacggcggctggaaggccctgcccctgaagctgatcaacagaacccacgccaccgtgcccatcagactgatcatcaacgccaacgccgtggcctggagatgcttcaccttcagcaaggagagcgtgagagcccccgtggaggtggccccctgcgccgacgtggtgaccagactggccggccccagcgtggtgaaccacatgatgcccgccagctacgacggccaggaccccgagttcctgatgatctgggtgctgttccacagccccaagaagcagatcagcagcagcgacatcctggacagcgccgaggagttcagcgccaaggtggacatcgaggtggacagccccaaccccacccccgtgctgagaagcgtgagcctgagagccagagccggcatcgccagaatccacgcccccagagacctgcagaccatgcacttcctggccaaggtggccagcagcagaaagcagcacctgcccctgaagaacgccggcaacatcgaggtgtacctggacatcaaggtgcccgagcagggcagccacttcagcgtggaccccaagaacctgctgctgaagcccggcgaggagcacgaggtgatcgtgagcttcacccccaaggaccccgaggcctgcgaggagagaatcctgaagatcttcgtgcagcccttcggcccccagtacgaggtggtgctgaagggcgaggtgatcagcagcggcagcaagcccctgagccccggcccctgcctggacatccccagcatcctgagcaacaagcagttcctggcctggggcggcgtgcccctgggcagaacccagctgcagaagctggccctgagaaacaacagcgccagcaccacccagcacctgagactgctgatcagaggccaggaccaggactgcttccagctgcagaacaccttcggcagcgagcagagactgaccagcaactgcgagatcagaatccaccccaaggaggacatcttcatcagcgtgctgttcgcccccaccagactgagctgcatgctggccagactggagatcaagcagctgggcaacagaagccagcccggcatcaagttcaccatccccctgagcggctacggcggcaccagcaacctgatcctggagggcgtgaagaagctgagcgacagctacatggtgaccgtgaacggcctggtgcccggcaaggagagcaagatcgtgttcagcgtgagaaacaccggcagcagagccgccttcgtgaaggccgtgggcttcaaggacagccagaagaaggtgctgctggaccccaaggtgctgagaatcttccccgacaagttcgtgctgaaggagagaacccaggagaacgtgaccctgatctacaaccccagcgacagaggcatcaacaacaagaccgccaccgagctgagcaccgtgtacctgttcggcggcgacgagatcagcagacagcagtacagaagagccctgctgcacaagcccgagatgatcaagcagatcctgcccgagcacagcgtgctgcagaacatcaacttcgtggaggccttccaggacgagctgctggtgaccgaggtgtacgacctgccccagagacccaacgacgtgcagctgttctacggcagcatgtgcaagatcatcctgagcgtgatcggcgagttcagagactgcatcagcagcagagagttcctgcagcccagcagcaaggccagcctggagagcaccagcgacctgggcgccagcggcaagcacggcggcaacgtgagcctggacgtgctgcccgtgaagggcccccagggcagccccctgctgagcagagccgccagaccccccctggaccagctggccagcgaggagccctggaccgtgctgcccgagcacctgatcctggtggcccccagcccctgcgacatggccaagaccggcagattccagatcgtgaacaacagcgtgagactgctgagattcgagctgtgctggcccgcccactgcctgaccgtgaccccccagcacggctgcgtggcccccgagagcaagctgcagatcctggtgagccccaacagcagcctgagcaccaagcagagcatgttcccctggagcggcctgatctacatccactgcgacgacggccagaagaagatcgtgaaggtgcagatcagagaggacctgacccaggtggagctgctgaccagactgaccagcaagcccttcggcatcctgagccccgtgagcgagcccagcgtgagccacctggtgaagcccatgaccaagccccccagcaccaaggtggagatcagaaacaagagcatcaccttccccaccaccgagcccggcgagaccagcgagagctgcctggagctggagaaccacggcaccaccgacgtgaagtggcacctgagcagcctggcccccccctacgtgaagggcgtggacgagagcggcgacgtgttcagagccacctacgccgccttcagatgcagccccatcagcggcctgctggagagccacggcatccagaaggtgagcatcaccttcctgcccagaggcagaggcgactacgcccagttctgggacgtggagtgccaccccctgaaggagccccacatgaagcacaccctgagattccagctgagcggccagagcatcgaggccgagaacgagcccgagaacgcctgcctgagcaccgacagcctgatcaagatcgaccacctggtgaagcccagaagacaggccgtgagcgaggccagcgccagaatccccgagcagctggacgtgaccgccagaggcgtgtacgcccccgaggacgtgtacagattcagacccaccagcgtgggcgagagcagaaccctgaaggtgaacctgagaaacaacagcttcatcacccacagcctgaagttcctgagccccagagagcccttctacgtgaagcacagcaagtacagcctgagagcccagcactacatcaacatgcccgtgcagttcaagcccaagagcgccggcaagttcgaggccctgctggtgatccagaccgacgagggcaagagcatcgccatcagactgatcggcgaggccctgggcaagaactag

SEQ ID NO: 223039 - DNA, 7614 bp, Artificial Sequence
  derived and/or modified sequence
atggaggacttcagaggcatcgccgaggagagcttccccagcttcctgaccaacagcctgttcggcaacagcggcatcctggagaacgtgaccctgagcagcaacctgggcctgcccgtggccgtgagcaccctggccagagacagaagcagcaccgacaacagataccccgacatccaggccagctacctggtggagggcagattcagcgtgcccagcggcagcagccccggcagccagagcgacgccgagcccagagagagactgcagctgagcttccaggacgacgacagcatcagcagaaagaagagctacgtggagagccagagactgagcaacgccctgagcaagcagagcgccctgcagatggagaccgccggccccgaggaggagcccgccggcgccaccgagagcctgcagggccaggacctgttcaacagagccagccccctggagcaggcccaggacagccccatcgacttccacctgcagagctggatgaacaacaaggagcccaagatcgtggtgctggacgccggcaagcacttcgaggacaagaccctgaagagcgacctgagccacaccagcctgctggagaacgagaagctgatcctgcccaccagcctggaggacagcagcgacgacgacatcgacgacgagatgttctacgacgaccacctggaggcctacttcgagcagctggccatccccggcatgatctacgaggacctggagggccccgagccccccgagaagggcttcaagctgcccaccaacggcctgagacaggccaacgagaacggcagcctgaactgcaagttccagagcgagaacaacagcagcctgatcagcctggacagccacagcagcgagaccacccacaaggagagcgaggagagccaggtgatctgcctgcccggcaccagcaacagcatcggcaccggcgacagcagaagatacaccgacggcatgctgcccttcagcagcggcacctggggcaccgagaaggagatcgagaacctgaagggcatcgtgcccgacctgaacagcgagtgcgccagcaaggacgtgctggtgaagaccctgagagccatcgacgtgaagctgaacagcgacaacttccacgacgccaacgccaacagaggcggcttcgacctgaccgaccccgtgaagcagggcgccgagtgcccccaccagaacaagaccgtgctgcacatggacggctgcctggacaccgagacccccaccgtgagcatccaggagaacgtggacgtggccagcctgaagcccatcagcgacagcggcatcaacttcaccgacgccatctggagccccacctgcgagagaagaacctgcgagtgccacgagagcatcgagaagaacaaggacaagaccgacctgccccagagcgtggtgtaccagaacgaggagggcagatgggtgaccgacctggcctactacaccagcttcaacagcaagcagaacctgaacgtgagcctgagcgacgagatgaacgaggacttcagaagcggcagcgaggccttcgacctgatcgcccaggacgaggaggagttcaacaaggagcaccagttcatccaggaggagaacatcgacgcccacaacaccagcgtggccctgggcgacaccagctggggcgccaccatcaactacagcctgctgagaaagagcagaagcaccagcgacctggacaaggacgacgccagctacctgagactgagcctgggcgagttcttcgcccagagaagcgaggccctgggctgcctgggcggcggcaacaacgtgaagagacccagcttcggctacttcatcagaagccccgagaagagagagcccatcgccctgatcagaaagagcgacgtgagcagaggcaacctggagaaggagatggcccacctgaaccacgacctgtacagcggcgacctgaacgagcagagccaggcccagctgagcgagggcagcatcaccctgcaggtggaggccgtggagagcaccagccaggtggacgagaacgacgtgaccctgaccgccgacaagggcaagaccgaggacaccttcttcatgagcaacaagccccagagatacaaggacaagctgcccgacagcggcgacagcatgctgagaatcagcaccatcgccagcgccatcgccgaggccagcgtgaacaccgaccccagccagctggccgccatgatcaaggccctgagcaacaagaccagagacaagaccttccaggaggacgagaagcagaaggactacagccacgtgagacacttcctgcccaacgacctggagaagagcaacggcagcaacgccctggacatggagaagtacctgaagaagaccgaggtgagcagatacgagagcgccctggagaacttcagcagagccagcatgagcgacacctgggacctgagcctgcccaaggagcagaccacccaggacatccaccccgtggacctgagcgccaccagcgtgagcgtgagagcccccgaggagaacaccgccgccatcgtgtacgtggagaacggcgagagcgagaaccaggagagcttcagaaccatcaacagcagcaacagcgtgaccaacagagagaacaacagcgccgtggtggacgtgaagacctgcagcatcgacaacaagctgcaggacgtgggcaacgacgagaaggccaccagcatcagcacccccagcgacagctacagcagcgtgagaaaccccagaatcaccagcctgtgcctgctgaaggactgcgaggagatcagagacaacagagagaaccagagacagaacgagtgcgtgagcgagatcagcaacagcgagaagcacgtgaccttcgagaaccacagaatcgtgagccccaagaacagcgacctgaagaacaccagccccgagcacggcggcagaggcagcgaggacgagcaggagagcttcagacccagcaccagccccctgagccacagcagccccagcgagatcagcggcaccagcagcagcggctgcgccctggagagcttcggcagcgccgcccagcagcagcagcccccctgcgagcaggagctgagccccctggtgtgcagccccgccggcgtgagcagactgacctacgtgagcgagcccgagagcagctaccccaccaccgccaccgacgacgccctggaggacagaaagagcgacatcaccagcgagctgagcaccaccatcatccagggcagccccgccgccctggaggagagagccatggagaagctgagagagaaggtgcccttccagaacagaggcaagggcaccctgagcagcatcatccagaacaacagcgacaccagaaaggccaccgagaccaccagcctgagcagcaagcccgagtacgtgaagcccgacttcagatggagcaaggaccccagcagcaagagcggcaacctgctggagaccagcgaggtgggctggaccagcaaccccgaggagctggaccccatcagactggccctgctgggcaagagcggcctgagctgccaggtgggcagcgccaccagccaccccgtgagctgccaggagcccatcgacgaggaccagagaatcagccccaaggacaagagcaccgccggcagagagttcagcggccaggtgagccaccagaccaccagcgagaaccagtgcacccccatccccagcagcaccgtgcacagcagcgtggccgacatgcagaacatgcccgccgccgtgcacgccctgctgacccagcccagcctgagcgccgcccccttcgcccagagatacctgggcaccctgcccagcaccggcagcaccaccctgccccagtgccacgccggcaacgccaccgtgtgcggcttcagcggcggcctgccctaccccgccgtggccggcgagcccgtgcagaacagcgtggccgtgggcatctgcctgggcagcaacatcggcagcggctggatgggcaccagcagcctgtgcaacccctacagcaacaccctgaaccagaacctgctgagcaccaccaagcccttccccgtgcccagcgtgggcaccaactgcggcatcgagccctgggacagcggcgtgaccagcggcctgggcagcgtgagagtgcccgaggagctgaagctgccccacgcctgctgcgtgggcatcgccagccagaccctgctgagcgtgctgaaccccaccgacagatggctgcaggtgagcatcggcgtgctgagcatcagcgtgaacggcgagaaggtggacctgagcacctacagatgcctggtgttcaagaacaaggccatcatcagaccccacgccaccgaggagatcaaggtgctgttcatccccagcagccccggcgtgttcagatgcaccttcagcgtggccagctggccctgcagcaccgacgccgagaccatcgtgcaggccgaggccctggccagcaccgtgaccctgaccgccatcgccgagagccccgtgatcgaggtggagaccgagaagaaggacgtgctggacttcggcgacctgacctacggcggctggaaggccctgcccctgaagctgatcaacagaacccacgccaccgtgcccatcagactgatcatcaacgccaacgccgtggcctggagatgcttcaccttcagcaaggagagcgtgagagcccccgtggaggtggccccctgcgccgacgtggtgaccagactggccggccccagcgtggtgaaccacatgatgcccgccagctacgacggccaggaccccgagttcctgatgatctgggtgctgttccacagccccaagaagcagatcagcagcagcgacatcctggacagcgccgaggagttcagcgccaaggtggacatcgaggtggacagccccaaccccacccccgtgctgagaagcgtgagcctgagagccagagccggcatcgccagaatccacgcccccagagacctgcagaccatgcacttcctggccaaggtggccagcagcagaaagcagcacctgcccctgaagaacgccggcaacatcgaggtgtacctggacatcaaggtgcccgagcagggcagccacttcagcgtggaccccaagaacctgctgctgaagcccggcgaggagcacgaggtgatcgtgagcttcacccccaaggaccccgaggcctgcgaggagagaatcctgaagatcttcgtgcagcccttcggcccccagtacgaggtggtgctgaagggcgaggtgatcagcagcggcagcaagcccctgagccccggcccctgcctggacatccccagcatcctgagcaacaagcagttcctggcctggggcggcgtgcccctgggcagaacccagctgcagaagctggccctgagaaacaacagcgccagcaccacccagcacctgagactgctgatcagaggccaggaccaggactgcttccagctgcagaacaccttcggcagcgagcagagactgaccagcaactgcgagatcagaatccaccccaaggaggacatcttcatcagcgtgctgttcgcccccaccagactgagctgcatgctggccagactggagatcaagcagctgggcaacagaagccagcccggcatcaagttcaccatccccctgagcggctacggcggcaccagcaacctgatcctggagggcgtgaagaagctgagcgacagctacatggtgaccgtgaacggcctggtgcccggcaaggagagcaagatcgtgttcagcgtgagaaacaccggcagcagagccgccttcgtgaaggccgtgggcttcaaggacagccagaagaaggtgctgctggaccccaaggtgctgagaatcttccccgacaagttcgtgctgaaggagagaacccaggagaacgtgaccctgatctacaaccccagcgacagaggcatcaacaacaagaccgccaccgagctgagcaccgtgtacctgttcggcggcgacgagatcagcagacagcagtacagaagagccctgctgcacaagcccgagatgatcaagcagatcctgcccgagcacagcgtgctgcagaacatcaacttcgtggaggccttccaggacgagctgctggtgaccgaggtgtacgacctgccccagagacccaacgacgtgcagctgttctacggcagcatgtgcaagatcatcctgagcgtgatcggcgagttcagagactgcatcagcagcagagagttcctgcagcccagcagcaaggccagcctggagagcaccagcgacctgggcgccagcggcaagcacggcggcaacgtgagcctggacgtgctgcccgtgaagggcccccagggcagccccctgctgagcagagccgccagaccccccctggaccagctggccagcgaggagccctggaccgtgctgcccgagcacctgatcctggtggcccccagcccctgcgacatggccaagaccggcagattccagatcgtgaacaacagcgtgagactgctgagattcgagctgtgctggcccgcccactgcctgaccgtgaccccccagcacggctgcgtggcccccgagagcaagctgcagatcctggtgagccccaacagcagcctgagcaccaagcagagcatgttcccctggagcggcctgatctacatccactgcgacgacggccagaagaagatcgtgaaggtgcagatcagagaggacctgacccaggtggagctgctgaccagactgaccagcaagcccttcggcatcctgagccccgtgagcgagcccagcgtgagccacctggtgaagcccatgaccaagccccccagcaccaaggtggagatcagaaacaagagcatcaccttccccaccaccgagcccggcgagaccagcgagagctgcctggagctggagaaccacggcaccaccgacgtgaagtggcacctgagcagcctggcccccccctacgtgaagggcgtggacgagagcggcgacgtgttcagagccacctacgccgccttcagatgcagccccatcagcggcctgctggagagccacggcatccagaaggtgagcatcaccttcctgcccagaggcagaggcgactacgcccagttctgggacgtggagtgccaccccctgaaggagccccacatgaagcacaccctgagattccagctgagcggccagagcatcgaggccgagaacgagcccgagaacgcctgcctgagcaccgacagcctgatcaagatcgaccacctggtgaagcccagaagacaggccgtgagcgaggccagcgccagaatccccgagcagctggacgtgaccgccagaggcgtgtacgcccccgaggacgtgtacagattcagacccaccagcgtgggcgagagcagaaccctgaaggtgaacctgagaaacaacagcttcatcacccacagcctgaagttcctgagccccagagagcccttctacgtgaagcacagcaagtacagcctgagagcccagcactacatcaacatgcccgtgcagttcaagcccaagagcgccggcaagttcgaggccctgctggtgatccagaccgacgagggcaagagcatcgccatcagactgatcggcgaggccctgggcaagaactag

SEQ ID NO: 223040 - DNA, 1626 bp, Artificial Sequence
  derived and/or modified sequence
atgagagccctgctgcacaagcccgagatgatcaagcagatcctgcccgagcacagcgtgctgcagaacatcaacttcgtggaggccttccaggacgagctgctggtgaccgaggtgtacgacctgccccagagacccaacgacgtgcagctgttctacggcagcatgtgcaagatcatcctgagcgtgatcggcgagttcagagactgcatcagcagcagagagttcctgcagcccagcagcaaggccagcctggagagcaccagcgacctgggcgccagcggcaagcacggcggcaacgtgagcctggacgtgctgcccgtgaagggcccccagggcagccccctgctgagcagagccgccagaccccccctggaccagctggccagcgaggagccctggaccgtgctgcccgagcacctgatcctggtggcccccagcccctgcgacatggccaagaccggcagattccagatcgtgaacaacagcgtgagactgctgagattcgagctgtgctggcccgcccactgcctgaccgtgaccccccagcacggctgcgtggcccccgagagcaagctgcagatcctggtgagccccaacagcagcctgagcaccaagcagagcatgttcccctggagcggcctgatctacatccactgcgacgacggccagaagaagatcgtgaaggtgcagatcagagaggacctgacccaggtggagctgctgaccagactgaccagcaagcccttcggcatcctgagccccgtgagcgagcccagcgtgagccacctggtgaagcccatgaccaagccccccagcaccaaggtggagatcagaaacaagagcatcaccttccccaccaccgagcccggcgagaccagcgagagctgcctggagctggagaaccacggcaccaccgacgtgaagtggcacctgagcagcctggcccccccctacgtgaagggcgtggacgagagcggcgacgtgttcagagccacctacgccgccttcagatgcagccccatcagcggcctgctggagagccacggcatccagaaggtgagcatcaccttcctgcccagaggcagaggcgactacgcccagttctgggacgtggagtgccaccccctgaaggagccccacatgaagcacaccctgagattccagctgagcggccagagcatcgaggccgagaacgagcccgagaacgcctgcctgagcaccgacagcctgatcaagatcgaccacctggtgaagcccagaagacaggccgtgagcgaggccagcgccagaatccccgagcagctggacgtgaccgccagaggcgtgtacgcccccgaggacgtgtacagattcagacccaccagcgtgggcgagagcagaaccctgaaggtgaacctgagaaacaacagcttcatcacccacagcctgaagttcctgagccccagagagcccttctacgtgaagcacagcaagtacagcctgagagcccagcactacatcaacatgcccgtgcagttcaagcccaagagcgccggcaagttcgaggccctgctggtgatccagaccgacgagggcaagagcatcgccatcagactgatcggcgaggccctgggcaagaactag

SEQ ID NO: 223041 - DNA, 5826 bp, Artificial Sequence
  derived and/or modified sequence
ttactgacgagcgtgctgatgccctccttcggatactttatacgcagccctgagaagcgggagccaatcgccctgatacggaagtccgacgtctctcgtggcaatctggagaaagagatggcccacctgaatcacgatctctattcaggtgacctgaacgaacagtctcaggctcaattgtcagaaggatctattaccctccaagtggaagccgttgagtctaccagtcaggtcgacgaaaacgacgtcacgctaaccgctgacaaaggaaagaccgaggacacattcttcatgtctaataagccgcagcgatacaaggataaactgcccgattcaggcgatagtatgctgagaatatctaccatcgcttccgccatagctgaggcatcagtgaacaccgaccctagtcagctagcagcaatgatcaaagctctgtccaataagaccagggacaaaactttccaggaagatgagaaacaaaaagactattctcacgtgcggcactttctcccgaatgatctagagaagagtaacggttcgaatgccctggacatggaaaagtatctcaagaagacggaggtgtctcggtatgaaagcgccctcgagaacttctccagggctagtatgagtgacacttgggatctttctctccctaaagagcagacaacacaagatattcacccagttgatctgtcagctacaagcgtgtcagtaagggcacctgaagagaatactgccgctatcgtttacgttgaaaacggggagtctgagaatcaagagagtttccgcaccatcaattcctccaattccgtcacgaacagagagaacaattccgccgtagtcgatgtgaagacatgtagcatcgataataaacttcaggacgtgggcaacgacgagaaggcgacatccatttcaactccctccgatagttattcttccgtgcggaatcccagaattaccagcctgtgcctcctgaaagattgtgaagagatcagggacaaccgagaaaaccagcgacagaacgagtgcgtgtcagagatttcaaattccgagaagcacgtgacttttgagaaccataggattgtgtctccgaagaactccgacctgaaaaacaccagccctgaacacggtggtaggggcagtgaagacgaacaggaaagttttcgaccatcaacatcaccattgagccacagttctccatctgagatctctggcacttcatcttccgggtgcgccttagaatcatttgggtccgcagcccagcagcagcagcctccttgcgagcaggagctcagccctctggtgtgcagcccggcaggcgtttcgaggctgacatatgttagtgagcctgagtcctcctatcccactaccgccacagatgacgcactggaggatcggaaatccgatattaccagcgagctcagcacgaccatcatccagggttcgccagctgccctggaggaaagagctatggaaaaactgagggagaaggtcccctttcagaaccgcggaaaggggactctgtcctctattatacagaacaatagcgacacccggaaagctacagagactacaagcctgagtagtaagcctgagtacgtcaagcctgattttaggtggtcaaaagacccctcttccaaaagcggaaacctgctcgagacatctgaagtggggtggacctccaaccccgaagagctggatcctatcagattagcattacttggtaaaagcggcctatcgtgccaggtaggctccgctacatctcacccggtgagctgccaggagcctattgatgaggaccaaaggattagcccaaaagataagtctacagctgggagagaattcagtggacaggtaagtcaccagacgacgagtgagaaccaatgcacacctattccatcaagtaccgtccattcgtccgtggctgatatgcagaatatgcctgccgccgtgcatgctctactgacacaaccctctctatccgctgcaccattcgcccagagatacctcggaactctcccctcaacaggtagtactaccctcccccagtgtcacgcaggtaatgctactgtatgcggcttctcaggggggttgccgtatccagcggtcgccggcgagcctgtgcagaattccgtggccgtgggtatttgccttggttctaatataggcagtggctggatggggacatcctctctgtgcaatccttatagcaataccctgaaccagaacctgctgagcaccactaaaccattccctgtgcccagtgtgggaaccaactgcggcattgagccatgggactccggtgtgacgtccgggttgggctcagttcgggtgccagaagagttgaagctgccacacgcttgttgtgttggaattgcaagccaaactctgctgtctgtgctcaatccaacggaccgatggctgcaggtgtccatcggtgttttgagcatatctgtcaacggggagaaagtggatctcagcacatatcgttgcttagtattcaaaaacaaggctattatcaggccgcacgcaactgaagaaattaaagtgctgtttattccgagcagtccgggcgtgtttaggtgcacattcagtgtggcttcttggccgtgcagtactgatgcagaaaccattgtgcaagccgaggccctcgcgagtacagtcacattaactgctatcgcggagagcccagtgattgaggtcgagaccgaaaaaaaagacgtcctggattttggagacctgacctatggcgggtggaaggcgttacccctgaaacttatcaatcggacccacgctaccgtgcccatccgtctgattatcaatgccaacgccgtggcatggcgctgcttcaccttttcaaaggagtcagtgcgcgcacccgttgaggtggccccgtgcgctgacgtggtcactagactggccggaccatctgtggttaaccacatgatgcccgcctcttacgatggccaagatcctgagttcttgatgatttgggtactgtttcacagtccaaagaagcagatcagttcaagcgacatattggactcagccgaggaattctccgccaaggttgacatcgaggtcgattctcccaatcccaccccggtactcagatcagtgtcactcagggccagggccggaatcgcccgtattcacgcaccccgggaccttcagaccatgcatttcctggccaaagttgcttcaagcagaaaacagcacctgccgctgaagaatgcaggcaatatcgaagtctatttggatatcaaagtccctgagcagggatcccatttctctgttgatccaaagaatttgttactcaagccgggtgaggagcacgaggtgatcgtgtcatttacccctaaagacccagaggcatgcgaggagcggatcctcaagatctttgtgcagccctttggcccacagtacgaggtggtgctgaagggcgaagtgatcagttcaggttccaagccactgagcccgggaccttgtcttgacatccccagcatcctcagtaacaaacaattcttagcttggggtggcgtgcccctgggaagaacgcagcttcagaaactcgctctacggaacaactccgcatccaccacacagcacctgagactgctgatcagaggtcaggatcaggattgctttcagttacagaacacgttcgggtccgagcagcgcttgacctccaactgcgagatcaggattcacccaaaagaggacattttcatcagtgtcctgtttgcgccaactcgcttatcgtgtatgctcgctaggctagagataaagcagctggggaatcgcagccagcccggaatcaaatttacaatcccactcagcggatatggaggaacatctaacctgatactcgaaggggtcaagaaactcagtgattcctacatggttacagtgaatggcctcgttcccggtaaagagagtaaaattgtgttctccgtcaggaataccggcagccgggctgcattcgtgaaggccgtcggatttaaagactcccaaaagaaggtcctgctcgatccaaaggtacttaggatcttccccgataagtttgtgctgaaggagcggacccaggagaatgttacgctgatctacaacccatcagatcggggcattaacaacaagacagccacggagttgagtactgtctatttgtttggaggcgacgagatctctcggcagcagtaccgcagagcacttctgcacaagccagagatgattaaacagattcttcctgagcacagtgtgctgcagaacatcaattttgttgaggcctttcaagatgaacttctcgtcactgaggtatatgatttaccacaacgtccgaacgatgtccagctgttctatgggtctatgtgtaagattattttatctgtgataggtgagttccgggactgtatctcctctagggagttcctccagccctccagcaaggcctcccttgagtccaccagtgacttgggggcctctgggaaacacggtggtaacgtttccctcgacgtcctcccagtaaagggtccacaaggatctccacttctatctagagccgcacgcccacccctggaccagctagcttccgaggaaccatggactgtgctgccggagcacctcatcctggtagccccaagcccctgcgatatggcaaagacaggcagattccagatagtgaacaactccgtccggctgttacggtttgagctgtgctggcccgcgcactgcctgactgtgacaccccagcatggttgtgtagccccggagagcaagttacagatcctcgtcagccctaacagctctctttcgaccaagcagtcaatgtttccatggtcaggtctcatatacattcactgtgacgatggccagaaaaaaatcgtaaaggtgcagataagagaggatttgactcaagtcgagctgctcaccagattgacgtctaaaccatttggcatcctttcacccgtgagcgagcctagcgtgagccacctagtaaagcctatgacgaaaccccctagcacaaaagtggaaattcgaaataaatcaataacatttcccacaactgagcccggcgagacaagcgagagttgtctggagttagaaaaccatggcactactgacgtgaagtggcacttgtccagcttggcacccccatacgttaagggcgtggatgaaagtggcgatgtgtttcgggccacttacgccgccttcagatgtagcccgattagtggcttattggaatcgcacgggatccagaaagtttcaattaccttcttaccacgcggacgcggggactatgcccaattctgggacgtggaatgccacccacttaaggagccccacatgaaacacactctgaggtttcagctatctggtcagtcaatcgaggcagagaatgagcccgaaaacgcttgtctgagtactgattctctgatcaagattgatcacctggtcaaaccccgaaggcaggctgtctctgaggcctccgcccgcatcccagagcagctggatgtcaccgccagaggtgtgtacgctccagaagacgtgtataggttccgccccacgtctgtgggggagtctaggacactaaaagtgaatctgcgaaacaattcttttataacccactcactgaagtttctgtcaccacgagagcccttctacgtcaagcattcaaaatactcgctaagagcacagcactacatcaacatgcccgtgcaatttaagcctaagtctgctgggaagttcgaggcactgcttgtgattcaaacagatgaaggcaagtccattgctataaggctcataggcgaagctctgggaaaaaactag

SEQ ID NO: 223042 - DNA, 7614 bp, Artificial Sequence
  derived and/or modified sequence
atggaggactttcgaggcattgcggaggaaagctttccgtcattcctgaccaacagcttatttggaaactcagggatactcgagaatgtgacgctttctagtaatctcgggctgccggtggctgtatctaccttggctcgggatcgatcttcaaccgataatcgctaccctgacatccaggcaagttatttggtcgagggaagattttcagtcccgtccggctcctcaccaggcagccagtccgacgctgagcctagggagcgccttcagctgagtttccaggacgatgacagcattagccggaagaagtcttacgtggaaagccagcgattaagcaacgcactatccaaacaaagtgctctccagatggagacagctgggcccgaagaggaacctgccggtgctaccgaaagcctccagggacaggatcttttcaacagggcatcacctctggagcaggcccaggattctcctattgattttcacctgcagtcttggatgaacaacaaggaaccaaagatcgtcgttctggacgccggcaagcattttgaggacaaaacccttaagtccgacctgtcccacaccagcctcctcgaaaatgaaaagctgattctgccaacgtctctggaggactcatccgatgatgacatagacgacgagatgttctacgacgaccacctggaagcctatttcgagcaacttgccatacccgggatgatctatgaggaccttgagggacctgaaccccccgagaagggatttaagctccctacgaatggcctgcgccaagctaacgagaatggcagtctgaattgtaaattccagtctgagaataactcttctctaatcagtcttgattcccatagctcagagaccacccataaggaatccgaagagtctcaggtgatttgtctcccagggacctccaattccattgggacgggcgactcaaggcgttacactgatggcatgttacccttcagcagtggaacttggggtacagagaaggagatagagaacctcaaggggattgtgcccgatctgaatagtgaatgcgcatctaaggacgtcctcgtgaaaaccctgcgagcaatagacgtgaaactgaactcagataattttcacgatgcaaacgctaatcgcggaggattcgacctcacagacccagtaaaacagggtgccgaatgtccccatcagaacaagactgtcctacatatggatggatgccttgatactgagacaccaacagtcagcatacaggaaaatgtcgacgtagcgtctctgaaacctatcagtgattcaggtataaacttcacggatgcaatctggtctcccacttgtgagagacgtacttgcgaatgccacgagtcaattgagaaaaacaaagacaaaacagacctgccacagtcagtggtctatcagaacgaagagggtcggtgggtgactgatctggcctactacacctcattcaatagcaagcaaaatctgaatgtctctctgtctgacgagatgaacgaagactttcgcagcggaagtgaagctttcgaccttatcgcacaggacgaggaagaattcaacaaagaacaccagtttatccaggaagagaacatagatgcccacaatacttccgtagcactcggagatacttcctggggtgccacaatcaactattctctgctcagaaaatcccgtagtacgtctgatctagacaaggatgacgcctcttacctgaggctcagcctgggcgaattctttgcccagcggtctgaagccctggggtgtttgggtggcggaaataacgtgaagcggccctctttcgggtacttcatcagatcccccgagaagagggagccaatcgctttgattaggaagtctgatgtgtccagaggaaatctcgagaaagagatggcgcacctgaatcatgatctgtacagcggagatttgaacgagcaatcacaggcccaactttccgagggttccattacgctacaggtagaagccgttgagtccacctcgcaggtcgatgaaaatgatgtaacacttaccgcagacaaaggtaaaactgaggataccttctttatgagcaacaaaccgcaacggtacaaagataaactccccgacagcggagactccatgctgcgcatcagtacaattgctagtgccatcgctgaagcatctgtgaacactgatcctagtcagctggccgcgatgatcaaggccctaagcaacaagactcgggataagacattccaggaggatgagaagcaaaaagactacagccatgtacgtcactttctcccgaacgatcttgaaaaatcaaacggatcaaacgctctggacatggagaagtacctcaaaaaaacagaggtttctagatatgaatccgctctggagaacttcagcagggcatcaatgagcgatacttgggatctatcattgcctaaggaacagaccactcaagacattcatcccgtagatttgtccgccaccagtgtcagcgttcgagcccccgaggaaaatacggctgccattgtctatgttgaaaacggagaatccgagaatcaagagtcattcaggaccattaacagtagtaactccgtcacgaacagggaaaataactccgccgtggttgacgtaaaaacctgcagtattgacaacaaactccaagatgtggggaacgatgaaaaagccacatctatctcaacaccttccgacagctatagtagtgtgcggaatcctagaattacttctctatgcctgctcaaggactgtgaggagatccgtgacaaccgagaaaaccaacgccagaatgagtgtgtcagcgaaatatcaaacagcgaaaagcacgtgaccttcgaaaaccatcgcattgtgagccccaagaatagcgatctgaaaaacacttcgccagaacatgggggtaggggttcggaggacgagcaagaatcttttaggccttccacctcccctcttagtcactcctcccccagtgagatctctggcaccagcagttccgggtgtgcgctcgagtctttcgggtcagcggcacaacagcagcagcccccctgcgaacaggaattgagcccactggtgtgcagtcccgctggcgtttctagattgacatatgttagtgagccggaatctagctacccaaccacagctactgatgatgccctggaggacaggaaaagcgacattacctccgagctctcaaccaccatcatacaaggtagtccggccgcattggaagagcgagccatggaaaaacttcgagaaaaggtgcccttccagaaccgcgggaaagggacactgtccagcatcattcagaacaactccgacacaagaaaggcaacagagactactagcctatcaagtaaacccgagtatgtgaagcccgattttcgatggagcaaagacccctcatcgaaatccgggaatttgcttgagacctcagaagtcggctggacttcaaaccctgaggagctggacccgatcagattagccctactggggaaaagcggtctgtcttgtcaggtgggaagtgccacctcacatcctgtgagttgtcaagaaccaatcgatgaggaccaacgcatctcccccaaagacaaatctaccgcgggaagagaattttctgggcaggtgagtcaccagactacaagcgagaaccagtgtactccaattcccagcagcacagttcactcaagtgtcgcagacatgcaaaacatgccggcggccgtgcatgcactccttacccagccatctttgagtgctgcacccttcgcccagaggtaccttgggacattgccatccaccgggagcaccacgctgccacagtgtcacgccggtaacgccactgtttgtggatttagtggcggcctcccctatcccgcagtcgccggggaacctgtgcagaacagtgtggctgtgggcatttgcctggggagcaacattgggtccgggtggatgggcacttctagtctgtgtaacccctatagtaacacactgaatcagaatctgctgtctaccactaaaccctttccagtgccttcagtgggtacaaactgcggcatcgaaccttgggattctggggtgacctcggggctcgggtctgtgagagtgcctgaagagctgaaactgcctcacgcatgttgcgttggaatagcgagtcagacactgctgtccgttctcaatcctactgacaggtggcttcaagtcagcattggcgtgctttctatttccgtcaatggtgagaaagtcgacctgtcaacttacagatgccttgtttttaagaacaaggccattattcgacctcatgccaccgaggaaattaaagtgttgtttattccatccagcccgggcgtttttcggtgcaccttttctgtggcaagttggccatgtagcactgacgccgaaactatcgtgcaagctgaggccctggctagcacggtcactttgacagcaatcgccgagtcacccgttatcgaggttgagaccgaaaagaaggacgtactcgactttggcgatctgacatacggcgggtggaaggccttgcccctaaaattgatcaaccggacacatgccacagtccctatccgacttatcattaacgccaatgccgtcgcttggaggtgtttcacctttagcaaagaaagcgtgcgggctcctgtggaggtagctccttgcgctgatgtcgtgacgaggctcgcagggccatccgtggtgaaccacatgatgcccgcctcatatgacggacaagatcctgaattcctcatgatctgggttctgtttcattcccccaaaaagcagattagttctagtgatatcctggattctgccgaggaattctcagccaaagtggacattgaggttgactccccaaatcccacacccgtcctcaggtcagtgagcctgcgcgctagggcaggcattgctaggattcacgccccgagggacctgcaaaccatgcatttcctggcgaaggtggcaagctcacgtaaacagcacctaccactgaagaacgcaggaaatatcgaggtgtacctggacattaaggtgccagagcaagggtcccacttcagcgtggacccaaaaaacctgctgttgaaacccggggaggagcacgaggtgattgtttctttcacgcctaaagacccagaagcctgcgaggagcgtattctgaaaatctttgtgcagccttttggtcctcagtacgaagtggtattaaaaggcgaagttatcagcagcggctcaaaacccctcagtcctgggccatgcctggatattcctagcatcctgtcaaataaacagttcctggcgtggggcggtgttcctctgggccgcacccagctgcaaaagctagctcttagaaacaatagcgcttcgacgacccagcacttgcgtcttttaattcgcggccaggatcaggactgttttcaactacagaatacttttggatctgagcagcgacttacatccaactgtgaaatccggatacatccaaaagaggacatcttcatttccgtcttgtttgcaccaacacgcttgtcatgcatgctcgcacgtctagagattaagcagctaggtaatcgcagtcagcctgggatcaagttcactattcctttgagtggatatggaggcacctctaatttaattctggagggagtgaagaagctgtccgactcgtatatggtgaccgtgaatgggctggttcctggaaaagagtctaagattgtgttcagcgttcgaaacactggatccagagccgcgttcgtcaaggcagttggattcaaggatagccagaaaaaggtcctcctcgatcctaaagtactcaggatcttccctgataaattcgtgctgaaggagcgtacccaggagaatgtaactctgatttataatccaagcgaccgcggcatcaacaacaagacggccactgagctctcaaccgtctacctgtttggcggggatgagatcagtcgccagcaatataggcgagcactgcttcacaagcccgaaatgatcaaacaaatactacccgaacactcagtcctgcagaatatcaactttgtggaggccttccaagatgaactgctcgtgacagaggtgtatgacttgcctcagagacccaacgatgttcagctgttctatggatcaatgtgtaaaatcatccttagtgtgattggcgagttccgagattgcatctctagtcgggagtttctccagccgagctcaaaagcttcgctcgagagcacaagtgatctcggcgcgagtggcaagcacggaggaaacgtgtccctagacgtattaccggtgaagggccctcagggatctccactattgtccagggctgctagacctcccctggaccagcttgccagcgaggagccttggaccgtgttacccgagcacctgatccttgtagctccttcgccctgtgatatggccaaaacaggacgcttccagattgttaataatagcgtgcggcttttgcgcttcgaactctgctggcctgcccactgcctgactgtgactcctcaacatggctgcgtcgccccggagtctaagctccagattcttgtgtcgccgaacagctcactgagcactaagcagtccatgttcccctggtccgggctcatctacattcactgtgacgatggacagaagaagatcgttaaggtacaaatccgcgaggacttaacacaggtggagttactgaccaggctcacctcaaagccatttggaattctatcgcctgttagcgagccgtcggtgtcccacctcgtgaaaccaatgacaaaacctccatcgacaaaagtggaaattcgcaataaatctatcacgtttccgacaaccgaaccgggcgagacgtccgaaagctgcctcgagctggagaaccatgggaccacagacgtcaaatggcatctgagctccctggcaccaccctatgtgaagggagttgatgaatctggggacgtgttccgtgcaacttacgccgcctttaggtgttccccaatttctggtttgttggaaagccatggtattcagaaagtctcaataacctttctgccaagaggaaggggcgactacgcgcagttctgggatgtggaatgtcatccactgaaggagccgcacatgaagcacacgcttcggttccagctgtccggccagtctatcgaagctgagaacgagccggaaaatgcctgcttgagcacagattccctgatcaaaatcgaccacttagtcaaaccacggcgtcaagccgttagcgaggctagcgcaaggatccccgagcagttagatgtgacagcacggggcgtgtacgccccagaggatgtctacaggttccgccccacctccgttggtgagagcagaacacttaaggtgaacctcagaaacaattcattcattacacactcccttaaatttctgtctccgagagaaccattctatgtcaagcatagcaagtactcattacgagcccaacactacatcaatatgccagttcaattcaagccaaagtcagcaggcaagttcgaggcccttttggtgatccaaacggacgaaggcaagtcaattgccatacggttaattggcgaggcacttggaaagaattag

SEQ ID NO: 223043 - DNA, 1626 bp, Artificial Sequence
  derived and/or modified sequence
atgagagccctgttgcacaagcctgagatgatcaaacaaattcttccagaacattccgtcttgcagaacattaatttcgtggaagcatttcaggacgagttgctggtgaccgaagtctatgacctgccacagcggccaaatgatgtgcagttattctatggctcaatgtgtaagatcatcctttccgttatcggcgagtttcgcgactgcatttcttcaagggaattccttcagccttcttctaaagcaagcctcgagtctacatcagatcttggcgcgagcggaaagcacggcggaaatgtatctctggacgtactgccagttaagggaccacaaggctcgccattactgagccgagcggctcggccgcccctggaccaacttgcatccgaggaaccctggaccgttctgccggagcatctcatactggtcgcacctagtccttgcgacatggccaagacaggaagattccagatagttaataacagcgtacgcttactgagattcgagctctgttggcctgcccactgtctgaccgtgacgccgcaacacggctgtgtcgctccagagagtaaactgcagattctggtgagtccaaattcatctttgtctaccaagcagtctatgtttccctggtctggtctaatctacatccactgtgacgacgggcaaaagaaaatcgttaaggtacagatccgggaggatctgacccaggttgaactgctgactcggttgacaagtaagcctttcggaattctgagccctgtttcggaaccttctgtcagtcatctggtcaaacctatgaccaagcccccctccacaaaagtggagattagaaataagtcgattactttcccaactaccgagccaggtgagacatccgagagctgtttggagctggagaatcacggaaccacggacgttaagtggcacttatcttctctagcaccaccttacgtcaaaggcgtggatgaatcaggagatgtcttcagagccacatatgccgctttccgctgcagtcccatctccgggttactagagtctcacggcatccagaaggtgtcaatcacattcctgccacggggacggggggactacgcccagttttgggatgtggagtgtcaccctctgaaggagcctcacatgaaacacaccctcagatttcagctatccggtcagtcgattgaggctgaaaacgagcccgaaaacgcctgtctgtctaccgactccctcatcaaaatcgatcacctcgtgaagcctaggcggcaagccgtaagcgaggctagtgcccgcattccagaacaattagacgtgacggcacgaggggtgtacgcccctgaggatgtatacagattccgtcccacctccgtgggcgaaagtaggactctaaaagttaacctgagaaataactccttcatcacccactcgctaaaatttctatcacccagggagcccttctacgtcaagcattctaaatattctctgagggctcagcactacataaacatgcccgtgcagttcaagcccaaaagcgctggcaagttcgaggctctactagttatccagaccgatgagggaaagtccatcgctattcgtctgatcggagaagccttggggaaaaattag

SEQ ID NO: 223044 - DNA, 5826 bp, Artificial Sequence
  derived and/or modified sequence
ctgctgacctctgtgctgatgcccagctttggctacttcatccgcagccctgagaagcgggagcccatcgccctgatcaggaagagtgatgtgtcccggggcaacctggagaaggagatggcccacctgaaccacgacctgtacagcggggacctgaatgagcagagccaggcccagctgtctgagggcagcatcaccctgcaggtggaggccgtggagagcaccagccaggtggatgaaaatgatgtgaccctgacagctgacaagggcaagacagaggacaccttcttcatgagcaacaagccccagcgctacaaggacaagctgcctgacagcggggacagcatgctgcgcatcagcaccatcgccagcgccatcgccgaggcctctgtgaacacagaccccagccagctggccgccatgatcaaggccctgagcaacaagacccgggacaagaccttccaggaggatgagaagcagaaggactacagccacgtgcgccacttcctgcccaatgacctggagaagagcaatggcagcaatgccctggacatggagaagtacctgaagaagacagaggtgagccgctatgaaagtgccctggagaacttcagccgggcctccatgtctgacacctgggacctgagcctgcccaaggagcagaccacccaggacatccaccctgtggacctgagcgccacctctgtgtctgtgcgggccccagaagaaaatacagctgccatcgtgtatgtggagaatggagagagcgagaaccaggagagcttccgcaccatcaacagcagcaacagcgtgaccaaccgggagaacaacagcgctgtggtggatgtgaagacctgcagcattgacaacaagctgcaggatgtgggcaatgatgagaaggccaccagcatcagcacccccagcgacagctacagctctgtgaggaacccccgcatcaccagcctgtgcctgctgaaggactgtgaggagatccgggacaaccgggagaaccagaggcagaatgaatgtgtgtctgagatcagcaacagcgagaagcacgtgacctttgagaaccacagaattgtgagccccaagaacagcgacctgaagaacaccagccctgagcacggcggccggggctctgaagatgagcaggagagcttccggcccagcaccagccccctgagccacagcagccccagcgagatcagcggcaccagcagcagcggctgtgccctggagagctttggcagcgctgcccagcagcagcagcccccctgtgagcaggagctgagccccctggtgtgcagccctgctggggtgtcccggctgacctacgtgtctgagcctgagagcagctaccccaccacagccacagatgatgccctggaggacaggaagagtgacatcaccagcgagctgagcaccaccatcatccagggcagccctgctgccctggaggagcgggccatggagaagctgcgggagaaggtgcccttccagaacagaggcaagggcaccctgagcagcatcatccagaacaacagcgacaccaggaaggccacagagaccaccagcctgagcagcaagccagaatatgtgaagccagacttccgctggagcaaggaccccagcagcaagagcggcaacctgctggagaccagcgaggtgggctggaccagcaaccctgaggagctggaccccatccggctggccctgctgggcaagagcggcctgagctgccaggtgggcagcgccaccagccaccctgtgtcctgccaggagcccattgatgaggaccagaggatcagccccaaggacaagagcacagctggccgggagttcagcggccaggtgagccaccagaccaccagcgagaaccagtgcacccccatccccagcagcacagtgcacagctctgtggccgacatgcagaacatgcctgctgctgtgcacgccctgctgacccagcccagcctgtctgctgccccctttgcccagcgctacctgggcaccctgcccagcacaggcagcaccaccctgccccagtgccacgccggaaatgccaccgtgtgtggcttcagcggcggcctgccctacccagctgtggccggggagcctgtgcagaacagcgtggccgtgggcatctgcctgggcagcaacatcggcagcggctggatgggcaccagcagcctgtgcaacccctacagcaacaccctgaaccagaacctgctgagcaccaccaagcccttccctgtgcccagcgtgggcaccaactgtggcatcgagccctgggacagcggcgtgaccagcggcctgggctctgtgcgggtgcctgaggagctgaagctgccccacgcctgctgcgtgggcatcgccagccagaccctgctgtctgtgctgaaccccacagaccgctggctgcaggtgtccattggagtgctgagcatctctgtgaatggagagaaggtggacctgagcacctaccgctgcctggtgttcaagaacaaggccatcatccggccccacgccacagaggagatcaaggtgctcttcatccccagcagccctggggtcttccgctgcaccttctctgtggcctcctggccctgcagcacagatgctgagaccatcgtgcaggccgaggccctggccagcacagtgaccctgacagccatcgccgagagccctgtgattgaggtggagacagagaagaaggatgtgctggactttggagacctgacctacggcggctggaaggccctgcccctgaagctgatcaacagaactcatgccaccgtgcccatccgcctcatcatcaatgccaatgctgtggcctggcgctgcttcaccttcagcaaggagagcgtgcgggcccctgtggaggtggccccctgtgctgatgtggtgacccggctggccggccccagcgtggtgaaccacatgatgcctgccagctatgatggccaggaccctgagttcctgatgatctgggtgctcttccacagccccaagaagcagatcagcagcagtgacatcctggacagcgctgaggagttcagcgccaaggtggacatcgaggtggacagccccaaccccacccctgtgctgcggtctgtgtccctgcgggcccgggccggcatcgcccgcatccacgccccccgggacctgcagaccatgcacttcctggccaaggtggccagcagcaggaagcagcacctgcccctgaagaatgccggcaacatcgaggtgtacctggacatcaaggtgcctgagcagggcagccacttctctgtggaccccaagaacctgctgctgaagccaggagaggagcacgaggtgattgtgtccttcacccccaaggaccctgaggcctgtgaggagcgcatcctgaagatctttgtgcagcccttcggcccccagtatgaggtggtgctgaagggggaggtgatcagcagcggcagcaagcccctgagccctggcccctgcctggacatccccagcatcctgagcaacaagcagttcctggcctggggcggcgtgcccctgggccgcacccagctgcagaagctggccctgaggaacaacagcgccagcaccacccagcacctgcggctgctgatccggggccaggaccaggactgcttccagctgcagaacaccttcggcagcgagcagaggctgaccagcaactgtgagatccgcatccaccccaaggaggacatcttcatctctgtgctgtttgcccccacccggctgagctgcatgctggcccggctggagatcaagcagctgggcaacagaagccagcccggcatcaagttcaccatccccctgagcggctacggcggcaccagcaacctgatcctggagggcgtgaagaagctgagtgacagctacatggtgacagtgaatggcctggtgcctgggaaggagagcaagatcgtgttttctgtgaggaacacaggcagccgggccgcctttgtgaaggctgtgggcttcaaggacagccagaagaaggtgctgctggaccccaaggtgctgcgcatcttcccagacaagtttgtgctgaaggagaggacccaggagaatgtgaccctcatctacaaccccagcgaccggggcatcaacaacaagacagccacagagctgagcacagtgtacctgtttggaggagatgagatcagccggcagcagtacagaagagccctgctgcacaagccagagatgatcaagcagatcctgcctgagcacagcgtgctgcagaacatcaactttgtggaggccttccaggatgagctgctggtgacagaggtgtatgacctgccccagaggcccaatgatgtgcagctgttctacggctccatgtgcaagatcatcctgagcgtcatcggggagttccgggactgcatcagcagccgggagttcctgcagcccagcagcaaggccagcctggagagcaccagtgacctgggcgccagcggcaagcatggaggaaatgtgtccctggatgtgctgcctgtgaagggcccccagggcagccccctgctgagccgggccgcccggccccccctggaccagctggccagcgaggagccctggacagtgctgcctgagcacctgatcctggtggcccccagcccctgtgacatggccaagacaggccgcttccagatcgtgaacaacagcgtgcggctgctgcgctttgagctgtgctggccagcccactgcctgactgtgaccccccagcacggctgtgtggcccctgagagcaagctgcagatcctggtgagccccaacagcagcctgagcaccaagcagagcatgttcccctggagcggcctcatctacatccactgtgatgatggccagaagaagatcgtgaaggtgcagatccgggaggacctgacccaggtggagctgctgacccggctgaccagcaagcccttcggcatcctgagccctgtgtctgagcccagcgtgagccacctggtgaagcccatgaccaagccacccagcaccaaggtggagatccggaacaagagcatcaccttccccaccacagagcccggggagaccagcgagagctgcctggagctggagaaccacggcaccacagatgtgaagtggcacctgagcagcctggccccaccctacgtgaagggcgtggatgagagcggagatgtgttccgggccacctatgctgccttccgctgcagccccatcagcggcctgctggagagccacggcatccagaaggtgtccatcaccttcctgccccggggccgcggggactatgcccagttctgggatgtggagtgccaccccctgaaggagccccacatgaagcacaccctgcgcttccagctgagcggccagagcattgaagcagaaaatgaaccagaaaatgcctgcctgagcacagacagcctcatcaagattgaccacctggtgaagccccggcggcaggccgtgtctgaggccagcgcccgcatccctgagcagctggatgtgacagcccggggcgtgtatgccccagaagatgtgtaccgcttccggcccacctctgtgggggagagcaggaccctgaaggtgaacctgaggaacaacagcttcatcacccacagcctgaagttcctgagcccccgggagcccttctacgtgaagcacagcaagtacagcctgcgggcccagcactacatcaacatgcctgtgcagttcaagcccaagtctgctgggaagtttgaggccctgctggtgatccagacagatgagggcaagagcatcgccatccgcctcatcggggaggccctgggcaagaactag

SEQ ID NO: 223045 - DNA, 7614 bp, Artificial Sequence
  derived and/or modified sequence
atggaggacttccggggcattgctgaggagagcttccccagcttcctgaccaacagcctgtttggaaacagcggcatcctggagaatgtgaccctgagcagcaacctgggcctgcctgtggccgtgtccaccctggcccgggacaggagcagcacagacaaccgctacccagacatccaggccagctacctggtggagggccgcttctctgtgcccagcggcagcagccctggcagccagagtgatgctgagccccgggagcggctgcagctgtccttccaggatgatgacagcatcagcaggaagaagagctatgtggagagccagaggctgagcaatgccctgagcaagcagagcgccctgcagatggagacagctggccctgaggaggagcctgctggggccacagagagcctgcagggccaggacctcttcaacagagccagccccctggagcaggcccaggacagccccatcgacttccacctgcagagctggatgaacaacaaggagcccaagatcgtggtgctggatgctgggaagcactttgaggacaagaccctgaagagtgacctgagccacaccagcctgctggagaatgagaagctgatcctgcccaccagcctggaggacagcagtgatgatgacattgatgatgagatgttttatgatgaccacctggaggcctactttgagcagctggccatccctggcatgatctatgaggacctggagggccctgagcccccagagaagggcttcaagctgcccaccaacggcctgcggcaggccaatgaaaatggcagcctgaactgcaagttccagagcgagaacaacagcagcctcatcagcctggacagccacagcagcgagaccacccacaaggagagcgaggagagccaggtgatctgcctgcccggcaccagcaacagcatcggcaccggggacagccgccgctacacagatggcatgctgcccttcagcagcggcacctggggcacagagaaggagattgagaacctgaagggcatcgtgcctgacctgaacagtgaatgtgccagcaaggatgtgctggtgaagaccctgcgggccattgatgtgaagctgaacagcgacaacttccatgatgccaatgccaacagaggaggctttgacctgacagatcctgtgaagcagggcgcagaatgtccccaccagaacaagacagtgctgcacatggatggctgcctggacacagagacccccaccgtgtccatccaggagaatgtggatgtggccagcctgaagcccatcagtgacagcggcatcaacttcacagatgccatctggagccccacctgtgaaagaaggacctgtgaatgtcatgagagcattgagaagaacaaggacaagacagacctgccccagagcgtggtgtaccagaatgaggagggccgctgggtgacagacctggcctactacaccagcttcaacagcaagcagaacctgaatgtgtccctgagtgatgagatgaatgaagacttccgcagcggcagcgaggcctttgacctgattgcccaggatgaggaggagttcaacaaggagcaccagttcatccaggaggagaacattgatgcccacaacacctctgtggccctgggggacacctcctggggcgccaccatcaactacagcctgctgaggaagagccgcagcaccagtgacctggacaaggatgatgccagctacctgcggctgagcctgggggagttctttgcccagaggtctgaggccctgggctgcctgggcggcggcaacaacgtgaagaggcccagctttggctacttcatccgcagccctgagaagcgggagcccatcgccctgatcaggaagagtgatgtgtcccggggcaacctggagaaggagatggcccacctgaaccacgacctgtacagcggggacctgaatgagcagagccaggcccagctgtctgagggcagcatcaccctgcaggtggaggccgtggagagcaccagccaggtggatgaaaatgatgtgaccctgacagctgacaagggcaagacagaggacaccttcttcatgagcaacaagccccagcgctacaaggacaagctgcctgacagcggggacagcatgctgcgcatcagcaccatcgccagcgccatcgccgaggcctctgtgaacacagaccccagccagctggccgccatgatcaaggccctgagcaacaagacccgggacaagaccttccaggaggatgagaagcagaaggactacagccacgtgcgccacttcctgcccaatgacctggagaagagcaatggcagcaatgccctggacatggagaagtacctgaagaagacagaggtgagccgctatgaaagtgccctggagaacttcagccgggcctccatgtctgacacctgggacctgagcctgcccaaggagcagaccacccaggacatccaccctgtggacctgagcgccacctctgtgtctgtgcgggccccagaagaaaatacagctgccatcgtgtatgtggagaatggagagagcgagaaccaggagagcttccgcaccatcaacagcagcaacagcgtgaccaaccgggagaacaacagcgctgtggtggatgtgaagacctgcagcattgacaacaagctgcaggatgtgggcaatgatgagaaggccaccagcatcagcacccccagcgacagctacagctctgtgaggaacccccgcatcaccagcctgtgcctgctgaaggactgtgaggagatccgggacaaccgggagaaccagaggcagaatgaatgtgtgtctgagatcagcaacagcgagaagcacgtgacctttgagaaccacagaattgtgagccccaagaacagcgacctgaagaacaccagccctgagcacggcggccggggctctgaagatgagcaggagagcttccggcccagcaccagccccctgagccacagcagccccagcgagatcagcggcaccagcagcagcggctgtgccctggagagctttggcagcgctgcccagcagcagcagcccccctgtgagcaggagctgagccccctggtgtgcagccctgctggggtgtcccggctgacctacgtgtctgagcctgagagcagctaccccaccacagccacagatgatgccctggaggacaggaagagtgacatcaccagcgagctgagcaccaccatcatccagggcagccctgctgccctggaggagcgggccatggagaagctgcgggagaaggtgcccttccagaacagaggcaagggcaccctgagcagcatcatccagaacaacagcgacaccaggaaggccacagagaccaccagcctgagcagcaagccagaatatgtgaagccagacttccgctggagcaaggaccccagcagcaagagcggcaacctgctggagaccagcgaggtgggctggaccagcaaccctgaggagctggaccccatccggctggccctgctgggcaagagcggcctgagctgccaggtgggcagcgccaccagccaccctgtgtcctgccaggagcccattgatgaggaccagaggatcagccccaaggacaagagcacagctggccgggagttcagcggccaggtgagccaccagaccaccagcgagaaccagtgcacccccatccccagcagcacagtgcacagctctgtggccgacatgcagaacatgcctgctgctgtgcacgccctgctgacccagcccagcctgtctgctgccccctttgcccagcgctacctgggcaccctgcccagcacaggcagcaccaccctgccccagtgccacgccggaaatgccaccgtgtgtggcttcagcggcggcctgccctacccagctgtggccggggagcctgtgcagaacagcgtggccgtgggcatctgcctgggcagcaacatcggcagcggctggatgggcaccagcagcctgtgcaacccctacagcaacaccctgaaccagaacctgctgagcaccaccaagcccttccctgtgcccagcgtgggcaccaactgtggcatcgagccctgggacagcggcgtgaccagcggcctgggctctgtgcgggtgcctgaggagctgaagctgccccacgcctgctgcgtgggcatcgccagccagaccctgctgtctgtgctgaaccccacagaccgctggctgcaggtgtccattggagtgctgagcatctctgtgaatggagagaaggtggacctgagcacctaccgctgcctggtgttcaagaacaaggccatcatccggccccacgccacagaggagatcaaggtgctcttcatccccagcagccctggggtcttccgctgcaccttctctgtggcctcctggccctgcagcacagatgctgagaccatcgtgcaggccgaggccctggccagcacagtgaccctgacagccatcgccgagagccctgtgattgaggtggagacagagaagaaggatgtgctggactttggagacctgacctacggcggctggaaggccctgcccctgaagctgatcaacagaactcatgccaccgtgcccatccgcctcatcatcaatgccaatgctgtggcctggcgctgcttcaccttcagcaaggagagcgtgcgggcccctgtggaggtggccccctgtgctgatgtggtgacccggctggccggccccagcgtggtgaaccacatgatgcctgccagctatgatggccaggaccctgagttcctgatgatctgggtgctcttccacagccccaagaagcagatcagcagcagtgacatcctggacagcgctgaggagttcagcgccaaggtggacatcgaggtggacagccccaaccccacccctgtgctgcggtctgtgtccctgcgggcccgggccggcatcgcccgcatccacgccccccgggacctgcagaccatgcacttcctggccaaggtggccagcagcaggaagcagcacctgcccctgaagaatgccggcaacatcgaggtgtacctggacatcaaggtgcctgagcagggcagccacttctctgtggaccccaagaacctgctgctgaagccaggagaggagcacgaggtgattgtgtccttcacccccaaggaccctgaggcctgtgaggagcgcatcctgaagatctttgtgcagcccttcggcccccagtatgaggtggtgctgaagggggaggtgatcagcagcggcagcaagcccctgagccctggcccctgcctggacatccccagcatcctgagcaacaagcagttcctggcctggggcggcgtgcccctgggccgcacccagctgcagaagctggccctgaggaacaacagcgccagcaccacccagcacctgcggctgctgatccggggccaggaccaggactgcttccagctgcagaacaccttcggcagcgagcagaggctgaccagcaactgtgagatccgcatccaccccaaggaggacatcttcatctctgtgctgtttgcccccacccggctgagctgcatgctggcccggctggagatcaagcagctgggcaacagaagccagcccggcatcaagttcaccatccccctgagcggctacggcggcaccagcaacctgatcctggagggcgtgaagaagctgagtgacagctacatggtgacagtgaatggcctggtgcctgggaaggagagcaagatcgtgttttctgtgaggaacacaggcagccgggccgcctttgtgaaggctgtgggcttcaaggacagccagaagaaggtgctgctggaccccaaggtgctgcgcatcttcccagacaagtttgtgctgaaggagaggacccaggagaatgtgaccctcatctacaaccccagcgaccggggcatcaacaacaagacagccacagagctgagcacagtgtacctgtttggaggagatgagatcagccggcagcagtacagaagagccctgctgcacaagccagagatgatcaagcagatcctgcctgagcacagcgtgctgcagaacatcaactttgtggaggccttccaggatgagctgctggtgacagaggtgtatgacctgccccagaggcccaatgatgtgcagctgttctacggctccatgtgcaagatcatcctgagcgtcatcggggagttccgggactgcatcagcagccgggagttcctgcagcccagcagcaaggccagcctggagagcaccagtgacctgggcgccagcggcaagcatggaggaaatgtgtccctggatgtgctgcctgtgaagggcccccagggcagccccctgctgagccgggccgcccggccccccctggaccagctggccagcgaggagccctggacagtgctgcctgagcacctgatcctggtggcccccagcccctgtgacatggccaagacaggccgcttccagatcgtgaacaacagcgtgcggctgctgcgctttgagctgtgctggccagcccactgcctgactgtgaccccccagcacggctgtgtggcccctgagagcaagctgcagatcctggtgagccccaacagcagcctgagcaccaagcagagcatgttcccctggagcggcctcatctacatccactgtgatgatggccagaagaagatcgtgaaggtgcagatccgggaggacctgacccaggtggagctgctgacccggctgaccagcaagcccttcggcatcctgagccctgtgtctgagcccagcgtgagccacctggtgaagcccatgaccaagccacccagcaccaaggtggagatccggaacaagagcatcaccttccccaccacagagcccggggagaccagcgagagctgcctggagctggagaaccacggcaccacagatgtgaagtggcacctgagcagcctggccccaccctacgtgaagggcgtggatgagagcggagatgtgttccgggccacctatgctgccttccgctgcagccccatcagcggcctgctggagagccacggcatccagaaggtgtccatcaccttcctgccccggggccgcggggactatgcccagttctgggatgtggagtgccaccccctgaaggagccccacatgaagcacaccctgcgcttccagctgagcggccagagcattgaagcagaaaatgaaccagaaaatgcctgcctgagcacagacagcctcatcaagattgaccacctggtgaagccccggcggcaggccgtgtctgaggccagcgcccgcatccctgagcagctggatgtgacagcccggggcgtgtatgccccagaagatgtgtaccgcttccggcccacctctgtgggggagagcaggaccctgaaggtgaacctgaggaacaacagcttcatcacccacagcctgaagttcctgagcccccgggagcccttctacgtgaagcacagcaagtacagcctgcgggcccagcactacatcaacatgcctgtgcagttcaagcccaagtctgctgggaagtttgaggccctgctggtgatccagacagatgagggcaagagcatcgccatccgcctcatcggggaggccctgggcaagaactag

SEQ ID NO: 223046 - DNA, 1626 bp, Artificial Sequence
  derived and/or modified sequence
atgagggccctgctgcacaagccagagatgatcaagcagatcctgcctgagcacagcgtgctgcagaacatcaactttgtggaggccttccaggatgagctgctggtgacagaggtgtatgacctgccccagaggcccaatgatgtgcagctgttctacggctccatgtgcaagatcatcctgagcgtcatcggggagttccgggactgcatcagcagccgggagttcctgcagcccagcagcaaggccagcctggagagcaccagtgacctgggcgccagcggcaagcatggaggaaatgtgtccctggatgtgctgcctgtgaagggcccccagggcagccccctgctgagccgggccgcccggccccccctggaccagctggccagcgaggagccctggacagtgctgcctgagcacctgatcctggtggcccccagcccctgtgacatggccaagacaggccgcttccagatcgtgaacaacagcgtgcggctgctgcgctttgagctgtgctggccagcccactgcctgactgtgaccccccagcacggctgtgtggcccctgagagcaagctgcagatcctggtgagccccaacagcagcctgagcaccaagcagagcatgttcccctggagcggcctcatctacatccactgtgatgatggccagaagaagatcgtgaaggtgcagatccgggaggacctgacccaggtggagctgctgacccggctgaccagcaagcccttcggcatcctgagccctgtgtctgagcccagcgtgagccacctggtgaagcccatgaccaagccacccagcaccaaggtggagatccggaacaagagcatcaccttccccaccacagagcccggggagaccagcgagagctgcctggagctggagaaccacggcaccacagatgtgaagtggcacctgagcagcctggccccaccctacgtgaagggcgtggatgagagcggagatgtgttccgggccacctatgctgccttccgctgcagccccatcagcggcctgctggagagccacggcatccagaaggtgtccatcaccttcctgccccggggccgcggggactatgcccagttctgggatgtggagtgccaccccctgaaggagccccacatgaagcacaccctgcgcttccagctgagcggccagagcattgaagcagaaaatgaaccagaaaatgcctgcctgagcacagacagcctcatcaagattgaccacctggtgaagccccggcggcaggccgtgtctgaggccagcgcccgcatccctgagcagctggatgtgacagcccggggcgtgtatgccccagaagatgtgtaccgcttccggcccacctctgtgggggagagcaggaccctgaaggtgaacctgaggaacaacagcttcatcacccacagcctgaagttcctgagcccccgggagcccttctacgtgaagcacagcaagtacagcctgcgggcccagcactacatcaacatgcctgtgcagttcaagcccaagtctgctgggaagtttgaggccctgctggtgatccagacagatgagggcaagagcatcgccatccgcctcatcggggaggccctgggcaagaactag

SEQ ID NO: 223047 - DNA, 5826 bp, Artificial Sequence
  derived and/or modified sequence
ctgctgaccagcgtgctgatgcccagcttcggctacttcatccggtcaccggaaaagcgggagcctattgccttaatacgcaaatcagacgtctcaaggggcaatttggaaaaagaaatggcccatcttaatcacgatctctacagcggagacctcaacgaacaatctcaggctcagctgtctgaagggtctatcaccctgcaagttgaggctgtagagtccacatctcaagtggatgagaacgatgtaaccttaacagccgacaagggtaagactgaggacaccttctttatgagcaataaacctcagcgatacaaggataaactccctgactctggagattctatgctgcgtatctctaccatagcatccgcaatagccgaagcctcggttaatactgatcccagtcagctcgccgctatgataaaagccctgagcaataagactcgcgacaaaacgtttcaagaggatgaaaagcagaaggactatagccacgtaagacacttcctccccaacgacttggagaaaagtaacgggagcaacgcactggatatggagaaatacctcaaaaaaacggaagtgagtagatacgagtcagcattggaaaacttttcccgagcaagtatgtcagatacatgggacctctcacttcccaaagagcagacaacccaagatatccatccagttgacctttcagcgactagtgtctctgtgcgggccccagaagagaatactgccgctatagtgtacgttgaaaatggtgaaagtgaaaaccaggaatcctttcgcacaataaattcatcaaattccgttaccaatcgcgagaataactccgccgtggtggatgttaaaacgtgctccatcgacaataagctgcaggacgtggggaatgacgaaaaggccacttctatcagcacccctagtgacagctatagcagtgtgaggaacccacggatcacctctctctgcctactgaaggactgcgaagagatacgcgataatagagagaaccagcgccagaatgaatgtgtgagcgagatttctaattccgagaaacacgtcaccttcgaaaatcaccgcatcgtatccccgaaaaacagtgacctcaaaaacacgtcccccgaacatgggggccgcggatctgaagatgagcaggagtctttccgaccatctacgtcaccgctctctcactccagcccttcagagatttccggaacctcctcatctggttgtgccctggaaagctttgggagcgccgcccagcagcagcaacctccctgcgaacaggaactaagccctctggtttgctcgccggcaggtgtcagtcgtcttacctatgtttcggaacccgaaagctcttatccgactacagcaacagacgatgccctggaggacagaaagagcgatatcacatctgagttgtcgaccactatcatccagggcagtccagcggctctggaggaaagagctatggaaaagctcagggaaaaagtccctttccagaaccgcggaaaagggaccctaagctccattattcagaacaacagcgatacaaggaaggccactgaaaccacctccctgtcgagcaaaccagagtatgtgaagccggatttccgctggtccaaagatcccagcagcaaaagtggaaatctgctcgagacaagcgaagtcggctggactagcaatccagaggagctggacccaatcagacttgctttactgggaaagagcggcctctcatgccaggtgggaagcgccacgagccacccagtcagctgtcaggaaccaatcgacgaggaccagagaatctcccctaaggacaagagcaccgcggggcgcgagttcagtggccaagtctctcaccagacgacttcagaaaaccagtgcacccctattcctagcagcacggtgcattcatccgttgctgacatgcagaatatgccagccgctgtgcacgccctgctcacacaacctagtctgtcagccgcccctttcgcccaacggtacctgggcaccctgccaagcacaggatctaccacgctccctcagtgccacgcgggaaacgcaacagtgtgtggattctctggggggcttccttatccagccgtggccggagagcctgtccagaatagcgttgccgtcggaatctgtctcggctcaaatattggctcaggatggatgggaacgtcttcactctgtaacccatactctaacaccctgaaccagaaccttttatccactacaaaacccttcccagtcccgagcgtcgggacaaactgcggaatcgagccatgggatagtggcgtaacgtcgggtctaggcagcgtgcgggtgccggaagaactcaaactaccgcacgcgtgttgtgtgggcattgcttcacagacgctgctgtccgtgctgaacccaacagacaggtggctgcaagtttctatcggcgtactgagcatttccgtcaatggagaaaaggttgacctgtccacctataggtgtctggtgttcaagaataaggccattatccgtcctcacgcgacagaggaaattaaggtcttgtttattccgtcgagcccaggcgtgttccgatgcactttcagcgtcgcttcttggccatgttcaaccgatgccgagacaatcgtgcaagccgaagcactggcctcaactgtcacactgactgctatcgctgagtcccccgtaattgaagtcgaaaccgaaaaaaaggatgtgctcgacttcggcgacttgacctacggggggtggaaggcactgccactcaagttaatcaatagaacccacgccaccgtcccaattcgcctgattataaatgcaaacgcagtggcttggcgctgcttcaccttctctaaggagagcgtgagagcccctgtggaagtggccccctgcgcagacgttgtgacaaggcttgctggcccttcagttgtgaatcacatgatgccagcaagttacgacggccaagaccctgaattcttaatgatctgggttcttttccactcacccaagaaacagatctcatcaagcgatatcctggatagcgcggaggagttttcagccaaggtggacattgaggtggacagccctaatcctacccccgttctgaggtctgtatctctgcgggctcgggctggcatagcaaggatccacgccccccgagatcttcagactatgcatttcctggccaaggttgcatccagtcggaagcagcacctccccttgaagaacgccggcaacattgaggtgtaccttgatatcaaagtccctgaacagggatcccatttctctgtggacccaaaaaacttgctgctgaaaccaggtgaagagcatgaagtgatcgtgtcattcacaccgaaggatcctgaagcatgcgaggagcgcatcctcaaaatctttgtgcagcctttcggccctcagtacgaagtggtccttaaaggcgaagttataagctctggctcaaaaccactgagccctggcccctgcctggacattccgagcattctgagcaataaacagtttctggcttgggggggcgttccactgggcagaacgcagttgcagaagcttgccttgcggaacaactcagcctccactacccagcatttgcggctgttgattcgggggcaagaccaggattgttttcagttgcagaacaccttcggaagtgaacagcgtcttaccagcaattgtgagatccgcatccatccgaaggaagacatattcatctctgtcttgtttgcgcccactcggctgtcatgcatgctggctaggctcgaaattaagcagcttggtaaccgcagccagcccgggatcaaatttacaattcccctgtcaggctacggggggacctccaacctcattctagagggagtgaaaaagttgtctgatagctacatggtgaccgttaatggcttagtccctggtaaggaatccaagattgtgttcagcgtacgtaacaccggttcacgcgccgccttcgtgaaggcagttgggttcaaagatagccagaaaaaagtactcctcgatccaaaagtgcttcgaatattccccgataagtttgtccttaaagagagaacccaggaaaatgtgacgttaatctataacccatcagatagaggcatcaacaataaaaccgctaccgagctgtctaccgtgtacctgtttggaggagacgagatttcccggcaacaatataggagggcactcctccacaaacctgagatgattaagcaaatcctgccggagcattcagtcttacagaacatcaatttcgttgaggcgtttcaggacgagctcctagtgactgaagtgtacgacctgcctcaaaggccaaacgacgtccagttattttatggatccatgtgtaagataatcctgtccgtgattggagagttcagagactgtatcagctccagggagttcttacagccaagctccaaggcctcactggagtctacgtctgatctgggagcctccggtaagcacggaggcaatgtgagcctggacgttctcccggttaaaggcccacagggatccccattactttctagggcagcaagaccccccctggaccagctggcatcagaagagccttggacagtattgccagagcacctgattctcgttgcccctagcccgtgtgacatggcgaaaactggcaggtttcagatcgtcaataacagtgtgcgcctcctaagatttgagctgtgctggccagcacattgccttacagttactccacagcatggttgcgttgcccctgagagcaagttgcaaattttggttagccctaattcgtcgctgtcgaccaaacagagcatgttcccatggtctgggctgatctacattcactgtgacgatgggcagaaaaagatagtaaaggtccagataagggaagatctgacacaggttgagctcctaacaaggcttacatcaaagccttttggaatcttaagcccggtatctgagcctagcgtatcgcatttggtcaaacctatgaccaaaccacccagcactaaagtcgagattaggaacaaatctatcaccttccccactaccgagcccggcgagacctccgaatcttgcctcgagttagaaaaccatgggaccaccgacgtgaaatggcacctgtctagcctggccccaccttacgtcaaaggagttgacgagtctggcgacgtgttccgagccacctacgccgcctttaggtgttctcccatctctggattattagaatcacacggcatacagaaggtgtctattacgtttttgcctcggggtagaggagattatgcacagttctgggacgtcgagtgccaccccctcaaggagcctcacatgaaacataccctgagatttcagcttagtggccagagcatcgaggccgagaacgagccggagaatgcgtgccttagcaccgactcgctcataaagattgaccacctggtaaaacctcggagacaggctgtgagcgaagcgtcagcccgcattcccgaacagctggatgtgactgccagaggtgtgtatgcaccagaggacgtttaccggtttaggccgacctctgtgggcgagtctcgcaccttgaaggtcaatctgaggaataatagttttattacccatagcttgaagtttttatctcctcgggaacccttttacgtgaagcactctaagtactctctccgagcacagcactacataaacatgcctgtgcaattcaagccgaagagcgcgggaaagttcgaagctctcctcgttattcagacagatgaggggaaatccattgcaattcgcctaatcggagaggccctgggtaagaactag

SEQ ID NO: 223048 - DNA, 6104 bp, Artificial Sequence
  derived and/or modified sequence
cttttgactagtgttttaatgccatcatttggctattttattagatcaccagagaagagagaacctattgccttaataagaaaatctgatgtatcaagaggtaatttggaaaaagaaatggctcatcttaaccatgatctatattcaggagatttaaatgaacagtcccaggcacagctaagtgaaggatcaattacacttcaggttgaagcagtagagagtacttcacaagtggatgaaaatgatgtgacgttaacggctgataaaggcaaaacagaggacactttcttcatgagcaacaaaccccaaagatacaaagacaagctaccagatagtggtgattctatgcttaggatcagcaccattgcttcagccattgcagaggcatcagttaatactgatccttcccaacttgctgcaatgatcaaggcactttcaaataaaaccagagacaagacttttcaggaagatgagaaacaaaaggactattctcatgtgcgtcatttcttacctaatgatttagaaaaaagtaatggatccaatgcacttgatatggagaaataccttaaaaaaacagaagttagtagatatgaaagtgcattggaaaacttttcaagggctagtatgtctgatacttgggatttatctttgcccaaagaacaaactactcaagacattcatccggtggacttaagtgctactagtgtaagtgtgagggcaccagaagaaaacacagcagctattgtttatgttgaaaatggagagagtgagaatcaagagtcatttagaaccataaactcctcaaattcagttacaaatagagagaataacagtgcagtagttgatgtgaagacatgttccattgacaacaaattacaagatgttggtaacgatgaaaaagctacctcaatttccactccatctgatagttattcatcagtgaggaaccccagaataacatccctttgtctgttaaaagactgtgaagaaatacgagataacagagaaaatcagaggcaaaatgagtgtgtcagtgaaataagcaacagtgagaagcatgtgacttttgaaaaccatcgcatagtctcacctaaaaatagtgatttgaaaaatacctctcctgagcatggtggacgtggctcagaggatgagcaggagagcttcagaccttccacgtcaccactgagtcattcttctcctagtgaaatttctggaacgagttcatcagggtgtgcgttagagtcctttggttcagcagctcagcagcagcagcctccctgtgagcaggagttgtctcccttggtgtgctcgcctgctggggtgagcaggctgacgtatgtgtctgaaccagagagctcctatcctaccacagccacagatgatgccctggaggaccgcaagagtgatatcaccagcgagttgagtaccacaattattcaaggcagtccagccgcattggaggaacgggctatggaaaaattgagagaaaaagttccatttcagaatagaggaaaaggaacattatcatctattatccagaataactctgatacaagaaaagcaactgaaactacttctctgagtagcaagcctgaatatgtaaaacctgactttagatggagtaaagatccttcctccaaaagtggaaatctgttggaaaccagtgaggtaggttggacatcaaaccctgaggaattggacccgatcaggctggctctcctgggcaagtcaggtctgagctgtcaggtggggtcagccacatcacaccctgtgtcctgccaggagcctatagatgaagatcaaagaataagtcctaaagataagtcaactgctggccgtgagttcagtggccaggtttctcatcagaccacctctgaaaaccagtgtactcctattcccagcagcacagttcacagctctgtggctgacatgcagaacatgcctgctgctgtgcacgcactcttgacacaaccctctctcagcgctgctccttttgctcagcggtatttgggaacactcccttcaactggaagcaccaccttgcctcagtgccatgctggcaatgccacagtctgtggcttctcaggaggccttccctatccagctgttgcaggagagcctgtgcagaactctgtggctgtgggaatttgtctaggatcaaatatcggctctggatggatgggtacctcttccctctgtaacccatattctaataccttaaatcagaacctgctaagcacaacaaaaccttttcctgtgccgtctgttggtacaaactgtggaattgaaccatgggattcaggagtgacatcaggattggggagtgtccgagtgcccgaggagttgaagcttcctcatgcttgctgtgtcgggatcgcttcccagaccctcctcagtgtgcttaatccaactgaccgctggctgcaagtcagcattggggtcctcagcattagtgttaatggtgaaaaggtggatctttcaacatatcgttgtttagttttcaagaataaagccatcataagacctcatgccacagaagagataaaagtgctttttataccatccagtcctggggttttcagatgcacattcagtgttgcttcttggccatgttcgacagatgctgagaccatcgtacaggcagaagctttggccagcaccgtcactctcactgccattgccgagagtcctgttattgaggtagaaacagaaaagaaagacgttcttgattttggtgacttgacttatggaggctggaaagccctcccactaaaattgataaaccgaacgcatgccactgtgccaattagactgattattaatgctaacgctgtagcctggcgctgtttcacgttttccaaggaatccgtccgagctcctgtggaagttgctccttgcgctgatgtggtcactcggctagcaggcccttctgtggtcaaccacatgatgcctgctagttatgatggacaggatccagaatttctgatgatttgggttcttttccatagtccaaagaaacagatcagctcttcagatattctggactcagcagaagaattctcggcaaaagttgatatcgaagttgacagcccaaaccctacgcccgttcttagaagtgtgagtctccgagcaagagcaggaatagctaggatccatgctcccagggacttgcagacgatgcatttcttggccaaagtggcttcctcaagaaagcagcacttacctttgaaaaatgctgggaacattgaagtttatttggatatcaaggtcccagaacaaggaagtcacttttcagtggatccaaagaatctactccttaaacctggagaagaacatgaggttattgtttcatttactccaaaggatcctgaagcctgcgaggaaaggatcttgaaaatatttgtgcagccatttggacctcagtatgaggtagtgttaaaaggcgaagtcatttcttcaggaagtaaacctctgtcacctggaccttgcttagatattccatcgattttgtccaacaaacaatttctggcttggggaggagtccctctaggtagaacacagcttcagaaactagctttaagaaataattctgcatctacaactcaacatttacgactgcttattagaggacaagatcaggactgctttcagcttcagaacacttttggttcagaacagcgattgaccagtaactgtgagatcagaattcacccaaaggaagacattttcatctctgtattatttgcacctactcgattatcttgcatgttggctagactagaaatcaaacaacttggaaatcgatcacaaccaggcattaagttcacaatacctttgtctggatatggaggaacaagcaatcttattttggaaggcgttaaaaaattatctgacagttacatggtaacagtgaatggcttagtacctggcaaagaaagtaaaattgttttttctgtccgcaacactggctcccgagcagcttttgttaaagcagtaggttttaaggattctcagaaaaaagttttgctggatcctaaagtattgaggatttttccagataaatttgtactcaaggaaagaacacaagaaaatgttactttaatatataatccatcagacagaggaatcaataataaaactgcaacagaactatcaactgtatacttatttggtggagatgaaatttcaagacagcagtatcgcagggccctgttacataaaccagagatgataaaacagatacttccagaacatagtgtgcttcaaaacattaattttgttgaagcatttcaagatgagctattagtaactgaagtatatgatcttccccaacgacctaatgatgttcagctcttttatggaagcatgtgtaaaattatactttcagtaattggagaattcagagattgcatttctagcagagaattccttcagccttcttccaaagctagcttggaatctacaagcgacttgggagcttctgggaaacatggtggcaacgtctctttggatgttttaccagtcaaaggtcctcagggttctcctcttctctcacgggcggctcgcccgcctctggatcagctggcctccgaagagccgtggactgtcctacccgagcacttgattctggtagctccttctccttgtgacatggcaaaaactggacgtttccagattgtgaataactctgtgaggttactgagatttgagctgtgctggccagcgcattgcctcacagtcacgccgcagcatggatgtgtcgcgccagagagtaaactacaaattcttgtgagtcctaattcctccttatccacaaaacagtcaatgttcccgtggagtggtttgatctatatacactgtgacgatggacagaagaaaattgtgaaagttcaaattcgagaagatttaactcaagtggaacttttaactcgtttgacctccaaaccatttggaattctttccccagtatctgagccttcagttagtcatttggtcaaaccaatgacaaaaccgccttccacaaaagttgaaataagaaacaagagtattacttttcctacaacagaacctggtgaaacttcagagagctgtctagaactcgagaatcatggcaccacagacgtgaaatggcatctgtcatctttagcgccaccttatgtcaagggagttgatgaaagtggagatgtttttagagctacctatgcagcattcagatgttctcctatttctggtctgctggaaagccatgggatccaaaaagtctccatcacatttttgcccagaggtaggggggattatgcccagttttgggatgttgaatgtcaccctcttaaggagcctcacatgaaacacacgttgagattccaactctctggacaaagcatcgaagcagaaaatgagcctgaaaacgcatgcctttccacggattccctcattaaaatagatcatttagttaagccccgaagacaagctgtgtcagaggcttctgctcgcatacctgagcagcttgatgtgactgctcgtggagtttatgccccagaggatgtgtacaggttccggccgactagtgtgggggaatcacggacacttaaagtcaatctgcgaaataattcttttattacacactcactgaagtttttgagtcccagagagccattctatgtcaaacattccaagtactctttgagagcccagcattacatcaacatgcccgtgcagttcaaaccgaagtccgcaggcaaatttgaagctttgcttgtcattcaaacagatgaaggcaagagtattgctattcgactaattggtgaagctcttggaaaaaattaactagaatacatttttgtgtaaagtaaattacataagttgtattttgttaactttatctttctacactacaattatgcttttgtatatatattttgtatgatggatatctataattgtagattttgtttttacaagctaatactgaagactcgactgaaatattatgtatctagcccatagtattgtacttaacttttacaggtgagaagagagttctgtgtttgcattgattatgatattctgaataaatatggaatatattttaatgtggtatatcc

SEQ ID NO: 223049 - DNA, 7614 bp, Artificial Sequence
  derived and/or modified sequence
atggaggacttccggggcatcgccgaggagagcttccccagcttccttaccaatagcctattcggaaactctggcatcctggaaaacgtcaccctgtcctccaatctcggtctgcccgtcgctgtatctactctcgcgagagacagatcatctacggacaatcgttatccagatattcaggcatcttatctggtagagggcagattctctgtgccctctggcagctctccaggaagccagtcagatgccgagcccagagagcggctccagttatcctttcaggatgatgattctatcagtaggaagaaatcctacgtcgagtcccagaggttatctaacgcgctgagcaaacagagcgcccttcaaatggaaaccgcggggccagaagaagaaccagctggggcaacagagagtctccagggacaggacctgttcaatcgggcatcgccactggagcaggcgcaggacagccccatagactttcacctccagagctggatgaacaacaaagaacctaagatagtggtgttggacgccggaaagcactttgaggacaagacactcaaatcagacctgtcccacacatcgctcctggaaaacgaaaagctgatcttgcctactagccttgaagacagctcagatgacgacattgacgacgagatgttctacgacgaccacctggaagcttactttgaacagctggcgatccccgggatgatatatgaagatctcgaaggcccggagccgcctgagaaaggcttcaaactgcctacaaatggtttgaggcaagccaacgagaatggaagtctgaactgcaagtttcagtctgaaaataattccagtctcatctcgctggactcccacagctctgagacaacccacaaggaaagcgaggagagccaagttatctgtttgcccgggacttcgaattccatcgggaccggcgattctcgccgctatacagacggtatgcttcccttctcttcaggcacttggggcaccgaaaaggagattgaaaatctgaaagggatcgtgccagatctcaactcagaatgtgcaagtaaagatgtgttggttaagacactgcgtgctatcgatgtgaaattaaatagcgataattttcatgacgctaatgctaaccgaggagggtttgaccttaccgaccctgtgaaacagggagctgagtgtcctcaccagaataagaccgtcctgcatatggatggctgtctggatactgaaacaccaactgtgtccatccaagagaatgttgatgtggcaagtctgaaaccaatctctgacagcggcataaacttcacagatgccatttggtcaccaacatgcgaaaggaggacatgcgaatgccacgaatctatcgagaagaacaaggacaaaacagacttgccccagagtgtggtataccagaatgaagaggggcgctgggtgaccgatctggcctactacactagcttcaactctaagcagaatctgaatgtcagcctgtctgacgagatgaacgaggatttccgctccggctctgaggcgtttgatcttattgcccaagacgaggaggagtttaataaagagcaccaatttattcaagaggagaatatcgatgcgcacaatacttctgtagccctcggcgacacctcatggggcgctaccatcaactattcactccttcggaagagtaggagtacgtctgatctggataaagatgatgcttcatatctcaggcttagtttgggcgagttctttgcccagcgctccgaggctctcggatgcctcggaggcggcaataacgttaaacgaccatctttcggctatttcatccggagtccagagaaacgagagcctatcgctctcatcagaaagagcgacgtgtcaaggggcaatctggagaaggagatggctcatctgaaccacgatttgtatagtggcgatttaaacgagcagtcccaggcccagctgtctgaaggcagcatcactttgcaagtggaggccgttgagagcacttctcaggtagacgagaacgacgtgaccttgacagccgacaagggaaagaccgaggacaccttttttatgagtaataagccacagcgttacaaagataaactgcccgacagcggagacagcatgctgcgcatctcaacaatagcgtctgccattgccgaggccagtgtcaacaccgatccttcccaactagccgccatgattaaagctctgtcaaacaaaactcgagataagacctttcaggaggatgaaaagcagaaggactattcccatgtgcgccacttcctccccaacgatctcgagaaaagtaatggctccaatgccctggatatggaaaaatatttaaaaaagaccgaggtgtctcgctatgagagcgccctggagaatttttcacgcgccagcatgagcgacacctgggacctgtccctgccaaaggagcaaactacccaggacattcacccagttgatctttcagcaacttccgtttcggtccgggccccagaggagaacaccgctgctatcgtctatgtagagaatggcgagagcgaaaaccaggaaagtttccggaccataaactcctcgaactcggtgactaacagggaaaataactccgcggtcgtcgatgtaaagacttgctccattgataacaagctgcaggacgtgggcaacgacgaaaaggccacctccatctcaactccgtcggacagctattcttcggtccggaaccctcggattacgagcctttgtctgctgaaagattgcgaagagatacgtgacaacagggaaaatcagcggcagaacgaatgtgtatcagagataagtaatagcgagaagcatgttacttttgaaaaccaccggatcgtgtcacccaaaaactctgacctgaaaaatacaagccctgaacatggcggacgcggctctgaagatgagcaagagtcttttcgaccaagcaccagccctctgagtcatagctcaccgtcagagattagcgggacatctagctccgggtgtgccctggaatcattcgggtcagcggcgcagcaacagcagccgccatgtgagcaggaactgtctcctctggtgtgcagtcctgcaggcgtctcacggctgacctatgtgtctgaacccgagagttcgtacccaacaacagcgactgatgatgcccttgaggaccggaagtccgacattaccagcgaactttccacgacaatcattcagggttctccagccgctctggaagaacgggccatggagaagctgcgggaaaaggttccatttcaaaaccgcgggaagggaaccctatcaagtattatacagaataatagcgacacgcggaaggccacagaaaccactagcctatctagcaaacctgaatacgtcaaaccagatttcagatggtcaaaagatccatcctcaaaaagcggcaacttgctcgagactagcgaagtgggctggacgagtaaccccgaggaattggatcccattcgtctcgcgttactcggtaagagtggcctgtcgtgccaggtaggttctgccacttcccaccccgtgagctgtcaggagccaatagatgaggatcagagaatcagccccaaggacaaatccacagccggtcgcgagttcagtgggcaggtctcccatcagaccacgtctgaaaatcagtgtacccccatcccctcgtcaacggtccactctagtgtcgctgatatgcaaaatatgccagcggcagtacatgcactgctcacccagccatccctatccgcggccccatttgctcaacggtacctggggaccctgccttccacggggagcacaacactgccacaatgtcacgcaggaaatgccactgtctgtgggttttccggtggcctgccataccccgccgtcgccggcgaaccggtgcaaaacagcgtggctgtgggcatctgtctcggatccaatataggaagcgggtggatgggtacctcctccttatgtaacccctactctaacacgctcaatcagaatcttctgtcgaccacgaaaccgtttcccgtgccatcagtgggaacgaactgcggtatagagccatgggacagtggtgtaacatcaggcctggggagcgtgcgagtgccagaggaactaaaactgccccacgcatgttgcgtgggaattgcatctcagacactcctgtccgtcctgaatcccactgataggtggctgcaggtgtccatcggagtgctgtcaatctctgttaatggggaaaaagtggatctgtccacctatcgatgtttagtgttcaagaataaggcaatcatccgcccccatgcaaccgaggagataaaggtcctgttcattccctctagtcctggtgtctttcgatgtaccttcagtgtggcgtcctggccttgctcgacggatgcagaaacaattgttcaggcggaagccctggcctcaacagtaacccttaccgctatcgctgaaagcccggtaatcgaggtcgagacagaaaaaaaggatgtgcttgactttggagacctgacttacgggggttggaaggcactcccattgaagctgatcaatcgcacacacgccaccgtaccaatcagactcattataaatgcaaatgcagtagcatggcgttgcttcactttttcaaaggaatccgttagggcacccgtggaggtggctccttgtgccgacgtcgtaaccagactcgcgggaccttccgtggtgaaccacatgatgcctgcctcttatgacggacaggatcctgaatttctgatgatctgggtgctttttcacagtcccaagaagcagattagcagttctgatatccttgactctgcggaggaattcagcgctaaggtcgatatcgaggtcgactcccctaacccgacacctgtgcttcgctctgtcagtctcagggcccgagctgggattgcacggattcatgctccccgggatctccagacaatgcatttcctggccaaagtggcgtcgtctcgcaaacagcacctgccccttaaaaacgcaggaaacattgaggtttacctggatatcaaagtgccggagcaaggctcgcatttttcggtagaccctaagaaccttctgttgaagcccggtgaagaacacgaggtgatcgtatccttcacccctaaagaccccgaagcgtgcgaggagcgcatccttaagatctttgtccagccgttcggcccccagtatgaagttgtgctgaagggagaggtgatctcttccggcagcaagccgctttcacccggaccctgtctagacatcccctcgatcctgtccaacaaacagttcttggcgtggggcggagtgcccctgggtaggacacaactccagaaacttgccttgaggaataactccgcttcaaccacacagcatctacgtttactgatcagaggccaggaccaggactgcttccaactgcagaacaccttcggcagcgaacagcggctaaccagcaactgcgagatccggatccaccccaaggaggatatcttcattagtgtgctgttcgcaccgaccagactgtcttgtatgctagctaggctggaaattaagcagcttggcaaccgctcacaacctgggatcaagtttaccattccactatctggttacgggggaacttcgaacctgattttggagggggtaaaaaagctgtctgacagctatatggtcacagtaaatggcctcgtgcctggtaaagaatcaaagatcgtcttctctgtgcggaatacagggtcccgcgccgcatttgtgaaggcggtgggattcaaggacagtcaaaaaaaggtgcttcttgatcctaaagtgctgcgaatctttcctgacaagtttgtgcttaaggagaggacacaagagaacgttaccctgatctataatccctctgacaggggtattaataataagaccgcaaccgagctgtctaccgtttatctcttcgggggagacgagattagcaggcaacaataccgtcgggctctgctgcacaaacccgaaatgatcaagcaaattctccctgagcactccgtgttacagaacatcaacttcgtcgaagcctttcaggatgagctcttagtgaccgaagtatacgatctccctcaaagacccaatgatgttcagttgttctatggcagcatgtgcaaaatcatactaagcgtcatcggtgagtttcgcgactgcatatcttctcgggagtttctgcagccttccagcaaggccagccttgaaagcacatccgatctgggcgcctcggggaaacatggcggaaatgtgagcctcgacgtgctgccggtcaagggtccccagggcagccctctgctgagtcgagccgcgagacctcctctagaccagctagcctcagaagagccttggaccgtcctgcccgagcaccttattctggtcgccccaagtccatgcgacatggctaagactgggcgttttcaaattgtcaataactccgttaggctgttgagattcgagttgtgttggcctgcacattgtctgaccgtgacaccacagcatgggtgtgtagcgccagagagtaaactacagatattggtcagccctaacagtagcctaagcactaaacagtcaatgtttccctggtcaggtttgatctacatccactgtgatgacgggcagaagaagatcgttaaggtgcaaattagggaggaccttacccaggtagaactgctcacccgcctgaccagcaaacctttcggcattctatctccagtaagtgagccttcggtctctcatctggtgaaaccaatgaccaagcccccttccaccaaggtggaaataaggaataaatctatcacgttcccaacaactgagcccggcgagacatcagaatcgtgtctcgagctggagaatcacggcacaacagacgtaaagtggcacctaagcagcttagcgcccccatacgtgaaaggggttgatgagagcggagatgtgttccgcgccacctacgcagccttcagatgttctccgatctcaggcctcctcgaaagccacggcatccagaaggtgtccatcacatttctgcctcgcggacgaggggactacgctcagttttgggatgtggaatgccaccctttgaaagaacctcatatgaaacacacactcagattccagctgagtgggcagtcaatcgaggccgagaatgagcccgaaaacgcatgcttatctacagactccttaataaagattgaccatttggtgaagcctcggcgccaagcagtgtctgaagccagcgcaaggatcccggagcagctggacgtcactgctcgaggcgtatacgcacccgaggacgtgtaccggttccggccaacgtctgtgggcgaatcgcggacgctgaaagttaacctgagaaataatagtttcatcacgcactcactgaagttcctgtctcccagggagccgttctatgtgaaacattcgaaatacagtctgcgagcccaacactatatcaatatgcccgtccaatttaaacctaaatcagccgggaaattcgaggccctgctggtcatccaaactgatgagggcaaatctattgctatacgcctaatcggggaagcacttggaaaaaattag

SEQ ID NO: 223050 - DNA, 1626 bp, Artificial Sequence
  derived and/or modified sequence
atgcgggccctgctgcacaagcccgagatgatcaagcagatcctgccggaacacagcgtcctccagaatataaactttgtggaagccttccaggatgagctgctggtgaccgaggtatacgatctgccccagagacctaacgatgtgcagctgttctatggaagcatgtgtaaaatcatattgagcgtgataggcgaatttagggattgcatatcctcccgggaatttcttcaaccaagtagcaaagcaagcttagaaagtacctccgaccttggtgcaagtgggaaacacggcggtaatgtaagcctggacgtgctgccagttaaagggccccagggcagtccactgttgtcccgcgccgcccggccacctctggatcagctcgcttcagaggaaccttggacggtgctccccgagcatttgatcttggtggccccctccccttgcgatatggccaagaccggtcgattccagattgtaaacaatagtgtcaggctattgaggttcgagctctgttggccagcacattgtctgacagtcacaccgcaacatggatgcgttgcaccagagtctaaactccagattctggtcagccctaactcttctttaagcaccaaacagagcatgtttccctggtcaggcctgatctatattcactgcgatgacggacagaagaagatcgtcaaagttcagattcgcgaggacctgacacaagtggaactgctcacgagactaaccagcaagccgtttgggatcctgtctccagtttccgaaccaagtgtgtctcacctcgtcaaacctatgacaaagcctcccagcaccaaagtggaaatcagaaataagtctattacattccctacaaccgagcccggagagacaagcgagtcatgcctagagctggaaaaccacggtacgaccgacgtgaagtggcacctttctagtttggcacccccgtatgtcaagggggttgacgagtctggggacgtctttcgcgcgacctatgctgccttccggtgtagccctatatccggtctgctggagtctcatggtatccagaaggtgtccattacattccttccaaggggtaggggcgattacgcccagttttgggacgtcgagtgtcaccctctgaaggagccccatatgaaacacactctgcgcttccagctgtcgggtcagtccattgaggcagaaaatgaaccagaaaatgcctgcctgtccacagatagcttgataaaaatcgaccatctggtgaagccccgccggcaggccgtctcggaagcctcagctaggatccctgagcagctcgatgtgactgcacgaggtgtatacgcgccagaggatgtgtataggttccggcctactagtgtaggcgagtcaagaactctgaaagttaatctccgtaacaacagcttcatcacacatagtctcaaatttctctctccccgcgaacccttctacgttaagcactcaaaatacagcctgagggcacagcactatatcaatatgcccgtgcagtttaagccaaagtctgccggaaagttcgaagccttgcttgtgattcagaccgatgaagggaagtccatagccattaggctaataggcgaagcactcggaaagaattag

SEQ ID NO: 223051 - DNA, 5825 bp, Artificial Sequence
  derived and/or modified sequence
ctgttgacatctgtgctcatgcctagtttcggttactttattcggtcccccgagaagcgggaacccatagcccttattcggaaaagtgatgtgtctaggggaaatcttgagaaggagatggcgcatcttaatcacgatctgtattcaggagacctcaatgagcagagccaggcccagctttcggagggaagcatcaccctgcaggtcgaggcagttgaaagcacatcacaggtggacgagaacgacgtcaccttgacagccgataaaggtaaaacagaggatacgttcttcatgtccaacaagccccagaggtataaggacaaactgccagattctggtgacagtatgttgcggatatccacaatagcaagcgcgatagctgaggccagcgtaaacacggatcccagccagctggcagccatgattaaagcgctttcaaacaagactagggataagacattccaggaagacgaaaagcagaaggactacagccatgtgagacattttcttcccaatgatctggaaaagagcaacggctctaatgctctcgacatggaaaaatatttgaaaaagacagaggtgagccgctatgaatccgcactggagaatttctcccgagcctctatgagtgacacctgggatctcagtttgcccaaagagcagactactcaggatattcacccagtggacctctccgctaccagtgtgagcgtgcgcgcaccggaagagaatactgccgctattgtttatgtggagaacggtgaatctgagaaccaggagagcttccggaccattaatagttctaattctgtgaccaaccgcgagaacaactctgccgtggttgatgtgaagacatgctcaatcgacaataagcttcaggatgtgggaaacgatgagaaggccacctccatttccactcccagtgatagctactcatccgtccgtaatccaagaatcacttccctctgtttgctgaaagattgtgaggaaattagagataaccgcgaaaaccagcggcagaatgaatgtgtgagcgaaatctccaacagcgaaaaacacgtgacattcgagaaccataggattgtctctcccaagaattctgatttgaagaatacaagtcccgagcacggtgggagaggcagcgaggacgagcaagagagcttcaggccaagtactagccccctaagccactcctctccctccgaaatttctgggacctccagctccggatgcgccctggagtcttttgggtcagcagcccagcagcagcagccaccttgcgagcaggagctttctccactggtatgttccccagccggtgtatctaggctgacatacgtttcagaacccgagtcttcctatccaacaactgcgaccgatgacgccttggaagatcgcaagagtgacattacgagcgaactctctaccacgattatacagggatcgccagctgccctagaagagagggccatggagaaattgcgggaaaaagtcccattccagaatcgtggtaaaggtaccctgtcatctattatccagaataacagcgacactcggaaagcaaccgagacaacatccctgagctccaagccagaatatgtcaagccagactttaggtggtctaaagatccctcgagtaaatctggaaacctattggaaacctccgaagtgggctggacctctaatcctgaagagcttgacccaatccgactcgctctgcttggcaaaagtgggctgagctgtcaggtgggctctgcgacatctcaccccgtttcttgccaggaacctattgatgaggatcagcggatctcccctaaagacaaatccaccgctggaagagaatttagtggtcaggtaagtcaccagacaacctccgagaaccagtgcacgcctatccctagcagcactgtccactcctcagtagcagacatgcaaaatatgccagctgcggtgcatgcccttcttacacaacctagcctgtcagccgcaccgttcgctcagcggtacctcggcacactcccctccactggcagcacaaccctaccccagtgccacgctggaaacgccactgtttgcggttttagcgggggactgccgtacccggctgtcgccggtgagcccgtacagaatagtgtcgcggtgggcatctgtcttgggagcaatataggaagcggttggatgggaacgagctccctctgtaacccttacagcaacactctgaatcagaaccttttatcaaccaccaaacctttccctgttccatccgtgggcacgaattgtgggatcgaaccatgggactcgggggtgacttcaggcctcggttcagtccgtgtgcccgaagagctgaagctaccccacgcttgctgcgtcggaatcgcaagtcagactctcctgagtgtactgaaccccactgaccgctggctacaggtttccataggcgttctatccatctcagtgaacggcgagaaggtagacttgtcgacatatcgatgccttgtgttcaaaaataaggcaataatccggccacacgcgacagaagagatcaaggtgctgttcattccctccagtccaggtgtctttcggtgcactttctctgttgcgagctggccctgctcgaccgatgccgaaacgattgtacaggcggaagctttggcctcaactgttactctcaccgctatcgccgagtccccagttatcgaggtggagacggaaaaaaaagacgtgctagatttcggcgatctcacctacgggggatggaaggctctgcctctgaagctcattaaccgaacgcatgccacagtgccgatccgacttatcattaacgcgaatgccgtggcctggagatgtttcaccttcagcaaggagtcagtgagagcccctgtcgaggtagccccatgcgcagatgtcgtcacgcgcctggcaggaccctcagtggtaaaccacatgatgccagcatcatatgacggtcaggatcccgaattcctcatgatttgggttctcttccacagtcccaaaaaacagatttcgagctcggacatcctggactctgccgaggaattttccgcgaaagtggatattgaggttgattcccccaaccccacgccagtgctcagaagcgtgtcccttcgagctagggctggcatcgcccgtatccatgctccaagagacttacagaccatgcattttctggctaaagtcgcttcatcgcgaaaacagcaccttcccctaaagaacgccggaaacattgaagtgtatcttgacatcaaggtgcctgagcagggttcacacttttctgtagaccctaagaaccttctccttaagccaggcgaggagcatgaggtgattgtctctttcacacccaaggatcccgaggcctgcgaggagaggatcctgaagatcttcgtgcagccatttggcccacagtatgaggtggtgcttaaaggggaggtcattagcagtgggtcaaaaccattaagccccggtccttgtctggacatcccgtccatcctttccaataagcaattcttagcctggggaggggtgccactcggcaggactcagctgcagaagctagctctgcgcaataactctgcctctaccacacagcacctccgactgctaataagagggcaggaccaagactgcttccaactgcaaaacacattcggatccgagcagaggttaaccagcaattgcgaaattcgaatccacccgaaggaggatattttcatctcagtgttattcgccccaacccgactgagctgcatgctggctcggctagagattaagcaactggggaatcgctctcaacctgggataaaattcactatacccttgtccggatatggtggcacctccaacctgatcctagaaggagtcaagaagctttctgattcttatatggtgacagttaatgggctggttcccggaaaagaatcgaagatagtgttctcagtcaggaatacaggcagtagggctgcgttcgtgaaagctgtggggttcaaggacagccagaaaaaagtgctgcttgatccgaaagtcctaagaatttttccagacaaatttgtgctcaaggagcgcacgcaagagaacgttactttaatatacaatccatctgatagaggtataaacaataagactgccactgagctgtctaccgtttatctttttggtggagacgaaatctcgcggcagcagtacagaagagcgctccttcataagcccgagatgataaagcagatcctgcccgaacacagtgtgctccagaatattaactttgtggaagcttttcaggacgagctacttgttactgaagtgtatgacctgccccagagaccgaatgacgtgcagctgttttatgggtccatgtgcaaaattatactgagcgtaattggtgagttccgcgactgcatctcttcccgcgaattcctccagccatctagcaaagcaagcttggagagtacaagcgacctgggagcatccgggaagcacggcggtaacgtttccttggatgtcctgcccgtcaagggcccacaggggagtcccctgctgtctagagcggcaagaccaccactcgaccagcttgcttccgaagaaccctggaccgtgctgcccgaacaccttattctggtcgcccctagcccctgtgacatggcgaaaaccggtaggttccagatcgtaaacaactctgtgcgacttttgcgctttgagctgtgctggcctgcccactgtctgaccgtaactccgcagcatgggtgcgtcgcacccgaatcaaaactgcagatcttggtttctccaaactcctcattaagtactaaacaaagcatgttcccctggagtgggttgatctacatccattgcgatgacggccagaagaagatcgtgaaggtacaaattcgcgaggatctcacacaagtggaactccttactaggctcacctccaagcccttcgggatacttagtcctgtgtcagaaccgagtgtgagccatctggtcaagcccatgacaaagccaccttctactaaagtggagatcagaaacaaaagtatcacatttcctactacggagcccggagaaacctccgagtcatgccttgagctagagaatcatggcactaccgacgtgaaatggcacctgtcgtcattggcaccaccatatgtaaaaggcgtggatgagtcgggagatgtattcagagcgacatacgctgcttttcgctgttccccaatctctggactgcttgagtcacacggcatccagaaggtgagtattacatttctgccgagggggagaggtgactatgcacaattttgggatgtggaatgtcacccccttaaagaaccacatatgaaacataccctgcgatttcaactttctggacagagtatagaggccgaaaacgaacccgaaaacgcatgtctatctaccgatagcctgattaaaatcgaccacttggtgaaacccagaagacaggccgtcagcgaggcctctgcacggattcctgagcaattggatgtgactgccagaggagtgtacgctcccgaagacgtatatcggttccggccaacctccgtcggggagtcaagaaccctcaaagtgaacctccgcaacaacagcttcatcacccatagtttaaagttcctgtcaccaagagagcctttctatgtgaagcactctaaatactctctcagagctcagcattatatcaatatgccagtacagttcaagccaaaatctgccggaaaattcgaggcgctgctagtgattcaaaccgatgaagggaagagtattgcaattcggttgattggcgaggctctcggcaagaacta

SEQ ID NO: 223052 - DNA, 7613 bp, Artificial Sequence
  derived and/or modified sequence
atggaagacttccggggtattgcagaagagtccttcccaagttttctgacaaacagcctgtttggaaactctgggatcctggagaatgtaactctgagttctaatttgggcctccccgttgcggtttccacccttgccagagataggtccagcaccgacaacagatatcccgatattcaagctagttatctggtagaagggagattcagcgtgccgtcaggaagttctcctgggagtcagtcggatgcagagccccgtgagagacttcagctttcctttcaggatgacgactcaatatcaaggaagaaaagctacgtcgaatcgcagcgactgtctaatgcattgagcaagcaatccgccctgcaaatggagacagccggacccgaggaagaaccagccggtgctacagaaagcctgcaaggccaggacctgtttaacagggctagccctctggaacaggctcaggacagcccaatcgatttccacttgcagagctggatgaacaataaagagcctaagattgtggtcctcgacgccggtaaacattttgaggataaaactctgaagtccgatttaagtcacacgagcctgctggagaacgaaaaacttatcctgcccactagtctggaagacagctcagacgacgacattgacgatgagatgttttatgatgatcatttggaggcctatttcgagcagctggcgatccccggtatgatatacgaagacctcgagggccctgagcccccagagaaagggttcaagctacctaccaatggactgagacaggcaaacgagaacggaagccttaattgcaaatttcagtccgagaacaatagctcactgatctccctcgacagtcattccagcgagacaacacacaaggagagcgaagaatcccaggttatctgtctgcctgggacatccaactctatcggtactggggattcacgccgttacaccgacggcatgcttcctttctcctccggcacctggggtaccgaaaaggagatcgagaatctcaaaggcatcgtgccagacctaaacagcgagtgtgcgagcaaggacgtgctggtcaagactcttagagcgatcgacgtgaagctcaactcagataatttccacgacgctaacgccaacaggggtgggttcgacttgaccgatcccgtcaaacagggggcagagtgcccgcaccagaacaaaaccgtcctgcatatggacggatgcttggataccgaaactcccacagtgtccatccaggagaatgttgacgtcgcctcactgaaacccatatcggacagtgggattaactttaccgatgctatatggagccccacctgcgagaggaggacatgcgaatgccacgaatctatagagaaaaataaagacaaaactgatctccctcagtctgtggtttatcaaaatgaagaaggaagatgggttacagacctagcgtattacaccagttttaacagcaagcagaacttgaatgtgtccctgagtgacgaaatgaacgaggactttcggagtggctccgaagccttcgacttgatcgcccaagacgaggaggaattcaacaaggagcaccagtttatacaggaggagaacatcgacgcccacaatacttcagtggcattaggcgatacgtcctggggggctactattaattactccctcctgagaaagtcccggtcaacttctgacttggacaaagacgacgcctcttatctgcgactgtcattgggagagttttttgcacagaggtcagaagccctgggatgtctgggcggtggcaataatgtgaagcggccttctttcggatactttattaggagcccggagaaacgcgagccaatagcattgattcgaaaaagcgatgtgtcgcggggaaaccttgaaaaggagatggcccatctgaaccacgacctgtacagcggagacttgaacgagcagagccaggcccagctgtccgaaggaagcatcactttgcaggttgaggctgtagagtccacctcacaagtagacgaaaatgacgtgaccctcactgctgataaaggcaagaccgaggacacattcttcatgtccaacaagccccaaagatacaaggataagctgcccgattccggcgacagcatgttaagaatctccactatcgcctccgctatagccgaggcgagtgtcaatacagacccctcacagctcgccgcaatgatcaaggcactgtcaaataagacaagagacaagactttccaggaggatgagaagcagaaagactatagtcatgtccgccatttcctgccgaatgatctggagaagtctaacgggtccaacgccttggatatggaaaagtaccttaagaagacagaagtgtctaggtatgagtcagcccttgagaattttagccgagcaagcatgtcggatacatgggacctgagcctgcccaaggagcaaacaacacaagatatacaccctgtcgatctcagtgctactagcgtttccgtgcgagccccagaggagaacactgctgccatcgtctacgtcgagaacggcgaatctgaaaaccaggaaagctttagaactatcaacagttcaaactcagttactaatagggaaaacaactcagccgtcgtcgacgttaaaacatgcagtatcgataataagttgcaggacgttggcaatgatgagaaagccacctcgataagcaccccctcggatagctacagctctgtgcgtaaccccagaattaccagtctttgcctgctgaaggattgtgaggagattcgggacaaccgagagaaccagagacagaatgagtgcgtgtccgagatctccaactcagaaaaacatgtgacctttgagaatcacagaatagtcagccctaagaattctgacttgaaaaatacaagcccggagcacgggggacggggatccgaggatgagcaggaaagttttcgcccttctaccagccctttgtctcatagttctccttcagagattagcggcacctccagctcagggtgcgcgcttgagagcttcggaagtgccgcacagcagcagcaacccccttgcgagcaggagctcagtccacttgtttgcagtccagccggtgtgagtcgcttaacctatgtgtcagagcctgagagtagctacccaaccactgccaccgacgacgcactcgaggataggaaatccgatatcacctcggaactctccacgacgatcatacaaggatccccggctgccctcgaggagcgcgcaatggagaagctgagggagaaggtgcccttccaaaatcgtggcaaagggacattaagctccataattcagaataactctgatactcgtaaagctactgagactacttcgcttagctcaaagcccgaatacgtgaagccagattttaggtggtctaaagacccctccagcaagtcaggaaatctactcgagacttcggaggtcggctggacgagcaaccctgaagaactagatccgatcagactggccctgttagggaagagcggcctgagctgccaggtcggaagcgccacatctcatcctgtgtcatgtcaggaacccatcgacgaagaccagcgaatctctccaaaagacaaatcaacagccggacgcgaatttagtggccaggtatcccatcagacaacttccgaaaaccagtgtacaccgatcccttcttccaccgtgcactcctccgtcgccgacatgcagaatatgcctgctgccgtgcacgccctcctgacccagccctcactctcggcggcaccgttcgcccagcggtatttggggacacttcctagcactggctcaaccaccctacctcagtgtcatgccggtaacgctaccgtgtgtggcttctcgggaggtctgccatacccagcagtcgctggggaacctgtccaaaattccgtagcagttgggatctgtttgggaagcaatatcgggagtggctggatgggcacaagtagcctgtgtaatccctactccaacacgctgaatcaaaacctgctttccactactaagccctttcctgtgcccagcgtcggcacgaattgcgggattgaaccctgggattccggggttacaagcggcctcggctcagtgcgagtccccgaggaactcaaacttcctcacgcttgctgtgtgggaatcgcttcacagactctactatctgtactgaatcccactgataggtggctccaggtgtcaattggtgttctcagcatttccgtgaacggcgagaaggtagacctgagtacataccggtgtctagtcttcaagaacaaagcgataattcgacctcacgcaaccgaagaaattaaggtgcttttcattccctccagcccaggagtgtttaggtgcacgttctcagttgcttcttggccctgctcaacagatgctgaaacaatagttcaggccgaggcgctcgctagtacagtcaccctaactgccatcgcagaatctcccgtgatcgaggtagaaaccgaaaagaaagacgttctcgattttggtgatctgacctatggcggatggaaagctcttccactgaaactaattaaccggacccacgctaccgttcccatccggctgatcattaacgcaaatgcagtggcatggcgctgctttacattctccaaagagagtgtgcgagcgccagtggaggtcgcaccctgcgccgatgtggtcaccagactggctggaccaagcgtggtcaatcacatgatgccagcatcctatgatggccaagatccagaattcctcatgatctgggtcttgtttcacagtcctaagaaacagatctcaagcagtgatatcctggattcggcggaagaattctccgccaaggtggacattgaagtcgacagtcctaaccccacacccgtcctaaggagcgttagcctgagggccagagctggcattgcccgtatccatgcaccacgtgatctgcagacaatgcatttcctggcaaaggttgcttcaagcagaaagcagcatcttcccctcaagaacgcaggcaacattgaagtttacctggacatcaaggtaccagagcagggctcacatttcagcgttgatcccaaaaacctgctactcaaaccgggtgaggagcatgaggtgattgtatcatttacccctaaggaccctgaagcatgcgaggaacggatactaaagattttcgtccaaccgtttggacctcagtacgaagtcgtattgaagggcgaagttatctcatcgggctcgaaacccctttctcctggtccctgtcttgacatccccagtatcctttccaataaacaatttctggcttggggaggtgtgcctctaggtagaacacaattacagaagttggccttaaggaacaattccgcctcgaccacccagcacctgcgactgttgatccgtggccaggaccaagactgcttccaactacaaaacaccttcggttcagagcagcgactgacctccaactgtgagattcggattcatcccaaggaagatatctttatcagtgtcctgtttgctccaacgagacttagctgcatgctcgcccgactggaaatcaaacagctgggaaaccgcagtcagcctggaattaaattcacgatccccctctccggatacgggggtacaagcaacctgattctggagggcgtcaagaagttgtccgattcttacatggtgaccgtcaacggcctagtcccgggtaaggagtcaaagattgtattttctgtcaggaataccggatcgagagccgcattcgtaaaagcagtgggtttcaaggatagccagaagaaagttctgctcgaccccaaggtccttcggattttccctgataaattcgtgctgaaggaaaggacgcaagaaaacgtgaccctaatttataatccgagtgaccggggaataaataataagactgccaccgaactgagtacagtctacctattcggaggcgacgaaatctcacggcagcagtaccggagagcgttactgcacaaaccagaaatgatcaaacaaatcttaccagagcacagcgttctgcagaacatcaacttcgtcgaagcgttccaggacgaactgctggttaccgaggtgtatgacctcccccaaagaccaaacgacgttcaactgttttacgggtccatgtgtaagattatcctcagcgtgattggcgaattcagagactgcatctccagcagagagttccttcagccaagcagtaaggcctccctggaaagcacaagcgatctgggagcttctggcaaacacggcggtaatgtgtccctggacgtgcttccagtgaagggcccacagggaagtccactgctatcacgagccgcacgacctccattggaccagctggcaagcgaggagccatggacagtacttcctgagcatctgatacttgtcgctccaagtccgtgcgatatggcgaagactggtcggttccagatcgtcaataactcagtccgcctcctcagatttgagctctgctggccagcacactgcctgaccgtgacaccacaacatgggtgcgtggcaccagagtccaagctgcagatcctggtgagtccaaattcgtccctttcgactaagcagtctatgttcccgtggagtggcctcatctacatccactgtgacgacgggcagaaaaagattgtgaaagtgcaaataagagaagacttgacccaagtggagttactaacaaggttgacttctaagccattcgggatattgagcccggtatccgaaccatctgtctcccacctggtgaaacctatgacgaagccaccatccaccaaggtggaaatacggaataagtctatcacattccccactaccgagcccggtgagaccagcgagtcttgcctggagctagagaatcatggaacaaccgacgtgaagtggcatctgtcatctctggcgccaccctatgttaaaggcgtggacgagagcggcgatgtgtttcgtgctacttacgccgcattcaggtgttctccaatttcgggactactggaaagccatggtattcaaaaagttagcatcacattccttcctcggggacgcggtgactacgcgcagttttgggatgtggagtgtcaccctctcaaagagccacacatgaagcacacgctgaggtttcagttgtctgggcaaagcattgaagccgaaaacgagccagagaacgcctgtctttctaccgactcactcatcaaaatagaccacttggtgaaacctaggagacaggctgtcagtgaagcctcagccagaatccctgaacagttagacgtcactgcacgcggtgtttatgctccagaggacgtgtacaggttcagacccacgtcagtcggtgagtctcgaactctgaaggtgaacctgcggaacaatagctttatcactcactctctgaagtttttgtctccacgcgagcctttttatgtcaaacattctaaatatagtctcagggcacagcactacatcaacatgcccgttcagttcaaacccaaatccgctggaaaattcgaggcccttctcgttatccaaacggacgaaggcaagtcaatcgccattcgcctgattggggaagccctgggtaagaacta

SEQ ID NO: 223053 - DNA, 1626 bp, Artificial Sequence
  derived and/or modified sequence
atgcgagctttattgcacaagccagaaatgataaagcagattttgcccgaacattccgtgctacagaatataaactttgtcgaggccttccaggacgagttactggtgaccgaggtctatgacctaccccaaaggcccaatgacgtacagctgttttacggatcaatgtgtaaaataatacttagcgtcattggagagttcagagattgtatttcatcaagagagttcctgcagccttcctctaaggccagtctcgagagcacctctgacctgggcgcaagcggaaagcacggcggtaacgtgtctctggacgtccttccagtgaagggcccacagggctccccactactgtcccgagcggcacggccacctttggatcaactagcttctgaagagccttggaccgttcttccggaacatctgattctcgtggctcccagcccctgtgacatggctaaaaccggcaggttccagatcgtgaacaattcagtccgactattgagattcgagctttgctggcccgcacactgcctgacggtgacgcctcagcatggttgcgtcgcccctgaatccaaactacagatactcgtgtcgccgaattccagcctatccaccaaacaaagtatgttcccctggtccggcctgatttacatccactgtgatgacggacagaaaaagatcgttaaggtacaaatcagggaagatctcacgcaggtcgagctgttgaccaggctgacaagcaaaccttttggcatccttagtccggtgtccgaaccatctgtaagccatttggttaaacccatgacgaagcccccaagcacaaaggtagagattcgaaataaaagcattacgttccccacaacagagcccggagagacgtctgagtcttgtctggagttagagaaccacggcactacagatgttaaatggcacctgtcttctctggcgccaccatacgtgaagggggtggatgaatctggcgatgtgtttcgggctacatacgcggcatttagatgctcccccattagcggactgctggaatcccatgggatccaaaaggtaagtatcacatttctgcctaggggccgaggcgattacgctcagttctgggacgtggagtgccacccattaaaggagccacacatgaagcacactcttagatttcaactgtccgggcagtcaatcgaggccgagaacgaaccggagaatgcgtgcctctccaccgattctctcataaagattgatcacctcgttaaaccaagacgacaggcggtaagcgaagcaagcgcacgcatccctgagcagttggacgtgacagcaaggggcgtttacgcacccgaagacgtttatcgtttccgtccaacgagcgtgggcgagtctcgtaccctgaaagtgaatctgcggaataattccttcatcacacattccctgaaattcttgtcaccaagagagccgttttacgtgaagcatagcaagtactcgttgcgcgcacagcattacattaacatgccagtccagtttaaaccaaaatctgctgggaaattcgaagcactgctggtaattcaaactgatgagggaaaatcaatcgcaattagactaatcggagaggctctggggaagaactag

SEQ ID NO: 223054 - DNA, 7960 bp, Artificial Sequence
  derived and/or modified sequence
agtgccctgggacacctcttcagtccgtggactttcccgctgcacactgccctccgaagtcggggacgcgggctcgtgagatggaagattttcgaggtatagcagaagaatcatttccaagctttctcaccaattcattatttggtaacagtgggattttggaaaatgtcactctttcttcaaatcttggcttgcctgttgctgtttctacacttgctagggatagatccagcactgataacaggtatcctgatatccaggcatcttacttagtagaagggagattttcagttccatccgggtcatctcccggaagccagagtgatgctgaaccaagagagaggttacagcttagcttccaggatgatgattctatctctaggaaaaagagctatgtggaaagtcaacgtttgtcaaatgctctcagcaaacagtcagctttacaaatggagacagcaggaccagaagaggagccagccggagctacagaatccttgcagggccaagatctcttcaacagggcttcaccactggaacaagcacaagactcacctattgattttcatttacagtcatggatgaataataaggaacccaagattgttgtgcttgatgctggaaaacattttgaagacaagactctaaagagtgacctaagccacactagcttattagaaaatgagaaacttatcttaccgacaagcttggaagattcttctgatgatgatattgatgatgaaatgttttatgatgatcatttggaggcttattttgaacaactggcaattccaggaatgatatatgaagacctagaaggaccagaacctccagaaaaaggttttaagttacctacaaatggtcttagacaggcaaatgaaaacggtagcttaaactgcaagtttcaatcagaaaataacagctctctgatttccctcgactcacactcttctgaaacaactcacaaagagtctgaggaaagccaagttatttgtctacctgggactagtaattctataggtactggagatagtagaaggtacacagatggtatgttaccattttcctctggtacttggggaactgagaaagaaatagaaaatttgaagggtattgttccagatcttaacagtgaatgtgcaagtaaagatgttctggtgaagaccctcagggctattgatgtgaaacttaactctgataattttcatgatgcaaatgccaatagaggtggttttgatctgactgaccctgtaaaacagggggcagagtgtcctcaccaaaataagacagttttgcacatggatggatgtttagacactgagactcctacggtgtccattcaagaaaatgtggatgtagcctctttgaagcccattagtgacagtggaattaatttcactgatgccatttggtcaccaacttgtgaaaggcgaacatgtgaatgtcacgagtccatcgaaaagaataaagacaaaacagatctcccacagagtgtggtctatcaaaatgaagagggtaggtgggtcacagaccttgcctattacacatcttttaatagcaaacaaaatttaaatgtgtctctaagtgatgagatgaatgaagacttcagatctggttctgaagcatttgatttgattgcacaagatgaagaagaatttaataaagagcatcaatttatacaggaagaaaacatagatgctcataatacttcggttgcactgggcgatacgtcctggggagctacaattaattacagtctgttgaggaaatcacgtagcacatcagatttggataaagatgatgccagttatttacgtctgtctttaggagagttctttgctcaaagatctgaagctcttggttgccttggtggtggtaacaatgtgaaaagaccatcatttggctattttattagatcaccagagaagagagaacctattgccttaataagaaaatctgatgtatcaagaggtaatttggaaaaagaaatggctcatcttaaccatgatctatattcaggagatttaaatgaacagtcccaggcacagctaagtgaaggatcaattacacttcaggttgaagcagtagagagtacttcacaagtggatgaaaatgatgtgacgttaacggctgataaaggcaaaacagaggacactttcttcatgagcaacaaaccccaaagatacaaagacaagctaccagatagtggtgattctatgcttaggatcagcaccattgcttcagccattgcagaggcatcagttaatactgatccttcccaacttgctgcaatgatcaaggcactttcaaataaaaccagagacaagacttttcaggaagatgagaaacaaaaggactattctcatgtgcgtcatttcttacctaatgatttagaaaaaagtaatggatccaatgcacttgatatggagaaataccttaaaaaaacagaagttagtagatatgaaagtgcattggaaaacttttcaagggctagtatgtctgatacttgggatttatctttgcccaaagaacaaactactcaagacattcatccggtggacttaagtgctactagtgtaagtgtgagggcaccagaagaaaacacagcagctattgtttatgttgaaaatggagagagtgagaatcaagagtcatttagaaccataaactcctcaaattcagttacaaatagagagaataacagtgcagtagttgatgtgaagacatgttccattgacaacaaattacaagatgttggtaacgatgaaaaagctacctcaatttccactccatctgatagttattcatcagtgaggaaccccagaataacatccctttgtctgttaaaagactgtgaagaaatacgagataacagagaaaatcagaggcaaaatgagtgtgtcagtgaaataagcaacagtgagaagcatgtgacttttgaaaaccatcgcatagtctcacctaaaaatagtgatttgaaaaatacctctcctgagcatggtggacgtggctcagaggatgagcaggagagcttcagaccttccacgtcaccactgagtcattcttctcctagtgaaatttctggaacgagttcatcagggtgtgcgttagagtcctttggttcagcagctcagcagcagcagcctccctgtgagcaggagttgtctcccttggtgtgctcgcctgctggggtgagcaggctgacgtatgtgtctgaaccagagagctcctatcctaccacagccacagatgatgccctggaggaccgcaagagtgatatcaccagcgagttgagtaccacaattattcaaggcagtccagccgcattggaggaacgggctatggaaaaattgagagaaaaagttccatttcagaatagaggaaaaggaacattatcatctattatccagaataactctgatacaagaaaagcaactgaaactacttctctgagtagcaagcctgaatatgtaaaacctgactttagatggagtaaagatccttcctccaaaagtggaaatctgttggaaaccagtgaggtaggttggacatcaaaccctgaggaattggacccgatcaggctggctctcctgggcaagtcaggtctgagctgtcaggtggggtcagccacatcacaccctgtgtcctgccaggagcctatagatgaagatcaaagaataagtcctaaagataagtcaactgctggccgtgagttcagtggccaggtttctcatcagaccacctctgaaaaccagtgtactcctattcccagcagcacagttcacagctctgtggctgacatgcagaacatgcctgctgctgtgcacgcactcttgacacaaccctctctcagcgctgctccttttgctcagcggtatttgggaacactcccttcaactggaagcaccaccttgcctcagtgccatgctggcaatgccacagtctgtggcttctcaggaggccttccctatccagctgttgcaggagagcctgtgcagaactctgtggctgtgggaatttgtctaggatcaaatatcggctctggatggatgggtacctcttccctctgtaacccatattctaataccttaaatcagaacctgctaagcacaacaaaaccttttcctgtgccgtctgttggtacaaactgtggaattgaaccatgggattcaggagtgacatcaggattggggagtgtccgagtgcccgaggagttgaagcttcctcatgcttgctgtgtcgggatcgcttcccagaccctcctcagtgtgcttaatccaactgaccgctggctgcaagtcagcattggggtcctcagcattagtgttaatggtgaaaaggtggatctttcaacatatcgttgtttagttttcaagaataaagccatcataagacctcatgccacagaagagataaaagtgctttttataccatccagtcctggggttttcagatgcacattcagtgttgcttcttggccatgttcgacagatgctgagaccatcgtacaggcagaagctttggccagcaccgtcactctcactgccattgccgagagtcctgttattgaggtagaaacagaaaagaaagacgttcttgattttggtgacttgacttatggaggctggaaagccctcccactaaaattgataaaccgaacgcatgccactgtgccaattagactgattattaatgctaacgctgtagcctggcgctgtttcacgttttccaaggaatccgtccgagctcctgtggaagttgctccttgcgctgatgtggtcactcggctagcaggcccttctgtggtcaaccacatgatgcctgctagttatgatggacaggatccagaatttctgatgatttgggttcttttccatagtccaaagaaacagatcagctcttcagatattctggactcagcagaagaattctcggcaaaagttgatatcgaagttgacagcccaaaccctacgcccgttcttagaagtgtgagtctccgagcaagagcaggaatagctaggatccatgctcccagggacttgcagacgatgcatttcttggccaaagtggcttcctcaagaaagcagcacttacctttgaaaaatgctgggaacattgaagtttatttggatatcaaggtcccagaacaaggaagtcacttttcagtggatccaaagaatctactccttaaacctggagaagaacatgaggttattgtttcatttactccaaaggatcctgaagcctgcgaggaaaggatcttgaaaatatttgtgcagccatttggacctcagtatgaggtagtgttaaaaggcgaagtcatttcttcaggaagtaaacctctgtcacctggaccttgcttagatattccatcgattttgtccaacaaacaatttctggcttggggaggagtccctctaggtagaacacagcttcagaaactagctttaagaaataattctgcatctacaactcaacatttacgactgcttattagaggacaagatcaggactgctttcagcttcagaacacttttggttcagaacagcgattgaccagtaactgtgagatcagaattcacccaaaggaagacattttcatctctgtattatttgcacctactcgattatcttgcatgttggctagactagaaatcaaacaacttggaaatcgatcacaaccaggcattaagttcacaatacctttgtctggatatggaggaacaagcaatcttattttggaaggcgttaaaaaattatctgacagttacatggtaacagtgaatggcttagtacctggcaaagaaagtaaaattgttttttctgtccgcaacactggctcccgagcagcttttgttaaagcagtaggttttaaggattctcagaaaaaagttttgctggatcctaaagtattgaggatttttccagataaatttgtactcaaggaaagaacacaagaaaatgttactttaatatataatccatcagacagaggaatcaataataaaactgcaacagaactatcaactgtatacttatttggtggagatgaaatttcaagacagcagtatcgcagggccctgttacataaaccagagatgataaaacagatacttccagaacatagtgtgcttcaaaacattaattttgttgaagcatttcaagatgagctattagtaactgaagtatatgatcttccccaacgacctaatgatgttcagctcttttatggaagcatgtgtaaaattatactttcagtaattggagaattcagagattgcatttctagcagagaattccttcagccttcttccaaagctagcttggaatctacaagcgacttgggagcttctgggaaacatggtggcaacgtctctttggatgttttaccagtcaaaggtcctcagggttctcctcttctctcacgggcggctcgcccgcctctggatcagctggcctccgaagagccgtggactgtcctacccgagcacttgattctggtagctccttctccttgtgacatggcaaaaactggacgtttccagattgtgaataactctgtgaggttactgagatttgagctgtgctggccagcgcattgcctcacagtcacgccgcagcatggatgtgtcgcgccagagagtaaactacaaattcttgtgagtcctaattcctccttatccacaaaacagtcaatgttcccgtggagtggtttgatctatatacactgtgacgatggacagaagaaaattgtgaaagttcaaattcgagaagatttaactcaagtggaacttttaactcgtttgacctccaaaccatttggaattctttccccagtatctgagccttcagttagtcatttggtcaaaccaatgacaaaaccgccttccacaaaagttgaaataagaaacaagagtattacttttcctacaacagaacctggtgaaacttcagagagctgtctagaactcgagaatcatggcaccacagacgtgaaatggcatctgtcatctttagcgccaccttatgtcaagggagttgatgaaagtggagatgtttttagagctacctatgcagcattcagatgttctcctatttctggtctgctggaaagccatgggatccaaaaagtctccatcacatttttgcccagaggtaggggggattatgcccagttttgggatgttgaatgtcaccctcttaaggagcctcacatgaaacacacgttgagattccaactctctggacaaagcatcgaagcagaaaatgagcctgaaaacgcatgcctttccacggattccctcattaaaatagatcatttagttaagccccgaagacaagctgtgtcagaggcttctgctcgcatacctgagcagcttgatgtgactgctcgtggagtttatgccccagaggatgtgtacaggttccggccgactagtgtgggggaatcacggacacttaaagtcaatctgcgaaataattcttttattacacactcactgaagtttttgagtcccagagagccattctatgtcaaacattccaagtactctttgagagcccagcattacatcaacatgcccgtgcagttcaaaccgaagtccgcaggcaaatttgaagctttgcttgtcattcaaacagatgaaggcaagagtattgctattcgactaattggtgaagctcttggaaaaaattaactagaatacatttttgtgtaaagtaaattacataagttgtattttgttaactttatctttctacactacaattatgcttttgtatatatattttgtatgatggatatctataattgtagattttgtttttacaagctaatactgaagactcgactgaaatattatgtatctagcccatagtattgtacttaacttttacaggtgagaagagagttctgtgtttgcattgattatgatattctgaataaatatggaatatattttaa

SEQ ID NO: 223055 - DNA, 2483 bp, Artificial Sequence
  derived and/or modified sequence
atcttgcatgttggctagactagaaatcaaacaacttggaaatcgatcacaaccaggcattaagttcacaatacctttgtctggatatggaggaacaagcaatcttattttggaaggcgttaaaaaattatctgacagttacatggtaacagtgaatggcttagtacctggcaaagaaagtaaaattgttttttctgtccgcaacactggctcccgagcagcttttgttaaagcagtaggttttaaggattctcagaaaaaagttttgctggatcctaaagtattgaggatttttccagataaatttgtactcaaggaaagaacacaagaaaatgttactttaatatataatccatcagacagaggaatcaataataaaactgcaacagaactatcaactgtatacttatttggtggagatgaaatttcaagacagcagtatcgcagggtcattggaatgttttacaagagggaatttaatggcgacttgctacatgatgttagaacagaccaaatacaaagcttgcctttgaacctggttttgtttcttaattattttggaaatagaaactgacatttggagaaatcacattatgagggccctgttacataaaccagagatgataaaacagatacttccagaacatagtgtgcttcaaaacattaattttgttgaagcatttcaagatgagctattagtaactgaagtatatgatcttccccaacgacctaatgatgttcagctcttttatggaagcatgtgtaaaattatactttcagtaattggagaattcagagattgcatttctagcagagaattccttcagccttcttccaaagctagcttggaatctacaagcgacttgggagcttctgggaaacatggtggcaacgtctctttggatgttttaccagtcaaaggtcctcagggttctcctcttctctcacgggcggctcgcccgcctctggatcagctggcctccgaagagccgtggactgtcctacccgagcacttgattctggtagctccttctccttgtgacatggcaaaaactggacgtttccagattgtgaataactctgtgaggttactgagatttgagctgtgctggccagcgcattgcctcacagtcacgccgcagcatggatgtgtcgcgccagagagtaaactacaaattcttgtgagtcctaattcctccttatccacaaaacagtcaatgttcccgtggagtggtttgatctatatacactgtgacgatggacagaagaaaattgtgaaagttcaaattcgagaagatttaactcaagtggaacttttaactcgtttgacctccaaaccatttggaattctttccccagtatctgagccttcagttagtcatttggtcaaaccaatgacaaaaccgccttccacaaaagttgaaataagaaacaagagtattacttttcctacaacagaacctggtgaaacttcagagagctgtctagaactcgagaatcatggcaccacagacgtgaaatggcatctgtcatctttagcgccaccttatgtcaagggagttgatgaaagtggagatgtttttagagctacctatgcagcattcagatgttctcctatttctggtctgctggaaagccatgggatccaaaaagtctccatcacatttttgcccagaggtaggggggattatgcccagttttgggatgttgaatgtcaccctcttaaggagcctcacatgaaacacacgttgagattccaactctctggacaaagcatcgaagcagaaaatgagcctgaaaacgcatgcctttccacggattccctcattaaaatagatcatttagttaagccccgaagacaagctgtgtcagaggcttctgctcgcatacctgagcagcttgatgtgactgctcgtggagtttatgccccagaggatgtgtacaggttccggccgactagtgtgggggaatcacggacacttaaagtcaatctgcgaaataattcttttattacacactcactgaagtttttgagtcccagagagccattctatgtcaaacattccaagtactctttgagagcccagcattacatcaacatgcccgtgcagttcaaaccgaagtccgcaggcaaatttgaagctttgcttgtcattcaaacagatgaaggcaagagtattgctattcgactaattggtgaagctcttggaaaaaattaactagaatacatttttgtgtaaagtaaattacataagttgtattttgttaactttatctttctacactacaattatgcttttgtatatatattttgtatgatggatatctataattgtagattttgtttttacaagctaatactgaagactcgactgaaatattatgtatctagcccatagtattgtacttaacttttacaggtgagaagagagttctgtgtttgcattgattatgatattctgaataaatatggaatatatttt

SEQ ID NO: 223056 - protein, 1079 aa, Artificial Sequence
  derived and/or modified sequence
MPRVHNIKKSLTPHISCVTNESDNLLDFLPDRLRAKLLPFQKDGIIFALKRNGRCMVADEMGLGKTIQAIGITYFYKEEWPLLIVVPSSLRYPWTEEIEKWIPELSPEEINVIQNKTDVRRMSTSKVTVLGYGLLTADAKTLIDALNNQNFKVVIVDESHYMKSRNATRSRILLPIVQKARRAILLTGTPALGRPEELFMQIEALFPQKFGRWTDYAKRYCNAHIRYFGKRPQWDCRGASNLNELHQLLSDIMIRRLKTEVLTQLPPKVRQRIPFDLPSAAAKELNTSFEEWEKIMRTPNSGAMETVMGLITRMFKQTAIAKAGAVKDYIKMMLQNDSLKFLVFAHHLSMLQACTEAVIENKTRYIRIDGSVSSSERIHLVNQFQKDPDTRVAILSIQAAGQGLTFTAASHVVFAELYWDPGHIKQAEDRAHRIGQCSSVNIHYLIANGTLDTLMWGMLNRKAQVTGSTLNGRKEKIQAEEGDKEKWDFLQFAEAWTPNDSSEELRKEALFTHFEKEKQHDIRSFFVPQPKKRQLMTSCDESKRFREENTVVSSDPTKTAARDIIDYESDVEPETKRLKLAASEDHCSPSEETPSQSKQIRTPLVESVQEAKAQLTTPAFPVEGWQCSLCTYINNSELPYCEMCETPQGSAVMQIDSLNHIQDKNEKDDSQKDTSKKVQTISDCEKQALAQSEPGQLADSKEETPKIEKEDGLTSQPGNEQWKSSDTLPVYDTLMFCASRNTDRIHIYTKDGKQMSCNFIPLDIKLDLWEDLPASFQLKQYRSLILRFVREWSSLTAMKQRIIRKSGQLFCSPILALEEITKQQTKQNCTKRYITKEDVAVASMDKVKNVGGHVRLITKESRPRDPFTKKLLEDGACVPFLNPYTVQADLTVKPSTSKGYLQAVDNEGNPLCLRCQQPTCQTKQACKANSWDSRFCSLKCQEEFWIRSNNSYLRAKVFETEHGVCQLCNVNAQELFLRLRDAPKSQRKNLLYATWTSKLPLEQLNEMIRNPGEGHFWQVDHIKPVYGGGGQCSLDNLQTLCTVCHKERTARQAKERSQVRRQSLASKHGSDITRFLVKK

SEQ ID NO: 223057 - DNA, 3240 bp, Artificial Sequence
  derived and/or modified sequence
atgcccagagtgcacaacatcaagaagagcctgaccccccacatcagctgcgtgaccaacgagagcgacaacctgctggacttcctgcccgacagactgagagccaagctgctgcccttccagaaggacggcatcatcttcgccctgaagagaaacggcagatgcatggtggccgacgagatgggcctgggcaagaccatccaggccatcggcatcacctacttctacaaggaggagtggcccctgctgatcgtggtgcccagcagcctgagatacccctggaccgaggagatcgagaagtggatccccgagctgagccccgaggagatcaacgtgatccagaacaagaccgacgtgagaagaatgagcaccagcaaggtgaccgtgctgggctacggcctgctgaccgccgacgccaagaccctgatcgacgccctgaacaaccagaacttcaaggtggtgatcgtggacgagagccactacatgaagagcagaaacgccaccagaagcagaatcctgctgcccatcgtgcagaaggccagaagagccatcctgctgaccggcacccccgccctgggcagacccgaggagctgttcatgcagatcgaggccctgttcccccagaagttcggcagatggaccgactacgccaagagatactgcaacgcccacatcagatacttcggcaagagaccccagtgggactgcagaggcgccagcaacctgaacgagctgcaccagctgctgagcgacatcatgatcagaagactgaagaccgaggtgctgacccagctgccccccaaggtgagacagagaatccccttcgacctgcccagcgccgccgccaaggagctgaacaccagcttcgaggagtgggagaagatcatgagaacccccaacagcggcgccatggagaccgtgatgggcctgatcaccagaatgttcaagcagaccgccatcgccaaggccggcgccgtgaaggactacatcaagatgatgctgcagaacgacagcctgaagttcctggtgttcgcccaccacctgagcatgctgcaggcctgcaccgaggccgtgatcgagaacaagaccagatacatcagaatcgacggcagcgtgagcagcagcgagagaatccacctggtgaaccagttccagaaggaccccgacaccagagtggccatcctgagcatccaggccgccggccagggcctgaccttcaccgccgccagccacgtggtgttcgccgagctgtactgggaccccggccacatcaagcaggccgaggacagagcccacagaatcggccagtgcagcagcgtgaacatccactacctgatcgccaacggcaccctggacaccctgatgtggggcatgctgaacagaaaggcccaggtgaccggcagcaccctgaacggcagaaaggagaagatccaggccgaggagggcgacaaggagaagtgggacttcctgcagttcgccgaggcctggacccccaacgacagcagcgaggagctgagaaaggaggccctgttcacccacttcgagaaggagaagcagcacgacatcagaagcttcttcgtgccccagcccaagaagagacagctgatgaccagctgcgacgagagcaagagattcagagaggagaacaccgtggtgagcagcgaccccaccaagaccgccgccagagacatcatcgactacgagagcgacgtggagcccgagaccaagagactgaagctggccgccagcgaggaccactgcagccccagcgaggagacccccagccagagcaagcagatcagaacccccctggtggagagcgtgcaggaggccaaggcccagctgaccacccccgccttccccgtggagggctggcagtgcagcctgtgcacctacatcaacaacagcgagctgccctactgcgagatgtgcgagaccccccagggcagcgccgtgatgcagatcgacagcctgaaccacatccaggacaagaacgagaaggacgacagccagaaggacaccagcaagaaggtgcagaccatcagcgactgcgagaagcaggccctggcccagagcgagcccggccagctggccgacagcaaggaggagacccccaagatcgagaaggaggacggcctgaccagccagcccggcaacgagcagtggaagagcagcgacaccctgcccgtgtacgacaccctgatgttctgcgccagcagaaacaccgacagaatccacatctacaccaaggacggcaagcagatgagctgcaacttcatccccctggacatcaagctggacctgtgggaggacctgcccgccagcttccagctgaagcagtacagaagcctgatcctgagattcgtgagagagtggagcagcctgaccgccatgaagcagagaatcatcagaaagagcggccagctgttctgcagccccatcctggccctggaggagatcaccaagcagcagaccaagcagaactgcaccaagagatacatcaccaaggaggacgtggccgtggccagcatggacaaggtgaagaacgtgggcggccacgtgagactgatcaccaaggagagcagacccagagaccccttcaccaagaagctgctggaggacggcgcctgcgtgcccttcctgaacccctacaccgtgcaggccgacctgaccgtgaagcccagcaccagcaagggctacctgcaggccgtggacaacgagggcaaccccctgtgcctgagatgccagcagcccacctgccagaccaagcaggcctgcaaggccaacagctgggacagcagattctgcagcctgaagtgccaggaggagttctggatcagaagcaacaacagctacctgagagccaaggtgttcgagaccgagcacggcgtgtgccagctgtgcaacgtgaacgcccaggagctgttcctgagactgagagacgcccccaagagccagagaaagaacctgctgtacgccacctggaccagcaagctgcccctggagcagctgaacgagatgatcagaaaccccggcgagggccacttctggcaggtggaccacatcaagcccgtgtacggcggcggcggccagtgcagcctggacaacctgcagaccctgtgcaccgtgtgccacaaggagagaaccgccagacaggccaaggagagaagccaggtgagaagacagagcctggccagcaagcacggcagcgacatcaccagattcctggtgaagaagtag

SEQ ID NO: 223058 - DNA, 3240 bp, Artificial Sequence
  derived and/or modified sequence
atgccccgcgtgcacaacatcaaaaagagcctcactccccatatctcttgcgtcacaaatgagagtgacaacttgcttgacttcctgcctgaccgtctgcgtgcgaagctgcttccttttcagaaagacggcattatcttcgctctcaagcgcaacgggcgctgcatggtggcggacgaaatgggtctgggtaagactatccaggctatcgggatcacgtacttttacaaggaggaatggcccctactgatcgttgtgccatcatcccttaggtacccctggacagaagaaatcgaaaagtggattccagaactctcacccgaggagataaatgtgatccaaaacaagactgacgtgcgccgcatgtccacctccaaggtgaccgtgctcggctacggcctcctcaccgctgacgccaagaccttaatcgacgcactgaataaccagaactttaaagttgtgattgtagacgagagtcactacatgaaaagcaggaacgcaacccggagccggatccttctgcctatcgtgcagaaagcacggcgggcaatcttgcttacaggcacgcctgccctggggaggccagaagagctctttatgcagattgaggctctctttccacagaaatttggtcgttggaccgactacgctaaaagatattgtaacgctcatataagatatttcggcaaaaggccacagtgggactgcagaggggcgtcaaatttgaatgagttacaccagctcctgagtgacatcatgatacggcgcctgaagaccgaagtcctcactcaattgcctcctaaagtgcgacagaggatacctttcgacctcccttccgctgccgcaaaggaactaaacactagttttgaggagtgggaaaagatcatgcgcacacccaattccggggctatggagacggtgatggggcttatcaccaggatgttcaagcagaccgccatagctaaagctggtgcagtgaaggactacataaaaatgatgcttcagaatgattccctgaaatttctcgtttttgcccatcacttgagcatgctgcaggcatgcaccgaggctgtgatcgagaataagaccagatacatcagaatcgacggaagtgtgtcctcctcggagagaatccacctggtgaatcaatttcagaaggatcctgatacacgagtggcaattctttctattcaggctgctggccagggactcacctttacagccgcatctcatgtggtgttcgccgaactgtactgggatccagggcacatcaaacaggccgaagatcgggctcaccgcatagggcaatgcagttctgttaatatccactatctgatagctaacggaacactcgacacgctcatgtggggaatgctcaaccggaaggcccaggttactggctccaccctgaacggacgcaaggaaaagatccaggcggaagagggagataaggaaaagtgggatttcctgcagtttgccgaggcctggacccccaatgacagcagcgaagagctgagaaaggaggctctctttacacatttcgagaaggagaagcaacacgatattcgaagctttttcgtgcctcagccaaaaaaacgccagcttatgacctcctgtgacgaaagcaaacgctttagggaagagaacacggtggtgagctcagacccaaccaagacagccgctagggatataatcgattatgagtctgacgttgagccagagacaaagcggctgaaacttgccgcctctgaagatcactgttctcccagcgaggagacgccaagccagtctaagcagatcaggacccccttagtcgagtctgtgcaggaggccaaagcccagctgacaactccagcatttcctgtggaaggttggcagtgttctctgtgtacttatattaacaactccgaattaccatactgtgagatgtgtgaaaccccccagggcagtgccgtgatgcagattgattcactcaatcacatccaggacaagaatgagaaggatgactcacaaaaagacacctcgaaaaaggtccagacaatttccgattgcgaaaaacaggccctggcgcaatccgagccaggccaactggctgacagcaaggaagagactccaaagattgaaaaagaggatggactcacttcccagcccggtaatgagcagtggaaatctagtgatacgctgcctgtatacgatacactcatgttctgtgcctcacgtaacaccgaccggatccatatctataccaaggacgggaagcagatgagctgtaattttataccactggatatcaaactggacctttgggaggacctgcctgcctctttccaactcaagcagtatcgctccctaatactacggtttgtcagagaatggtcttccctgaccgctatgaaacagcgaatcatccgaaaatccggtcaattattctgttcaccaattctggcactagaggaaattaccaagcagcagactaaacagaattgcactaaaaggtatataaccaaggaagatgtcgccgtcgccagtatggacaaggtaaaaaatgtaggtggccatgttagactgatcactaaagaatctaggccaagagatccgtttactaaaaagctcctagaagacggtgcgtgtgtgccctttctgaatccctataccgttcaggccgacctcaccgtaaagccttccaccagcaagggatatttgcaggctgtggacaatgagggcaacccattgtgtctgaggtgccagcagccaacatgccaaacgaaacaggcctgcaaagcgaattcttgggacagcagattctgtagcctcaagtgccaagaggaattctggatccgcagcaataattcttatctgagggcaaaagtctttgagaccgagcatggggtgtgccagttgtgtaacgtgaatgcgcaagaactgtttctgcggctccgcgacgcccctaagagccagagaaagaatcttctgtatgctacatggactagcaagctgccattggagcagctcaatgaaatgattcggaaccctggcgaaggccatttctggcaagtggaccacataaagcccgtttacggaggaggtggacagtgtagcctggataacctccagacactgtgtacagtgtgccataaggagaggacggcccgccaggcaaaagagagaagccaggtgagacgccagtccctggcttccaagcatgggtctgacatcacccgctttctcgtgaagaaatag

SEQ ID NO: 223059 - DNA, 3240 bp, Artificial Sequence
  derived and/or modified sequence
atgccccgggtgcacaacatcaagaagagcctgaccccccacatcagctgtgtgaccaatgaaagtgacaacctgctggacttcctgcctgaccggctgcgggccaagctgctgcccttccagaaggatggcatcatctttgccctgaagagaaatggccgctgcatggtggctgatgagatgggcctgggcaagaccatccaggccatcggcatcacctacttctacaaggaggagtggcccctgctgattgtggtgcccagcagcctgcgctacccctggacagaggagattgagaagtggatccctgagctgagccctgaggagatcaacgtcatccagaacaagacagatgtgcggaggatgagcaccagcaaggtgacagtgctgggctacggcctgctgacagcagatgccaagaccctgattgatgccctgaacaaccagaacttcaaggtggtgattgtggatgagagccactacatgaagagcagaaatgccaccaggagccgcatcctgctgcccatcgtgcagaaggcccggcgggccatcctgctgaccggcaccccagccctgggccggcctgaggagctgttcatgcagatcgaggccctcttcccccagaagtttggccgctggacagattatgccaagcgctactgcaatgcccacatccgctactttgggaagaggccccagtgggactgccgcggggccagcaacctgaatgagctgcaccagctgctgagtgacatcatgatccggcggctgaagacagaggtgctgacccagctgccccccaaggtgcggcagaggatcccctttgacctgcccagcgctgctgccaaggagctgaacaccagctttgaggagtgggagaagatcatgaggacccccaacagcggggccatggagaccgtgatgggcctcatcaccaggatgttcaagcagacagccatcgccaaggccggggctgtgaaggactacatcaagatgatgctgcagaatgacagcctgaagttcctggtgtttgcccaccacctgtccatgctgcaggcctgcacagaagctgtgattgagaacaagacccgctacatcagaattgatggctctgtgagcagcagcgagcgcatccacctggtgaaccagttccagaaggaccctgacaccagggtggccatcctgagcatccaggccgccggccagggcctgaccttcaccgctgccagccacgtggtgtttgctgagctgtactgggaccccggccacatcaagcaggccgaggaccgggcccaccgcatcggccagtgcagctctgtgaacatccactacctgattgccaacggcaccctggacaccctgatgtggggcatgctgaacaggaaggcccaggtgacaggcagcaccctgaatggaaggaaggagaagatccaggccgaggagggggacaaggagaagtgggacttcctgcagtttgctgaggcctggaccccaaatgacagcagcgaggagctgaggaaggaggccctcttcacccactttgagaaggagaagcagcacgacatccgctccttctttgtgccccagcccaagaagaggcagctgatgaccagctgtgatgagagcaagcgcttccgggaggagaacacagtggtgtccagtgaccccaccaagacagctgcccgggacatcattgattatgaaagtgatgtggagcctgagaccaagaggctgaagctggccgccagcgaggaccactgcagccccagcgaggagacccccagccagagcaagcagatccgcacccccctggtggagagcgtgcaggaggccaaggcccagctgaccaccccagccttccctgtggagggctggcagtgcagcctgtgcacctacatcaacaacagcgagctgccctactgtgagatgtgtgagaccccccagggcagcgctgtgatgcagattgacagcctgaaccacatccaggacaagaatgagaaggatgacagccagaaggacaccagcaagaaggtgcagaccatcagtgactgtgagaagcaggccctggcccagagcgagcccggccagctggccgacagcaaggaggagacccccaagattgagaaggaggatggcctgaccagccagcctggaaatgagcagtggaagagcagtgacaccctgcctgtgtatgacaccctgatgttctgtgccagcaggaacacagaccgcatccacatctacaccaaggatggcaagcagatgagctgcaacttcatccccctggacatcaagctggacctgtgggaggacctgcctgccagcttccagctgaagcagtaccgcagcctcatcctgcgctttgtgcgggagtggagcagcctgacagccatgaagcagaggatcatcaggaagagcggccagctgttctgcagccccatcctggccctggaggagatcaccaagcagcagaccaagcagaactgcaccaagcgctacatcaccaaggaggatgtggccgtggcctccatggacaaggtgaagaatgtgggcggccacgtgcggctcatcaccaaggagagccggccccgggaccccttcaccaagaagctgctggaggatggagcctgtgtgcccttcctgaacccctacacagtgcaggccgacctgactgtgaagcccagcaccagcaagggctacctgcaggccgtggacaatgaaggcaaccccctgtgcctgcgctgccagcagcccacctgccagaccaagcaggcctgcaaggccaacagctgggacagccgcttctgcagcctgaagtgccaggaggagttctggatccgcagcaacaacagctacctgcgggccaaggtgtttgaaacagagcacggcgtgtgccagctgtgcaatgtgaatgcccaggagctgttcctgcggctgagagatgcccccaagagccagaggaagaacctgctgtatgccacctggaccagcaagctgcccctggagcagctgaatgagatgatcagaaatcctggagagggccacttctggcaggtggaccacatcaagcctgtgtatggaggcggcggccagtgcagcctggacaacctgcagaccctgtgcaccgtgtgccacaaggagaggacagcccggcaggccaaggagaggagccaggtgcggcggcagagcctggccagcaagcacggcagtgacatcacccgcttcctggtgaagaagtag

SEQ ID NO: 223060 - DNA, 3240 bp, Artificial Sequence
  derived and/or modified sequence
atgccccgggtgcacaacatcaagaagagcctgaccccccacatctcttgcgtgacaaatgaatctgataatctcctggatttcctgccagataggctcagggccaaactgttgcctttccaaaaggatggaattatttttgcgctcaagaggaacggcagatgcatggtggccgacgaaatggggttgggtaagaccatacaggcaatcggcattacatacttttataaggaagagtggccattgctcatcgtcgtgcccagctcactgagatatccttggaccgaagagattgaaaagtggattccagaactgtcaccagaggagattaacgtgatccagaacaagacggacgtaagaaggatgtctacttcgaaagtaacagtcctggggtacggcctacttacagcagacgctaagaccttaattgatgctcttaataaccagaactttaaggtggtgatcgtcgacgagtctcactacatgaagagtcgcaatgcaactcggagccggatcctgctgccgattgtccagaaagctcggagagccattctcctcaccggaactcccgccttaggcaggcctgaagagctgttcatgcagatagaggcgctatttccccagaagttcggacgttggacagactacgcaaagcgctactgtaacgctcatatccgctatttcggaaaacgcccacagtgggattgtaggggagcctccaatttaaatgagctccaccagctgctttcagatattatgattcggcgcttaaaaacagaagttctcacacagctcccccccaaggtgaggcagcgcatcccttttgatctgcccagtgcagccgcaaaggagctaaataccagtttcgaggagtgggagaaaattatgcgcactccaaactcaggagccatggaaacggtgatggggctaataaccaggatgtttaagcaaaccgccatcgccaaagcaggggctgtgaaggattatatcaagatgatgctccaaaatgatagccttaaatttctggtgttcgcccatcatctgagcatgctacaggcttgtacggaggcggtgatagaaaacaaaacacgctatatccgtattgacggtagcgtctctagctcggagagaatccacctagtcaatcagtttcagaaagaccccgacacgagggtagccattctgtcaattcaggcagccggccaaggcctcactttcactgcagcttctcatgtcgtcttcgcggaactctattgggatcccggccatattaagcaggccgaagaccgagctcacagaatcggccagtgcagttctgttaatatccactacttgattgctaacggcaccctcgacaccctgatgtggggaatgcttaataggaaggcccaggtgaccgggagcactttaaacggacgaaaagagaagattcaggcagaggagggcgataaagaaaagtgggatttcctgcaatttgccgaggcatggacaccgaatgatagtagcgaagagctgcgcaaggaagcactatttacgcactttgagaaggagaaacaacacgacattcggagcttctttgtgccacagccgaaaaagagacaattgatgaccagttgtgacgagtcaaaacggttcagggaggaaaacacagttgtgtcctctgatccgaccaagactgcagcccgggatattattgactatgagagcgacgtagagccggagactaaaagattaaagctcgccgcgtcagaggaccattgttctccctctgaggagacaccctcccagtctaagcaaattagaacccccctggtggagtccgtacaggaggcgaaagcacagctgactactcctgcttttccagttgagggatggcaatgttctctgtgcacctatataaacaactctgagttaccctattgcgagatgtgtgagactcctcaaggatcagccgtgatgcagatcgattcccttaatcacatccaagacaagaacgagaaagatgacagccaaaaagacacatccaagaaagtccagacgatcagtgactgtgagaagcaggctctggctcagtctgaaccaggacagctcgctgactccaaagaagaaacacctaaaatagaaaaagaagacggcctgacttcacagcccggtaacgagcaatggaagagttctgatactctcccagtgtacgacaccttaatgttttgcgcatcacgcaacacggaccgcatccacatctacactaaggacggaaagcaaatgagttgtaatttcataccgctcgacataaaattggacctttgggaggatctcccggcctccttccagcttaaacagtatagatctctgatccttcggttcgttagggagtggtcttccctcacggcaatgaagcaacggatcattaggaagtcggggcagcttttctgcagccccatattagctctggaggagatcaccaagcagcagactaaacagaattgcaccaaacgatacatcactaaggaggatgtagctgtcgcgtcaatggacaaagttaaaaacgtaggtgggcacgtgcgcttgatcaccaaagaatcgcgtccacgagacccatttacaaagaaactgctggaagatggcgcgtgtgtgcccttcctgaatccttacacagtccaggccgatctgacagtgaagccttctacttcaaaaggttatctgcaagctgttgacaacgagggtaatcccttgtgtctacgctgccagcagcccacatgtcaaacaaagcaggcctgtaaagcaaactcctgggactccagattctgctcactcaagtgccaggaggagttttggataaggagcaacaattcttatctgcgtgccaaagtcttcgagaccgaacacggcgtgtgtcagttgtgcaacgttaatgctcaggaattgttcttgcggctgagggacgccccaaagtctcagcgcaaaaatctcctatatgctacgtggactagcaaactgccactggaacagctgaacgagatgatacgcaatcctggcgaagggcatttctggcaggttgaccacatcaagcctgtgtacggcgggggaggccaatgcagcctggataacctgcaaacactgtgcacagtgtgtcataaagaacgtaccgctcggcaggccaaggaacgttcccaagttcggagacagagtcttgcctccaagcatgggtccgacatcacacggtttttagtgaagaagtag

SEQ ID NO: 223061 - DNA, 3240 bp, Artificial Sequence
  derived and/or modified sequence
atgccgagagtccataacattaaaaaatccctgacacctcacatttcatgtgttacaaatgaatctgacaatcttctcgattttcttcccgatcgcctgagggcgaaattgctcccgtttcagaaagatggcatcatttttgctttgaaacgaaacgggagatgtatggtggctgacgagatgggcttggggaaaacaatccaggcaattggcatcacctatttttacaaggaggaatggccgctccttatcgtggtccctagtagtttacgatacccttggacagaggagatcgaaaagtggatacccgaactgtcccctgaggagattaacgttatccagaacaagacggatgtgaggcggatgtctacctctaaggtgactgtactcggatatggcttacttacagccgatgctaagaccctaatcgatgccctcaataaccagaacttcaaggtggtgatagtggacgaatcacattacatgaaatccaggaatgctactcgttctaggatcctgctcccgatcgtacaaaaagcgaggcgggctattctcctgactggtactccagctctgggacgacccgaggagttgtttatgcagatcgaagccctgttcccccagaagtttggaagatggacagattacgcgaagagatattgtaatgcgcacatacgctatttcggaaaacggccacagtgggattgtagaggcgctagtaacctgaatgagctccaccagctcctgtccgatatcatgatcaggcgtcttaagacagaagttctgacgcaacttccacctaaggtgcggcaacgcattccatttgacctacccagtgcagcggcaaaggagttgaacacttcctttgaggagtgggaaaagatcatgcgaacaccaaactccggcgcaatggagaccgtgatggggctaatcacacgtatgtttaaacaaaccgcaatcgctaaagcgggagccgtcaaggattacattaaaatgatgcttcagaatgactccttgaaattcttggtgtttgcccaccacctttcaatgcttcaggcttgcacagaggcggtgatcgagaacaagacccgctatatccgtattgatggcagcgtgagcagttctgagaggatccatctcgtcaatcagttccagaaggaccccgacaccagagtcgccatcctgtccatccaggccgcaggtcagggcctaacctttaccgccgctagtcacgttgtgttcgctgagttatactgggaccccggtcacatcaagcaggctgaggaccgggcacatcggattgggcagtgctctagtgtaaacatccattacttgattgcaaatggaacgttagataccctgatgtgggggatgcttaacaggaaggcccaggttacaggatccacgttaaatgggagaaaagaaaagattcaggctgaggagggagacaaagagaagtgggacttcttgcagttcgctgaggcctggacccctaatgactcctcagaagaactgagaaaagaagcgctatttacgcacttcgaaaaggaaaagcaacatgatatcagatcattcttcgtccctcagccgaagaaaagacagctaatgacttcatgcgatgagtctaagcgctttcgggaggagaacacagtggtatccagtgacccaactaagactgctgccagggacatcatagactatgagtccgacgtggaacccgagacaaagcggttgaagctggctgcttccgaggatcattgctccccatcagaggagactccgtcccaatctaaacaaattaggacacccttggtggagtcagtccaagaggccaaggcccaacttacgactccagcctttcctgtagagggatggcagtgcagcctgtgtacatatataaacaactccgagctgccatattgcgaaatgtgtgaaacccctcaaggcagcgccgtaatgcaaatagacagtcttaaccacattcaggataagaacgagaaggacgactcacagaaagacacctccaagaaagtccagacaatttccgattgtgaaaagcaagcactcgcacagtctgaacctggacagcttgctgactcaaaggaggagacacccaagattgaaaaagaggacgggcttacgtcccagcccggaaacgagcagtggaaaagctccgacaccctgcctgtatatgacacgctgatgttctgtgccagccgcaataccgatcgcatacacatttataccaaggatggtaagcagatgagttgtaattttattccacttgatatcaagctggacctctgggaagacttgcccgcaagcttccagctgaagcagtatcggagcctgattctgcgattcgtgagagaatggtctagcttaacagctatgaaacagcggatcatcagaaaaagcgggcaattgttttgcagccccattctggcactagaggagattaccaagcagcagaccaaacagaactgtactaagcggtacatcaccaaggaagacgtggcagtagcctcaatggataaagtgaagaacgtgggtggccacgttagattgattaccaaggaaagccgacccagagacccattcacaaagaagctgttggaagacggagcttgcgtgccatttcttaatccgtatacggtgcaggcagatcttacagtaaaacccagcaccagcaagggttacctgcaggcagttgacaacgaggggaaccctctgtgcctgaggtgccaacaaccaacctgtcagacaaagcaggcctgcaaagccaatagctgggactcacgcttctgttccttaaagtgtcaggaggagttttggatacgctccaataactcttatctgagagcaaaggtattcgagaccgagcacggggtgtgccagctgtgtaatgtgaacgcccaggaactcttccttagactccgggacgctccaaagagtcaaagaaagaatcttctgtacgctacatggacgtctaaactgcccctcgagcaactgaacgagatgattcggaatccaggcgaaggccacttttggcaggtggaccacattaagcctgtgtacgggggtgggggacaatgttcccttgataatctgcagactctatgcaccgtctgccacaaggagcggacagccaggcaggccaaggagagaagccaggtacgccgacagtctctcgcctccaaacacggcagcgatattactaggtttctcgtcaagaaatag

SEQ ID NO: 223062 - DNA, 4046 bp, Artificial Sequence
  derived and/or modified sequence
ccaatggtaaaactaggaggacagccattttgcccacttgtaaaagagctaccttttcccacgagttggagcctgaggtgcggagtttcgtgagtttttactgactcgaggatcatcatgcctagggttcataacataaaaaagtctcttacacctcacatttcttgtgtgacaaatgaatctgataatctgctggattttttgcctgacagactaagagcaaagctacttccattccagaaagatggcatcatttttgccctcaaaagaaatggcaggtgtatggtggctgatgaaatgggtctaggaaagacaatccaggcaattggaattacttacttctataaagaggaatggcctctgttaatagtggtcccttcgtctctgaggtacccttggacagaagaaattgaaaaatggatcccagagctaagtccagaagaaatcaatgttattcagaataaaactgatgttaggagaatgtcgaccagtaaagtgacagttctgggttatggtctcttaaccgcagatgcaaagactttgatagatgcactgaataatcagaacttcaaagtagttatagtggatgaatcacactacatgaaatccagaaatgcaactcgcagcaggattttattgccaatagtacagaaagccagacgagccattcttcttacaggaacaccagctttaggaaggcctgaagagctttttatgcagattgaagctctctttccacaaaaatttggaagatggaccgactatgcaaaaagatactgtaatgcacacatcagatattttggtaaaagacctcagtgggattgtagaggggcatcaaatcttaatgaacttcaccagctattaagtgacataatgattagaagattaaagactgaagttttaacccagctaccccctaaagtcagacagcgtattccatttgatcttccatcagcagctgccaaggaattgaataccagctttgaagagtgggaaaaaataatgagaactccaaattcaggtgccatggagacagtcatggggttgataactcgcatgtttaaacaaactgctattgccaaggcaggtgctgtaaaggattatattaagatgatgcttcagaatgattcgcttaaatttctggtttttgctcaccatttaagcatgctccaagcttgcacagaagcagtcatcgaaaataagactcgttacattaggatagatggaagtgtttcatcttcagaaagaatacatctggttaatcagtttcaaaaggatcctgacactcgcgtggctatcctaagcattcaggctgctggccagggattaacatttactgcagcaagtcatgttgtatttgctgagttgtactgggaccctggacatataaaacaagcagaagaccgagctcacagaattggccagtgcagttctgtgaatattcactaccttattgcaaatggaaccctagacacccttatgtggggaatgttgaatcgcaaggctcaagttacagggagcacactgaacggtaggaaagaaaaaattcaggctgaggaaggtgataaggaaaaatgggatttcctgcagtttgctgaagcttggactccaaatgacagttctgaagagttaaggaaggaagctttgttcactcacttcgaaaaagaaaaacagcatgatattcgatcattttttgtaccacaacctaaaaaaagacagttgatgacctcctgtgacgaatcaaagagattccgggaggaaaatactgtagtgtcatcagaccctacaaaaacagctgcaagagatatcatcgattatgaaagtgatgttgaacctgaaacgaaaagattgaaattggctgcctcggaagaccactgcagtccgtcggaagagacaccatcccagtccaagcaaatccgaactccactcgtggaaagtgtacaggaggccaaggcccagttaaccaccccagcctttcctgtagagggctggcaatgtagtctctgcacctatatcaataattcagagttaccttattgtgaaatgtgtgagactcctcaaggcagtgctgttatgcaaatagatagcctcaaccatatccaggataaaaacgagaaggatgattctcagaaagacacctccaaaaaggttcaaactatctcagactgtgaaaaacaagcccttgcacagtcagaacctggccagttggctgacagcaaggaagaaacaccaaaaattgagaaagaagacggacttacatcccagccaggtaatgaacagtggaagagttcagacactttgccagtgtatgacaccttaatgttctgtgcaagtaggaatactgaccggattcacatctatactaaggatggaaaacagatgagctgtaatttcattcctctggatataaaattagacctttgggaagatttaccagcaagctttcagctgaaacaatatcgctcactgattttgagatttgttcgagaatggagtagtctaactgccatgaagcaaaggataatcaggaaaagtggacagctattctgtagcccaattcttgctttggaagagatcacaaagcaacaaaccaaacaaaattgcaccaaaagatacataaccaaagaagatgttgccgtagcctcaatggacaaagtgaagaatgttgggggccatgtccgtctgatcacaaaggagtccaggccacgggatcctttcacaaaaaaacttcttgaagatggagcctgtgtcccatttctaaatccatacacagtccaggcagatctcactgtgaagccctctacatccaaaggctatttgcaagctgtggataatgaaggaaatccactttgccttcgctgtcagcaacccacttgccagactaagcaagcatgtaaagcgaactcttgggattcacggttttgctctctgaaatgtcaggaagagttttggattcgatctaataacagttacctgagagccaaagtatttgaaactgaacatggtgtgtgtcagctctgtaatgtgaacgcacaagaactctttttacgtctgagagatgcccctaaaagtcagaggaagaatcttctgtatgctacctggacttcaaagctcccattagaacagctaaatgaaatgataagaaacccaggggaaggacatttctggcaggtggatcacatcaagccagtgtatgggggaggaggacagtgttccctggacaacctgcagactctctgcacagtctgtcacaaagagagaactgccagacaagctaaggaaagaagccaggtgagaagacaatctctagcatcaaagcatggatcagacatcacacgatttttggtaaagaagtaaagtagaaaaatatatgaatgaatgacaaatggtttacatgtggaagactttaatacagaagttttccatgtttgtttaatatatcgagagtaaaaattttcagaacaaaaatcaagaattcaaattctcttctactaattacttttagtattaaatacattttgaaagtacttaacagaaactaagatacaatactgaatatttctgtggtctttttgatttgattcagactcgcaattatgtttcagcaatgttttgtaaagctctttacccctaatatgcctaatcactgtattgtgcatagattgtgtttaaaaaatgtactctcaattacctaaaaatgcttctggattagtattgttctggactgtcataggtatgagtggaacattgcaaaaccttatgggaaatttcagacgcaaatcattatttgggaattctgggccaagcatgaccagcctgcttaggattcaagagagactgtccactaaatacctccagaatgagctaggggcacacattttgggtgttgcttttcttgctttatttcttagctagtcatctttatcaaaaatatccttttcaaaatgaggtacctatggtgtttgtggacaatttgggggttctgtgtaaagtaattgttaaaactattaaataactgaaaacataaaatgtaaaatgccacttaa

SEQ ID NO: 223063 - DNA, 2777 bp, Artificial Sequence
  derived and/or modified sequence
ttgtaaaagagctaccttttcccacgagttggagcctgaggtgcggagtttcgtgagtttttactgactcgagatgggtctaggaaagacaatccaggcaattggaattacttacttctataaagaggaatggcctctgttaatagtggtcccttcgtctctgaggtacccttggacagaagaaattgaaaaatggatcccagagctaagtccagaagaaatcaatgttattcagaataaaactgatgttaggagaatgtcgaccagtaaagtgacagttctgggttatggtctcttaaccgcagatgcaaagactttgatagatgcactgaataatcagaacttcaaagtagttatagtggatgaatcacactacatgaaatccagaaatgcaactcgcagcaggattttattgccaatagtacagaaagccagacgagccattcttcttacaggaacaccagctttaggaaggcctgaagagctttttatgcagattgaagctctctttccacaaaaatttggaagatggaccgactatgcaaaaagatactgtaatgcacacatcagatattttggtaaaagacctcagtgggattgtagaggggcatcaaatcttaatgaacttcaccagctattaagtgacataatgattagaagattaaagactgaagttttaacccagctaccccctaaagtcagacagcgtattccatttgatcttccatcagcagctgccaaggaattgaataccagctttgaagagtgggaaaaaataatgagaactccaaattcaggtgccatggagacagtcatggggttgataactcgcatgtttaaacaaactgctattgccaaggcaggtgctgtaaaggattatattaagatgatgcttcagaatgattcgcttaaatttctggtttttgctcaccatttaagcatgctccaagcttgcacagaagcagtcatcgaaaataagactcgttacattaggatagatggaagtgtttcatcttcagaaagaatacatctggttaatcagtttcaaaaggatcctgacactcgcgtggctatcctaagcattcaggctgctggccaggacctgtatgacaaggtggcctgggggaaaagaactcttgtctcaggactttttatggagtgcttctgttttgtcccttaggattaagtttgaagggattaacatttactgcagcaagtcatgttgtatttgctgagttgtactgggaccctggacatataaaacaagcagatgacagttctgaagagttaaggaaggaagctttgttcactcacttcgaaaaagaaaaacagcatgatattcgatcattttttgtaccacaacctaaaaaaagacagttgatgacctcctgtgacgaatcaaagagattccgggaggaaaatactgtagtgtcatcagaccctacaaaaacagctgcaagagatatcatcgattatgaaagtgatgttgaacctgaaacgaaaagattgaaattggctgcctcggaagaccactgcagtccgtcggaagagacaccatcccagtccaagcaaatccgaactccactcgtggaaagtgtacaggaggccaaggcccagttaaccaccccagcctttcctgtagagggctggcaatgtagtctctgcacctatatcaataattcagagttaccttattgtgaaatgtgtgagactcctcaaggcagtgctgttatgcaaatagatagcctcaaccatatccaggataaaaacgagaaggatgattctcagaaagacacctccaaaaaggttcaaactatctcagactgtgaaaaacaagcccttgcacagtcagaacctggccagttggctgacagcaaggaagaaacaccaaaaattgagaaagaagacggacttacatcccagccaggtaatgaacagtggaagagttcagacactttgccagtgtatgacaccttaatgttctgtgcaagtaggaatactgaccggattcacatctatactaaggatggaaaacagatgagctgtaatttcattcctctggatataaaattagacctttgggaagatttaccagcaagctttcagctgaaacaatatcgctcactgattttgagatttgttcgagaatggagtagtctaactgccatgaagcaaaggataatcaggaaaagtggacagctattctgtagcccaattcttgctttggaagagatcacaaagcaacaaaccaaacaaaattgcaccaaaagatacataaccaaagaagatgttgccgtagcctcaatggacaaagtgaagaatgttgggggccatgtccgtctgatcacaaaggagtccaggccacgggatcctttcacaaaaaaacttcttgaagatggagcctgtgtcccatttctaaatccatacacagtccaggcagatctcactgtgaagccctctacatccaaaggctatttgcaagctgtggataatgaaggaaatccactttgccttcgctgtcagcaacccacttgccagactaagcaagcatgtaaagcgaactcttgggattcacggttttgctctctgaaatgtcaggaagagttttggattcgatctaataacagttacctgagagccaaagtatttgaaactgaacatggtgtgtgtcagctctgtaatgtgaacgcacaagaactctttttacgtctgagagatgcccctaaaagtcagaggaagaatcttctgtatgctacctggacttcaaagctcccatt

SEQ ID NO: 223064 - protein, 254 aa, Artificial Sequence
  derived and/or modified sequence
MSAGGDFGNPLRKFKLVFLGEQSVAKTSLITRFRYDSFDNTYQAIIGIDFLSKTMYLEDGTIGLRLWDTAGQERLRSLIPRYIRDSAAAVVVYDITNVNSFQQTTKWIDDVRTERGSDVIITLVGNRTDLADKRQVSVEEGERKAKGLNVTFIETRAKAGYNVKQLFRRVAAALPGMESTQDGSREDMSDIKLEKPQEQTVSEGGCSCYSPMSSSTLPQKPPYSFIDCSVNIGLNLFPSLITFCNSSLLPVSWR

SEQ ID NO: 223065 - DNA, 765 bp, Artificial Sequence
  derived and/or modified sequence
atgagcgcagggggcgactttggaaacccacttagaaaatttaaactcgtctttcttggggagcagtccgtggccaaaacttccctcattactcgcttcagatacgattcctttgataacacataccaggctattattggtattgatttcttatcgaaaaccatgtacttggaggacggaacaattggcctgaggttatgggataccgcagggcaggagcgccttcgcagcctaattcctaggtatatcagagactcagcagccgctgtggtcgtatatgacattactaacgtgaatagctttcagcagacaacgaaatggatcgacgatgttagaaccgagcggggaagtgatgttatcattaccctagtgggcaatcggaccgacctggccgacaagcgacaggtctccgtagaggagggagaacgaaaggccaaaggactcaatgttacattcatcgaaacccgggcgaaagccggatataatgttaagcagctgtttcgcagagtcgccgccgccctcccagggatggagtcaacccaggatggcagcagagaggacatgtcagatatcaaactggaaaaaccacaggagcagactgttagtgagggaggatgctcctgctacagtcccatgtccagttccacactaccacagaagccaccgtattcttttatagattgttcagtcaacatcggactgaaccttttcccaagcttgataacattttgcaacagttcactgctccctgtttcctggcgatag

SEQ ID NO: 223066 - DNA, 765 bp, Artificial Sequence
  derived and/or modified sequence
atgtctgctggaggagactttggaaaccccctgaggaagttcaagctggtgttcctgggggagcagagcgtggccaagaccagcctcatcacccgcttccgctatgacagctttgacaacacctaccaggccatcatcggcatcgacttcctgagcaagaccatgtacctggaggatggcaccatcggcctgcggctgtgggacacagctggccaggagcggctgcggagcctcatcccccgctacatccgggacagcgctgctgctgtggtggtgtatgacatcaccaacgtgaacagcttccagcagaccaccaagtggattgatgatgtgaggacagagcggggcagtgatgtgatcatcaccctggtgggcaacagaacagacctggccgacaagaggcaggtgtctgtggaggagggggagaggaaggccaagggcctgaatgtgaccttcatcgagacccgggccaaggccggctacaacgtgaagcagctgttccggcgggtggccgccgccctgcccggcatggagagcacccaggacggcagccgggaggacatgtctgacatcaagctggagaagccccaggagcagacagtgtctgagggcggctgcagctgctacagccccatgagcagcagcaccctgccccagaagccaccctacagcttcatcgactgcagcgtgaacatcggcctgaacctcttccccagcctcatcaccttctgcaacagcagcctgctgcctgtgtcctggaggtag

SEQ ID NO: 223067 - DNA, 765 bp, Artificial Sequence
  derived and/or modified sequence
atgagcgccggcggcgacttcggcaaccccctgcggaagttcaagctggtgttccttggagaacagtcagtggcaaaaacttctctgattacaaggttccgatacgattcatttgacaatacatatcaggcaataatcggaattgactttctatctaagacgatgtacttagaggacggaactatcggtttgcgcctctgggacacggccggccaggagcggctccgttcactgatccccagatacatccgggatagcgctgccgccgtcgtggtgtatgatattacgaatgtgaattcctttcaacagacgaccaagtggatcgatgacgtcaggacagagagaggctctgatgtcattatcactctagtagggaatagaacggacctggccgataaacggcaggtatctgtcgaggaaggcgaacggaaagctaaaggtttgaatgtgaccttcatagaaacccgggcaaaggccggatataatgtgaaacagctgtttagacgcgtggccgcggcccttcccggtatggagagtacccaggatgggagtagagaggacatgtctgatatcaagttggaaaaaccacaggaacaaacggtgagcgaagggggctgtagttgctactctcctatgtcgtcctctaccctaccacagaagcctccttactcctttattgattgctcagtgaacattgggctcaacctgttcccttccctcataacattctgcaactcatccctcctgccagtcagctggcgctag

SEQ ID NO: 223068 - DNA, 765 bp, Artificial Sequence
  derived and/or modified sequence
atgtccgcaggcggagattttggaaatccgcttcggaagttcaaattggtattcctgggggaacagtcggtggctaagacctccctgataactagatttaggtacgattccttcgacaacacatatcaggcaatcatcggaatagattttctgtcgaaaacgatgtatctagaagacggtaccattggccttcgactttgggacacagcagggcaggagcgcctcagatcgttaatcccccgatatattcgagattctgccgctgccgtggtcgtgtacgacattaccaacgtgaattccttccagcagacaaccaaatggatagacgatgttcggacagagcgaggtagtgacgtcatcattactctggtgggaaaccgaaccgacctcgctgataaaagacaagtaagcgtggaggagggcgaacgtaaggccaaaggcctcaacgtgactttcatcgaaacgagggccaaggctgggtacaacgtcaaacagttgttccggagagtggctgccgcactaccagggatggaatccacgcaagacggttctcgagaggatatgagtgatattaagttagagaagcctcaagaacagactgtgagcgagggcggttgtagttgttacagcccaatgagttctagtaccttgccacagaagccaccatacagcttcattgattgttccgtgaatattggcctgaacctttttccatcactcatcaccttttgcaacagtagcctcctgccggtttcctggcgttag

SEQ ID NO: 223069 - DNA, 3134 bp, Artificial Sequence
  derived and/or modified sequence
agcggccggcggggccgcaggctcgcgcccgggctcgccccgcgccgctccagaggctcgcgcactcagcaggttgggctgcggcggcggcggcagctgtggaagctcaggcgctgcgcgtgagaggtcccagatacgtctgcggttccggctccgccaccctcagcttctcttccccaggtctgggagccgagtgcggaaggagggaacggccctagctttgggaagccagaggacacccctggctcctgccgacaccgccctccttcccttcccagccgcgggcctcgctcggtgctaggctactctgccgggaggcggcggcggctgccagtctgtggagagtcctgctgccctccagccgggctcctccaccgggccttgcaggggccgagagagctcggtgcccgcccttccgctcgcctttttcgtcagctggctggagcagcatcggtccgggaggtctctaggctgaggcggcggccgctcctctagttccacaatgtccacgggcggagacttcgggaatccgctgaggaaattcaagctggtgttcctgggggagcaaagcgttggaaagacatctttgatcaccagattcatgtatgacagttttgacaacacctatcaggcaacaattggcattgactttttatcaaaaactatgtacttggaggatcgaacaatcaggcttcagctgtgggatactgcgggtcaggaacgtttccgtagcctcattcccagttacatccgtgattctgctgcagctgtagtagtttacgatatcacaaatgttaactcattccagcaaactacaaagtggattgatgatgtcagaacagaaagaggaagtgatgttatcatcatgctagtaggaaataaaacagatcttgctgacaagaggcaagtgtcaattgaggagggagagaggaaagccaaagagctgaatgttatgtttattgaaactagtgcaaaagctggatacaatgtaaagcagctctttcgacgtgtagcagcagctttgccgggaatggaaagcacacaggacagaagcagagaagatatgattgacataaaactggaaaagcctcaggagcaaccagtcagtgaaggaggctgttcctgctaatctcccatgtcatcttcaaccttcttcagaagctcactgctttggcccccttactctttcattgactgcagtgtgaatattggcttgaaccttttcccttcagtaataacgtattgcaattcatcattgctgcctgtctcgtggagatgatctattagcttcacaagcacaacaaaagtcagtgtcttcattatttatattttacaaaaagccaaaatatttcagcatattccagtgataactttaaaaattagatacattttcttaacatttttttcttttttaatgttatgataatgtacttcaaaatgatggaaatctcaacagtatgagtatggcttggttaacgagcggtatgttcacagcctactttatctctccttgcttttctcacctctcacttacccccattccctattaccctattcttacctagcctcccccgacttcctcaaaacaaacaagagatggcaaagcagcagttctaccaagcccattggaattatcctttaattttacagataccacttgctgtaggctacggaccaagatgtccaaaattattcttgagcactgatataaattacggtcttctttgaggtcaaaattcagccatcatggtaggcagtgcttgaatgagaaaaggctcctggtgcatcttcaaaatgagtcctaaagaacatactgagtacttagaagtagaagaacataagatgtatttctgactaaaacaaatggctctttcacatgtgctttattagactctgggagagaaaattaaccaagtgcttcagaacaggtttttagtatttaattcttcacggtaagaaaatgaagttctaatgaactgtttctcccaaggttttaaaattgtcaagagttattctgtttgtttaaaaaataagaaacctctttaagcaatagattttgcttgggttttcttttttaaaaacataatactgtgcaggcaaggcactgtaaaagttttaattccttccagaagaaccagtggaagaatttaaatttggcgctacgatcaaaactactgaattagtagaaataatgatgtctaaagcttaccaacaaaagaaccctcagcagaataacaaaaactttgctcaggacatttgaggtcaaattgaagacggaaaccggaaaccgttttcttgtaagcccctagaggcagatcaggtaaagcatacatagtagagggaaaggagagaatggaaataaaactcaatattatgcagatttatgccttattttttagcattttttaaggttgggtctttcaggctggttttggtttgtattagatctgtatagtttaattaactggtgatttagttttatatttaagctacaattaatcttttttctttggtgatatttatttctttgccttttttttttttaacaactttcaatcttcagatgtttcgttgaatctatttagagcttcaccatggcaatatgtatttcccttaaaacactgcaaacaaatatactaggagtgtgcccttttaatctttactagttattgtgagattgctgtgtaagctaataaacacatttgtaaatacattgtttgcaggacgaaaacttctgagttacagctcaggaaaagcctgctgaatttatgttgtaagcattacttaacacagtataaagatgaaaagacaacaaaaatatcttcatacttcctcatcccctcattggaacaaaaccttaaactgggagaaccttagtcccctctctttcctcttcctcctccacttcccacttattgtcaccttgtaatattcagagagcacttggattatggatctgaatagagaaatgcttacagataatcattagcccacataccagtaacttatacttaaagatgggatggagttgtaaagtgcttttataatacaatataattgttaaaggcaagggttgactctttgttttattttgacatggcatgtcctgaaataaatattgattcaatatggca

SEQ ID NO: 223070 - DNA, 3085 bp, Artificial Sequence
  derived and/or modified sequence
gctccagaggctcgcgcactcagcaggttgggctgcggcggcggcggcagctgtggaagctcaggcgctgcgcgtgagaggtcccagatacgtctgcggttccggctccgccaccctcagcttctcttccccaggtctgggagccgagtgcggaaggagggaacggccctagctttgggaagccagaggacacccctggctcctgccgacaccgccctccttcccttcccagccgcgggcctcgctcggtgctaggctactctgccgggaggcggcggcggctgccagtctgtggagagtcctgctgccctccagccgggctcctccaccgggccttgcaggggccgagagagctcggtgcccgcccttccgctcgcctttttcgtcagctggctggagcagcatcggtccgggaggtctctaggctgaggcggcggccgctcctctagttccacaatgtccacgggcggagacttcgggaatccgctgaggaaattcaagctggtgttcctgggggagcaaagcgttggaaagacatctttgatcaccagattcatgtatgacagttttgacaacacctatcaggcaacaattggcattgactttttatcaaaaactatgtacttggaggatcgaacagtacgattgcaattatgggacacagcaggtcaagagcggttcaggagcttgattcctagctacattcgtgactccactgtggcagttgttgtttatgatatcacaaatgttaactcattccagcaaactacaaagtggattgatgatgtcagaacagaaagaggaagtgatgttatcatcatgctagtaggaaataaaacagatcttgctgacaagaggcaagtgtcaattgaggagggagagaggaaagccaaagagctgaatgttatgtttattgaaactagtgcaaaagctggatacaatgtaaagcagctctttcgacgtgtagcagcagctttgccgggaatggaaagcacacaggacagaagcagagaagatatgattgacataaaactggaaaagcctcaggagcaaccagtcagtgaaggaggctgttcctgctaatctcccatgtcatcttcaaccttcttcagaagctcactgctttggcccccttactctttcattgactgcagtgtgaatattggcttgaaccttttcccttcagtaataacgtattgcaattcatcattgctgcctgtctcgtggagatgatctattagcttcacaagcacaacaaaagtcagtgtcttcattatttatattttacaaaaagccaaaatatttcagcatattccagtgataactttaaaaattagatacattttcttaacatttttttcttttttaatgttatgataatgtacttcaaaatgatggaaatctcaacagtatgagtatggcttggttaacgagcggtatgttcacagcctactttatctctccttgcttttctcacctctcacttacccccattccctattaccctattcttacctagcctcccccgacttcctcaaaacaaacaagagatggcaaagcagcagttctaccaagcccattggaattatcctttaattttacagataccacttgctgtaggctacggaccaagatgtccaaaattattcttgagcactgatataaattacggtcttctttgaggtcaaaattcagccatcatggtaggcagtgcttgaatgagaaaaggctcctggtgcatcttcaaaatgagtcctaaagaacatactgagtacttagaagtagaagaacataagatgtatttctgactaaaacaaatggctctttcacatgtgctttattagactctgggagagaaaattaaccaagtgcttcagaacaggtttttagtatttaattcttcacggtaagaaaatgaagttctaatgaactgtttctcccaaggttttaaaattgtcaagagttattctgtttgtttaaaaaataagaaacctctttaagcaatagattttgcttgggttttcttttttaaaaacataatactgtgcaggcaaggcactgtaaaagttttaattccttccagaagaaccagtggaagaatttaaatttggcgctacgatcaaaactactgaattagtagaaataatgatgtctaaagcttaccaacaaaagaaccctcagcagaataacaaaaactttgctcaggacatttgaggtcaaattgaagacggaaaccggaaaccgttttcttgtaagcccctagaggcagatcaggtaaagcatacatagtagagggaaaggagagaatggaaataaaactcaatattatgcagatttatgccttattttttagcattttttaaggttgggtctttcaggctggttttggtttgtattagatctgtatagtttaattaactggtgatttagttttatatttaagctacaattaatcttttttctttggtgatatttatttctttgccttttttttttttaacaactttcaatcttcagatgtttcgttgaatctatttagagcttcaccatggcaatatgtatttcccttaaaacactgcaaacaaatatactaggagtgtgcccttttaatctttactagttattgtgagattgctgtgtaagctaataaacacatttgtaaatacattgtttgcaggacgaaaacttctgagttacagctcaggaaaagcctgctgaatttatgttgtaagcattacttaacacagtataaagatgaaaagacaacaaaaatatcttcatacttcctcatcccctcattggaacaaaaccttaaactgggagaaccttagtcccctctctttcctcttcctcctccacttcccacttattgtcaccttgtaatattcagagagcacttggattatggatctgaatagagaaatgcttacagataatcattagcccacataccagtaacttatacttaaagatgggatggagttgtaaagtgcttttataatacaatataattgttaaaggcaagggttgactctttgttttattttgacatggcatgtcctgaaataaatattgattcaatatg

SEQ ID NO: 223071 - DNA, 3089 bp, Artificial Sequence
  derived and/or modified sequence
gccggcggggccgcaggctcgcgcccgggctcgccccgcgccgctccagaggctcgcgcactcagcaggttgggctgcggcggcggcggcagctgtggaagctcaggcgctgcgcgtgagaggtcccagatacgtctgcggttccggctccgccaccctcagcttctcttccccagctttgggaagccagaggacacccctggctcctgccgacaccgccctccttcccttcccagccgcgggcctcgctcggtgctaggctactctgccgggaggcggcggcggctgccagtctgtggagagtcctgctgccctccagccgggctcctccaccgggccttgcaggggccgagagagctcggtgcccgcccttccgctcgcctttttcgtcagctggctggagcagcatcggtccgggaggtctctaggctgaggcggcggccgctcctctagttccacaatgtccacgggcggagacttcgggaatccgctgaggaaattcaagctggtgttcctgggggagcaaagcgttggaaagacatctttgatcaccagattcatgtatgacagttttgacaacacctatcaggcaacaattggcattgactttttatcaaaaactatgtacttggaggatcgaacaatcaggcttcagctgtgggatactgcgggtcaggaacgtttccgtagcctcattcccagttacatccgtgattctgctgcagctgtagtagtttacgatatcacaaatgttaactcattccagcaaactacaaagtggattgatgatgtcagaacagaaagaggaagtgatgttatcatcatgctagtaggaaataaaacagatcttgctgacaagaggcaagtgtcaattgaggagggagagaggaaagccaaagagctgaatgttatgtttattgaaactagtgcaaaagctggatacaatgtaaagcagctctttcgacgtgtagcagcagctttgccgggaatggaaagcacacaggacagaagcagagaagatatgattgacataaaactggaaaagcctcaggagcaaccagtcagtgaaggaggctgttcctgctaatctcccatgtcatcttcaaccttcttcagaagctcactgctttggcccccttactctttcattgactgcagtgtgaatattggcttgaaccttttcccttcagtaataacgtattgcaattcatcattgctgcctgtctcgtggagatgatctattagcttcacaagcacaacaaaagtcagtgtcttcattatttatattttacaaaaagccaaaatatttcagcatattccagtgataactttaaaaattagatacattttcttaacatttttttcttttttaatgttatgataatgtacttcaaaatgatggaaatctcaacagtatgagtatggcttggttaacgagcggtatgttcacagcctactttatctctccttgcttttctcacctctcacttacccccattccctattaccctattcttacctagcctcccccgacttcctcaaaacaaacaagagatggcaaagcagcagttctaccaagcccattggaattatcctttaattttacagataccacttgctgtaggctacggaccaagatgtccaaaattattcttgagcactgatataaattacggtcttctttgaggtcaaaattcagccatcatggtaggcagtgcttgaatgagaaaaggctcctggtgcatcttcaaaatgagtcctaaagaacatactgagtacttagaagtagaagaacataagatgtatttctgactaaaacaaatggctctttcacatgtgctttattagactctgggagagaaaattaaccaagtgcttcagaacaggtttttagtatttaattcttcacggtaagaaaatgaagttctaatgaactgtttctcccaaggttttaaaattgtcaagagttattctgtttgtttaaaaaataagaaacctctttaagcaatagattttgcttgggttttcttttttaaaaacataatactgtgcaggcaaggcactgtaaaagttttaattccttccagaagaaccagtggaagaatttaaatttggcgctacgatcaaaactactgaattagtagaaataatgatgtctaaagcttaccaacaaaagaaccctcagcagaataacaaaaactttgctcaggacatttgaggtcaaattgaagacggaaaccggaaaccgttttcttgtaagcccctagaggcagatcaggtaaagcatacatagtagagggaaaggagagaatggaaataaaactcaatattatgcagatttatgccttattttttagcattttttaaggttgggtctttcaggctggttttggtttgtattagatctgtatagtttaattaactggtgatttagttttatatttaagctacaattaatcttttttctttggtgatatttatttctttgccttttttttttttaacaactttcaatcttcagatgtttcgttgaatctatttagagcttcaccatggcaatatgtatttcccttaaaacactgcaaacaaatatactaggagtgtgcccttttaatctttactagttattgtgagattgctgtgtaagctaataaacacatttgtaaatacattgtttgcaggacgaaaacttctgagttacagctcaggaaaagcctgctgaatttatgttgtaagcattacttaacacagtataaagatgaaaagacaacaaaaatatcttcatacttcctcatcccctcattggaacaaaaccttaaactgggagaaccttagtcccctctctttcctcttcctcctccacttcccacttattgtcaccttgtaatattcagagagcacttggattatggatctgaatagagaaatgcttacagataatcattagcccacataccagtaacttatacttaaagatgggatggagttgtaaagtgcttttataatacaatataattgttaaaggcaagggttgactctttgttttattttgacatggcatgtcctgaaataaatattgattcaatatg

SEQ ID NO: 223072 - DNA, 1102 bp, Artificial Sequence
  derived and/or modified sequence
gttttccccagaggcttggccctgcgaagtgctgatgtcgtggaagttggaaagacatctttgatcaccagattcatgtatgacagttttgacaacacctatcaggcaacaattggcattgactttttatcaaaaactatgtacttggaggatcgaacaatcaggcttcagctgtgggatactgcgggtcaggaacgtttccgtagcctcattcccagttacatccgtgattctgctgcagctgtagtagtttacgatatcacaaatgttaactcattccagcaaactacaaagtggattgatgatgtcagaacagaaagaggaagtgatgttatcatcatgctagtaggaaataaaacagatcttgctgacaagaggcaagtgtcaattgaggagggagagaggaaagccaaagagctgaatgttatgtttattgaaactagtgcaaaagctggatacaatgtaaagcagctctttcgacgtgtagcagcagctttgccgggaatggaaagcacacaggacagaagcagagaagatatgattgacataaaactggaaaagcctcaggagcaaccagtcagtgaaggaggctgttcctgctaatctcccatgtcatcttcaaccttcttcagaagctcactgctttggcccccttactctttcattgactgcagtgtgaatattggcttgaaccttttcccttcagtaataacgtattgcaattcatcattgctgcctgtctcgtggagatgatctattagcttcacaagcacaacaaaagtcagtgtcttcattatttatattttacaaaaagccaaaatatttcagcatattccagtgataactttaaaaattagatacattttcttaacatttttttcttttttaatgttatgataatgtacttcaaaatgatggaaatctcaacagtatgagtatggcttggttaacgagcggtatgttcacagcctactttatctctccttgcttttctcacctctcacttacccccattccctattaccctattcttacctagcctcccccgacttcctcaaaacaaacaagagatggcaaagcagcagttctaccaagcccattg

SEQ ID NO: 223073 - DNA, 1104 bp, Artificial Sequence
  derived and/or modified sequence
ttgttttccccagaggcttggccctgcgaagtgctgatgtcgtggaagttggaaagacatctttgatcaccagattcatgtatgacagttttgacaacacctatcaggcaacaattggcattgactttttatcaaaaactatgtacttggaggatcgaacaatcaggcttcagctgtgggatactgcgggtcaggaacgtttccgtagcctcattcccagttacatccgtgattctgctgcagctgtagtagtttacgatatcacaaatgttaactcattccagcaaactacaaagtggattgatgatgtcagaacagaaagaggaagtgatgttatcatcatgctagtaggaaataaaacagatcttgctgacaagaggcaagtgtcaattgaggagggagagaggaaagccaaagagctgaatgttatgtttattgaaactagtgcaaaagctggatacaatgtaaagcagctctttcgacgtgtagcagcagctttgccgggaatggaaagcacacaggacagaagcagagaagatatgattgacataaaactggaaaagcctcaggagcaaccagtcagtgaaggaggctgttcctgctaatctcccatgtcatcttcaaccttcttcagaagctcactgctttggcccccttactctttcattgactgcagtgtgaatattggcttgaaccttttcccttcagtaataacgtattgcaattcatcattgctgcctgtctcgtggagatgatctattagcttcacaagcacaacaaaagtcagtgtcttcattatttatattttacaaaaagccaaaatatttcagcatattccagtgataactttaaaaattagatacattttcttaacatttttttcttttttaatgttatgataatgtacttcaaaatgatggaaatctcaacagtatgagtatggcttggttaacgagcggtatgttcacagcctactttatctctccttgcttttctcacctctcacttacccccattccctattaccctattcttacctagcctcccccgacttcctcaaaacaaacaagagatggcaaagcagcagttctaccaagcccattg

SEQ ID NO: 223074 - DNA, 3077 bp, Artificial Sequence
  derived and/or modified sequence
gcgcactcagcaggttgggctgcggcggcggcggctggggaagccgaagcgccgcgcgtgagagatcccggatacatctgcggtttgggctccgccaccctccgtctctctcccgcaggtctctgagccgggtgcggaaggagggaacggccctagccttgggaagccaaagcacacccctggctcctgccgacaccgccctccttcccttcccagccgcgggcctcgctccgtgctcggctactctgccgggaggcggcggcggctgccagtctgtggcgagccctgctgccctccagccgggctcctccagccgggctcctccaccggcccttgcaggggcgcagagagctcggcgcccgcccttccgctcgcctttttcgtcagccggctggaggagcatcggtccgggaggtctctgggctgaggcggcgacagctcctctagttccaccatgtccgcgggcggagacttcgggaatccgctgaggaaattcaagctggtgttcctgggggagcaaagcgttgcaaagacatctttgatcaccagattcaggtatgacagttttgacaacacctatcaggcaataattggcattgactttttatcaaaaactatgtacttggaggatggaacaatcgggcttcggctgtgggatacggcgggtcaggaacgtctccgtagcctcattcccaggtacatccgtgattctgctgcagctgtagtagtttacgatatcacaaatgttaactcattccagcaaactacaaagtggattgatgatgtcagaacagaaagaggaagtgatgttatcatcacgctagtaggaaatagaacagatcttgctgacaagaggcaagtgtcagttgaggagggagagaggaaagccaaagggctgaatgttacgtttattgaaactagggcaaaagctggatacaatgtaaagcagctctttcgacgtgtagcagcagctttgccgggaatggaaagcacacaggacggaagcagagaagacatgagtgacataaaactggaaaagcctcaggagcaaacagtcagcgaagggggttgttcctgctactctcccatgtcatcttcaacccttcctcagaagcccccttactctttcattgactgcagtgtgaatattggcttgaaccttttcccttcattaataacgttttgcaattcatcattgctgcctgtctcgtggaggtgatctattagcttcacaagcacaaaaaaagtcagcgtcttcattatttatattttacaaaaagccaaattatttcagcatattccggtgataactttaaaaattagatacattttcttaacatttttttcttttttaatgttatgataatgtacttcaaaatgatggaaatctcaacagtatgagtatggcttggttaacgagcagtatgttcacagcctgctttatctctccttgctcttctcacctctcccttaccccgttccctatttccgtgttcttacctagcctccccccacttcctcaaaacaaacaagagatggcaaagcagcagtccgaccaagcccactggaattatcctttaattttacagataccacttgctgtaggctgtggaccaagatgtccagaattattcttgagcactgatgtaaattacttagatcttctttgaggtcagaattcagcgatcacggtaggcagtgcttgaatgagaaaagcctcctggtgcatcttcaaaatgagtcctaaagaacatactgagtacttataagtagcagaacataaaatgtatttctgactaacacaaatggtcctttcacatgtgctttattagactctgggagagaaaagtaaccaagtgcttcagaacaggtttttagtatttacttcttcatggtaagataatgaagttctaatgaactatttctcccaaggttttaaaattgtcaagagttattctgtttgtttaaaaagtaagaaacctctgtaagcaatagattttgcttgggttttctttcttaaaaaaataatactatgcaggcaagacaccataaaagtttaattccttacagaagaaccagtggaagaatttaaatttggcactacgatcaaaactactgaattagcagaaataacgatatctaaagcttaccagcaaaagaaccctcagcagaatagcaaaaactttgctcaggacatttgaggtcaaattgaagacggaagacggaagacggaaaccggaaaccgttttcttgtaagcccctagaggcagatcaggtaaagcatacatagtagagggaaaggagagaatggaaataaaactgaatattatgcagatttatgccttattttttagcattttttaaggttgggtctttcaggctggttttggtttgtattagatctgtatagtttaactagtgatttagttttatatttaagctacgattaatattttttctttggcgatatttctttgctttttttttttttaacaactttccatttttagatgtttcgttgaatctatttagagcttcaccatggcaatatgtatttcccttaaaacactgcaaacaaatatactaggagtgtgcccttttaatctttactagttattgtgagattgctgtgtaagctaataaacacatttgtaaatacattgtttgcaggaagaaaacttcgagttacaggtcaggaaaagcctgctgaatttatgttgtaaacgttacttaacacagtataaagatgaaaagacaacaaaagtatcttcatacttcctcatcccctcattgcaacaaaaccttaaactgggagaaccttagtcccctctctttcctcttcctcctccacttcccacttattgtcactttgtaatattcagagagcacttggattatggatctgaatagagaaatgcttacagataatcattagcccacataccagtaacttatacttaaagatgggatggagttataaagtgcttttataatacaatataattgctaaaggcaagggttgactctttgttttattttgacatggcatgtcctgaaataaatattgattcactatg

SEQ ID NO: 223075 - DNA, 765 bp, Artificial Sequence
  derived and/or modified sequence
atgagcgccggcggcgacttcggcaaccccctgagaaagttcaagctggtgttcctgggcgagcagagcgtggccaagaccagcctgatcaccagattcagatacgacagcttcgacaacacctaccaggccatcatcggcatcgacttcctgagcaagaccatgtacctggaggacggcaccatcggcctgagactgtgggacaccgccggccaggagagactgagaagcctgatccccagatacatcagagacagcgccgccgccgtggtggtgtacgacatcaccaacgtgaacagcttccagcagaccaccaagtggatcgacgacgtgagaaccgagagaggcagcgacgtgatcatcaccctggtgggcaacagaaccgacctggccgacaagagacaggtgagcgtggaggagggcgagagaaaggccaagggcctgaacgtgaccttcatcgagaccagagccaaggccggctacaacgtgaagcagctgttcagaagagtggccgccgccctgcccggcatggagagcacccaggacggcagcagagaggacatgagcgacatcaagctggagaagccccaggagcagaccgtgagcgagggcggctgcagctgctacagccccatgagcagcagcaccctgccccagaagcccccctacagcttcatcgactgcagcgtgaacatcggcctgaacctgttccccagcctgatcaccttctgcaacagcagcctgctgcccgtgagctggagatag

SEQ ID NO: 223076 - protein, 130 aa, Artificial Sequence
  derived and/or modified sequence
MAAVLGALGATRRLLAALRGQSLGLAAMSSGTHRLTAEERNQAILDLKAAGWSELSERDAIYKEFSFHNFNQAFGFMSRVALQAEKMNHHPEWFNVYNKVQITLTSHDCGELTKKDVKLAKFIEKAAASV

SEQ ID NO: 223077 - DNA, 393 bp, Artificial Sequence
  derived and/or modified sequence
atggccgccgttcttggtgccctgggggctacacggcggctgctcgctgccctccgtggccagagtcttggcctcgccgccatgtccagcggaacacatcgcttgaccgctgaagaacggaaccaggccatcctcgaccttaaggcagccggatggtctgaactttccgagcgcgacgccatctacaaagagttcagtttccataatttcaaccaggctttcggattcatgagcagagttgctctccaagctgaaaaaatgaatcaccatccagagtggtttaatgtttacaacaaagtgcagattactcttacctcccatgactgtggggaactgaccaaaaaagatgtgaagctggccaaatttatcgagaaggccgccgcctccgtctag

SEQ ID NO: 223078 - DNA, 393 bp, Artificial Sequence
  derived and/or modified sequence
atggcagctgtgctgggagctctgggtgcaactaggagactactagctgccctgagaggacaaagtctggggttagcggcaatgagctccggcacacacaggctgaccgcggaggagaggaaccaagccatcctagatctgaaggccgctggatggtctgagttatcagagcgcgatgccatctacaaagagttctccttccataacttcaatcaggcattcggctttatgagtcgagtggcccttcaagcagaaaagatgaaccatcaccccgagtggttcaatgtgtacaataaggtgcagattacactaaccagccacgactgcggagaattgactaagaaagacgttaagctggcgaagttcatcgaaaaggcagcagcctcagtgtag

SEQ ID NO: 223079 - DNA, 393 bp, Artificial Sequence
  derived and/or modified sequence
atggctgctgtgctgggcgccctgggcgccacccggcggctgctggccgccctgcggggccagagcctgggcctggccgccatgagcagcggcacccaccggctgacagctgaggagaggaaccaggccatcctggacctgaaggccgccggctggagcgagctgtctgaaagagatgccatctacaaggagttctccttccacaacttcaaccaggccttcggcttcatgagccgggtggccctgcaggccgagaagatgaaccaccaccctgagtggttcaacgtgtacaacaaggtgcagatcaccctgaccagccatgactgtggggagctgaccaagaaggatgtgaagctggccaagttcatcgagaaggctgctgcctctgtgtag

SEQ ID NO: 223080 - DNA, 393 bp, Artificial Sequence
  derived and/or modified sequence
atggccgccgtgctgggcgccctgggcgccacccggcggctgctggctgcccttagaggacaaagtctggggttggccgcaatgagcagcggcacccatcgcctgacggccgaggaaaggaatcaagcaattctggatctcaaggctgcaggatggtctgagctcagtgaaagggatgctatttataaggaattcagttttcataacttcaatcaggcctttggatttatgagtcgggtggcccttcaggcggagaagatgaaccaccacccagaatggtttaatgtgtacaataaggtccagattaccctaacgtcccacgattgtggagagctaacaaaaaaggatgtgaaactggccaagttcatagaaaaagcagccgcctccgtctag

SEQ ID NO: 223081 - DNA, 393 bp, Artificial Sequence
  derived and/or modified sequence
atggccgccgtgctgggcgccctgggcgccacccggcggctgctggcggccctgaggggtcagtctttaggcctggccgctatgagcagtggcacgcacagactgacagctgaagagcggaatcaagcgatcctcgatctaaaggccgcgggctggagcgagctctctgaaagagatgctatttataaagaatttagcttccacaattttaaccaggcttttggttttatgtcacgggtggcactccaggccgagaagatgaaccatcaccccgagtggttcaatgtctataacaaagtacaaattacgctgacatcccatgactgcggagagctgactaagaaagatgtgaaactcgctaagtttatcgagaaggcagccgcaagcgtctag

SEQ ID NO: 223082 - DNA, 393 bp, Artificial Sequence
  derived and/or modified sequence
atggctgctgtgctgggcgctttaggggcaacacgtcgattgctggcagcgcttcggggacagtctctcggtctggcagctatgagcagtggaacgcatcgactaaccgctgaggagcgcaatcaagccatcctagatctcaaggcagccggatggagcgaactctccgaacgcgacgcaatctacaaggagttctccttccacaacttcaatcaggcattcggcttcatgtccagagtcgcacttcaggcagagaaaatgaaccatcaccctgagtggtttaacgtctacaataaggtccagattacacttaccagtcacgattgtggcgagctaacaaaaaaagatgttaaactagctaagtttattgaaaaagctgccgcttctgtgtag

SEQ ID NO: 223083 - DNA, 393 bp, Artificial Sequence
  derived and/or modified sequence
atggctgccgtccttggggctttgggcgctaccaggcgactgctggctgcactgcgaggtcaatctctgggcctcgcagctatgtccagcggtacccatcggctgacggctgaggagcgaaaccaagcgatcctggacctgaaggctgctggctggtcggagttatctgaacgggacgccatctacaaggaattctcttttcataattttaaccaggcattcggattcatgtcgcgagtggccctacaggccgagaaaatgaaccaccaccccgagtggttcaatgtttacaataaagtgcagataactttgactagccatgactgtggtgaactgacaaagaaagacgtaaaactggcgaagtttatagaaaaagctgcggcaagtgtgtag

SEQ ID NO: 223084 - DNA, 1223 bp, Artificial Sequence
  derived and/or modified sequence
agagtccacctggcggccaagggcgctggcgaccgctgaagctcctgggggtgttcggggtccgggctgcgcctgtgcccgcgggaaggctgggcgcttcccacacacagaccccgctccgggccagccccgcagggagactaccagggctggcggtagctgggcgtggtcgggtcgggggcggctgtgggcggccggcaggcagcgcgcggggcagccctcggcagacggccaatggcggcggtgctcggggcgctcggggcgacgcggcgcttgttggcggcgctgcgaggccagagcctagggctagcggccatgtcatcaggtactcacaggttgactgcagaggagaggaaccaagctatacttgaccttaaagcagcaggatggtcggaattaagtgagagagatgccatctacaaagaattctccttccacaattttaatcaggcatttggctttatgtcccgagttgccctacaagcagagaagatgaatcatcacccagaatggttcaatgtatacaacaaggtccagataactctcacctcacatgactgtggtgaactgaccaaaaaagatgtgaagctggccaagtttattgaaaaagcagctgcttctgtgtgatttcttccaaaatacatgtaaaatcttgtacacatcttagctgcaatgtatgttgaaggaaatttatgtgaacaaatagagttgttctttttctcttttttttaagacagagtgttgctctgtcgcccaggccagagtgcagtggtatgatctcggctcactgtaacctccgcctcccaggttcaggtgattctcctgcctcagcctcctgagtagctgggattacaagcacgtgtcaccacgcctggctaatttttgtatttttagtatagacagggttttaccacgttggtcaggctggtctcgaactcctgacctcgtgatccgcctgcctcagcctcccaaagtgctgggattacaggcatgagccaccatgcctggctgttgaattgttcttaaggcatcatatctagaagcaaagaaaaaagaaaaataacaatttaagttgtgtaaattgtttgcctttatatattacatttggtaaaatcagtgcttaaatacgcaatgatttaaactggaacctgaggtatttttcatgctatctaatcatatacctaagataaaccaacccagttacttatattaataatattcag

SEQ ID NO: 223085 - DNA, 5621 bp, Artificial Sequence
  derived and/or modified sequence
cagccctcggcagacggccaatggcggcggtgctcggggcgctcggggcgacgcggcgcttgttggcggcgctgcgaggccagagcctagggctagcggccatgtcatcaggtactcacaggttgactgcagaggagaggaaccaagctatacttgaccttaaagcagcaggatggtcggaattaagtgagagagatgccatctacaaagaattctccttccacaattttaatcaggcatttggctttatgtcccgagttgccctacaagcagagaagatgaatcatcacccagaatggttcaatgtatacaacaaggtccagataactctcacctcacatgactgtggtgaactgaccaaaaaagatgtgaagctggccaagtttattgaaaaagcagctgcttctgtgtgatttcttccaaaatacataagtctgagaggctaaacttgatggctgtgttaacatatgtcacgtgtagcacagtggagaaagcaggatatggctcataatgacagtggtgaagacctgcgaatgaagttgctagttatcacctacattagggtttgacataggtctatgttatgggtcgctgcatctgctggaactcacagactttactatagagaatcaaagatcccgtatccgaagtctatggaaatgctcatggtggtaaattccaacagaatgaaacaccaaacttgcttaaagtaactcacgtttcaatttgaaagagatattgtcaaaattggaggcccccaggttcctgtctgttccaaatctttgcatgatgacagtggtttctctgatgtggtaagctttggctttcttctgttttctttctaaaagatcactggagtagagaggagttaaacagacatgacctttgacctcttgcatgacctccacagatagcaaaccgggccgacacatggttgacgatgtccttttctacaatgaagttaatgaaagttctgaaaatagtgattactttctgacattgataggatttaggaaacctctggataaatagcttaagcatggctgtttatgtttttgctatagacaaaaagcagcagcatgtacattgtatttggacacaagcctgcctcggttaatatattgaactattggaccactagggttagtagggagcggtctgtacactttctgattcagcattcagaaacattctaggtggactctgtagctttcagttttgtaaagttatcagaaaaacatcgggagggtttggccatcatatgtgagctttgtgtttcaatgccagttactcaggattagtaaattaatgactgtccagaggacttcagggtcaccaagctgctgcacctgccattggctgactctccccggctatctgtggctgagatggtgctgcttaggtcacgcagagcatgagctgctgctgaaagggcacaggagatggcccttgggcttctcatcccaggatgcctgccctgcccaccaatccatgagaagatatgtatgatttcagtaggccctggatcagcttgtcacctctggtttcctgtttgctttccactcactcagctggagtttcatttccagactaaagtcttcatcattggcttcagaaacagcattcatctgtggctgtgctgatgtagtacaccaagaacaactgggctcttctctgtcactttcagtgggctaccttccctcacctctccaagcagcatgaaagaattctttacatttttaatctcttttttgtttttccctgaaagtatgctttggtgcttaaagagagaagtcacaaaagtatactactgagtttcctggagatgaaatcctgttgtccctagctatgtgaatgagcacagggatccctgatgccattattttgtatattcatacggcacacacttactgagggccttctgtgtgccctaggggattgagcacagtgacatatcagggcaggtagaaacagatggagagctgatgcgggctgtcttagagcagctgccccaggaggcccctgtggatggatgttgggcaggagccctgagacgttaggggcatataactaaaggacatagcaggagttataggaggagctgatccctgagggaaacaatgaagacggagaagatggggctaaagtttgaattgtggggacattaatcacagtgattcttaaaactttgctgttgatgattttaaatggagaaaatgagtacgtaagatgttatttcccagttcagtatattggttgcccacaaagtattttcctaccatgaatggtcatatatacttgttgtagaataccagggacagcagagatggtggggtagttacttccttttcttacagcccaagaactttggtgtccaggagattgaccaatttagccactgagcatttaatacaacacagggctacccagatcccactgtcctgatttgccctgaaagccaaaggagttaggagaaggtgagtggggagaatatattaatcctgagagttgaacagagcaaaaatccctattacttttgtacttaaaacatctctgccacatgtgctcactctttatattctgtttaggtggtttatatgtgcacatcccatcctatgcctgcagttagccaactcagggtttatattgcctcctttctttttttctttttttttttttttttaagagatggggtctcattctatcatgcagactggagtgcagtggtgtgatcacagctcattgtaacctccaacgcctggactaaagtgatcctcctaccttggcctctctggtagctgggactacaggtgcatgccaccacacccacctaattttttttatttttattttttgtagagacagtctcactatcttgctcaggctagtcctgaactcctgggctcaagttatcttgctgcctcagcctcccatgggtaatttttatttcctttttttttttttttggagatggagtttcgctcttgtcgcccaggctggagtgcaatggcacgatcttggctcactgcagtctccacctcctgggttcaagtgattctccatcctcagcctcctgagtagctgagattacaggcaactgccaccatgcgcggctaatttatgtatttttttttagtaagagatggggtttcaccatgttggccagactagtcttaaactcctgacctcaagcgacctgcctgccttggcctcccaaagtgctgggattacaggcatgagccgctatgcctcgtcgctgatttttatttcttattttttttttagagatgggggtctcactatgttgctcaggctgatctcaaactcctggcctcaagtgatcctcccaccttagcctcccaagttgctgggattataagtgtgagccactatccctacctcactattaccttctttgcttctcttgttttcttttgttctaagtcaaacccatcacaatcttttcttgtccttccaggtgttttccagtgctgtgccctggatgtgctctctttctcttagagcccagagaacttgcttttcccccttatatatgacccttaactttttctaacacattattaagggcctgtgtctatcagctgggggcacttcttgaagggagggcctttgtgtggtctgtttctagtgacttccagctttaacccagagcctcatgattgctgggtgcccatagcctttttgctgaatggaggcactcagtctccttgggaagagagaatccatgatagacccacttgggagctccccacttcaggggcctacacactggtaatgcaacagaatgcccaagagtgacctcataaagcaaggattcccttcgtggccccttctctgctgcctctcagaatccagacgctaaggaaaatccctaagcagagattttctgttggatgctaaaagcaaggaataaaagttgaaaatttggaaaatgtctcaacaccgtcaccagcgccactcgagagtcatttctagttcaccagttgacactacatcggtgggattttgcccaacattcaagaaatttaagtaaatattatctatctccattgcctgttaagaaatgtgctagtagaagtgtgagggcagggtgtcagtgttctctcagcctcttccctcagatactcgtctgcttaccaaaataagttgcatgtccttgacaatctggtttctatgattggtgaggctggcatgctattacctttatgtgccctgtagacttgaatgaccagtttgaccagtttgactgttagataatctgaaggcttttctctttttttataatagaccccatctcaaatcagataatgaaaattacatatcttgatatattagaaaagtatatacattctggctgggcacggtggctcacacctgtaatccctgcactttgagaggctggggcggatcacttgaggtcaggagtttgagaccagcctggccaacgtggcgaaaccccatctctactaaaaatacacagattagcccggagtgatggtgtgcacctgttgtcccagctactcaggatgctgaggcaggagaatccctttaacctggggggcgaaggttgcagtgagccaagattgcaccactgcactccagcctgggtgacagaacgagactctgtctcagaaaaaaaaaaaaagaaaaggaaaaagaaaaatatatattctatatttttttaacttatgagaatgtgttcatttcatttgtaacatataatgggaaacagtaatacgtactctgagaaaaattgcaaagcacagataaatggaaataaacaggaaaaagaatcacctataacctcaccatccatagacagacactgttaaaattttggcatatttcctgctgattttttctactgctgatttttgcacaggtgagataattttgaacagagaattttgtatctttggtttttgtgttttgctgcacacaaaaacaaaagatataaaaatggatcataaacatttttctaaatcctgaaaaatgcatagacatattttagtgcctgtatttcacaagatggacataccataatttacttacacagtcctttttgttagatgtttaagttgttttcaagcttctcagtgctggaaaaaatactgagatagacatgtttagttgaagttatttcatttcaggttatattatcttgggtcagagaatgaatggttctcaggcttttcaaaagagctggtcagtttttatgcctctggcagtttttgagagtgctcaatcatactacactgttgccagcattagatcttatcacatttaagtcattgctaattttataaacaaaaacaatggttttactttgcatctccctgattggtattgctgtagaacatatttggagaagtttgtttgtctttggtgtttatttcatgaatagattgtgtgcccattttctcttggggtattcagttttttattactgatgtgagcatgtgtatgggtgattatttgatgattatcagttttgcttagtagactggcaatatttagtcttgctgtcactgtgttcccagtgcctactagattgcttgatatgtagttgccactcaataaagatttgttgagtcaatgaa

SEQ ID NO: 223086 - DNA, 393 bp, Artificial Sequence
  derived and/or modified sequence
atggccgccgtgctgggcgccctgggcgccaccagaagactgctggccgccctgagaggccagagcctgggcctggccgccatgagcagcggcacccacagactgaccgccgaggagagaaaccaggccatcctggacctgaaggccgccggctggagcgagctgagcgagagagacgccatctacaaggagttcagcttccacaacttcaaccaggccttcggcttcatgagcagagtggccctgcaggccgagaagatgaaccaccaccccgagtggttcaacgtgtacaacaaggtgcagatcaccctgaccagccacgactgcggcgagctgaccaagaaggacgtgaagctggccaagttcatcgagaaggccgccgccagcgtgtag

SEQ ID NO: 223087 - protein, 669 aa, Artificial Sequence
  derived and/or modified sequence
MAHHLPAAMESHQDFRSIKAKFQASQPEPSDLPKKPPKPEFGKLKKFSQPELSEHPKKAPLPEFGAVSLKPPPPEVTDLPKKPPPPEVTDLPKKPPPPEVTDLPKKPPPPEVTDLPKKPSKLELSDLSKKFPQLGATPFPRKPLQPEVGEAPLKASLPEPGAPARKPLQPDELSHPARPPSEPKSGAFPRKLWQPEAGEATPRSPQPELSTFPKKPAQPEFNVYPKKPPQPQVGGLPKKSVPQPEFSEAAQTPLWKPQSSEPKRDSSAFPKKASQPPLSDFPKKPPQPELGDLTRTSSEPEVSVLPKRPRPAEFKALSKKPPQPELGGLPRTSSEPEFNSLPRKLLQPERRGPPRKFSQPEPSAVLKRHPQPEFFGDLPRKPPLPSSASESSLPAAVAGFSSRHPLSPGFGAAGTPRWRSGGLVHSGGARPGLRPSHPPRRRPLPPASSLGHPPAKPPLPPGPVDMQSFRRPSAASIDLRRTRSAAGLHFQDRQPEDIPVPDEIYELYDDVEPRDDSSPSPKGRDEAPSVQQAARRPPQDPALRKEKDPQPQQLPPMDPKLLKQLRKAEKAEREFRKKFKFEGEIVVHTKMMIDPNAKTRRGGGKHLGIRRGEILEVIEFTSNEEMLCRDPKGKYGYVPRTALLPLETEVYDDVDFCDPLENQPLPLGR

SEQ ID NO: 223088 - protein, 670 aa, Artificial Sequence
  derived and/or modified sequence
MAHHLPAAMESHQDFRSIKAKFQASQPEPSDLPKKPPKPEFGKLKKFSQPELSEHPKKAPLPEFGAVSLKPPPPEVTDLPKKPPPPEVTDLPKKPPPPEVTDLPKKPPPPEVTDLPKKPSKLELSDLSKKFPQLGATPFPRKPLQPEVGEAPLKASLPEPGAPARKPLQPDELSHPARPPSEPKSGAFPRKLWQPEAGEATPRSPQPELSTFPKKPAQPEFNVYPKKPPQPQVGGLPKKSVPQPEFSEAAQTPLWKPQSSEPKRDSSAFPKKASQPPLSDFPKKPPQPELGDLTRTSSEPEVSVLPKRPRPAEFKALSKKPPQPELGGLPRTSSEPEFNSLPRKLLQPERRGPPRKFSQPEPSAVLKRHPQPEFFGDLPRKPPLPSSASESSLPAAVAGFSSRHPLSPGFGAAGTPRWRSGGLVHSGGARPGLRPSHPPRRRPLPPASSLGHPPAKPPLPPGPVDMQSFRRPSAASIDLRRTRSAAGLHFQDRQPEDIPQVPDEIYELYDDVEPRDDSSPSPKGRDEAPSVQQAARRPPQDPALRKEKDPQPQQLPPMDPKLLKQLRKAEKAEREFRKKFKFEGEIVVHTKMMIDPNAKTRRGGGKHLGIRRGEILEVIEFTSNEEMLCRDPKGKYGYVPRTALLPLETEVYDDVDFCDPLENQPLPLGR

SEQ ID NO: 223089 - DNA, 2010 bp, Artificial Sequence
  derived and/or modified sequence
atggcccaccacctgcccgccgccatggagagccaccaggacttcagaagcatcaaggccaagttccaggccagccagcccgagcccagcgacctgcccaagaagccccccaagcccgagttcggcaagctgaagaagttcagccagcccgagctgagcgagcaccccaagaaggcccccctgcccgagttcggcgccgtgagcctgaagccccccccccccgaggtgaccgacctgcccaagaagccccccccccccgaggtgaccgacctgcccaagaagccccccccccccgaggtgaccgacctgcccaagaagccccccccccccgaggtgaccgacctgcccaagaagcccagcaagctggagctgagcgacctgagcaagaagttcccccagctgggcgccacccccttccccagaaagcccctgcagcccgaggtgggcgaggcccccctgaaggccagcctgcccgagcccggcgcccccgccagaaagcccctgcagcccgacgagctgagccaccccgccagaccccccagcgagcccaagagcggcgccttccccagaaagctgtggcagcccgaggccggcgaggccacccccagaagcccccagcccgagctgagcaccttccccaagaagcccgcccagcccgagttcaacgtgtaccccaagaagcccccccagccccaggtgggcggcctgcccaagaagagcgtgccccagcccgagttcagcgaggccgcccagacccccctgtggaagccccagagcagcgagcccaagagagacagcagcgccttccccaagaaggccagccagccccccctgagcgacttccccaagaagcccccccagcccgagctgggcgacctgaccagaaccagcagcgagcccgaggtgagcgtgctgcccaagagacccagacccgccgagttcaaggccctgagcaagaagcccccccagcccgagctgggcggcctgcccagaaccagcagcgagcccgagttcaacagcctgcccagaaagctgctgcagcccgagagaagaggcccccccagaaagttcagccagcccgagcccagcgccgtgctgaagagacacccccagcccgagttcttcggcgacctgcccagaaagccccccctgcccagcagcgccagcgagagcagcctgcccgccgccgtggccggcttcagcagcagacaccccctgagccccggcttcggcgccgccggcacccccagatggagaagcggcggcctggtgcacagcggcggcgccagacccggcctgagacccagccacccccccagaagaagacccctgccccccgccagcagcctgggccacccccccgccaagccccccctgccccccggccccgtggacatgcagagcttcagaagacccagcgccgccagcatcgacctgagaagaaccagaagcgccgccggcctgcacttccaggacagacagcccgaggacatccccgtgcccgacgagatctacgagctgtacgacgacgtggagcccagagacgacagcagccccagccccaagggcagagacgaggcccccagcgtgcagcaggccgccagaagacccccccaggaccccgccctgagaaaggagaaggacccccagccccagcagctgccccccatggaccccaagctgctgaagcagctgagaaaggccgagaaggccgagagagagttcagaaagaagttcaagttcgagggcgagatcgtggtgcacaccaagatgatgatcgaccccaacgccaagaccagaagaggcggcggcaagcacctgggcatcagaagaggcgagatcctggaggtgatcgagttcaccagcaacgaggagatgctgtgcagagaccccaagggcaagtacggctacgtgcccagaaccgccctgctgcccctggagaccgaggtgtacgacgacgtggacttctgcgaccccctggagaaccagcccctgcccctgggcagatag

SEQ ID NO: 223090 - DNA, 2013 bp, Artificial Sequence
  derived and/or modified sequence
atggcccaccacctgcccgccgccatggagagccaccaggacttcagaagcatcaaggccaagttccaggccagccagcccgagcccagcgacctgcccaagaagccccccaagcccgagttcggcaagctgaagaagttcagccagcccgagctgagcgagcaccccaagaaggcccccctgcccgagttcggcgccgtgagcctgaagccccccccccccgaggtgaccgacctgcccaagaagccccccccccccgaggtgaccgacctgcccaagaagccccccccccccgaggtgaccgacctgcccaagaagccccccccccccgaggtgaccgacctgcccaagaagcccagcaagctggagctgagcgacctgagcaagaagttcccccagctgggcgccacccccttccccagaaagcccctgcagcccgaggtgggcgaggcccccctgaaggccagcctgcccgagcccggcgcccccgccagaaagcccctgcagcccgacgagctgagccaccccgccagaccccccagcgagcccaagagcggcgccttccccagaaagctgtggcagcccgaggccggcgaggccacccccagaagcccccagcccgagctgagcaccttccccaagaagcccgcccagcccgagttcaacgtgtaccccaagaagcccccccagccccaggtgggcggcctgcccaagaagagcgtgccccagcccgagttcagcgaggccgcccagacccccctgtggaagccccagagcagcgagcccaagagagacagcagcgccttccccaagaaggccagccagccccccctgagcgacttccccaagaagcccccccagcccgagctgggcgacctgaccagaaccagcagcgagcccgaggtgagcgtgctgcccaagagacccagacccgccgagttcaaggccctgagcaagaagcccccccagcccgagctgggcggcctgcccagaaccagcagcgagcccgagttcaacagcctgcccagaaagctgctgcagcccgagagaagaggcccccccagaaagttcagccagcccgagcccagcgccgtgctgaagagacacccccagcccgagttcttcggcgacctgcccagaaagccccccctgcccagcagcgccagcgagagcagcctgcccgccgccgtggccggcttcagcagcagacaccccctgagccccggcttcggcgccgccggcacccccagatggagaagcggcggcctggtgcacagcggcggcgccagacccggcctgagacccagccacccccccagaagaagacccctgccccccgccagcagcctgggccacccccccgccaagccccccctgccccccggccccgtggacatgcagagcttcagaagacccagcgccgccagcatcgacctgagaagaaccagaagcgccgccggcctgcacttccaggacagacagcccgaggacatcccccaggtgcccgacgagatctacgagctgtacgacgacgtggagcccagagacgacagcagccccagccccaagggcagagacgaggcccccagcgtgcagcaggccgccagaagacccccccaggaccccgccctgagaaaggagaaggacccccagccccagcagctgccccccatggaccccaagctgctgaagcagctgagaaaggccgagaaggccgagagagagttcagaaagaagttcaagttcgagggcgagatcgtggtgcacaccaagatgatgatcgaccccaacgccaagaccagaagaggcggcggcaagcacctgggcatcagaagaggcgagatcctggaggtgatcgagttcaccagcaacgaggagatgctgtgcagagaccccaagggcaagtacggctacgtgcccagaaccgccctgctgcccctggagaccgaggtgtacgacgacgtggacttctgcgaccccctggagaaccagcccctgcccctgggcagatag

SEQ ID NO: 223091 - DNA, 2010 bp, Artificial Sequence
  derived and/or modified sequence
atggcacatcacctccccgcagctatggagtctcatcaggactttcgaagtattaaggccaaatttcaggcttcccagccggagccaagcgacctgcctaagaaaccgccaaaaccggagtttggcaagttgaagaagttcagccaacctgagctgtccgaacaccccaaaaaggctccactgccggaattcggggcagtgagtcttaagcctcctcctccagaggtgacagatctgcccaagaaacctcctccgcctgaggtgaccgacctgcctaagaaaccacccccccccgaagtgacggatctccctaagaaacccccccctcccgaagtcactgacctgcccaagaaaccgagtaaactggagctcagtgacctgagcaagaaattcccgcagctgggagccactccatttcctcgaaagcctctccagccagaagttggggaggctcccctgaaagcctcattgccggagccaggtgcccctgcgcgaaagcctctgcagcctgacgaactgtcccacccagcacgcccacccagtgagcctaagtccggcgcgtttccccgcaaattgtggcagccagaggcaggggaggctaccccaagatccccacaacctgaattaagtaccttccctaaaaaaccagcccagccagagttcaatgtctaccccaagaaacctccacagccacaagttggcgggttacccaaaaaaagtgtaccgcaacccgaattctccgaggcagcccagacgccactgtggaaaccccagtcttctgaacccaaacgcgacagcagtgcctttccgaaaaaagcgtctcagcctccactatccgactttcctaaaaaacccccacagcctgagctgggtgacctcactcgcactagtagcgaacccgaggtctccgtgctacctaagcgtccacgacctgcagagttcaaggcccttagcaaaaaacctccacagccagaactgggtgggctgccccggacttcgtctgagccggaatttaactcgctgccgcgaaaactcctgcagccagagcggagaggtcccccaagaaagttcagtcaaccagagccatcggcggtgcttaaacgacacccccagcccgagttctttggcgatctgcctaggaaaccacctctgccctcctccgctagcgaaagcagtctgcccgctgcggttgccggttttagctcgcgccaccctctgagtccaggattcggggcggctggcacccccagatggagatccgggggactcgtgcattccggaggcgccagacccggactcagaccctctcatcccccacgacggcgccctcttccacctgccagtagtttagggcatcctcccgccaaaccaccacttcctccgggaccggttgacatgcagagcttccggagaccctctgcggccagtatcgacctacggagaacccgcagcgctgccggactacactttcaggatagacagcccgaggacatacccgtccccgacgaaatttacgagctgtacgacgacgtggaaccccgggacgattctagccctagcccaaagggtagggatgaggcaccctccgtccaacaggctgccaggcggccacctcaggacccggccctgaggaaagagaaagacccccagccacagcagctgcctcccatggaccctaaattgctaaaacagctccgcaaagccgaaaaggcagaaagagaatttcgcaaaaagtttaaatttgaaggggagatcgttgtgcacacaaagatgatgatcgatccaaatgccaaaacccggaggggcggcggaaaacacctggggatacgccgaggggagattttggaagtcattgagttcacatctaacgaagagatgctctgccgcgaccctaaaggcaagtatggctacgtgcctcgtaccgctcttctgccactcgagactgaagtgtatgatgacgtggatttctgtgacccacttgaaaaccagcctcttcctctggggaggtag

SEQ ID NO: 223092 - DNA, 2013 bp, Artificial Sequence
  derived and/or modified sequence
atggcgcatcacttgccagccgccatggaaagccatcaagattttcgaagtatcaaggcaaagttccaagcctcccagcctgaaccttccgaccttccaaaaaagccccctaagccagagttcggcaaactgaagaagttttcccaacccgaattgtccgagcatcccaagaaggctccgttgcctgagtttggggccgtgtcactcaaaccaccccccccagaagtgacggatctcccaaaaaagccccctccaccagaggtgaccgaccttcctaagaaaccccctccccccgaagtaacagacttgcccaaaaagcctcctcccccggaggtgacagacctccctaaaaagccatccaagctggagctgtccgacctgtccaagaagttcccacagctgggtgctacaccgttcccccgaaagcctctccagcccgaagttggcgaggcgcctctcaaggcatcactccccgagcctggcgcacctgcgaggaaacctctgcagcctgacgaactgtctcaccctgcacggccacccagcgagccgaagtctggagccttcccacggaagctgtggcaaccagaagctggggaggcgaccccacggtcccctcaaccggagctttcaacctttcccaaaaaacctgcgcaacctgagtttaacgtctaccctaagaaacctccccagccacaggtcggcggcctcccgaaaaaatcggtacctcagcctgaattcagtgaagcagcacagacaccactgtggaagcctcaatcctctgaaccaaaacgtgactcctccgccttccctaagaaagcttcacagccaccattgagcgactttcctaagaagcctcctcagcccgagctcggcgacttaacacgaacgagctccgaaccagaggtgagcgtgcttcctaaacgtccaaggccagccgaatttaaggcgctgtccaaaaagccccctcaaccggaactcgggggattaccacgaacgtcaagcgagccagaattcaacagcttgccacgcaagctgctccagcccgaacggaggggccctccacgcaaattctcccagccggagccctccgccgtgctcaagaggcaccctcagcctgaatttttcggcgatctgccgcgcaaacctcccctcccatcatccgcgtctgagtccagcctacctgcagccgtggccggcttctctagccgtcatcctctctcacctggctttggtgccgccggtactccgaggtggaggagcggcggattggttcattcaggaggagccaggccagggttgagaccttcccatcccccccgaaggcgacccttgccaccagcatcaagcctcggccaccctccagccaaaccacccctcccgccaggccctgtggatatgcagtccttcagacggccttccgcagcgtctattgacctcagacggacgcgctctgcagccggtttgcacttccaggatcgccagcccgaggatatccctcaagtcccagacgaaatctatgaactgtatgatgacgttgagcctagagacgactcctccccgtcccccaaaggccgcgacgaggccccttcagtgcagcaagcagcccggcgccctcctcaggatccagcgctgaggaaggagaaggatccccaaccacagcaactgccccctatggatccgaaactcctaaagcagctacgtaaggctgaaaaagctgaaagggagtttcgcaaaaagttcaagtttgaaggagaaatcgtagtccataccaaaatgatgatcgatccaaacgccaaaaccagaagggggggaggcaaacatctcggcatcaggcggggggagatcctggaggtaatcgaatttaccagcaacgaagagatgctctgccgggacccaaaaggaaagtatggttatgtgcccaggacagccctgcttccccttgagactgaggtgtatgatgacgtagatttctgcgatccactcgagaatcagccacttcctctgggtcgatag

SEQ ID NO: 223093 - DNA, 2010 bp, Artificial Sequence
  derived and/or modified sequence
atggcccaccacctgcctgctgccatggagagccaccaggacttccgcagcatcaaggccaagttccaggccagccagcctgagcccagcgacctgcccaagaagccacccaagccagagtttgggaagctgaagaagttcagccagcctgagctgtctgagcaccccaagaaggcccccctgcctgagtttggagctgtgtccctgaagcccccacctcctgaggtgacagacctgcccaagaagcccccacctcctgaggtgacagacctgcccaagaagcccccacctcctgaggtgacagacctgcccaagaagcccccacctcctgaggtgacagacctgcccaagaagcccagcaagctggagctgagtgacctgagcaagaagttcccccagctgggcgccacccccttccccaggaagcccctgcagcctgaggtgggggaggcccccctgaaggccagcctgcctgagcccggggccccagccaggaagcccctgcagccagatgagctgagccacccagcccggcccccatctgagcccaagagcggggccttccccaggaagctgtggcagcctgaggccggggaggccacccccaggagcccccagcctgagctgagcaccttccccaagaagccagcccagcctgagttcaacgtgtaccccaagaagccaccccagccccaggtgggcggcctgcccaagaagtctgtgccccagcctgagttcagcgaggccgcccagacccccctgtggaagccccagagcagcgagcccaagagggacagcagcgccttccccaagaaggccagccagccccccctgagtgacttccccaagaagccaccccagcctgagctgggggacctgaccaggaccagcagcgagcctgaggtgtctgtgctgcccaagaggcccaggcctgctgagttcaaggccctgagcaagaagccaccccagcctgagctgggcggcctgcccaggaccagcagcgagcctgagttcaacagcctgcccaggaagctgctgcagcctgagcggcggggcccccccaggaagttcagccagcctgagcccagcgctgtgctgaagaggcacccccagcctgagttctttggagacctgcccaggaagccacccctgcccagcagcgccagcgagagcagcctgcctgctgctgtggccggcttcagcagccgccaccccctgagccctggctttggagctgctggcaccccccgctggaggtctgggggcctggtgcacagcggcggggcccggcccggcctgcggcccagccacccccccaggagaagacccctgcccccagccagcagcctgggccaccccccagccaagccacccctgcccccaggccctgtggacatgcagagcttccggcggcccagcgctgccagcattgacctgcggaggaccaggtctgctgctggcctgcacttccaggaccggcagcctgaggacatccctgtgcctgatgagatctatgagctgtatgatgatgtggagcccagagatgacagcagccccagccccaagggcagagatgaggcccccagcgtgcagcaggccgcccggcggcccccccaggaccctgccctgaggaaggagaaggacccccagccccagcagctgccccccatggaccccaagctgctgaagcagctgaggaaggccgagaaggccgagcgggagttcaggaagaagttcaagtttgaaggagaaattgtggtgcacaccaagatgatgattgaccccaatgccaagacccggcggggcggcggcaagcacctgggcatccggcggggggagatcctggaggtgattgagttcaccagcaatgaggagatgctgtgccgggaccccaagggcaagtatggctacgtgcccaggacagccctgctgcccctggagacagaggtgtatgatgatgtggacttctgtgaccccctggagaaccagcccctgcccctgggccgctag

SEQ ID NO: 223094 - DNA, 2013 bp, Artificial Sequence
  derived and/or modified sequence
atggcccaccacctgcctgctgccatggagagccaccaggacttccgcagcatcaaggccaagttccaggccagccagcctgagcccagcgacctgcccaagaagccacccaagccagagtttgggaagctgaagaagttcagccagcctgagctgtctgagcaccccaagaaggcccccctgcctgagtttggagctgtgtccctgaagcccccacctcctgaggtgacagacctgcccaagaagcccccacctcctgaggtgacagacctgcccaagaagcccccacctcctgaggtgacagacctgcccaagaagcccccacctcctgaggtgacagacctgcccaagaagcccagcaagctggagctgagtgacctgagcaagaagttcccccagctgggcgccacccccttccccaggaagcccctgcagcctgaggtgggggaggcccccctgaaggccagcctgcctgagcccggggccccagccaggaagcccctgcagccagatgagctgagccacccagcccggcccccatctgagcccaagagcggggccttccccaggaagctgtggcagcctgaggccggggaggccacccccaggagcccccagcctgagctgagcaccttccccaagaagccagcccagcctgagttcaacgtgtaccccaagaagccaccccagccccaggtgggcggcctgcccaagaagtctgtgccccagcctgagttcagcgaggccgcccagacccccctgtggaagccccagagcagcgagcccaagagggacagcagcgccttccccaagaaggccagccagccccccctgagtgacttccccaagaagccaccccagcctgagctgggggacctgaccaggaccagcagcgagcctgaggtgtctgtgctgcccaagaggcccaggcctgctgagttcaaggccctgagcaagaagccaccccagcctgagctgggcggcctgcccaggaccagcagcgagcctgagttcaacagcctgcccaggaagctgctgcagcctgagcggcggggcccccccaggaagttcagccagcctgagcccagcgctgtgctgaagaggcacccccagcctgagttctttggagacctgcccaggaagccacccctgcccagcagcgccagcgagagcagcctgcctgctgctgtggccggcttcagcagccgccaccccctgagccctggctttggagctgctggcaccccccgctggaggtctgggggcctggtgcacagcggcggggcccggcccggcctgcggcccagccacccccccaggagaagacccctgcccccagccagcagcctgggccaccccccagccaagccacccctgcccccaggccctgtggacatgcagagcttccggcggcccagcgctgccagcattgacctgcggaggaccaggtctgctgctggcctgcacttccaggaccggcagcctgaggacatcccccaggtgcctgatgagatctatgagctgtatgatgatgtggagcccagagatgacagcagccccagccccaagggcagagatgaggcccccagcgtgcagcaggccgcccggcggcccccccaggaccctgccctgaggaaggagaaggacccccagccccagcagctgccccccatggaccccaagctgctgaagcagctgaggaaggccgagaaggccgagcgggagttcaggaagaagttcaagtttgaaggagagatcgtggtgcacaccaagatgatgattgaccccaatgccaagaccaggagaggaggcggcaagcacctgggcatcagaagaggagagatcctggaggtgattgagttcaccagcaatgaggagatgctgtgccgggaccccaagggcaagtatggctacgtgcccaggacagccctgctgcccctggagacagaggtgtatgatgatgtggacttctgtgaccccctggagaaccagcccctgcccctgggccgctag

SEQ ID NO: 223095 - DNA, 2010 bp, Artificial Sequence
  derived and/or modified sequence
atggcccaccacctgcccgccgccatggagagccaccaggacttcagatcaatcaaggctaagtttcaggcaagtcagcccgagccctctgacctgcctaaaaagcccccaaaacctgagtttgggaaattgaagaagtttagccagcctgaactctcagagcatccaaagaaagctccccttcccgagtttggggccgtgtccctaaaaccgccaccgcccgaagtcaccgacctgccaaaaaaaccccctcccccggaagtgacggatcttcccaagaagccacctccccctgaggtgactgacctcccaaagaagcccccaccacctgaggtcacagacttaccaaagaagcctagcaaacttgaactaagcgatctctctaaaaaattccctcaactcggcgccaccccattcccgaggaaacccctgcagcctgaggtcggcgaagcaccccttaaagcctccctccccgaaccaggagcaccagcgcgaaagcctttacagccagacgagctgtcccaccccgcacggccaccctctgagccaaagtcgggcgctttcccccggaaattatggcaaccagaggcaggggaggcaacgccaaggagtccacagccagaactgtcgaccttccctaagaagccagcccagccagagttcaatgtatacccaaagaagcctccccagccgcaggtgggagggctccccaaaaagagcgtcccacagcccgaattcagcgaagcagcccagactccactgtggaagcctcagtcaagtgaaccaaaaagagattcaagtgcatttcccaagaaagcttcacagcctccactcagcgactttcccaaaaagccaccccagcctgagctaggagatctgactagaacctcctccgaacctgaggtgtcagtgctgccaaaacgaccgcgccccgccgaattcaaagcgctgtctaagaagcccccccagcccgaacttggcggcctgccacgcacttccagcgaacctgagtttaactccttaccacggaagctgctccaaccggaaaggcgcggccctcctcggaagttcagtcagcctgagccaagcgcagtgcttaaacggcacccccagccagagttttttggagatttacccagaaaacctcccctcccctcgagcgccagtgagagcagcctgcccgccgccgtggccggattctcttcccgtcatcccctgagccccgggtttggtgccgcgggaactccacgttggagaagcggtggcctcgtgcatagcggcggggctcgcccggggctgcgcccatcccacccccctagaagaagaccactccctccagccagttcattgggacatccccccgccaagccgccccttcctcctggaccagtggatatgcaatcatttcggcggccaagcgccgctagtatcgacctgcggcgcacacggtccgcagccggactccatttccaggatcggcagcctgaggacattcctgtgcccgatgagatttacgaactttatgatgacgtggaacctcgtgatgactcgagtccgtctccaaagggtcgtgatgaagcaccttccgttcagcaagcagctaggaggccccctcaagacccagctctccggaaagaaaaggatcctcagccacaacaacttccccctatggaccccaagctgctgaagcagctaaggaaggctgaaaaagccgagagggaatttcgcaaaaaattcaaatttgagggtgaaatcgtggtgcataccaagatgatgatagatccaaacgccaaaacccgcaggggcggcggtaaacatctggggataagacggggcgaaattctggaagtcattgagtttacttccaacgaggaaatgctgtgtagggatccaaagggcaaatacgggtacgtgcctcggaccgccctgctaccactggaaaccgaagtatacgatgacgtagacttttgtgacccacttgagaatcagccgctgccccttggtcggtag

SEQ ID NO: 223096 - DNA, 2013 bp, Artificial Sequence
  derived and/or modified sequence
atggcccaccacctgcccgccgccatggagagccaccaggacttcagatctatcaaggctaagtttcaggcctcccagcctgaaccatctgacttgcccaagaaaccccctaagcccgagtttgggaagttaaaaaagtttagccagcctgaactgtctgaacatccgaaaaaggccccccttcccgaatttggcgctgtgtcattaaagccacctccacccgaagtgacagacctgccaaagaaacccccaccccctgaggtgaccgatcttcccaaaaaaccccccccgccagaggtcaccgacctccccaagaagcccccccctccggaggtcaccgatctgcctaagaagcccagtaaactggagctctcagatttgtctaagaagtttcctcagctcggtgcaacccccttcccgcggaagcccttgcagcccgaggtgggggaggcaccactgaaggctagcctcccagagccaggtgcccccgccaggaaaccccttcagcccgatgaactcagccatcctgccagaccgccttcagagcctaagagcggggccttccccaggaaactgtggcagcctgaggcgggcgaggcgacccccaggagccctcaaccagagctgtccacgttccccaagaaaccagcacagccagagttcaatgtttacccgaaaaagcccccacagccgcaagttggtggactgcccaagaagtctgtgccacagcccgaattttcagaagctgcccagacgcctctctggaaaccgcaaagcagcgagcctaaacgggattcatcggcattcccgaagaaagcttcccagcccccactctccgatttccccaagaaaccaccacaacccgaactgggtgacttgacccgtacgagcagcgagccagaagtttcagtcctgcctaagcggccccgtccagcagaattcaaagcactgagcaagaaaccaccacaaccagaactgggcggcctgccccgcacctccagcgagcctgaattcaactcgcttcctaggaaactgctgcagcccgagagaagaggtccacctagaaagttttcacagcctgagccctccgccgtcctgaagcgccatccacagccagagttttttggagatttgcctaggaaaccaccactaccatcttccgccagcgagagctctctgcctgctgctgtcgctggttttagttcgcggcaccctctgtcccccggctttggggccgccggcacccccagatggcgcagcggggggttggtccactcaggaggagcccggccgggtctgcggccttcacacccaccccgacgtagaccgctccctcctgctagctctctcggacacccgccagcaaagcctccattgccgccagggcccgttgatatgcaatccttcaggcgcccctcagcagcgtcaattgatcttaggaggacaaggagtgccgccggactacacttccaagacagacaaccggaggacatcccccaggtgccagacgagatctatgagttgtacgacgacgtcgagccaagggatgacagttcacctagccccaaagggagggacgaggctccttctgtgcagcaggccgcacgcaggccaccccaggacccagccctcagaaaagaaaaagacccacagccacagcagctgcccccgatggatcccaaattgctgaaacaattgaggaaggcggagaaggcggagcgagaatttaggaagaagttcaagttcgagggtgagatcgtggttcacacgaaaatgatgattgaccccaacgctaaaacaagaagaggcggcggcaagcatctcggcattagaaggggagagattctggaagtgatcgaatttacatcaaacgaggagatgctctgccgggatccaaaaggcaagtatggctacgtgccaaggaccgccctccttcctcttgaaaccgaagtttacgatgatgtagacttttgcgatcctttggagaatcaacctctaccactcggtcggtag

SEQ ID NO: 223097 - DNA, 2162 bp, Artificial Sequence
  derived and/or modified sequence
gctcgggtcccactcatcccatggcccatcacctgcctgcagccatggagagccatcaggacttccggagcatcaaagcaaagttccaggcctctcagccggagcccagcgacctgcccaaaaaacctccgaagcctgagtttggtaaactgaagaagttctcccagcctgagctaagcgagcaccccaagaaggccccgctgcctgagtttggtgcagtgtccttgaagcccccgccgcctgaggtcactgacctccccaagaagcccccgccgcctgaggtcactgacctccccaagaagcccccgccgcctgaggtcactgacctccccaagaagcccccgccgcctgaggtcactgacctccccaagaagccgtccaaactggagttgagtgacctctccaagaagttcccacagctgggggccactccgtttccaaggaagcccctgcagcctgaggtcggtgaggcccctttgaaggcctcgctgccggagcctggtgcgccggcccggaaacccctgcagcccgacgaactcagtcaccccgccagacccccctccgaacccaaatccggcgcattccccaggaagctctggcaacccgaggccggtgaggctaccccgaggtccccgcagcctgagttgagtacctttcccaagaagcctgcgcagcctgagttcaacgtgtaccccaaaaagcctccgcagcctcaggtcggtggcctccctaagaagtccgtgccgcagcctgagttcagcgaggccgctcagactcccctctggaagcctcagtccagcgagccgaagcgcgactccagcgcctttcccaaaaaggcctcccagcctccgctgagtgactttcccaagaagcctccgcagcctgagcttggggacctcaccaggacctcctcagagcccgaagtcagcgtgcttcccaagaggccgcggccggccgaattcaaagcgctctccaagaagcccccgcagcccgagctgggcggcctccccaggacctcctcagagcccgagttcaactcactccccaggaagctgctgcagccggagcgccgggggccaccccgcaagttctcacagcctgagcccagcgctgtcctcaagagacacccgcagcctgagttcttcggtgatctccctcgaaagcctccactccccagctccgcttccgagagctcactgcctgcggccgtggccggcttcagctcccggcacccgctcagccctgggtttggagcggctgggacaccccgctggaggtcaggaggcctggttcacagtggaggggccaggccaggcctcagacccagccatccaccccggcggaggcctctgccccctgccagcagcctgggacaccctccagccaagcccccgctgcccccggggcccgtggatatgcagagctttcggagaccctctgcagcatccatagatctacggaggacccgctcggccgctgggctccacttccaggaccgacagcctgaagacatcccggtcccagatgagatctacgagctgtatgacgatgtggaacccagagatgactccagccccagccccaagggcagagatgaagcgccctcagttcagcaagccgccaggaggccaccacaagacccagcgctcaggaaggagaaggatccccagccacagcagttgccacccatggacccaaagttgctgaagcagctgaggaaggcagagaaggccgagagggagttccggaagaagttcaagtttgaaggggagatcgtggttcacacgaagatgatgatcgaccccaacgctaagacacgtcgcgggggtggcaagcacctcgggatccggcgcggggagatcctggaggtgatcgagttcaccagcaatgaggagatgctgtgccgggaccccaaaggcaaatatggctacgtgcccagaacagcgctcctgcccctggagacggaggtgtacgatgatgtcgacttctgcgatcccctggaaaaccaaccactccccctgggacggtaagaccggtaggcgtggggccaggacagccagccagcccagcgcccgctcacccaggagccctggatcccggcgcgggaaagtcacagagctgcctgggcttgtacctggccacataaagccccagtttaaagc

SEQ ID NO: 223098 - DNA, 2060 bp, Artificial Sequence
  derived and/or modified sequence
agtcacttcctgaaggcagcggccccagctcgggtcccactcatcccatggcccatcacctgcctgcagccatggagagccatcaggacttccggagcatcaaagcaaagttccaggcctctcagccggagcccagcgacctgcccaaaaaacctccgaagcctgagtttggtaaactgaagaagttctcccagcctgagctaagcgagcaccccaagaaggccccgctgcctgagtttggtgcagtgtccttgaagcccccgccgcctgaggtcactgacctccccaagaagcccccgccgcctgaggtcactgacctccccaagaagcccccgccgcctgaggtcactgacctccccaagaagcccccgccgcctgaggtcactgacctccccaagaagccgtccaaactggagttgagtgacctctccaagaagttcccacagctgggggccactccgtttccaaggaagcccctgcagcctgaggtcggtgaggcccctttgaaggcctcgctgccggagcctggtgcgccggcccggaaacccctgcagcccgacgaactcagtcaccccgccagacccccctccgaacccaaatccggcgcattccccaggaagctctggcaacccgaggccggtgaggctaccccgaggtccccgcagcctgagttgagtacctttcccaagaagcctgcgcagcctgagttcaacgtgtaccccaaaaagcctccgcagcctcaggtcggtggcctccctaagaagtccgtgccgcagcctgagttcagcgaggccgctcagactcccctctggaagcctcagtccagcgagccgaagcgcgactccagcgcctttcccaaaaaggcctcccagcctccgctgagtgactttcccaagaagcctccgcagcctgagcttggggacctcaccaggacctcctcagagcccgaagtcagcgtgcttcccaagaggccgcggccggccgaattcaaagcgctctccaagaagcccccgcagcccgagctgggcggcctccccaggacctcctcagagcccgagttcaactcactccccaggaagctgctgcagccggagcgccgggggccaccccgcaagttctcacagcctgagcccagcgctgtcctcaagagacacccgcagcctgagttcttcggtgatctccctcgaaagcctccactccccagctccgcttccgagagctcactgcctgcggccgtggccggcttcagctcccggcacccgctcagccctgggtttggagcggctgggacaccccgctggaggtcaggaggcctggttcacagtggaggggccaggccaggcctcagacccagccatccaccccggcggaggcctctgccccctgccagcagcctgggacaccctccagccaagcccccgctgcccccggggcccgtggatatgcagagctttcggagaccctctgcagcatccatagatctacggaggacccgctcggccgctgggctccacttccaggaccgacagcctgaagacatcccgcaggtcccagatgagatctacgagctgtatgacgatgtggaacccagagatgactccagccccagccccaagggcagagatgaagcgccctcagttcagcaagccgccaggaggccaccacaagacccagcgctcaggaaggagaaggatccccagccacagcagttgccacccatggacccaaagttgctgaagcagctgaggaaggcagagaaggccgagagggagttccggaagaagttcaagtttgaaggggagatcgtggttcacacgaagatgatgatcgaccccaacgctaagacacgtcgcgggggtggcaagcacctcgggatccggcgcggggagatcctggaggtgatcgagttcaccagcaatgaggagatgctgtgccgggaccccaaaggcaaatatggctacgtgcccagaacagcgctcctgcccctggagacggaggtgtacgatgatgtcgacttctgcgatcccctggaaaaccaaccactccccctgggacggtaa

SEQ ID NO: 223099 - DNA, 2010 bp, Artificial Sequence
  derived and/or modified sequence
atggcccatcatctgcccgcagctatggagtcgcatcaggacttccgttcaatcaaggctaaatttcaggcctctcagcctgagcccagcgatctgccaaagaagcctcccaaaccggagttcgggaagctcaaaaagttttcacagccggaattgagcgaacatccaaaaaaggcacccctgccagagtttggcgctgtgtctctcaaaccccctcctcctgaagtaactgatctccccaagaaacccccacccccagaggtgaccgatttgccaaagaagccacctccccctgaggtgactgacctcccgaagaaacccccacctcctgaggtgacggacttgcccaaaaagccctccaagttggagttgagtgatctgtcgaagaaattcccacaactgggcgctacacctttcccaaggaagcctctccaacccgaggtgggcgaggcacccctgaaggcgtctctgccagaacctggcgctcccgcaagaaagccactccagccagacgaactgtcccacccagcgaggccaccctccgagcccaagtcaggggcattcccgaggaagctatggcagccggaggcaggagaggctacaccgcgtagccctcagcccgaattaagcacctttcccaaaaagcccgctcagcctgagttcaacgtgtaccccaaaaaaccaccacagcctcaggtcggaggcctccccaagaagtctgtccctcagccggagttctctgaggcagcacagacaccactctggaaacctcagtcatcggagccgaagagagactcatccgcctttccaaaaaaggcatcccagccaccactgtccgacttcccaaagaagccgccacaacccgagctaggtgatttgacacgcacaagctccgagcctgaagtctctgtgctacctaagagacccaggcccgctgagttcaaagccctttctaagaagccgcctcagcccgaactcgggggacttcccaggacctcgtcagaacctgagttcaatagtcttccacgcaaattgctacagcccgaaagaagaggcccacccagaaaattcagccagccagaaccatccgccgtattgaagcggcaccctcagcctgaattctttggggatctgcctaggaagccaccactgccctcctctgcctccgaatcttctttgcctgccgctgtggccggattcagtagtcgccatcctctaagccccggatttggggctgccggaacccctcgatggaggtcagggggtctggtccacagcggcggtgcaagacccggtctccggcctagtcatccccctaggaggaggccgcttccccctgccagtagcctgggacatcccccagccaagccacctttgccccctggcccagtagacatgcagtcctttcgcaggccgtcagctgcaagcatcgatctcagacgcacaagaagcgcagccggacttcacttccaggacaggcagcccgaggacatcccggtgcccgacgagatctatgagctttatgatgacgttgaaccacgggatgatagcagtccctcacccaagggcagggacgaggcccctagcgttcaacaggcagctcggcgaccccctcaggatcccgcattgcgaaaagagaaggaccctcagccccagcaattgcccccaatggaccctaaactgctgaaacaattacggaaagctgagaaggccgagcgggagtttaggaagaagttcaaattcgaaggggaaatcgtggtgcacactaaaatgatgatcgaccctaacgcaaagacccggcgaggcggtggcaaacatttgggcatccgtaggggcgagatattggaggtaatagaatttacctccaatgaagagatgctttgtagggatccgaagggcaaatacggctatgtgccacgaaccgccctcctgcccctggaaaccgaagtgtatgatgacgtagacttttgtgatcctttagagaatcagcctcttccattgggtcgctag

SEQ ID NO: 223100 - DNA, 2013 bp, Artificial Sequence
  derived and/or modified sequence
atggcccaccatctgccagccgctatggagagtcatcaggattttcggtccatcaaggctaaatttcaggcaagccagccagagcctagtgatttaccaaaaaaaccccctaagcccgaatttgggaaactcaaaaaattctcccaacccgagctcagtgaacaccctaagaaggcccctctcccagagttcggcgctgtgtccctgaaaccacctcctcctgaggtaaccgacctccctaagaaaccacccccaccagaagtcacagacctgcccaaaaagccacccccaccagaggtcactgacctaccaaaaaaacctcctcctcctgaagtgactgacctgcccaaaaagccaagcaaactggaactgagcgacctgtcaaagaaatttccacagttgggcgcaacccccttcccaagaaaaccactgcagccagaagtgggggaggccccactgaaggctagcttgcctgagcctggagcccctgcgaggaaacctttacagcctgacgagcttagccaccccgctcgccctccttcggaaccaaaaagcggagcgtttcctaggaaattgtggcagcctgaagctggggaggcaaccccaagatcgccgcagccagagctgtctacctttccaaagaagcccgctcagcctgagtttaacgtgtaccccaaaaaaccccctcagcctcaagttggcggtctgccaaagaaatcagtgcctcagcctgaattcagcgaggccgctcagacccctctctggaaaccacagagctccgagccaaaacgggatagtagcgcttttcccaagaaagctagtcagccccctctctcagactttcctaagaaaccaccacagcctgaactcggtgacctcaccaggacctccagcgagcctgaggtgagtgttcttccgaaacgtcctcgaccagcagaattcaaggcgctgagtaagaagcctccccagcccgagctcggaggtctgcccaggactagctctgagccagagttcaatagccttccccgaaagttgctccagccagaaagaagggggccacctcgtaagttcagccagccagagccctcagcagtactaaagaggcatccgcagccagagttcttcggcgaccttcccaggaaaccacctctacccagctccgccagcgagagctcactgccggcagcagtggccggattttctagcagacatcccttgagccctggtttcggcgctgccggaacccctcggtggcgaagcggcggattagtgcatagcgggggagctcgcccaggcttgagacccagtcatcccccacgcaggcgtcctttacctccagccagttcacttggccacccccctgccaagccgccacttccaccagggccagtggacatgcagagttttcggaggcctagtgccgctagcatcgatttaaggagaactagaagtgctgccggactccactttcaggacagacagcctgaagacatcccacaggtccccgacgagatctacgagttatatgacgatgtggaacctagagatgatagctccccttcccctaaaggacgcgatgaagcgccatcagtccaacaggctgcaaggcgtccacctcaggatcctgctcttcgtaaggaaaaagatcctcaacctcagcagctgcctcctatggaccccaagctgcttaagcaattacgcaaggctgagaaggctgagcgtgaattccggaaaaaatttaaatttgagggagagattgttgtacacaccaagatgatgatcgatcccaatgccaaaacaagacgtgggggaggtaagcaccttgggatcagaagaggcgagattctggaggtcatagaattcacctccaatgaggaaatgctgtgcagagacccaaaggggaagtatggctacgtcccaaggaccgcgcttttgcccctggaaacagaggtgtatgacgatgttgatttctgcgaccctcttgagaatcagcctcttcctttgggtagatag

SEQ ID NO: 223101 - protein, 275 aa, Artificial Sequence
  derived and/or modified sequence
MEGVAVVTAGSVGAAKTEGAAALPPPPPVSPPALTPAPAAGEEGPAPLSETGAPGCSGSRPPELEPERSLGRFRGRFEDEDEELEEEEELEEEEEEEEEDMSHFSLRLEGGRQDSEDEEERLINLSELTPYILCSICKGYLIDATTITECLHTFCKSCIVRHFYYSNRCPKCNIVVHQTQPLYNISANEGTGHFKPLEKKFVRVSGEATIGHVEKFLRRKMGLDPACQVDIICGDHLLEQYQTLREIRRAIGDAAMQDGLLVLHYGLVVSPLKIT

SEQ ID NO: 223102 - DNA, 828 bp, Artificial Sequence
  derived and/or modified sequence
atggaaggagtcgctgtcgtgactgccggctcagttggagctgcgaaaacagagggcgccgcggctttaccccccccgcctccagtgtctcccccggccctgacaccagcccccgcagccggggaagaggggccggcccctttgagtgagaccggtgctccaggatgttctggcagtcggcctcccgagctggagcccgagcggtcgctgggtaggtttcggggccgatttgaggatgaagatgaggaactcgaggaggaggaagaactcgaagaggaggaagaagaagaggaggaggacatgagccacttcagcctccggctggaaggtgggagacaagactccgaagatgaggaggaacggcttattaatttgagcgaactgacgccatatattttatgttccatctgtaagggctacctcattgacgctaccacaattacagagtgtcttcacacattttgcaaatcttgcattgtgaggcacttttattactccaaccgatgtcctaaatgtaatatcgtggttcaccagacacagcctttatataatatttccgccaacgagggaacgggccactttaagccgttagagaagaagtttgtaagggtctcaggggaggcgaccatcggtcatgtcgaaaagtttttgagaagaaaaatggggcttgatccagcctgtcaggtagacatcatatgtggcgaccacctgctggagcagtatcaaaccttgcgggagatccgaagagctatcggcgacgctgccatgcaggacggcttattggttcttcactatgggctggttgtctcgcccctcaagattacatag

SEQ ID NO: 223103 - DNA, 828 bp, Artificial Sequence
  derived and/or modified sequence
atggagggcgtggccgtggtgacagctggctctgtgggcgccgccaagacagaaggagctgctgccctgcccccacctcctcctgtgtccccaccagccctgaccccagccccagctgctggggaggagggccctgcccccctgtctgaaacaggagcccctggctgcagcggcagcaggcctcctgagctggagcctgagaggagcctgggccgcttccggggccgctttgaagatgaagatgaggagctggaggaggaggaggagctggaggaggaggaggaggaggaggaggaggacatgagccacttcagcctgcggctggagggcggccggcaggacagtgaagatgaggaggagcggctcatcaacctgtctgagctgaccccctacatcctgtgcagcatctgcaagggctacctgattgatgccaccaccatcacagaatgtctgcacaccttctgcaagagctgcatcgtgcgccacttctactacagcaaccgctgccccaagtgcaacatcgtggtgcaccagacccagcccctgtacaacatcagcgccaatgaaggaacaggccacttcaagcccctggagaagaagtttgtgcgggtgtctggagaggccaccatcggccacgtggagaagttcctgcggaggaagatgggcctggaccctgcctgccaggtggacatcatctgtggggaccacctgctggagcagtaccagaccctgcgggagatccggcgggccatcggagatgctgccatgcaggacggcctgctggtgctgcactacggcctggtggtgagccccctgaagatcacctag

SEQ ID NO: 223104 - DNA, 828 bp, Artificial Sequence
  derived and/or modified sequence
atggagggcgtggccgtggtgaccgccggcagcgtgggcgccgccaaaactgaaggcgccgcagccctccctcctccaccaccggtatcacctcctgccctgaccccagcgcctgcggccggtgaagagggtccagccccactgtctgaaaccggcgcgcccgggtgttccggatctcgaccgccagagctggaaccagaacgcagcctcggacggttccgcggtagatttgaagacgaggacgaggaattggaggaagaggaggaactcgaagaggaagaggaggaggaggaggaggatatgtcccacttctctctccgactagaggggggtaggcaagattctgaggacgaagaggaaaggctcattaacctatctgagcttacaccctacatcttgtgcagtatatgcaaaggctacctgatagatgccaccaccatcacagagtgcctgcacacattttgtaaaagttgtatcgtaaggcacttttactactcaaaccgctgtccaaaatgtaacattgtggtgcatcagacccagcctctgtacaacatcagcgcgaatgagggcaccggtcacttcaagcctttggaaaagaagtttgtgcgggtcagcggagaagcaactatcggccacgttgaaaaatttttgcgcaggaagatgggactggaccctgcttgccaagtcgatatcatctgtggtgaccatctgctggaacagtaccagaccctgagggagattcggcgggcaatcggcgatgctgctatgcaggacggacttctggtgctgcactatgggctggtcgtgtccccactgaagatcacctag

SEQ ID NO: 223105 - DNA, 1950 bp, Artificial Sequence
  derived and/or modified sequence
gtctctcccgaccatggagggggtcgcggtggtgacggcgggcagcgtaggcgctgccaaaaccgagggagctgcagccttgccgcctccgcctcctgtctccccgcccgccctcacccctgcacccgcagcgggtgaggagggaccggcgcctctgtctgagacgggggctcccggctgctccggctcccggccccctgagctggagccggagcgcagcctgggccgcttcagaggccgcttcgaggacgaggacgaggagttggaagaagaagaggagctggaggaggaagaagaggaggaggaggaggacatgagtcacttctcgttgaggctggagggaggccggcaggactcggaggacgaggaggagcgcctgattaatctctctgagctgaccccatacatcttgtgttccatttgcaaaggttacttaatagatgcaactaccatcacagaatgtcttcataccttttgtaaaagctgcatcgtaagacatttttactacagcaacagatgtccaaaatgcaatatagtagtacatcagacacaacctctttataacataagtgctaatgaaggcacgggacattttaagccattggaaaagaagtttgttcgagtttcaggagaagcaactattggacatgtagaaaaattcctcagaagaaaaatgggtcttgatccagcttgtcaggtagatataatctgtggtgatcacctgttggagcagtatcaaactctaagggaaatccgacgtgcaataggtgatgcagcaatgcaggatggtctgcttgtccttcattatggtcttgtggtttctcctctgaagataacttgaagattctaggcacattatgaggagggaaacaaaggaggcttctgcaggactgcatctcaccaaagatttccatgaaatgtaattgctaccactttgctgttcaagacataacttacctatttttagcaccaagaattatagcgtttataagtacaacttggaacgatggaatgcatctgttactagagactgtatataaaaagcagccaaagctcaggggaaatttttcaaaaattgaattttaaaatttcttatgattttaaataccttgacattgattttgcttcccatctttgaagtaattggttagttttctttgttcagccatttcaagttggtggttgggatatctgctctctgggatggcatcagttgggcagtcatctttttggaagagaagtgtgcttttgagtggaagattcaaagccagtctttgttaaactgcagggtgtactctcaaagaccaaaactattggccacttttgtatgttgccagcatattttgaacttgtacctttttttatactagcaacactacaaaggagaagttactcatttcaaaatggatgaattgttattatgtgtgaagagactctgagtttatgatctgtgccataaaatttcagtgtaataagacttcttcaatacatcttccaataaggggtgcttctttgtgacagtatttttatttctgacattcattttatttgggtacatagtgtggttgttgataccttgcaatagtattgcttctgaaagtaataaaaaattttaggagaatttgagaagtttacagaattacttattcattgttttcttagtaagtcagtttaatgtttatttttctcattatttcatcactgcaataaagaataagggtgtttgagctcacctccatgcaaagacttcagttttaaaacattatttgcctaaaattagcattgtgatgctttctgaaagaaatattttataaatcctgtttaacagcagaatttctgaatgtgtagagactactacaaaattggaaaaagattggcaattctttgtaaagaatttgtgaattgtgtataaatttattctaacatttaataaaaatgtattttaaccta

SEQ ID NO: 223106 - DNA, 828 bp, Artificial Sequence
  derived and/or modified sequence
atggagggcgtcgctgtagttacagccggatcggtgggtgccgctaagactgagggcgctgctgccctgccgcctccccctcctgtttcaccaccggctctcacaccagccccagccgcaggggaagaggggccagcaccactttccgagaccggagctcccggatgctcgggttcgcggccaccagaacttgagcctgaaaggtcccttgggagatttcggggaaggttcgaggatgaagatgaggaactggaggaagaagaggaactggaggaggaagaagaagaggaggaagaggacatgtcgcacttctcactgaggttggaaggcggacggcaggactccgaagatgaagaagagcggctgatcaacctgagtgaactgacaccatacattctgtgttcaatctgtaaaggctacctcattgacgcaacaaccataacagaatgcctccacaccttttgcaagtcctgtatcgttaggcatttctattactccaatcgctgtcccaagtgtaacatagtggtgcaccagacacagcccctgtataacatctccgccaacgaaggaacgggacatttcaagcctttggaaaagaaattcgttcgtgtctctggagaagcgactatagggcatgtcgagaagttcctccggagaaaaatgggactggaccctgcatgccaggtcgacatcatctgcggcgatcacctgctggagcagtatcagacgctccgagagatccggagggcgatcggggacgctgctatgcaggacggactgctggtattgcactacggtttggtggtctcgcccctgaagattacgtag

SEQ ID NO: 223107 - DNA, 828 bp, Artificial Sequence
  derived and/or modified sequence
atggagggcgtggccgtggtgaccgccggcagcgtgggcgccgccaagaccgagggcgccgccgccctgcccccccccccccccgtgagcccccccgccctgacccccgcccccgccgccggcgaggagggccccgcccccctgagcgagaccggcgcccccggctgcagcggcagcagaccccccgagctggagcccgagagaagcctgggcagattcagaggcagattcgaggacgaggacgaggagctggaggaggaggaggagctggaggaggaggaggaggaggaggaggaggacatgagccacttcagcctgagactggagggcggcagacaggacagcgaggacgaggaggagagactgatcaacctgagcgagctgaccccctacatcctgtgcagcatctgcaagggctacctgatcgacgccaccaccatcaccgagtgcctgcacaccttctgcaagagctgcatcgtgagacacttctactacagcaacagatgccccaagtgcaacatcgtggtgcaccagacccagcccctgtacaacatcagcgccaacgagggcaccggccacttcaagcccctggagaagaagttcgtgagagtgagcggcgaggccaccatcggccacgtggagaagttcctgagaagaaagatgggcctggaccccgcctgccaggtggacatcatctgcggcgaccacctgctggagcagtaccagaccctgagagagatcagaagagccatcggcgacgccgccatgcaggacggcctgctggtgctgcactacggcctggtggtgagccccctgaagatcacctag

SEQ ID NO: 223108 - protein, 960 aa, Artificial Sequence
  derived and/or modified sequence
MEVQVSQASLGFELTSVEKSLREWSRLSREVIAWLCPSSPNFILNFPPPPSASSVSMVQLFSSPFGYQSPSGHSEEEREGNMKSAKPQVNHSQHGESQRALSPLQSTLSSAASPSQAYETYIENGLICLKHKIRNIEKKKLKLEDYKDRLKSGEHLNPDQLEAVEKYEEVLHNLEFAKELQKTFSGLSLDLLKAQKKAQRREHMLKLEAEKKKLRTILQVQYVLQNLTQEHVQKDFKGGLNGAVYLPSKELDYLIKFSKLTCPERNESLSVEDQMEQSSLYFWDLLEGSEKAVVGTTYKHLKDLLSKLLNSGYFESIPVPKNAKEKEVPLEEEMLIQSEKKTQLSKTESVKESESLMEFAQPEIQPQEFLNRRYMTEVDYSNKQGEEQPWEADYARKPNLPKRWDMLTEPDGQEKKQESFKSWEASGKHQEVSKPAVSLEQRKQDTSKLRSTLPEEQKKQEISKSKPSPSQWKQDTPKSKAGYVQEEQKKQETPKLWPVQLQKEQDPKKQTPKSWTPSMQSEQNTTKSWTTPMCEEQDSKQPETPKSWENNVESQKHSLTSQSQISPKSWGVATASLIPNDQLLPRKLNTEPKDVPKPVHQPVGSSSTLPKDPVLRKEKLQDLMTQIQGTCNFMQESVLDFDKPSSAIPTSQPPSATPGSPVASKEQNLSSQSDFLQEPLQATSSPVTCSSNACLVTTDQASSGSETEFMTSETPEAAIPPGKQPSSLASPNPPMAKGSEQGFQSPPASSSSVTINTAPFQAMQTVFNVNAPLPPRKEQEIKESPYSPGYNQSFTTASTQTPPQCQLPSIHVEQTVHSQETANYHPDGTIQVSNGSLAFYPAQTNVFPRPTQPFVNSRGSVRGCTRGGRLITNSYRSPGGYKGFDTYRGLPSISNGNYSQLQFQAREYSGAPYSQRDNFQQCYKRGGTSGGPRANSRANCFIMRNSLLLIKQQGGVILLR

SEQ ID NO: 223109 - DNA, 2883 bp, Artificial Sequence
  derived and/or modified sequence
atggaggtgcaggtgagccaggccagcctgggcttcgagctgaccagcgtggagaagagcctgagagagtggagcagactgagcagagaggtgatcgcctggctgtgccccagcagccccaacttcatcctgaacttcccccccccccccagcgccagcagcgtgagcatggtgcagctgttcagcagccccttcggctaccagagccccagcggccacagcgaggaggagagagagggcaacatgaagagcgccaagccccaggtgaaccacagccagcacggcgagagccagagagccctgagccccctgcagagcaccctgagcagcgccgccagccccagccaggcctacgagacctacatcgagaacggcctgatctgcctgaagcacaagatcagaaacatcgagaagaagaagctgaagctggaggactacaaggacagactgaagagcggcgagcacctgaaccccgaccagctggaggccgtggagaagtacgaggaggtgctgcacaacctggagttcgccaaggagctgcagaagaccttcagcggcctgagcctggacctgctgaaggcccagaagaaggcccagagaagagagcacatgctgaagctggaggccgagaagaagaagctgagaaccatcctgcaggtgcagtacgtgctgcagaacctgacccaggagcacgtgcagaaggacttcaagggcggcctgaacggcgccgtgtacctgcccagcaaggagctggactacctgatcaagttcagcaagctgacctgccccgagagaaacgagagcctgagcgtggaggaccagatggagcagagcagcctgtacttctgggacctgctggagggcagcgagaaggccgtggtgggcaccacctacaagcacctgaaggacctgctgagcaagctgctgaacagcggctacttcgagagcatccccgtgcccaagaacgccaaggagaaggaggtgcccctggaggaggagatgctgatccagagcgagaagaagacccagctgagcaagaccgagagcgtgaaggagagcgagagcctgatggagttcgcccagcccgagatccagccccaggagttcctgaacagaagatacatgaccgaggtggactacagcaacaagcagggcgaggagcagccctgggaggccgactacgccagaaagcccaacctgcccaagagatgggacatgctgaccgagcccgacggccaggagaagaagcaggagagcttcaagagctgggaggccagcggcaagcaccaggaggtgagcaagcccgccgtgagcctggagcagagaaagcaggacaccagcaagctgagaagcaccctgcccgaggagcagaagaagcaggagatcagcaagagcaagcccagccccagccagtggaagcaggacacccccaagagcaaggccggctacgtgcaggaggagcagaagaagcaggagacccccaagctgtggcccgtgcagctgcagaaggagcaggaccccaagaagcagacccccaagagctggacccccagcatgcagagcgagcagaacaccaccaagagctggaccacccccatgtgcgaggagcaggacagcaagcagcccgagacccccaagagctgggagaacaacgtggagagccagaagcacagcctgaccagccagagccagatcagccccaagagctggggcgtggccaccgccagcctgatccccaacgaccagctgctgcccagaaagctgaacaccgagcccaaggacgtgcccaagcccgtgcaccagcccgtgggcagcagcagcaccctgcccaaggaccccgtgctgagaaaggagaagctgcaggacctgatgacccagatccagggcacctgcaacttcatgcaggagagcgtgctggacttcgacaagcccagcagcgccatccccaccagccagccccccagcgccacccccggcagccccgtggccagcaaggagcagaacctgagcagccagagcgacttcctgcaggagcccctgcaggccaccagcagccccgtgacctgcagcagcaacgcctgcctggtgaccaccgaccaggccagcagcggcagcgagaccgagttcatgaccagcgagacccccgaggccgccatcccccccggcaagcagcccagcagcctggccagccccaacccccccatggccaagggcagcgagcagggcttccagagcccccccgccagcagcagcagcgtgaccatcaacaccgcccccttccaggccatgcagaccgtgttcaacgtgaacgcccccctgccccccagaaaggagcaggagatcaaggagagcccctacagccccggctacaaccagagcttcaccaccgccagcacccagacccccccccagtgccagctgcccagcatccacgtggagcagaccgtgcacagccaggagaccgccaactaccaccccgacggcaccatccaggtgagcaacggcagcctggccttctaccccgcccagaccaacgtgttccccagacccacccagcccttcgtgaacagcagaggcagcgtgagaggctgcaccagaggcggcagactgatcaccaacagctacagaagccccggcggctacaagggcttcgacacctacagaggcctgcccagcatcagcaacggcaactacagccagctgcagttccaggccagagagtacagcggcgccccctacagccagagagacaacttccagcagtgctacaagagaggcggcaccagcggcggccccagagccaacagcagagccaactgcttcatcatgagaaacagcctgctgctgatcaagcagcagggcggcgtgatcctgctgagatag

SEQ ID NO: 223110 - DNA, 2883 bp, Artificial Sequence
  derived and/or modified sequence
atggaggtacaggtgagtcaggccagccttggctttgagctcacctcagtcgaaaagtctctccgagaatggtcacggctgtctagggaagtcattgcatggctatgtcctagcagtcctaatttcatcttgaacttccccccccctccatctgcaagcagcgtttcgatggtgcagctgttttctagtcccttcggttaccagtcacccagcgggcattcagaggaggagagagaaggcaacatgaagtccgccaagccacaggtaaaccattcacagcatggcgaaagccagcgggctttaagcccactgcaaagcactctgagcagtgctgcaagcccatcccaggcttacgagacatatattgaaaatggcctgatatgtctgaagcataagattcggaacattgagaaaaagaaactgaagctggaggattacaaggaccggttgaaaagcggggagcatctgaacccggatcaactagaagctgtggaaaaatacgaagaagtacttcacaacttagagtttgcgaaagaactgcaaaagaccttcagcggcctgtcattagatctccttaaggcccaaaagaaagcccagcggagagaacacatgttgaaactcgaagcagagaagaagaaactgaggactatcctacaagtgcagtatgttttacagaacctgacccaggagcacgtacagaaggacttcaagggcgggctgaacggggcggtgtacctgccttctaaggagctggactacctgataaaattttctaagcttacgtgtcccgagaggaatgaatctctctctgtggaggatcagatggagcagtcctccctttatttctgggatctcctggaaggaagtgaaaaggctgtggttgggacgacatacaagcacctcaaagacttacttagtaagctactgaattccggttacttcgagtctatccctgtccccaaaaacgccaaagagaaagaggtcccgctcgaggaagagatgctcatacaatctgagaaaaagactcagttaagcaagaccgagagcgtgaaagagtccgaaagccttatggagttcgcacaaccagaaattcaaccacaagagttcctgaaccggcgatacatgaccgaagttgactatagtaacaagcagggggaggagcaaccgtgggaagccgattatgccaggaagcctaacctgcctaaaaggtgggacatgctcaccgaacctgatgggcaggagaagaagcaggaatcttttaagagctgggaggcatcaggaaaacatcaggaggtcagcaagcctgcggtttcgctagaacagagaaagcaggacacgtccaaactgcgttctaccctgcccgaggagcagaagaaacaggaaattagcaaatcaaaaccttcaccgagtcaatggaaacaagacacccccaaatctaaagcaggctacgtccaagaagagcagaagaagcaggagacccctaaactctggcctgtgcagttacaaaaggaacaggatcccaagaagcagacacctaagagctggactcctagtatgcagtctgaacagaacactacgaagtcctggacaacccctatgtgcgaagagcaggacagtaaacagcctgaaacacccaagtcatgggagaacaatgtcgaatctcagaaacactcgctgaccagccagtctcagatcagtcccaaaagttggggtgttgctaccgctagcctgatccctaatgatcaactactgccacgcaaactgaacacagaacctaaagacgtacccaagcctgttcatcagccagtggggtcatcgtccacactgcctaaggatccagtactccggaaagagaagttgcaggatctcatgacccagatccagggaacttgtaactttatgcaagagtccgtgctggactttgacaaacctagttccgccatccctactagtcaacccccaagcgcgactcccggaagtcccgtggcgagtaaggagcaaaacttgagcagccaatctgattttctgcaggaaccactgcaggcgacctcgagtccagtgacatgttcttccaacgcttgcctggtgacaacagatcaggcttccagcggctctgaaaccgaatttatgacaagtgagacccccgaggccgcaattccccctgggaaacagcctagttcccttgccagccccaaccccccaatggccaaggggtccgagcagggctttcaaagtccacccgcatcttcctccagcgtcacaatcaacactgcccccttccaagcaatgcagaccgtgttcaacgtgaatgccccgctgcccccccggaaggagcaggagattaaggagagcccctatagcccgggttataaccagtcctttaccacagcctcgactcaaacaccaccccagtgccagctcccgtctattcatgtggagcagacagtgcactcccaagagactgccaattaccaccccgatggcacaatccaggtttccaacggatccctggctttttacccagcacaaactaatgtgttcccaaggcctactcagccctttgttaactctcggggctcagtccggggatgtacaagaggagggagactcatcacaaactcctaccgcagcccaggagggtacaaaggctttgacacttaccggggactgccttctatctccaacgggaactactctcagcttcagttccaagcccgtgagtattctggcgccccgtactcccagcgtgacaacttccagcagtgctacaaaagaggtggtacatctgggggcccgagagcaaattccagggctaactgttttattatgcgcaatagcctgctgctcattaagcagcaggggggagtcattttgttgaggtag

SEQ ID NO: 223111 - DNA, 2883 bp, Artificial Sequence
  derived and/or modified sequence
atggaggtgcaggtgtcccaggccagcctgggctttgagctgacctctgtggagaagagcctgcgggagtggagccggctgagccgggaggtgattgcctggctgtgccccagcagccccaacttcatcctgaacttccccccacctccttctgccagctctgtgtccatggtgcagctgttcagcagccccttcggctaccagagccccagcggccacagcgaggaggagcgggagggcaacatgaagagcgccaagccccaggtgaaccacagccagcacggggagagccagagggccctgagccccctgcagagcaccctgagcagcgctgccagccccagccaggcctatgagacctacattgaaaatggcctcatctgcctgaagcacaagatccggaacatcgagaagaagaagctgaagctggaggactacaaggaccggctgaagagcggggagcacctgaacccagaccagctggaggccgtggagaagtatgaggaggtgctgcacaacctggagtttgccaaggagctgcagaagaccttcagcggcctgagcctggacctgctgaaggcccagaagaaggcccagaggcgggagcacatgctgaagctggaggccgagaagaagaagctgcggaccatcctgcaggtgcagtatgtgctgcagaacctgacccaggagcacgtgcagaaggacttcaagggcggcctgaatggagctgtgtacctgcccagcaaggagctggactacctgatcaagttcagcaagctgacctgcccagagagaaatgaaagcctgtctgtggaggaccagatggagcagagcagcctgtacttctgggacctgctggagggcagcgagaaggctgtggtgggcaccacctacaagcacctgaaggacctgctgagcaagctgctgaacagcggctactttgagagcatccctgtgcccaagaatgccaaggagaaggaggtgcccctggaggaggagatgctgatccagagcgagaagaagacccagctgagcaagacagaatctgtgaaggagagcgagagcctgatggagtttgcccagcctgagatccagccccaggagttcctgaacagacgctacatgacagaggtggactacagcaacaagcagggcgaggagcagccctgggaggccgactatgccaggaagcccaacctgcccaagcgctgggacatgctgacagagccagatggccaggagaagaagcaggagagcttcaagtcctgggaggccagcggcaagcaccaggaggtgtccaagccagctgtgtccctggagcagaggaagcaggacaccagcaagctgcggagcaccctgcctgaggagcagaagaagcaggagatcagcaagagcaagcccagccccagccagtggaagcaggacacccccaagagcaaggccggctacgtgcaggaggagcagaagaagcaggagacccccaagctgtggcctgtgcagctgcagaaggagcaggaccccaagaagcagacccccaagtcctggacccccagcatgcagagcgagcagaacaccaccaagtcctggaccacccccatgtgtgaggagcaggacagcaagcagcctgagacccccaagtcctgggagaacaacgtggagagccagaagcacagcctgaccagccagagccagatcagccccaagtcctggggcgtggccacagccagcctcatccccaatgaccagctgctgcccaggaagctgaacacagagcccaaggatgtgcccaagcctgtgcaccagcctgtgggcagcagcagcaccctgcccaaggaccctgtgctgaggaaggagaagctgcaggacctgatgacccagatccagggcacctgcaacttcatgcaggagagcgtgctggactttgacaagcccagcagcgccatccccaccagccagcccccatctgccaccccaggcagccctgtggccagcaaggagcagaacctgagcagccagagcgacttcctgcaggagcccctgcaggccaccagcagccctgtgacctgcagcagcaatgcctgcctggtgaccacagaccaggccagcagcggcagcgagacagagttcatgaccagcgagaccccagaggccgccatccccccaggcaagcagcccagcagcctggccagccccaacccccccatggccaagggcagcgagcagggcttccagagccccccagccagcagcagctctgtgaccatcaacacagcccccttccaggccatgcagacagtgttcaacgtgaatgcccccctgccccccaggaaggagcaggagatcaaggagagcccctacagccctggctacaaccagagcttcaccacagccagcacccagaccccaccccagtgccagctgcccagcatccacgtggagcagacagtgcacagccaggagacagccaactaccacccagatggcaccatccaggtgtccaatggcagcctggccttctacccagcccagaccaacgtgttcccccggcccacccagccctttgtgaacagccggggctctgtgcggggctgcacccggggcggccgcctcatcaccaacagctaccgcagccctgggggctacaagggctttgacacctaccggggcctgcccagcatcagcaatggaaactacagccagctgcagttccaggcccgggagtacagcggggccccctacagccagagggacaacttccagcagtgctacaagaggggcggcaccagcggcggcccccgggccaacagccgggccaactgcttcatcatgaggaacagcctgctgctgatcaagcagcagggcggcgtcatcctgctgaggtag

SEQ ID NO: 223112 - DNA, 2883 bp, Artificial Sequence
  derived and/or modified sequence
atggaggtgcaggtgagccaggccagcctgggcttcgagctgacctctgtagagaaaagtctccgtgagtggagtcgtctgtcccgggaagtgattgcgtggttatgcccttcctctcctaacttcatcctgaactttccccccccaccatcggcgagcagcgtgagtatggtccagcttttttcctccccatttgggtaccagtcaccatcgggccactccgaggaagagagagagggcaatatgaagtcagctaagccacaggtgaatcattctcagcatggcgagtctcagagggcactttcgccacttcagtccactctctcctctgccgcctctcccagtcaggcttacgagacttatatcgagaatgggcttatctgtttgaagcataagatccggaatatagagaagaaaaaacttaaacttgaggactacaaagatcgcctgaagtccggggagcatctgaatccagatcagctggaagccgttgaaaagtatgaagaggtcttgcataacctggagtttgccaaggaattgcaaaagacatttagcggcctttccctcgatctgctaaaagcccagaaaaaggcccaaagacgggagcacatgctcaagctggaggctgagaagaaaaaactgcggacaatattacaagtgcagtacgtgctgcagaacctcacccaggaacatgtacagaaggatttcaaggggggcctgaatggagcggtgtacttgccatcgaaggaactggattatctcattaagttttccaagctcacctgtccagagagaaacgaatcactgtcagtggaagaccagatggaacagagcagtctatatttttgggatctgcttgaaggatccgagaaggccgtggtgggcaccacttacaagcatttgaaagatttgctgtctaaactgttaaattcaggatactttgagagtattcccgttcctaagaatgcaaaagagaaagaagtgccgctggaagaggagatgctgattcaatcagagaagaaaactcagctgtcaaagactgagagtgtcaaagaatcagaatcccttatggaattcgcgcagcccgagatacagcctcaggagttcctcaaccgacgctatatgaccgaagtggattactctaataaacagggagaggagcagccatgggaggccgactacgcccgcaagcctaacttgcctaagcggtgggacatgctcacggagccagacgggcaggagaaaaagcaagaatctttcaagtcctgggaagctagcgggaagcaccaggaggtctctaagccagctgtgtcactcgagcaacgaaagcaagacacatccaaattacgctctacattgcctgaggaacagaagaaacaagagatctcgaagagtaaacccagtccttcacagtggaagcaggatactccgaaaagcaaggccggctacgtccaagaagaacaaaagaagcaggagacaccaaagttgtggccagttcaactccagaaggagcaggatcccaaaaaacaaactcccaagagctggacacctagcatgcagtcggaacaaaacactaccaaatcttggaccaccccaatgtgcgaggagcaagacagcaagcaacctgagacacccaagtcctgggaaaataacgtggagagccagaagcactctttgaccagccagtcccagatttctcctaaaagttggggggttgcgaccgcatcattgatcccgaacgatcagttgttacctcggaaactgaatacagaacctaaggatgtgcccaagcccgtgcaccagcctgtcggatcaagttcgactctgcctaaagacccagtgttgcgtaaagagaagctgcaggatctgatgacacagatccaggggacctgcaactttatgcaggaatccgttctcgacttcgacaagccatcctcagcgatccctacatcacagcctccctccgcgacacccgggtcccccgtggcctctaaggagcagaacctgtccagtcagagcgactttctgcaggagccattgcaggctacaagcagtccggtgacgtgcagctctaacgcatgcttagtcaccacagaccaggccagctcggggagtgagactgagttcatgacttccgagactcctgaagcggccattccccctggaaagcaaccatcctcactggcctctcccaacccccctatggctaagggatccgagcagggctttcagtctcctcctgcaagctcatctagtgtcacaatcaacacagctcccttccaggccatgcaaacggttttcaacgtgaacgccccactgccccccaggaaggaacaggagatcaaagaatccccttatagtcctggctacaaccagtcgtttacaaccgcctccactcagaccccaccccagtgtcagctgccttccattcacgttgaacagacagtgcactctcaggagaccgcaaactaccatcctgacggtaccatccaggtgagcaacggaagtctcgcgttttaccctgcccagactaatgtcttccctagacctacacagccttttgttaactcgaggggctctgtccgtggatgtaccaggggcgggcgattaattaccaatagctatcgaagccctggtggctacaaaggattcgatacttatcgcggactgccttcaatcagcaacggcaactactcccagctccagtttcaggccagggagtatagcggggccccctattctcaacgcgataacttccagcagtgctacaaacgcggcggcacttcgggcggcccaagggcgaactcccgcgccaattgctttatcatgcgcaacagcctcctgcttattaagcaacagggcggcgtgattctgctccgctag

SEQ ID NO: 223113 - DNA, 3535 bp, Artificial Sequence
  derived and/or modified sequence
tagggcacgggaagggctcgctagaatgagctcttaaactggttgggtgtaagcggttttgggctagtctaaaccaaacaactgagaataaacgcggggttcctgcaggttgagagagtacctgtctgcaaatgtccagtagtgatggattgccttgtaggccccagagcaatcggggaagttagcattcttgttcaagaagctgctggttcacttagagctataaaagaatgttgtgagtttggattttcttccaaacgttcaggattgaggttagggctggtggtgagggatcatgtaaagaggtttgagtggctcagccttaggtcccggtgtggaaagcttattcttttggtgtcatcacgtggccgtgggaattatttagaatgtgatctgccctcatgagaagaaaggagctctgaagccgttgcagttcttcctccctatgtggaaaatcgaatttctggaaacatcctccgtattgggagattttgcctatgtaaaggctatccttattggctagcggcactaattactttaaaagtaggatggaagtacaagtatctcaagcatcattgggtttcgagctcacttctgtggaaaagagtttaagggagtggtctagactttccagggaagttattgcctggctgtgtccctctagtcctaattttatacttaactttcccccacctccttcagcctcatctgtttcaatggtgcaactcttttcatccccttttggttaccagtcaccttcaggccattcagaggaggaaagagaggggaatatgaagtcagccaagccccaagtgaaccacagtcagcatggggaaagccagcgggccttgagccccctgcagtctactctgagttctgctgcatctccttcccaagcgtatgagacctatattgaaaatggactcatatgccttaaacacaaaattagaaacatcgagaaaaagaagctcaaactggaggattataaggatcgcctgaaaagtggagagcatcttaatccagaccagttggaagctgtagagaaatatgaagaagtgctacataatttggaatttgccaaggagcttcaaaaaaccttttctgggttgagcctagatctactaaaagcgcaaaagaaggcccagagaagggagcacatgctaaaacttgaggctgagaagaaaaagcttcgaactatacttcaagttcagtatgtattgcagaacttgacacaggagcacgtacaaaaagacttcaaagggggtttgaatggtgcagtgtatttgccttcaaaagaacttgactacctcattaagttttcaaaactgacctgccctgaaagaaatgaaagtctgagtgttgaagaccagatggagcagtcatccttgtacttttgggaccttttggaaggtagtgagaaagcagtggtaggaacgacatacaaacacttgaaggatctactgtctaaattgctgaactcaggctattttgaaagtatcccagttcccaaaaatgccaaggaaaaggaagtaccactggaggaagaaatgctaatacaatcagagaaaaaaacacaattatcgaagactgaatctgtcaaagagtcagagtctctaatggaatttgcccagccagagatacaaccacaagagtttcttaacagacgctatatgacagaagtagattattcaaacaaacaaggcgaagagcaaccttgggaagcagattatgctagaaaaccaaatctcccaaaacgttgggatatgcttactgaaccagatggtcaagagaagaaacaggagtcctttaagtcctgggaggcttctggtaagcaccaggaggtatccaagcctgcagtttccttagaacagaggaaacaagacacctcaaaactcaggtctactctgccggaagagcagaagaagcaggagatctccaaatccaagccatctcctagccagtggaagcaagatacacctaaatccaaagcagggtatgttcaagaggaacaaaagaaacaggagacaccaaagctgtggccagttcagctgcagaaagaacaagatccaaagaagcaaactccaaagtcttggacaccttccatgcagagcgaacagaacaccaccaagtcatggaccactcccatgtgtgaagaacaggattcaaaacagccagagactccaaaatcctgggaaaacaatgttgagagtcaaaaacactctttaacatcacagtcacagatttctccaaagtcctggggagtagctacagcaagcctcataccaaatgaccagctgctgcccaggaagttgaacacagaacccaaagatgtgcctaagcctgtgcatcagcctgtaggttcttcctctacccttccgaaggatccagtattgaggaaagaaaaactgcaggatctgatgactcagattcaaggaacttgtaactttatgcaagagtctgttcttgactttgacaaaccttcaagtgcaattccaacgtcacaaccgccttcagctactccaggtagccccgtagcatctaaagaacaaaatctgtccagtcaaagtgattttcttcaagagccgttacaggctacttcttctccagttacttgtagctcaaatgcttgcttggttactaccgatcaggcttcttctggatctgaaacagagtttatgacctcagagactcctgaggcagcaattcccccaggcaagcaaccgtcttcactagcttctccaaatcctcccatggcaaagggctctgaacagggcttccagtcacctccagcaagtagtagttcagtaaccattaacacagcaccctttcaagccatgcagacagtatttaacgttaatgcacctctgcctccacgaaaagaacaagaaataaaagaatccccttattcacctggctacaatcaaagttttaccacagcaagtacacaaacaccaccccagtgccaactgccatctatacatgtagaacaaactgtccattctcaagagactgcaaattatcatcctgatggaactattcaagtaagcaatggtagccttgccttttacccagcacagacgaatgtgtttcccagacctactcagccatttgtcaatagccggggatctgttagaggatgtactcgtggtgggagattaataaccaattcctatcggtcccctggtggttataaaggttttgatacttatagaggactcccttcaatttccaatggaaattatagccagctgcagttccaagctagagagtattctggagcaccttattcccaaagggataatttccagcagtgttataagcgaggagggacatctggtggtccacgagcaaattcgagagctaactgcttcattatgagaaactcactgttgctaataaaacagcagggtggagtgattcttctcaggtgagcagcccagaaagagacaacgaaacctttaacagtggtgactctggacaaggagactcccgtagcatgacccctgtggatgtgccagtgacaaatccagcagcc

SEQ ID NO: 223114 - DNA, 2883 bp, Artificial Sequence
  derived and/or modified sequence
atggaggtgcaagttagccaagccagccttgggtttgagctcacgtcagttgagaagtctctgcgagaatggagtcgcctgtcacgagaggtcatcgcgtggctgtgcccctcttctcctaatttcatattgaactttcctcctccgccatctgcctccagtgtgagtatggtccagttattcagctcgccctttgggtatcagagtccctcaggacattccgaagaagagcgggaggggaacatgaagagtgccaagcctcaggtgaaccatagccagcacggggaatcacaacgcgctctgagcccactgcagtccaccctgtcatcagccgcaagcccgagccaggcctacgagacctatatcgaaaacggtctgatctgcctcaagcacaagattcgtaacatagagaaaaaaaagctcaagctggaagactacaaggatcgcctaaagagtggcgaacatctgaatcccgatcagttagaagccgtggagaagtacgaggaggtgctccacaatctcgagttcgcaaaggagttacagaaaaccttcagtggactttcactcgatctcttgaaggcgcagaaaaaagctcagcgacgggagcatatgctgaagttggaggcggagaagaagaagttgagaactatccttcaggttcagtacgtgctgcagaatctgacacaagagcacgtgcagaaagacttcaagggcggtctgaacggagcagtttatctgcccagcaaagaacttgattatctcatcaagttttccaagctaacatgcccggagagaaacgagagtctgagcgtggaggaccagatggagcagagctcactgtacttctgggacctgctggaaggctccgagaaagcagtggtaggtaccacctacaaacacttgaaagatttactttccaaactgctcaatagcggatatttcgaatcgatcccggtgcctaagaacgccaaggagaaggaggtacctctggaggaggaaatgctgatccagtctgaaaagaagacccagttgtccaagaccgaaagcgtgaaagaaagtgagagcctaatggaattcgcccagcctgagatccaaccacaggaatttctgaatcgcaggtatatgaccgaagtggactacagtaataagcaaggagaggaacagccgtgggaggcagactacgctcgcaaaccgaatctcccaaaacggtgggacatgctcaccgagcctgacggccaagaaaaaaagcaagaaagctttaaatcatgggaggcgagcggaaaacatcaggaggtgtccaagcctgcggtctcattagagcagcggaagcaagatacaagtaaactgagaagcactctgccggaagaacagaagaagcaggagattagtaagtctaagccaagcccgtctcagtggaagcaagatactccaaagagtaaggccggttacgtacaggaggagcaaaagaagcaggaaacccccaaactttggccagtgcagctccaaaaagagcaggacccgaagaagcagactcctaagagctggacaccttctatgcaaagtgaacagaacactacaaagagctggactacgcccatgtgcgaggagcaggactccaaacagcctgaaactccgaagagttgggagaacaatgttgagagccagaagcacagtctgacttctcagagccaaatctcaccaaagtcatggggcgtcgcaacagccagcctgatcccaaatgatcaactcctgccacgcaaactgaatacggagccaaaagacgtcccaaagcccgtgcaccagccagtcggttccagttctactctgccgaaggaccctgtgctgagaaaggagaaacttcaggatttaatgacccagattcaaggcacttgcaatttcatgcaggaatccgtcctggattttgataagccctcatctgcaatccccacctctcaaccgccatccgcaacacctggctccccagttgcatcaaaagagcagaatttaagttcccaaagtgatttcctccaagaacctctgcaggctacttcatccccggtgacctgcagctcaaatgcttgcctggtaacaacggaccaagctagttcaggcagcgagacagaattcatgacttccgagacaccagaagccgctatccctccaggaaaacagccgagctctctagcctcccccaatccacccatggcaaaaggtagcgagcagggctttcagagccctcctgctagtagcagtagcgtgacgatcaacactgccccttttcaggcaatgcaaacggtgttcaacgtcaatgcgccactgccgcctcgaaaagagcaggaaataaaagaaagtccttattcccctggctataatcagtcctttaccacagcctccactcaaactcccccacagtgtcagcttccatccatccacgtggagcaaaccgtgcatagtcaggaaacagctaactatcatcccgacggtacgatccaggtgtcaaatgggagccttgcattttaccccgctcagactaacgtttttccacggccaacacagccgtttgtgaacagcaggggatccgtacgcggatgcacgagggggggtcgtttaatcaccaatagctaccggagtccaggaggttataagggctttgacacctatagaggcctacctagtatctccaacggaaattacagccagctgcagtttcaggctagagaatattctggggctccatattcccagagggacaatttccagcagtgttacaagaggggtggaaccagtgggggtccacgtgccaactcccgagccaattgtttcatcatgcgaaacagccttctgctgatcaagcagcaaggaggagtgatcttgcttcgttag

SEQ ID NO: 223115 - protein, 1222 aa, Artificial Sequence
  derived and/or modified sequence
MPKGGAPPWIMALMFTGHLLFLALLMFAFSTFEESVSNYSEWAVFTDDIDQFKTQKVQDFRPNQKLKKSMLHPSLYFDAGEIQAMRQKSRASHLHLFRAIRSAVTVMLSNPTYYLPPPKHADFAAKWNEIYGNNLPPLALYCLLCPEDKVAFEFVLEYMDRMVGYKDWLVENAPGDEVPIGHSLTGFATAFDFLYNLLDNHRRQKYLEKIWVITEEMYEYSKVRSWGKQLLHNHQATNMIALLTGALVTGVDKGSKANIWKQAVVDVMEKTMFLLNHIVDGSLDEGVAYGSYTAKSVTQYVFLAQRHFNINNLDNNWLKMHFWFYYATLLPGFQRTVGIADSNYNWFYGPESQLVFLDKFILKNGAGNWLAQQIRKHRPKDGPMVPSTAQRWSTLHTEYIWYDPQLTPQPPADYGTAKIHTFPNWGVVTYGAGLPNTQTNTFVSFKSGKLGGRAVYDIVHFQPYSWIDGWRSFNPGHEHPDQNSFTFAPNGQVFVSEALYGPKLSHLNNVLVFAPSPSSQCNKPWEGQLGECAQWLKWTGEEVGDAAGEIITASQHGEMVFVSGEAVSAYSSAMRLKSVYRALLLLNSQTLLVVDHIERQEDSPINSVSAFFHNLDIDFKYIPYKFMNRYNGAMMDVWDAHYKMFWFDHHGNSPMASIQEAEQAAEFKKRWTQFVNVTFQMEPTITRIAYVFYGPYINVSSCRFIDSSNPGLQISLNVNNTEHVVSIVTDYHNLKTRFNYLGFGGFASVADQGQITRFGLGTQAIVKPVRHDRIIFPFGFKFNIAVGLILCISLVILTFQWRFYLSFRKLMRWILILVIALWFIELLDVWSTCSQPICAKWTRTEAEGSKKSLSSEGHHMDLPDVVITSLPGSGAEILKQLFFNSSDFLYIRVPTAYIDIPETELEIDSFVDACEWKVSDIRSGHFRLLRGWLQSLVQDTKLHLQNIHLHEPNRGKLAQYFAMNKDKKRKFKRRESLPEQRSQMKGAFDRDAEYIRALRRHLVYYPSARPVLSLSSGSWTLKLHFFQEVLGASMRALYIVRDPRAWIYSMLYNSKPSLYSLKNVPEHLAKLFKIEGGKGKCNLNSGYAFEYEPLRKELSKSKSNAVSLLSHLWLANTAAALRINTDLLPTSYQLVKFEDIVHFPQKTTERIFAFLGIPLSPASLNQILFATSTNLFYLPYEGEISPTNTNVWKQNLPRDEIKLIENICWTLMDRLGYPKFMD

SEQ ID NO: 223116 - protein, 1212 aa, Artificial Sequence
  derived and/or modified sequence
MALMFTGHLLFLALLMFAFSTFEESVSNYSEWAVFTDDIDQFKTQKVQDFRPNQKLKKSMLHPSLYFDAGEIQAMRQKSRASHLHLFRAIRSAVTVMLSNPTYYLPPPKHADFAAKWNEIYGNNLPPLALYCLLCPEDKVAFEFVLEYMDRMVGYKDWLVENAPGDEVPIGHSLTGFATAFDFLYNLLDNHRRQKYLEKIWVITEEMYEYSKVRSWGKQLLHNHQATNMIALLTGALVTGVDKGSKANIWKQAVVDVMEKTMFLLNHIVDGSLDEGVAYGSYTAKSVTQYVFLAQRHFNINNLDNNWLKMHFWFYYATLLPGFQRTVGIADSNYNWFYGPESQLVFLDKFILKNGAGNWLAQQIRKHRPKDGPMVPSTAQRWSTLHTEYIWYDPQLTPQPPADYGTAKIHTFPNWGVVTYGAGLPNTQTNTFVSFKSGKLGGRAVYDIVHFQPYSWIDGWRSFNPGHEHPDQNSFTFAPNGQVFVSEALYGPKLSHLNNVLVFAPSPSSQCNKPWEGQLGECAQWLKWTGEEVGDAAGEIITASQHGEMVFVSGEAVSAYSSAMRLKSVYRALLLLNSQTLLVVDHIERQEDSPINSVSAFFHNLDIDFKYIPYKFMNRYNGAMMDVWDAHYKMFWFDHHGNSPMASIQEAEQAAEFKKRWTQFVNVTFQMEPTITRIAYVFYGPYINVSSCRFIDSSNPGLQISLNVNNTEHVVSIVTDYHNLKTRFNYLGFGGFASVADQGQITRFGLGTQAIVKPVRHDRIIFPFGFKFNIAVGLILCISLVILTFQWRFYLSFRKLMRWILILVIALWFIELLDVWSTCSQPICAKWTRTEAEGSKKSLSSEGHHMDLPDVVITSLPGSGAEILKQLFFNSSDFLYIRVPTAYIDIPETELEIDSFVDACEWKVSDIRSGHFRLLRGWLQSLVQDTKLHLQNIHLHEPNRGKLAQYFAMNKDKKRKFKRRESLPEQRSQMKGAFDRDAEYIRALRRHLVYYPSARPVLSLSSGSWTLKLHFFQEVLGASMRALYIVRDPRAWIYSMLYNSKPSLYSLKNVPEHLAKLFKIEGGKGKCNLNSGYAFEYEPLRKELSKSKSNAVSLLSHLWLANTAAALRINTDLLPTSYQLVKFEDIVHFPQKTTERIFAFLGIPLSPASLNQILFATSTNLFYLPYEGEISPTNTNVWKQNLPRDEIKLIENICWTLMDRLGYPKFMD

SEQ ID NO: 223117 - DNA, 3669 bp, Artificial Sequence
  derived and/or modified sequence
atgcctaaaggaggagcacccccatggatcatggcactgatgttcaccggccatctattgttcctggctctcttgatgtttgccttttccacttttgaggaatccgtgtctaattattcagaatgggccgttttcaccgatgatatcgaccagttcaagacccagaaagtacaagattttcggccaaaccagaagctgaagaagagcatgctgcacccttcattgtacttcgacgctggagagatccaggccatgagacagaaatcccgggcctcacatttgcacctgtttagagccatacggtcagctgttaccgtgatgctttccaatcctacttattaccttcccccacctaagcatgcagacttcgctgctaaatggaacgagatttacggtaacaatctccctccactcgcactgtattgtcttctttgcccagaggacaaggttgcttttgaatttgtgttggaatacatggaccgaatggtcggttataaggactggctagtggaaaacgctcccggtgatgaggttccaatcggtcactcactcacaggatttgccaccgcattcgatttcctttataatctactggacaatcatcgccgccagaaatatttggagaagatttgggttattacagaggagatgtatgaatacagtaaagttaggtcatggggtaaacagcttctgcataaccatcaggccactaatatgattgccctgttaactggggcacttgtgaccggcgtggataagggctccaaggcaaatatctggaagcaggcagtggtcgacgtgatggagaaaactatgtttttattgaaccacatagtggacggatccctagacgaaggcgttgcttacgggtcatataccgcgaagtccgtcacacagtacgtctttcttgctcagcgccatttcaatatcaacaacctcgataataattggctgaagatgcacttttggttttactacgccacactcctgcccggatttcagcgcaccgtgggtattgccgacagcaattacaattggttctatggccccgaaagccagctggtctttctggataagttcatattaaaaaacggagcaggcaattggctagcacagcaaatccgcaagcataggcctaaagacggtcctatggtcccaagcactgcacagcgatggagcacactgcacactgaatatatttggtacgaccctcagttgacgccccagccgcccgcagactacgggacagccaaaatccatacctttccgaattggggggttgtcacgtatggagcaggactacctaatacccagaccaacacttttgtttccttcaagagcggtaagctcggaggacgagcagtgtacgacatcgtgcattttcagccttactcctggattgacggatggaggtctttcaacccgggtcacgaacatcctgaccagaattcattcactttcgcccctaatggccaggtgttcgtgtctgaggcgctctacggccccaaactgtcccatttgaacaatgtcctggtgttcgcccccagcccttcctcccaatgtaataaaccttgggagggccagctgggcgagtgtgctcagtggctgaagtggacaggagaagaggtgggagacgccgcgggagagattatcacagcgagccagcacggggagatggtgttcgtgagcggggaggccgtcagcgcatattccagtgcaatgcgcctgaaatccgtgtaccgcgcattgctgctgttaaatagtcagacattgctggttgtggatcacatcgagaggcaggaggattcaccgatcaacagcgtctctgcgttttttcacaaccttgatatagatttcaaatacattccctataagtttatgaatcgctacaatggtgccatgatggacgtttgggatgctcattacaagatgttttggtttgatcatcacggtaacagcccaatggcgtccattcaagaggctgaacaggcggccgagttcaagaaacgctggacccagttcgttaatgtgacctttcagatggaacctacaatcacacgaatcgcatatgttttttacggaccatatatcaatgtatcttcatgtcgcttcatcgactcctctaatcctgggctgcagatcagtctgaatgtcaataacaccgaacatgtggtttccatcgtgaccgactaccacaacctgaaaacgcgatttaattatctgggctttggcgggttcgcttcggtggccgaccaggggcagattacccggttcggactgggtacccaggccattgtgaagcctgtcaggcatgacaggatcattttccccttcggcttcaagtttaatatcgcagttgggctgattctatgtatttccctcgtgatcctgaccttccaatggagattctacttgtcatttagaaagctgatgagatggatcttaattctggtgatcgcactctggttcattgaactcctagatgtgtggagtacttgttcccaaccaatctgcgccaaatggacacggacagaagccgaggggagcaaaaagagcctgtccagtgaaggccaccacatggatcttcctgatgtggtcattaccagcctcccagggtcaggagcggagatcctgaagcaactctttttcaattcatcagacttcctttatattagggtaccaacagcctacattgatatccccgagacagagctggaaatcgactcattcgtggatgcatgtgagtggaaggtgagtgatatccggagcggacactttagattgctccgtggctggcttcaatcactggttcaggacaccaagcttcatttacagaatatccacctccacgaaccgaaccggggaaaactcgctcaatattttgccatgaataaagacaaaaaacgcaaattcaagaggagggaatcattgccagaacagcgctctcagatgaagggagcgttcgacagagatgctgagtacatcagagccctgaggcggcacctggtgtattacccttccgcacgcccagtcctcagcctgagcagcgggtcatggacattgaaactgcattttttccaggaggtgctaggggcctccatgagagctttgtacattgttagggacccgcgggcttggatctatagcatgttgtataactccaagccctccctttattccctgaagaacgttcctgaacacctcgctaaactgtttaaaatagaagggggaaagggaaaatgtaatttaaactccggctacgcatttgaatatgagccgttaagaaaagaactgtcgaagagtaaaagtaacgccgtcagcttgctgagtcacctgtggctcgcaaataccgccgccgccctcagaatcaacactgacctattgcccacttcctatcaactagtaaagtttgaagacatcgtgcacttccctcagaagactacagagagaatcttcgccttcctggggatccccctttccccagcctccctcaatcagatcctctttgctaccagcaccaatctgttttatctcccctacgagggggagataagcccgaccaacaccaatgtgtggaagcagaatttgccaagggatgagatcaaactgatcgaaaacatctgttggacattaatggaccgtcttggatacccaaaatttatggactag

SEQ ID NO: 223118 - DNA, 3639 bp, Artificial Sequence
  derived and/or modified sequence
atggcccttatgttcacagggcatctcctgttcctcgctctgctgatgtttgctttctctacctttgaagagagtgtctcaaactatagcgaatgggctgtatttacggacgatatcgaccagtttaagacccaaaaggtgcaggatttccgtccaaaccagaaactgaagaaatcgatgttgcatccgtctctttactttgatgcaggcgagattcaggctatgcgccagaagtccagggcctctcatctgcatctgttccgggcgataagaagtgccgtaaccgtgatgttgagtaacccgacttactacctccctccgcctaaacatgccgatttcgccgctaagtggaacgagatctacggaaacaacttgccccctctcgcgctgtactgcctattgtgtcccgaggacaaagtggccttcgagtttgtgttggaatacatggacaggatggtcggctataaagattggctggtggaaaacgcgcccggggacgaagtgccaatcggccactctctaacagggttcgctaccgctttcgatttcctatacaacctactggataatcaccggagacagaagtatttggagaagatatgggtgatcaccgaagagatgtatgaatattccaaagtgaggagttgggggaagcagctgctgcataatcaccaggccacaaacatgattgctctattgaccggtgctctagtcacaggtgtagataagggcagcaaggccaacatatggaagcaggcagtggtcgatgtgatggaaaaaactatgtttctgctgaaccacatagtcgacgggagcctggacgaaggagttgcctacggatcttacaccgccaaaagcgtgacacaatacgtctttctggcccagaggcactttaatatcaacaaccttgacaacaattggcttaagatgcatttctggttctattatgctactctcctccctggattccagcgaacagtggggattgccgattctaactacaactggttctacggtcctgaatctcagcttgtgtttctggacaagttcatactcaaaaatggggctggcaattggctagcgcagcagatcagaaagcatagacctaaagacgggcctatggtgcctagcactgctcagaggtggtccacactccacacagagtatatatggtacgaccctcagctgaccccacagccccccgccgattatggaaccgccaaaattcacacgtttccaaattggggagtggtaacttacggcgcagggttaccaaacacacaaaccaatacattcgtgtccttcaaatcgggcaaactgggaggccgagcagtttatgacatcgtgcattttcaaccttactcttggattgatgggtggcgctcctttaaccctggccatgaacaccctgatcagaatagtttcactttcgcaccgaatggtcaagtctttgtgtcagaagccctctacggccccaaattaagtcatctgaataacgtactagtgttcgccccgtctccttctagccaatgtaataaaccttgggaaggccaactcggtgaatgtgcccagtggctgaaatggactggcgaggaagtgggggatgcagccggtgagatcattacagctagtcaacatggtgagatggtgttcgtctctggtgaggccgtcagcgcctattcatctgctatgcggctgaagtcggtctacagggccctcctgcttctaaattcgcaaaccttgttggtcgtggatcatatcgaaagacaggaagattctccaataaatagtgtgtctgcgttctttcataacctagatattgacttcaaatacatcccctataagttcatgaacaggtataacggagcaatgatggatgtgtgggatgctcattacaagatgttctggttcgaccaccatgggaattcccccatggcctctattcaggaggcggaacaagcagccgagttcaaaaagcggtggactcagtttgtgaatgtgacttttcagatggagcccactattacccgaatagcctatgtgttctacggaccttacattaacgtgagcagctgtcggttcatcgactccagcaatcctggactgcaaatttctctcaatgtaaataacacagaacacgtcgtttcaatcgtgacggactaccacaacctaaagactcggtttaattaccttggttttggggggtttgctagtgtggcagatcagggccaaattacacggttcggcctggggacgcaggcgatcgtcaagcccgtgaggcatgatcggataattttcccattcgggttcaagttcaatatagcggtgggtctgatcctttgtatctctctggtgattctgaccttccagtggcggttttacctgtcctttaggaagctcatgcgttggatcttaatcctcgtcatcgcactgtggttcatcgaactgctggatgtctggtccacgtgttcacaacctatctgcgcgaagtggactcggaccgaagctgagggcagcaagaaaagcctgagttctgagggacaccatatggacctccccgatgtcgtaataacctccttaccgggttctggcgccgagattttgaagcagctgttcttcaattccagcgatttcctgtacatcagggttccgaccgcatatatagatataccagaaacagagctggagatcgacagctttgtagatgcttgcgagtggaaggttagcgacattcggtcaggacacttccgtttgctacgagggtggctgcagtcgctagtgcaggacacgaagttgcacctgcaaaacattcacttgcacgagcccaatagaggtaagctggcacaatacttcgccatgaacaaagacaaaaagcgcaagtttaaacgtagggagtcactgccggagcagcgatcacagatgaagggcgcctttgatcgtgatgctgaatatatccgcgccctgcggcggcatttagtgtattacccatctgctcgcccagtgttgtcccttagtagcgggtcctggacactgaagctacattttttccaagaggtactgggcgccagcatgcgagctctgtacatcgtgcgcgaccctagagcttggatttattctatgctgtataattccaagcctagtctttactccttgaagaacgtgccagagcacttggcaaagctgtttaagattgaaggagggaaggggaagtgcaacctgaactcgggatacgcctttgagtacgaaccgctgagaaaagagctctctaagagcaaatcaaacgcggtttccctcctgagccatctgtggctggcaaacacggcggccgccctgcgtattaatacagatctcctgcccaccagctatcagctagtgaagtttgaagacattgtgcatttcccccaaaagacgactgaaagaattttcgcattcctgggcattcctctgagtcccgcaagcttgaaccaaatcctgttcgctacatcaacaaatctcttctatctaccctacgaaggggaaatctcacccactaataccaatgtgtggaaacagaacctcccaagggacgagattaaactcattgagaacatttgctggaccctgatggatcgcttaggatatccgaagttcatggactag

SEQ ID NO: 223119 - DNA, 3669 bp, Artificial Sequence
  derived and/or modified sequence
atgcccaagggcggggccccaccctggatcatggccctgatgttcaccggccacctgctcttcctggccctgctgatgtttgccttcagcacctttgaggagagcgtgagcaactacagcgagtgggccgtgttcacagatgacatcgaccagttcaagacccagaaggtgcaggacttccggcccaaccagaagctgaagaagtccatgctgcaccccagcctgtactttgatgctggggagatccaggccatgaggcagaagagccgggccagccacctgcacctgttccgggccatccgctctgctgtgacagtgatgctgagcaaccccacctactacctgcccccacccaagcatgctgactttgctgccaagtggaatgagatctacggcaacaacctgccccccctggccctgtactgcctgctgtgcccagaggacaaggtggcctttgaatttgtgctggagtacatggacaggatggtgggctacaaggactggctggtggagaatgcccctggagatgaggtgcccatcggccacagcctgactggatttgccacagcctttgacttcctgtacaacctgctggacaaccaccggcggcagaagtacctggagaagatctgggtgatcacagaggagatgtatgagtacagcaaggtgcgctcctggggcaagcagctgctgcacaaccaccaggccaccaacatgattgccctgctgaccggggccctggtgactggagtggacaagggcagcaaggccaacatctggaagcaggccgtggtggatgtgatggagaagaccatgttcctgctgaaccacatcgtggatggcagcctggatgagggcgtggcctacggcagctacacagccaagtctgtgacccagtatgtgttcctggcccagaggcacttcaacatcaacaacctggacaacaactggctgaagatgcacttctggttctactatgccaccctgctgcccggcttccagaggacagtgggcattgctgacagcaactacaactggttctacggccctgagagccagctggtgttcctggacaagttcatcctgaagaatggagctggcaactggctggcccagcagatcaggaagcaccggcccaaggatggccccatggtgcccagcacagcccagcgctggagcaccctgcacacagagtacatctggtatgacccccagctgaccccccagcccccagctgactatggaacagccaagatccacaccttccccaactggggcgtggtgacctacggggccggcctgcccaacacccagaccaacacctttgtgtccttcaagagcggcaagctgggcggccgggctgtgtatgacatcgtgcacttccagccctacagctggattgatggctggaggagcttcaaccctggccacgagcacccagaccagaacagcttcacctttgcccccaacggccaggtgtttgtgtctgaggccctgtatggccccaagctgagccacctgaacaacgtgctggtgtttgcccccagccccagcagccagtgcaacaagccctgggagggccagctgggagaatgtgcccagtggctgaagtggacaggagaggaggtgggagatgctgctggggagatcatcacagccagccagcacggggagatggtgtttgtgtctggagaggccgtgtctgcctacagcagcgccatgaggctgaagtctgtgtaccgggccctgctgctgctgaacagccagaccctgctggtggtggaccacatcgagcggcaggaggacagccccatcaacagcgtgtctgccttcttccacaacctggacatcgacttcaagtacatcccctacaagttcatgaaccgctacaatggagccatgatggatgtgtgggatgcccactacaagatgttctggtttgaccaccacggcaacagccccatggccagcatccaggaggccgagcaggccgctgagttcaagaagcgctggacccagtttgtgaatgtgaccttccagatggagcccaccatcacccgcatcgcctacgtgttctacggcccctacatcaacgtgagcagctgccgcttcatcgacagcagcaaccctggcctgcagatcagcctgaatgtgaacaacacagaacatgtggtgtccatcgtgacagactaccacaacctgaagacccgcttcaactacctgggctttggaggctttgcctctgtggccgaccagggccagatcacccgcttcggcctgggcacccaggccatcgtgaagcctgtgagacatgaccgcatcatcttccccttcggcttcaagttcaacattgctgtgggcctcatcctgtgcatcagcctggtgatcctgaccttccagtggaggttctacctgtccttcaggaagctgatgcgctggatcctgatcctggtgattgccctgtggttcatcgagctgctggatgtgtggagcacctgcagccagcccatctgtgccaagtggaccaggacagaggccgagggcagcaagaagagcctgagcagcgagggccaccacatggacctgcctgatgtggtgatcaccagcctgcccggcagcggggctgagatcctgaagcagctgttcttcaacagcagtgacttcctgtacatccgggtgcccacagcctacatcgacatccctgagacagagctggagattgacagctttgtggatgcctgtgagtggaaggtgtctgacatccgcagcggccacttccggctgctgcggggctggctgcagagcctggtgcaggacaccaagctgcacctgcagaacatccacctgcacgagcccaacagaggcaagctggcccagtactttgccatgaacaaggacaagaagaggaagttcaagagaagagagagcctgcctgagcagaggagccagatgaagggggcctttgacagagatgctgagtacatccgggccctgcggcggcacctggtgtactaccccagcgcccggcctgtgctgagcctgagcagcggctcctggaccctgaagctgcacttcttccaggaggtgctgggcgcctccatgagggccctgtacatcgtgcgggacccccgggcctggatctacagcatgctgtacaacagcaagcccagcctgtacagcctgaagaatgtgcctgagcacctggccaagctgttcaagattgagggcggcaagggcaagtgcaacctgaacagcggctacgcctttgaatatgagcccctgaggaaggagctgagcaagagcaagagcaatgctgtgtccctgctgagccacctgtggctggccaacacagctgctgccctgcgcatcaacacagacctgctgcccaccagctaccagctggtgaagtttgaggacatcgtgcacttcccccagaagaccacagagcgcatctttgccttcctgggcatccccctgagccctgccagcctgaaccagatcctgtttgccaccagcaccaacctcttctacctgccctatgaaggagagatcagccccaccaacaccaacgtgtggaagcagaacctgcccagagatgagatcaagctgattgagaacatctgctggaccctgatggaccggctgggctaccccaagttcatggactag

SEQ ID NO: 223120 - DNA, 3639 bp, Artificial Sequence
  derived and/or modified sequence
atggccctgatgttcaccggccacctgctcttcctggccctgctgatgtttgccttcagcacctttgaggagagcgtgagcaactacagcgagtgggccgtgttcacagatgacatcgaccagttcaagacccagaaggtgcaggacttccggcccaaccagaagctgaagaagtccatgctgcaccccagcctgtactttgatgctggggagatccaggccatgaggcagaagagccgggccagccacctgcacctgttccgggccatccgctctgctgtgacagtgatgctgagcaaccccacctactacctgcccccacccaagcatgctgactttgctgccaagtggaatgagatctacggcaacaacctgccccccctggccctgtactgcctgctgtgcccagaggacaaggtggcctttgaatttgtgctggagtacatggacaggatggtgggctacaaggactggctggtggagaatgcccctggagatgaggtgcccatcggccacagcctgactggatttgccacagcctttgacttcctgtacaacctgctggacaaccaccggcggcagaagtacctggagaagatctgggtgatcacagaggagatgtatgagtacagcaaggtgcgctcctggggcaagcagctgctgcacaaccaccaggccaccaacatgattgccctgctgaccggggccctggtgactggagtggacaagggcagcaaggccaacatctggaagcaggccgtggtggatgtgatggagaagaccatgttcctgctgaaccacatcgtggatggcagcctggatgagggcgtggcctacggcagctacacagccaagtctgtgacccagtatgtgttcctggcccagaggcacttcaacatcaacaacctggacaacaactggctgaagatgcacttctggttctactatgccaccctgctgcccggcttccagaggacagtgggcattgctgacagcaactacaactggttctacggccctgagagccagctggtgttcctggacaagttcatcctgaagaatggagctggcaactggctggcccagcagatcaggaagcaccggcccaaggatggccccatggtgcccagcacagcccagcgctggagcaccctgcacacagagtacatctggtatgacccccagctgaccccccagcccccagctgactatggaacagccaagatccacaccttccccaactggggcgtggtgacctacggggccggcctgcccaacacccagaccaacacctttgtgtccttcaagagcggcaagctgggcggccgggctgtgtatgacatcgtgcacttccagccctacagctggattgatggctggaggagcttcaaccctggccacgagcacccagaccagaacagcttcacctttgcccccaacggccaggtgtttgtgtctgaggccctgtatggccccaagctgagccacctgaacaacgtgctggtgtttgcccccagccccagcagccagtgcaacaagccctgggagggccagctgggagaatgtgcccagtggctgaagtggacaggagaggaggtgggagatgctgctggggagatcatcacagccagccagcacggggagatggtgtttgtgtctggagaggccgtgtctgcctacagcagcgccatgaggctgaagtctgtgtaccgggccctgctgctgctgaacagccagaccctgctggtggtggaccacatcgagcggcaggaggacagccccatcaacagcgtgtctgccttcttccacaacctggacatcgacttcaagtacatcccctacaagttcatgaaccgctacaatggagccatgatggatgtgtgggatgcccactacaagatgttctggtttgaccaccacggcaacagccccatggccagcatccaggaggccgagcaggccgctgagttcaagaagcgctggacccagtttgtgaatgtgaccttccagatggagcccaccatcacccgcatcgcctacgtgttctacggcccctacatcaacgtgagcagctgccgcttcatcgacagcagcaaccctggcctgcagatcagcctgaatgtgaacaacacagaacatgtggtgtccatcgtgacagactaccacaacctgaagacccgcttcaactacctgggctttggaggctttgcctctgtggccgaccagggccagatcacccgcttcggcctgggcacccaggccatcgtgaagcctgtgagacatgaccgcatcatcttccccttcggcttcaagttcaacattgctgtgggcctcatcctgtgcatcagcctggtgatcctgaccttccagtggaggttctacctgtccttcaggaagctgatgcgctggatcctgatcctggtgattgccctgtggttcatcgagctgctggatgtgtggagcacctgcagccagcccatctgtgccaagtggaccaggacagaggccgagggcagcaagaagagcctgagcagcgagggccaccacatggacctgcctgatgtggtgatcaccagcctgcccggcagcggggctgagatcctgaagcagctgttcttcaacagcagtgacttcctgtacatccgggtgcccacagcctacatcgacatccctgagacagagctggagattgacagctttgtggatgcctgtgagtggaaggtgtctgacatccgcagcggccacttccggctgctgcggggctggctgcagagcctggtgcaggacaccaagctgcacctgcagaacatccacctgcacgagcccaacagaggcaagctggcccagtactttgccatgaacaaggacaagaagaggaagttcaagagaagagagagcctgcctgagcagaggagccagatgaagggggcctttgacagagatgctgagtacatccgggccctgcggcggcacctggtgtactaccccagcgcccggcctgtgctgagcctgagcagcggctcctggaccctgaagctgcacttcttccaggaggtgctgggcgcctccatgagggccctgtacatcgtgcgggacccccgggcctggatctacagcatgctgtacaacagcaagcccagcctgtacagcctgaagaatgtgcctgagcacctggccaagctgttcaagattgagggcggcaagggcaagtgcaacctgaacagcggctacgcctttgaatatgagcccctgaggaaggagctgagcaagagcaagagcaatgctgtgtccctgctgagccacctgtggctggccaacacagctgctgccctgcgcatcaacacagacctgctgcccaccagctaccagctggtgaagtttgaggacatcgtgcacttcccccagaagaccacagagcgcatctttgccttcctgggcatccccctgagccctgccagcctgaaccagatcctgtttgccaccagcaccaacctcttctacctgccctatgaaggagagatcagccccaccaacaccaacgtgtggaagcagaacctgcccagagatgagatcaagctgattgagaacatctgctggaccctgatggaccggctgggctaccccaagttcatggactag

SEQ ID NO: 223121 - DNA, 3669 bp, Artificial Sequence
  derived and/or modified sequence
atgcccaagggcggcgcccccccctggatcatggccctgatgttcaccggccacctgctgtttctagcgctactgatgtttgccttctccacatttgaagagtcagtcagtaattactccgagtgggccgtgttcacagatgacatcgatcaattcaagacgcagaaggttcaagacttccgcccaaatcagaaactcaaaaaatctatgctccatccctctttgtatttcgacgctggagagattcaggccatgcgacagaaatctcgagccagccatctgcatctgttccgagcaattcggtccgccgtcaccgttatgctgtctaacccgacgtattacctcccccccccgaagcacgcagacttcgccgccaaatggaatgaaatctacggcaacaaccttccaccgctcgcactttattgcctgttgtgccccgaggacaaagttgcgttcgagttcgtgctagagtacatggaccgaatggttggatataaggattggcttgtggagaacgccccaggagacgaggttcccattggccatagccttacaggcttcgcgaccgcttttgacttcctgtataacctcttggataaccaccggcggcagaagtatcttgaaaagatttgggtaatcacagaggaaatgtacgaatattctaaggttcgcagttggggtaagcagctgctgcacaaccatcaagccaccaacatgatcgctcttttaacgggtgcattggtgaccggagtcgataaggggtccaaggcaaatatttggaagcaggcagtggtcgacgtaatggaaaaaacaatgtttctcctgaatcacatcgtcgacggatcccttgacgagggggtagcctatggcagttacacggccaagagcgtaacccagtatgtgtttctggctcaaaggcactttaacatcaataatcttgacaataattggctaaaaatgcatttttggttttattacgccacattactccctgggtttcagcgaaccgtgggcattgctgatagcaattacaattggttctatggtcccgagagccagttggtgttcttggataagtttattctgaagaatggggcagggaactggttggcacagcagattaggaagcacagacccaaagacgggccgatggtgccctccacagctcagcggtggtcaacacttcataccgagtacatatggtacgacccgcagcttaccccccagccacccgcagattacggaaccgccaagatccacacgtttccaaactggggtgtcgtgacttatggagccggactccctaatacacagacgaatacctttgtgtcctttaagagcggaaagctgggaggcagagcagtgtacgacatcgtgcactttcagccgtactcgtggatcgatgggtggcggagctttaaccctggccacgagcatccggaccagaactcctttacgttcgcgcctaatggccaggtgtttgtctcggaggccctctatgggcccaaactctcgcacctgaataacgtcctcgtgtttgcgccctcaccctcctcgcaatgcaacaagccctgggaagggcagctgggcgaatgcgcccagtggctgaagtggacgggggaagaggttggagatgcagctggggaaatcatcacggcatcccagcatggggagatggtattcgtcagcggtgaagccgtttctgcttacagtagcgctatgaggctgaaaagtgtctatcgggccctgctcctcctcaacagccagaccctgcttgtagttgatcacattgaacggcaggaagacagcccaatcaacagtgtgtccgcctttttccataacctcgatatcgactttaagtacatcccctataagtttatgaaccgctacaatggagcgatgatggacgtttgggatgctcactacaagatgttctggtttgatcatcatggaaattcccccatggcatcaatccaagaggccgagcaagcagcagaattcaaaaagcggtggacgcaatttgttaatgtgacttttcagatggaacccacgatcacacggatcgcctacgtgttctatgggccgtatatcaatgtctctagctgtcgatttattgattcttccaacccgggtttacaaattagcctcaacgtcaataacaccgagcacgttgtgtcaatcgtgacagattatcataacctgaagacccgctttaattatctgggcttcggagggtttgccagcgtggccgaccagggacagattacaagattcggccttgggacacaggccattgtgaaacctgtgcgacacgatagaatcatcttcccattcggcttcaaattcaatattgcagtggggctcattctgtgcatctccttggtcatcctgacgttccagtggagattctacctctcctttcggaagcttatgcgatggatcctgatcctggtgattgctctctggttcattgagctactggatgtgtggtccacctgctctcagccaatttgcgcgaaatggaccaggaccgaagccgagggctcgaagaaatccctctctagcgaaggccatcacatggacctccccgatgtggtcataacttccctaccaggttctggcgctgaaatactgaagcagctctttttcaactcaagcgacttcttgtatatcagagtgcctacagcttatattgacattcccgagaccgaactggagatcgacagcttcgttgacgcctgtgaatggaaagttagcgacatacgctctgggcactttagactgcttaggggctggctgcagtctctggtgcaggatactaagttgcacctgcagaacatccatctgcatgagccaaaccggggcaagctcgcccagtatttcgccatgaacaaggataagaagcgcaaatttaaacgtcgggagtccctccctgaacagaggtctcagatgaaaggcgcatttgacagagacgccgagtacatccgcgcattaagacgacatctggtttactacccctccgctaggccagtgctgtccctctcctccggctcatggacgctgaaacttcatttttttcaggaagtcctgggcgcaagcatgcgggcgctttacatcgtccgggacccgagggcctggatctattctatgctgtacaactccaaaccctctctgtacagcctgaaaaacgttccggagcatctagcaaaattattcaaaattgaggggggtaaagggaaatgcaatctcaattcaggctacgcattcgagtatgagcccctgcgcaaggaattatccaagagcaaaagcaacgctgtgagtctcttgagccacctctggctggctaacacagcagcagccctgcgcatcaatacagatctactgcccactagctatcagctggttaagttcgaagatatcgtacatttcccacagaaaaccacggagcgcatattcgctttcctcggcataccgctgtcaccagcctctctcaaccagatattatttgcaacaagtactaatctcttttacctgccttatgagggcgaaatctctcccaccaataccaacgtttggaaacagaacctgccacgcgatgaaataaagctgatagaaaacatttgttggacattaatggaccgcttgggatacccaaaatttatggactag

SEQ ID NO: 223122 - DNA, 3639 bp, Artificial Sequence
  derived and/or modified sequence
atggccctgatgttcaccggccacctgctgttcctggccctgctgatgtttgccttctccacattcgaagagtccgtcagtaactacagtgagtgggcggtgttcactgatgatattgaccagttcaagacccagaaagtgcaggactttcgacctaaccaaaaactgaaaaagtcgatgcttcacccatctctgtactttgacgctggggaaatccaggctatgagacagaaatccagagcctcacatttgcacttgtttcgggcaatccggagcgccgtgacagttatgctctccaatcctacctattaccttccaccccctaaacacgccgattttgcagcgaaatggaacgagatctatggcaataatttgccgccgttggcactgtattgcctcctctgtccagaggacaaagtagcttttgaattcgtgctggagtacatggaccgtatggtgggatacaaggactggctggtggaaaacgcacccggagacgaagttcctatcggtcactccctaactgggtttgcaaccgcctttgatttcctgtacaatttactggataaccatcggagacagaaatacctggagaaaatctgggtgatcactgaggagatgtacgaatattcaaaggtgcgcagctggggcaagcaattgttgcacaatcatcaagccactaacatgattgccctgctcaccggcgccctggtaaccggcgtggacaaaggctccaaggcaaacatatggaaacaagcagttgtggacgtcatggagaaaaccatgtttctgctgaaccacatagtagacggctccctggatgaaggggtggcttacggctcttataccgccaagagcgtgacacaatacgtattcctggctcagcgacacttcaacatcaacaacttggataataattggctgaaaatgcatttctggttctattatgccactctgttgcctgggttccagagaacagtagggatcgcagattccaattacaattggttctatggccctgagtcccagctggtctttttagataaattcattcttaagaacggggccgggaactggttagcacagcagatccgaaagcatcggcctaaggacgggccaatggtgccttcaacggcccagagatggagcacattacacaccgagtacatctggtacgatccacagctaactccccagccacccgctgactacggcaccgctaaaatccatacatttccaaactggggtgtggttacatacggcgccgggcttcctaacacacagaccaacactttcgtgtccttcaagtcgggcaaactaggcgggagggcggtgtacgacatcgtacattttcagccctatagctggattgatggttggcgctcatttaaccccggccacgaacatcctgaccaaaatagctttacatttgcgccaaatgggcaggtgtttgtgagcgaggctttatacggcccaaagcttagccatttgaataacgtcctggtgttcgcacccagcccatcttctcagtgcaacaagccatgggaagggcagctcggggaatgtgcccagtggctgaagtggaccggggaagaggtgggcgacgcagccggagagatcatcaccgctagccaacatggtgaaatggtattcgtgagcggggaggcagtcagtgcttacagtagtgctatgaggttgaaaagtgtttatagggcactgctgttgttgaactcacaaactctgctggtggtcgatcacattgaacgacaggaggactctcctataaatagcgtaagcgctttttttcataacctcgacattgatttcaagtacattccctacaagttcatgaaccgatataatggtgccatgatggacgtgtgggatgctcactacaaaatgttttggtttgatcatcatgggaattccccgatggcaagcattcaggaggccgaacaggccgccgagtttaaaaagagatggacccagttcgtaaatgttacatttcagatggagcccacaattacccgtatcgcctatgtgttttatgggccctatataaacgtaagctcatgtcgcttcatcgactcctccaatccaggcctacaaatatccctgaatgtgaataatactgagcacgtggtgtcaatcgtcaccgattaccacaacctgaagacccgatttaattatctcggatttggagggttcgcttcagtagctgaccagggtcagattaccagatttggcttaggaactcaggcaatcgtgaagccggttcgccacgatcgcatcattttcccctttgggtttaagttcaacattgccgtcggactgattttatgcatttctctggtgatcctgacctttcaatggcggttttacctctcattcagaaaactgatgaggtggatcttgatcctggtgattgctctgtggttcatcgaactactggatgtctggtctacctgttctcagccgatatgcgcgaagtggacgcggacagaagcagaggggtccaagaagagcttatcgagtgaaggtcaccacatggacctgcctgatgtcgtaatcacctctcttccagggtcaggcgcggaaatactgaagcagctgttcttcaattccagtgatttcctgtatatccgggtccctactgcctacatcgacattccagagaccgaattggagatcgactccttcgttgatgcctgcgaatggaaggtctcagacattcgctccggccacttccggttactcaggggatggctccagtcactcgtgcaggatacaaagcttcatcttcagaatatccaccttcatgaaccgaacagaggaaagctggcacagtatttcgcaatgaacaaggataaaaagaggaagtttaaaagaagggaaagccttccggagcagagaagccaaatgaagggagcgttcgatagagatgccgagtatatcagagccctgcggcgccatcttgtatattaccccagtgcccggcccgtcctctccctgagcagcggaagctggacactgaagctgcacttcttccaggaagtgcttggggcttctatgagagctttgtacatagtgagggaccccagggcttggatttattccatgctatacaattcaaaaccatccctctatagccttaaaaacgtgcctgaacacttggccaagctctttaagatcgaaggaggcaagggtaaatgcaacttgaatagcgggtacgccttcgaatacgaacctctcagaaaggagttaagtaagagtaaatccaacgccgtgagcctgctgtcacatttgtggttagccaataccgccgccgctctgaggattaacaccgatttgttacccaccagctaccagctggtgaagttcgaagatattgtacacttcccgcagaaaaccacggagcgcatctttgcctttcttgggatccccttgagcccagcatccctcaaccagatcctattcgctacctctaccaacctgttttatctaccctacgagggcgagatcagccctacaaacactaatgtatggaagcagaatctgcctagagacgagatcaagctgatcgagaacatttgttggactttgatggaccggctcgggtatccaaagttcatggattag

SEQ ID NO: 223123 - DNA, 3669 bp, Artificial Sequence
  derived and/or modified sequence
atgccaaaaggtggtgcaccaccgtggattatggccttgatgttcaccgggcacctgttgtttctagcgctgctgatgtttgccttttcaaccttcgaagagagtgtgagtaactactctgagtgggctgtattcactgacgacatcgatcagtttaaaacccaaaaggtgcaggattttcggcctaatcagaagttgaaaaagtctatgctgcatcccagcctgtattttgacgcgggtgagatccaggcgatgagacagaagagtagggcatcccatctgcacttgttcagggccattcgctccgcagtgacagtgatgctgagcaaccctacctactatttgccccctcctaaacacgcagattttgccgctaagtggaatgagatctatggcaacaacctgccaccgctggccctgtactgtctcctatgccccgaagataaagtggcgttcgagtttgtgctggagtatatggaccggatggtgggctataaggactggctggtcgaaaatgcacctggtgatgaggtacctataggccacagcctgacaggattcgctacagcgtttgactttctatacaatctactggataatcatcgccgtcagaaatatcttgaaaaaatctgggtgataacggaggagatgtacgagtacagcaaggtgcgctcatggggaaaacagctactgcacaaccatcaagctacgaacatgatagcactgctcacaggtgctctggtcacaggggttgataaaggttctaaggctaatatatggaaacaggcagtcgtggatgtgatggaaaagacgatgtttctgctgaatcacatcgtggacggatccctcgacgaaggggtggcttatggtagctataccgcaaagagtgtgacgcagtacgtattcctcgcgcagagacatttcaatattaacaatctggacaacaattggcttaagatgcacttctggttttattatgcaactttacttcccggtttccagcgaacagtgggcattgccgactcgaattacaattggttctacggacccgagtctcagctcgtcttcctcgataagttcatcctgaagaatggagctgggaattggttggcacagcaaattcgcaagcataggcctaaggatggtcccatggtcccttctacagcccaaaggtggagtacactgcatactgaatacatatggtacgaccctcaactgacccctcaaccacccgcagactacgggaccgctaaaatccatactttcccaaattggggtgtcgtgacatatggggcaggcttgccaaatacccaaactaacaccttcgtgtcgttcaagagtggcaaactgggaggaagagctgtctacgacattgtacattttcagccttattcctggatcgatggatggcgctccttcaatcctggccacgaacatccagaccagaacagctttacattcgctcctaatgggcaggttttcgtgtctgaggctctgtatggaccgaagctctcgcatctcaataatgtcctggtgtttgcgccaagcccatcttcccaatgcaacaagccctgggaaggacagcttggagaatgcgcccagtggctgaagtggactggcgaggaagttggagacgccgctggcgagataattaccgccagccaacatggcgagatggtatttgtgagtggtgaggccgtgtccgcatactcatctgcaatgcggctgaagagtgtttatcgcgcattgttgctcttaaactcccagactctgctggtggtggatcacattgaacgccaagaagatagtccaattaactcggtaagcgctttcttccacaacctggatattgattttaagtatattccctataaattcatgaatcggtataatggggcaatgatggatgtgtgggatgcccattataaaatgttctggtttgatcaccacggaaattcccctatggcctcaatacaggaggcagaacaggctgcagagtttaagaagcgatggacccagtttgtgaatgtgacgttccagatggagccaaccattacaagaattgcctacgtgttctacggtccttacataaacgtgtcatcatgtcgattcattgactcaagtaatccagggctgcagatttcattaaacgtgaataataccgagcatgtggtgagtattgtaactgactaccacaacttgaaaacacggtttaattatctcgggtttgggggtttcgcaagcgtggcagatcagggccagatcaccagattcgggctgggaactcaggctattgtgaaacctgtcaggcacgataggataattttccccttcgggttcaagttcaatattgccgttggtcttattctgtgtattagcctggtgatcctaacattccagtggcgtttttacctgtcgttcaggaaacttatgagatggattctgatccttgtgatcgcgctctggttcattgagctgctcgatgtttggagcacgtgttcccagcctatctgcgctaagtggacgcgcactgaggcagagggaagcaaaaagtctttgagcagtgaagggcatcatatggacctgcccgacgtggtaattaccagtctcccgggatcgggcgctgagattctaaagcagctcttctttaacagttctgatttcctctacatcagagtgcccactgcctatatcgacattccggaaactgagctggagattgattcgttcgtggacgcctgcgagtggaaagtttccgacatcagaagcggacacttccgtctcctccgaggctggttacagtcactcgtccaagatacaaaactccacttacagaatatccacctccacgaaccaaatcggggaaaacttgctcaatactttgcgatgaacaaggataaaaagcgaaagtttaagcggagagagtccctgcccgaacagcgctcccagatgaaaggggcattcgacagagatgcagaatatattagggcgctgcggagacacctggtatactatcctagcgccaggcccgtgctctcactgtccagtgggagctggaccctcaaactgcacttctttcaagaagtgctgggagcaagcatgagagcgctttacattgtacgggaccccagggcctggatttattccatgctgtacaatagcaagcctagcctctacagcttaaaaaacgtgcccgagcatctagcgaagctgtttaaaattgaaggaggcaaaggcaagtgcaatctgaattctggctatgcctttgaatacgagcccttgaggaaagagctgagcaagtctaaaagtaatgctgtgtctctcctgagccatctgtggctggcaaatacagcagccgcacttcgaatcaacactgacctgttgccaaccagttatcagctggtaaagtttgaagatatcgtccactttcctcagaagacaactgaacggatcttcgccttccttggtataccattgagcccagcttccctaaatcaaatcctgtttgccaccagcacaaacctcttttatttgccttacgagggagaaatttctcccaccaacacaaatgtatggaagcagaatttgccccgtgatgaaatcaaactgattgagaacatctgttggacacttatggacaggttgggataccccaaatttatggactag

SEQ ID NO: 223124 - DNA, 3639 bp, Artificial Sequence
  derived and/or modified sequence
atggcccttatgttcactggtcatcttctttttctagccttactaatgttcgccttctctactttcgaggagtccgtatcaaactattcagaatgggctgtttttactgacgatatagatcagtttaaaactcagaaagtgcaggatttcagacctaaccagaaactgaagaagagtatgctccacccaagtctgtacttcgacgcaggtgagatccaggccatgaggcagaaatccagggcatcacaccttcacttatttcgggcaatccgttctgcagtgactgtgatgctgagcaaccccacatactacttgccgccacctaaacatgccgattttgccgctaagtggaacgagatttacggaaataacctccctcctctcgctctttactgcttgctctgtccggaggataaggtagcgtttgagttcgtgctcgagtacatggatagaatggtgggatataaggactggctggtcgagaatgccccaggggacgaagtgcccattggccacagcctaaccggattcgccaccgcttttgactttctgtacaatctgctggataaccatcgccgacaaaaatatttggagaaaatctgggtaatcactgaagagatgtacgaatacagcaaggttcgatcatggggcaagcagctcctccataaccaccaggctacgaacatgatagcgcttctcaccggagcgctggttaccggcgtggataagggatctaaagcaaacatctggaaacaggccgtggtggatgtgatggaaaaaaccatgtttctcttgaatcatattgtggatggtagcctagatgaaggggtggcttatggatcttatactgccaaaagcgtgactcaatacgtattcctggcccagaggcactttaatatcaataacttagacaataactggctgaagatgcacttctggttctattacgctaccctgctgcctggatttcagcgcactgttggcatcgctgattccaactataattggttttatggccctgaatcacaactggtgttcctagacaaattcatcttaaaaaacggcgcaggtaactggttagcacaacagatccgcaaacaccgtcccaaagatgggccaatggtgccgtcgactgcccagaggtggtcaacactgcacaccgagtatatctggtatgatccacagctaactccccaaccccctgccgattatggtaccgcaaaaatccacactttccctaactggggggtggtgacctatggggcaggcttgccgaacacccagactaatacttttgtcagctttaaatccggcaagttgggtggcagagctgtttacgacatcgtgcacttccagccctactcatggattgatggctggcgcagcttcaaccctggtcatgaacaccctgaccagaactcatttactttcgccccaaacggccaggtgtttgtgagtgaagctttatacgggccaaaactttcccacctgaacaacgtcctcgtgttcgctccgtccccctctagccagtgcaacaaaccatgggaaggccagctcggggagtgcgcccaatggcttaaatggactggagaagaggttggtgacgccgctggcgaaattatcacagccagccagcacggagagatggtgttcgtttctggggaggccgtctcagcttacagctctgcaatgcggttgaagtctgtgtacagggccctgcttttactgaattctcagacactgctggtggtggaccacatagagaggcaggaggacagcccaataaatagcgtgagcgccttttttcacaacctggacattgactttaaatacatcccttacaaatttatgaacagatataacggtgccatgatggatgtgtgggatgcccactataagatgttctggttcgaccaccacggtaactctcccatggcttcgattcaggaggccgagcaggctgcggagttcaaaaaaagatggacacagttcgtaaatgtgaccttccagatggagccaactattacgcgtatcgcttacgtgttctacggaccctatattaacgtcagcagctgccgatttattgattcctcaaaccccggactgcagatttctctgaacgtcaacaacacagagcacgtggtgtcaatcgtcaccgactaccacaacttgaaaactcggttcaactatctgggcttcggcggattcgcttctgttgcagaccagggccagatcaccagattcggactcgggacccaggccatcgttaagccggtcaggcatgatagaatcatatttccttttggatttaagttcaatatcgccgtgggactgatcctctgtatctccctcgtgatcctcacatttcagtggagattttatctatcttttaggaaactgatgaggtggatactaattttggtgattgcactgtggtttatcgagctgcttgacgtgtggagcacttgctcacaacctatctgcgccaaatggaccaggaccgaggccgaagggtccaaaaagtcactgagcagtgaaggtcatcacatggacctgcccgatgtggttattacatctctgcccggatccggagctgagattcttaagcagctcttcttcaactctagcgacttcttgtatatcagggttcccactgcgtatattgacatccccgaaacagaactggagatcgacagttttgttgacgcctgcgagtggaaggtttccgatattaggtccgggcacttccggctactccggggatggttacagtctctagtacaggataccaagctccacctgcagaacatacacctgcatgagcctaacaggggcaagttggcccagtacttcgcaatgaacaaggataaaaagaggaaattcaagcgtcgtgagtccctgccggaacagagatcccaaatgaagggcgctttcgatagggatgccgaatatatccgcgcactacgcaggcacctggtgtattacccttcggcgagacccgttttgtccttaagctcgggttcttggactctcaaacttcatttcttccaggaagtcttgggagccagcatgagggccctgtacattgtgagggacccaagagcttggatctactcgatgctgtataattcaaagcccagcttatattcgcttaaaaacgtgcctgagcaccttgccaaactgtttaagatcgaaggcggaaaggggaaatgtaacctgaattcaggatacgcgtttgaatacgagcccctgcgcaaggagctaagtaaaagcaagtcgaatgcagtgagcctactgagccatctctggttggctaatactgctgctgctctgaggatcaacaccgacctgctgccgaccagctaccagctcgtcaagttcgaggacatcgtccactttccgcaaaagaccacagagcgaatctttgcttttctagggatccctctgtcaccagccagcctcaaccagatcctcttcgctaccagtactaatttattctatttgccatatgagggagaaattagccccactaataccaacgtctggaaacaaaatcttccaagagatgaaattaaattgatagagaatatttgctggaccctcatggatagactcggctatccgaagtttatggactag

SEQ ID NO: 223125 - DNA, 3669 bp, Artificial Sequence
  derived and/or modified sequence
atgcccaagggcggcgcccccccctggatcatggccctgatgttcaccggccacctgctgttcctggccctgctgatgttcgccttcagcaccttcgaggagagcgtgagcaactacagcgagtgggccgtgttcaccgacgacatcgaccagttcaagacccagaaggtgcaggacttcagacccaaccagaagctgaagaagagcatgctgcaccccagcctgtacttcgacgccggcgagatccaggccatgagacagaagagcagagccagccacctgcacctgttcagagccatcagaagcgccgtgaccgtgatgctgagcaaccccacctactacctgcccccccccaagcacgccgacttcgccgccaagtggaacgagatctacggcaacaacctgccccccctggccctgtactgcctgctgtgccccgaggacaaggtggccttcgagttcgtgctggagtacatggacagaatggtgggctacaaggactggctggtggagaacgcccccggcgacgaggtgcccatcggccacagcctgaccggcttcgccaccgccttcgacttcctgtacaacctgctggacaaccacagaagacagaagtacctggagaagatctgggtgatcaccgaggagatgtacgagtacagcaaggtgagaagctggggcaagcagctgctgcacaaccaccaggccaccaacatgatcgccctgctgaccggcgccctggtgaccggcgtggacaagggcagcaaggccaacatctggaagcaggccgtggtggacgtgatggagaagaccatgttcctgctgaaccacatcgtggacggcagcctggacgagggcgtggcctacggcagctacaccgccaagagcgtgacccagtacgtgttcctggcccagagacacttcaacatcaacaacctggacaacaactggctgaagatgcacttctggttctactacgccaccctgctgcccggcttccagagaaccgtgggcatcgccgacagcaactacaactggttctacggccccgagagccagctggtgttcctggacaagttcatcctgaagaacggcgccggcaactggctggcccagcagatcagaaagcacagacccaaggacggccccatggtgcccagcaccgcccagagatggagcaccctgcacaccgagtacatctggtacgacccccagctgaccccccagccccccgccgactacggcaccgccaagatccacaccttccccaactggggcgtggtgacctacggcgccggcctgcccaacacccagaccaacaccttcgtgagcttcaagagcggcaagctgggcggcagagccgtgtacgacatcgtgcacttccagccctacagctggatcgacggctggagaagcttcaaccccggccacgagcaccccgaccagaacagcttcaccttcgcccccaacggccaggtgttcgtgagcgaggccctgtacggccccaagctgagccacctgaacaacgtgctggtgttcgcccccagccccagcagccagtgcaacaagccctgggagggccagctgggcgagtgcgcccagtggctgaagtggaccggcgaggaggtgggcgacgccgccggcgagatcatcaccgccagccagcacggcgagatggtgttcgtgagcggcgaggccgtgagcgcctacagcagcgccatgagactgaagagcgtgtacagagccctgctgctgctgaacagccagaccctgctggtggtggaccacatcgagagacaggaggacagccccatcaacagcgtgagcgccttcttccacaacctggacatcgacttcaagtacatcccctacaagttcatgaacagatacaacggcgccatgatggacgtgtgggacgcccactacaagatgttctggttcgaccaccacggcaacagccccatggccagcatccaggaggccgagcaggccgccgagttcaagaagagatggacccagttcgtgaacgtgaccttccagatggagcccaccatcaccagaatcgcctacgtgttctacggcccctacatcaacgtgagcagctgcagattcatcgacagcagcaaccccggcctgcagatcagcctgaacgtgaacaacaccgagcacgtggtgagcatcgtgaccgactaccacaacctgaagaccagattcaactacctgggcttcggcggcttcgccagcgtggccgaccagggccagatcaccagattcggcctgggcacccaggccatcgtgaagcccgtgagacacgacagaatcatcttccccttcggcttcaagttcaacatcgccgtgggcctgatcctgtgcatcagcctggtgatcctgaccttccagtggagattctacctgagcttcagaaagctgatgagatggatcctgatcctggtgatcgccctgtggttcatcgagctgctggacgtgtggagcacctgcagccagcccatctgcgccaagtggaccagaaccgaggccgagggcagcaagaagagcctgagcagcgagggccaccacatggacctgcccgacgtggtgatcaccagcctgcccggcagcggcgccgagatcctgaagcagctgttcttcaacagcagcgacttcctgtacatcagagtgcccaccgcctacatcgacatccccgagaccgagctggagatcgacagcttcgtggacgcctgcgagtggaaggtgagcgacatcagaagcggccacttcagactgctgagaggctggctgcagagcctggtgcaggacaccaagctgcacctgcagaacatccacctgcacgagcccaacagaggcaagctggcccagtacttcgccatgaacaaggacaagaagagaaagttcaagagaagagagagcctgcccgagcagagaagccagatgaagggcgccttcgacagagacgccgagtacatcagagccctgagaagacacctggtgtactaccccagcgccagacccgtgctgagcctgagcagcggcagctggaccctgaagctgcacttcttccaggaggtgctgggcgccagcatgagagccctgtacatcgtgagagaccccagagcctggatctacagcatgctgtacaacagcaagcccagcctgtacagcctgaagaacgtgcccgagcacctggccaagctgttcaagatcgagggcggcaagggcaagtgcaacctgaacagcggctacgccttcgagtacgagcccctgagaaaggagctgagcaagagcaagagcaacgccgtgagcctgctgagccacctgtggctggccaacaccgccgccgccctgagaatcaacaccgacctgctgcccaccagctaccagctggtgaagttcgaggacatcgtgcacttcccccagaagaccaccgagagaatcttcgccttcctgggcatccccctgagccccgccagcctgaaccagatcctgttcgccaccagcaccaacctgttctacctgccctacgagggcgagatcagccccaccaacaccaacgtgtggaagcagaacctgcccagagacgagatcaagctgatcgagaacatctgctggaccctgatggacagactgggctaccccaagttcatggactag

SEQ ID NO: 223126 - DNA, 3639 bp, Artificial Sequence
  derived and/or modified sequence
atggccctgatgttcaccggccacctgctgttcctggccctgctgatgttcgccttcagcaccttcgaggagagcgtgagcaactacagcgagtgggccgtgttcaccgacgacatcgaccagttcaagacccagaaggtgcaggacttcagacccaaccagaagctgaagaagagcatgctgcaccccagcctgtacttcgacgccggcgagatccaggccatgagacagaagagcagagccagccacctgcacctgttcagagccatcagaagcgccgtgaccgtgatgctgagcaaccccacctactacctgcccccccccaagcacgccgacttcgccgccaagtggaacgagatctacggcaacaacctgccccccctggccctgtactgcctgctgtgccccgaggacaaggtggccttcgagttcgtgctggagtacatggacagaatggtgggctacaaggactggctggtggagaacgcccccggcgacgaggtgcccatcggccacagcctgaccggcttcgccaccgccttcgacttcctgtacaacctgctggacaaccacagaagacagaagtacctggagaagatctgggtgatcaccgaggagatgtacgagtacagcaaggtgagaagctggggcaagcagctgctgcacaaccaccaggccaccaacatgatcgccctgctgaccggcgccctggtgaccggcgtggacaagggcagcaaggccaacatctggaagcaggccgtggtggacgtgatggagaagaccatgttcctgctgaaccacatcgtggacggcagcctggacgagggcgtggcctacggcagctacaccgccaagagcgtgacccagtacgtgttcctggcccagagacacttcaacatcaacaacctggacaacaactggctgaagatgcacttctggttctactacgccaccctgctgcccggcttccagagaaccgtgggcatcgccgacagcaactacaactggttctacggccccgagagccagctggtgttcctggacaagttcatcctgaagaacggcgccggcaactggctggcccagcagatcagaaagcacagacccaaggacggccccatggtgcccagcaccgcccagagatggagcaccctgcacaccgagtacatctggtacgacccccagctgaccccccagccccccgccgactacggcaccgccaagatccacaccttccccaactggggcgtggtgacctacggcgccggcctgcccaacacccagaccaacaccttcgtgagcttcaagagcggcaagctgggcggcagagccgtgtacgacatcgtgcacttccagccctacagctggatcgacggctggagaagcttcaaccccggccacgagcaccccgaccagaacagcttcaccttcgcccccaacggccaggtgttcgtgagcgaggccctgtacggccccaagctgagccacctgaacaacgtgctggtgttcgcccccagccccagcagccagtgcaacaagccctgggagggccagctgggcgagtgcgcccagtggctgaagtggaccggcgaggaggtgggcgacgccgccggcgagatcatcaccgccagccagcacggcgagatggtgttcgtgagcggcgaggccgtgagcgcctacagcagcgccatgagactgaagagcgtgtacagagccctgctgctgctgaacagccagaccctgctggtggtggaccacatcgagagacaggaggacagccccatcaacagcgtgagcgccttcttccacaacctggacatcgacttcaagtacatcccctacaagttcatgaacagatacaacggcgccatgatggacgtgtgggacgcccactacaagatgttctggttcgaccaccacggcaacagccccatggccagcatccaggaggccgagcaggccgccgagttcaagaagagatggacccagttcgtgaacgtgaccttccagatggagcccaccatcaccagaatcgcctacgtgttctacggcccctacatcaacgtgagcagctgcagattcatcgacagcagcaaccccggcctgcagatcagcctgaacgtgaacaacaccgagcacgtggtgagcatcgtgaccgactaccacaacctgaagaccagattcaactacctgggcttcggcggcttcgccagcgtggccgaccagggccagatcaccagattcggcctgggcacccaggccatcgtgaagcccgtgagacacgacagaatcatcttccccttcggcttcaagttcaacatcgccgtgggcctgatcctgtgcatcagcctggtgatcctgaccttccagtggagattctacctgagcttcagaaagctgatgagatggatcctgatcctggtgatcgccctgtggttcatcgagctgctggacgtgtggagcacctgcagccagcccatctgcgccaagtggaccagaaccgaggccgagggcagcaagaagagcctgagcagcgagggccaccacatggacctgcccgacgtggtgatcaccagcctgcccggcagcggcgccgagatcctgaagcagctgttcttcaacagcagcgacttcctgtacatcagagtgcccaccgcctacatcgacatccccgagaccgagctggagatcgacagcttcgtggacgcctgcgagtggaaggtgagcgacatcagaagcggccacttcagactgctgagaggctggctgcagagcctggtgcaggacaccaagctgcacctgcagaacatccacctgcacgagcccaacagaggcaagctggcccagtacttcgccatgaacaaggacaagaagagaaagttcaagagaagagagagcctgcccgagcagagaagccagatgaagggcgccttcgacagagacgccgagtacatcagagccctgagaagacacctggtgtactaccccagcgccagacccgtgctgagcctgagcagcggcagctggaccctgaagctgcacttcttccaggaggtgctgggcgccagcatgagagccctgtacatcgtgagagaccccagagcctggatctacagcatgctgtacaacagcaagcccagcctgtacagcctgaagaacgtgcccgagcacctggccaagctgttcaagatcgagggcggcaagggcaagtgcaacctgaacagcggctacgccttcgagtacgagcccctgagaaaggagctgagcaagagcaagagcaacgccgtgagcctgctgagccacctgtggctggccaacaccgccgccgccctgagaatcaacaccgacctgctgcccaccagctaccagctggtgaagttcgaggacatcgtgcacttcccccagaagaccaccgagagaatcttcgccttcctgggcatccccctgagccccgccagcctgaaccagatcctgttcgccaccagcaccaacctgttctacctgccctacgagggcgagatcagccccaccaacaccaacgtgtggaagcagaacctgcccagagacgagatcaagctgatcgagaacatctgctggaccctgatggacagactgggctaccccaagttcatggactag

SEQ ID NO: 223127 - DNA, 9531 bp, Artificial Sequence
  derived and/or modified sequence
acctgctttcggccccgccccgcccgccgccggcctgctcacggctcctcccgtcctccccgaagccccgcctctgaccccgccctgtcctgtctccgtcccgccccacgcccgccagccagcgtcgctgtctctcgccttccctgaggccccgccttcagccccgccttcaaccccgccccgtcctgcctccgccccgcccccgcttgccggcccgcgtcgccgtctcaccctccccgggctgcgcggccggagctggcacagaggatcctcggccgcggcgacatcaccgcctgggcacgcgggcgctgctctggatacggcgccaccgagagaacccgccgcccgcgggtctctgtcctgcggtccgtggttgcccccacaagcgtccggcgtttcctgagggcgggcgtgtccgggccgtgcgggtcgcggggaccgagcgcggctgaggagaccgagctggggcagcgcctgccgtagcgcgggagacgacgcgggggtcttgcggagccccgcgggagcctggcccgccgtgcagagcagttttctggaactctccacctccgtctcccttggggcccagtgcggcgccgagcccccgtcgggatctgcctgagaaaagtgtcatgaaaaaagagcagaagagagacctcactgttgctgaaaggggaattttctttccccgttggcggttacttcatgatcggacgagaagtatctaggtgactgaagatattccatttttatgtttgtacacatgaagctgataaaagaagatgtgaacatgatttctctttgtcataataggctgatgagtaagtaagcctgaaaaatatttgaaatgaaggcaagaattttgaatttttaaaaaccaactaagactttgatcacttgttgaggatgtttctctctcataaatgaaagaaaaacgtattcacaagacaagaagtataaaaagttgagaggaatgacaactgagtccactcactcgaagaatgtcagtacttcatcatcttctttgggcaaacatacacaaatgcatcatacatgtgtggtgagcttatcaccagtgatggttttctgtgctagaaatgactcttaatttgaattttggagtgctttttctctttttttacaatgtgtgttccaactctttgtgttaaatagatttaagtaaaggaggtaaatgctaaattcatagtgttttttacctgtatcacttccctgtgtattatggaaaaattagagattttaacgttattcaaagttttactggaagcaaaactgtgccagggacagagatatacaatttaagttttctctttttggcaactgcacttgcttaaaatgtactgaatgtcagctggatttcacagcatatcagatttacagtctttgtcttatcaaggcctttactgtatgttttatactaaccagatgggaaacacattgagcatcatatctgacatgtatgcctaagggaggagctcccccatggatcatggcgttaatgtttacaggacatttactattcttagcattattgatgtttgctttctctacttttgaggaatctgtgagcaattattccgaatgggcagttttcacagatgatatagatcagtttaaaacacagaaagtgcaagatttcagacccaaccaaaagctgaagaaaagtatgcttcatccaagtttatattttgatgctggagaaatccaagcaatgagacaaaagtctcgtgcaagccatttgcatctttttagagctatcagaagtgcagtgacagttatgctgtccaacccaacatactacctacctccaccaaagcatgctgattttgctgccaagtggaatgaaatttatggtaacaatctgcctcctttagcattgtactgtttgttatgcccagaagacaaagttgcctttgaatttgtcttggaatatatggacaggatggttggctacaaagactggctagtagagaatgcaccaggagatgaggttccaattggccattccttaacaggttttgccactgcctttgactttttatataacttattagataatcatcgaagacaaaaatacctggaaaaaatatgggttattactgaggaaatgtacgagtattccaaggtccgctcatggggcaaacagcttctccataaccaccaagccactaatatgatagcattactcacaggggccttggtgactggagtagataaaggatctaaagcaaatatatggaaacaggctgtagtggatgtcatggaaaagacaatgtttctattgaatcatattgttgatggttctttggatgaaggtgtggcctatggaagctacacagctaaatccgtcacacagtatgtttttctggcccagcgccattttaatatcaacaacttggataataactggttaaagatgcacttttggttctattatgccacccttttacctggcttccaaagaactgtgggtatagcagattccaattataattggttttatggtccagaaagccagctagttttcttggataagttcatcttaaagaatggagctggaaattggttagctcagcaaattagaaagcaccgacctaaagatggaccgatggttccttcaactgcccaaaggtggagtactcttcacactgaatacatctggtatgatccccagctcacaccacagccacctgctgattatggtactgcaaaaatacacacattccctaactggggtgtggttacttatggggctgggttgccaaacacacagaccaacacctttgtgtcttttaaatctgggaagctggggggacgagctgtgtatgacatagttcattttcagccatattcctggattgatgggtggagaagttttaacccaggacatgagcatccagatcagaactcatttacttttgcccccaatggacaagtatttgtttctgaagctctctatggacccaagttgagccaccttaacaatgtattggtgtttgctccatcaccctcaagccagtgtaataagccctgggaaggtcaactgggagaatgtgcgcagtggcttaagtggactggcgaggaggttggtgatgcagctggggaaataatcactgcctctcaacatggggaaatggtatttgtgagtggggaagccgtgtctgcttattcttcagcaatgagactgaaaagtgtatatcgtgctttgcttctcttaaattcccaaactctgctagttgttgatcatattgagaggcaagaagattccccaataaattctgtcagtgccttctttcataatttggatattgattttaaatatatcccatataagtttatgaataggtataatggtgccatgatggatgtgtgggatgcacattacaaaatgttttggtttgatcatcatggcaatagtcccatggccagtatacaggaagcagagcaagctgctgaatttaaaaaacgatggactcaatttgttaatgttacttttcagatggaacccacaatcacaagaattgcatatgtcttttatgggccatatatcaatgtctccagctgcagatttattgatagttccaatcctggacttcagatttctctcaatgtcaataatactgaacatgttgtttctattgtaactgattaccataacctgaagacaagattcaattatctgggattcggtggctttgccagtgtggctgatcaaggccaaataacccgatttggtttgggcactcaagcaatagtaaagcctgtaagacatgataggattattttcccctttggatttaaatttaatatagcagttggattaattttgtgcattagcttggtgattttaactttccaatggcgtttttacctttcttttagaaaactaatgcgatggatattaatacttgttattgccttgtggtttattgagcttttggatgtgtggagcacttgtagtcagcccatttgtgcaaaatggacaaggacagaggctgagggaagcaagaagtctttgtcttctgaagggcaccacatggatcttcctgatgttgtcattacctcacttcctggttcaggagctgaaattctcaaacaactttttttcaacagtagtgattttctctacatcagggttcctacagcctacattgatattcctgaaactgagttggaaatcgactcatttgtagatgcttgtgaatggaaggtgtcagatatccgcagtgggcattttcgtttactccgaggctggttgcagtctttagtccaggacacaaaattacatttgcaaaacatccatctgcatgaacccaataggggtaaactggcccaatattttgcaatgaataaggacaaaaaaagaaaatttaaaaggagagagtctttgccagaacaaagaagtcaaatgaaaggcgcctttgatagagatgctgaatatattagggctttgaggagacacctggtttactatccaagtgcacgtcctgtgctcagtttaagcagtggaagctggacgttaaagcttcatttttttcaggaagttttaggagcttcgatgagggcattgtacatagtaagagaccctcgggcatggatttattcaatgttgtacaatagtaaaccaagtctttattctttgaagaatgtaccagagcatttagcaaaattgtttaaaatagagggaggtaaaggcaaatgtaacttaaattcgggttatgctttcgagtatgaaccattgaggaaagaattatcaaaatccaaatcaaatgcagtgtccctcttgtctcacttgtggctagcaaatacagcagcagccttgagaataaatacagatttgctgcctactagctaccagctggtcaagtttgaagatattgtgcattttcctcagaaaactactgaaaggatttttgcctttcttggaattcctttgtctcctgctagtttaaaccaaatattgtttgccacctctacaaaccttttttaccttccctatgaaggggaaatatcaccaactaatactaatgtttggaaacagaacttgcctagagatgaaattaaactaattgaaaacatctgctggactctgatggatcgcctaggatatccaaagtttatggactaaatgctgcaggtcagcagaaatttgcactaataatacttaccaacccactttgtggatatgaatcagaagagtttgtttattctttagtgtgtgtgtgtgtgtgcacgcgtgtatgtgttcagtgttgtttgcacagagagattgttttaaaaaatggcaccatatttggcctagcaggatttatttttatgtcatcacctcccttgcctttgtttctgaaaattttgtctgctaaaaagtttctgctacagagtggtagatgaagttatatcatggggtcaggggagatgggaaaattttaagtttttgtctaactccccttcatctgtaactgtgctaatctatctagagacctcaaacactgctaaaggccttgcaattgctgctttacccacgcatctcttgctttcaagatggactacaaaagttccttatccttttgaaaaggtcttctgacacacttatcttgcacaaagaaaaagaaaatttcttttactgtgtttaatgttcagtgatatcactgaggaaatggtgaaagctcctatcagaactataggatttcttctgggaaatacagatggaaatacagaatgaatatgtttttttgaggtcggaaactgactttaaaagcctccttgaagttttttacttagaaatataaggaataagtctttgaacaatctgggtggcaagggctggtagattattttagacatgattgtctgtttaaaactctcctttcactttttatcctccctggagctacagctgttcgccatcacatcactcccatcctatcctttctgtcactgtcaagcaaaacaatcagtagttactaatcgctgaactctcaatattgtggggcattttccccccagttgattaattttgcgttaaagactgacacagacttagaatcaaatttatttttctggaattaacactctgtgactcaaagtagtgccactgcagtgtctttttaaactggaaacagaattggaaaactgcctgacttatcttgcatccctttgaatgagtttacagactgccagtgtctgcaaaagttgaaagcaaatgggagatgatgtcagaggcatctgtttcctttaccatctgcatcttattataaatgtagtcgtcataaagtgtggtttattttattttggtaggctctgaaatcaaaatgctacgccattataagccagtggagtaattacaatgtattggatgaaaacataaggcagtgtggagacttgatgaaaatctctgtacagattgcagtcttcttcctgatgtttcaaactgtggttcccccaagctctctaacacttggaagtctgtcattctgacctagataaaagtggttctttctcagtagttattattatgtcaaaatgtgcctccagagtgataaagctctgtatatgttagattccagctaaacctaacttggctgtcatttttcttccattatagtgtgagtggagactgccccccctccccaacatattccttcccatatctctcatgattgtccctctgtaatttcaaaatgaatgaaattcatgtgaatgtaggttgagagggcactgaagacctgaatctacactagtaatctcaagaaagattattcattctatctcagagttaccggcaagcatataaaatgctacttggataatatctacatgaatattgcatgctacatggttgataacactatttccattattgggcagaatctcagtgtttactttcaattcctaggatatgtgatcgtgaatcagatcacatataaaaagtctggattgtcagtagtattagatctgatcaaggtaggaattacaattgcatgcaggtagcaagcaagaaagcagaaactactgttccctttattttaacattgtacagacaatacagaaatgtacctgttggcggccgggtgcagtggctcacgcctgtaatcccagcacttcgggaggccgaggcgggtggatcacgaggtcaggagatcaagaccatcctggctaacacggtgaaaccccgtctctactaaaaaaaaaagtacaaaaaattagccgggcgtggtggcgggcacctgtagtcccagctacacgggaggctgaggcaggagaatggcatgaacctgggaggcagagcttgcagtgagtggagatgcgccactgcactccagcctgggcgacagagcgagactccgcctcaaaaaaaaaaaaaaaagaaaaaaagaaatgtacctgttggcaggagaaggccagatggagtatgtggagtaatagggaaagaagagttacagaaaatgaaaaagaaaatgagttacactgagaatgaatatgggaacacgtcattgatagcaaaagaaaggtacaggcttacgaaaatgatctttacaatgtatcccagctttcacccccacatggcaatgcagagttgtatttacttgtttctgtactcacctactcccaccccaagggaaaattttagacatgaaccctactatttagttattctaaaatagaaagtttgctggagaaagcgtccactcacagattgttctgtaaggaatgttatgtatgggtgagcgggtgacacatccattgggtatgtatgcatgtgatggtgcctgagacccctgccttagaaacagaattcctaaggggattgactctcccagcatgttcccaggtcctgcacccttagggtgatctaggaaaattttaaatagcttctactcttatttttgttctttgaaataattaaaagagggattatcactatctgatacttctgaaagaaacacttacaaaatttcttatctgtaaaatccgtctttttctacattaacttccccaaacataggcctaattgagataattgcttttattataataataggattgaaattttaaaattttgaaaggacttattaattttgctgacaaaagtgaagtaacaaatataatgataattggctttttaaattttcaaacaacatagatttactcaagatgaaataaaaaggccatattcagagttgaatttaatgaaaactcagaggaaataggaaaatctgctcaggagaaagaagctaaatctgcatagatttagtttgtagaatttaatttaaaatttaaattttaacaaagtgatgacacaacaatatgtacgtttaggtgtggacaccaaaatattagacatttgattgtccttttacatagagaataactaataaatgcctgacaagaatgggacaatccttccttgtatcaaaattcccaggtcttgctacattgccctctgcaaatgtattcaaagaagaacctcctccaccacttacttttggttggcataattgttcagcaacgatttctgtacatcaccaagtatctttggcattcttggtatacaaagtatatcacaattttaagtgagtaaatattaatgataatttttgaattgctttgtttggcttgattaactttgatcagaaatagaaacgttttcatttgttgatttaggaaaaagcataaatagaatgcagtataacaccacttccaaaggtaaggatacctaacattcttttttttttttttttttttttttttgggatggagtctcactttgttgcccaggctggagtgcagtggtctgatctcggctcactgcaacctccgcctaccgggttcaagtgattctcctacgtcagcctcctgaatagctgggattacaggtgcacgccaccatgcttggctcatttttgtatttttagtagtgacagcgtttcaccacattggtcaggctggtctcaatctcttgacctggtgatctgcccacctgggcctcccaaaatgctgggattacaggcatgagccaccacacctggcaagggtacctgacattctaagatatcaagacacttaatatgtgggctattagctgcttatttaaatgttgaccaaattgtctgatatatctgattaatcatgatttcacttcatttcggaagaaaaattatccatatcatttttaaagacgcaaatgactttggatttttgcatagagtacaatagacacttcaaacaatagattctaacattctctgaaacacttgagatgtttgagctaccatttatatgggttatttatatttagtctaagtaacacatacatgtttaattgattctgttttcatggatagattcaactaagtcttccaagcaattaattttttgttcgtcgtcgtttttccttcatacgttatctagttatgcagcactggaaacagactgaagatcataaaccagttttatcagacctatgtgtaataagactcctgttaatacaaaaataaaaagctaaaagcaacttgt

SEQ ID NO: 223128 - DNA, 9525 bp, Artificial Sequence
  derived and/or modified sequence
acctgctttcggccccgccccgcccgccgccggcctgctcacggctcctcccgtcctccccgaagccccgcctctgaccccgccctgtcctgtctccgtcccgccccacgcccgccagccagcgtcgctgtctctcgccttccctgaggccccgccttcagccccgccttcaaccccgccccgtcctgcctccgccccgcccccgcttgccggcccgcgtcgccgtctcaccctccccgggctgcgcggccggagctggcacagaggatcctcggccgcggcgacatcaccgcctgggcacgcgggcgctgctctggatacggcgccaccgagagaacccgccgcccgcgggtctctgtcctgcggtccgtggttgcccccacaagcgtccggcgtttcctgagggcgggcgtgtccgggccgtgcgggtcgcggggaccgagcgcggctgaggagaccgagctggggcagcgcctgccgtagcgcgggagacgacgcgggggtcttgcggagccccgcgggagcctggcccgccgtgcagagcagttttctggaactctccacctccgtctcccttggggcccagtgcggcgccgagcccccgtcgggatctgcctgagaaagtgtcatgaaaaaagagcagaagagagacctcactgttgctgaaaggggaattttctttccccgttggcggttacttcatgatcggacgagaagtatctaggtgactgaagatattccatttttatgtttgtacacatgaagctgataaaagaagatgtgaacatgatttctctttgtcataataggctgatgagtaagtaagcctgaaaaatatttgaaatgaaggcaagaattttgaatttttaaaaaccaactaagactttgatcacttgttgaggatgtttctctctcataaatgaaagaaaaacgtattcacaagacaagaagtataaaaagttgagaggaatgacaactgagtccactcactcgaagaatgtcagtacttcatcatcttctttgggcaaacatacacaaatgcatcatacatgtgtggtgagcttatcaccagtgatggttttctgtgctagaaatgactcttaatttgaattttggagtgctttttctctttttttacaatgtgtgttccaactctttgtgttaaatagatttaagtaaaggaggtaaatgctaaattcatagtgttttttacctgtatcacttccctgtgtattatggaaaaattagagattttaacgttattcaaagttttactggaagcaaaactgtgccagggacagagatatacaatttaagttttctctttttggcaactgcacttgcttaaaatgtactgaatgtcagctggatttcacagcatatcagatttacagtctttgtcttatcaaggcctttactgtatgttttatactaaccagatgggaaacacattgagcatcatatctgacatgtatgcctaagggaggagctcccccatggatcatggcgttaatgtttacaggacatttactattcttagcattattgatgtttgctttctctacttttgaggaatctgtgagcaattattccgaatgggcagttttcacagatgatatagatcagtttaaaacacagaaagtgcaagatttcagacccaaccaaaagctgaagaaaagtatgcttcatccaagtttatattttgatgctggagaaatccaagcaatgagacaaaagtctcgtgcaagccatttgcatctttttagagctatcagaagtgcagtgacagttatgctgtccaacccaacatactacctacctccaccaaagcatgctgattttgctgccaagtggaatgaaatttatggtaacaatctgcctcctttagcattgtactgtttgttatgcccagaagacaaagttgcctttgaatttgtcttggaatatatggacaggatggttggctacaaagactggctagtagagaatgcaccaggagatgaggttccaattggccattccttaacaggttttgccactgcctttgactttttatataacttattagataatcatcgaagacaaaaatacctggaaaaaatatgggttattactgaggaaatgtacgagtattccaaggtccgctcatggggcaaacagcttctccataaccaccaagccactaatatgatagcattactcacaggggccttggtgactggagtagataaaggatctaaagcaaatatatggaaacaggctgtagtggatgtcatggaaaagacaatgtttctattgaatcatattgttgatggttctttggatgaaggtgtggcctatggaagctacacagctaaatccgtcacacagtatgtttttctggcccagcgccattttaatatcaacaacttggataataactggttaaagatgcacttttggttctattatgccacccttttacctggcttccaaagaactgtgggtatagcagattccaattataattggttttatggtccagaaagccagctagttttcttggataagttcatcttaaagaatggagctggaaattggttagctcagcaaattagaaagcaccgacctaaagatggaccgatggttccttcaactgcccaaaggtggagtactcttcacactgaatacatctggtatgatccccagctcacaccacagccacctgctgattatggtactgcaaaaatacacacattccctaactggggtgtggttacttatggggctgggttgccaaacacacagaccaacacctttgtgtcttttaaatctgggaagctggggggacgagctgtgtatgacatagttcattttcagccatattcctggattgatgggtggagaagttttaacccaggacatgagcatccagatcagaactcatttacttttgcccccaatggacaagtatttgtttctgaagctctctatggacccaagttgagccaccttaacaatgtattggtgtttgctccatcaccctcaagccagtgtaataagccctgggaaggtcaactgggagaatgtgcgcagtggcttaagtggactggcgaggaggttggtgatgcagctggggaaataatcactgcctctcaacatggggaaatggtatttgtgagtggggaagccgtgtctgcttattcttcagcaatgagactgaaaagtgtatatcgtgctttgcttctcttaaattcccaaactctgctagttgttgatcatattgagaggcaagaagattccccaataaattctgtcagtgccttctttcataatttggatattgattttaaatatatcccatataagtttatgaataggtataatggtgccatgatggatgtgtgggatgcacattacaaaatgttttggtttgatcatcatggcaatagtcccatggccagtatacaggaagcagagcaagctgctgaatttaaaaaacgatggactcaatttgttaatgttacttttcagatggaacccacaatcacaagaattgcatatgtcttttatgggccatatatcaatgtctccagctgcagatttattgatagttccaatcctggacttcagatttctctcaatgtcaataatactgaacatgttgtttctattgtaactgattaccataacctgaagacaagattcaattatctgggattcggtggctttgccagtgtggctgatcaaggccaaataacccgatttggtttgggcactcaagcaatagtaaagcctgtaagacatgataggattattttcccctttggatttaaatttaatatagcagttggattaattttgtgcattagcttggtgattttaactttccaatggcgtttttacctttcttttagaaaactaatgcgatggatattaatacttgttattgccttgtggtttattgagcttttggatgtgtggagcacttgtagtcagcccatttgtgcaaaatggacaaggacagaggctgagggaagcaagaagtctttgtcttctgaagggcaccacatggatcttcctgatgttgtcattacctcacttcctggttcaggagctgaaattctcaaacaactttttttcaacagtagtgattttctctacatcagggttcctacagcctacattgatattcctgaaactgagttggaaatcgactcatttgtagatgcttgtgaatggaaggtgtcagatatccgcagtgggcattttcgtttactccgaggctggttgcagtctttagtccaggacacaaaattacatttgcaaaacatccatctgcatgaacccaataggggtaaactggcccaatattttgcaatgaataaggacaaaaaaagaaaatttaaaaggagagagtctttgccagaacaaagaagtcaaatgaaaggcgcctttgatagagatgctgaatatattagggctttgaggagacacctggtttactatccaagtgcacgtcctgtgctcagtttaagcagtggaagctggacgttaaagcttcatttttttcaggaagttttaggagcttcgatgagggcattgtacatagtaagagaccctcgggcatggatttattcaatgttgtacaatagtaaaccaagtctttattctttgaagaatgtaccagagcatttagcaaaattgtttaaaatagagggaggtaaaggcaaatgtaacttaaattcgggttatgctttcgagtatgaaccattgaggaaagaattatcaaaatccaaatcaaatgcagtgtccctcttgtctcacttgtggctagcaaatacagcagcagccttgagaataaatacagatttgctgcctactagctaccagctggtcaagtttgaagatattgtgcattttcctcagaaaactactgaaaggatttttgcctttcttggaattcctttgtctcctgctagtttaaaccaaatattgtttgccacctctacaaaccttttttaccttccctatgaaggggaaatatcaccaactaatactaatgtttggaaacagaacttgcctagagatgaaattaaactaattgaaaacatctgctggactctgatggatcgcctaggatatccaaagtttatggactaaatgctgcaggtcagcagaaatttgcactaataatacttaccaacccactttgtggatatgaatcagaagagtttgtttattctttagtgtgtgtgtgtgtgtgcacgcgtgtatgtgttcagtgttgtttgcacagagagattgttttaaaaaatggcaccatatttggcctagcaggatttatttttatgtcatcacctcccttgcctttgtttctgaaaattttgtctgctaaaaagtttctgctacagagtggtagatgaagttatatcatggggtcaggggagatgggaaaattttaagtttttgtctaactccccttcatctgtaactgtgctaatctatctagagacctcaaacactgctaaaggccttgcaattgctgctttacccacgcatctcttgctttcaagatggactacaaaagttccttatccttttgaaaaggtcttctgacacacttatcttgcacaaagaaaaagaaaatttcttttactgtgtttaatgttcagtgatatcactgaggaaatggtgaaagctcctatcagaactataggatttcttctgggaaatacagatggaaatacagaatgaatatgtttttttgaggtcggaaactgactttaaaagcctccttgaagttttttacttagaaatataaggaataagtctttgaacaatctgggtggcaagggctggtagattattttagacatgattgtctgtttaaaactctcctttcactttttatcctccctggagctacagctgttcgccatcacatcactcccatcctatcctttctgtcactgtcaagcaaaacaatcagtagttactaatcgctgaactctcaatattgtggggcattttccccccagttgattaattttgcgttaaagactgacacagacttagaatcaaatttatttttctggaattaacactctgtgactcaaagtagtgccactgcagtgtctttttaaactggaaacagaattggaaaactgcctgacttatcttgcatccctttgaatgagtttacagactgccagtgtctgcaaaagttgaaagcaaatgggagatgatgtcagaggcatctgtttcctttaccatctgcatcttattataaatgtagtcgtcataaagtgtggtttattttattttggtaggctctgaaatcaaaatgctacgccattataagccagtggagtaattacaatgtattggatgaaaacataaggcagtgtggagacttgatgaaaatctctgtacagattgcagtcttcttcctgatgtttcaaactgtggttcccccaagctctctaacacttggaagtctgtcattctgacctagataaaagtggttctttctcagtagttattattatgtcaaaatgtgcctccagagtgataaagctctgtatatgttagattccagctaaacctaacttggctgtcatttttcttccattatagtgtgagtggagactgccccccctccccaacatattccttcccatatctctcatgattgtccctctgtaatttcaaaatgaatgaaattcatgtgaatgtaggttgagagggcactgaagacctgaatctacactagtaatctcaagaaagattattcattctatctcagagttaccggcaagcatataaaatgctacttggataatatctacatgaatattgcatgctacatggttgataacactatttccattattgggcagaatctcagtgtttactttcaattcctaggatatgtgatcgtgaatcagatcacatataaaaagtctggattgtcagtagtattagatctgatcaaggtaggaattacaattgcatgcaggtagcaagcaagaaagcagaaactactgttccctttattttaacattgtacagacaatacagaaatgtacctgttggcggccgggtgcagtggctcacgcctgtaatcccagcacttcgggaggccgaggcgggtggatcacgaggtcaggagatcaagaccatcctggctaacacggtgaaaccccgtctctactaaaaaaaaaagtacaaaaaattagccgggcgtggtggcgggcacctgtagtcccagctacacgggaggctgaggcaggagaatggcatgaacctgggaggcagagcttgcagtgagtggagatgcgccactgcactccagcctgggcgacagagcgagactccgcctcaaaaaaaaaaaaaaaagaaaaaaagaaatgtacctgttggcaggagaaggccagatggagtatgtggagtaatagggaaagaagagttacagaaaatgaaaaagaaaatgagttacactgagaatgaatatgggaacacgtcattgatagcaaaagaaaggtacaggcttacgaaaatgatctttacaatgtatcccagctttcacccccacatggcaatgcagagttgtatttacttgtttctgtactcacctactcccaccccaagggaaaattttagacatgaaccctactatttagttattctaaaatagaaagtttgctggagaaagcgtccactcacagattgttctgtaaggaatgttatgtatgggtgagcgggtgacacatccattgggtatgtatgcatgtgatggtgcctgagacccctgccttagaaacagaattcctaaggggattgactctcccagcatgttcccaggtcctgcacccttagggtgatctaggaaaattttaaatagcttctactcttatttttgttctttgaaataattaaaagagggattatcactatctgatacttctgaaagaaacacttacaaaatttcttatctgtaaaatccgtctttttctacattaacttccccaaacataggcctaattgagataattgcttttattataataataggattgaaattttaaaattttgaaaggacttattaattttgctgacaaaagtgaagtaacaaatataatgataattggctttttaaattttcaaacaacatagatttactcaagatgaaataaaaaggccatattcagagttgaatttaatgaaaactcagaggaaataggaaaatctgctcaggagaaagaagctaaatctgcatagatttagtttgtagaatttaatttaaaatttaaattttaacaaagtgatgacacaacaatatgtacgtttaggtgtggacaccaaaatattagacatttgattgtccttttacatagagaataactaataaatgcctgacaagaatgggacaatccttccttgtatcaaaattcccaggtcttgctacattgccctctgcaaatgtattcaaagaagaacctcctccaccacttacttttggttggcataattgttcagcaacgatttctgtacatcaccaagtatctttggcattcttggtatacaaagtatatcacaattttaagtgagtaaatattaatgataatttttgaattgctttgtttggcttgattaactttgatcagaaatagaaacgttttcatttgttgatttaggaaaaagcataaatagaatgcagtataacaccacttccaaaggtaaggatacctaacattcttttttttttttttttttttttttttgggatggagtctcactttgttgcccaggctggagtgcagtggtctgatctcggctcactgcaacctccgcctaccgggttcaagtgattctcctacgtcagcctcctgaatagctgggattacaggtgcacgccaccatgcttggctcatttttgtatttttagtagtgacagcgtttcaccacattggtcaggctggtctcaatctcttgacctggtgatctgcccacctgggcctcccaaaatgctgggattacaggcatgagccaccacacctggcaagggtacctgacattctaagatatcaagacacttaatatgtgggctattagctgcttatttaaatgttgaccaaattgtctgatatatctgattaatcatgatttcacttcatttcggaagaaaaattatccatatcatttttaaagacgcaaatgactttggatttttgcatagagtacaatagacacttcaaacaatagattctaacattctctgaaacacttgagatgtttgagctaccatttatatgggttatttatatttagtctaagtaacacatacatgtttaattgattctgttttcatggatagattcaactaagtcttccaagcaattaattttttgttcgtcgtcgtttttccttcatacgttatctagttatgcagcactggaaacagactgaagatcataaaccagttttatcagacctatgtgtaataagactcctgttaatacaaaaataaaaagctaaaagcaa

SEQ ID NO: 223129 - protein, 764 aa, Artificial Sequence
  derived and/or modified sequence
MAGTSAPGSKRRSEPPAPRPGPPPGTGHPPSKRARGFSAAAAPDPDDPFGAHGDFTADDLEELDTLASQALSQCPAAARDVSSDHKVHRLLDGMSKNPSGKNRETVPIKDNFELEVLQAQYKELKEKMKVMEEEVLIKNGEIKILRDSLHQTESVLEEQRRSHFLLEQEKTQALSDKEKEFSKKLQSLQSELQFKDAEMNELRTKLQTSERANKLAAPSVSHVSPRKNPSVVIKPEACSPQFGKTSFPTKESFSANMSLPHPCQTESGYKPLVGREDSKPHSLRGDSIKQEEAQKSFVDSWRQRSNTQGSILINLLLKQPLIPGSSLSLCHLLSSSSESPAGTPLQPPGFGSTLAGMSGLRTTGSYDGSFSLSALREAQNLAFTGLNLVARNECSRDGDPAEGGRRAFPLCQLPGAVHFLPLVQFFIGLHCQALQDLAAAKRSGAPGDSPTHSSCVSSGVETNPEDSVCILEGFSVTALSILQHLVCHSGAVVSLLLSGVGADSAAGEGNRSLVHRLSDGDMTSALRGVADDQGQHPLLKMLLHLLAFSSAATGHLQASVLTQCLKVLVKLAENTSCDFLPRFQCVFQVLPKCLSPETPLPSVLLAVELLSLLADHDQLAPQLCSHSEGCLLLLLYMYITSRPDRVALETQWLQLEQEVVRALTVMLHRQWLTVRRAGGPPRTDQQRRTVRCLRDTVLLLHGLSQKDKLFMMHCVEVLHQFDQVMPGVSMLIRGLPDVTDCEEAALDDLCAAETDVEDPEVECG

SEQ ID NO: 223130 - DNA, 2295 bp, Artificial Sequence
  derived and/or modified sequence
atggcagggacatctgccccagggagcaagaggcggagtgaacctcccgctcccagaccgggccccccccctggtactggtcacccaccatcaaagagagctcgcggtttctcagccgcggcagctcctgatcctgatgatccttttggcgcgcacggagatttcactgccgacgacttggaggagctggacactctcgcttcgcaggctctttcccagtgtcctgccgctgctcgagatgtttcctcagatcataaggtccaccgactcttagatggcatgtctaaaaatccctcgggaaaaaatcgcgagaccgttccaatcaaagacaatttcgagcttgaggtgctgcaagctcagtacaaagagttgaaagagaaaatgaaagtgatggaggaggaggttctgataaaaaatggggaaataaagattcttcgagactccctgcatcagaccgaaagtgtgctggaagaacagcgtaggagccacttcctcttggagcaggaaaagacacaagccttgagcgataaagaaaaagagttttcgaagaagctgcagtcgctgcaaagtgagctgcaattcaaggatgccgaaatgaacgagttaagaacaaaattgcagaccagcgaacgggcaaataaactggccgccccttccgtgtcacatgtttctccaaggaagaaccctagtgtagtcatcaaaccagaagcttgctcaccccagtttggaaaaacgagcttcccaacgaaagagtcgttttctgctaatatgagcttgccccacccctgccagacagagtctggatataagcctctggtaggacgggaggactccaaaccacattccctgagaggagattccatcaagcaggaagaggcgcagaagtcgttcgtggactcctggcggcagcggtccaatactcaggggtccattctgatcaaccttttattgaagcagccactcattccagggtcttcgcttagtctgtgccacctactgtccagcagcagtgagtcccctgctggcacaccgctgcagcctcccgggtttgggagcacactcgctggaatgagcggactacggaccaccggttcatatgacggctcctttagtctctcagcgcttcgcgaggctcagaacctcgccttcacaggacttaacttagtagcaagaaacgagtgttccagggacggtgatcctgcagagggaggacgcagagcatttcccctgtgccaacttcctggagcagttcatttcctgccgttggtgcagtttttcataggcctccattgtcaggctctgcaagacttagcggcagccaaacggagtggagcaccgggtgatagcccaacacactcttcctgtgtgtcctccggagttgagacaaatcccgaagatagcgtctgtatcctggaaggtttcagtgtgaccgccctgtcaatcctgcaacatcttgtttgccactcaggtgccgtggtgagcctgctcctcagcggcgtaggggctgatagcgccgccggtgaggggaaccggtctctcgtgcacaggctgtcagacggagatatgacaagcgctcttagaggggttgctgacgatcaaggccagcaccccctgttgaagatgctcctacaccttctcgcttttagctccgcggctacaggtcacttgcaggcttccgtcctcacccaatgtctcaaggtactggtgaagttggccgaaaatacgtcctgtgacttcctccctagattccaatgtgttttccaggtgctccccaagtgcctgtctccggagacccccttgccctccgtcctgctggccgtggagctgctcagcttgctggccgatcacgaccagctcgcccctcagctctgcagtcactcggagggttgtctgcttctgctgctgtatatgtatatcacatctcgcccagatagggtagccctagagacacagtggctgcaattggaacaggaggttgtgcgggccttgaccgtgatgctgcatcgccagtggctgaccgttcgccgggctggcggacccccaaggaccgatcagcaaaggcgaacggtacgttgtctcagagacactgtgctcctgctgcatggtttgtctcagaaggataagctgttcatgatgcactgtgtcgaagttcttcaccagttcgaccaggtgatgcctggggtgtctatgctcatccgcggcctgcctgacgttacagattgcgaagaggccgcactcgatgacttgtgtgcagccgaaacagacgtggaagatcctgaagtagagtgtgggtag

SEQ ID NO: 223131 - DNA, 2295 bp, Artificial Sequence
  derived and/or modified sequence
atggccggcaccagcgcccctggcagcaagagaagaagtgagcccccagccccccggcccggccccccacctggcaccggccacccccccagcaagagggcccggggcttctctgctgctgctgccccagaccctgatgacccctttggagcccacggggacttcaccgcagatgacctggaggagctggacaccctggccagccaggccctgagccagtgcccagctgctgccagagatgtgtccagtgaccacaaggtgcaccggctgctggatggcatgagcaagaaccccagcggcaagaaccgggagaccgtgcccatcaaggacaactttgagctggaggtgctgcaggcccagtacaaggagctgaaggagaagatgaaggtgatggaggaggaggtgctgatcaagaatggagagatcaagatcctgcgggacagcctgcaccagacagagagcgtgctggaggagcagaggaggagccacttcctgctggagcaggagaagacccaggccctgagtgacaaggagaaggagttcagcaagaagctgcagagcctgcagagcgagctgcagttcaaggatgctgagatgaatgagctgcggaccaagctgcagaccagcgagcgggccaacaagctggccgcccccagcgtgagccacgtgagccccaggaagaaccccagcgtggtgatcaagccagaggcctgcagcccccagtttgggaagaccagcttccccaccaaggagagcttcagcgccaacatgagcctgccccacccctgccagacagaaagtggctacaagcccctggtgggccgggaggacagcaagccccacagcctgcggggggacagcatcaagcaggaggaggcccagaagagctttgtggacagctggaggcagaggagcaacacccagggcagcatcctgatcaacctgctgctgaagcagcccctcatccctggcagcagcctgagcctgtgccacctgctgagcagcagcagcgagagccctgctggcacccccctgcagcccccaggcttcggcagcaccctggccggcatgagcggcctgcggaccaccggcagctatgatggcagcttcagcctgagcgccctgcgggaggcccagaacctggccttcaccggcctgaacctggtggccagaaatgaatgttccagagatggagaccctgctgagggcggcagaagagccttccccctgtgccagctgcccggggctgtgcacttcctgcccctggtgcagttcttcatcggcctgcactgccaggccctgcaggacctggccgccgccaagaggtctggggcccctggggacagccccacccacagcagctgtgtgagcagcggcgtggagaccaacccagaagattctgtgtgcatcctggagggcttctctgtgacagccctgagcatcctgcagcacctggtgtgccacagcggggctgtggtgtccctgctgctgagcggcgtgggcgctgacagcgctgctggggagggcaacagaagcctggtgcaccggctgagtgatggagacatgaccagcgccctgcggggcgtggctgatgaccagggccagcaccccctgctgaagatgctgctgcacctgctggccttcagcagcgctgccaccggccacctgcaggcctctgtgctgacccagtgcctgaaggtgctggtgaagctggccgagaacaccagctgtgacttcctgccccgcttccagtgtgtgttccaggtgctgcccaagtgcctgagccctgagacccccctgcccagcgtgctgctggccgtggagctgctgagcctgctggccgaccatgaccagctggccccccagctgtgcagccacagcgagggctgcctgctgctgctgctgtacatgtacatcaccagcaggccagacagagtggccctggagacccagtggctgcagctggagcaggaggtggtgcgggccctgactgtgatgctgcaccggcagtggctgactgtgagaagagctgggggcccccccaggacagaccagcagaggagaacagtgcgctgcctgcgggacacagtgctgctgctgcacggcctgagccagaaggacaagctgttcatgatgcactgtgtggaggtgctgcaccagtttgaccaggtgatgcctggggtgtccatgctgatccggggcctgcctgatgtgacagactgtgaggaggccgccctggatgacctgtgtgccgctgagacagatgtggaggaccctgaggtggagtgtggctag

SEQ ID NO: 223132 - DNA, 2295 bp, Artificial Sequence
  derived and/or modified sequence
atggccggcaccagcgcccccggcagcaagcggcggagcgagccccccgcacctaggcctggtccacctcccggaaccgggcatcctccttccaaaagggcaagaggcttctctgcagctgccgccccagatcctgatgacccatttggagcccacggagatttcactgcagatgacctggaggagctcgatactctggcttctcaggcactcagccaatgcccggcagctgctcgagacgtcagttcagaccataaggttcacagactgctggatggcatgagcaaaaacccgtctggcaagaatagggaaaccgtgccaatcaaggataatttcgagttggaggtactgcaggcccagtacaaggagctaaaggagaagatgaaggtgatggaagaagaagtgctgattaagaatggggaaatcaagatactacgcgattccctgcaccaaacggaaagcgtgctggaggaacagcgacgatctcacttcttactcgaacaggaaaagacgcaggcgctgagtgataaggagaaggagttttctaaaaagttacagagtcttcaatcagagctacagtttaaggacgctgaaatgaacgaactgaggactaagcttcaaacatcagaacgtgccaataagctagccgcacccagtgttagccatgtgtccccaaggaagaacccgtcagtggtaataaagcccgaggcctgtagtccacagtttggaaaaacttccttcccgacaaaagagagtttctccgccaatatgagcctcccgcacccatgtcaaaccgaaagtggctacaaaccactggtcggacgtgaagatagtaagccccactcactgcggggcgacagtatcaagcaggaggaagcacagaaaagttttgtggattcatggcggcagaggagtaatactcagggaagcatattgattaatctcttgctcaagcaacctttgatccctggcagcagtctgtctctgtgccacctgctgtcaagttcgtcagaatcccctgctggaacccctctgcagcctcccggctttggcagcaccctggcgggtatgtcaggcttacgcaccacaggcagttatgacggttcattttctttatctgctctcagggaagcacaaaacctggcattcaccggcctgaacttagtggcaaggaatgagtgttcaagggacggtgatcccgcagaaggcggcagaagggcatttccattgtgccagctccccggagctgtgcattttcttcctctggtccagttttttatcggtcttcactgccaggcactgcaagatttggccgctgcaaagcgatcaggtgcccccggagactcacctacgcatagctcttgtgtgtccagcggggtcgaaacgaatcccgaggatagcgtttgtatcctcgagggtttttcagttacagccctttcaattctacagcacctggtttgccacagtggcgccgtggtttccctactgctatcaggagtgggcgccgatagcgccgctggcgaggggaaccggagcttggtacatagactgtctgacggggatatgacttccgcactgaggggggttgcagacgaccaaggacagcatcctttactaaaaatgctgctgcatttgctggcattcagttcagcagccaccggccaccttcaggcttcggtcctcacacagtgcctgaaagttcttgttaaattagcagagaatacctcatgcgattttctgccaagattccagtgcgtgtttcaggtgctgcccaaatgcttaagcccagaaactcctttaccctcagtgttactggcggtggaactgttgagcctgctggcggatcacgaccagttggcaccgcagctgtgttcacactccgaagggtgcctattgctcctcttgtatatgtacatcacaagccgcccagaccgggttgccctagagacacagtggttgcagcttgaacaggaagtcgtgagagcccttactgtgatgctgcatagacagtggctaaccgtccggagagccggtggaccacctaggacagatcagcagagacggactgtaaggtgtctgagagacacagtgttattgctacacggcttgagtcaaaaagataaactgttcatgatgcattgtgttgaggttcttcatcagttcgatcaggtaatgcccggcgtgagtatgctaattcgtggcctgcctgatgtaaccgactgcgaagaggccgccctggacgacctgtgtgctgcagaaactgacgttgaagatccagaagttgaatgcgggtag

SEQ ID NO: 223133 - DNA, 2295 bp, Artificial Sequence
  derived and/or modified sequence
atggccggtacctctgccccaggttctaaacgtcgctctgagccccctgccccaaggcccggaccccctcctggtaccggacacccgccatctaaaagagcgagggggttttctgctgcggcagccccagatccagatgatcctttcggcgctcatggcgactttacagctgatgacctagaggaactggatactctggcgtcccaggctctgagtcagtgccccgctgctgcaagagacgtgtcatcggaccacaaggtccatcgcttgttagacggaatgagcaagaatccaagtgggaagaatcgagagactgtaccaataaaggacaactttgaacttgaagttttgcaggcccagtataaggagttgaaagaaaaaatgaaagttatggaggaagaggtgctcatcaagaatggggaaatcaagatactgcgcgattccctgcatcagactgagtccgtgctggaagaacaaaggagatctcattttctgctggagcaggaaaagacccaagccctgagcgataaggagaaggagttcagcaagaaactgcagagcctgcaatccgaactccaattcaaagacgctgagatgaacgagttaagaacaaagttgcagacctcagagcgggctaacaaactcgccgcaccctctgtgagtcacgtcagcccgcgaaagaaccctagcgtcgtgatcaagcctgaagcctgctcaccacagtttggtaagacttcattccccacaaaggaatcctttagcgctaatatgtccctgccccacccttgccagacagagagtgggtataagcctttggttggcagggaagactctaagccacattccctgcgcggtgatagcatcaagcaggaggaggcgcaaaaaagtttcgtggatagttggcggcagaggagcaacacgcaaggatctatcctgattaacctgctgctgaagcagccgctgattccaggatcctccctgagcctttgccacttactgtcttcttcaagcgagagcccagccggtaccccactgcagccccctggcttcggctcaaccctggccggaatgagcggtctgagaacaacaggtagctatgacgggtcctttagtctatccgcattgagggaagcgcagaatcttgctttcactggtcttaacctggtagcgagaaacgagtgttcacgcgatggcgatcccgcagagggcggacgccgtgcattccccctatgtcaactcccgggagccgtccattttctccctctggttcagttttttattgggcttcactgtcaagcacttcaggacctcgctgccgctaagaggtctggagccccaggagactcaccaacccactcttcttgcgtgtctagcggagtggaaactaacccggaggactccgtgtgcattctggaagggttctcggttaccgcactgtcaatcctgcaacatctggtttgccactccggagctgtcgtctccctcctgctgtcaggagtgggggcagattctgctgccggagaggggaacaggtcattggtacatcgtttgtctgacggggacatgacatctgctctgcgcggagtagcagacgatcaaggacagcatccactcctgaagatgcttctgcacttgctggctttttctagtgccgcaacaggtcacttgcaggccagcgtgctgacccaatgtctaaaggtgctggtgaaacttgcagaaaacacttcttgcgactttctgcctaggttccagtgcgtgtttcaggtgctcccgaagtgtttgtcacccgagacaccactgccaagtgtgctcctggccgtggagttgctgtctttactggcagatcacgatcaactggcacctcagttgtgttcccactctgaagggtgcctacttctcctgctttatatgtacattacatctcggccagaccgggtggccctggagactcagtggctgcaacttgaacaggaggttgtgcgagcattgactgttatgttacaccggcagtggttaacagtgagacgagcaggcggacccccaagaaccgaccagcaacgcaggacagttcgctgcctgagagatactgtcctactgctgcatggactatcccaaaaggataagttgtttatgatgcactgcgtcgaggtcctccatcagttcgaccaggttatgccaggcgtgtcaatgcttatacgaggcctgcctgacgtgactgactgtgaagaggccgctctggatgacttgtgtgccgcagaaacagatgtcgaagatcccgaagtcgagtgtggctag

SEQ ID NO: 223134 - DNA, 2509 bp, Artificial Sequence
  derived and/or modified sequence
gggcactcgcggcggaggcaagcggcggcgcgcggacggttggtccagttctccggcctggcggcaggcaagtctagctcggcgctgtcggatacttggggtgagcggaaagcatggcggggacctccgcgccaggcagcaagaggcggagcgagcccccggcgcctcgccccggcccgccgccgggcaccgggcaccccccgagcaagcgggcccggggcttctccgcagccgctgccccggaccctgacgacccgttcggcgcgcatggggacttcactgccgacgacctggaggagcttgacaccctcgcgtcacaggccctgagccaatgtccggccgcggctcgggacgtgtccagtgatcataaggtccacagattattagatggcatgtcaaaaaatccttcagggaaaaacagagaaactgttccaattaaagataatttcgaattagaggtacttcaggcacaatacaaagaacttaaagaaaagatgaaagtaatggaagaagaagttctcattaagaatggagaaattaaaattttgcgagactcactacatcagacggaatccgttctagaggaacagagaagatcacattttcttcttgagcaagagaaaacccaagcactcagtgacaaggaaaaggaattctccaaaaagctccaatcattgcagtctgaactccagtttaaagatgcagagatgaatgaattaaggacaaagctccagaccagtgaacgagcaaataaactggctgctccctctgtttcccatgtcagtcctaggaaaaacccttctgtggttataaagccagaagcatgttctccacaatttggaaaaacatcttttcctacaaaggagtcttttagtgctaacatgtcccttccccacccctgccagacggagtcaggatacaagcctctggtgggcagagaggatagtaagccccacagtctgagaggtgactccataaaacaagaagaggcccagaaaagctttgttgacagctggagacagagatcaaacactcaaggttccattttgataaacctgctcctgaagcagcctttgatcccagggtcatccctaagcctttgccacctcctgagtagtagttctgagtctcctgctggcacccccctgcagccaccagggtttggcagtaccttggctggaatgtcaggcctcaggaccacaggttcttatgatgggtcattttccctctcagccctgagagaagcacagaacctggcattcactggactgaatctggttgcccggaatgagtgctcacgtgatggagacccagcagagggaggcagaagggccttcccactctgccagcttcctggagccgtgcatttcctcccccttgtacagttcttcatcggcttacactgccaggccctgcaggacttggcagctgctaagagaagcggagcacctggggactcaccgacacattcctcctgcgtgagctctggggtagagaccaaccctgaggactcagtgtgcatcctggaaggcttctctgtgactgcacttagcattcttcagcacctggtgtgccacagcggagcagtcgtctccctattactgtcaggagtgggggcagattctgctgctggggaaggaaacaggagcctggttcacaggcttagtgatggagatatgacctcagccctaaggggggttgctgatgaccaaggacagcacccactgttgaagatgcttcttcacctgttggctttctcttctgcagcaacaggtcaccttcaagccagtgtcctgacccagtgccttaaggttttggtgaaattagccgaaaacacttcctgtgatttcttgcccaggttccagtgtgtgttccaagtgctgccaaagtgcctcagcccagagacacccctgcctagcgtgctgctggctgttgagctcctctccctgctggcggaccacgaccagctggcacctcagctctgttcccactcagaaggctgcctcctgctgctgctgtacatgtacatcacatcacggcctgacagagtggccttggagacacaatggctccagctggaacaagaggtggtcagagcgctcacggtgatgttgcacagacagtggctgacagtgcggagggcagggggacccccaaggaccgaccagcagaggcggacagtgcgctgtctgcgggacacggtgctgctgctgcacggcctatcgcagaaggacaagctcttcatgatgcactgcgtggaggtcctgcatcagtttgaccaggtgatgccgggggtcagcatgctcatccgagggcttcctgatgtgacggactgtgaagaggcagccctggatgacctctgtgccgcggaaaccgatgtggaagaccccgaggtggagtgtggctgaggccctgagtgtccagccacatggtggcaccagcaccactcctttccttaccacatcaactgattaaagcagtgaccagcaggaactgcccagagaactgg

SEQ ID NO: 223135 - DNA, 711 bp, Artificial Sequence
  derived and/or modified sequence
gattggcccctgggccaggggcggggcactcgcggcggaggcaagcggcggcgcgcggacggttggtccagttctccggcctggcggcaggtgatcataaggtccacagattattagatggcatgtcaaaaaatccttcagggaaaaacagagaaactgttccaattaaagataatttcgaattagaggtacttcaggcacaatacaaagaacttaaagaaaagatgaaagtaatggaagaagaagttctcattaagaatggagaaattaaaattttgcgagactcactacatcagacggaatccgttctagaggaacagagaagatcacattttcttcttgagcaagagaaaacccaagcactcagtgacaaggaaaaggaattctccaaaaagctccaatcattgcagtctgaactccagtttaaagatgcagagatgaatgaattaaggacaaagctccagaccagtgaacgagcaaataaactggctgctccctctgtttcccatgtcagtcctaggaaaaacccttctgtggttataaagccagaagcatgttctccacaatttggaaaaacatcttttcctacaaaggagtcttttagtgctaacatgtcccttccccacccctgccagacggagtcaggatacaagcctctggtgggcagagaggatagtaagccccacagtctgagaggtgactccataaaac

SEQ ID NO: 223136 - DNA, 2295 bp, Artificial Sequence
  derived and/or modified sequence
atggccggcaccagcgcccccggcagcaagagaagaagcgagccccccgcccccagacccggccccccccccggcaccggccacccccccagcaagagagccagaggcttcagcgccgccgccgcccccgaccccgacgaccccttcggcgcccacggcgacttcaccgccgacgacctggaggagctggacaccctggccagccaggccctgagccagtgccccgccgccgccagagacgtgagcagcgaccacaaggtgcacagactgctggacggcatgagcaagaaccccagcggcaagaacagagagaccgtgcccatcaaggacaacttcgagctggaggtgctgcaggcccagtacaaggagctgaaggagaagatgaaggtgatggaggaggaggtgctgatcaagaacggcgagatcaagatcctgagagacagcctgcaccagaccgagagcgtgctggaggagcagagaagaagccacttcctgctggagcaggagaagacccaggccctgagcgacaaggagaaggagttcagcaagaagctgcagagcctgcagagcgagctgcagttcaaggacgccgagatgaacgagctgagaaccaagctgcagaccagcgagagagccaacaagctggccgcccccagcgtgagccacgtgagccccagaaagaaccccagcgtggtgatcaagcccgaggcctgcagcccccagttcggcaagaccagcttccccaccaaggagagcttcagcgccaacatgagcctgccccacccctgccagaccgagagcggctacaagcccctggtgggcagagaggacagcaagccccacagcctgagaggcgacagcatcaagcaggaggaggcccagaagagcttcgtggacagctggagacagagaagcaacacccagggcagcatcctgatcaacctgctgctgaagcagcccctgatccccggcagcagcctgagcctgtgccacctgctgagcagcagcagcgagagccccgccggcacccccctgcagccccccggcttcggcagcaccctggccggcatgagcggcctgagaaccaccggcagctacgacggcagcttcagcctgagcgccctgagagaggcccagaacctggccttcaccggcctgaacctggtggccagaaacgagtgcagcagagacggcgaccccgccgagggcggcagaagagccttccccctgtgccagctgcccggcgccgtgcacttcctgcccctggtgcagttcttcatcggcctgcactgccaggccctgcaggacctggccgccgccaagagaagcggcgcccccggcgacagccccacccacagcagctgcgtgagcagcggcgtggagaccaaccccgaggacagcgtgtgcatcctggagggcttcagcgtgaccgccctgagcatcctgcagcacctggtgtgccacagcggcgccgtggtgagcctgctgctgagcggcgtgggcgccgacagcgccgccggcgagggcaacagaagcctggtgcacagactgagcgacggcgacatgaccagcgccctgagaggcgtggccgacgaccagggccagcaccccctgctgaagatgctgctgcacctgctggccttcagcagcgccgccaccggccacctgcaggccagcgtgctgacccagtgcctgaaggtgctggtgaagctggccgagaacaccagctgcgacttcctgcccagattccagtgcgtgttccaggtgctgcccaagtgcctgagccccgagacccccctgcccagcgtgctgctggccgtggagctgctgagcctgctggccgaccacgaccagctggccccccagctgtgcagccacagcgagggctgcctgctgctgctgctgtacatgtacatcaccagcagacccgacagagtggccctggagacccagtggctgcagctggagcaggaggtggtgagagccctgaccgtgatgctgcacagacagtggctgaccgtgagaagagccggcggcccccccagaaccgaccagcagagaagaaccgtgagatgcctgagagacaccgtgctgctgctgcacggcctgagccagaaggacaagctgttcatgatgcactgcgtggaggtgctgcaccagttcgaccaggtgatgcccggcgtgagcatgctgatcagaggcctgcccgacgtgaccgactgcgaggaggccgccctggacgacctgtgcgccgccgagaccgacgtggaggaccccgaggtggagtgcggctag

SEQ ID NO: 223137 - protein, 375 aa, Artificial Sequence
  derived and/or modified sequence
MSGSQNNDKRQFLLERLLDAVKQCQIRFGGRKEIASDSDSRVTCLCAQFEAVLQHGLKRSRGLALTAAAIKQAAGFASKTETEPVFWYYVKEVLNKHELQRFYSLRHIASDVGRGRAWLRCALNEHSLERYLHMLLADRCRLSTFYEDWSFVMDEERSSMLPTMAAGLNSILFAINIDNKDLNGQSKFAPTVSDLLKESTQNVTSLLKESTQGVSSLFREITASSAVSILIKPEQETDPLPVVSRNVSADAKCKKERKKKKKVTNIISFDDEEDEQNSGDVFKKTPGAGESSEDNSDRSSVNIMSAFESPFGPNSNGSQSSNSWKIDSLSLNGEFGYQKLDVKSIDDEDVDENEDDVYGNSSGRKHRGHSESPEK

SEQ ID NO: 223138 - protein, 428 aa, Artificial Sequence
  derived and/or modified sequence
MHSWAPLKVLHNDSDILFPVSGVGSYSPADAPLGSLENGTGPEDHVLPDPGLRYSVEASSPGHGSPLSSLLPSASVPESMTISELRQATVAMMNRKDELEEENRSLRNLLDGEMEHSAALRQEVDTLKRKVAEQEERQGMKVQALARENEVLKVQLKKYVGAVQMLKREGQTAEVPNLWSVDGEVTVAEQKPGEIAEELASSYERKLIEVAEMHGELIEFNERLHRALVAKEALVSQMRQELIDLRGPVPGDLSQTSEDQSLSDFEISNRALINVWIPSVFLRGKAANAFHVYQVYIRIKDDEWNIYRRYTEFRSLHHKLQNKYPQVRAYNFPPKKAIGNKDAKFVEERRKQLQNYLRSVMNKVIQMVPEFAASPKKETLIQLMPFFVDITPPGEPVNSRPKAASRFPKLSRGQPRETRNVEPQSGDL

SEQ ID NO: 223139 - protein, 268 aa, Artificial Sequence
  derived and/or modified sequence
MLLADRCRLSTFYEDWSFVMDEERSSMLPTMAAGPNSILFAINIDNKDLNGQSKFAPTVSDLLKESTQNVTLLKESTQGVSSVFREITASSAISILIKPEQETDPLPVVSRNVSADAKCKKERKKKKQVTNIISFDDEEDEQNSGDMFKKTPGAGESSEDNSDHSSVNIMSAFESPFGPNSNGSQSSNSWKIDSLSLNREFGYQKLDVKSIDDEDVDENEDDVYGNSSGRKHRGHSESPEKNGAHSVTQAGVQWHDLSSLQPLPPGFK

SEQ ID NO: 223140 - protein, 116 aa, Artificial Sequence
  derived and/or modified sequence
MLLADRCRLSTFYEDWSFVMDEERSSMLPTMAAGPNSILFAINIDNKDLNGQSKFAPTVSDLLKESTQNVTLLKESTQGVSSVFREITASSAISILIKPEQETDPLPVVSRNVSAG

SEQ ID NO: 223141 - DNA, 1287 bp, Artificial Sequence
  derived and/or modified sequence
atgcacagctgggcccccctgaaggtgctgcacaacgacagcgacatcctgttccccgtgagcggcgtgggcagctacagccccgccgacgcccccctgggcagcctggagaacggcaccggccccgaggaccacgtgctgcccgaccccggcctgagatacagcgtggaggccagcagccccggccacggcagccccctgagcagcctgctgcccagcgccagcgtgcccgagagcatgaccatcagcgagctgagacaggccaccgtggccatgatgaacagaaaggacgagctggaggaggagaacagaagcctgagaaacctgctggacggcgagatggagcacagcgccgccctgagacaggaggtggacaccctgaagagaaaggtggccgagcaggaggagagacagggcatgaaggtgcaggccctggccagagagaacgaggtgctgaaggtgcagctgaagaagtacgtgggcgccgtgcagatgctgaagagagagggccagaccgccgaggtgcccaacctgtggagcgtggacggcgaggtgaccgtggccgagcagaagcccggcgagatcgccgaggagctggccagcagctacgagagaaagctgatcgaggtggccgagatgcacggcgagctgatcgagttcaacgagagactgcacagagccctggtggccaaggaggccctggtgagccagatgagacaggagctgatcgacctgagaggccccgtgcccggcgacctgagccagaccagcgaggaccagagcctgagcgacttcgagatcagcaacagagccctgatcaacgtgtggatccccagcgtgttcctgagaggcaaggccgccaacgccttccacgtgtaccaggtgtacatcagaatcaaggacgacgagtggaacatctacagaagatacaccgagttcagaagcctgcaccacaagctgcagaacaagtacccccaggtgagagcctacaacttcccccccaagaaggccatcggcaacaaggacgccaagttcgtggaggagagaagaaagcagctgcagaactacctgagaagcgtgatgaacaaggtgatccagatggtgcccgagttcgccgccagccccaagaaggagaccctgatccagctgatgcccttcttcgtggacatcaccccccccggcgagcccgtgaacagcagacccaaggccgccagcagattccccaagctgagcagaggccagcccagagagaccagaaacgtggagccccagagcggcgacctgtag

SEQ ID NO: 223142 - DNA, 1287 bp, Artificial Sequence
  derived and/or modified sequence
atgcactcttgggcccccttgaaggtcctgcacaatgacagcgacatcctattccccgtgtccggggtggggtcatatagccctgccgatgctcctctgggttccctcgagaatggcactgggcccgaagaccacgtcttgcccgacccgggcctgagatactctgtggaagcatcttcgcccggccacgggagtcccctcagttcactgctgcccagtgcctctgtccctgaaagtatgactattagcgaattaaggcaggccaccgtggccatgatgaatcgtaaagacgaattggaagaggagaatcgatcactgcgtaacttgctggacggggagatggagcattcagctgcattgaggcaggaggtggacaccctgaagaggaaggtcgctgaacaggaggagcggcagggcatgaaagtacaggccctagccagggagaatgaagtgctcaaggtccagctgaagaagtacgttggcgccgtgcaaatgctgaagagggagggacagaccgctgaggttccaaacttgtggtcagtcgacggggaggtgacagtggcggaacagaagcccggagaaattgctgaggagctggcctcttcttacgagagaaagctcatcgaggtagccgagatgcatggcgaactgatcgagttcaatgagagattgcaccgcgccctggtggcaaaggaagctctggtgtctcagatgcggcaggaacttattgacttaagggggcctgtgccaggtgatctgtctcaaactagcgaagaccagagtctgtccgattttgagatcagtaaccgggcactcataaatgtgtggattcccagtgttttcctgagaggcaaggcagcaaacgcatttcacgtttaccaagtttatattcggatcaaggatgacgaatggaatatatatcgcagatatacagaattccgctctctgcatcacaaattgcagaacaagtatccccaggtacgcgcatacaattttcctccaaagaaagcgattgggaataaggatgcaaagtttgttgaggaacggaggaagcaactgcagaattacctcaggagcgtcatgaacaaagttattcagatggtccccgagttcgccgcttctcctaagaaggaaacactgattcagttgatgcccttcttcgtggatataactcccccgggcgaaccggtgaattccagaccaaaggcagccagcaggttcccaaagctaagtagaggacagccgcgcgagacaagaaacgtggaacctcaatcaggtgacctgtag

SEQ ID NO: 223143 - DNA, 1287 bp, Artificial Sequence
  derived and/or modified sequence
atgcacagctgggcccccctgaaggtgctgcacaatgacagcgacatcctcttccctgtgtctggagtgggcagctacagccctgcagatgcccccctgggcagcctggagaatggcaccggcccagaagatcatgtgctgcctgaccccggcctgcgctacagcgtggaggccagcagccctggccacggcagccccctgagcagcctgctgcccagcgcctctgtgcctgagagcatgaccatcagcgagctgcggcaggccaccgtggccatgatgaacaggaaggatgagctggaggaggagaacagaagcctgaggaacctgctggatggagagatggagcacagcgctgccctgcggcaggaggtggacaccctgaagaggaaggtggccgagcaggaggagcggcagggcatgaaggtgcaggccctggcccgggagaatgaggtgctgaaggtgcagctgaagaagtatgtgggcgctgtgcagatgctgaagcgggagggccagacagctgaggtgcccaacctgtggagcgtggatggagaggtgacagtggccgagcagaagccaggagaaattgctgaggagctggccagcagctatgaaaggaagctgattgaggtggccgagatgcacggggagctgattgagttcaatgaaaggctgcaccgggccctggtggccaaggaggccctggtgtcccagatgaggcaggagctgattgacctgcggggccctgtgcctggggacctgagccagaccagcgaggaccagagcctgagtgactttgagatcagcaacagagccctgatcaacgtgtggatccccagcgtcttcctgcggggcaaggccgccaatgccttccacgtgtaccaggtgtacatccgcatcaaggatgatgagtggaacatctaccgccgctacacagagttccgcagcctgcaccacaagctgcagaacaagtacccccaggtgcgggcctacaacttcccccccaagaaggccatcggcaacaaggatgccaagtttgtggaggagaggaggaagcagctgcagaactacctgcggtctgtgatgaacaaggtgatccagatggtgcctgagtttgctgccagccccaagaaggagaccctcatccagctgatgcccttctttgtggacatcaccccacctggagagcctgtgaacagccggcccaaggccgccagccgcttccccaagctgagccggggccagccccgggagaccagaaatgtggagccccagagcggggacctgtag

SEQ ID NO: 223144 - DNA, 1287 bp, Artificial Sequence
  derived and/or modified sequence
atgcacagctgggcccccctgaaggtgctgcacaacgacagcgacattttgttccccgtgtctggagtgggctcttactcacctgctgacgctcccctgggctctctagaaaacgggacgggcccagaggatcacgttcttccagaccccggcctgcgatatagcgtggaggcctcctcccctggccacggctccccattatcttcattactcccctctgctagcgtgcccgaatctatgaccatcagcgaacttaggcaggctactgtcgccatgatgaataggaaggatgaactcgaggaagaaaatagatcgctgagaaatctactggacggagagatggagcactcagccgctctccggcaggaagtggacaccctgaaacgtaaagtggcagagcaggaggaacgccaggggatgaaagtgcaggctcttgcaagggagaatgaggtcctcaaggtgcaactgaagaagtatgttggggctgtccagatgctcaaacgtgagggacagacagcagaggtgcctaatctatggagtgtggacggcgaggttaccgtggccgagcaaaaacctggagagattgccgaggaactagcgtcttcttacgagaggaaactaatcgaggtagcagagatgcacggtgagttaattgagttcaacgaaagattacaccgggccctggtagctaaggaggcactggtgagccaaatgcggcaggaactcatagatctacggggccccgttcctggcgacctcagccagaccagcgaggaccaaagcctctccgactttgagattagtaaccgggccctgatcaacgtctggatcccttccgtgtttttgcgcggtaaggccgctaacgcttttcatgtgtatcaagtgtatattaggatcaaggacgacgaatggaacatatatcggaggtacactgaatttcggagcctgcaccacaaactgcagaacaagtacccacaagtccgggcttacaacttcccgcccaaaaaagcgatcggtaataaggacgccaaattcgttgaagagcgtagaaagcaactgcaaaactatttacgctcagtgatgaacaaggtcatccaaatggtgcccgagttcgccgcctctccaaagaaagagaccctgatccagctaatgccattctttgtggacatcactccccctggcgaaccagttaatagccgaccaaaagccgcctctcggtttcctaaactgagtcgagggcagccacgcgagaccaggaacgtggaacctcaaagtggcgatctgtag

SEQ ID NO: 223145 - DNA, 1287 bp, Artificial Sequence
  derived and/or modified sequence
atgcactcatgggcgccactgaaggtgcttcataatgacagcgatatactgttcccggtaagcggcgtcgggagctatagtcccgctgacgcaccgctgggaagtctcgagaatggtacagggccagaggaccacgtgctgccagaccccggactgcggtacagtgttgaggccagcagtcccggacacggaagcccactgtccagtctgctgccttctgccagtgtgcccgaaagcatgacgatttccgagctccgacaggctacagtggccatgatgaacagaaaggacgaattagaggaggagaatagatcactgcgaaatctgttggacggtgagatggagcactccgccgcactacgccaggaggtggatacacttaaacgcaaggtggcggaacaggaagagcgtcagggaatgaaggtgcaggcactggccagggaaaatgaggtgcttaaggtccaattgaagaaatatgtgggagctgtccagatgcttaagcgcgagggccaaacagctgaggtgccgaacctttggtctgtggatggggaggtgacggtggccgaacaaaagcccggagagatagctgaagagctggcttcttcatacgagagaaaactcatagaggtcgctgaaatgcacggcgaactgatcgaattcaacgaaaggctccatagagccctggtcgcgaaagaagccctggtttcacagatgcgccaggagcttattgacctgcggggacccgtccctggtgacctcagccaaaccagtgaggatcagtccctgagcgattttgaaatcagcaacagagctttaattaatgtctggattccgtcagttttcctgaggggaaaagccgctaacgcatttcatgtctaccaggtgtacattaggatcaaggatgacgagtggaacatctacaggcgatacacggagttccgcagtctgcatcacaaactgcagaataaataccctcaggtgagagcttataactttccaccaaaaaaggccatagggaacaaagacgccaagttcgttgaagagcgcaggaagcagctccagaactacctgagatcggtaatgaataaggtgattcaaatggtccccgagttcgctgcatcaccaaaaaaagagacccttattcagttaatgccattttttgtagacatcacgccgccaggggagccagtgaattcacgccctaaggctgcctcgcggtttcctaaactgtctagaggccagccacgagaaacccggaacgtagagccccagtctggggatttgtag

SEQ ID NO: 223146 - DNA, 7002 bp, Artificial Sequence
  derived and/or modified sequence
ggggccactcggagtcgcccgagaagccactggaagggaacacctgcctctcccagatgcacagctgggctccgctgaaggtgctgcacaatgactccgacatcctcttccctgtcagtggcgtgggctcctacagcccagcagatgcccccctcggaagcctggagaacgggacaggaccagaggaccacgttctcccagatcctggacttcggtacagtgtggaagccagctctccaggccacggaagtcctctgagcagcctgttaccttctgcctcagtgccagagtccatgacaattagtgaactgcgccaggccactgtggccatgatgaacaggaaggatgagctggaggaggagaacagatcactgcgaaacctgctcgacggtgagatggagcactcagccgcgctccggcaagaggtggacaccttgaaaaggaaggtggctgaacaggaggagcggcagggcatgaaggtccaggcgctggccagagagaacgaggtgctcaaagtccaactgaagaaatatgtaggagctgtccagatgctgaaaagagaaggtcaaacagctgaagtgccaaatctttggagtgttgatggagaagttacagtagctgaacagaagccgggagaaattgctgaagaactcgcaagctcctacgaaagaaagctcatcgaggtggcagagatgcatggcgagctgattgagttcaacgagcgcctgcacagggccctggtagccaaggaagccctcgtgtcccagatgaggcaggagctcatcgatctccggggaccggtgcctggagatttgagtcaaacgtccgaagaccagagtttgtcggattttgaaatatcaaaccgggcgctgatcaacgtctggatcccctcagtgtttctccggggcaaagcagcaaatgcattccacgtgtatcaggtctacatccggataaaagacgatgaatggaatatttatcgccggtatacagagttcaggagtttgcaccacaagttacaaaacaagtaccctcaagtgagggcctacaacttcccacccaaaaaggccattggaaacaaggatgccaagtttgtggaggaacggagaaagcagctccagaattacctgcgcagcgtcatgaacaaagtcatccagatggtccccgagttcgctgccagccccaagaaggagaccctcatccagctgatgcccttcttcgtcgacatcaccccgcccggagagcctgtgaacagccggcccaaagcagcttcccgcttccccaaactgtcccggggtcagccccgggagacccgcaacgtggagccccagagcggtgacctctgacctcgacaaaaccgcagccacgggccctgtgcgtggcaccagctgcgtccaccccagccactgccgctggcccctcacctcagcgtgacaaccacgtccacctggtgatcctgagagcacacgattcccaacagttacacaacaccccgattaaactaatcagtcttcgagccgcatgataccgtgacccgagagaccaaggcagcacctcgctggagagactgggacacacagtccttctgcttctggggtctaccctgggctgcaagggctgttcctccacctttctgtagttcagggctggcaggagggtgggcaccaggtcaggctgggtgcgccatggttgagaggcaaaggtgatcccctatataggaaggttcatgcagagccagcctctccactctttcccacgtggggactagaatgactattagcctctccttttgctttttaaggttattacctggcctaacctagggatggctggctttgcgggggggggggggggggggggcatggttcctttcactgcattttccaccaacagtcattagacacctggcactgtcacagctcacttttccagagggatattcctgtggctttggcaaggagccattagtgatgtgcaacttgagttcagagaacttcccctacctcccccatggctggcttcaggaaggaccagtgccctccatagcctgaggccacctaggccctcgccaggcttggagtggggggactcagacatctggcccagccatcagcagcaacctagtaacccggcgtcatccagcgtgtccaaagtagcattggccctacagtcatgagagacttgggtcagggaaccactgcagaaggttccagggttttcaaaccaggctccatgactatgaagttggacccagtgtggacacttaacagatcatgtgtctctccactaaaaacattttccatcccgtctgcccccgacattgtccttgataacagaactctgcatcccctaagacagagtcctctgttcctcccatgtcaggtggctctcagagtacagggaccttggcaggtggagaggaggatggggaccagcagctgggcagcccccagggctcctcctccagtgagctcacatcagagcacctcacagagcaatagccgtcctcagatgctcagcaaagttgtggcagtttgcatttctagggtaaactaactaggaaggatgtcgtgaaatggactatgcaagagtaagtttgtgtgtttcgccttaatctgaggcagagacacagcagaacctgaggagaaaagcaggtggaaggtgacggttagatggtaagccatgggcttgtcctggaactgcttcaactcagtggcttaaaatgagaactgcccaggtgagcatggagcatctcctaggctcgaggacatctctggagaatcatctggaaggtttatactgtgccttcccctcgtagcaaaaaggaagattgttcatggcctttaaggaaggctgagatcactcacacacagcgcccccccaccccagagaaaccgagtcagcctacatgacttccaaggggacctggggccagataagccctgccccggtgagaccaaatgagctggagcatgtatggaggtgcggaccctgcagtcagtttgcgagtgtggaggacccgagacatcctgtaaaggcaacttggtctccctcccactcacctgccaacattgctgcaatacacatggtttatctgaaattccaaggccagagtgcacatcagctcacatgactggcaactctaaatagagagccctaatggactgaggcaggaaacgtctaaaagctcaatctgctgtatgtcatgaccccttaggttgggtttatgccacatcggtcattttgaagtaggtgtttgatgccagctcagagactgtctcaggagtgcctccctggcctgggtagctaccctggaggtcatctccctgttctctgttggataaaggaacctcccccatctgtgacattcccttgggcccaggcttatgacctgcaccttttctgacacctgcccccaaagcacaggatgtgaattggtctctctccagataccccacgaggaagcaccttggacattctgcacatgataataatgcaacagtcccccattgctgagagatactaacccgtgagaaacaagtatgctctcagctggtattgaactggtgggagaaactgcctcctacttttataatactgaattattcacaaaaaacctggtctgctctccaaaatgagagcatgttcctgggagccacatggggaccatccccagctgcctgctcctggtacctcccccatgatcatgcacagaccgtagagtcgagtcatctcgcagatccagaccatctcctctcattctcactctaaaaatgctggtggcccgcacatgacagcaactccccgaagccttccctttggaatcccatagaatgttctgcaatgattgggtccatcttgctgctcagaagaatcccgtcctgctctctagtgtggtgggatgaacttcaggcaacaaacaactggcagggttcccagttcctggagttatggagcagaaacacccaggcctagcagaattgtggctgaaacctggtgcccaaattccacaccctggaaatgtgtcaactgcctgtcagcctggattcaattctgagggctaagccacgaccttatccatgagtggcgaagacacccctgaggaaaggattgcttgcacctcacatctgtcttcttctaagattactcggagattttcaaacaacatctgagaacagaagccccctcccctactcagagaggaacgagggtggcccacctctcaagggccttggattcctgggaccaccctttgctgggaggaagaatccacaccgaatccttctgtcttcatggcctgctgtgctgaaacagaacagcaggttccatctttcacatctttttttctcccccagatgaaagacgactcaggaacggtagggctgggcagaggtgtctctccttgagagacaacaaaagcttctaagggagggagcttaaaggctgctagaaacctagcccaaccatccactcctgatctgagacagaaccttctccgccactcttcctgcaatcagtgtgaaattccagcttctttgattcccacttagcagtatgctccaatcacgttgctggcaaggcattttagagtttggagctgaggttcaaagccccctgcatttctctactggcaggccctggtgaaggaagacactttcagggaagaggctcttacagtctatggtggtagccatcttcacatccagtcaccagttgcatctagggagctgctggctataaaagggatcatccagtggagttgtaaacaagggaaccatcttgcaagatctaggaagaggaaggggagggatgtggactgggtctgatcacagcccttggccctgcttcatactttggagcttattaagatcaattttgataaccatgtaatttcttagaaccatggcaggtagtattgtgctttaaaaaccagaggctcctgaaagtcgtttacaccaggtggattgataccatggctgtagctgatgcaactaacaagtactggggccagtgatcacaatccaggttggaaacaggagtgaagcccaccagcctgcctggttgatggacagcaggctctgccttctggaggcggcttatatcccaacagcctgaggcagggctctgtggcccaggccggcagtggctgcctctcttggttctgcatggtacattttgccaaccctgaggaccagttcttggggttccaggcctcggccttcctgctccacgtgctcaagcccccacagggggctgcgacaccatctggctcctcacagggaggtccagccatgttctctgggctcccagtgagccccctcccctccggctacccccagaatccatccttcattcctccaccaagctcctgtgtgagctgcagcacccacacgggggaagccctgcactccagcagcatcttccagccttggcacagaactgatggcaaaggaagggctgggttttcagcttctgggacccgaggaagaccccacctcactcctccttccccagtacatcagactggttaggaggcatcccagaaggggcagcctcatgcccaggtttcagccctaaaggtaatgattgtcttgactctgccttggcatttcgctcggaatcacggcagacttggagtgtttcttcaaggcaggcatctgcttatgagcaaggtcaaagatttttcaaaatattgtgcattaattcattaaagctactgttaaatatttgctgtttttagattggcgtccgtgctaattctgcagttgtagcactgtatattttatctcatttctgtgccaagaaagttcatctttatgtttttctaatacacaatcttgatcttgtttccaaaataaagcttcagctccttggtcaatagaagtaagggtgtagccatccagggtctcccggctctaggcagaccggatcccgcagttcatcccatggttgttgaaatgtacctcgatcagtcatctctggtattcctcactctagccatgagccattgccatcttatgggcccgatttgggtactctgaattatgtcatggagtagacagttacttctaaatcccagcaaccaagttgcgtatccttccttatagctagtttctatagagaagtgaaaaagaaatctggcttccttaataagatagttgagcctatgacattaaggagcagcgctgctggcggaagattctagattcactggtggtttaagaggcccagggatttagttcttactggtgcgtaagtgttttcccatcctaaccggaaaaccactcacccaggcttcccccacttcccctcaaattttctcagctctgccgctggtctccatgaacggcaaggggaaccaccactcattcactgtcagtgtaggtaagacagaggatgcccttgcaaaaattgggactgaggacagtagcacacggaatggtggatcgtacatttgcacccagagctactaaacgctcagtgaccccagagaccattaatttcccggagtgaaggggatgggggtagagctaattggaatttttattatccaggactcatcctaagaagaatgttggcctctcttcatccctggcttagccgtcaggtagaacgcttactcacctgacaccgacttcttagagaagcgagtcttttttgaatggaggagcgatggtaaccccactagggggcgcccatgatcggctcccagtgcacccccttaagggtaagcaggccacatatctagagtctgatagtctgtgtgtacataaggtctagaagtctgtggaaacgccctgaaacctgtagtattatcttaactaccctcttatgttaaggtttacataataggatttttaaacaaatgtgtttaattttttaagatctcttgtattaaaattttcttttggaataagctgtggaaattttgttacaacctggttgagatcaacctctttacaatgacacaaattgtgacattttataaattagatacttcagtgg

SEQ ID NO: 223147 - protein, 1316 aa, Artificial Sequence
  derived and/or modified sequence
MTIVDKASESSDPSAYQNQPGSSEAVSPGDMDAGSASWGAVSSLNDVSNHTLSLGPVPGAVVYSSSSVPDKSKPSPQKDQALGDGIAPPQKVLFPSEKICLKWQQTHRVGAGLQNLGNTCFANAALQCLTYTPPLANYMLSHEHSKTCHAEGFCMMCTMQAHITQALSNPGDVIKPMFVINEMRRIARHFRFGNQEDAHEFLQYTVDAMQKACLNGSNKLDRHTQATTLVCQIFGGYLRSRVKCLNCKGVSDTFDPYLDITLEIKAAQSVNKALEQFVKPEQLDGENSYKCSKCKKMVPASKRFTIHRSSNVLTLSLKRFANFTGGKIAKDVKYPEYLDIRPYMSQPNGEPIVYVLYAVLVHTGFNCHAGHYFCYIKASNGLWYQMNDSIVSTSDIRSVLSQQAYVLFYIRSHDVKNGGELTHPTHSPGQSSPRPVISQRVVTNKQAAPGFIGPQLPSHMIKNPPHLNGTGPLKDTPSSSMSSPNGNSSVNRASPVNASASVQNWSVNRSSVIPEHPKKQKITISIHNKLPVRQCQSQPNLHSNSLENPTKPVPSSTITNSAVQSTSNASTMSVSSKVTKPIPRSESCSQPVMNGKSKLNSSVLVPYGAESSEDSDEESKGLGKENGIGTIVSSHSPGQDAEDEEATPHELQEPMTLNGANSADSDSDPKENGLAPDGASCQGQPALHSENPFAKANGLPGKLMPAPLLSLPEDKILETFRLSNKLKGSTDEMSAPGAERGPPEDRDAEPQPGSPAAESLEEPDAAAGLSSTKKAPPPRDPGTPATKEGAWEAMAVAPEEPPPSAGEDIVGDTAPPDLCDPGSLTGDASPLSQDAKGMIAEGPRDSALAEAPEGLSPAPPARSEEPCEQPLLVHPSGDHARDAQDPSQSLGAPEAAERPPAPVLDMAPAGHPEGDAEPSPGERVEDAAAPKAPGPSPAKEKIGSLRKVDRGHYRSRRERSSSGEPARESRSKTEGHRHRRRRTCPRERDRQDRHAPEHHPGHGDRLSPGERRSLGRCSHHHSRHRSGVELDWVRHHYTEGERGWGREKFYPDRPRWDRCRYYHDRYALYAARDWKPFHGGREHERAGLHERPHKDHNRGRRGCEPARERERHRPSSPRAGAPHALAPHPDRFSHDRTALVAGDNCNLSDRFHEHENGKSRKRRHDSVENSDSHVEKKARRSEQKDPLEEPKAKKHKKSKKKKKSKDKHRDRDSRHQQDSDLSAACSDADLHRHKKKKKKKKRHSRKSEDFVKDSELHLPRVTSLETVAQFRRAQGGFPLSGGPPLEGVGPFREKTKHLRMESRDDRCRLFEYGQGD

SEQ ID NO: 223148 - DNA, 3951 bp, Artificial Sequence
  derived and/or modified sequence
atgaccatcgtggacaaggccagcgagagcagcgaccccagcgcctaccagaaccagcccggcagcagcgaggccgtgagccccggcgacatggacgccggcagcgccagctggggcgccgtgagcagcctgaacgacgtgagcaaccacaccctgagcctgggccccgtgcccggcgccgtggtgtacagcagcagcagcgtgcccgacaagagcaagcccagcccccagaaggaccaggccctgggcgacggcatcgcccccccccagaaggtgctgttccccagcgagaagatctgcctgaagtggcagcagacccacagagtgggcgccggcctgcagaacctgggcaacacctgcttcgccaacgccgccctgcagtgcctgacctacaccccccccctggccaactacatgctgagccacgagcacagcaagacctgccacgccgagggcttctgcatgatgtgcaccatgcaggcccacatcacccaggccctgagcaaccccggcgacgtgatcaagcccatgttcgtgatcaacgagatgagaagaatcgccagacacttcagattcggcaaccaggaggacgcccacgagttcctgcagtacaccgtggacgccatgcagaaggcctgcctgaacggcagcaacaagctggacagacacacccaggccaccaccctggtgtgccagatcttcggcggctacctgagaagcagagtgaagtgcctgaactgcaagggcgtgagcgacaccttcgacccctacctggacatcaccctggagatcaaggccgcccagagcgtgaacaaggccctggagcagttcgtgaagcccgagcagctggacggcgagaacagctacaagtgcagcaagtgcaagaagatggtgcccgccagcaagagattcaccatccacagaagcagcaacgtgctgaccctgagcctgaagagattcgccaacttcaccggcggcaagatcgccaaggacgtgaagtaccccgagtacctggacatcagaccctacatgagccagcccaacggcgagcccatcgtgtacgtgctgtacgccgtgctggtgcacaccggcttcaactgccacgccggccactacttctgctacatcaaggccagcaacggcctgtggtaccagatgaacgacagcatcgtgagcaccagcgacatcagaagcgtgctgagccagcaggcctacgtgctgttctacatcagaagccacgacgtgaagaacggcggcgagctgacccaccccacccacagccccggccagagcagccccagacccgtgatcagccagagagtggtgaccaacaagcaggccgcccccggcttcatcggcccccagctgcccagccacatgatcaagaaccccccccacctgaacggcaccggccccctgaaggacacccccagcagcagcatgagcagccccaacggcaacagcagcgtgaacagagccagccccgtgaacgccagcgccagcgtgcagaactggagcgtgaacagaagcagcgtgatccccgagcaccccaagaagcagaagatcaccatcagcatccacaacaagctgcccgtgagacagtgccagagccagcccaacctgcacagcaacagcctggagaaccccaccaagcccgtgcccagcagcaccatcaccaacagcgccgtgcagagcaccagcaacgccagcaccatgagcgtgagcagcaaggtgaccaagcccatccccagaagcgagagctgcagccagcccgtgatgaacggcaagagcaagctgaacagcagcgtgctggtgccctacggcgccgagagcagcgaggacagcgacgaggagagcaagggcctgggcaaggagaacggcatcggcaccatcgtgagcagccacagccccggccaggacgccgaggacgaggaggccaccccccacgagctgcaggagcccatgaccctgaacggcgccaacagcgccgacagcgacagcgaccccaaggagaacggcctggcccccgacggcgccagctgccagggccagcccgccctgcacagcgagaaccccttcgccaaggccaacggcctgcccggcaagctgatgcccgcccccctgctgagcctgcccgaggacaagatcctggagaccttcagactgagcaacaagctgaagggcagcaccgacgagatgagcgcccccggcgccgagagaggcccccccgaggacagagacgccgagccccagcccggcagccccgccgccgagagcctggaggagcccgacgccgccgccggcctgagcagcaccaagaaggcccccccccccagagaccccggcacccccgccaccaaggagggcgcctgggaggccatggccgtggcccccgaggagcccccccccagcgccggcgaggacatcgtgggcgacaccgccccccccgacctgtgcgaccccggcagcctgaccggcgacgccagccccctgagccaggacgccaagggcatgatcgccgagggccccagagacagcgccctggccgaggcccccgagggcctgagccccgccccccccgccagaagcgaggagccctgcgagcagcccctgctggtgcaccccagcggcgaccacgccagagacgcccaggaccccagccagagcctgggcgcccccgaggccgccgagagaccccccgcccccgtgctggacatggcccccgccggccaccccgagggcgacgccgagcccagccccggcgagagagtggaggacgccgccgcccccaaggcccccggccccagccccgccaaggagaagatcggcagcctgagaaaggtggacagaggccactacagaagcagaagagagagaagcagcagcggcgagcccgccagagagagcagaagcaagaccgagggccacagacacagaagaagaagaacctgccccagagagagagacagacaggacagacacgcccccgagcaccaccccggccacggcgacagactgagccccggcgagagaagaagcctgggcagatgcagccaccaccacagcagacacagaagcggcgtggagctggactgggtgagacaccactacaccgagggcgagagaggctggggcagagagaagttctaccccgacagacccagatgggacagatgcagatactaccacgacagatacgccctgtacgccgccagagactggaagcccttccacggcggcagagagcacgagagagccggcctgcacgagagaccccacaaggaccacaacagaggcagaagaggctgcgagcccgccagagagagagagagacacagacccagcagccccagagccggcgccccccacgccctggccccccaccccgacagattcagccacgacagaaccgccctggtggccggcgacaactgcaacctgagcgacagattccacgagcacgagaacggcaagagcagaaagagaagacacgacagcgtggagaacagcgacagccacgtggagaagaaggccagaagaagcgagcagaaggaccccctggaggagcccaaggccaagaagcacaagaagagcaagaagaagaagaagagcaaggacaagcacagagacagagacagcagacaccagcaggacagcgacctgagcgccgcctgcagcgacgccgacctgcacagacacaagaagaagaagaagaagaagaagagacacagcagaaagagcgaggacttcgtgaaggacagcgagctgcacctgcccagagtgaccagcctggagaccgtggcccagttcagaagagcccagggcggcttccccctgagcggcggcccccccctggagggcgtgggccccttcagagagaagaccaagcacctgagaatggagagcagagacgacagatgcagactgttcgagtacggccagggcgactag

SEQ ID NO: 223149 - DNA, 3951 bp, Artificial Sequence
  derived and/or modified sequence
atgactatcgtggacaaggcctcagagtcctccgatcccagcgcctaccagaatcagcctggttcttcagaagcagtctcgcctggagacatggacgcaggctcagcctcttggggggccgtgagctcactcaacgatgtcagtaatcatactttgtccctgggtcccgtgccaggggccgtggtgtactcgtcctcatccgtgcctgataagtccaagcctagcccgcagaaggaccaagctctgggcgacggcattgcaccccctcaaaaggtcctgttcccatccgaaaagatttgtctgaagtggcagcaaactcatcgcgtcggcgccggcctgcaaaacctgggcaacacttgcttcgctaacgcggcactccaatgcttgacctatactccaccactcgcgaactatatgctctctcacgagcactcgaaaacgtgccacgccgaaggcttttgtatgatgtgcacgatgcaggcacatattacccaggccctttctaatcctggtgatgtgatcaaacctatgttcgttattaacgagatgagaaggattgctagacattttaggttcggcaaccaggaagacgcccacgagttccttcagtacactgtcgatgccatgcaaaaggcctgcctgaatgggtccaacaaactcgatcgccatacccaagctactacacttgtctgtcagattttcggaggataccttagaagccgtgtgaaatgccttaattgtaaaggcgtgagtgacactttcgacccttacttagacatcacacttgaaataaaggcagcacaaagcgtgaataaggctctggagcagttcgtgaaacccgagcagttagatggagaaaacagctacaaatgcagtaaatgcaagaaaatggtccccgcctcaaagcgatttactatccacaggagttcaaatgtcctaacactctctctgaagcgttttgccaatttcacagggggtaaaattgcaaaggatgtgaagtaccctgaatacctcgacatccgcccctacatgtctcaaccgaatggagagcccatcgtctacgtgctctacgctgttctcgtgcacacggggtttaattgtcatgcaggccactatttttgttatattaaggccagtaatgggttgtggtaccagatgaacgattcaattgtgtccacaagtgacatccgaagcgtgctctcacagcaagcgtacgttctcttttacattcggtcacatgacgttaagaacggtggagagctaacccaccccactcactccccgggtcagtcctccccgagaccagttatctcacagcgagttgtgacaaataagcaggctgctccagggtttatcggcccgcagctgccttctcacatgataaaaaacccgccccacttaaatggcactggtccattaaaagacactccctcctcctctatgtcctccccgaatggcaatagcagtgttaatagggcatctccagtgaatgctagtgcgtctgtgcaaaattggtctgttaaccggtccagcgttattcccgagcatccaaagaagcagaagatcactatctctatacacaacaagctcccagtgagacagtgtcagagccagccaaatctccattctaatagcttagaaaatccgactaagcctgtaccctcgtccacgattacaaattcagcagtccaatcgacaagtaacgctagcacgatgtctgtgtcctcgaaagtgactaaacccatccctagatcagagagctgtagtcagcccgtaatgaatggcaaatctaaactgaacagtagcgtcctcgtgccctatggagctgaaagctctgaagactccgacgaggagtccaagggcttggggaaggagaacggcatcgggactatcgtgtcgtcccattcacccggtcaggacgcagaggatgaagaggccactccgcatgagcttcaggaacccatgaccttaaacggcgctaactccgcggactctgactcagacccaaaagaaaatgggctggctcccgacggtgccagctgccagggccagcctgctctgcattctgagaatcctttcgcaaaagccaacggcctcccgggcaagctgatgccggctccgctcctgagcctccctgaagacaaaatccttgagacttttcgactgtctaataagttgaagggaagcacggacgagatgtccgccccaggggctgagcggggcccgcccgaagacagggacgccgagccacaaccgggatctccagctgctgagtccctggaggagcccgacgccgccgccggtttgtccagcaccaaaaaagctcccccacctcgcgatccaggaacacccgccacaaaggaaggagcctgggaagcaatggccgtggctcccgaagagcccccgccatcagcaggagaagacatcgtcggggacaccgcaccgccagatctgtgtgatcctggcagtctcactggggacgccagcccactgagccaggatgctaaaggtatgatcgccgagggacctcgagattccgctctggctgaggcccccgaaggactgtcacccgccccgcctgcacgatccgaagaaccctgcgaacaacctcttctggttcatccctctggtgaccacgctcgagacgcgcaggatccatctcaatccctgggcgcacctgaagctgctgaaaggccccccgctcccgtccttgacatggccccggccggacaccccgagggagacgccgagcctagccctggagagcgtgtggaggatgccgccgctccaaaggcacctggccccagtcccgccaaagagaagattggttcattgcgaaaagtggacaggggccattataggagtcgcagagaaagaagctcctctggagagccagctagggaatcccggtccaagaccgaaggtcatagacatcgacggcggcgcacttgccccagggagagggaccgccaggacaggcacgcccccgagcaccacccaggtcacggggaccgtttatcccctggcgagaggcgtagcttgggcagatgcagtcaccaccactcccggcataggtctggtgtagagctagactgggttcgccatcactatactgaaggagagaggggctggggaagagagaagttctatcctgatcgcccaagatgggatcgctgcagatactaccatgataggtacgctctgtatgcagccagggattggaagccatttcacgggggccgggaacacgagagggccggcctccacgagcgcccgcacaaagaccataacaggggtaggcgcggctgcgagcccgcaagggagcgggagcgccacaggccatcatcaccacgcgccggcgctccacacgcactggctcctcatcccgatcgctttagccatgatcggactgcgctggtagccggggacaactgcaatctgtccgaccgctttcatgaacacgaaaatggcaagtctcgtaagcgcagacatgatagcgttgaaaattcggattcccacgtcgaaaagaaagcgaggcggtcggaacagaaggacccattagaggaacctaaggcaaagaagcataaaaaatcaaaaaagaagaagaagagcaaagacaaacaccgggacagggactccagacaccagcaggattcagacttgtctgcagcatgtagcgatgcagatctgcaccggcacaaaaagaaaaagaaaaaaaaaaagagacattcaagaaaatccgaagactttgtgaaggatagcgagttacacctccccagggtgacttccttagagaccgttgctcagtttcgccgtgcccagggcggattcccactgtcaggaggacctcctctcgagggagtcgggcccttccgcgagaagaccaagcacttgagaatggagtcccgggatgatcgctgccggcttttcgagtatggacagggggactag

SEQ ID NO: 223150 - DNA, 3951 bp, Artificial Sequence
  derived and/or modified sequence
atgaccatcgtggacaaggccagcgagagcagtgaccccagcgcctaccagaaccagcccggcagcagcgaggccgtgtcccctggggacatggatgctggcagcgcctcctggggcgctgtgagcagcctgaatgatgtgagcaaccacaccctgagcctgggccctgtgcctggagctgtggtgtacagcagcagctctgtgcctgacaagagcaagcccagcccccagaaggaccaggccctgggagatggcatcgccccaccccagaaggtgctcttccccagcgagaagatctgcctgaagtggcagcagacccaccgggtgggcgccggcctgcagaacctgggcaacacctgctttgccaatgctgccctgcagtgcctgacctacaccccacccctggccaactacatgctgagccatgagcacagcaagacctgccacgccgagggcttctgcatgatgtgcaccatgcaggcccacatcacccaggccctgagcaaccctggagatgtgatcaagcccatgtttgtgatcaatgagatgaggcgcatcgcccggcacttccgcttcggcaaccaggaggatgcccacgagttcctgcagtacacagtggatgccatgcagaaggcctgcctgaatggcagcaacaagctggacagacacacccaggccaccaccctggtgtgccagatctttggaggctacctgcggagccgggtgaagtgcctgaactgcaagggcgtgtctgacacctttgacccctacctggacatcaccctggagatcaaggccgcccagagcgtgaacaaggccctggagcagtttgtgaagccagagcagctggatggagagaacagctacaagtgcagcaagtgcaagaagatggtgcctgccagcaagcgcttcaccatccacaggagcagcaatgtgctgaccctgagcctgaagagatttgccaacttcaccggcggcaagatcgccaaggatgtgaagtacccagagtacctggacatccggccctacatgagccagcccaacggggagcccatcgtgtatgtgctgtatgctgtgctggtgcacacaggcttcaactgccacgccggccactacttctgctacatcaaggccagcaatggcctgtggtaccagatgaatgacagcatcgtgtccaccagtgacatccgctctgtgctgagccagcaggcctacgtgctcttctacatccgcagccatgatgtgaagaatggaggagagctgacccaccccacccacagccctggccagagcagccccaggcctgtgatcagccagagggtggtgaccaacaagcaggccgcccctggcttcatcggcccccagctgcccagccacatgatcaagaaccccccccacctgaatggcaccggccccctgaaggacacccccagcagctccatgagcagccccaatggaaacagctctgtgaacagagccagccctgtgaatgccagcgcctctgtgcagaactggagcgtgaacagaagcagcgtcatccctgagcaccccaagaagcagaagatcaccatcagcatccacaacaagctgcctgtgcggcagtgccagagccagcccaacctgcacagcaacagcctggagaaccccaccaagcctgtgcccagcagcaccatcaccaacagcgctgtgcagagcaccagcaatgccagcaccatgtctgtgagcagcaaggtgaccaagcccatccccaggtctgagagctgcagccagcctgtgatgaatggcaagagcaagctgaacagctctgtgctggtgccctatggagctgagagcagtgaagattctgatgaggagagcaagggcctgggcaaggaaaatggcatcggcaccatcgtgagcagccacagccctggccaggatgctgaagatgaggaggccacccctcatgagctgcaggagcccatgaccctgaatggagccaacagcgctgacagcgacagcgaccccaaggaaaatggcctggccccagatggagccagctgccagggccagcctgccctgcacagcgagaacccctttgccaaggccaacggcctgcccgggaagctgatgcctgcccccctgctgagcctgcctgaggacaagatcctggagaccttccggctgagcaacaagctgaagggcagcacagatgagatgtctgcccctggagctgagcggggccccccagaggacagagatgctgagccccagcccggcagccctgctgctgagagcctggaggagccagatgctgctgctggcctgagcagcaccaagaaggcccccccaccccgggaccccggcaccccagccaccaaggagggcgcctgggaggccatggctgtggcccctgaggagcccccacccagcgctggagaagatattgtgggggacacagcccccccagacctgtgtgaccccggcagcctgactggagatgccagccccctgagccaggatgccaagggcatgattgctgagggcccccgggacagcgccctggccgaggcccctgagggcctgagccctgcccccccagcccggtctgaggagccctgtgagcagcccctgctggtgcaccccagcggggaccacgccagagatgcccaggaccccagccagagcctgggcgcccctgaggccgctgagcggcccccagcccctgtgctggacatggccccagctggccacccagaaggagatgctgagcccagccctggagagcgggtggaggatgctgctgcccccaaggcccctggccccagccctgccaaggagaagattggcagcctgaggaaggtggaccggggccactaccgcagccggcgggagaggagcagcagcggggagcccgcccgggagagccgcagcaagacagagggccaccgccacagaagaagaaggacctgcccccgggagcgggaccggcaggacagacatgcccctgagcaccaccctggccacggggaccggctgagccctggagagaggaggagcctgggccgctgcagccaccaccacagccgccacagaagtggagtggagctggactgggtgcgccaccactacacagaaggagagcggggctggggccgggagaagttctacccagaccggccccgctgggaccgctgccgctactaccatgacagatatgccctgtatgctgcccgggactggaagcccttccacggcggccgggagcacgagcgggccggcctgcacgagcggccccacaaggaccacaacagaggccggcggggctgtgagcccgcccgggagcgggagcggcaccggcccagcagccccagggctggggcccctcatgccctggccccccacccagaccgcttcagccatgacagaacagccctggtggccggggacaactgcaacctgagtgaccgcttccacgagcatgaaaatggcaagagcaggaagagaagacatgacagcgtggagaacagcgacagccacgtggagaagaaggccaggagaagtgagcagaaggaccccctggaggagcccaaggccaagaagcacaagaagagcaagaagaagaagaagagcaaggacaagcaccgggaccgggacagccgccaccagcaggacagcgacctgtctgctgcctgcagtgatgctgacctgcaccgccacaagaagaagaagaagaagaagaagaggcacagcaggaagtctgaggactttgtgaaggacagcgagctgcacctgccccgggtgaccagcctggagaccgtggcccagttcagaagagcccagggcggcttccccctgagcggcggcccccccctggagggcgtgggccccttccgggagaagaccaagcacctgaggatggagagcagagatgaccgctgccgcctgtttgaatatggccagggcgactag

SEQ ID NO: 223151 - DNA, 3951 bp, Artificial Sequence
  derived and/or modified sequence
atgaccatcgtggacaaggccagcgagagcagcgaccccagcgcctatcagaatcaacccggcagctctgaggcagtctctcccggcgacatggacgctggttccgcctcctggggagccgtgtcctcgctcaacgacgtgtctaatcatacactctcccttggacccgtgccgggcgccgtcgtgtattcaagcagctctgtccctgataagagtaaaccctctcctcaaaaggatcaggccctgggagatggaatagccccgccacagaaggttctgttcccttctgagaaaatctgcctgaaatggcaacagacacatagggttggagccgggctccagaacctcggaaacacatgttttgccaatgctgcactacagtgtctgacgtatacaccaccattagcaaattacatgctttcacatgagcactccaagacttgtcacgccgaaggcttctgcatgatgtgcacgatgcaagcccatattacacaagcgctcagcaacccaggagacgtaatcaagccgatgttcgtcattaatgagatgcgccgcatcgcgcggcatttccgattcggaaatcaggaagacgctcatgagtttctgcagtatactgtggacgccatgcagaaggcttgtttgaatgggtcaaacaaactggacaggcatacacaagccactacgctagtctgccagatcttcgggggttatctcagaagccgagttaaatgtcttaattgcaagggagtgtctgacacctttgacccttacctcgacatcacccttgagattaaagcggctcagtcagtgaataaagctttggagcagtttgtaaaaccagagcagctagacggagaaaactcctataagtgttccaagtgcaaaaaaatggtgcctgcgtctaaaaggttcacaatccatcgttcatccaatgttctcacactcagccttaagaggtttgccaatttcactggtggaaaaattgcaaaggacgtgaaataccccgagtacctcgacatcaggccttatatgagccaacccaacggcgagccaatcgtgtatgtactgtacgccgtcttggtgcataccggttttaactgtcacgccgggcattacttttgctatattaaggccagtaacggcctgtggtaccagatgaatgactctatagtgagcacgtccgacatccgctctgtgttgtcccagcaggcgtatgtgctattctacatacgctctcacgatgtgaagaacgggggggaactcacgcatcccacccattcacctggacagtctagtccacgccctgtcattagccaacgggttgttacaaataagcaggcggcgccgggttttatcgggccccaactgccgtctcatatgatcaaaaaccctcctcacttaaatggtaccggccctttaaaggatactccatcttcttcaatgtctagtccaaatggcaacagcagcgtgaatagagccagtcccgtgaatgcaagcgcttcagttcagaactggagtgtcaaccgtagttctgtgataccagaacatccgaagaaacagaagattactataagcatccacaataaacttcctgttcggcagtgtcagtcacaacctaatctccatagtaattcactcgaaaacccaaccaagcccgttccctcctccacgattactaacagtgccgttcaaagtacaagcaacgctagtacaatgtccgtgtcttctaaggttaccaaacccatcccacggtcagagtcctgtagccaacccgtgatgaatggaaagtccaaactaaactcttctgtgctcgtaccctacggagccgagagctcagaggacagcgacgaagagtccaagggcctggggaaggaaaatggaattgggactatagtgagttcacacagccccggacaagatgccgaagacgaagaagccactcctcacgaacttcaggagcctatgacattgaacggagcaaatagcgctgattcagactccgacccaaaggagaacggcctagcccctgacggcgcctcatgccaggggcagccagccctccactccgagaatccttttgctaaagcaaatgggctacctggcaagctgatgcctgctccattgctgagcctccccgaggacaagatcctggaaacatttaggctgagtaataagttaaagggctcaaccgatgaaatgagtgcacctggggccgagcgtggcccacccgaagaccgggacgcagagcctcagcccggctctccagcagccgagtcacttgaggagccggacgcagcagccggactgtcttctaccaaaaaagcaccgcccccccgcgatccaggtactccggctaccaaagaaggtgcttgggaggctatggctgtggccccagaggaacccccaccatcagcaggagaggacatcgtgggtgataccgcgccaccagatctctgcgacccaggaagcttaaccggcgatgcctctcctctctctcaggatgctaaggggatgattgccgaaggtccaagggacagcgcgctggcagaagctccagagggcttgtcccctgcaccgccagctcgcagtgaagagccatgcgaacaaccccttctagtacatcctagtggagaccatgctcgggacgctcaggacccctcccagagccttggggccccagaagctgccgagagaccgcctgcccccgtcctagacatggccccggcaggccaccccgagggtgatgcagagccaagcccaggagagcgtgtggaagatgctgccgctcctaaggcgcccggcccgagtccagctaaagagaagatcggctccttgcgcaaggtggatcgggggcactaccggagccggagagagaggtcctcctctggggagcctgcccgagagtctcgctctaagacagagggacatcggcaccggcggcgcaggacgtgccccagggaacgggatagacaggaccgccacgcgcccgaacaccatccgggccatggagaccggttatctccaggagaacggcgtagcttggggagatgcagccatcatcactcacgccaccggtctggcgtggaattggactgggttaggcaccactacactgaaggggagaggggctggggcagagagaagttttaccctgataggccccgttgggataggtgcaggtattatcatgatcggtacgccctctacgccgcccgtgattggaaacctttccacggcggaagagagcacgaaagagctggactacacgagcggccacataaggatcataacagaggccggagaggctgcgaaccggctcgagagagagagagacacagaccatcttcccccagggccggagctccgcacgccctcgccccccacccggacaggttcagtcatgacaggacagccctggttgccggcgataattgtaatttgtcagacagatttcacgagcacgagaacggaaaatctcgcaaacggaggcacgacagtgtggagaactcagactcacacgtagagaagaaggctagacgatctgaacagaaggaccccttggaagagccaaaagctaagaagcacaaaaagagtaagaaaaaaaagaagtctaaagacaaacatcgcgatagagatagtcgccatcagcaggattccgatttgtctgcggcctgttccgatgccgatttgcacaggcacaagaaaaagaagaagaagaagaaacggcactccagaaaaagtgaggactttgttaaggactctgagctacacctgcctcgagtgacctccctggagacggtggcccagtttcgtcgagcccagggagggtttcccctgtccggcggcccgcccctggaaggggtgggaccttttagagagaagacaaagcatctaaggatggaaagcagggacgacagatgtcgcctgttcgagtatggacagggggactag

SEQ ID NO: 223152 - DNA, 3951 bp, Artificial Sequence
  derived and/or modified sequence
atgacaatcgttgacaaagccagcgaatcctccgatcctagtgcataccagaatcaacccggtagttcggaagcggtgagcccaggtgacatggatgcgggaagtgcctcttggggcgctgtgagctcacttaatgacgtcagcaaccataccctgagtctgggtcccgtgccgggtgctgtggtctacagctcttcctctgtgcctgataagtccaagccttccccacaaaaagaccaagcgctgggcgacggcattgcgccaccccagaaggtcttattccctagtgagaagatctgtctgaagtggcagcagacccacagagttggggctggactgcagaatcttggaaatacatgcttcgccaacgcggcattgcagtgtctgacatatacaccccctcttgccaattacatgctgagccacgaacacagcaagacatgccacgccgagggtttctgcatgatgtgtacaatgcaggcccacatcactcaggcccttagtaatccaggagatgtcattaagccaatgtttgtgatcaacgagatgaggcggattgccaggcactttcgctttggaaatcaggaagatgctcatgagtttctccagtataccgtcgacgcgatgcaaaaagcctgtctaaacggctctaataagttagatagacatacccaggccacaactcttgtctgtcagatcttcggaggctatctccgaagtagggtcaagtgcctcaactgcaaaggcgtcagtgatacgtttgatccttatctggatattacattagagatcaaagcggctcagagcgtaaataaggctttggagcaattcgtcaagcctgaacagctggatggggagaactcttacaagtgctctaaatgtaaaaaaatggtgcctgcctcgaagaggtttacaatccacagatcaagtaacgttttgacattgagcctgaaacggttcgcgaactttaccgggggtaagatcgcaaaggatgtgaagtacccggaatacctggacattcgtccttacatgagccagcccaacggtgagcctattgtgtatgtgctctacgctgtgctggtgcataccgggtttaattgccatgcagggcactacttctgctatataaaggctagcaacggactatggtaccaaatgaacgactctattgtgtctactagtgatatccggtctgtgctttcccaacaggcctacgttctattttatatccgctcccacgacgtgaaaaacggaggggaactgacacatccaacccactcacctggacagagttcgcccaggccagtaattagccagagagtagtcacaaataaacaagccgctccaggattcattggccctcagctgccctctcacatgattaagaacccgccacatctcaatgggaccggccctttgaaagacaccccaagttcatccatgagttcgccgaacggcaacagttccgtcaatagggccagtcccgtgaacgcaagcgccagtgtccagaactggtcagttaaccgttcaagtgtcattcccgagcaccctaaaaagcagaagatcacaatttccatccacaacaagctccctgttaggcagtgtcagtcccagccaaatctacattccaattcactggagaaccccacaaaaccagtccccagcagcaccattacaaacagcgcggtccagagcactagcaacgccagtaccatgtctgtgagtagtaaggtgactaagcctatcccaaggagcgaatcctgctcgcagcccgtcatgaacgggaaaagcaagctgaattcatcagttctcgtcccctatggcgctgagtcctctgaagatagcgatgaggaatcaaagggcctgggtaaggagaacggcatcggtacgatcgtttcttcccactctcccggtcaggatgctgaggatgaagaggccacaccacacgaattacaggaacccatgaccctaaacggtgctaattcagctgacagtgactccgatcctaaagaaaacggtctggcccctgatggagcatcatgtcagggccagcccgcactgcatagcgaaaacccttttgcgaaggcgaatggcctgcctggcaagctgatgccagctccattgctgtctttgccagaggacaagattctggaaacattcaggctcagtaataagcttaaagggtcaacggatgagatgtcggcacctggtgctgagcgagggcctcccgaggatcgtgacgcagagccgcagcctggcagcccggctgccgagtcgttagaagaacccgatgccgctgctggactctctagcactaaaaaagctccacctcctcgcgatcccggaacaccagcgaccaaggaaggcgcttgggaggccatggcagtcgcgcctgaggagccaccgccaagcgccggagaggacattgtgggagacaccgctccacccgacttgtgcgacccaggttccctgacgggagacgcctctccactgtcccaggatgccaaagggatgatcgctgaaggaccaagagattccgcactagccgaagcacccgaaggactctcaccagccccaccagcccgaagcgaggaaccatgtgagcagcccctgcttgtgcacccttcaggagaccatgccagggatgcccaggatcccagccagagcctgggagcccctgaggccgctgagagaccccctgctccagttctggacatggccccagctgggcatcctgaaggggatgcggaaccatcacctggagagcgcgtggaggatgctgcagccccaaaagcacccggaccatctcccgcaaaggagaaaattggctcgttgcgtaaggtggatcggggtcattaccggagccgaagggagcggagctcctcaggggagcctgcgcgtgaatctagaagtaagactgagggccacaggcacaggagacgcagaacatgcccgcgtgaacgagatcgccaggaccgccacgcccctgagcaccacccgggacacggcgatcggctttctcccggagaaagaaggagtctcggcagatgttcccaccatcactctcgtcaccgctccggggtagaacttgattgggtgaggcaccattacaccgagggtgaaaggggctggggcagggaaaaattctatccggaccggccacgatgggaccgctgcagatactaccatgaccgctacgctctctacgccgctagggactggaagccatttcatggagggagagaacacgaaagggccggactccacgagagaccgcacaaagaccataatcgaggaagaagaggatgcgagcctgcccgtgaaagggagcggcatagaccaagtagccctagggccggagctcctcacgctctggctcctcaccctgacaggtttagccatgaccggacagccctcgtggcaggagacaactgcaacctctccgacaggttccatgaacacgagaatgggaagtcccgcaagagacggcacgactctgtagaaaactccgacagccacgtggaaaagaaagctagacgcagtgaacagaaagaccccttggaggagccaaaggccaagaagcataagaagagtaaaaaaaaaaaaaagtctaaagataaacatcgagacagagatagcaggcatcagcaggacagcgatctgtccgccgcttgcagtgatgctgatttacatcgccataagaaaaaaaaaaagaaaaaaaagcgtcactcaaggaaaagtgaagatttcgtgaaggacagcgagctgcatctgccacgagtgacatccctggagactgtggcccagtttaggcgggctcaaggtggatttcccctgagtgggggaccgccattagaaggggtcggcccattccgcgagaaaactaaacatctacgtatggaaagcagagatgacaggtgccgcttgtttgagtacggccaaggtgactag

SEQ ID NO: 223153 - DNA, 5155 bp, Artificial Sequence
  derived and/or modified sequence
aggggcgcggcgggcgcggcgctgacccggaggcggcggcggcggtgcccggatggaggcacgtcattgtcccccgccgggcggctgggctgtgtgcggcggcggcggcggcggccgagggggatggagcgagcgccgagccgggtcagagttgaacaatgaccatagttgacaaagcttctgaatcttcagacccatcagcctatcagaatcagcctggcagctccgaggcagtctcacctggagacatggatgcaggttctgccagctggggtgctgtgtcttcattgaatgatgtgtcaaatcacacactttctttaggaccagtacctggtgctgtagtttattcgagttcatctgtacctgataaatcaaaaccatcaccacaaaaggatcaagccctaggtgatggcatcgctcctccacagaaagttcttttcccatctgagaagatttgtcttaagtggcaacaaactcatagagttggagctgggctccagaatttgggcaatacctgttttgccaatgcagcactgcagtgtttaacctacacaccacctcttgccaattacatgctatcacatgaacactccaaaacatgtcatgcagaaggcttttgtatgatgtgtacaatgcaagcacatattacccaggcactcagtaatcctggggacgttattaaaccaatgtttgtcatcaatgagatgcggcgtatagctaggcacttccgttttggaaaccaagaagatgcccatgaattccttcaatacactgttgatgctatgcagaaagcatgcttgaatggcagcaataaattagacagacacacccaggccaccactcttgtttgtcagatatttggaggatacctaagatctagagtcaaatgtttaaattgcaagggcgtttcagatacttttgatccatatcttgatataacattggagataaaggctgctcagagtgtcaacaaggcattggagcagtttgtgaagccggaacagcttgatggagaaaactcgtacaagtgcagcaagtgtaaaaagatggttccagcttcaaagaggttcactatccatagatcctctaatgttcttacactttctctgaaacgttttgcaaattttaccggtggaaaaattgctaaggatgtgaaataccctgagtatcttgatattcggccatatatgtctcaacccaacggagagccaattgtctacgtcttgtatgcagtgctggtccacactggttttaattgccatgctggccattacttctgctacataaaagctagcaatggcctctggtatcaaatgaatgactccattgtatctaccagtgatattagatcggtactcagccaacaagcctatgtgctcttttatatcaggtcccatgatgtgaaaaatggaggtgaacttactcatcccacccatagccccggccagtcctctccccgccccgtcatcagtcagcgggttgtcaccaacaaacaggctgcgccaggctttatcggaccacagcttccctctcacatgataaagaatccacctcacttaaatgggactggaccattgaaagacacgccaagcagttccatgtcgagtcctaacgggaattccagtgtcaacagggctagtcctgttaatgcttcagcttctgtccaaaactggtcagttaataggtcctcagtgatcccagaacatcctaagaaacaaaaaattacaatcagtattcacaacaagttgcctgttcgccagtgtcagtctcaacctaaccttcatagtaattctttggagaaccctaccaagcccgttccctcttctaccattaccaattctgcagtacagtctacctcgaacgcatctacgatgtcagtttctagtaaagtaacaaaaccgatcccccgcagtgaatcctgctcccagcccgtgatgaatggcaaatccaagctgaactccagcgtgctggtgccctatggcgccgagtcctctgaggactctgacgaggagtcaaaggggctgggcaaggagaatgggattggtacgattgtgagctcccactctcccggccaagatgccgaagatgaggaggccactccgcacgagcttcaagaacccatgaccctaaacggtgctaatagtgcagacagcgacagtgacccgaaagaaaacggcctagcgcctgatggtgccagctgccaaggccagcctgccctgcactcagaaaatccctttgctaaggcaaacggtcttcctggaaagttgatgcctgctcctttgctgtctctcccagaagacaaaatcttagagaccttcaggcttagcaacaaactgaaaggctcgacggatgaaatgagtgcacctggagcagagaggggccctcccgaggaccgcgacgccgagcctcagcctggcagccccgccgccgaatccctggaggagccagatgcggccgccggcctcagcagcaccaagaaggctccgccgccccgcgatcccggcacccccgctaccaaagaaggcgcctgggaggccatggccgtcgcccccgaggagcctccgcccagcgccggcgaggacatcgtgggggacacagcaccccctgacctgtgtgatcccgggagcttaacaggcgatgcgagcccgttgtcccaggacgcaaaggggatgatcgcggagggcccgcgggactcggcgttggcggaagccccggaagggttgagtccggctccgcctgcgcggtcggaggagccctgcgagcagccactccttgttcaccccagcggggaccacgcccgggacgctcaggacccatcccagagcttgggcgcacccgaggccgcagagcggccgccagctcctgtgctggacatggccccggccggtcacccggaaggggacgctgagcctagccccggcgagagggtcgaggacgccgcggcgccgaaagccccaggcccttccccagcgaaggagaaaatcggcagcctcagaaaggtggaccgaggccactaccgcagccggagagagcgctcgtccagcggggagcccgccagagagagcaggagcaagactgagggccaccgtcaccggcggcgccgcacctgcccccgggagcgcgaccgccaggaccgccacgccccggagcaccaccccggccacggcgacaggctcagccctggcgagcgccgctctctgggcaggtgcagtcaccaccactcccgacaccggagcggggtggagctggactgggtcagacaccactacaccgagggcgagcgtggctggggccgggagaagttctaccccgacaggccgcgctgggacaggtgccggtactaccatgacaggtacgccctgtacgctgcccgggactggaagcccttccacggcggccgcgagcacgagcgggccgggctgcacgagcggccgcacaaggaccacaaccggggccgtaggggctgcgagccggcccgggagagggagcggcaccgccccagcagcccccgcgcaggcgcgccccacgccctcgccccgcaccccgaccgcttctcccacgacagaactgcacttgtagccggagacaactgtaacctctctgatcggtttcacgaacacgaaaatggaaagtcccggaaacggagacacgacagtgtggagaacagtgacagtcatgttgaaaagaaagcccggaggagcgaacagaaggatcctctagaagagcctaaagcaaagaagcacaaaaaatcaaagaagaaaaagaaatccaaagacaaacaccgagaccgcgactccaggcatcagcaggactcagacctctcagcagcgtgctctgacgctgacctccacagacacaaaaaaaagaagaagaaaaagaagagacattcaagaaaatcagaggactttgttaaagattcagaactgcacttacccagggtcaccagcttggagactgtcgcccagttccggagagcccagggtggctttcctctctctggtggcccgcctctggaaggcgtcggacctttccgtgagaaaacgaaacacttacggatggaaagcagggatgacaggtgtcgtctctttgagtatggccagggtgattgaaaactcagcctcaaaacaaaaaattcactagttatgattcaacgcgttcaacagaagccatccccagcccagcttaaattataaagatagacaataactctgttccaatctgcgtggtgcttctttagtaaatactgtacagattttaccatggagaactttttttttagtttttaccttttcttaattacccttattccgaatggacgaacactttctaccactgctgaccattgtaaaataccgtgtatataaatcccattgaaataatgccctggaatagaacatctcaaatgctgcttaattacagactcaggtcgattacttgtatttcatgtaatgttcctccaagttagacatctggtgcaagaccaaccgggagaccatggaattgtcaaaagtacaaactgacagtgtgtatatttaatttaaagacttatttaaaaactcacaagctctcacctagactttggagagcagtctgttttctgtaatgtctgatactagaaactaatttgcttattttagttgtattcaagatttgaagatgtattttatagacaagttctgtttttgaactttgtggaactgttccaatcaatcaatttcccagttatgatgagtatttacattatgaatgtataacccagacatgatttgtaaagccgacagtatgtttctattacacaacactttttgatacagcgtctcttgtcttcactgatactggagtctccgttgtctgcttggtcccttcgagtttctagttacagacacaatcatactgtgattttatttttaatatggatatgctatcaaactgtgatacacttataattcactggtcctgcatcaggagatggagtggggaaaactgtatttaatacagtttgtatctgaataatctgtatggtttatacagtttgtgttgttcagagatgtttaaagtttgatctttgtttttctaaagattaaaaaagcacttgccccactgtaaatatacagcatgtaaaatttctatagtatataaatggcagcaaatcaca

SEQ ID NO: 223154 - protein, 660 aa, Artificial Sequence
  derived and/or modified sequence
MATSHRVAKLVASSLQTPVNPITGARVAQYEREDPLKALAAAEAILEDEEEEKVAQPAGASADLNTSFSGVDEHAPISYEDFVNFPDIHHSNEEYFKKVEELKAAHIETMAKLEKMYQDKLHLKEVQPVVIREDSLSDSSRSVSEKNSYHPVSLMTSFSEPDLGQSSSLYVSSSEEELPNLEKEYPRKNRMMTYAKELINNMWTDFCVEDYIRCKDTGFHAAEKRRKKRKEWVPTITVPEPFQMMIREQKKKEESMKSKSDIEMVHKALKKQEEDPEYKKKFRANPVPASVFLPLYHDLVKQKEERRRSLKEKSKEALLASQKPFKFIAREEQKRAAREKQLRDFLKYKKKTNRFKARPIPRSTYGSTTNDKLKEEELYRNLRTQLRAQEHLQNSSPLPCRSACGCRNPRCPEQAVKLKCKHKVRCPTPDFEDLPERYQKHLSEHKSPKLLTVCKPFDLHASPHASIKREKILADIEADEENLKETRWPYLSPRRKSPVRCAGVNPVPCNCNPPVPTVSSRGREQAVRKSEKERMREYQRELEEREEKLKKRPLLFERVAQKNARMAAEKHYSNTLKALGISDEFVSKKGQSGKVLEYFNNQETKSVTEDKESFNEEEKIEERENGEENYFIDTNSQDSYKEKDEANEESEEEKSVEESH

SEQ ID NO: 223155 - DNA, 3684 bp, Artificial Sequence
  derived and/or modified sequence
atagcaaccggctccctagctaggcgcccccgggttgccaggggccgcaccagctttcccgtcccgggccagcgcaggcgctcaggcctcggaggcggggcgatggccacctcccaccgagtggcgaagctggtggcctccagtctccagaccccggtaaatcccatcactggagcgcgggtcgcccagtacgaacgcgaagaccccttaaaggccctggcggcagcggaggcgatcttggaggacgaagaggaggagaaagtggctcagcccgctggggcatcggctgatttgaacaccagcttttctggggtggatgaacatgcaccgataagctatgaggactttgtgaactttcctgatattcaccactctaatgaggagtatttcaagaaagtagaagagttgaaggctgcccacatagaaactatggcaaaattagagaaaatgtaccaggataaattacatttaaaggaagttcagccagtggtcatcagagaagactctcttagtgactcttccagatctgtatcagaaaagaactcctatcaccctgtctcattaatgacatcattttcagagcctgatttaggccagtcttcctccttgtatgtgtcctcctctgaagaggagttacccaacctagaaaaagagtatcctaggaaaaacagaatgatgacctatgctaaggagctcatcaacaatatgtggacagacttttgtgttgaggattatattcgctgtaaagatactggcttccatgcagctgaaaaaagaaggaagaaacgaaaagaatgggtgcccacaattacagtaccggagccttttcaaatgatgataagagaacagaagaaaaaagaagagtccatgaaatctaaatcagatatcgaaatggtacataaagcgctcaaaaaacaagaagaggatccagagtataagaagaaattccgagccaatccagttcctgcatctgtctttctccccctttaccatgatttagtcaagcaaaaagaagaacggagaaggtctctgaaggagaaaagcaaagaagctcttttggcctcacaaaagccatttaaatttatagcaagggaggaacagaagcgagcagcccgggaaaagcagctgagagactttcttaagtataaaaagaaaacaaatcgatttaaagccagacccattcctcgatctacttatggttcaactaccaatgacaagttaaaagaagaagagctctatcgaaaccttaggacacagctgagagcccaggagcatttacagaactcatctcctctgccttgtaggtcagcttgtggatgcaggaaccccaggtgtcctgaacaggctgtaaagttgaagtgtaaacacaaggttaggtgcccaactcctgattttgaggaccttcctgagagataccagaaacacctctcagaacacaagtctccaaaactcttaacagtgtgtaaaccatttgatcttcatgcatctccacatgcatctattaaaagagaaaaaattttggcagacatcgaagcagatgaagaaaatttaaaagaaacacgttggccttatttgtctccaaggcgtaagtcaccagtaagatgtgcaggtgtaaaccctgtgccttgtaactgcaaccctcccgtgcccacggtatcttccagaggacgagaacaagccgtaagaaagagcgaaaaggaaaggatgagagaataccaacgagaactagaagaaagagaagaaaaattaaaaaagaggccactgctatttgaaagagttgctcagaaaaatgcaagaatggcagcagaaaagcattattctaataccctaaaagcactaggaatatctgatgagtttgtttcaaagaaaggccaaagtggaaaagtacttgagtacttcaacaatcaagagacgaaaagtgtcactgaagacaaagaaagctttaatgaagaagaaaaaatagaagaaagagagaatggggaagaaaattattttattgataccaacagccaggattcttacaaggaaaaagatgaagccaatgaggaaagtgaagaagagaaatctgttgaagaatcacactgaatcatcaaggtctcctctctatgcccttgctgttgtttgcagcgtcagggtgtcagcagccgcatttgtgtttagaacatctgtggggacgcttctgatatgtgcagggctgttgatcaaagtcatctgtagcctgaaaagcctgaatccagctgattggtcatttgatcagttagagtaaggctttgcctattcagttttaaaaatcattgtgtattatctgtttgcaactatgattttgtatttttaaaaagtgagaaccacagctgtcacaaactgattagttataaaaatatacattatttcattaattttactggaaaaaatggcttagtattgaaaggagagagaagtattggtctttggtggtttactttttaaaaattttggaaagtgtgaatcaataactatttttaattatactatttgcccattctttttctctgcagtgcatttcacagaataaatcctctaacttgttttgctgctctgagccatttttaaaagtatagaaaaaacgccgggtatggtggctcatgcctgtaatcccagcattttgggaggccgagacgggtggatcacgaggtcaggagatcgagaccatcctggctaacacgatgaaaccccgtctctactaaaaatacaaaaaattagccaggcgtggtggtgggcgcctgtagtcccagctacttgggaggcagaggcaggagaatggcatgaacccaggaggcagagcttgcagtgagccgagatcgcgccactgcactccagcttgggcaacagagcgagactccgtctccaaaaaaaaaaaaaaagtatagaaaaaaatggatacttgcaaatttacatttatttttgcactgagagtttactgttaaattgtctacaccatcatccctttttctttttatccttagttctagtccaaattatttttgatttgtaaattattaggaaagtttttatactagtttttttaaccctatgtattattacagatggaagtaattatggcatgtgtgagttataatctaaattaggggcaagtatccctttttttatatgatgaaattgtgcataataacttggctagggcaagtctccaaagtaattcagatttaactcttcactgctagacccagttgtgttcaactttttacatattattgccaacacactttatctctctgtgtacagtgttaatctgattttataaatctatatttttttctttaagcaaatttttgttttaaaatttgaagccaatcataaagataatatagcataagacattttcttttctaaaaacaatcagcatcattttaaaaggatgaactaatacaggtgtatgtaatagcagtgtttccaaactggcaatttatgctttaaatttaaaaataaggtcatttttctccatcaggggcaaatgtttacttgtaattttcttcctacagttcgtgttaaattactttttactattattatattgtaaactccttgggatttggcaccatttaaaaattcatctttgtattcccttaatatttggaacagtattgtacatatggtaggtacttaataaaggtttgaatgagtgtg

SEQ ID NO: 223156 - DNA, 1983 bp, Artificial Sequence
  derived and/or modified sequence
atggcaacttcccaccgtgtagccaaacttgtggccagcagcttacagactccagtgaaccctatcaccggagcaagagtcgcacagtacgagagagaggaccctctaaaggcattggctgccgccgaggccatactggaagacgaagaggaggagaaggtggcccaacccgcaggcgctagcgccgacctgaatacctccttcagtggggtcgatgagcacgctcccatcagttatgaagacttcgtgaatttccccgacattcaccatagcaacgaggaatattttaagaaggtggaggaactcaaagctgcccatatcgaaacaatggccaaactggaaaagatgtaccaagacaagctgcatctgaaagaagtccaaccagttgtgatacgcgaagactccctgagcgacagttcccggtctgttagtgaaaagaactcctaccaccctgtcagccttatgacttccttcagcgagcccgacttggggcagagttcttccctctacgtgtcctcatccgaggaggaactccccaacttggaaaaggagtaccctcgcaagaatagaatgatgacatacgccaaagagttgatcaacaacatgtggactgacttttgcgtggaggactatatccggtgtaaagacactggattccacgcagctgagaaacggcgaaaaaaacggaaggaatgggtcccaactataaccgtgccggaaccatttcaaatgatgattcgcgaacaaaagaaaaaagaagaatcaatgaagtctaaatcagatattgaaatggttcataaagctctaaaaaagcaggaggaggatccggagtataagaagaagttcagggctaaccctgtccctgcatccgtgttcctgccactgtatcatgacctggtgaagcaaaaagaagagagacggcggagtctgaaagagaagagtaaggaagccctgctggctagccagaagccgtttaagttcatcgcacgggaagagcagaaacgggctgccagggagaagcagctgagagatttcttgaaatacaagaaaaagactaatagattcaaggcacgaccaataccgaggagcacttatgggtcgacaaccaacgataaattgaaggaagaggaattatacaggaacctgcggactcaactcagggcccaagagcatctgcagaacagttctcctctgccatgcaggagcgcttgcggttgtcgcaaccccagatgccccgagcaggcggtaaaactgaagtgtaagcacaaggtgcgctgccccactcccgatttcgaagatcttccggaaaggtatcagaagcacctgtctgaacataagtcacctaaactcctcacagtgtgcaaaccatttgacttgcatgccagccctcacgcctctatcaagagggaaaaaatcctggccgacatcgaagccgatgaggagaatctaaaggaaacaaggtggccatacctgtccccccggagaaagtcccccgtgcggtgcgcaggagtcaacccagtaccttgcaactgtaatccccccgtccccacagtgagctcaagaggtagagagcaagcagtgaggaaatccgagaaagaacgtatgagggagtatcagagagaactggaggagagagaagagaaactgaagaagcgcccgcttctttttgagagggtggcacagaaaaacgcccggatggcggcggaaaagcactatagcaataccctcaaagctttgggaatctctgacgagttcgtctctaaaaaaggccagtcaggaaaggtgttagagtattttaacaaccaggagaccaaaagcgtgactgaggacaaggagtcttttaatgaagaagaaaagattgaagaacgcgaaaacggagaggagaattacttcattgatacaaattcccaagacagttataaagagaaggacgaagccaatgaagaaagcgaagaagaaaaatcagtggaggagtcccattag

SEQ ID NO: 223157 - DNA, 1983 bp, Artificial Sequence
  derived and/or modified sequence
atggccaccagccaccgggtggccaagctggtggccagcagcctgcagacccctgtgaaccccatcactggagcccgggtggcccagtatgaaagagaggaccccctgaaggccctggccgctgctgaggccatcctggaggatgaggaggaggagaaggtggcccagcctgctggggccagcgctgacctgaacaccagcttctctggagtggatgagcacgcccccatctcctatgaggactttgtgaacttcccagacatccaccacagcaatgaggagtacttcaagaaggtggaggagctgaaggccgcccacatcgagaccatggccaagctggagaagatgtaccaggacaagctgcacctgaaggaggtgcagcctgtggtgatccgggaggacagcctgagtgacagcagccgctctgtgtctgagaagaacagctaccaccctgtgtccctgatgaccagcttcagcgagccagacctgggccagagcagcagcctgtatgtgagcagcagcgaggaggagctgcccaacctggagaaggagtaccccaggaagaacaggatgatgacctacgccaaggagctgatcaacaacatgtggacagacttctgtgtggaggactacatccgctgcaaggacaccggcttccacgccgctgagaagaggaggaagaagaggaaggagtgggtgcccaccatcaccgtgcctgagcccttccagatgatgatccgggagcagaagaagaaggaggagagcatgaagagcaagagtgacatcgagatggtgcacaaggccctgaagaagcaggaggaggaccctgagtacaagaagaagttccgggccaaccctgtgcctgccagcgtcttcctgcccctgtaccatgacctggtgaagcagaaggaggagaggagaagaagcctgaaggagaagagcaaggaggccctgctggccagccagaagcccttcaagttcatcgcccgggaggagcagaagagagctgcccgggagaagcagctgcgggacttcctgaagtacaagaagaagaccaaccgcttcaaggcccggcccatccccaggagcacctacggcagcaccaccaatgacaagctgaaggaggaggagctgtacagaaacctgcggacccagctgcgggcccaggagcacctgcagaacagcagccccctgccctgccgcagcgcctgtggctgcaggaacccccgctgcccagagcaggccgtgaagctgaagtgcaagcacaaggtgcgctgccccaccccagactttgaggacctgcctgagcgctaccagaagcacctgtctgagcacaagagccccaagctgctgactgtgtgcaagccctttgacctgcacgccagcccccacgccagcatcaagcgggagaagatcctggccgacatcgaggctgatgaggagaacctgaaggagacccgctggccctacctgagccccaggaggaagagccctgtgcgctgtgccggcgtgaaccctgtgccctgcaactgcaacccccctgtgcccaccgtgagcagccggggccgggagcaggccgtgaggaagtctgagaaggagaggatgagggagtaccagcgggagctggaggagcgggaggagaagctgaagaagaggcccctgctgtttgagcgggtggcccagaagaatgccaggatggctgctgagaagcactacagcaacaccctgaaggccctgggcatcagtgatgaatttgtgtccaagaagggccagagcggcaaggtgctggagtacttcaacaaccaggagaccaagtctgtgacagaggacaaggagagcttcaatgaggaggagaagattgaggagcgggagaatggagaggagaactacttcatcgacaccaacagccaggacagctacaaggagaaggatgaggccaatgaggagagcgaggaggagaagtctgtggaggagagccactag

SEQ ID NO: 223158 - DNA, 1983 bp, Artificial Sequence
  derived and/or modified sequence
atggccaccagccaccgggtggccaagctggtggccagcagcctgcagactccagtcaatcctatcacgggagcacgcgtggcacagtatgagagggaggacccgttgaaagctctggccgcggctgaagcaatcctggaggatgaggaggaagagaaagtcgcacaaccagccggcgcatccgccgatctgaatacgagtttctctggggtggacgagcacgctcctatctcttatgaagattttgtgaattttccagacattcaccactccaatgaagagtactttaaaaaagtagaggagctcaaggctgctcacatcgaaacgatggctaagttggaaaaaatgtatcaagacaagctccatcttaaagaagtgcagccagtggtgatcagagaggatagcctgtctgactcctctaggtccgtgtccgagaagaactcttaccatccagtgtctctgatgacatcattctccgaaccggacctggggcagagcagctcgctctacgtttcatcaagtgaggaagagctgccgaacctcgaaaaagaatatcctcggaaaaaccggatgatgacatacgcgaaggaactcataaacaatatgtggaccgacttctgcgtggaagactatatacgctgcaaggataccgggttccacgccgccgagaaaagaagaaagaagaggaaggaatgggtgcccaccatcaccgtgccggagcccttccagatgatgataagagaacagaaaaaaaaggaggagagtatgaagtcaaaaagtgatatcgagatggtccataaagctctgaagaagcaagaggaagatcctgagtataagaagaaattccgggcaaatcccgtgcccgcatcagtgtttctgccattgtatcacgacctggtgaaacagaaggaggaacgtagacgaagcctcaaagaaaaatcaaaggaggcactgctcgcctcccagaagcccttcaagttcatagcaagagaggagcaaaaacgggccgcccgtgaaaaacaactgagggactttttgaagtataaaaagaagactaatcgcttcaaggctagacccattcctagatctacatatggtagcactaccaacgataagttgaaggaagaggaactgtaccggaatctcagaactcaacttcgagcccaggaacaccttcaaaactcctcaccactgccttgtcgctcagcttgcggttgccgcaacccccgatgcccggagcaagccgtcaagttaaagtgtaagcataaggtcaggtgccctacccccgacttcgaagacctaccggaaagatatcagaagcatctgtcagaacataaaagcccgaaactgctaactgtgtgcaaaccattcgatctgcacgcctctccccacgcctccattaagagagagaagattctggcggacatcgaggcagatgaagagaacctcaaagaaacaaggtggccttatctttctcctcgaaggaaatcccctgtccgatgcgctggcgtcaaccctgtcccttgcaactgcaacccaccggtacccactgtgagcagccgaggaagggagcaggccgtgagaaaatcagagaaggagagaatgagagaatatcaaagggaactcgaagagcgagaggaaaagctaaagaaacgccccttactgtttgagagggtagcacagaagaatgcccgcatggccgccgagaagcactactctaacacactgaaggcgttggggatatcagatgagtttgtcagcaagaaggggcagtcaggaaaggtcctggaatacttcaacaatcaggagactaaatccgtgacagaagataaggagtccttcaatgaggaggaaaagatcgaggaacgcgaaaacggcgaggagaattatttcattgatacaaattcacaagatagctacaaggaaaaagatgaggcaaacgaggagtccgaggaagagaagtccgtcgaagaaagtcattag

SEQ ID NO: 223159 - DNA, 1983 bp, Artificial Sequence
  derived and/or modified sequence
atggctaccagccacagagtggctaagctagtggccagttcacttcagactcccgtcaatcctatcaccggcgcaagagtggctcagtatgagagggaagaccctctcaaggccctcgctgctgctgaggcgatattggaagatgaggaagaggagaaggtggctcaaccagctggcgcatctgccgatctcaatacctcattcagtggcgtcgatgaacacgcaccaatctcttacgaggatttcgtcaatttcccagacattcaccatagtaacgaggagtacttcaaaaaggtggaggagcttaaagccgctcacattgaaaccatggccaagctggaaaagatgtatcaagataagcttcatttgaaggaggtccagcccgtggtcataagagaagattccctctccgattcttcacgatctgtgtcagagaaaaactcctatcatcctgtctcactcatgaccagcttcagcgagccagacctcggacagagttcaagcttgtacgtcagctcctctgaggaggagctgcccaatctcgaaaaagaatatcctcgaaagaacaggatgatgacatacgccaaggaactgatcaataacatgtggacagatttttgtgtggaggattacattcgatgtaaggacacaggattccacgcggcagaaaagcggcgtaagaagagaaaagagtgggttccaactatcacagtgcccgagccttttcagatgatgatccgtgagcaaaaaaaaaaggaggaatccatgaaaagtaagtcagatatagagatggtgcacaaagcccttaagaaacaggaagaggaccctgaatataagaagaagttccgggctaacccagttcccgcaagcgtgtttctgcccttgtatcacgacctcgtcaaacagaaggaggagcggaggcggagcttaaaggaaaagtccaaagaagctttactggcatcccagaaacctttcaaattcatagctcgcgaagagcagaaacgagctgcgagagaaaaacagcttcgagacttcttaaagtacaaaaaaaagacgaataggtttaaggcccgaccgatacccagatcaacctacgggagcaccaccaatgacaagctgaaagaggaagaactgtaccggaacctccgcacacagttaagggcacaggagcatctgcagaatagttctccactaccttgccggtcagcttgcgggtgtaggaaccctcgctgccccgagcaggccgttaagctcaagtgcaaacacaaagtgaggtgcccaacccccgactttgaagatttgccagagcgctaccagaagcatcttagcgaacataagtctcctaaactactgacagtctgcaagccatttgacttgcatgcctctccccatgcctctatcaaaagggaaaagattctggctgacatagaggccgacgaggagaacttgaaggaaactcgatggccatatttatccccccgacgaaagtccccagtgagatgtgcaggcgtgaacccagtgccttgcaactgcaaccctcccgtgcccactgtgtcatcaagaggacgtgaacaggctgtccgcaagtcagagaaggaacggatgagggagtaccagagagagctagaggaaagagaagagaaattgaagaaacggccactcctcttcgagcgcgttgcccagaagaacgcacgtatggcagcagagaaacattatagcaacaccctgaaagccctcggaataagtgacgaatttgtctccaagaagggacagagcggtaaggttctggagtattttaataaccaagaaaccaaatctgtcacagaggacaaagaaagtttcaatgaagaggagaaaattgaagagcgggagaacggcgaggaaaattatttcatcgacaccaactcacaggacagctataaggagaaggacgaagccaatgaggaatccgaggaggaaaagagtgtggaggaatctcattag

SEQ ID NO: 223160 - DNA, 1983 bp, Artificial Sequence
  derived and/or modified sequence
atggccaccagccacagagtggccaagctggtggccagcagcctgcagacccccgtgaaccccatcaccggcgccagagtggcccagtacgagagagaggaccccctgaaggccctggccgccgccgaggccatcctggaggacgaggaggaggagaaggtggcccagcccgccggcgccagcgccgacctgaacaccagcttcagcggcgtggacgagcacgcccccatcagctacgaggacttcgtgaacttccccgacatccaccacagcaacgaggagtacttcaagaaggtggaggagctgaaggccgcccacatcgagaccatggccaagctggagaagatgtaccaggacaagctgcacctgaaggaggtgcagcccgtggtgatcagagaggacagcctgagcgacagcagcagaagcgtgagcgagaagaacagctaccaccccgtgagcctgatgaccagcttcagcgagcccgacctgggccagagcagcagcctgtacgtgagcagcagcgaggaggagctgcccaacctggagaaggagtaccccagaaagaacagaatgatgacctacgccaaggagctgatcaacaacatgtggaccgacttctgcgtggaggactacatcagatgcaaggacaccggcttccacgccgccgagaagagaagaaagaagagaaaggagtgggtgcccaccatcaccgtgcccgagcccttccagatgatgatcagagagcagaagaagaaggaggagagcatgaagagcaagagcgacatcgagatggtgcacaaggccctgaagaagcaggaggaggaccccgagtacaagaagaagttcagagccaaccccgtgcccgccagcgtgttcctgcccctgtaccacgacctggtgaagcagaaggaggagagaagaagaagcctgaaggagaagagcaaggaggccctgctggccagccagaagcccttcaagttcatcgccagagaggagcagaagagagccgccagagagaagcagctgagagacttcctgaagtacaagaagaagaccaacagattcaaggccagacccatccccagaagcacctacggcagcaccaccaacgacaagctgaaggaggaggagctgtacagaaacctgagaacccagctgagagcccaggagcacctgcagaacagcagccccctgccctgcagaagcgcctgcggctgcagaaaccccagatgccccgagcaggccgtgaagctgaagtgcaagcacaaggtgagatgccccacccccgacttcgaggacctgcccgagagataccagaagcacctgagcgagcacaagagccccaagctgctgaccgtgtgcaagcccttcgacctgcacgccagcccccacgccagcatcaagagagagaagatcctggccgacatcgaggccgacgaggagaacctgaaggagaccagatggccctacctgagccccagaagaaagagccccgtgagatgcgccggcgtgaaccccgtgccctgcaactgcaacccccccgtgcccaccgtgagcagcagaggcagagagcaggccgtgagaaagagcgagaaggagagaatgagagagtaccagagagagctggaggagagagaggagaagctgaagaagagacccctgctgttcgagagagtggcccagaagaacgccagaatggccgccgagaagcactacagcaacaccctgaaggccctgggcatcagcgacgagttcgtgagcaagaagggccagagcggcaaggtgctggagtacttcaacaaccaggagaccaagagcgtgaccgaggacaaggagagcttcaacgaggaggagaagatcgaggagagagagaacggcgaggagaactacttcatcgacaccaacagccaggacagctacaaggagaaggacgaggccaacgaggagagcgaggaggagaagagcgtggaggagagccactag

SEQ ID NO: 223161 - protein, 152 aa, Artificial Sequence
  derived and/or modified sequence
MRLPLSHSPEHVEMALLSNILAAYSFVSENPERAALYFVSGVCIGLVLTLAALVIRISCHTDCRRRPGKKFLQDRESSSDSSDSEDGSEDTVSDLSVRRHRRFERTLNKNVFTSAEELERAQRLEERERIIREIWMNGQPEVPGTRSLNRYY

SEQ ID NO: 223162 - protein, 143 aa, Artificial Sequence
  derived and/or modified sequence
MRLPLSHSPEHVEMALLSNILAAYSFVSENPERAALYFVSGVCIGLVLTLAALVIRISCHTDCRRRPGKKFLQDRESSSDSSDSEDGSEDTVSDLSVRRHRRFERTLNKNVFTSAEELERAQRLEERERIIREIWMNGQPEVP

SEQ ID NO: 223163 - protein, 101 aa, Artificial Sequence
  derived and/or modified sequence
MRLPLSHSPEHVEMALLSNILAAYSFVSENPERAALYFVSGVCIGLVLTLAALVIRISCHTDCRRRPGKKFLQDRESSSDSSDSEDGSEDTVSDLSVRRHR

SEQ ID NO: 223164 - DNA, 459 bp, Artificial Sequence
  derived and/or modified sequence
atgagactgcccctgagccacagccccgagcacgtggagatggccctgctgagcaacatcctggccgcctacagcttcgtgagcgagaaccccgagagagccgccctgtacttcgtgagcggcgtgtgcatcggcctggtgctgaccctggccgccctggtgatcagaatcagctgccacaccgactgcagaagaagacccggcaagaagttcctgcaggacagagagagcagcagcgacagcagcgacagcgaggacggcagcgaggacaccgtgagcgacctgagcgtgagaagacacagaagattcgagagaaccctgaacaagaacgtgttcaccagcgccgaggagctggagagagcccagagactggaggagagagagagaatcatcagagagatctggatgaacggccagcccgaggtgcccggcaccagaagcctgaacagatactactag

SEQ ID NO: 223165 - DNA, 432 bp, Artificial Sequence
  derived and/or modified sequence
atgagactgcccctgagccacagccccgagcacgtggagatggccctgctgagcaacatcctggccgcctacagcttcgtgagcgagaaccccgagagagccgccctgtacttcgtgagcggcgtgtgcatcggcctggtgctgaccctggccgccctggtgatcagaatcagctgccacaccgactgcagaagaagacccggcaagaagttcctgcaggacagagagagcagcagcgacagcagcgacagcgaggacggcagcgaggacaccgtgagcgacctgagcgtgagaagacacagaagattcgagagaaccctgaacaagaacgtgttcaccagcgccgaggagctggagagagcccagagactggaggagagagagagaatcatcagagagatctggatgaacggccagcccgaggtgccctag

SEQ ID NO: 223166 - DNA, 306 bp, Artificial Sequence
  derived and/or modified sequence
atgagactgcccctgagccacagccccgagcacgtggagatggccctgctgagcaacatcctggccgcctacagcttcgtgagcgagaaccccgagagagccgccctgtacttcgtgagcggcgtgtgcatcggcctggtgctgaccctggccgccctggtgatcagaatcagctgccacaccgactgcagaagaagacccggcaagaagttcctgcaggacagagagagcagcagcgacagcagcgacagcgaggacggcagcgaggacaccgtgagcgacctgagcgtgagaagacacagatag

SEQ ID NO: 223167 - DNA, 1815 bp, Artificial Sequence
  derived and/or modified sequence
agcataacctgtttgtgaaactgcaaaaaggttgacatggctgaagcagaagatgggttggtactgaatggttgggagagatatgtagcggctgaccctgaaggacgttgcagcccatgctatggagacctgattttattttgtaagaggtgggcaacccctgaagcattttagtgatgcgaacagatgtgtctgttaccaagcaaagccagttaaagaaggtcacagaggaggaatgatcacaaagagtctgagaagccaactggggccaaacaagttttagaacctctactggctgatgccaacatcatcagagatgaactgttcttaccagaaacttctctgctcctgacaccccacctctccccagaagagaagaaggagagtggccacgttgattcagccaagcacctccaggaggtcccctctggatgtcccatgaggctgcccctcagccacagcccagagcacgtggagatggctttgctcagcaacatcctagcggcctattcctttgtctcagaaaatcctgagcgagcagctctgtactttgtttctggcgtgtgcatcgggctggtgctgaccctggctgctctggtgataaggatctcttgccacacagactgcaggcggcgtcccgggaagaagttcctgcaggacagagagagcagcagcgacagcagcgacagcgaggatggcagtgaggacaccgtgtccgatctctccgtgcggagacaccgccgcttcgagaggactttgaacaagaatgtgttcacctctgcggaggagctggagcgcgcccagcggctggaggagcgcgagcgcatcatcagggagatctggatgaatggccagcctgaggtgcccgggaccaggagcctgaatcgctactattagggagcagcaggaccccggaaaccactggaggccgcctggaaaggagagcgtctgcagggacagtgggcacaaggaactgaacccagctctgctaatattgtgatttcagagaaaaagcaggacatgccccttttctagccaggaggattgctcctttttggccaaatgtatggagaagtagaaaaatcaaagcagttcatcaccctttccaggtctcggaatggtgctgaaaaatcctctccaacactgtggatggagatcggagaaacgcgactgtggtttctcttgatttctgaggatctcagaagtttcagcagacttccttgctctgtgttattcctttgcaaaaggaaagatcattatagcatgagggctgggaatagcagggtgaacttaacccaataaatgcaatttcctaaatgacttcatgctatggaggtgattctgattcaaatagcatgatccatgcttattatttaaggctgatttttaaaatcttgtgttgcaagggcaacctcgtccattttaactggcacctcagggattaaaatcctactttttagtgtagttcccacctcattcatgaaaatgaatagaactattgtattatgggagatgtgtcagtgaactagaaaatgtcaataacctcaaaggatgaagggtttttattttaaatagtttataaaatatatattgacatgcatatttgaaaatgctgcataaaaataaaagtggtgtgttttccccctctttggagacaagaaaattttattatgactctagataattgtgattttaaacactttgtttttttttttttttttaattggatttcaaagaaaagaatggaaatgagaggtaaggattaaagccaaagttaggatgggaattaaaaaaataaacattacataaaatctt

SEQ ID NO: 223168 - DNA, 1802 bp, Artificial Sequence
  derived and/or modified sequence
cggggcttggcgccgccgtccgtgagcacccaggccgggaccccacatccccaggccagccctgaccccggcggcccctccgccgggattcctttccgaggtactggtgccggcccaagacccgggcagcgctttgtcgtgtccgcccctcagtgatcagctccgggtccccctgctcggccccgcgcgccccaagcgcagtccccggaagtgcgcgccggggccccagcaaagagtctgagaagccaactggggccaaacaagttttagaacctctactggctgatgccaacatcatcagagatgaactgttcttaccagaaacttctctgctcctgacaccccacctctccccagaagagaagaaggagagtggccacgttgattcagccaagcacctccaggaggtcccctctggatgtcccatgaggctgcccctcagccacagcccagagcacgtggagatggctttgctcagcaacatcctagcggcctattcctttgtctcagaaaatcctgagcgagcagctctgtactttgtttctggcgtgtgcatcgggctggtgctgaccctggctgctctggtgataaggatctcttgccacacagactgcaggcggcgtcccgggaagaagttcctgcaggacagagagagcagcagcgacagcagcgacagcgaggatggcagtgaggacaccgtgtccgatctctccgtgcggagacaccgccgcttcgagaggactttgaacaagaatgtgttcacctctgcggaggagctggagcgcgcccagcggctggaggagcgcgagcgcatcatcagggagatctggatgaatggccagcctgaggtgcccgggaccaggagcctgaatcgctactattagggagcagcaggaccccggaaaccactggaggccgcctggaaaggagagcgtctgcagggacagtgggcacaaggaactgaacccagctctgctaatattgtgatttcagagaaaaagcaggacatgccccttttctagccaggaggattgctcctttttggccaaatgtatggagaagtagaaaaatcaaagcagttcatcaccctttccaggtctcggaatggtgctgaaaaatcctctccaacactgtggatggagatcggagaaacgcgactgtggtttctcttgatttctgaggatctcagaagtttcagcagacttccttgctctgtgttattcctttgcaaaaggaaagatcattatagcatgagggctgggaatagcagggtgaacttaacccaataaatgcaatttcctaaatgacttcatgctatggaggtgattctgattcaaatagcatgatccatgcttattatttaaggctgatttttaaaatcttgtgttgcaagggcaacctcgtccattttaactggcacctcagggattaaaatcctactttttagtgtagttcccacctcattcatgaaaatgaatagaactattgtattatgggagatgtgtcagtgaactagaaaatgtcaataacctcaaaggatgaagggtttttattttaaatagtttataaaatatatattgacatgcatatttgaaaatgctgcataaaaataaaagtggtgtgttttccccctctttggagacaagaaaattttattatgactctagataattgtgattttaaacactttgtttttttttttttttttaattggatttcaaagaaaagaatggaaatgagaggtaaggattaaagccaaagttaggatgggaattaaaaaaataaacattacataaaatctt

SEQ ID NO: 223169 - DNA, 777 bp, Artificial Sequence
  derived and/or modified sequence
cgggacaggaatgagaggatggatgctggcaggggcttggagagtctgagaagccaactggggccaaacaagttttagaacctctactggctgatgccaacatcatcagagatgaactgttcttaccagaaacttctctgctcctgacaccccacctctccccagaagagaagaaggagagtggccacgttgattcagccaagcacctccaggaggtcccctctggatgtcccatgaggctgcccctcagccacagcccagagcacgtggagatggctttgctcagcaacatcctagcggcctattcctttgtctcagaaaatcctgagcgagcagctctgtactttgtttctggcgtgtgcatcgggctggtgctgaccctggctgctctggtgataaggatctcttgccacacagactgcaggcggcgtcccgggaagaagttcctgcaggacagagagagcagcagcgacagcagcgacagcgaggatggcagtgaggacaccgtgtccgatctctccgtgcggagacaccgccgcttcgagaggactttgaacaagaatgtgttcacctctgcggaggagctggagcgcgcccagcggctggaggagcgcgagcgcatcatcagggagatctggatgaatggccagcctgaggtgcccgggaccaggagcctgaatcgctactattagggagcagcaggaccccggaaaccactggaggccgcctggaaaggagagcgtctgcagggacagtgggcacaaggaactgaaccca

SEQ ID NO: 223170 - DNA, 1747 bp, Artificial Sequence
  derived and/or modified sequence
ctgactcgggctcctgcagcttctgcggggcttggcgccgccgtccgtgagcacccaggccgggaccccacatccccaggccagccctgaccccggcggcccctccgccgggattcctttccgaggtactggtgccggcccaagacccgggcagcgctttgtcgtgtccgcccctcagtgatcagctccgggtccccctgctcggccccgcgcgccccaagcgcagtccccggaagtgcgcgccggggccccagcaaagtgcaggtaggtagatcgctgaccacatttgctcatttctggattattcattcaaaggaagcactatgagtcaatcattgggcacagagagtctgagaagccaactggggccaaacaagttttagaacctctactggctgatgccaacatcatcagagatgaactgttcttaccagaaacttctctgctcctgacaccccacctctccccagaagagaagaaggagagtggccacgttgattcagccaagcacctccaggaggtcccctctggatgtcccatgaggctgcccctcagccacagcccagagcacgtggagatggctttgctcagcaacatcctagcggcctattcctttgtctcagaaaatcctgagcgagcagctctgtactttgtttctggcgtgtgcatcgggctggtgctgaccctggctgctctggtgataaggatctcttgccacacagactgcaggcggcgtcccgggaagaagttcctgcaggacagagagagcagcagcgacagcagcgacagcgaggatggcagtgaggacaccgtgtccgatctctccgtgcggagacaccgccgcttcgagaggactttgaacaagaatgtgttcacctctgcggaggagctggagcgcgcccagcggctggaggagcgcgagcgcatcatcagggagatctggatgaatggccagcctgaggtgcccgggaccaggagcctgaatcgctactattagggagcagcaggaccccggaaaccactggaggccgcctggaaaggagagcgtctgcagggacagtgggcacaaggaactgaacccagctctgctaatattgtgatttcagagaaaaagcaggacatgccccttttctagccaggaggattgctcctttttggccaaatgtatggagaagtagaaaaatcaaagcagttcatcaccctttccaggtctcggaatggtgctgaaaaatcctctccaacactgtggatggagatcggagaaacgcgactgtggtttctcttgatttctgaggatctcagaagtttcagcagacttccttgctctgtgttattcctttgcaaaaggaaagatcattatagcatgagggctgggaatagcagggtgaacttaacccaataaatgcaatttcctaaatgacttcatgctatggaggtgattctgattcaaatagcatgatccatgcttattatttaaggctgatttttaaaatcttgtgttgcaagggcaacctcgtccattttaactggcacctcagggattaaaatcctactttttagtgtagttcccacctcattcatgaaaatgaatagaactattgtattatgggagatgtgtcagtgaactagaaaatgtcaataacctcaaaggatgaagggtttttattttaaatagtttataaaatatatattgacatgcatatttgaaaatgctgcataaaaataaaagtggtgtgttttccccctc

SEQ ID NO: 223171 - DNA, 569 bp, Artificial Sequence
  derived and/or modified sequence
gagtagctgaatacaggctcaaagcaggcgacgggacaggaatgagaggatggatgctggcaggggcttggagaagagaagaaggagagtggccacgttgattcagccaagcacctccaggaggtcccctctggatgtcccatgaggctgcccctcagccacagcccagagcacgtggagatggctttgctcagcaacatcctagcggcctattcctttgtctcagaaaatcctgagcgagcagctctgtactttgtttctggcgtgtgcatcgggctggtgctgaccctggctgctctggtgataaggatctcttgccacacagactgcaggcggcgtcccgggaagaagttcctgcaggacagagagagcagcagcgacagcagcgacagcgaggatggcagtgaggacaccgtgtccgatctctccgtgcggagacaccgccgcttcgagaggactttgaacaagaatgtgttcacctctgcggaggagctggagcgcgcccagcggctggaggagcgcgagcgcatcatcagggagatctggatgaatggccagcctgaggtgcc

SEQ ID NO: 223172 - DNA, 434 bp, Artificial Sequence
  derived and/or modified sequence
gaacccgatgggctgtgcctcaaaggtgaaccagggagaatcaaataaagagttccagaagtgaagagaagaaggagagtggccacgttgattcagccaagcacctccaggaggtcccctctggatgtcccatgaggctgcccctcagccacagcccagagcacgtggagatggctttgctcagcaacatcctagcggcctattcctttgtctcagaaaatcctgagcgagcagctctgtactttgtttctggcgtgtgcatcgggctggtgctgaccctggctgctctggtgataaggatctcttgccacacagactgcaggcggcgtcccgggaagaagttcctgcaggacagagagagcagcagcgacagcagcgacagcgaggatggcagtgaggacaccgtgtccgatctctccgtgcggagacaccgc

SEQ ID NO: 223173 - DNA, 459 bp, Artificial Sequence
  derived and/or modified sequence
atgagactgcccctgagccattctcccgaacatgtggagatggctctgttatcaaacatcttagcagcctactccttcgttagcgaaaatcctgaacgggctgccttgtatttcgtatcgggcgtctgtatcggactggtgctgacgctggcagcactggttattcggatatcttgccacaccgattgtaggcgccgacccggcaagaaatttctacaggatagagagagctccagtgacagttcagatagcgaggatggcagcgaagacaccgtcagcgatctgtccgtgcgcagacacaggagattcgagcgcactttaaataagaacgtgtttacctcagcggaggaactggagcgggctcaacggctcgaggaaagagagcgcattatacgtgagatttggatgaatggccagccagaggttccaggaactcgctcgctgaaccggtattattag

SEQ ID NO: 223174 - DNA, 459 bp, Artificial Sequence
  derived and/or modified sequence
atgaggctgcccctgagtcacagtcctgaacatgtggagatggcattactttctaatattcttgctgcttattcgttcgtaagcgagaaccccgagagagctgcgctgtactttgtcagtggtgtttgtattggattggtactaacgttagccgccctggtgattaggatctcttgccatactgattgcagacgcagacccgggaaaaagttcttgcaggatcgcgagtcatcctccgacagcagcgattcggaggatggctccgaggatactgtcagcgacctgtcagtgcgaagacatcggcgctttgaacggaccctgaacaagaatgtcttcactagcgcagaggaactggagagagctcaaaggctggaagagcgcgaacggataatcagagagatttggatgaacggacaaccagaggtccccggcacccgaagcttgaatcgctattattag

SEQ ID NO: 223175 - DNA, 459 bp, Artificial Sequence
  derived and/or modified sequence
atgcgccttcccctgagccactctcctgagcatgttgagatggccctgttgtctaacattctggctgcctactccttcgtgtctgagaaccctgagagggcagccttatatttcgtgtccggagtgtgcatcgggttagtcctaaccctggccgcgctggtgataaggatctcttgtcacacagattgtcggaggcgtcctggtaaaaaattccttcaggacagggagagctcaagcgactcttcagattctgaagatgggtccgaggacaccgtgtccgacttatctgtcaggcggcaccggcgcttcgaaaggaccctgaacaagaacgtcttcaccagtgctgaggagctggagcgcgctcaacggctggaagagagagagcgcattattagagagatttggatgaacggtcaacctgaagttcctggaactcggtccttaaaccggtactactag

SEQ ID NO: 223176 - DNA, 432 bp, Artificial Sequence
  derived and/or modified sequence
atgcggttacctttgtcccacagccccgagcacgtggagatggcactcctgtcgaatatcctagccgcatatagctttgttagtgagaatcctgaaagggcagccctttactttgtgtctggggtatgcatcggcctggtcttgacactggcggctcttgtgatccggatctcgtgtcataccgactgtcgaagacggcccggcaaaaagtttctgcaggaccgggagtccagttcagattcatctgactccgaagacggatcagaagacacagtcagtgacctctcggtgaggaggcatagacggtttgagcgaacccttaataaaaacgtcttcacctccgctgaagagttagagcgggcacagagattagaagagcgagaaaggattattcgggagatctggatgaatggacaacctgaagtgccgtag

SEQ ID NO: 223177 - DNA, 306 bp, Artificial Sequence
  derived and/or modified sequence
atgcgattaccactctcacacagtccagagcacgtggagatggcacttctgagcaatattcttgccgcgtattccttcgtctcagagaatcctgagagagcggcactgtactttgtgtcaggggtgtgcataggactagtgttgactttggccgccttagtgatcagaatttcctgccacacagattgtcgaaggaggccgggaaagaaattcctccaggatcgcgaatcgtcaagcgacagctccgacagcgaagatggcagtgaggacacagtgtctgacctgtccgtgagacggcaccggtag

SEQ ID NO: 223178 - DNA, 459 bp, Artificial Sequence
  derived and/or modified sequence
atgaggctgcccctgagccacagccctgagcacgtggagatggccctgctgagcaacatcctggccgcctacagctttgtgtctgaaaatcctgagcgggccgccctgtactttgtgtctggagtgtgcatcggcctggtgctgaccctggccgccctggtgatccgcatcagctgccacacagactgcagaagaagacctgggaagaagttcctgcaggaccgggagagcagcagtgacagcagtgacagtgaagatggctctgaagatactgtgtctgacctgtctgtgcggcggcacagaagatttgagaggaccctgaacaagaatgtgttcaccagcgctgaggagctggagcgggcccagaggctggaggagcgggagcgcatcatccgggagatctggatgaatggccagcctgaggtgcccggcaccaggagcctgaaccgctactactag

SEQ ID NO: 223179 - DNA, 432 bp, Artificial Sequence
  derived and/or modified sequence
atgaggctgcccctgagccacagccctgagcacgtggagatggccctgctgagcaacatcctggccgcctacagctttgtgtctgaaaatcctgagcgggccgccctgtactttgtgtctggagtgtgcatcggcctggtgctgaccctggccgccctggtgatccgcatcagctgccacacagactgcagaagaagacctgggaagaagttcctgcaggaccgggagagcagcagtgacagcagtgacagtgaagatggctctgaagatactgtgtctgacctgtctgtgcggcggcacagaagatttgagaggaccctgaacaagaatgtgttcaccagcgctgaggagctggagcgggcccagaggctggaggagcgggagcgcatcatccgggagatctggatgaatggccagcctgaggtgccctag

SEQ ID NO: 223180 - DNA, 306 bp, Artificial Sequence
  derived and/or modified sequence
atgaggctgcccctgagccacagccctgagcacgtggagatggccctgctgagcaacatcctggccgcctacagctttgtgtctgaaaatcctgagcgggccgccctgtactttgtgtctggagtgtgcatcggcctggtgctgaccctggccgccctggtgatccgcatcagctgccacacagactgcagaagaagacctgggaagaagttcctgcaggaccgggagagcagcagtgacagcagtgacagtgaagatggctctgaagatactgtgtctgacctgtctgtgcggcggcacaggtag

SEQ ID NO: 223181 - DNA, 459 bp, Artificial Sequence
  derived and/or modified sequence
atgcggctgcccctgagccacagccccgagcacgtggagatggccctactgtccaacatactcgccgcctatagcttcgtcagtgaaaaccccgaacgtgcagcgttatatttcgttagcggggtatgcattggactggttctgaccttggctgctttagtgattaggatctcctgccataccgactgccgccgcaggcctgggaagaaatttctccaggaccgggagtcttcatcagatagttccgactcagaggacggctccgaagacacagtgtctgatctatctgttaggcgacatcggaggttcgagcgaactctgaataagaacgtatttaccagcgccgaagagctggagcgggcacagcggttggaggagagagaacgaatcatccgggaaatttggatgaatggtcagcccgaggttccaggaacgcgcagcttaaatcgctattactag

SEQ ID NO: 223182 - DNA, 459 bp, Artificial Sequence
  derived and/or modified sequence
atgcggctgcccctgagccacagccccgagcacgtggagatggccctgctgagcaatatcctggctgcctatagtttcgttagcgaaaacccggagagggccgctttgtactttgtgagcggcgtctgcatcggcctcgtcctgactttggccgcactggtgattcgaatttcatgtcataccgactgtcgccgtcgccccgggaagaaatttttacaggaccgggagtcttctagtgactcatccgatagtgaagacgggagcgaagacaccgtgtccgatctcagcgtgagacgccaccggcgtttcgagagaactttaaacaagaatgtattcacctccgccgaggaactggagagggctcagagattagaggagcgggaacgaatcattagagagatctggatgaatgggcaaccagaagtgcccggcacgcggtcgctcaatcgctattactag

SEQ ID NO: 223183 - DNA, 459 bp, Artificial Sequence
  derived and/or modified sequence
atgcggctgcccctgagccacagccccgagcacgtggagatggccctgttgagcaacatcctggccgcctatagcttcgttagcgagaatccagagagagctgcactctactttgtctccggcgtttgtataggactcgtcctcaccctggctgccctggtcattcggatctcctgccacaccgattgcaggaggcgtccgggcaaaaagtttctgcaggacagagaatcctcatcggacagttccgatagcgaggatggcagcgaagacacggtgtccgacttatcggttaggaggcaccgcaggttcgaaagaacactaaacaagaacgtattcacaagtgcagaggaactcgagagagcgcagaggcttgaagaacgcgagcggattatccgcgaaatctggatgaacgggcaacccgaggtgcctggtacccgtagtctgaaccgttactactag

SEQ ID NO: 223184 - DNA, 432 bp, Artificial Sequence
  derived and/or modified sequence
atgcggctgcccctgagccacagccccgagcacgtggagatggccctgctttcaaatatcctggccgcctatagcttcgtcagcgagaacccagaaagagcagcattatacttcgtgagtggggtgtgtatcgggctagtgctgactttggctgccctggtgatcaggatcagttgtcatacagactgtaggaggcggccaggtaaaaagtttcttcaggacagggagtcttcgagcgacagcagtgacagcgaggacgggtcggaagacacagtgtccgatctatcagtacgtcgccatagacggttcgagaggactctgaataagaatgtgtttacctccgccgaagagctggagcgcgctcagcgtctggaagaacgcgagagaatcattcgggaaatttggatgaacgggcagcccgaggtaccatag

SEQ ID NO: 223185 - DNA, 306 bp, Artificial Sequence
  derived and/or modified sequence
atgcggctgcccctgagccacagccccgagcacgtggagatggccctgctgtccaacatacttgcggcatatagcttcgtctctgagaatcctgagagagcggccctgtatttcgtgtctggagtatgcattggactcgtgctgactcttgctgcgctggtgatcagaatctcctgccacacagactgtagacgccggcctgggaagaagttcctgcaagaccgggagtccagcagtgacagttcagacagtgaggatggctcagaagacactgtgagtgatctctcggtgcgccgccaccgctag

SEQ ID NO: 223186 - DNA, 459 bp, Artificial Sequence
  derived and/or modified sequence
atgcgcctacctttgtcgcactcgccggagcatgtggaaatggctctactcagtaatattctggctgcgtattcctttgtgtctgaaaacccagagcgagctgccctctatttcgtgagcggagtatgcattggtctggtgctgacccttgctgccttagtcattaggattagttgccacacggactgcaggaggagaccagggaaaaagtttctgcaagaccgcgagtcttccagtgacagctcagattccgaagacgggagcgaggacacagtaagcgacctgtccgtccgccgtcataggaggttcgaacgcacactgaacaaaaatgtttttaccagcgccgaggaactcgaacgggcacaacgtctggaagagagagagcggatcatcagggaaatatggatgaacggccaaccagaggtgccaggaactcggtcactgaaccgatactattag

SEQ ID NO: 223187 - DNA, 459 bp, Artificial Sequence
  derived and/or modified sequence
atgcgactccccctgagtcattcacctgaacacgtggagatggctctcctgagcaacattctggccgcttactcattcgttagcgaaaatcctgaacgagccgcactgtacttcgtcagcggagtgtgtatcgggctggtgctaacactggccgcactcgtgatacggatctcctgtcatactgactgtcggagacgccctggcaaaaagttcctacaagaccgggagagcagttccgattcatcagactccgaggacggaagtgaggataccgtctccgacctgagcgtcaggcgccacaggaggttcgaacggacactgaataagaacgtctttacaagcgctgaggagctggaacgagcccagcgtttggaggagcgcgagaggattatccgtgagatttggatgaatggtcagcccgaggtgcctggtaccagatcgcttaataggtactactag

SEQ ID NO: 223188 - DNA, 459 bp, Artificial Sequence
  derived and/or modified sequence
atgcgactgccactctctcactcccccgagcacgtggagatggccctcctctccaatattctcgccgcttacagctttgtgtccgagaacccagaaagagctgccctgtacttcgtaagcggagtttgcattgggctggtcttaactttggctgcgttggttattcggatctcgtgccatacggactgtagacggagaccgggaaaaaagttcctccaagacagagagtcctctagcgatagctctgattctgaggacggttcagaagataccgtctcagatttatcagtaaggagacaccgcagattcgagagaacgcttaataaaaatgtgttcacctctgctgaggagctggagcgtgcacagaggctggaagagcgcgaacggatcattagggagatctggatgaacggacagcccgaagtgcccggaacgcggtcgctgaatcgctattattag

SEQ ID NO: 223189 - DNA, 432 bp, Artificial Sequence
  derived and/or modified sequence
atgagactaccattgtcacactccccagaacatgtagagatggctctgctgagcaatatcctcgctgcgtactcctttgtcagcgagaaccccgaaagagccgctctatacttcgtgagtggagtgtgcatcgggcttgtcctcacacttgcagccctggtgattaggatctcatgtcatacggactgccgccgacggcctggaaaaaaattccttcaggaccgcgagtcatcaagcgactcctcagactcagaggatggttccgaggacaccgttagtgatctctctgtccggcgacatcgaaggtttgagagaacacttaacaaaaacgtctttaccagcgcagaggaactggaacgagcacagaggcttgaagagcgggagcgaatcatccgcgagatctggatgaacggacaaccagaggtgccctag

SEQ ID NO: 223190 - DNA, 306 bp, Artificial Sequence
  derived and/or modified sequence
atgcggcttccccttagccattcgccagaacacgtggagatggctctgttatctaacatcctcgctgcctattctttcgtaagcgaaaatccagaaagagccgcattgtactttgtgtccggggtttgtatcggattggtcctcactctggccgctttagttatcagaatctcgtgtcatacggactgtcgtcggaggccagggaagaagtttctacaggatagagaaagctctagcgactcctcagatagtgaggacggttctgaggacaccgtttccgatctgagcgtccggaggcaccgctag

SEQ ID NO: 223191 - DNA, 459 bp, Artificial Sequence
  derived and/or modified sequence
atgcgcctccctctgtctcacagccctgaacatgtcgagatggcacttcttagcaacatcctcgcggcttattcttttgtgagcgaaaacccagaacgggctgcactgtatttcgtctcgggagtgtgcatcggcctggtgctgaccttggcagccttagtgatccgtatttcctgtcatactgattgtaggcgtagaccaggcaagaagttcctgcaggatagagagtcctcttctgatagtagcgattccgaagacgggagcgaggacaccgtttcagatctgtccgttcgccgccacaggcgattcgagcggaccctcaacaaaaacgtcttcaccagcgccgaggaactagaacgcgcccagcgcctggaagaacgggagcggatcattcgggaaatatggatgaacggccagccagaggtaccaggcactcgctcgctaaacagatactattag

SEQ ID NO: 223192 - DNA, 459 bp, Artificial Sequence
  derived and/or modified sequence
atgcggctgcccctgagccacagccccgagcacgtggagatggccctcctgagtaatatcctggcagcatatagctttgtctccgaaaacccggagagggcggctctgtacttcgtctccggcgtctgcatcggcctggtattaaccctggcagcattggtcatacgtatttcttgtcacaccgattgccgccggaggccgggcaagaagtttctgcaagatagggaatcctcaagcgactctagcgacagtgaagatggatccgaggataccgtttccgacctctctgtgcggcgacatcgtcggttcgagcgcacactgaacaaaaatgtttttacttccgccgaggagttagagcgggcccaaagacttgaggagagggagcgcattatcagagaaatctggatgaatggtcaacctgaagtgcccgggaccagatcgcttaacaggtactactag

SEQ ID NO: 223193 - DNA, 459 bp, Artificial Sequence
  derived and/or modified sequence
atgcggctgccattgtcacattcacccgaacacgtcgagatggcacttttgagcaacattttggctgcctattcctttgtcagcgagaatcctgagcgcgcagcgctctactttgtgagcggggtgtgcatcgggctggtgctaaccctcgccgctctggtgatcaggatttcctgccacactgactgcaggagacgaccgggaaagaagttcctccaagatcgtgagtcctctagtgactcatcggactctgaagatggaagcgaggacacggtctcagatctctccgtcagaaggcataggaggtttgagcgcacacttaacaagaatgtgtttacatccgcagaagagttagaaagagcacagcgcctggaggaaagggagaggattataagagagatatggatgaacggtcagcccgaagtgcctggcacgcggtctttgaatagatactactag

SEQ ID NO: 223194 - protein, 415 aa, Artificial Sequence
  derived and/or modified sequence
MAASISGYTFSAVCFHSANSNADHEGFLLGEVRQEETFSISDSQISNTEFLQVIEIHNHQPCSKLFSFYDYASKVNEESLDRILKDRRKKVIGWYRFRRNTQQQMSYREQVLHKQLTRILGVPDLVFLLFSFISTANNSTHALEYVLFRPNRRYNQRISLAIPNLGNTSQQEYKVSSVPNTSQSYAKVIKEHGTDFFDKDGVMKDIRAIYQVYNALQEKVQAVCADVEKSERVVESCQAEVNKLRRQITQRKNEKEQERRLQQAVLSRQMPSESLDPAFSPRMPSSGFAAEGRSTLGDAEASDPPPPYSDFHPNNQESTLSHSRMERSVFMPRPQAVGSSNYASTSAGLKYPGSGADLPPPQRAAGDSGEDSDDSDYENLIDPTEPSNSEYSHSKDSRPMAHPDEDPRNTQTSQI

SEQ ID NO: 223195 - DNA, 2992 bp, Artificial Sequence
  derived and/or modified sequence
gtgtgccctccgcggggcatgatggggtagctggagatttccatcatggcggcgtccatttcgggctacaccttcagtgctgtgtgtttccacagcgccaacagcaacgcggaccacgaaggatttttactgggagaggtaagacaagaggaaacgtttagcatcagtgactcacaaatcagcaacacagaatttctgcaagtaattgaaatccataaccatcagccttgttcaaaactttttagtttttatgactacgcaagcaaagtgaatgaggagagtttggacaggattcttaaagatcggagaaagaaagtcattgggtggtacagattccggcgcaatacgcagcagcagatgtcctacagagagcaggttcttcacaagcagctcacccgcatcctcggcgtgcccgacctcgtctttcttctcttcagcttcatctccactgccaacaattccactcacgctttagaatatgtgctcttcagaccaaatagaaggtataatcagaggatatcactcgctattcccaatctaggaaatactagccagcaagagtacaaagtgtcttcagtgccaaatacttctcagagttatgccaaagtgattaaagaacatggtactgacttttttgacaaggatggagtgatgaaagacatcagggcgatttatcaggtttataatgcacttcaggagaaagttcaggcagtgtgtgcagatgttgaaaagagtgagcgagttgttgaatcttgtcaggcagaagtgaacaaattaagaagacaaatcactcagaggaaaaatgaaaaggaacaagaaagaagattgcagcaggcagtgttaagcagacagatgccgtctgaaagcttggacccagcgttcagtcctcggatgccgtcctctgggtttgcagctgaaggcagaagtacacttggagatgcagaggcctcggatcctcctcccccttactctgattttcacccaaacaatcaagaaagtactttgagccactctcgcatggaaaggagtgtctttatgcctcgacctcaagctgtgggctcttccaattatgcttccaccagtgccggactgaagtatcctggaagtggggctgaccttcctcctccccaaagagcagctggagacagtggtgaggattcagacgacagtgattatgaaaatttgattgaccctacagagccttctaatagtgaatactcacattcaaaggattctcgacccatggcacatcccgacgaggaccccaggaacactcagacctcccagatttaactaaacaaaagaaactctccacctagcactgtttttcttcattgcttactgagagggtttttgagaacttaatctggggggagaactgctttctcagataccttaactcccgagaagagagtccttgtgcacagaacttgtgggagcctccatccgctgctctttacctttggatacagtgtgcaagtttcatgacagaatcattaagataatcaaattgtcctaattctggtgcgattcatggatatactggtaaatttaggcaaagtgaaacttatcagcgtagtttctgttctttaaaataaattggaaattagagactaagcacaattagtctataaatgttctataaatcaaaaacttacctcttgcactatcatgccttgaaatttactttttcaaagggaaacaagtttagcagcagccttcaaagaacttctttctatgatgagccaaattcatctttgccagaaaagaaattttgataattccaagaagcctgattagaacaaatcagatataccttctcttgtctgcatgactttgtgagataaaagagagggcttccaacttttttctactagcttgatatgtattatcacttaaaatggttgcctttaaaaaaaaaaagtagagatactaattaccagtaagtaatcatccaaataaatacgtcataaaataaattaattattttttctttgatggattacagtgactactgtgttgcactggcacatttatggtctctgttctggaatcttggaggacacacagcagtggagaacagaaggagtgagttttataatgaacagattccagacacggtaggtttagctgagttcatacagaggagatataactcatttagatcttctgacaaatcctagtgttagttttatctgtggaggaaagacatttaataataaactgtttgggaatcttggtgaataaagattcattttcaagctgaataaccatacttattttattttaagttgccatttggggaataattgcagtatgtgtagagactctcttgggatgcacttatatttttatttaatgactacttgttttctagttttgcccacaacgtctgaaaccactaagacattcaggagcatgttgagcttctggtttggaaacagcaagacccaccatttatgacaaggacagccatgaggttaatacttggagtttaactgccttccctttgaactagttaaaatctgtaagaataaggaagttgttgaaggcttaaaatctgggttctgaaaaagtagtttcagtttataggatacacatttactcactgagctccagttccaatactaaattagacagtatcatatagacggaaaatgaaatgctagaactgccgttctttggatcgccactctatgggggtctgtcttttaactactctcctggttatgttggccttacaccactgccatttgatttaaaacgctgcagaccactttatctgcaaatgtgttccagttgttatcagctacctactacgcagcttcagcgccagtgtgaatttatttttttttaagtgccattaccgtctcctctgttcagattttgacattcaggaaaatatttttattttgatgccatactgaaatctacaatgtatatctgacaaagcagttaaatgtgacaataaaaaacttatttaatcatggta

SEQ ID NO: 223196 - DNA, 1248 bp, Artificial Sequence
  derived and/or modified sequence
atggctgcctccataagcgggtacacattttccgccgtctgcttccacagcgccaatagcaacgctgatcacgaagggtttctacttggtgaggttcgtcaggaggagacttttagcatcagtgactcacagatcagcaacactgaattcctgcaggtgatcgagatacataatcatcagccgtgtagcaaactcttctccttttatgactacgcgtctaaagtcaacgaggaaagcctggaccgcatcctcaaagatagacgcaagaaagttattggctggtatagattccggcggaacacgcagcagcaaatgtcctaccgcgagcaggtgctgcacaaacagctgacgagaatactgggcgtgcctgacctcgtttttctcctgttttcatttatttcaaccgccaacaatagtacccatgccctggaatatgttctgttccggcccaaccggcgatacaatcagaggatctcccttgctatccccaatctcggcaacacgtcccagcaagagtataaggttagttctgtgcccaatacctctcagagctatgcaaaggttataaaggagcacggcacagatttcttcgacaaggacggcgtgatgaaggacattagagcgatctaccaagtgtacaacgccctgcaagagaaggtgcaagcggtctgtgctgatgtggagaagagcgagcgggttgtagagtcctgccaagctgaagtaaataaactgcgcaggcaaatcacacagcgaaagaatgagaaagaacaggaacgtagactccaacaggcagtgctgtctaggcaaatgccatccgagagcttggatccagccttttcccctcgcatgccatcttctgggttcgcggctgagggacgatccactctgggtgacgccgaggccagcgatcccccgccgccctattctgactttcaccctaataatcaggagtctacactcagtcactctagaatggagcgaagcgtattcatgccaagacctcaggccgtgggctcctcgaattacgcatcaactagcgctgggctcaaataccccggaagcggtgctgaccttcccccacctcaacgcgctgccggcgacagcggagaagacagtgatgatagcgattacgaaaacctgatcgaccccacagaaccgagtaatagtgagtatagtcactctaaggatagtcggcccatggctcatcccgacgaagatcccagaaatacccagacctcccaaatttag

SEQ ID NO: 223197 - DNA, 1248 bp, Artificial Sequence
  derived and/or modified sequence
atggccgccagcatcagcggctacaccttctctgctgtgtgcttccacagcgccaacagcaatgctgaccacgagggcttcctgctgggggaggtgcggcaggaggagaccttcagcatcagtgacagccagatcagcaacacagagttcctgcaggtgattgagatccacaaccaccagccctgcagcaagctgttctccttctatgactatgccagcaaggtgaatgaggagagcctggaccgcatcctgaaggacaggaggaagaaggtgattggctggtaccgcttcagaagaaacacccagcagcagatgagctaccgggagcaggtgctgcacaagcagctgacccgcatcctgggcgtgcctgacctggtgttcctgctcttctccttcatcagcacagccaacaacagcacccacgccctggagtatgtgctcttccggcccaacagacgctacaaccagaggatcagcctggccatccccaacctgggcaacaccagccagcaggagtacaaggtgtcctctgtgcccaacaccagccagagctatgccaaggtgatcaaggagcacggcacagacttctttgacaaggatggagtgatgaaggacatccgggccatctaccaggtgtacaatgccctgcaggagaaggtgcaggccgtgtgtgctgatgtggagaagtctgagcgggtggtggagagctgccaggccgaggtgaacaagctgcggcggcagatcacccagaggaagaatgagaaggagcaggagcggcggctgcagcaggccgtgctgagccggcagatgcccagcgagagcctggaccctgccttcagccccaggatgcccagcagcggctttgctgctgagggccgcagcaccctgggagatgctgaggccagtgaccccccaccaccctacagcgacttccaccccaacaaccaggagagcaccctgagccacagcaggatggagaggagcgtcttcatgccccggccccaggccgtgggcagcagcaactatgccagcaccagcgctggcctgaagtacccaggcagcggggctgacctgcccccaccccagagagctgctggggacagcggggaggacagtgatgacagcgactatgagaacctgattgaccccacagagcccagcaacagcgagtacagccacagcaaggacagccggcccatggcccacccagatgaggaccccaggaacacccagaccagccagatctag

SEQ ID NO: 223198 - DNA, 1248 bp, Artificial Sequence
  derived and/or modified sequence
atggccgccagcatcagcggctacaccttcagcgccgtgtgcttccactctgcaaactctaatgctgatcacgaaggcttcctcttgggggaagtgcggcaggaggaaaccttctctatctctgactcacagatttctaataccgaatttctccaggtaattgaaatccacaaccatcaaccatgcagtaaacttttcagtttctacgattacgcatcaaaagtgaatgaagaatccttggatcggattctgaaagaccggagaaaaaaagtgatcggttggtatcgattcaggcgcaatacccagcaacagatgagctatcgtgagcaagtcctgcataagcagctcacaaggatcttaggtgtccctgacttagtcttccttctgtttagctttatttccactgccaataatagcacacacgcccttgaatatgttttgtttcgacccaaccgacgttacaaccagagaatatctctcgcaattcccaatcttggcaacacttcccagcaggaatataaagtcagtagcgtaccaaacacctcacagagttatgccaaggtcatcaaagagcatgggactgatttctttgacaaagacggagttatgaaggacatacgtgccatctatcaggtgtataacgctttgcaggaaaaggttcaggcggtttgcgccgacgtagagaaaagcgaacgagtagtcgagtcatgccaggccgaggtaaataagcttcggaggcaaatcactcagcgtaagaatgagaaggagcaagaaagaaggctgcagcaggccgtgctgtctaggcaaatgccttcggagtcactggaccctgcctttagtccgcgaatgccatcctcgggatttgctgccgagggccggagtaccctcggcgatgctgaagcctctgatcccccccccccatacagtgatttccacccaaataatcaggaaagtaccttatcacattcccggatggaacggtcagtcttcatgccccgcccccaagccgtgggctcatctaactacgcctcaacctcagccgggctaaagtaccccggttctggggctgacctccctccaccacagagagccgcgggtgatagcggcgaagattcagatgattctgattacgaaaatcttatcgaccctacagagcctagtaacagcgaatatagtcactctaaagactcacggccaatggctcatcccgatgaggaccctcgcaacacacaaacatctcagatctag

SEQ ID NO: 223199 - DNA, 1248 bp, Artificial Sequence
  derived and/or modified sequence
atggccgctagtataagcggctacacgtttagcgccgtgtgcttccacagcgcaaacagcaatgctgatcatgaaggtttcctgttgggggaggtccgtcaagaggaaacattttcaattagcgactctcagattagtaataccgagttcttacaggtgatcgaaatccacaatcaccaaccctgtagtaagctcttttcattctatgattacgcctccaaagtaaatgaggagtctctggaccgcatcttaaaagaccgacgaaaaaaggtgatcggatggtatcgatttagaaggaacacccaacagcaaatgtcgtatcgcgaacaggtcctgcacaagcaactgacccgcatccttggagtgcccgatctagtattccttcttttcagcttcatttccaccgccaacaactcaacccatgctctggagtacgtcctgttccggccaaataggcggtataaccagagaatctcccttgctatccctaatttggggaatacatcacagcaagagtacaaagttagttccgtgcctaacaccagccagtcatatgctaaggtgattaaggagcacggcactgacttcttcgataaggacggagtgatgaaagacatccgagccatttaccaggtgtataacgctttacaggaaaaggttcaggcggtgtgcgcagatgtggaaaagtctgagagggtggtggaatcctgccaggcggaggtgaacaagctgcgcaggcagattacccaaaggaagaatgaaaaggaacaggaaaggagactgcagcaggctgtgctcagtcggcagatgccctccgaaagtctagatcctgccttttctccccgtatgcctagctccggattcgcagctgaagggagatccaccttgggagacgcagaagcatcggatcctccaccaccgtattcagattttcatccaaataaccaggagtcaactctgagccattctcgcatggaacggtccgtctttatgcccaggcctcaggccgtcggaagttcaaattatgcgagtacaagcgcgggtctgaaataccccggatcgggggcagacctgcctccgcctcaaagggcagctggggatagcggggaagatagtgacgactcagactatgaaaatctgatagacccaactgaacccagcaattccgagtatagtcacagcaaggatagcaggccaatggctcaccccgacgaagaccctcggaacacacagacaagtcagatctag

SEQ ID NO: 223200 - DNA, 1248 bp, Artificial Sequence
  derived and/or modified sequence
atggccgccagcatcagcggctacaccttcagcgccgtgtgcttccacagcgccaacagcaacgccgaccacgagggcttcctgctgggcgaggtgagacaggaggagaccttcagcatcagcgacagccagatcagcaacaccgagttcctgcaggtgatcgagatccacaaccaccagccctgcagcaagctgttcagcttctacgactacgccagcaaggtgaacgaggagagcctggacagaatcctgaaggacagaagaaagaaggtgatcggctggtacagattcagaagaaacacccagcagcagatgagctacagagagcaggtgctgcacaagcagctgaccagaatcctgggcgtgcccgacctggtgttcctgctgttcagcttcatcagcaccgccaacaacagcacccacgccctggagtacgtgctgttcagacccaacagaagatacaaccagagaatcagcctggccatccccaacctgggcaacaccagccagcaggagtacaaggtgagcagcgtgcccaacaccagccagagctacgccaaggtgatcaaggagcacggcaccgacttcttcgacaaggacggcgtgatgaaggacatcagagccatctaccaggtgtacaacgccctgcaggagaaggtgcaggccgtgtgcgccgacgtggagaagagcgagagagtggtggagagctgccaggccgaggtgaacaagctgagaagacagatcacccagagaaagaacgagaaggagcaggagagaagactgcagcaggccgtgctgagcagacagatgcccagcgagagcctggaccccgccttcagccccagaatgcccagcagcggcttcgccgccgagggcagaagcaccctgggcgacgccgaggccagcgaccccccccccccctacagcgacttccaccccaacaaccaggagagcaccctgagccacagcagaatggagagaagcgtgttcatgcccagaccccaggccgtgggcagcagcaactacgccagcaccagcgccggcctgaagtaccccggcagcggcgccgacctgccccccccccagagagccgccggcgacagcggcgaggacagcgacgacagcgactacgagaacctgatcgaccccaccgagcccagcaacagcgagtacagccacagcaaggacagcagacccatggcccaccccgacgaggaccccagaaacacccagaccagccagatctag

SEQ ID NO: 223201 - protein, 458 aa, Artificial Sequence
  derived and/or modified sequence
MAAQGAAAAVAAGTSGVAGEGEPGPGENAAAEGTAPSPGRVSPPTPARGEPEVTVEIGETYLCRRPDSTWHSAEVIQSRVNDQEGREEFYVHYVGFNRRLDEWVDKNRLALTKTVKDAVQKNSEKYLSELAEQPERKITRNQKRKHDEINHVQKTYAEMDPTTAALEKEHEAITKVKYVDKIHIGNYEIDAWYFSPFPEDYGKQPKLWLCEYCLKYMKYEKSYRFHLGQCQWRQPPGKEIYRKSNISVYEVDGKDHKIYCQNLCLLAKLFLDHKTLYFDVEPFVFYILTEVDRQGAHIVGYFSKEKESPDGNNVACILTLPPYQRRGYGKFLIAFSYELSKLESTVGSPEKPLSDLGKLSYRSYWSWVLLEILRDFRGTLSIKDLSQMTSITQNDIISTLQSLNMVKYWKGQHVICVTPKLVEEHLKSAQYKKPPITVDSVCLKWAPPKHKQVKLSKK

SEQ ID NO: 223202 - DNA, 1377 bp, Artificial Sequence
  derived and/or modified sequence
atggccgcccagggcgccgccgccgccgtggccgccggcaccagcggcgtggccggcgagggcgagcccggccccggcgagaacgccgccgccgagggcaccgcccccagccccggcagagtgagcccccccacccccgccagaggcgagcccgaggtgaccgtggagatcggcgagacctacctgtgcagaagacccgacagcacctggcacagcgccgaggtgatccagagcagagtgaacgaccaggagggcagagaggagttctacgtgcactacgtgggcttcaacagaagactggacgagtgggtggacaagaacagactggccctgaccaagaccgtgaaggacgccgtgcagaagaacagcgagaagtacctgagcgagctggccgagcagcccgagagaaagatcaccagaaaccagaagagaaagcacgacgagatcaaccacgtgcagaagacctacgccgagatggaccccaccaccgccgccctggagaaggagcacgaggccatcaccaaggtgaagtacgtggacaagatccacatcggcaactacgagatcgacgcctggtacttcagccccttccccgaggactacggcaagcagcccaagctgtggctgtgcgagtactgcctgaagtacatgaagtacgagaagagctacagattccacctgggccagtgccagtggagacagccccccggcaaggagatctacagaaagagcaacatcagcgtgtacgaggtggacggcaaggaccacaagatctactgccagaacctgtgcctgctggccaagctgttcctggaccacaagaccctgtacttcgacgtggagcccttcgtgttctacatcctgaccgaggtggacagacagggcgcccacatcgtgggctacttcagcaaggagaaggagagccccgacggcaacaacgtggcctgcatcctgaccctgcccccctaccagagaagaggctacggcaagttcctgatcgccttcagctacgagctgagcaagctggagagcaccgtgggcagccccgagaagcccctgagcgacctgggcaagctgagctacagaagctactggagctgggtgctgctggagatcctgagagacttcagaggcaccctgagcatcaaggacctgagccagatgaccagcatcacccagaacgacatcatcagcaccctgcagagcctgaacatggtgaagtactggaagggccagcacgtgatctgcgtgacccccaagctggtggaggagcacctgaagagcgcccagtacaagaagccccccatcaccgtggacagcgtgtgcctgaagtgggccccccccaagcacaagcaggtgaagctgagcaagaagtag

SEQ ID NO: 223203 - DNA, 1377 bp, Artificial Sequence
  derived and/or modified sequence
atggccgctcagggagcggccgccgccgtcgccgcaggcacgagcggggtcgcaggagagggggaacccggtccgggagagaacgccgccgctgagggcaccgcgccctctcccggacgcgtttctcccccgactcccgccaggggagagccagaagtgactgttgagattggggaaacgtatttgtgccggcggccggactcaacctggcatagcgctgaggtgattcagtcacgcgttaacgaccaggagggtcgggaagagttctatgtacactatgtaggattcaataggcggctcgatgaatgggtggacaaaaaccggctggccctgacaaagacagtcaaggacgccgtgcaaaaaaatagtgaaaagtatttatccgagcttgctgaacagcccgaaaggaagatcaccagaaaccaaaagcgaaagcacgatgagattaaccatgtgcagaaaacgtatgctgagatggaccccacaacagctgcgctggagaaagaacatgaggccatcaccaaagtcaagtatgtagacaagatacacatcgggaactacgaaattgatgcttggtacttttctccctttcccgaagattatggtaaacaaccgaagctttggttgtgtgaatattgcctaaagtatatgaaatatgagaaatcctaccgcttccatttgggccagtgccaatggcgccaaccacccgggaaagaaatctataggaagagcaatatttccgtctacgaagtagatggcaaggatcacaaaatctactgtcagaatctttgtctgctggcgaaactatttttggatcacaaaactttatacttcgacgttgagccatttgtcttctatatactaacagaggtggatcgtcagggggcacatatagtgggatattttagcaaggagaaggagtcccctgatggtaataacgtggcttgtatcctgaccctaccaccatatcagcggaggggttatggcaaatttctgatcgctttctcatatgagttgtccaagttagaatccactgtggggtcacccgaaaagcccctaagtgatctcggcaaacttagctatcgttcatactggagctgggtgttactggagatcctgcgcgattttcgcggcactctgtccataaaggacttgtcacagatgacgagtatcacacagaatgacatcatatccaccctgcaatcgcttaacatggttaaatattggaagggccagcacgtcatttgcgtaactccaaaattggtcgaggagcatctcaagagtgcccagtataaaaagcccccaatcacggtggattctgtgtgcctgaagtgggcccctccaaagcacaaacaggtgaagttatctaagaaatag

SEQ ID NO: 223204 - DNA, 1377 bp, Artificial Sequence
  derived and/or modified sequence
atggccgcccagggcgctgctgctgctgtggccgccggcaccagcggcgtggccggggagggggagcccggccctggagaaaatgctgctgctgagggcacagcccccagccctggccgggtgtccccacccaccccagcccggggggagcctgaggtgacagtggagattggagagacctacctgtgccggcggccagacagcacctggcacagcgctgaggtgatccagagccgggtgaatgaccaggagggccgggaggagttctacgtgcactacgtgggcttcaacagaaggctggatgagtgggtggacaagaaccggctggccctgaccaagacagtgaaggatgctgtgcagaagaacagcgagaagtacctgtctgagctggccgagcagcctgagaggaagatcaccaggaaccagaagaggaagcatgatgagatcaaccacgtgcagaagacctatgcagagatggaccccaccacagctgccctggagaaggagcacgaggccatcaccaaggtgaagtatgtggacaagatccacatcggcaactatgaaattgatgcctggtacttcagccccttcccagaagattatggcaagcagcccaagctgtggctgtgtgagtactgcctgaagtacatgaagtatgagaagagctaccgcttccacctgggccagtgccagtggaggcagcccccaggcaaggagatctacaggaagagcaacatctctgtgtatgaggtggatggcaaggaccacaagatctactgccagaacctgtgcctgctggccaagctgttcctggaccacaagaccctgtactttgatgtggagccctttgtgttctacatcctgacagaggtggaccggcagggcgcccacatcgtgggctacttcagcaaggagaaggagagcccagatggcaacaacgtggcctgcatcctgaccctgcccccctaccagaggcggggctacggcaagttcctgattgccttctcctatgagctgagcaagctggagagcacagtgggcagccctgagaagcccctgagtgacctgggcaagctgagctaccgcagctactggagctgggtgctgctggagatcctgcgggacttccggggcaccctgagcatcaaggacctgagccagatgaccagcatcacccagaatgacatcatcagcaccctgcagagcctgaacatggtgaagtactggaagggccagcacgtgatctgtgtgacccccaagctggtggaggagcacctgaagagcgcccagtacaagaagccacccatcaccgtggacagcgtgtgcctgaagtgggccccacccaagcacaagcaggtgaagctgagcaagaagtag

SEQ ID NO: 223205 - DNA, 1377 bp, Artificial Sequence
  derived and/or modified sequence
atggccgcccagggcgccgccgccgccgtggccgccggcaccagcggggtggccggcgaaggggagccaggacccggggagaacgccgccgccgaggggaccgctccttctcctggaagagtctcgccccccacgcctgcccgaggggaacccgaggtcacagttgaaataggagagacgtacttatgcaggcgccctgacagtacgtggcacagcgccgaggtgatccaaagccgcgtgaatgaccaggaggggagagaggaattttatgtgcattacgtcggatttaataggcgcctggacgagtgggtggataagaatcgccttgccctgactaaaacagtgaaggatgccgtgcagaaaaattctgaaaaatatctgtccgagcttgccgagcagcctgagagaaaaatcacccgcaaccagaaacgcaagcacgatgagataaaccatgtgcaaaagacctatgcagagatggatcctacaactgccgcgcttgagaaagagcacgaggccatcacaaaggtgaagtatgtagataagatacacattggcaattacgagattgacgcatggtattttagccccttccccgaggattatgggaagcagcccaagttatggctgtgtgaatattgtttaaaatacatgaaatatgagaagtcatatcgcttccacctgggacaatgccagtggcgacagcctcccggaaaagaaatctacagaaagagcaacatctcggtttacgaagtggatggcaaggaccataagatatattgtcagaatttatgcctgctcgcaaaactatttttggatcataagacactgtattttgacgtggagcctttcgttttctacatcctgactgaggttgatcgacaaggagcacacattgtaggttacttttccaaggagaaagaatcgcctgacgggaataatgtagcctgcatactaaccctgccaccatatcagagacgaggttatgggaagttcctgattgctttctcgtacgaattgtccaagctggagtccacagtgggctcccctgagaagcccctctccgacctggggaaattgtcttacagatcatactggtcctgggtcctcctggaaattttgcgagacttccgaggaaccctctcaatcaaagaccttagccagatgacctccatcacccagaacgacatcattagtaccctccaatccttgaacatggtgaaatactggaagggacagcacgtcatctgcgttacacctaaactggtcgaggagcatctgaagtccgcccagtacaagaagcctcctattaccgtggatagtgtgtgtctgaagtgggctccgcccaagcacaaacaggtcaagctctctaaaaagtag

SEQ ID NO: 223206 - DNA, 1377 bp, Artificial Sequence
  derived and/or modified sequence
atggcagctcaaggtgccgcagcggctgtggcagctggcacatctggtgtggcaggggagggcgagcccggtccgggtgagaacgcagccgcagaaggcaccgcaccgagcccaggcagggtgagccctcctactccagcaagaggggagcccgaggtgacagtggagattggagaaacgtacttatgtcgaagaccagattcgacgtggcattctgctgaagtgatccaatctagagtgaacgatcaggaggggagggaggagttctatgttcattacgtgggattcaacagaagactggatgaatgggtcgataagaaccgccttgccttgactaagactgtgaaagacgcggttcagaaaaactccgagaagtatttatccgaactggccgagcaacctgaacgcaagattacacgcaatcaaaagagaaaacacgatgaaatcaatcacgtccagaagacatatgctgagatggaccccacaactgccgctttagaaaaggagcacgaggccatcacaaaagtgaagtacgttgacaaaatccacatcggtaactatgagatcgacgcctggtatttttcccccttccctgaggactatggaaaacaacctaaactctggttatgcgaatactgcttgaaatatatgaagtacgaaaaatcttatcggttccacctcggtcagtgtcaatggaggcagccaccaggaaaggagatttacagaaagagtaatatctctgtgtacgaagtggatggtaaggaccataaaatatactgtcaaaacctgtgcctccttgctaagctgttccttgatcacaaaactttgtatttcgacgtcgagccgttcgtgttctacatcttaaccgaggttgaccgccagggcgcacacattgtgggatattttagcaaggaaaaggagtctccagatggaaacaatgtggcatgcatcttaaccctcccaccctaccagagaagagggtacggtaaattcctgattgcatttagttatgaactcagtaaacttgagtcgacggtcgggagccccgaaaagcctctgagcgatctcggaaagctttcctaccgcagctattggagttgggttctgctggaaatcctgagggattttcgcggtacactttctattaaagacctgagtcagatgacgtccataacgcaaaacgacatcatttcaactctccaaagtcttaatatggtcaagtactggaaaggccaacacgtaatttgcgtgacgcccaaattagtggaggaacatctgaaatccgcccagtataaaaaaccaccaatcacagtggacagtgtttgtcttaagtgggcacctcctaaacacaaacaggtgaagttgagcaagaagtag

SEQ ID NO: 223207 - DNA, 1531 bp, Artificial Sequence
  derived and/or modified sequence
gcgtcacttcccttcccgcgatggcggcacagggagctgctgcggcggttgcggcggggacttcaggggtcgcgggggagggcgagcccgggcccggggagaatgcggccgctgaggggaccgccccatccccgggccgcgtctctccgccgaccccggcgcgcggcgagccggaagtcacggtggagatcggagaaacgtacctgtgccggcgaccggatagcacctggcattctgctgaagtgatccagtctcgagtgaacgaccaggagggccgagaggaattctatgtacactacgtgggctttaaccggcggctggacgagtgggtagacaagaaccggctggcgctgaccaagacagtgaaggatgctgtacagaagaactcagagaagtacctgagcgagctcgcagagcagcctgagcgcaagatcactcgcaaccaaaagcgcaagcatgatgagatcaaccatgtgcagaagacttatgcagagatggaccccaccacagcagccttggagaaggagcatgaggcgatcaccaaggtgaagtatgtggacaagatccacatcgggaactacgaaattgatgcctggtatttctcaccattccccgaagactatgggaaacagcccaagctctggctctgcgagtactgcctcaagtacatgaaatatgagaagagctaccgcttccacttgggtcagtgccagtggcggcagccccccgggaaagagatctaccgcaagagcaacatctccgtgtacgaagttgatggcaaagaccataagatttactgtcagaacctgtgtctgctggccaagcttttcctggaccataagacactgtactttgacgtggagccgttcgtcttttacatcctgactgaggtggaccggcagggggcccacattgttggctacttctccaaggagaaggagtccccggatggaaacaatgtggcctgcatcctgaccttgcccccctaccaacgccgcggctacgggaagttcctcatcgctttcagttatgagctctccaagctggagagcacagtcggctccccggagaagccactgtctgacctgggcaagctcagctaccgcagctactggtcctgggtgctgctagagatcctgcgggacttccggggcacactgtccatcaaggacctcagccagatgaccagtatcacccaaaatgacatcatcagtaccctgcaatccctcaatatggtcaagtactggaagggccagcacgtgatctgtgtcacacccaagctggtggaggagcacctcaaaagtgcccagtataagaaaccacccatcacagtggactccgtctgcctcaagtgggcaccccccaagcacaagcaagtcaagctctccaagaagtgagcagcctggcccctgctgtcggacctgagcctcctggctcccagcctgtaaatatgtatagacctgttttgtcatttttttaataaagtcagttctggtggccctggactttggaggggaaggggaggccaaga

SEQ ID NO: 223208 - protein, 1191 aa, Artificial Sequence
  derived and/or modified sequence
MDCSLVRTLVHRYCAGEENWVDSRTIYVGHREPPPGAEAYIPQRYPDNRIVSSKYTFWNFIPKNLFEQFRRVANFYFLIIFLVQLIIDTPTSPVTSGLPLFFVITVTAIKQGYEDWLRHKADNAMNQCPVHFIQHGKLVRKQSRKLRVGDIVMVKEDETFPCDLIFLSSNRGDGTCHVTTASLDGESSHKTHYAVQDTKGFHTEEDIGGLHATIECEQPQPDLYKFVGRINVYSDLNDPVVRPLGSENLLLRGATLKNTEKIFGVAIYTGMETKMALNYQSKSQKRSAVEKSMNAFLIVYLCILISKALINTVLKYMWQSEPFRDEPWYNQKTESERQRNLFLKAFTDFLAFMVLFNYIIPVSMYVTVEMQKFLGSYFITWDEDMFDEETGEGPLVNTSDLNEELGQVEYIFTDKTGTLTENNMEFKECCIEGHVYVPHVICNGQVLPESSGIDMIDSSPSVNGREREELFFRALCLCHTVQVKDDDSVDGPRKSPDGGKSCVYISSSPDEVALVEGVQRLGFTYLRLKDNYMEILNRENHIERFELLEILSFDSVRRRMSVIVKSATGEIYLFCKGADSSIFPRVIEGKVDQIRARVERNAVEGLRTLCVAYKRLIQEEYEGICKLLQAAKVALQDREKKLAEAYEQIEKDLTLLGATAVEDRLQEKAADTIEALQKAGIKVWVLTGDKMETAAATCYACKLFRRNTQLLELTTKRIEEQSLHDVLFELSKTVLRHSGSLTRDNLSGLSADMQDYGLIIDGAALSLIMKPREDGSSGNYRELFLEICRSCSAVLCCRMAPLQKAQIVKLIKFSKEHPITLAIGDGANDVSMILEAHVGIGVIGKEGRQAARNSDYAIPKFKHLKKMLLVHGHFYYIRISELVQYFFYKNVCFIFPQFLYQFFCGFSQQTLYDTAYLTLYNISFTSLPILLYSLMEQHVGIDVLKRDPTLYRDVAKNALLRWRVFIYWTLLGLFDALVFFFGAYFVFENTTVTSNGQIFGNWTFGTLVFTVMVFTVTLKLALDTHYWTWINHFVIWGSLLFYVVFSLLWGGVIWPFLNYQRMYYVFIQMLSSGPAWLAIVLLVTISLLPDVLKKVLCRQLWPTATERVQNGCAQPRDRDSEFTPLASLQSPGYQSTCPSAAWYSSHSQQVTLAAWKEKVSTEPPPILGGSHHHCSSIPSHSCPRSRVGMLV

SEQ ID NO: 223209 - DNA, 3576 bp, Artificial Sequence
  derived and/or modified sequence
atggattgcagtctggtgcggaccctggtgcatcgttactgtgctggcgaagagaactgggtagactcccgaactatttacgtgggccatcgcgaaccccctcctggggcagaggcctacatacctcagcgctacccagataaccgaattgtaagctcaaaatacaccttttggaactttatccctaaaaatctctttgagcagttcagacgcgtagccaacttttatttcttgatcatttttttagtgcagctgattattgacacaccaacaagcccagtaactagcgggctgccattgttctttgtgatcaccgtcacagccattaaacagggatacgaggactggcttcgtcataaagcagataacgccatgaaccagtgccccgtgcacttcatccagcatggaaaacttgtgcggaaacagtccaggaaactcagggtcggggatatcgtcatggtgaaagaggacgaaacatttccctgtgatctgatctttctgagctccaatcgcggagacggtacctgtcacgtaactacagcctcactggacggtgaaagcagccataaaactcactacgccgtgcaagatactaagggttttcacactgaggaagatatcgggggcctgcacgccactattgaatgcgaacaaccacagcccgatttatataaattcgtgggtaggatcaacgtttatagcgatctgaacgatccagttgtgagaccgcttggttctgaaaatttgctgctgcgcggcgccactctgaagaatacggagaaaattttcggagtggccatatacacagggatggaaacgaaaatggctcttaactaccagtcaaagagccagaagcggagtgctgtcgagaagtccatgaacgcttttctgattgtatacctttgcattctgatctcaaaggcacttatcaacacagttctgaagtatatgtggcaaagtgagccttttcgggatgagccctggtataatcagaagaccgagtcagagcgccagcgaaacctcttcctgaaggcctttactgactttctggccttcatggtgctgttcaattacatcattccggtcagtatgtacgtcaccgtggagatgcaaaagtttcttgggtcgtacttcattacatgggatgaggacatgtttgacgaggagacaggcgagggaccgcttgtgaatacatccgacctaaacgaagaactggggcaggtggagtatattttcacagataaaaccgggaccctcaccgaaaataatatggagttcaaagagtgttgcatcgaagggcacgtctacgtgccccacgtcatttgcaatgggcaggtcctgcccgagtccagcggcattgacatgattgattccagtcctagcgtcaacggccgcgaacgggaagaactgtttttccgcgccctgtgtctgtgccatacggttcaagtgaaggacgatgattccgttgacggcccccgaaaatcccctgatggcggcaagtcatgcgtgtacatttcaagttctcccgacgaggtggctctagtggagggcgtacagcgcctgggattcacatacctgcggttgaaggacaattacatggagatccttaatcgagagaatcatatagaacgttttgaactgctggagattctcagctttgacagcgtgcggcggagaatgagcgttattgtgaaatcagcgaccggtgagatctacctattttgtaagggcgctgactcctccatttttcctagagttatcgaaggtaaagttgaccagataagagcccgcgtcgagagaaatgcagtggagggcctgagaaccttgtgcgtagcctacaagaggctgatccaggaagagtacgaagggatctgtaagctgctccaggccgctaaggtggctctccaggaccgggaaaaaaaactggcagaagcttatgaacaaatcgagaaggacctgacactgctcggggcaaccgccgtggaggaccggctgcaggagaaggccgctgacaccatcgaggcccttcaaaaagctgggattaaagtttgggtactcacaggggacaagatggagaccgctgcagccacatgctatgcgtgcaaactgttcaggagaaatactcaattactggaactgactacaaagcgaatcgaggaacagagcctgcatgacgtgctttttgagctgagtaagacagttctgcgccactcaggcagcctgactagagacaacctgtcagggctttcagctgatatgcaggactacggacttataatcgacggcgccgctttgagtctcatcatgaaaccacgggaggacgggtctagcggcaactatagggaactcttcctagagatctgtagatcctgctccgctgtgttatgttgcagaatggcccctctccagaaggctcagatcgtgaagctgattaagttttctaaggaacatcctattaccctggctattggcgacggcgccaatgatgtaagcatgatcctcgaagcgcacgtggggattggggtgatcggcaaggaggggcgccaggcagccaggaatagtgactatgccatcccgaagtttaaacatctgaaaaaaatgctcttagtccacgggcacttctattacatcaggatttctgagctggtacagtatttcttctataagaacgtgtgttttatcttcccgcagttcctctatcaattcttttgcggattctcacaacagacactgtacgataccgcctatctgaccctgtataatatctcgttcaccagccttcccatactactgtacagcctgatggaacaacacgttggcatcgacgtccttaagcgagatccaaccctctaccgggacgtcgccaaaaatgccctgctgcgatggagagtgtttatctactggaccctgctcggactctttgatgcccttgttttcttctttggtgcatatttcgtcttcgagaacaccaccgtgacttccaatggacagatattcggtaactggacatttggaaccctcgtcttcaccgtgatggtgtttacagtgacgctgaaactcgcactcgatactcactactggacctggatcaaccatttcgtcatttggggaagtctgttgttttatgtggtgtttagtttgctgtggggaggcgttatctggccgttccttaattatcagcgcatgtattacgtctttatccaaatgttgtcttcagggccagcttggttagccatcgttctgttggtcacaattagtctcctaccagatgtgctgaaaaaggtgctgtgtagacagctttggcctaccgccaccgagagggtgcaaaatggctgcgctcagcccagagatcgtgattctgagttcacaccactggcatcgctgcagagccctggctaccagtctacctgcccatccgcggcctggtactcttcacatagccagcaggtgactctggctgcctggaaggaaaaggtgtccactgaaccaccaccaatcctgggtggttcccatcaccactgcagctccattccgtcccattcatgtccacgctcccgcgtcggtatgttagtgtag

SEQ ID NO: 223210 - DNA, 3576 bp, Artificial Sequence
  derived and/or modified sequence
atggactgcagcctggtgaggaccctggtgcaccgctactgtgccggggaggagaactgggtggacagcaggaccatctacgtgggccaccgggagcccccacctggagctgaggcctacatcccccagcgctacccagacaaccgcatcgtgagcagcaagtacaccttctggaacttcatccccaagaacctgtttgagcagttccggcgggtggccaacttctacttcctgatcatcttcctggtgcagctgatcatcgacacccccaccagccctgtgaccagcggcctgcccctcttcttcgtcatcaccgtgacagccatcaagcagggctatgaggactggctgcggcacaaggctgacaatgccatgaaccagtgccctgtgcacttcatccagcacggcaagctggtgaggaagcagagcaggaagctgcgggtgggggacatcgtgatggtgaaggaggatgagaccttcccctgtgacctgatcttcctgagcagcaacagaggagatggcacctgccacgtgaccacagccagcctggatggagagagcagccacaagacccactatgctgtgcaggacaccaagggcttccacacagaagaagatattggaggcctgcacgccaccattgaatgtgagcagccccagcctgacctgtacaagtttgtgggccgcatcaacgtgtacagcgacctgaatgaccctgtggtgcggcccctgggcagcgagaacctgctgctgcggggggccaccctgaagaacacagagaagatctttggagtggccatctacacaggcatggagaccaagatggccctgaactaccagagcaagagccagaagaggtctgctgtggagaagtccatgaatgccttcctgattgtgtacctgtgcatcctgatcagcaaggccctgatcaacacagtgctgaagtacatgtggcagagcgagcccttcagagatgagccctggtacaaccagaagacagaaagtgagcggcagaggaacctcttcctgaaggccttcacagacttcctggccttcatggtgctcttcaactacatcatccctgtgtccatgtatgtgacagtggagatgcagaagttcctgggcagctacttcatcacctgggatgaggacatgtttgatgaggagaccggggagggccccctggtgaacaccagtgacctgaatgaggagctgggccaggtggagtacatcttcacagacaagacaggcaccctgacagagaacaacatggagttcaaggagtgctgcatcgagggccacgtgtatgtgccccacgtgatctgcaatggccaggtgctgcctgagagcagcggcatcgacatgattgacagcagccccagcgtgaatggccgggagcgggaggagctgttcttccgggccctgtgcctgtgccacacagtgcaggtgaaggatgatgacagcgtggatggccccaggaagagcccagatggcggcaagagctgtgtgtacatcagcagcagcccagatgaggtggccctggtggagggcgtgcagaggctgggcttcacctacctgcggctgaaggacaactacatggagatcctgaaccgggagaaccacatcgagagatttgagctgctggagatcctgagctttgattctgtgagaagaaggatgtctgtgattgtgaagagcgccaccggggagatctacctgttctgcaagggagctgacagcagcatcttcccccgggtgattgagggcaaggtggaccagatccgggcccgggtggagagaaatgctgtggagggcctgcggaccctgtgtgtggcctacaagaggctcatccaggaggagtatgagggcatctgcaagctgctgcaggccgccaaggtggccctgcaggaccgggagaagaagctggccgaggcctatgagcagatcgagaaggacctgaccctgctgggcgccacagctgtggaggaccggctgcaggagaaggctgctgacaccatcgaggccctgcagaaggccggcatcaaggtgtgggtgctgactggagacaagatggagacagctgctgccacctgctacgcctgcaagctgttcagaagaaacacccagctgctggagctgaccaccaagagaattgaggagcagagcctgcatgatgtgctgtttgagctgagcaagacagtgctgcggcacagcggcagcctgacccgggacaacctgagcggcctgtctgctgacatgcaggactatggcctcatcattgatggagctgccctgagcctcatcatgaagcccagagaagatggcagcagcggcaactaccgggagctgttcctggagatctgccgcagctgcagcgctgtgctgtgctgcaggatggcccccctgcagaaggcccagatcgtgaagctgatcaagttcagcaaggagcaccccatcaccctggccatcggagatggagccaatgatgtgtccatgatcctggaggcccacgtgggcatcggcgtgattggcaaggagggccggcaggccgccaggaacagcgactatgccatccccaagttcaagcacctgaagaagatgctgctggtgcacggccacttctactacatccgcatcagcgagctggtgcagtacttcttctacaagaatgtgtgcttcatcttcccccagttcctgtaccagttcttctgtggcttcagccagcagaccctgtatgacacagcctacctgaccctgtacaacatctccttcaccagcctgcccatcctgctgtacagcctgatggagcagcacgtgggcattgatgtgctgaagagggaccccaccctgtacagagatgtggccaagaatgccctgctgcgctggagggtcttcatctactggaccctgctgggcctgtttgatgccctggtgttcttctttggagcctactttgtgtttgagaacaccaccgtgaccagcaatggccagatctttggaaactggaccttcggcaccctggtgttcaccgtgatggtgttcaccgtgaccctgaagctggccctggacacccactactggacctggatcaaccactttgtgatctggggcagcctgctcttctacgtggtgttcagcctgctgtggggcggcgtcatctggcccttcctgaactaccagaggatgtactacgtgttcatccagatgctgagcagcggccctgcctggctggccatcgtgctgctggtgaccatcagcctgctgcctgatgtgctgaagaaggtgctgtgccggcagctgtggcccacagccacagagcgggtgcagaatggctgtgcccagccccgggaccgggacagcgagttcacccccctggccagcctgcagagccctggctaccagagcacctgccccagcgctgcctggtacagcagccacagccagcaggtgaccctggccgcctggaaggagaaggtgtccacagagcccccacccatcctgggcggcagccaccaccactgcagcagcatccccagccacagctgccccaggagccgggtgggcatgctggtgtag

SEQ ID NO: 223211 - DNA, 3576 bp, Artificial Sequence
  derived and/or modified sequence
atggactgcagcctggtgcggaccctggtgcaccggtactgcgccggggaagagaattgggtagattccaggacaatttacgtcggacacagggaaccacctcccggcgcagaggcctacattccacagaggtatccagacaatcggatagtgtcctctaaatacacattctggaatttcattcccaagaacctctttgagcagtttcggagagttgccaacttctattttctgattatcttcctggtccaactcattatcgacactccgaccagtcccgtgacctccgggttgcccttattttttgtcatcacagtgacagctataaagcagggctacgaggactggctgagacacaaggctgataacgccatgaaccagtgccccgtgcatttcattcagcatggcaaactggttagaaagcagtcccgcaagctcagagtgggtgatatagtgatggtaaaggaagatgaaacattcccttgtgatcttatcttcctctcctccaatcgtggggatggcacctgtcatgtcaccactgccagccttgatggcgagagttctcacaagacgcactatgccgtgcaggacaccaaggggttccacactgaggaggacattggcggcctccacgcgaccatcgaatgtgagcagccccaaccagacctgtacaaattcgttgggcgcattaatgtgtacagcgatttgaatgatccagttgttaggccactggggagcgagaacctcctcttgagaggcgctactctcaaaaataccgaaaaaatctttggtgttgccatatacacggggatggaaacgaagatggcccttaactaccaaagcaaatcacagaagcggtcagccgtggaaaagtccatgaacgcgtttttgatcgtgtacctctgtatcctgatctcaaaagcactgatcaacacggttctaaaatacatgtggcagagcgagccatttagggacgagccctggtataaccagaagacagaaagcgaaaggcagagaaacctgttcctgaaggctttcactgatttcctggccttcatggtactgtttaattacatcattcccgtgagtatgtatgtcacagtggaaatgcagaaattcctggggtcttactttattacctgggatgaggacatgttcgacgaagagacgggagagggccccttagttaatacctctgatctcaacgaggaacttgggcaggttgagtatatttttaccgataaaacaggtacactgactgaaaacaatatggaattcaaggaatgctgcatcgaagggcatgtgtatgtccctcacgttatctgtaatggccaggttctccctgagagcagcgggattgatatgatagactccagcccttccgtgaatgggcgagaacgcgaggagctattctttcgagccttgtgcttgtgccacactgttcaggtgaaagacgatgatagtgtcgatggaccacgcaaatctcctgacgggggaaaatcgtgcgtttatatttcgagcagtcctgatgaggtagctctggtcgaaggcgtccagaggctgggctttacatacctcagacttaaagataattacatggagattctcaatagggagaaccacattgaaagattcgaattgctcgaaatcctatccttcgacagtgtgaggcgacgcatgagtgttatagtgaaaagtgcgacgggagaaatatacttgttctgcaagggtgccgattcctctattttccctcgcgttattgagggtaaggtggaccaaatcagggctcgggtggaacgaaatgccgttgagggtcttcgaaccttgtgcgttgcttacaaacgcctgatacaagaggagtatgaagggatctgcaagctacttcaggcagctaaggtggcgctgcaggaccgcgagaaaaagctagctgaagcatacgaacagatcgagaaggatctcacccttctgggagcaactgcagtagaggatcggttacaagagaaggcagcagacaccatcgaggctttgcagaaagccggtattaaggtgtgggtgctcactggcgataagatggagactgccgcagcaacctgttatgcctgcaagctgttccgaagaaacacgcagctgctggagttgacgactaaacggatagaagagcagagcctgcatgatgtgctattcgagctgtccaagacggtgctgaggcattccggatccctgactcgggacaacctgagcggactcagcgcagacatgcaagattacggtctcatcattgatggggctgcactgtctctcatcatgaaaccccgtgaagatgggagctctggtaattacagggagttgttcctggagatttgcaggtcatgctctgctgtgttgtgttgcaggatggccccgctgcagaaggcacagattgtgaagctcatcaaatttagcaaagagcatcctattactctcgccattggggatggagctaacgacgttagcatgattctggaagcccatgtaggcatcggggtgatcggaaaggagggcagacaagctgctcgcaattctgactacgccattcccaagttcaaacatcttaagaagatgcttcttgtgcatgggcatttttactacatccgaattagtgagttggtgcaatactttttttataaaaacgtgtgcttcattttccctcagttcctctaccaatttttctgcggcttctcccaacaaacactctatgatactgcgtatcttaccctctataacatttcttttacttccctgcccattctgttgtacagtctgatggagcagcacgtcggtattgacgtattgaaaagagaccctacactgtatcgtgacgtggcaaagaacgcgctgctgcgatggcgcgtgttcatctactggacactgcttggcctgtttgatgcattggtgttcttcttcggagcgtattttgtctttgagaacacaacagtgacaagcaacggccagatcttcggcaattggacctttggcaccctggtgtttaccgttatggtgtttacggtcactctgaaactcgctttagacacccactactggacatggatcaatcacttcgttatatggggatccttactattctatgtcgtgttcagtctcctttgggggggcgtgatttggccttttttgaactaccagcggatgtactacgttttcatccaaatgctgtcatccggaccggcctggctggctattgtgctgctggtgaccatttccctactgcctgatgtgctcaaaaaagtcttatgtaggcagctgtggcccaccgcaaccgaaagggttcagaatgggtgcgctcagccgagagaccgagactccgaattcacaccactggcgtcacttcagagccccggctatcagtcaacctgtccctcagccgcctggtattcctctcattcacaacaggtgacccttgctgcctggaaagaaaaagtgtccacagagccgcctcctatattggggggctctcaccatcattgctcatcaattccgtcccactcttgcccacgatcccgggtcggtatgctagtctag

SEQ ID NO: 223212 - DNA, 3576 bp, Artificial Sequence
  derived and/or modified sequence
atggactgctccctggtccggacactggtccaccgctattgcgccggtgaggaaaattgggtcgactcaaggacaatctacgtgggccatcgcgagccccctcccggtgcagaggcttacatcccacagcgataccctgataacaggatcgtaagcagcaaatacaccttctggaattttatcccgaagaacctgttcgagcagttccggagagtcgctaacttctatttcctgatcatattcttagtacagcttattatcgacactcccacttcaccagtgacttcaggcctgccactgttttttgtcattactgtcactgccatcaaacaggggtatgaggactggctgcgccacaaggctgacaatgccatgaaccagtgtccggttcattttattcagcatggcaagttagttagaaaacagtctcgcaaactcagggttggagacatcgttatggtgaaggaggacgagacctttccatgtgatctgatcttcctgagttcaaacaggggcgatgggacctgccacgtaacgactgccagcttggacggtgaatcttcccataaaacacattatgcagtgcaggatacaaaaggctttcataccgaggaagatatcggaggcctccatgcgaccatcgaatgcgaacagccacagcctgacctgtataagtttgtcggtcggataaacgtgtactcggaccttaacgacccggtggttagaccactgggatccgagaacctactgctccgcggtgctacgctgaaaaatactgaaaagatcttcggtgtggccatttatacggggatggagacaaagatggcactaaattatcagtccaagtctcagaagcgatctgccgtggagaaatcgatgaatgcttttctcattgtgtacctctgcatattaatttctaaggctctaatcaacactgtactgaagtacatgtggcagagcgagccttttcgggatgagccatggtacaatcagaagacagagtccgagcggcaaagaaacctgttcctgaaggcctttacagattttctggcattcatggtcctctttaactatataatccccgtctctatgtacgtgaccgtggagatgcaaaaattcctaggatcgtactttatcacctgggacgaggacatgttcgacgaggaaactggcgagggtcccctcgtgaacacctccgacttaaatgaggagttgggccaagtggagtacatctttaccgacaagacaggtaccctgacggagaataatatggagttcaaggagtgctgtattgaggggcacgtttacgttccgcacgtcatctgcaacggtcaggtcctccctgaatcttccggtatagacatgattgacagttctcccagtgtgaatgggagggaaagagaagagctgttttttcgggctctctgtttgtgccatactgttcaggttaaggacgacgacagcgtggacggaccgcgaaagagccccgatggtggaaaatcgtgtgtctacattagttcatcccccgacgaagttgccctcgtcgaaggcgttcagcggctgggattcacctaccttagactgaaagacaactacatggaaatcctgaaccgggaaaatcatatcgaaaggttcgaactcttggagatcttatcctttgactctgtgagacgacgcatgagcgtcatcgtgaagagcgccactggagagatctaccttttctgtaagggcgctgattcttcaattttcccgcgtgttatagagggcaaagtagatcagattcgggctagagtcgagcgcaacgctgtagaaggtctgcggaccctgtgtgttgcttacaaacgactgatccaggaagaatacgaagggatttgcaagttactgcaggcagctaaggtggcgttgcaggacagagagaagaagttggctgaagcatatgagcagatagagaaggatctcacactcctgggagccactgcagtagaggataggctgcaggagaaagcagcagacaccatagaggccctccaaaaggctggaataaaggtatgggtgcttactggcgataaaatggagaccgccgctgccacttgttacgcctgcaagctgtttcgcagaaatacccagctcttagagctgactactaaacggatcgaggaacagagcctgcatgacgtcctctttgagctgagtaagaccgtgctgagacatagtgggagcctgacacgagataacctcagcggtcttagcgccgatatgcaagattatggcctgattatcgatggtgcagctttatccctgatcatgaaacctcgggaagatggtagcagcggcaattatagagagctgtttcttgagatctgtcgctcttgttccgcggtcctgtgctgccgcatggccccactacagaaagcgcagatcgtaaaacttataaagttttccaaagaacatcctatcacccttgccatcggggacggggcaaacgatgtgagcatgatcctggaagctcatgtgggcattggagtgatcggcaaagaagggcgacaggcggcaaggaacagcgattacgccatcccaaagttcaaacacctcaagaagatgctgctcgtccacggccatttctactacattaggattagcgaacttgtgcagtattttttctataagaacgtgtgtttcattttcccccagttcctctaccagttcttctgcggttttagtcaacagactctgtacgatacagcgtacctcacactttacaacatttcgttcacaagcctcccaatactactgtattcgctcatggaacagcatgtgggtattgatgtacttaagagagatcctacactttatcgggacgtagcaaagaacgctctcttacgatggcgagtcttcatctactggaccctgctgggattatttgacgccctcgtgttcttcttcggagcatattttgtcttcgaaaacaccacagtcacaagtaatgggcaaatctttggaaattggactttcggcaccctcgtgtttactgtgatggttttcacggtcacactgaagctggcactcgatacacactattggacatggattaaccatttcgtgatctggggctcactgttgttctacgtagtgttcagccttctgtggggcggtgtgatttggcccttcctcaattaccagaggatgtactacgtgttcatccagatgctctcttccggacccgcatggctggctattgtgcttctcgtgacaatttcattattgccagatgtattgaagaaagtgctgtgtaggcagctttggcctactgccaccgagcgggtgcagaacggctgcgcccagccccgagaccgcgactcagaattcacccctctcgcttctctgcaaagtccaggttaccagtccacttgcccttcagcagcatggtactcaagccactctcagcaagtgactctcgccgcatggaaagagaaggtgagcaccgaaccacctcccatactgggaggatcacatcatcattgttcttccataccctctcatagttgtcctcgttcgagggtagggatgctggtttag

SEQ ID NO: 223213 - DNA, 8768 bp, Artificial Sequence
  derived and/or modified sequence
gcggccgcactagtaccccggagcccatgggcgcgccgagccgggcgcgggggcgctgaacggcggagcgggagcggccggaggagccatggactgcagcctcgtgcggacgctcgtgcacagatactgtgcaggagaagagaattgggtggacagcaggaccatctacgtgggacacagggagccacctccgggcgcagaggcctacatcccacagagatacccagacaacaggatcgtctcgtccaagtacacattttggaactttatacccaagaatttatttgaacaattcagaagagtagccaacttttatttccttatcatatttctggtgcagttgattattgatacacccacaagtccagtgacaagcggacttccactcttctttgtcattactgtgacggctatcaaacagggttatgaagactggcttcgacataaagcagacaatgccatgaaccagtgtcctgttcatttcattcagcacggcaagctcgttcggaaacaaagtcgaaagctgcgagttggggacattgtcatggttaaggaggacgagacctttccctgcgacttgatcttcctttccagcaaccggggagatgggacgtgccacgtcaccaccgccagcttggatggagaatccagccataaaacgcattacgcggtccaggacaccaaaggcttccacacagaggaggatatcggcggacttcacgccaccatcgagtgtgagcagccccagcccgacctctacaagttcgtgggtcgcatcaacgtttacagtgacctgaatgaccccgtggtgaggcccttaggatcggaaaacctgctgcttagaggagctacactgaagaacactgagaaaatctttggtgtggctatttacacgggaatggaaaccaagatggcattaaattatcaatcaaaatctcagaagcgatctgccgtggaaaaatcgatgaatgcgttcctcattgtgtatctctgcattctgatcagcaaagccctgataaacactgtgctgaaatacatgtggcagagtgagccctttcgggatgagccgtggtataatcagaaaacggagtcggaaaggcagaggaatctgttcctcaaggcattcacggacttcctggccttcatggtcctctttaactacatcatccctgtgtccatgtacgtcacggtcgagatgcagaagttcctcggctcttacttcatcacctgggacgaagacatgtttgacgaggagactggcgaggggcctctggtgaacacgtcggacctcaatgaagagctgggacaggtggagtacatcttcacagacaagaccggcaccctcacggaaaacaacatggagttcaaggagtgctgcatcgaaggccatgtctacgtgccccacgtcatctgcaacgggcaggtcctcccagagtcgtcaggaatcgacatgattgactcgtcccccagcgtcaacgggagggagcgcgaggagctgtttttccgggccctctgtctctgccacaccgtccaggtgaaagacgatgacagcgtagacggccccaggaaatcgccggacggggggaaatcctgtgtgtacatctcatcctcgcccgacgaggtggcgctggtcgaaggtgtccagagacttggctttacctacctaaggctgaaggacaattacatggagatattaaacagggagaaccacatcgaaaggtttgaattgctggaaattttgagttttgactcagtcagaaggagaatgagtgtaattgtaaaatctgctacaggagaaatttatctgttttgcaaaggagcagattcttcgatattcccccgagtgatagaaggcaaagttgaccagatccgagccagagtggagcgtaacgcagtggaggggctccgaactttgtgtgttgcttataaaaggctgatccaagaagaatatgaaggcatttgtaagctgctgcaggctgccaaagtggcccttcaagatcgagagaaaaagttagcagaagcctatgagcaaatagagaaagatcttactctgcttggtgctacagctgttgaggaccggctgcaggagaaagctgcagacaccatcgaggccctgcagaaggccgggatcaaagtctgggttctcacgggagacaagatggagacggccgcggccacgtgctacgcctgcaagctcttccgcaggaacacgcagctgctggagctgaccaccaagaggatcgaggagcagagcctgcacgacgtcctgttcgagctgagcaagacggtcctgcgccacagcgggagcctgaccagagacaacctgtccggactttcagcagatatgcaggactacggtttaattatcgacggagctgcactgtctctgataatgaagcctcgagaagacgggagttccggcaactacagggagctcttcctggaaatctgccggagctgcagcgcggtgctctgctgccgcatggcgcccttgcagaaggctcagattgttaaattaatcaaattttcaaaagagcacccaatcacgttagcaattggcgatggtgcaaatgatgtcagcatgattctggaagcgcacgtgggcataggtgtcatcggcaaggaaggccgccaggctgccaggaacagcgactatgcaatcccaaagtttaagcatttgaagaagatgctgcttgttcacgggcatttttattacattaggatctctgagctcgtgcagtacttcttctataagaacgtctgcttcatcttccctcagtttttataccagttcttctgtgggttttcacaacagactttgtacgacaccgcgtatctgaccctctacaacatcagcttcacctccctccccatcctcctgtacagcctcatggagcagcatgttggcattgacgtgctcaagagagacccgaccctgtacagggacgtcgccaagaatgccctgctgcgctggcgcgtgttcatctactggacgctcctgggactgtttgacgcactggtgttcttctttggtgcttatttcgtgtttgaaaatacaactgtgacaagcaacgggcagatatttggaaactggacgtttggaacgctggtattcaccgtgatggtgttcacagttacactaaagcttgcattggacacacactactggacttggatcaaccattttgtcatctgggggtcgctgctgttctacgttgtcttttcgcttctctggggaggagtgatctggccgttcctcaactaccagaggatgtactacgtgttcatccagatgctgtccagcgggcccgcctggctggccatcgtgctgctggtgaccatcagcctccttcccgacgtcctcaagaaagtcctgtgccggcagctgtggccaacagcaacagagagagtccagaatgggtgcgcacagcctcgggaccgcgactcagaattcacccctcttgcctctctgcagagcccaggctaccagagcacctgtccctcggccgcctggtacagctcccactctcagcaggtgacactcgcggcctggaaggagaaggtgtccacggagcccccacccatcctcggcggttcccatcaccactgcagttccatcccaagtcacagctgccctaggtcccgtgtgggaatgctcgtgtgatggatggtcctaagcctgtggagactgtgcacgtgcctcttcctggcccccagcaggcaaggaggggggtcacaggccttgccctcgagcatggcaccctggccgcctggacccagcactgtggttgttgagccacaccagtggcctctgggcattcggctcaacgcaggagggacattctgctggcccaccctgcgcgctgtcatgcagaggccattcccccaggcctgtgtcttcacccacctgccatcattggcctttgctgtcactgggagagaagagccgtccagggacccatggtggcccacatgtggatgccacatgctgctgtttcctgcttgcccggccaccacccatgccctccatagggtgaggtggagccatggtggtgcgtcctttactcaacaaccctccaatccggatgctgtgggaagggccgggtcactcggataccatcatccctgcggatgcaccgccgtaccctgctcatctgggagtggtttccctgcggttacgtccaagcccgcctgccctgtgtgttggggctggctgagtttcggtctccccatcaccggccgcctcgtggagaaggcagtgccacgtgggaggacaaggccacgccggcagcttccagccctgccgcagaagtgccaggatgtccatcagccactcgccagggcacggagccgtcagtccactgttacgggagaatgttgatttcgcgggtgcgagggccgggagacagatacttggctgtgatgagcagacatcctctgtccccgtggaggggtcaacaccaaggtggtgttcgtgcaccagaacctgtctcgggctgacgggggtggcacacaggacacgggtggatcccaacaggcagcaccgcacctctgcccgcctcccgcactgcagctccgcccgccgggctctgcgtccccacgtcccctcgtcccatccccacgtcccctcatcccgtcacctcgtccccacatccccttgccccgtcacctcgtcctcatgtccccttgtcctgtcacctcgtccccacgtcccctcgtctcctcatccccacgtcctctcgtccccttgtcccgtccccacataccctcgtccccatgtccccacgcagggctctccttcgtcttaggatctgtccagcgctgctctgggtgggttagcaaccccagggctgctgtgataggaagtccctgttgttctccgtactggcatttctatttctagaaataatatttgacatagccttaatggtccttaaagaagacatttcagtgtgagattcagacttcagacgctgaaactgctgcctttcaggaaagcaccaccaacgctggaggaggagccggccctcacgcccgccccgcgccacgctgtggaacggggctccggcaagtgaaacccagagggtgtttccgaggtgctcgacagtaggtatttttggaagctcagatttcaccatttgattgtataatcttttacctataaaatatttatttgaagtagagggtaaatcagcggtaagaacagtgaacacagtggttgggataaaataaggtgacaaacatcacaccaaagatgagggtagcgagcaactggcttgagcagacagaacggggaagactccactctgtcccgaggggccagccgcaggcgtccccagggccaccctgccctgaggtccttgtgtggccgccctggcttggcagccctgcccacgctgcccccgcaaacaatggtgtgtgcgtttttacagccctttttaggaacccaatatgggcataaatgtaacacctgtagcgggggcagattctctgtatgttcagttaacaaattatttgtaatgtatttttttagaaatcttaaaattgcctttgcactgaagtattttcatagctgtttatatctcttttattcatttatttaacatactgtctaattttaaaaataggtttttaaagctttcatttttaagtttatgaaattttggccactttacatttagattctggtgagagttttgactgaatgttccaatctctgatgaatgcgaattttcagatttgattttattctctacacacacctcttcttttcttggtatttctggtggcagtgattagttgaacagcacatttaaggcacgataatttgctacactttttctttacaatttgttgcaatttcatctgctttctatgtttcattgttaattgccatccttcagccttaaaaatagaagattctcacgtgaaggtttagtaagttgggtcccagctctgcctgtgtggagatagtcaccatgtacctctgacaacaagttttagtgtgaaagtcactaaacttttacacactcccaaacgtctttttaaaaattgcttgggaaattattaaatgaatgtgcctgatgatttgaaatagacaaggggcacgagataaaaaagaaaaggatgagaagatcctcagtgaatgacgttgcagggtcttcatgcaattttccacctcgcagtagttagtatttacttgccttaaactaactttgaagcaagtaatgtcaactttgagcactttgttgagttttgaaaaatcttatttgttgctgcacaggttaataaattatcaatttgtaattcagcatgttggtcagagacacggtcactgattcacacccagtccctgccacagaccgtctcagacacgcacagtgggcctgctgcatgattcacacccagtccctgccacagaccgtctcagacacgcacagtgggcctgctgcatgattcacacccagtccctgccacagaccgtctcagacacgcacagtgggcctgctgcatgcgtgttacctggcttttggctccacgctcactcatagccatgtccacatgggggcttgcacacaggatcactcacatatgtacatgtacccaccacaaacgtgcaagctcctgcacacatgcatgcacacaaacgtgtacacaagtgtgagctcctacacgcatacacacacacacgtgtacatgcaccaaagcatgtgtgacctacagacatgcagaacatgcacgtgtacacataccacagacacgcgtgtgcatgctcctacacaatacatatgcacatatcatgaacagcgtaagttcctacacacggacgtgtgatacacacatgcatgtacaggtaagcacacatgtacaagctcctacaggcttgctctcacacacgtgtatgcacagcagagagacgtatgagcttctactgcacacatgcacacacacacgcacacgtacattcactacaaacgtgcagcctcctgcacacgtgcacattcatgtgtacaccacaaatgagttcccagacgtgtaaacacacgtgcacacatcgtacacatgtgagctcccacacgtacacacagatgcacatggacacaccccaaacacgcacaggctcctacacacatgcacacacgtgtacaccacaaacgagctcccagacatgtaaacacacgtctcccacacgtgagctcccacacgtacacatgcacatgtacgcaccacaaacacatgcgcaggctcctgcaggcgtgaatacacacatgcacacacatatacacacatgtgccacaaacaagtgcacactgtcctggtgtcctgcactgcatcctgcctccttgctgaggggcccctgtgagaggcctctggatgggcatgggaagatgggctccctggcccccagcccatgcctccctgggatgaagagtccccctcctggcagaatgtctgggctttgcagagcaggccccgggggtgaagtcgcagcttcacttacaccagctgctctgtgagcaaggcttggtgccctggacaaggcccttcccctttagggaggtccagcctcgcaagctgaaacctcccctcggctcagccctataccaggcggccacagcaggactggccacacccacgccgcacctcatccgtgcacgcgtcggagcacggccagccttccgccacgagccagctgggaagggccgcggccgcctaaagccccagtcaacccagcctgtgtctgagcagacagggcgaacaagcaggccacaccgtctcgagggaggaggccagatgcggccagcgtctccaacagggtgaccatccgctcggcttgctgagcgtttaaacaaatgtttagacaggctgtggggactcccctgagttgagccttggccaggggtccggtgctgtcgcgggaaacctccagccttgttcttcaaaccactcagctcatgtgttttgcactgactagtactgaataatacaaccactcttatttaatgttagtattatttatttgacaactcagtgtctaacagcttgatatgcaggtccttgcatcctacatttctttaggaagttacccatttgtaactttaaaaacaggaaaaatatcagttggcaaatgcaatcttttttttttttaagctaaaggtgggtgaactggaatgaaaatctttctgatgttgtgtctataagcagccttgatgggatatgttagaagtgtcatgaaagtgtgattctacttttgcagaaaaatctaaagatcaatttatatagctttattttttactttatcaaagtatacagaattttaatatgcatatattgtgtctgacttaaaattataatgtctgcgtcaccatttaaaatgtctgttcattatgtaatgtaataaaagaaggtcttcaaaaatgtatttaacatgaatggtatccatagttgtcatcatcataaatactggagtttatttttaaattattaaacatagtaggtgcattaacataaatcagtctccacacagtaacatttaactgataattcattaatcagctttgaaaaattaaattgttaattaaaccaatctaacatttcagtaaagtttattttgtatgcttctgtttttaacttttatttctgtagataaactgactggataatattatattggacttttctctagattatctaagcaggagacctgaatctgcttgcaataaagaataaaagtctgcttcagtttctttataaagaaactcacacaa

SEQ ID NO: 223214 - DNA, 3576 bp, Artificial Sequence
  derived and/or modified sequence
atggactgcagcctggtgagaaccctggtgcacagatactgcgccggcgaggagaactgggtggacagcagaaccatctacgtgggccacagagagcccccccccggcgccgaggcctacatcccccagagataccccgacaacagaatcgtgagcagcaagtacaccttctggaacttcatccccaagaacctgttcgagcagttcagaagagtggccaacttctacttcctgatcatcttcctggtgcagctgatcatcgacacccccaccagccccgtgaccagcggcctgcccctgttcttcgtgatcaccgtgaccgccatcaagcagggctacgaggactggctgagacacaaggccgacaacgccatgaaccagtgccccgtgcacttcatccagcacggcaagctggtgagaaagcagagcagaaagctgagagtgggcgacatcgtgatggtgaaggaggacgagaccttcccctgcgacctgatcttcctgagcagcaacagaggcgacggcacctgccacgtgaccaccgccagcctggacggcgagagcagccacaagacccactacgccgtgcaggacaccaagggcttccacaccgaggaggacatcggcggcctgcacgccaccatcgagtgcgagcagccccagcccgacctgtacaagttcgtgggcagaatcaacgtgtacagcgacctgaacgaccccgtggtgagacccctgggcagcgagaacctgctgctgagaggcgccaccctgaagaacaccgagaagatcttcggcgtggccatctacaccggcatggagaccaagatggccctgaactaccagagcaagagccagaagagaagcgccgtggagaagagcatgaacgccttcctgatcgtgtacctgtgcatcctgatcagcaaggccctgatcaacaccgtgctgaagtacatgtggcagagcgagcccttcagagacgagccctggtacaaccagaagaccgagagcgagagacagagaaacctgttcctgaaggccttcaccgacttcctggccttcatggtgctgttcaactacatcatccccgtgagcatgtacgtgaccgtggagatgcagaagttcctgggcagctacttcatcacctgggacgaggacatgttcgacgaggagaccggcgagggccccctggtgaacaccagcgacctgaacgaggagctgggccaggtggagtacatcttcaccgacaagaccggcaccctgaccgagaacaacatggagttcaaggagtgctgcatcgagggccacgtgtacgtgccccacgtgatctgcaacggccaggtgctgcccgagagcagcggcatcgacatgatcgacagcagccccagcgtgaacggcagagagagagaggagctgttcttcagagccctgtgcctgtgccacaccgtgcaggtgaaggacgacgacagcgtggacggccccagaaagagccccgacggcggcaagagctgcgtgtacatcagcagcagccccgacgaggtggccctggtggagggcgtgcagagactgggcttcacctacctgagactgaaggacaactacatggagatcctgaacagagagaaccacatcgagagattcgagctgctggagatcctgagcttcgacagcgtgagaagaagaatgagcgtgatcgtgaagagcgccaccggcgagatctacctgttctgcaagggcgccgacagcagcatcttccccagagtgatcgagggcaaggtggaccagatcagagccagagtggagagaaacgccgtggagggcctgagaaccctgtgcgtggcctacaagagactgatccaggaggagtacgagggcatctgcaagctgctgcaggccgccaaggtggccctgcaggacagagagaagaagctggccgaggcctacgagcagatcgagaaggacctgaccctgctgggcgccaccgccgtggaggacagactgcaggagaaggccgccgacaccatcgaggccctgcagaaggccggcatcaaggtgtgggtgctgaccggcgacaagatggagaccgccgccgccacctgctacgcctgcaagctgttcagaagaaacacccagctgctggagctgaccaccaagagaatcgaggagcagagcctgcacgacgtgctgttcgagctgagcaagaccgtgctgagacacagcggcagcctgaccagagacaacctgagcggcctgagcgccgacatgcaggactacggcctgatcatcgacggcgccgccctgagcctgatcatgaagcccagagaggacggcagcagcggcaactacagagagctgttcctggagatctgcagaagctgcagcgccgtgctgtgctgcagaatggcccccctgcagaaggcccagatcgtgaagctgatcaagttcagcaaggagcaccccatcaccctggccatcggcgacggcgccaacgacgtgagcatgatcctggaggcccacgtgggcatcggcgtgatcggcaaggagggcagacaggccgccagaaacagcgactacgccatccccaagttcaagcacctgaagaagatgctgctggtgcacggccacttctactacatcagaatcagcgagctggtgcagtacttcttctacaagaacgtgtgcttcatcttcccccagttcctgtaccagttcttctgcggcttcagccagcagaccctgtacgacaccgcctacctgaccctgtacaacatcagcttcaccagcctgcccatcctgctgtacagcctgatggagcagcacgtgggcatcgacgtgctgaagagagaccccaccctgtacagagacgtggccaagaacgccctgctgagatggagagtgttcatctactggaccctgctgggcctgttcgacgccctggtgttcttcttcggcgcctacttcgtgttcgagaacaccaccgtgaccagcaacggccagatcttcggcaactggaccttcggcaccctggtgttcaccgtgatggtgttcaccgtgaccctgaagctggccctggacacccactactggacctggatcaaccacttcgtgatctggggcagcctgctgttctacgtggtgttcagcctgctgtggggcggcgtgatctggcccttcctgaactaccagagaatgtactacgtgttcatccagatgctgagcagcggccccgcctggctggccatcgtgctgctggtgaccatcagcctgctgcccgacgtgctgaagaaggtgctgtgcagacagctgtggcccaccgccaccgagagagtgcagaacggctgcgcccagcccagagacagagacagcgagttcacccccctggccagcctgcagagccccggctaccagagcacctgccccagcgccgcctggtacagcagccacagccagcaggtgaccctggccgcctggaaggagaaggtgagcaccgagcccccccccatcctgggcggcagccaccaccactgcagcagcatccccagccacagctgccccagaagcagagtgggcatgctggtgtag

SEQ ID NO: 223215 - protein, 204 aa, Artificial Sequence
  derived and/or modified sequence
MDPKDRKKIQFSVPAPPSQLDPRQVEMIRRRRPTPAMLFRLSEHSSPEEEASPHQRASGEGHHLKSKRPNPCAYTPPSLKAVQRIAESHLQSISNLNENQASEEEDELGELRELGYPREEDEEEEEDDEEEEEEEDSQAEVLKVIRQSAGQKTTCGQGLEGPWERPPPLDESERDGGSEDQVEDPALSEPGEEPQRPSPSEPGT

SEQ ID NO: 223216 - protein, 168 aa, Artificial Sequence
  derived and/or modified sequence
MLFRLSEHSSPEEEASPHQRASGEGHHLKSKRPNPCAYTPPSLKAVQRIAESHLQSISNLNENQASEEEDELGELRELGYPREEDEEEEEDDEEEEEEEDSQAEVLKVIRQSAGQKTTCGQGLEGPWERPPPLDESERDGGSEDQVEDPALSEPGEEPQRPSPSEPGT

SEQ ID NO: 223217 - protein, 215 aa, Artificial Sequence
  derived and/or modified sequence
MDPKDRKKIQFSVPAPPSQLDPRQVEMIRRRRPTPAMLFRLSEHSSPEEEASPHQVTPLTWHFPWQRASGEGHHLKSKRPNPCAYTPPSLKAVQRIAESHLQSISNLNENQASEEEDELGELRELGYPREEDEEEEEDDEEEEEEEDSQAEVLKVIRQSAGQKTTCGQGLEGPWERPPPLDESERDGGSEDQVEDPALSEPGEEPQRPSPSEPGT

SEQ ID NO: 223218 - DNA, 648 bp, Artificial Sequence
  derived and/or modified sequence
atggaccccaaggacagaaagaagatccagttcagcgtgcccgccccccccagccagctggaccccagacaggtggagatgatcagaagaagaagacccacccccgccatgctgttcagactgagcgagcacagcagccccgaggaggaggccagcccccaccaggtgacccccctgacctggcacttcccctggcagagagccagcggcgagggccaccacctgaagagcaagagacccaacccctgcgcctacaccccccccagcctgaaggccgtgcagagaatcgccgagagccacctgcagagcatcagcaacctgaacgagaaccaggccagcgaggaggaggacgagctgggcgagctgagagagctgggctaccccagagaggaggacgaggaggaggaggaggacgacgaggaggaggaggaggaggaggacagccaggccgaggtgctgaaggtgatcagacagagcgccggccagaagaccacctgcggccagggcctggagggcccctgggagagacccccccccctggacgagagcgagagagacggcggcagcgaggaccaggtggaggaccccgccctgagcgagcccggcgaggagccccagagacccagccccagcgagcccggcacctag

SEQ ID NO: 223219 - DNA, 615 bp, Artificial Sequence
  derived and/or modified sequence
atggaccccaaagacagaaagaagatccagttcagtgttcctgccccacctagtcaactagatccacgacaggtggaaatgatccgccgacggcgccccacgcctgcaatgctctttcgactcagtgagcattcatcgcccgaagaagaggcctccccacatcaacgtgcatctggggagggccatcatctgaaatccaaacgtcccaacccatgtgcctacaccccaccgagcttgaaggccgtccaaaggatcgccgaatcacatttacagtccatctcaaacctgaacgagaaccaggcttctgaggaagaagatgaactgggggagctgcgggaactgggctaccccagggaggaagatgaggaggaggaagaagatgatgaggaggaggaggaggaagaagatagtcaggctgaggtactcaaagtgatacgtcaatcagccggacagaagacaacctgtggacagggattggaaggaccttgggaaaggcctcctccgctcgacgaaagtgagcgtgacggggggtctgaggatcaggtcgaggacccggctttatcagagccaggggaggagccacagcggccctccccttcagagcctggaacctag

SEQ ID NO: 223220 - DNA, 1705 bp, Artificial Sequence
  derived and/or modified sequence
agaggcagagacacacgcggagaggaggagaggctgagggagggaggtggagaaggacgggagaggcagagagaggagacacgcagagacactcaggaggggagagacaccgagacgcagagacactcaggaggggagagacaccgagacgcagagacacccaggccggggagcgcgccctcccctcggcgggcacggtatttttatccgtgcgcgaacagccctcctcctcctctcgccgcacagcccgccgcctgcgcgggggagcccagcacagaccgccgccgggaccccgagtcgcgcaccccagccccaccgcccaccccgcgcgccatggaccccaaggaccgcaagaagatccagttctcggtgcccgcgccccctagccagctcgacccccgccaggtggagatgatccggcgcaggagaccaacgcctgccatgctgttccggctctcagagcactcctcaccagaggaggaagcctccccccaccagagagcctcaggagaggggcaccatctcaagtcgaagagacccaacccctgtgcctacacaccaccttcgctgaaagctgtgcagcgcattgctgagtctcacctgcagtctatcagcaatttgaatgagaaccaggcctcagaggaggaggatgagctgggggagcttcgggagctgggttatccaagagaggaagatgaggaggaagaggaggatgatgaagaagaggaagaagaagaggacagccaggctgaagtcctgaaggtcatcaggcagtctgctgggcaaaagacaacctgtggccagggtctggaagggccctgggagcgcccaccccctctggatgagtccgagagagatggaggctctgaggaccaagtggaagacccagcactaagtgagcctggggaggaacctcagcgcccttccccctctgagcctggcacataggcacccagcctgcatctcccaggaggaagtggaggggacatcgctgttccccagaaacccactctatcctcaccctgttttgtgctcttcccctcgcctgctagggctgcggcttctgacttctagaagactaaggctggtctgtgtttgcttgtttgcccacctttggctgatacccagagaacctgggcacttgctgcctgatgcccacccctgccagtcattcctccattcacccagcgggaggtgggatgtgagacagcccacattggaaaatccagaaaaccgggaacagggatttgcccttcacaattctactccccagatcctctcccctggacacaggagacccacagggcaggaccctaagatctggggaaaggaggtcctgagaaccttgaggtacccttagatccttttctacccactttcctatggaggattccaagtcaccacttctctcaccggcttctaccagggtccaggactaaggcgtttttctccatagcctcaacattttgggaatcttcccttaatcacccttgctcctcctgggtgcctggaagatggactggcagagacctctttgttgcgttttgtgctttgatgccaggaatgccgcctagtttatgtccccggtggggcacacagcggggggcgccaggttttccttgtcccccagctgctctgcccctttccccttcttccctgactccaggcctgaacccctcccgtgctgtaataaatctttgtaaat

SEQ ID NO: 223221 - DNA, 615 bp, Artificial Sequence
  derived and/or modified sequence
atggatcccaaggatcgaaagaaaattcagttcagcgtacctgcgcctccctcccagctggacccacgccaggttgaaatgatcagaagacgaaggcctactccagcaatgctcttccgattgtccgagcacagctcaccagaggaggaggcctctcctcaccagcgggcgtcaggcgaggggcatcacctgaagtcaaagcgtcctaatccctgcgcctacacgccaccgagtctgaaggccgtgcagagaattgctgaatctcatttgcaaagcatctcaaacttgaatgagaaccaggcaagtgaggaggaggacgaactgggggagctgcgggagctggggtaccctcgtgaagaggacgaagaggaagaggaggacgatgaggaagaagaagaggaggaggactcccaggccgaggtcttgaaggttattcgccagagcgccgggcagaaaacaacctgtggccaggggctcgagggaccatgggaacgacccccgcccctcgatgagagcgagagagacggcgggtcagaggaccaagtagaagaccccgctctatctgaacctggagaagagccccaaagacctagccctagtgagcctggtacctag

SEQ ID NO: 223222 - DNA, 648 bp, Artificial Sequence
  derived and/or modified sequence
atggatccgaaggatagaaagaagatccagttctcggttccagcgccaccttctcagctggatccgagacaagtggagatgattcgccgtcggcgcccgaccccagctatgctattcaggctgagcgagcacagttcacctgaagaagaggcctctcctcaccaggtgaccccactgacttggcatttcccctggcagcgcgcctctggtgaggggcaccacctcaagtctaagagacctaatccgtgtgcttacacgcctccctcattgaaggccgtccaaaggattgcggagtcacacctccagtctatctcaaacctcaacgagaaccaggccagtgaggaggaagatgaattgggcgaacttcgggaactgggatatccacgcgaggaagacgaggaagaagaggaggatgacgaagaggaggaagaagaggaagactctcaagcagaagtgctgaaagtgattcgtcaaagcgctggtcagaagacgacatgcggccagggcctggaggggccttgggaaaggcctccgcctttagacgaaagtgagagggacggagggagcgaggatcaggtggaagaccccgctctttctgagccaggagaggagccacagcggccctcaccatcggaacccggaacgtag

SEQ ID NO: 223223 - DNA, 615 bp, Artificial Sequence
  derived and/or modified sequence
atggaccccaaggacaggaagaagatccagttctctgtgcctgccccacccagccagctggacccccggcaggtggagatgatcagaagaagaagacccaccccagccatgctgttccggctgtctgagcacagcagccctgaggaggaggccagcccccaccagagggccagcggggagggccaccacctgaagagcaagaggcccaacccctgtgcctacaccccacccagcctgaaggctgtgcagagaattgctgagagccacctgcagagcatcagcaacctgaatgaaaaccaggccagcgaggaggaggatgagctgggggagctgcgggagctgggctacccccgggaggaggatgaggaggaggaggaggatgatgaggaggaggaggaggaggaggacagccaggccgaggtgctgaaggtgatccggcagagcgctggccagaagaccacctgtggccagggcctggagggcccctgggagcggcccccacccctggatgagagcgagagagatggcggcagcgaggaccaggtggaggaccctgccctgtctgagcccggggaggagccccagaggcccagccccagcgagcccggcacctag

SEQ ID NO: 223224 - DNA, 648 bp, Artificial Sequence
  derived and/or modified sequence
atggaccccaaggacaggaagaagatccagttctctgtgcctgccccacccagccagctggacccccggcaggtggagatgatcagaagaagaagacccaccccagccatgctgttccggctgtctgagcacagcagccctgaggaggaggccagcccccaccaggtgacccccctgacctggcacttcccctggcagagggccagcggggagggccaccacctgaagagcaagaggcccaacccctgtgcctacaccccacccagcctgaaggctgtgcagagaattgctgagagccacctgcagagcatcagcaacctgaatgaaaaccaggccagcgaggaggaggatgagctgggggagctgcgggagctgggctacccccgggaggaggatgaggaggaggaggaggatgatgaggaggaggaggaggaggaggacagccaggccgaggtgctgaaggtgatccggcagagcgctggccagaagaccacctgtggccagggcctggagggcccctgggagcggcccccacccctggatgaaagtgaaagagatggcggcagcgaggaccaggtggaggaccctgccctgtctgagcctggagaggagccccagaggcccagccccagcgagcccggcacctag

SEQ ID NO: 223225 - DNA, 615 bp, Artificial Sequence
  derived and/or modified sequence
atggaccccaaggaccggaagaagatccagttcagcgtgcccgccccgccctctcagctggatccaagacaggtcgaaatgattcggcggagacggcctacgcctgctatgctttttaggctcagcgagcattcgtccccagaggaggaagcaagccctcaccaaagggcaagcggtgagggacatcacctcaagagcaagcgccctaacccttgtgcttatactcccccttctctgaaggcggtccagcgcatcgctgagtcccacctgcagtccatttcaaatctgaacgagaaccaggcttccgaagaggaggatgagttgggagaattacgcgagcttgggtaccctagggaagaggacgaggaggaggaggaagacgatgaagaggaggaagaggaggaagattctcaagctgaagtactgaaagtgatacgtcaaagcgcaggccaaaagaccacgtgtggtcagggcttagaaggtccatgggagcgtccaccccccctggatgagtccgagcgggatggaggttcagaagatcaggtggaggaccccgccctcagtgagccaggcgaagagcctcagaggccttccccgagcgagcctgggacttag

SEQ ID NO: 223226 - DNA, 1419 bp, Artificial Sequence
  derived and/or modified sequence
ttttcatttctcacaaggactgggtgaagagttctgcagccttacagagactggaaaagaagcccaaaccaaggcccccagagaggtcccccaggcccctttgggtccctgagcctcagctggagatccggcgcaggagaccaacgcctgccatgctgttccggctctcagagcactcctcaccagaggaggaagcctccccccaccagagagcctcaggagaggggcaccatctcaagtcgaagagacccaacccctgtgcctacacaccaccttcgctgaaagctgtgcagcgcattgctgagtctcacctgcagtctatcagcaatttgaatgagaaccaggcctcagaggaggaggatgagctgggggagcttcgggagctgggttatccaagagaggaagatgaggaggaagaggaggatgatgaagaagaggaagaagaagaggacagccaggctgaagtcctgaaggtcatcaggcagtctgctgggcaaaagacaacctgtggccagggtctggaagggccctgggagcgcccaccccctctggatgagtccgagagagatggaggctctgaggaccaagtggaagacccagcactaagtgagcctggggaggaacctcagcgcccttccccctctgagcctggcacataggcacccagcctgcatctcccaggaggaagtggaggggacatcgctgttccccagaaacccactctatcctcaccctgttttgtgctcttcccctcgcctgctagggctgcggcttctgacttctagaagactaaggctggtctgtgtttgcttgtttgcccacctttggctgatacccagagaacctgggcacttgctgcctgatgcccacccctgccagtcattcctccattcacccagcgggaggtgggatgtgagacagcccacattggaaaatccagaaaaccgggaacagggatttgcccttcacaattctactccccagatcctctcccctggacacaggagacccacagggcaggaccctaagatctggggaaaggaggtcctgagaaccttgaggtacccttagatccttttctacccactttcctatggaggattccaagtcaccacttctctcaccggcttctaccagggtccaggactaaggcgtttttctccatagcctcaacattttgggaatcttcccttaatcacccttgctcctcctgggtgcctggaagatggactggcagagacctctttgttgcgttttgtgctttgatgccaggaatgccgcctagtttatgtccccggtggggcacacagcggggggcgccaggttttccttgtcccccagctgctctgcccctttccccttcttccctgactccaggcctgaacccctcccgtgctgtaataaatctttgtaaataac

SEQ ID NO: 223227 - DNA, 1504 bp, Artificial Sequence
  derived and/or modified sequence
ttttcatttctcacaaggactgggtgaagagttctgcagccttacagagactggaaaagaagcccaaaccaaggcccccagagaggtcccccaggcccctttgggtccctgagcctcagctggaggtggggggtgcctgcagtgcgctggctcagtctccttctgaaaagctggatccagcttgtttgaagcccttgagctgatcttagatccggcgcaggagaccaacgcctgccatgctgttccggctctcagagcactcctcaccagaggaggaagcctccccccaccagagagcctcaggagaggggcaccatctcaagtcgaagagacccaacccctgtgcctacacaccaccttcgctgaaagctgtgcagcgcattgctgagtctcacctgcagtctatcagcaatttgaatgagaaccaggcctcagaggaggaggatgagctgggggagcttcgggagctgggttatccaagagaggaagatgaggaggaagaggaggatgatgaagaagaggaagaagaagaggacagccaggctgaagtcctgaaggtcatcaggcagtctgctgggcaaaagacaacctgtggccagggtctggaagggccctgggagcgcccaccccctctggatgagtccgagagagatggaggctctgaggaccaagtggaagacccagcactaagtgagcctggggaggaacctcagcgcccttccccctctgagcctggcacataggcacccagcctgcatctcccaggaggaagtggaggggacatcgctgttccccagaaacccactctatcctcaccctgttttgtgctcttcccctcgcctgctagggctgcggcttctgacttctagaagactaaggctggtctgtgtttgcttgtttgcccacctttggctgatacccagagaacctgggcacttgctgcctgatgcccacccctgccagtcattcctccattcacccagcgggaggtgggatgtgagacagcccacattggaaaatccagaaaaccgggaacagggatttgcccttcacaattctactccccagatcctctcccctggacacaggagacccacagggcaggaccctaagatctggggaaaggaggtcctgagaaccttgaggtacccttagatccttttctacccactttcctatggaggattccaagtcaccacttctctcaccggcttctaccagggtccaggactaaggcgtttttctccatagcctcaacattttgggaatcttcccttaatcacccttgctcctcctgggtgcctggaagatggactggcagagacctctttgttgcgttttgtgctttgatgccaggaatgccgcctagtttatgtccccggtggggcacacagcggggggcgccaggttttccttgtcccccagctgctctgcccctttccccttcttccctgactccaggcctgaacccctcccgtgctgtaataaatctttgtaaataact

SEQ ID NO: 223228 - DNA, 1779 bp, Artificial Sequence
  derived and/or modified sequence
gggaggtggagaaggacgggagaggcagagagaggagacacgcagagacactcaggaggggagagacaccgagacgcagagacactcaggaggggagagacaccgagacgcagagacacccaggccggggagcgcgagggagcgaggcacagacctggctcagcgagcgcggggggcgagccccgagtcccgagagcctgggggcgcgcccagcccgggcgccgaccctcctcccgctcccgcgccctcccctcggcgggcacggtatttttatccgtgcgcgaacagccctcctcctcctctcgccgcacagcccgccgcctgcgcgggggagcccagcacagaccgccgccgggaccccgagtcgcgcaccccagccccaccgcccaccccgcgcgccatggaccccaaggaccgcaagaagatccagttctcggtgcccgcgccccctagccagctcgacccccgccaggtggagatgatccggcgcaggagaccaacgcctgccatgctgttccggctctcagagcactcctcaccagaggaggaagcctccccccaccaggtgacccctttaacctggcacttcccctggcagagagcctcaggagaggggcaccatctcaagtcgaagagacccaacccctgtgcctacacaccaccttcgctgaaagctgtgcagcgcattgctgagtctcacctgcagtctatcagcaatttgaatgagaaccaggcctcagaggaggaggatgagctgggggagcttcgggagctgggttatccaagagaggaagatgaggaggaagaggaggatgatgaagaagaggaagaagaagaggacagccaggctgaagtcctgaaggtcatcaggcagtctgctgggcaaaagacaacctgtggccagggtctggaagggccctgggagcgcccaccccctctggatgagtccgagagagatggaggctctgaggaccaagtggaagacccagcactaagtgagcctggggaggaacctcagcgcccttccccctctgagcctggcacataggcacccagcctgcatctcccaggaggaagtggaggggacatcgctgttccccagaaacccactctatcctcaccctgttttgtgctcttcccctcgcctgctagggctgcggcttctgacttctagaagactaaggctggtctgtgtttgcttgtttgcccacctttggctgatacccagagaacctgggcacttgctgcctgatgcccacccctgccagtcattcctccattcacccagcgggaggtgggatgtgagacagcccacattggaaaatccagaaaaccgggaacagggatttgcccttcacaattctactccccagatcctctcccctggacacaggagacccacagggcaggaccctaagatctggggaaaggaggtcctgagaaccttgaggtacccttagatccttttctacccactttcctatggaggattccaagtcaccacttctctcaccggcttctaccagggtccaggactaaggcgtttttctccatagcctcaacattttgggaatcttcccttaatcacccttgctcctcctgggtgcctggaagatggactggcagagacctctttgttgcgttttgtgctttgatgccaggaatgccgcctagtttatgtccccggtggggcacacagcggggggcgccaggttttccttgtcccccagctgctctgcccctttccccttcttccctgactccaggcctgaacccctc

SEQ ID NO: 223229 - DNA, 615 bp, Artificial Sequence
  derived and/or modified sequence
atggaccccaaggaccggaagaagatccagttcagcgtgcccgcccctccgtcgcaattagaccccagacaggtcgagatgattcgcaggagaagaccgacgcccgcaatgctgtttaggctctccgagcactctagcccagaagaagaagcatcaccacaccagagggcgtcgggtgagggccatcatctgaaatccaaacggcccaatccttgtgcttatacccctccgagcctgaaggctgtccagcgcatagcagagagccacttacagagtatctctaacctgaatgagaaccaggccagtgaggaagaggatgagctaggagaactgcgcgaactcggctaccctcgagaagaagacgaggaagaggaggaagatgatgaagaggaagaggaagaagaagacagccaggccgaggtgctgaaagttataaggcagtcagcaggtcaaaagaccacttgcgggcaaggcctcgagggaccttgggagaggccaccaccactcgatgaatccgagagggacggggggagcgaggatcaggtagaggacccggctctgtccgaacccggtgaggagccccagaggccttctccctctgaacccggcacatag

SEQ ID NO: 223230 - DNA, 648 bp, Artificial Sequence
  derived and/or modified sequence
atggaccccaaggaccggaagaagatccagttcagcgtgcccgccccaccctctcagctggatcctagacaggttgagatgattcgcagacgtcggcctactcccgccatgctgtttaggctctcagagcactcttccccagaagaggaggcctccccacaccaagtgacacctttgacctggcatttcccttggcagagggccagcggagagggtcatcatctcaagtccaagaggcctaacccgtgtgcctatacacctccatccttgaaggcggttcagcgtatagccgagtcccaccttcagagtatttccaacttaaacgagaaccaggcaagtgaggaagaagacgagctgggcgaactgagggagttaggatatccccgggaagaggatgaggaggaggaggaggacgatgaagaagaagaagaagaggaagattcccaggccgaggtactgaaggtgatccgccagagtgctggccagaagacgacctgtgggcagggtttggagggtccctgggagcgtcccccacctctcgacgagagcgagcgcgatggaggcagtgaagaccaggtcgaagacccagctctttccgaacccggtgaggaaccgcagagaccatctcctagtgaaccaggaacctag

SEQ ID NO: 223231 - DNA, 615 bp, Artificial Sequence
  derived and/or modified sequence
atggaccctaaggaccggaaaaagatacagttctcagtgcccgcaccccctagtcagctggacccacggcaggtggaaatgatacgaaggcgcaggcctacgccagcaatgctctttcgattgagcgagcactcatctcctgaggaggaagcttctccccatcaaagggcttccggagagggccaccatttaaagtctaaacggccaaacccttgtgcctacactcccccatctctgaaggctgtgcagagaatcgcggaatcacatctgcaatcaatcagcaatcttaatgaaaaccaggcatcggaagaggaagacgaactgggtgaactccgtgagttgggctatccaagggaggaggatgaggaagaagaagaggatgatgaggaggaggaagaagaggaggattcccaggcggaagtgttgaaagtaattcgacagtccgccggacagaaaaccacttgcggacaggggctggagggtccatgggaaaggccgcctcctctcgatgagagcgaaagggacggaggcagtgaagaccaggtcgaagaccccgcactttcagaacctggcgaggaaccccagaggccaagcccttctgagcctggaacttag

SEQ ID NO: 223232 - DNA, 615 bp, Artificial Sequence
  derived and/or modified sequence
atggatcctaaggatagaaaaaagatccagttctcagtccccgcacctcctagccagctggacccacgccaagtcgagatgatccgacgcagacgccctacaccagcgatgctgttccgcctctctgagcatagctcccctgaggaggaagcaagcccccaccagcgggcttcaggcgaagggcaccatctgaaatccaagcgccctaacccttgcgcttatacccccccttctctgaaggccgtacagcggatcgccgaatcacatctgcagtcgatcagcaatttaaatgagaaccaggcctctgaagaggaagacgaactcggcgagctgagggagttgggttaccctcgagaagaggacgaagaggaggaggaagatgatgaggaggaagaggaggaagaagacagtcaggcagaggtgctgaaggtgattcgccagtctgcaggccaaaaaaccacttgtggccaaggattggaaggaccctgggaacgcccaccacccctagacgagtctgaacgggacggtgggtcggaagaccaggtcgaagaccccgctctctccgagcctggggaggagcctcagcgcccatctcccagtgagccaggcacatag

SEQ ID NO: 223233 - DNA, 648 bp, Artificial Sequence
  derived and/or modified sequence
atggacccaaaggaccggaagaaaatccagttttccgtgccagctcccccttcccagctggatccacgccaggtggagatgatccgaagacgaagaccgactcccgctatgctgttcagactatcagagcattctagcccagaggaagaagcctctcctcaccaagtgaccccactgacctggcatttcccgtggcagcgtgcatcgggtgaagggcatcacctcaagtcgaagcgccctaatccttgcgcctatactccaccttcactgaaggcagttcagcggatcgccgaatcacatttacagtctatttcaaatctcaatgagaatcaagctagtgaagaggaagacgagctgggcgagctgcgagaattgggttatccaagggaggaggatgaggaagaggaggaagatgacgaagaggaggaggaggaagaagatagccaggccgaggtactgaaggtcataaggcaatcagcaggacagaaaactacgtgtgggcagggattagagggtccttgggaaaggccccctccattggatgagagtgagagggacggaggcagcgaagaccaagtggaggatccggctttaagcgaacccggagaagaaccacagaggcctagccccagcgagccgggtacttag

SEQ ID NO: 223234 - DNA, 1843 bp, Artificial Sequence
  derived and/or modified sequence
agctgggaccggagggtgagcccggcagaggcagagacacacgcggagaggaggagaggctgagggagggaggtggagaaggacgggagaggcagagagaggagacacgcagagacactcaggaggggagagacaccgagacgcagagacactcaggaggggagagacaccgagacgcagagacacccaggccggggagcgcgagggagcgaggcacagacctggctcagcgagcgcggggggcgagccccgagtcccgagagcctgggggcgcgcccagcccgggcgccgaccctcctcccgctcccgcgccctcccctcggcgggcacggtatttttatccgtgcgcgaacagccctcctcctcctctcgccgcacagcccgccgcctgcgcgggggagcccagcacagaccgccgccgggaccccgagtcgcgcaccccagccccaccgcccaccccgcgcgccatggaccccaaggaccgcaagaagatccagttctcggtgcccgcgccccctagccagctcgacccccgccaggtggagatgatccggcgcaggagaccaacgcctgccatgctgttccggctctcagagcactcctcaccagaggaggaagcctccccccaccagagagcctcaggagaggggcaccatctcaagtcgaagagacccaacccctgtgcctacacaccaccttcgctgaaagctgtgcagcgcattgctgagtctcacctgcagtctatcagcaatttgaatgagaaccaggcctcagaggaggaggatgagctgggggagcttcgggagctgggttatccaagagaggaagatgaggaggaagaggaggatgatgaagaagaggaagaagaagaggacagccaggctgaagtcctgaaggtcatcaggcagtctgctgggcaaaagacaacctgtggccagggtctggaagggccctgggagcgcccaccccctctggatgagtccgagagagatggaggctctgaggaccaagtggaagacccagcactaagtgagcctggggaggaacctcagcgcccttccccctctgagcctggcacataggcacccagcctgcatctcccaggaggaagtggaggggacatcgctgttccccagaaacccactctatcctcaccctgttttgtgctcttcccctcgcctgctagggctgcggcttctgacttctagaagactaaggctggtctgtgtttgcttgtttgcccacctttggctgatacccagagaacctgggcacttgctgcctgatgcccacccctgccagtcattcctccattcacccagcgggaggtgggatgtgagacagcccacattggaaaatccagaaaaccgggaacagggatttgcccttcacaattctactccccagatcctctcccctggacacaggagacccacagggcaggaccctaagatctggggaaaggaggtcctgagaaccttgaggtacccttagatccttttctacccactttcctatggaggattccaagtcaccacttctctcaccggcttctaccagggtccaggactaaggcgtttttctccatagcctcaacattttgggaatcttcccttaatcacccttgctcctcctgggtgcctggaagatggactggcagagacctctttgttgcgttttgtgctttgatgccaggaatgccgcctagtttatgtccccggtggggcacacagcggggggcgccaggttttccttgtcccccagctgctctgcccctttccccttcttccctgactccaggcctgaacccctcccgtgctgtaataaatctttgtaaataact

SEQ ID NO: 223235 - DNA, 615 bp, Artificial Sequence
  derived and/or modified sequence
atggaccccaaggacagaaagaagatccagttcagcgtgcccgccccccccagccagctggaccccagacaggtggagatgatcagaagaagaagacccacccccgccatgctgttcagactgagcgagcacagcagccccgaggaggaggccagcccccaccagagagccagcggcgagggccaccacctgaagagcaagagacccaacccctgcgcctacaccccccccagcctgaaggccgtgcagagaatcgccgagagccacctgcagagcatcagcaacctgaacgagaaccaggccagcgaggaggaggacgagctgggcgagctgagagagctgggctaccccagagaggaggacgaggaggaggaggaggacgacgaggaggaggaggaggaggaggacagccaggccgaggtgctgaaggtgatcagacagagcgccggccagaagaccacctgcggccagggcctggagggcccctgggagagacccccccccctggacgagagcgagagagacggcggcagcgaggaccaggtggaggaccccgccctgagcgagcccggcgaggagccccagagacccagccccagcgagcccggcacctag

SEQ ID NO: 223236 - protein, 164 aa, Artificial Sequence
  derived and/or modified sequence
MESGDEAAIERHRVHLRSATLRDAVPATLHLLPCEVAVDGPAPVGRFFTPAIRQGPEGLEVSFRGRCLRGEEVAVPPGLVGYVMVTEEKKVSMGKPDPLRDSGTDDQEEEPLERDFDRFIGATANFSRFTLWGLETIPGPDAKVRGALTWPSLAAAIHAQVPED

SEQ ID NO: 223237 - DNA, 495 bp, Artificial Sequence
  derived and/or modified sequence
atggagtccggcgacgaggctgccatcgaaagacaccgagtgcatttgcggagtgccactcttcgagacgccgtgcctgccacactgcatttgctgccgtgcgaagtagctgtcgacggacccgccccagtgggcaggttctttacgcccgcgataagacagggacccgagggcctggaagtgtcctttaggggtagatgcttgcgtggggaagaggtcgccgtcccccctggtctggtgggttacgtgatggtcaccgaggaaaagaaagtgtctatgggaaaacccgatcccctcagagattctgggactgatgatcaagaagaagagccactggagcgggacttcgatcgtttcattggtgcaacggcgaacttcagccgattcaccctctggggcctcgaaaccatcccaggccccgacgccaaggtccgaggcgcactaacgtggccatccctggcagccgcaatccatgctcaagtgcctgaggattag

SEQ ID NO: 223238 - DNA, 495 bp, Artificial Sequence
  derived and/or modified sequence
atggagagcggagatgaagctgccatcgagcggcaccgggtgcacctgcggagcgccaccctgagagatgctgtgcctgccaccctgcacctgctgccctgtgaggtggccgtggatggccctgcccctgtgggccgcttcttcaccccagccatccggcagggccctgagggcctggaggtgtccttccggggccgctgcctgcggggggaggaggtggccgtgcccccaggcctggtgggctacgtgatggtgacagaggagaagaaggtgtccatgggcaagccagaccccctgcgggacagcggcacagatgaccaggaggaggagcccctggagcgggactttgaccgcttcatcggggccacagccaacttcagccgcttcaccctgtggggcctggagaccatccctggcccagatgccaaggtgcggggggccctgacctggcccagcctggccgccgccatccacgcccaggtgcctgaagattag

SEQ ID NO: 223239 - DNA, 495 bp, Artificial Sequence
  derived and/or modified sequence
atggagagcggcgacgaggccgccatcgagcggcaccgggtgcacctgcgtagtgccacgctgcgcgacgctgtccccgctactctgcatcttctcccgtgtgaggtggcagtggacgggccggccccagtggggcgatttttcacccccgctattcggcagggtcctgagggcttggaagtgtccttccggggcaggtgcctccgcggggaggaggtcgcagttcctccgggcctggtcggatatgtcatggtcaccgaggaaaaaaaggtgtctatgggcaagcccgaccccttgcgcgatagtgggaccgacgaccaggaggaggagccgctggaacgagatttcgatcgcttcatcggggccaccgctaacttctcccgatttaccttgtggggtctcgaaaccattccaggaccggacgccaaagttcgcggagcactaacgtggcccagcctagcagccgcgatccacgctcaagtaccagaggattag

SEQ ID NO: 223240 - DNA, 495 bp, Artificial Sequence
  derived and/or modified sequence
atggagtctggtgatgaggccgcaattgagaggcaccgcgttcatctgaggtctgctactcttagggacgccgtgcctgccacacttcacttgctgccatgtgaagtggccgttgacggtcccgcaccggtgggtcgcttctttacccccgctatcaggcaaggacccgagggcttagaagtatcatttcgcggtagatgtctgcgcggtgaagaggttgccgtcccaccagggctggtcggttacgtgatggtaacagaggagaagaaggtcagcatgggaaagcccgatcctcttcgagacagtgggactgacgaccaggaagaagagccgctggaacgcgatttcgatagatttattggggctacagccaattttagtcgctttaccctgtggggcctcgagacgattcctggcccagacgctaaggtccgcggagcactgacctggcctagcctcgccgcagctatacacgctcaagtaccagaagactag

SEQ ID NO: 223241 - DNA, 2794 bp, Artificial Sequence
  derived and/or modified sequence
aaaacacaactggaaaaccctaggacttgaacccagggaaagcgttagggggtaaggggactacacttcccgtgaagctccgcggcggcttcccgtgaggccccgcggaggcttcctgagaggtcctgcgcgctttccgcgccagcttcagtgtcagctcgcgagccctggcgtcgcgtaggagggaggatggagagcggcgacgaagcggccatcgagaggcaccgcgtccacttgcgctccgccacattgcgcgacgccgtacccgccacactgcatctgctgccctgcgaggttgcggtggacgggcccgccccggtggggcgcttcttcacgcccgccatccgccagggccccgagggactcgaagtgtcgtttcggggccgctgtctacggggagaggaggtggcggtgccgcctggcctcgtgggatacgtgatggtgacagaagagaagaaggtgtcgatggggaagccagaccccttgcgggattccgggactgacgaccaagaggaggagccgctggagcgggacttcgaccgcttcattggagccactgccaacttcagccgcttcaccctgtggggtctggagaccatccctggcccggatgccaaagtgcgtggggccttaacttggcccagccttgcggcagcgattcacgcacaggtgcccgaggactgagaaccagagcttgaaattcaaagctgcgatcccttcacagcagtaaaccagctctttggaaccgattccatcaccccaataaaggagctcttcacagcacctgtgagtctgggcgccttagagcccctaagccagcatgggccctttccccctccccaccaagaactttgcatggctctggcatatagaaacaatttattgccgggggcaataggggtaagagaagccagaaatttttgcagccagcacccaccccacccccaacttctactttacaaaagaaatttttacaatcaccagccctctgtacagagctcccccatccggatcccttctcactgtacacagctgcctggctccctctggtccctgcttcagaggaggcctgggcctgtggccagctgaccttggagttggtctgagcccggagctcgccttggtgctgggcaccagtgggcccctgccaggcctgtcctctcctttttgagctgtcctcagccccatctcccttagagtgctttgtgggagctgcagtgggggcggggtgggctatcagccccagtcctgctgccgtcttggcactgcagtgggcagtgtctggtcaccacttccccctcttgctccagtccttgggagtgaagtgcagacacttggagtcgatccgcaggagccgcttgagcatggcccgctcatggccatccacgatgtcctctgacagtgtgaggatgtactggccctgggcagaggagatgggttcagcaggtggtcagcccacagaggactgcactctgcatcccacacacctgtctcccctgcctgcctccctaccttgtagtagttgatgagattgaggtactgcagagtggagatgacatcctccttcttgatgctggtgatttcactaatctcactgtgggagagcacaggtcaggttccctgaggacctttatctgtccccaggagccctgagagagaaagcccaggaacagacaagccatgccatgtacccccaggtagacagcgccaggctcacttgatggtgatctgtggcctctccccgctctccgacttcagccccatcaggatctccaggatggtctgggaccagtagcttcgataggataggaggccaaggtctgagaggggcttctcaggggtccctgttttcccttccactttggagagttcatagcctaaagcaatggagcaggagagggtgagtaagaggtcacagatgaacataagcaacatttaaaaacacaggttgccaaggcaggctgcctagttcctatcatggccctgccacttggcagttctatgccctccacttctctgtgcctcagttccctcaggaagaactgagtattcactctttccgtgcgctgagcacagtggagggcatgagggcactgagaggagcagctgcagtcaaccatgagggtgatcagaggccagtgaaggcttatgggcaggggatgcagagaaaatggctcatgggaagaaggggcctccaattttcctttgccatcccgggctctgtgtctagccatgtaaggaagtggagacagattcctgtctctaatccagacctgagaatgcttgaattctcaaagtcctcctagctgggaccttgggagtgtcacctgctgtaagacttgagtggcctgactgggtggttgtgaggatgcaaggagaaaaggtgcaccaaggtgcttcctaagtcggggagaccattcctgggagccacgtgactgacccccaccatggctctttccctccaactcgtgctgatagctggccgctgggaggccgtccccagtgagatcctcagaccctgcacagccctgagtggcttcacatctcttggtcagtgtcttcattctccccagtcagggacctgggatgtttgttacttctagaagcccttcctcaccctcataatggaccttagccccttgctggtcccactcacatcccgtctccattgctgtctgagttccaagactgagtttcttcaagcatccacttgtgctaccaggctgagaagttctgaggatgtgaccccatctgggcatcatttaaccaataaaatttctcgaatggaccataa

SEQ ID NO: 223242 - DNA, 495 bp, Artificial Sequence
  derived and/or modified sequence
atggagagcggcgacgaggccgccatcgagagacacagagtgcacctgagaagcgccaccctgagagacgccgtgcccgccaccctgcacctgctgccctgcgaggtggccgtggacggccccgcccccgtgggcagattcttcacccccgccatcagacagggccccgagggcctggaggtgagcttcagaggcagatgcctgagaggcgaggaggtggccgtgccccccggcctggtgggctacgtgatggtgaccgaggagaagaaggtgagcatgggcaagcccgaccccctgagagacagcggcaccgacgaccaggaggaggagcccctggagagagacttcgacagattcatcggcgccaccgccaacttcagcagattcaccctgtggggcctggagaccatccccggccccgacgccaaggtgagaggcgccctgacctggcccagcctggccgccgccatccacgcccaggtgcccgaggactag

SEQ ID NO: 223243 - protein, 2303 aa, Artificial Sequence
  derived and/or modified sequence
MATNIEQIFRSFVVSKFREIQQELSSGRNEGQLNGETNTPIEGNQAGDAAASARSLPNEEIVQKIEEVLSGVLDTELRYKPDLKEGSRKSRCVSVQTDPTDEIPTKKSKKHKKHKNKKKKKKKEKEKKYKRQPEESESKTKSHDDGNIDLESDSFLKFDSEPSAVALELPTRAFGPSETNESPAVVLEPPVVSMEVSEPHILETLKPATKTAELSVVSTSVISEQSEQSVAVMPEPSMTKILDSFAAAPVPTTTLVLKSSEPVVTMSVEYQMKSVLKSVESTSPEPSKIMLVEPPVAKVLEPSETLVVSSETPTEVYPEPSTSTTMDFPESSAIEALRLPEQPVDVPSEIADSSMTRPQELPELPKTTALELQESSVASAMELPGPPATSMPELQGPPVTPVLELPGPSATPVPELPGPLSTPVPELPGPPATAVPELPGPSVTPVPQLSQELPGLPAPSMGLEPPQEVPEPPVMAQELPGLPLVTAAVELPEQPAVTVAMELTEQPVTTTELEQPVGMTTVEHPGHPEVTTATGLLGQPEATMVLELPGQPVATTALELPGQPSVTGVPELPGLPSATRALELSGQPVATGALELPGPLMAAGALEFSGQSGAAGALELLGQPLATGVLELPGQPGAPELPGQPVATVALEISVQSVVTTSELSTMTVSQSLEVPSTTALESYNTVAQELPTTLVGETSVTVGVDPLMAPESHILASNTMETHILASNTMDSQMLASNTMDSQMLASNTMDSQMLASSTMDSQMLATSSMDSQMLATSSMDSQMLATSTMDSQMLATSSMDSQMLATSSMDSQMLATSSMDSQMLATSSMDSQMLATSTMDSQMLATSTMDSQMLATSSMDSQMLASGTMDSQMLASGTMDAQMLASGTMDAQMLASSTQDSAMLGSKSPDPYRLAQDPYRLAQDPYRLGHDPYRLGHDAYRLGQDPYRLGHDPYRLTPDPYRMSPRPYRIAPRSYRIAPRPYRLAPRPLMLASRRSMMMSYAAERSMMSSYERSMMSYERSMMSPMAERSMMSAYERSMMSAYERSMMSPMAERSMMSAYERSMMSAYERSMMSPMADRSMMSMGADRSMMSSYSAADRSMMSSYSAADRSMMSSYTADRSMMSMAADSYTDSYTDTYTEAYMVPPLPPEEPPTMPPLPPEEPPMTPPLPPEEPPEGPALPTEQSALTAENTWPTEVPSSPSEESVSQPEPPVSQSEISEPSAVPTDYSVSASDPSVLVSEAAVTVPEPPPEPESSITLTPVESAVVAEEHEVVPERPVTCMVSETPAMSAEPTVLASEPPVMSETAETFDSMRASGHVASEVSTSLLVPAVTTPVLAESILEPPAMAAPESSAMAVLESSAVTVLESSTVTVLESSTVTVLEPSVVTVPEPPVVAEPDYVTIPVPVVSALEPSVPVLEPAVSVLQPSMIVSEPSVSVQESTVTVSEPAVTVSEQTQVIPTEVAIESTPMILESSIMSSHVMKGINLSSGDQNLAPEIGMQEIALHSGEEPHAEEHLKGDFYESEHGINIDLNINNHLIAKEMEHNTVCAAGTSPVGEIGEEKILPTSETKQRTVLDTYPGVSEADAGETLSSTGPFALEPDATGTSKGIEFTTASTLSLVNKYDVDLSLTTQDTEHDMVISTSPSGGSEADIEGPLPAKDIHLDLPSNNNLVSKDTEEPLPVKESDQTLAALLSPKESSGGEKEVPPPPKETLPDSGFSANIEDINEADLVRPLLPKDMERLTSLRAGIEGPLLASDVGRDRSAASPVVSSMPERASESSSEEKDDYEIFVKVKDTHEKSKKNKNRDKGEKEKKRDSSLRSRSKRSKSSEHKSRKRTSESRSRARKRSSKSKSHRSQTRSRSRSRRRRRSSRSRSKSRGRRSVSKEKRKRSPKHRSKSRERKRKRSSSRDNRKTVRARSRTPSRRSRSHTPSRRRRSRSVGRRRSFSISPSRRSRTPSRRSRTPSRRSRTPSRRSRTPSRRSRTPSRRSRTPSRRRRSRSVVRRRSFSISPVRLRRSRTPLRRRFSRSPIRRKRSRSSERGRSPKRLTDLDKAQLLEIAKANAAAMCAKAGVPLPPNLKPAPPPTIEEKVAKKSGGATIEELTEKCKQIAQSKEDDDVIVNKPHVSDEEEEEPPFYHHPFKLSEPKPIFFNLNIAAAKPTPPKSQVTLTKEFPVSSGSQHRKKEADSVYGEWVPVEKNGEENKDDDNVFSSNLPSEGRVKRQGRVRRQMKQPAASHLTVTRCNSLCGTKPQSEKHRIAENSVITSLPNIGPSLHLWEGSPRYNYLASRFASRLYSSRFWW

SEQ ID NO: 223244 - DNA, 6978 bp, Artificial Sequence
  derived and/or modified sequence
atggccaccaacatcgagcagatcttcagaagcttcgtggtgagcaagttcagagagatccagcaggagctgagcagcggcagaaacgagggccagctgaacggcgagaccaacacccccatcgagggcaaccaggccggcgacgccgccgccagcgccagaagcctgcccaacgaggagatcgtgcagaagatcgaggaggtgctgagcggcgtgctggacaccgagctgagatacaagcccgacctgaaggagggcagcagaaagagcagatgcgtgagcgtgcagaccgaccccaccgacgagatccccaccaagaagagcaagaagcacaagaagcacaagaacaagaagaagaagaagaagaaggagaaggagaagaagtacaagagacagcccgaggagagcgagagcaagaccaagagccacgacgacggcaacatcgacctggagagcgacagcttcctgaagttcgacagcgagcccagcgccgtggccctggagctgcccaccagagccttcggccccagcgagaccaacgagagccccgccgtggtgctggagccccccgtggtgagcatggaggtgagcgagccccacatcctggagaccctgaagcccgccaccaagaccgccgagctgagcgtggtgagcaccagcgtgatcagcgagcagagcgagcagagcgtggccgtgatgcccgagcccagcatgaccaagatcctggacagcttcgccgccgcccccgtgcccaccaccaccctggtgctgaagagcagcgagcccgtggtgaccatgagcgtggagtaccagatgaagagcgtgctgaagagcgtggagagcaccagccccgagcccagcaagatcatgctggtggagccccccgtggccaaggtgctggagcccagcgagaccctggtggtgagcagcgagacccccaccgaggtgtaccccgagcccagcaccagcaccaccatggacttccccgagagcagcgccatcgaggccctgagactgcccgagcagcccgtggacgtgcccagcgagatcgccgacagcagcatgaccagaccccaggagctgcccgagctgcccaagaccaccgccctggagctgcaggagagcagcgtggccagcgccatggagctgcccggcccccccgccaccagcatgcccgagctgcagggcccccccgtgacccccgtgctggagctgcccggccccagcgccacccccgtgcccgagctgcccggccccctgagcacccccgtgcccgagctgcccggcccccccgccaccgccgtgcccgagctgcccggccccagcgtgacccccgtgccccagctgagccaggagctgcccggcctgcccgcccccagcatgggcctggagcccccccaggaggtgcccgagccccccgtgatggcccaggagctgcccggcctgcccctggtgaccgccgccgtggagctgcccgagcagcccgccgtgaccgtggccatggagctgaccgagcagcccgtgaccaccaccgagctggagcagcccgtgggcatgaccaccgtggagcaccccggccaccccgaggtgaccaccgccaccggcctgctgggccagcccgaggccaccatggtgctggagctgcccggccagcccgtggccaccaccgccctggagctgcccggccagcccagcgtgaccggcgtgcccgagctgcccggcctgcccagcgccaccagagccctggagctgagcggccagcccgtggccaccggcgccctggagctgcccggccccctgatggccgccggcgccctggagttcagcggccagagcggcgccgccggcgccctggagctgctgggccagcccctggccaccggcgtgctggagctgcccggccagcccggcgcccccgagctgcccggccagcccgtggccaccgtggccctggagatcagcgtgcagagcgtggtgaccaccagcgagctgagcaccatgaccgtgagccagagcctggaggtgcccagcaccaccgccctggagagctacaacaccgtggcccaggagctgcccaccaccctggtgggcgagaccagcgtgaccgtgggcgtggaccccctgatggcccccgagagccacatcctggccagcaacaccatggagacccacatcctggccagcaacaccatggacagccagatgctggccagcaacaccatggacagccagatgctggccagcaacaccatggacagccagatgctggccagcagcaccatggacagccagatgctggccaccagcagcatggacagccagatgctggccaccagcagcatggacagccagatgctggccaccagcaccatggacagccagatgctggccaccagcagcatggacagccagatgctggccaccagcagcatggacagccagatgctggccaccagcagcatggacagccagatgctggccaccagcagcatggacagccagatgctggccaccagcaccatggacagccagatgctggccaccagcaccatggacagccagatgctggccaccagcagcatggacagccagatgctggccagcggcaccatggacagccagatgctggccagcggcaccatggacgcccagatgctggccagcggcaccatggacgcccagatgctggccagcagcacccaggacagcgccatgctgggcagcaagagccccgacccctacagactggcccaggacccctacagactggcccaggacccctacagactgggccacgacccctacagactgggccacgacgcctacagactgggccaggacccctacagactgggccacgacccctacagactgacccccgacccctacagaatgagccccagaccctacagaatcgcccccagaagctacagaatcgcccccagaccctacagactggcccccagacccctgatgctggccagcagaagaagcatgatgatgagctacgccgccgagagaagcatgatgagcagctacgagagaagcatgatgagctacgagagaagcatgatgagccccatggccgagagaagcatgatgagcgcctacgagagaagcatgatgagcgcctacgagagaagcatgatgagccccatggccgagagaagcatgatgagcgcctacgagagaagcatgatgagcgcctacgagagaagcatgatgagccccatggccgacagaagcatgatgagcatgggcgccgacagaagcatgatgagcagctacagcgccgccgacagaagcatgatgagcagctacagcgccgccgacagaagcatgatgagcagctacaccgccgacagaagcatgatgagcatggccgccgacagctacaccgacagctacaccgacacctacaccgaggcctacatggtgccccccctgccccccgaggagccccccaccatgccccccctgccccccgaggagccccccatgaccccccccctgccccccgaggagccccccgagggccccgccctgcccaccgagcagagcgccctgaccgccgagaacacctggcccaccgaggtgcccagcagccccagcgaggagagcgtgagccagcccgagccccccgtgagccagagcgagatcagcgagcccagcgccgtgcccaccgactacagcgtgagcgccagcgaccccagcgtgctggtgagcgaggccgccgtgaccgtgcccgagcccccccccgagcccgagagcagcatcaccctgacccccgtggagagcgccgtggtggccgaggagcacgaggtggtgcccgagagacccgtgacctgcatggtgagcgagacccccgccatgagcgccgagcccaccgtgctggccagcgagccccccgtgatgagcgagaccgccgagaccttcgacagcatgagagccagcggccacgtggccagcgaggtgagcaccagcctgctggtgcccgccgtgaccacccccgtgctggccgagagcatcctggagccccccgccatggccgcccccgagagcagcgccatggccgtgctggagagcagcgccgtgaccgtgctggagagcagcaccgtgaccgtgctggagagcagcaccgtgaccgtgctggagcccagcgtggtgaccgtgcccgagccccccgtggtggccgagcccgactacgtgaccatccccgtgcccgtggtgagcgccctggagcccagcgtgcccgtgctggagcccgccgtgagcgtgctgcagcccagcatgatcgtgagcgagcccagcgtgagcgtgcaggagagcaccgtgaccgtgagcgagcccgccgtgaccgtgagcgagcagacccaggtgatccccaccgaggtggccatcgagagcacccccatgatcctggagagcagcatcatgagcagccacgtgatgaagggcatcaacctgagcagcggcgaccagaacctggcccccgagatcggcatgcaggagatcgccctgcacagcggcgaggagccccacgccgaggagcacctgaagggcgacttctacgagagcgagcacggcatcaacatcgacctgaacatcaacaaccacctgatcgccaaggagatggagcacaacaccgtgtgcgccgccggcaccagccccgtgggcgagatcggcgaggagaagatcctgcccaccagcgagaccaagcagagaaccgtgctggacacctaccccggcgtgagcgaggccgacgccggcgagaccctgagcagcaccggccccttcgccctggagcccgacgccaccggcaccagcaagggcatcgagttcaccaccgccagcaccctgagcctggtgaacaagtacgacgtggacctgagcctgaccacccaggacaccgagcacgacatggtgatcagcaccagccccagcggcggcagcgaggccgacatcgagggccccctgcccgccaaggacatccacctggacctgcccagcaacaacaacctggtgagcaaggacaccgaggagcccctgcccgtgaaggagagcgaccagaccctggccgccctgctgagccccaaggagagcagcggcggcgagaaggaggtgccccccccccccaaggagaccctgcccgacagcggcttcagcgccaacatcgaggacatcaacgaggccgacctggtgagacccctgctgcccaaggacatggagagactgaccagcctgagagccggcatcgagggccccctgctggccagcgacgtgggcagagacagaagcgccgccagccccgtggtgagcagcatgcccgagagagccagcgagagcagcagcgaggagaaggacgactacgagatcttcgtgaaggtgaaggacacccacgagaagagcaagaagaacaagaacagagacaagggcgagaaggagaagaagagagacagcagcctgagaagcagaagcaagagaagcaagagcagcgagcacaagagcagaaagagaaccagcgagagcagaagcagagccagaaagagaagcagcaagagcaagagccacagaagccagaccagaagcagaagcagaagcagaagaagaagaagaagcagcagaagcagaagcaagagcagaggcagaagaagcgtgagcaaggagaagagaaagagaagccccaagcacagaagcaagagcagagagagaaagagaaagagaagcagcagcagagacaacagaaagaccgtgagagccagaagcagaacccccagcagaagaagcagaagccacacccccagcagaagaagaagaagcagaagcgtgggcagaagaagaagcttcagcatcagccccagcagaagaagcagaacccccagcagaagaagcagaacccccagcagaagaagcagaacccccagcagaagaagcagaacccccagcagaagaagcagaacccccagcagaagaagcagaacccccagcagaagaagaagaagcagaagcgtggtgagaagaagaagcttcagcatcagccccgtgagactgagaagaagcagaacccccctgagaagaagattcagcagaagccccatcagaagaaagagaagcagaagcagcgagagaggcagaagccccaagagactgaccgacctggacaaggcccagctgctggagatcgccaaggccaacgccgccgccatgtgcgccaaggccggcgtgcccctgccccccaacctgaagcccgcccccccccccaccatcgaggagaaggtggccaagaagagcggcggcgccaccatcgaggagctgaccgagaagtgcaagcagatcgcccagagcaaggaggacgacgacgtgatcgtgaacaagccccacgtgagcgacgaggaggaggaggagccccccttctaccaccaccccttcaagctgagcgagcccaagcccatcttcttcaacctgaacatcgccgccgccaagcccaccccccccaagagccaggtgaccctgaccaaggagttccccgtgagcagcggcagccagcacagaaagaaggaggccgacagcgtgtacggcgagtgggtgcccgtggagaagaacggcgaggagaacaaggacgacgacaacgtgttcagcagcaacctgcccagcgagcccgtggacatcagcaccgccatgagcgagagagccctggcccagaagagactgagcgagaacgccttcgacctggaggccatgagcatgctgaacagagcccaggagagaatcgacgcctgggcccagctgaacagcatccccggccagttcaccggcagcaccggcgtgcaggtgctgacccaggagcagctggccaacaccggcgcccaggcctggatcaagaagggccagatcctggtggccgtgttcctgcccagaagcgtgcccgccgtgctgttcaccaccctgctgctgcccagacccagaatcagcagctag

SEQ ID NO: 223245 - DNA, 6912 bp, Artificial Sequence
  derived and/or modified sequence
atggccaccaacatcgagcagatcttcagaagcttcgtggtgagcaagttcagagagatccagcaggagctgagcagcggcagaaacgagggccagctgaacggcgagaccaacacccccatcgagggcaaccaggccggcgacgccgccgccagcgccagaagcctgcccaacgaggagatcgtgcagaagatcgaggaggtgctgagcggcgtgctggacaccgagctgagatacaagcccgacctgaaggagggcagcagaaagagcagatgcgtgagcgtgcagaccgaccccaccgacgagatccccaccaagaagagcaagaagcacaagaagcacaagaacaagaagaagaagaagaagaaggagaaggagaagaagtacaagagacagcccgaggagagcgagagcaagaccaagagccacgacgacggcaacatcgacctggagagcgacagcttcctgaagttcgacagcgagcccagcgccgtggccctggagctgcccaccagagccttcggccccagcgagaccaacgagagccccgccgtggtgctggagccccccgtggtgagcatggaggtgagcgagccccacatcctggagaccctgaagcccgccaccaagaccgccgagctgagcgtggtgagcaccagcgtgatcagcgagcagagcgagcagagcgtggccgtgatgcccgagcccagcatgaccaagatcctggacagcttcgccgccgcccccgtgcccaccaccaccctggtgctgaagagcagcgagcccgtggtgaccatgagcgtggagtaccagatgaagagcgtgctgaagagcgtggagagcaccagccccgagcccagcaagatcatgctggtggagccccccgtggccaaggtgctggagcccagcgagaccctggtggtgagcagcgagacccccaccgaggtgtaccccgagcccagcaccagcaccaccatggacttccccgagagcagcgccatcgaggccctgagactgcccgagcagcccgtggacgtgcccagcgagatcgccgacagcagcatgaccagaccccaggagctgcccgagctgcccaagaccaccgccctggagctgcaggagagcagcgtggccagcgccatggagctgcccggcccccccgccaccagcatgcccgagctgcagggcccccccgtgacccccgtgctggagctgcccggccccagcgccacccccgtgcccgagctgcccggccccctgagcacccccgtgcccgagctgcccggcccccccgccaccgccgtgcccgagctgcccggccccagcgtgacccccgtgccccagctgagccaggagctgcccggcctgcccgcccccagcatgggcctggagcccccccaggaggtgcccgagccccccgtgatggcccaggagctgcccggcctgcccctggtgaccgccgccgtggagctgcccgagcagcccgccgtgaccgtggccatggagctgaccgagcagcccgtgaccaccaccgagctggagcagcccgtgggcatgaccaccgtggagcaccccggccaccccgaggtgaccaccgccaccggcctgctgggccagcccgaggccaccatggtgctggagctgcccggccagcccgtggccaccaccgccctggagctgcccggccagcccagcgtgaccggcgtgcccgagctgcccggcctgcccagcgccaccagagccctggagctgagcggccagcccgtggccaccggcgccctggagctgcccggccccctgatggccgccggcgccctggagttcagcggccagagcggcgccgccggcgccctggagctgctgggccagcccctggccaccggcgtgctggagctgcccggccagcccggcgcccccgagctgcccggccagcccgtggccaccgtggccctggagatcagcgtgcagagcgtggtgaccaccagcgagctgagcaccatgaccgtgagccagagcctggaggtgcccagcaccaccgccctggagagctacaacaccgtggcccaggagctgcccaccaccctggtgggcgagaccagcgtgaccgtgggcgtggaccccctgatggcccccgagagccacatcctggccagcaacaccatggagacccacatcctggccagcaacaccatggacagccagatgctggccagcaacaccatggacagccagatgctggccagcaacaccatggacagccagatgctggccagcagcaccatggacagccagatgctggccaccagcagcatggacagccagatgctggccaccagcagcatggacagccagatgctggccaccagcaccatggacagccagatgctggccaccagcagcatggacagccagatgctggccaccagcagcatggacagccagatgctggccaccagcagcatggacagccagatgctggccaccagcagcatggacagccagatgctggccaccagcaccatggacagccagatgctggccaccagcaccatggacagccagatgctggccaccagcagcatggacagccagatgctggccagcggcaccatggacagccagatgctggccagcggcaccatggacgcccagatgctggccagcggcaccatggacgcccagatgctggccagcagcacccaggacagcgccatgctgggcagcaagagccccgacccctacagactggcccaggacccctacagactggcccaggacccctacagactgggccacgacccctacagactgggccacgacgcctacagactgggccaggacccctacagactgggccacgacccctacagactgacccccgacccctacagaatgagccccagaccctacagaatcgcccccagaagctacagaatcgcccccagaccctacagactggcccccagacccctgatgctggccagcagaagaagcatgatgatgagctacgccgccgagagaagcatgatgagcagctacgagagaagcatgatgagctacgagagaagcatgatgagccccatggccgagagaagcatgatgagcgcctacgagagaagcatgatgagcgcctacgagagaagcatgatgagccccatggccgagagaagcatgatgagcgcctacgagagaagcatgatgagcgcctacgagagaagcatgatgagccccatggccgacagaagcatgatgagcatgggcgccgacagaagcatgatgagcagctacagcgccgccgacagaagcatgatgagcagctacagcgccgccgacagaagcatgatgagcagctacaccgccgacagaagcatgatgagcatggccgccgacagctacaccgacagctacaccgacacctacaccgaggcctacatggtgccccccctgccccccgaggagccccccaccatgccccccctgccccccgaggagccccccatgaccccccccctgccccccgaggagccccccgagggccccgccctgcccaccgagcagagcgccctgaccgccgagaacacctggcccaccgaggtgcccagcagccccagcgaggagagcgtgagccagcccgagccccccgtgagccagagcgagatcagcgagcccagcgccgtgcccaccgactacagcgtgagcgccagcgaccccagcgtgctggtgagcgaggccgccgtgaccgtgcccgagcccccccccgagcccgagagcagcatcaccctgacccccgtggagagcgccgtggtggccgaggagcacgaggtggtgcccgagagacccgtgacctgcatggtgagcgagacccccgccatgagcgccgagcccaccgtgctggccagcgagccccccgtgatgagcgagaccgccgagaccttcgacagcatgagagccagcggccacgtggccagcgaggtgagcaccagcctgctggtgcccgccgtgaccacccccgtgctggccgagagcatcctggagccccccgccatggccgcccccgagagcagcgccatggccgtgctggagagcagcgccgtgaccgtgctggagagcagcaccgtgaccgtgctggagagcagcaccgtgaccgtgctggagcccagcgtggtgaccgtgcccgagccccccgtggtggccgagcccgactacgtgaccatccccgtgcccgtggtgagcgccctggagcccagcgtgcccgtgctggagcccgccgtgagcgtgctgcagcccagcatgatcgtgagcgagcccagcgtgagcgtgcaggagagcaccgtgaccgtgagcgagcccgccgtgaccgtgagcgagcagacccaggtgatccccaccgaggtggccatcgagagcacccccatgatcctggagagcagcatcatgagcagccacgtgatgaagggcatcaacctgagcagcggcgaccagaacctggcccccgagatcggcatgcaggagatcgccctgcacagcggcgaggagccccacgccgaggagcacctgaagggcgacttctacgagagcgagcacggcatcaacatcgacctgaacatcaacaaccacctgatcgccaaggagatggagcacaacaccgtgtgcgccgccggcaccagccccgtgggcgagatcggcgaggagaagatcctgcccaccagcgagaccaagcagagaaccgtgctggacacctaccccggcgtgagcgaggccgacgccggcgagaccctgagcagcaccggccccttcgccctggagcccgacgccaccggcaccagcaagggcatcgagttcaccaccgccagcaccctgagcctggtgaacaagtacgacgtggacctgagcctgaccacccaggacaccgagcacgacatggtgatcagcaccagccccagcggcggcagcgaggccgacatcgagggccccctgcccgccaaggacatccacctggacctgcccagcaacaacaacctggtgagcaaggacaccgaggagcccctgcccgtgaaggagagcgaccagaccctggccgccctgctgagccccaaggagagcagcggcggcgagaaggaggtgccccccccccccaaggagaccctgcccgacagcggcttcagcgccaacatcgaggacatcaacgaggccgacctggtgagacccctgctgcccaaggacatggagagactgaccagcctgagagccggcatcgagggccccctgctggccagcgacgtgggcagagacagaagcgccgccagccccgtggtgagcagcatgcccgagagagccagcgagagcagcagcgaggagaaggacgactacgagatcttcgtgaaggtgaaggacacccacgagaagagcaagaagaacaagaacagagacaagggcgagaaggagaagaagagagacagcagcctgagaagcagaagcaagagaagcaagagcagcgagcacaagagcagaaagagaaccagcgagagcagaagcagagccagaaagagaagcagcaagagcaagagccacagaagccagaccagaagcagaagcagaagcagaagaagaagaagaagcagcagaagcagaagcaagagcagaggcagaagaagcgtgagcaaggagaagagaaagagaagccccaagcacagaagcaagagcagagagagaaagagaaagagaagcagcagcagagacaacagaaagaccgtgagagccagaagcagaacccccagcagaagaagcagaagccacacccccagcagaagaagaagaagcagaagcgtgggcagaagaagaagcttcagcatcagccccagcagaagaagcagaacccccagcagaagaagcagaacccccagcagaagaagcagaacccccagcagaagaagcagaacccccagcagaagaagcagaacccccagcagaagaagcagaacccccagcagaagaagaagaagcagaagcgtggtgagaagaagaagcttcagcatcagccccgtgagactgagaagaagcagaacccccctgagaagaagattcagcagaagccccatcagaagaaagagaagcagaagcagcgagagaggcagaagccccaagagactgaccgacctggacaaggcccagctgctggagatcgccaaggccaacgccgccgccatgtgcgccaaggccggcgtgcccctgccccccaacctgaagcccgcccccccccccaccatcgaggagaaggtggccaagaagagcggcggcgccaccatcgaggagctgaccgagaagtgcaagcagatcgcccagagcaaggaggacgacgacgtgatcgtgaacaagccccacgtgagcgacgaggaggaggaggagccccccttctaccaccaccccttcaagctgagcgagcccaagcccatcttcttcaacctgaacatcgccgccgccaagcccaccccccccaagagccaggtgaccctgaccaaggagttccccgtgagcagcggcagccagcacagaaagaaggaggccgacagcgtgtacggcgagtgggtgcccgtggagaagaacggcgaggagaacaaggacgacgacaacgtgttcagcagcaacctgcccagcgagggcagagtgaagagacagggcagagtgagaagacagatgaagcagcccgccgccagccacctgaccgtgaccagatgcaacagcctgtgcggcaccaagccccagagcgagaagcacagaatcgccgagaacagcgtgatcaccagcctgcccaacatcggccccagcctgcacctgtgggagggcagccccagatacaactacctggccagcagattcgccagcagactgtacagcagcagattctggtggtag

SEQ ID NO: 223246 - DNA, 7281 bp, Artificial Sequence
  derived and/or modified sequence
atggccaccaacatcgagcagatcttcagaagcttcgtggtgagcaagttcagagagatccagcaggagctgagcagcggcagaaacgagggccagctgaacggcgagaccaacacccccatcgagggcaaccaggccggcgacgccgccgccagcgccagaagcctgcccaacgaggagatcgtgcagaagatcgaggaggtgctgagcggcgtgctggacaccgagctgagatacaagcccgacctgaaggagggcagcagaaagagcagatgcgtgagcgtgcagaccgaccccaccgacgagatccccaccaagaagagcaagaagcacaagaagcacaagaacaagaagaagaagaagaagaaggagaaggagaagaagtacaagagacagcccgaggagagcgagagcaagaccaagagccacgacgacggcaacatcgacctggagagcgacagcttcctgaagttcgacagcgagcccagcgccgtggccctggagctgcccaccagagccttcggccccagcgagaccaacgagagccccgccgtggtgctggagccccccgtggtgagcatggaggtgagcgagccccacatcctggagaccctgaagcccgccaccaagaccgccgagctgagcgtggtgagcaccagcgtgatcagcgagcagagcgagcagagcgtggccgtgatgcccgagcccagcatgaccaagatcctggacagcttcgccgccgcccccgtgcccaccaccaccctggtgctgaagagcagcgagcccgtggtgaccatgagcgtggagtaccagatgaagagcgtgctgaagagcgtggagagcaccagccccgagcccagcaagatcatgctggtggagccccccgtggccaaggtgctggagcccagcgagaccctggtggtgagcagcgagacccccaccgaggtgtaccccgagcccagcaccagcaccaccatggacttccccgagagcagcgccatcgaggccctgagactgcccgagcagcccgtggacgtgcccagcgagatcgccgacagcagcatgaccagaccccaggagctgcccgagctgcccaagaccaccgccctggagctgcaggagagcagcgtggccagcgccatggagctgcccggcccccccgccaccagcatgcccgagctgcagggcccccccgtgacccccgtgctggagctgcccggccccagcgccacccccgtgcccgagctgcccggccccctgagcacccccgtgcccgagctgcccggcccccccgccaccgccgtgcccgagctgcccggccccagcgtgacccccgtgccccagctgagccaggagctgcccggcctgcccgcccccagcatgggcctggagcccccccaggaggtgcccgagccccccgtgatggcccaggagctgcccggcctgcccctggtgaccgccgccgtggagctgcccgagcagcccgccgtgaccgtggccatggagctgaccgagcagcccgtgaccaccaccgagctggagcagcccgtgggcatgaccaccgtggagcaccccggccaccccgaggtgaccaccgccaccggcctgctgggccagcccgaggccaccatggtgctggagctgcccggccagcccgtggccaccaccgccctggagctgcccggccagcccagcgtgaccggcgtgcccgagctgcccggcctgcccagcgccaccagagccctggagctgagcggccagcccgtggccaccggcgccctggagctgcccggccccctgatggccgccggcgccctggagttcagcggccagagcggcgccgccggcgccctggagctgctgggccagcccctggccaccggcgtgctggagctgcccggccagcccggcgcccccgagctgcccggccagcccgtggccaccgtggccctggagatcagcgtgcagagcgtggtgaccaccagcgagctgagcaccatgaccgtgagccagagcctggaggtgcccagcaccaccgccctggagagctacaacaccgtggcccaggagctgcccaccaccctggtgggcgagaccagcgtgaccgtgggcgtggaccccctgatggcccccgagagccacatcctggccagcaacaccatggagacccacatcctggccagcaacaccatggacagccagatgctggccagcaacaccatggacagccagatgctggccagcaacaccatggacagccagatgctggccagcagcaccatggacagccagatgctggccaccagcagcatggacagccagatgctggccaccagcagcatggacagccagatgctggccaccagcaccatggacagccagatgctggccaccagcagcatggacagccagatgctggccaccagcagcatggacagccagatgctggccaccagcagcatggacagccagatgctggccaccagcagcatggacagccagatgctggccaccagcaccatggacagccagatgctggccaccagcaccatggacagccagatgctggccaccagcagcatggacagccagatgctggccagcggcaccatggacagccagatgctggccagcggcaccatggacgcccagatgctggccagcggcaccatggacgcccagatgctggccagcagcacccaggacagcgccatgctgggcagcaagagccccgacccctacagactggcccaggacccctacagactggcccaggacccctacagactgggccacgacccctacagactgggccacgacgcctacagactgggccaggacccctacagactgggccacgacccctacagactgacccccgacccctacagaatgagccccagaccctacagaatcgcccccagaagctacagaatcgcccccagaccctacagactggcccccagacccctgatgctggccagcagaagaagcatgatgatgagctacgccgccgagagaagcatgatgagcagctacgagagaagcatgatgagctacgagagaagcatgatgagccccatggccgagagaagcatgatgagcgcctacgagagaagcatgatgagcgcctacgagagaagcatgatgagccccatggccgagagaagcatgatgagcgcctacgagagaagcatgatgagcgcctacgagagaagcatgatgagccccatggccgacagaagcatgatgagcatgggcgccgacagaagcatgatgagcagctacagcgccgccgacagaagcatgatgagcagctacagcgccgccgacagaagcatgatgagcagctacaccgccgacagaagcatgatgagcatggccgccgacagctacaccgacagctacaccgacacctacaccgaggcctacatggtgccccccctgccccccgaggagccccccaccatgccccccctgccccccgaggagccccccatgaccccccccctgccccccgaggagccccccgagggccccgccctgcccaccgagcagagcgccctgaccgccgagaacacctggcccaccgaggtgcccagcagccccagcgaggagagcgtgagccagcccgagccccccgtgagccagagcgagatcagcgagcccagcgccgtgcccaccgactacagcgtgagcgccagcgaccccagcgtgctggtgagcgaggccgccgtgaccgtgcccgagcccccccccgagcccgagagcagcatcaccctgacccccgtggagagcgccgtggtggccgaggagcacgaggtggtgcccgagagacccgtgacctgcatggtgagcgagacccccgccatgagcgccgagcccaccgtgctggccagcgagccccccgtgatgagcgagaccgccgagaccttcgacagcatgagagccagcggccacgtggccagcgaggtgagcaccagcctgctggtgcccgccgtgaccacccccgtgctggccgagagcatcctggagccccccgccatggccgcccccgagagcagcgccatggccgtgctggagagcagcgccgtgaccgtgctggagagcagcaccgtgaccgtgctggagagcagcaccgtgaccgtgctggagcccagcgtggtgaccgtgcccgagccccccgtggtggccgagcccgactacgtgaccatccccgtgcccgtggtgagcgccctggagcccagcgtgcccgtgctggagcccgccgtgagcgtgctgcagcccagcatgatcgtgagcgagcccagcgtgagcgtgcaggagagcaccgtgaccgtgagcgagcccgccgtgaccgtgagcgagcagacccaggtgatccccaccgaggtggccatcgagagcacccccatgatcctggagagcagcatcatgagcagccacgtgatgaagggcatcaacctgagcagcggcgaccagaacctggcccccgagatcggcatgcaggagatcgccctgcacagcggcgaggagccccacgccgaggagcacctgaagggcgacttctacgagagcgagcacggcatcaacatcgacctgaacatcaacaaccacctgatcgccaaggagatggagcacaacaccgtgtgcgccgccggcaccagccccgtgggcgagatcggcgaggagaagatcctgcccaccagcgagaccaagcagagaaccgtgctggacacctaccccggcgtgagcgaggccgacgccggcgagaccctgagcagcaccggccccttcgccctggagcccgacgccaccggcaccagcaagggcatcgagttcaccaccgccagcaccctgagcctggtgaacaagtacgacgtggacctgagcctgaccacccaggacaccgagcacgacatggtgatcagcaccagccccagcggcggcagcgaggccgacatcgagggccccctgcccgccaaggacatccacctggacctgcccagcaacaacaacctggtgagcaaggacaccgaggagcccctgcccgtgaaggagagcgaccagaccctggccgccctgctgagccccaaggagagcagcggcggcgagaaggaggtgccccccccccccaaggagaccctgcccgacagcggcttcagcgccaacatcgaggacatcaacgaggccgacctggtgagacccctgctgcccaaggacatggagagactgaccagcctgagagccggcatcgagggccccctgctggccagcgacgtgggcagagacagaagcgccgccagccccgtggtgagcagcatgcccgagagagccagcgagagcagcagcgaggagaaggacgactacgagatcttcgtgaaggtgaaggacacccacgagaagagcaagaagaacaagaacagagacaagggcgagaaggagaagaagagagacagcagcctgagaagcagaagcaagagaagcaagagcagcgagcacaagagcagaaagagaaccagcgagagcagaagcagagccagaaagagaagcagcaagagcaagagccacagaagccagaccagaagcagaagcagaagcagaagaagaagaagaagcagcagaagcagaagcaagagcagaggcagaagaagcgtgagcaaggagaagagaaagagaagccccaagcacagaagcaagagcagagagagaaagagaaagagaagcagcagcagagacaacagaaagaccgtgagagccagaagcagaacccccagcagaagaagcagaagccacacccccagcagaagaagaagaagcagaagcgtgggcagaagaagaagcttcagcatcagccccagcagaagaagcagaacccccagcagaagaagcagaacccccagcagaagaagcagaacccccagcagaagaagcagaacccccagcagaagaagcagaacccccagcagaagaagcagaacccccagcagaagaagaagaagcagaagcgtggtgagaagaagaagcttcagcatcagccccgtgagactgagaagaagcagaacccccctgagaagaagattcagcagaagccccatcagaagaaagagaagcagaagcagcgagagaggcagaagccccaagagactgaccgacctggacaaggcccagctgctggagatcgccaaggccaacgccgccgccatgtgcgccaaggccggcgtgcccctgccccccaacctgaagcccgcccccccccccaccatcgaggagaaggtggccaagaagagcggcggcgccaccatcgaggagctgaccgagaagtgcaagcagatcgcccagagcaaggaggacgacgacgtgatcgtgaacaagccccacgtgagcgacgaggaggaggaggagccccccttctaccaccaccccttcaagctgagcgagcccaagcccatcttcttcaacctgaacatcgccgccgccaagcccaccccccccaagagccaggtgaccctgaccaaggagttccccgtgagcagcggcagccagcacagaaagaaggaggccgacagcgtgtacggcgagtgggtgcccgtggagaagaacggcgaggagaacaaggacgacgacaacgtgttcagcagcaacctgcccagcgagcccgtggacatcagcaccgccatgagcgagagagccctggcccagaagagactgagcgagaacgccttcgacctggaggccatgagcatgctgaacagagcccaggagagaatcgacgcctgggcccagctgaacagcatccccggccagttcaccggcagcaccggcgtgcaggtgctgacccaggagcagctggccaacaccggcgcccaggcctggatcaagaaggaccagttcctgagagccgcccccgtgaccggcggcatgggcgccgtgctgatgagaaagatgggctggagagagggcgagggcctgggcaagaacaaggagggcaacaaggagcccatcctggtggacttcaagaccgacagaaagggcctggtggccgtgggcgagagagcccagaagagaagcggcaacttcagcgccgccatgaaggacctgagcggcaagcaccccgtgagcgccctgatggagatctgcaacaagagaagatggcagccccccgagttcctgctggtgcacgacagcggccccgaccacagaaagcacttcctgttcagagtgctgagaaacggcgccctgaccagacccaactgcatgttcttcctgaacagatactag

SEQ ID NO: 223247 - DNA, 6978 bp, Artificial Sequence
  derived and/or modified sequence
atggccaccaacatcgagcagatctttaggtcttttgtcgtgtccaaatttcgggagattcagcaggagctgtcatctggtaggaatgagggccagctgaatggcgaaacgaatacccccatcgaggggaatcaggctggcgacgctgcggctagcgcacgtagtcttcctaacgaagagattgtgcaaaagattgaggaggtactgagtggagtactggacactgaactgcgttacaaacccgacttgaaggaggggtccagaaagtctagatgcgtgtctgttcaaactgaccctaccgatgaaatccccaccaaaaaaagcaagaaacacaaaaagcataagaataagaagaagaaaaagaaaaaagaaaaggagaaaaaatataaacggcagcccgaggagtctgagtccaaaaccaaatcgcacgatgacgggaacattgatctggaatctgatagttttctgaaatttgactctgaaccaagtgctgtcgccctggagttgccaacaagagcctttgggccgagcgaaaccaatgaaagtcccgctgtagtgctggaaccccctgtcgtaagtatggaagtgtcagagccccatattctagaaactttaaaacctgcgacaaagaccgctgagctgtcagtggtgtctacctcagttatttccgaacagtcggaacagtctgtcgcggtcatgcccgaaccttccatgaccaagatcctcgattcattcgccgccgccccagtgccaaccacgacccttgtcctcaagtcaagcgagccggtggtgactatgtctgttgagtaccagatgaagtctgtcttgaagagcgttgagagcacttcacctgaacctagcaaaatcatgctcgttgagcctcccgtcgcgaaggtgctggagccaagtgagaccctggtcgtgtcaagtgaaacccctacggaggtttacccagagcccagcacatcgaccactatggacttccccgagtctagtgctattgaagctcttcgcttgcctgaacagcccgtggatgttccatccgagatcgccgatagctccatgacccgtccacaggaattaccagaactgcccaaaaccacagcgctggaattacaggaatcttcggtcgccagcgctatggagttacccggccccccagccacgtctatgccggaacttcagggcccaccagtgacacccgtcctcgagttgcctggtccatctgccacaccagttcccgagctccctggcccactgtctacgccagtccccgaactgccaggcccccccgcaaccgctgtccctgaattgcccgggccaagcgtgacacccgtgcctcaactctctcaggagctgccagggttgcccgcgccgagcatggggctggagccgccacaggaggtgcctgaaccaccagtgatggctcaggagctgcccggcctaccccttgttactgcagccgtggagctgcctgagcagccagccgtaaccgttgcaatggagctgaccgagcaaccagtaacaaccactgaactcgaacaaccggtaggcatgactacggtggagcatccgggccatccagaagtgactaccgccacaggcttactgggtcaacccgaagccacaatggtgctggaactgcccgggcaacctgtggccaccactgcactcgaactgccgggacaaccatctgtaactggtgtcccagagcttccaggactgccctctgctaccagagccctcgaactctccggacaaccagtggccaccggagcactcgaacttcctggaccactgatggcagcaggcgcgctggaatttagtggacaaagtggagccgccggcgccctggagcttttggggcagcccctcgcgaccggagtcctagagcttccgggccagccgggtgcccccgaactccccggccaacctgtggctacggtggcccttgaaatatccgtccaaagcgttgtcacaacatccgagctgagcaccatgaccgtgtcccagtccctggaagtgccgagtacgaccgcactcgagtcctacaataccgtcgcccaggagctacccacaaccctagtgggggagacgtcagtgactgttggagtcgacccattgatggcccctgagagtcatattcttgctagtaatacaatggaaacccatattctggcgagcaacactatggacagtcagatgcttgcttcgaacaccatggactcacagatgcttgcaagcaacactatggacagtcagatgcttgcttccagtactatggacagccagatgttggcaacttcctctatggacagtcagatgctggccactagttccatggatagtcagatgctggctaccagtacaatggactcccaaatgctggctaccagtagtatggacagccagatgctggccactagcagtatggactctcagatgttggccacctcaagtatggactctcaaatgctggctaccagctccatggattcccagatgctggccacatccacgatggactcccagatgctggccaccagtaccatggactcccagatgctcgcaacaagctccatggacagccagatgctggcaagcgggaccatggacagtcagatgctagctagtgggactatggatgcccaaatgctggcttcagggacaatggacgctcagatgctggcttctagtacccaggactcggccatgctaggctctaaaagtcccgatccctacaggctggcccaagacccttaccggctcgctcaagacccgtaccgccttggccacgacccatacagacttggtcacgacgcctacaggctgggacaggatccgtatagactgggacacgacccttaccgattgaccccagacccgtatcggatgtccccacgaccatatcgaatcgctccaaggagttatcggatagctcctcgtccctacaggctggcacctcgacctctgatgctggccagccgccgcagcatgatgatgagctatgcagccgagcgcagcatgatgagttcttatgaacgctcgatgatgtcctatgagcggtctatgatgagccccatggccgaacgctcgatgatgtctgcgtacgagaggtctatgatgtctgcatacgaacgcagcatgatgagtccaatggccgaacggtcaatgatgagcgcctatgaaagatccatgatgtcagcatacgagaggtcaatgatgtcgccaatggccgaccggagtatgatgtccatgggagccgacaggagtatgatgtcttcatatagtgccgctgacaggtcaatgatgtccagctatagcgctgcggaccgatctatgatgtcctcttataccgcagaccggtcaatgatgagcatggccgccgatagctacaccgattcctatactgacacctacactgaagcatacatggtgccccctctgccacccgaggagccacctacaatgccgcccctaccccccgaggaacccccaatgaccccgcctctgcctcctgaagagccccccgaaggacctgctctgccgactgagcagtctgccctgaccgcagagaacacttggccaaccgaggtccctagttcaccgtcagaggaatcagtgagccagcctgagccccccgtgtcccaatctgaaatctccgaaccatccgccgttcccactgactatagcgtatctgcctcggacccatccgtcctcgttagcgaagccgccgtgacagttccggaaccacctcctgaaccagagtcatcgataacgcttaccccagtggagagcgcagtggttgccgaggaacatgaggtggtccccgaacggcccgtgacatgcatggtgagtgagaccccagccatgagtgccgaaccaactgttttggcttctgaacctcctgttatgagtgagaccgcggagacatttgattccatgagagcaagtggacatgtggcttccgaggtgtccacgagcctgcttgttcccgccgtaactactccggtcctggccgaatccattttagaaccacccgccatggccgccccggaatcttccgctatggctgtattggagtctagtgccgttacagtcctcgagtccagtaccgtaacagttcttgagtcctctactgtgaccgtcttggaaccttcagtggtcacagtgcccgaaccacccgtggtggcagagcccgattatgtcaccattcccgtgccagtggtgagcgcattggagccgtcagtgcccgtacttgaacccgccgtctcagttctccaaccctctatgatagtttcagaaccgtcggtgtctgtgcaagaatctacagtgactgtctcggaaccagcagttacagtgtccgaacagacccaggtcatacccactgaggtggctattgaaagtacaccgatgattctcgagtcatctattatgagttcacacgtaatgaagggtattaatctgagttcaggggatcagaatcttgcacccgagatcggaatgcaagaaatcgcgctgcactccggcgaggaacctcacgcagaggaacacctaaaaggtgatttctatgagtccgagcatggtataaatattgatcttaatatcaacaatcatctcatagctaaggagatggagcacaacacagtttgtgctgccgggacctccccagttggcgagatcggggaggagaaaatattgccgaccagcgagaccaagcagcgaaccgtcctagacacttacccgggtgttagcgaggcagatgccggagagaccctgtctagcactgggccgtttgccctagaaccggacgccacagggacatccaaggggatcgaattcactacggcaagcacactcagccttgttaataagtacgacgttgatctctctttaactacccaggacaccgagcatgacatggtcataagcaccagtccctccggaggcagtgaggctgatatcgagggccccctgcccgcaaaagacatccacctggatctcccatccaataacaatctggtatccaaagacactgaggaacccctgcccgttaaggaatctgaccagaccctggcagctctcttgagccccaaggaatcttccgggggagagaaagaagttcccccgccacccaaggagacccttccggactctggttttagcgctaacatcgaagacataaatgaagccgacctcgtacgcccccttctgccaaaagacatggaacgcttgacaagtctgcgtgcagggatagagggcccactgcttgcgtcagacgtaggccgtgacagatccgcggcctctcctgtcgtctctagcatgcctgagcgggcctcagaatcgtcctccgaggagaaagatgattatgagatattcgtaaaggtgaaggacacacacgagaaaagcaagaaaaataaaaatcgagacaaaggggaaaaagagaagaagcgggacagcagccttcgcagtcgaagtaagaggtccaagtcctcagagcataagagtaggaagagaacatccgaatcaaggtctagagcccggaagcgatcaagcaaatcaaagtctcatcggtcccagacgcggtcccgctctcggtcccgcagaaggcgtcggagttctaggagccggagcaagtccagagggagaaggagcgtgtcaaaggaaaagcgaaagcggtcgcctaaacatcgctcaaagagccgcgaaagaaaacgcaagcgatcaagttcacgcgacaaccgaaaaacggtgagagcccgtagccggaccccctcaaggcgcagccgctcccacacaccgtcaagacggcggagaagcagatccgttggccgcaggaggtctttctctatatctccatccagacgtagtcgcactccatcccggcgcagccgcaccccatcccggagaagtcgcaccccgtccagacgttcccgcacaccttcacgcaggagccgcacaccatctagaaggtctaggactccttccaggcgtcgtcggagccgtagcgtcgtgcgtcgccgctctttttctatttctccagtgcgccttcggcggagtcgcacccctctgcgaagaaggttttctcggagcccaatcaggcggaagcgaagcaggtcaagcgaacgtggtagatccccaaagagactgaccgacctggacaaggcccagttgcttgagatcgcaaaagccaacgcagctgctatgtgcgccaaggccggggtgccattgcctccgaatctcaagccagcgcctccacctaccatcgaggaaaaggtggcaaagaaatcaggcggggctactatagaagagttaaccgaaaaatgtaagcagatcgcccagagcaaggaggacgacgatgtgatcgtgaacaagccacatgtgtcagacgaggaggaagaggaacctcccttctatcatcatcctttcaagttgtcagagccaaaacctatctttttcaatctgaatatcgcagctgccaagcccacaccccctaaatctcaggttacccttacgaaagagtttcctgtatccagcggcagtcagcacaggaaaaaggaagcggatagcgtgtatggcgagtgggtgcctgtggagaagaatggtgaggagaacaaggatgacgataacgtcttctcctctaacctgccctcagaacccgtggacatcagtactgccatgtctgagcgagccctggcgcagaagagattgtccgagaacgcctttgacttggaagccatgtctatgcttaacagagcccaagagaggatcgacgcctgggcccagctcaatagtattccgggccagtttaccgggtctactggagtgcaggtgttgacacaggagcagttagcaaatactggcgcccaggcttggattaagaaaggacagatcttggtagccgtcttcctcccacggtccgtcccagctgtcctctttactacactgcttttaccccgaccccgcatttcatcttag

SEQ ID NO: 223248 - DNA, 6912 bp, Artificial Sequence
  derived and/or modified sequence
atggcgacgaatatagagcagatatttaggagttttgtggtcagcaagttcagggaaatccaacaagagttgtcttctggacggaatgagggtcaactgaatggcgaaacaaacactcctatcgagggcaaccaggccggtgacgccgccgcgagtgctaggtccctgccaaacgaggaaatcgtccagaagatcgaggaggttctgtcgggcgtcctcgacactgagctgcgatacaaacctgacttgaaggagggttccagaaaatctcgctgtgtatccgtgcagaccgatccgaccgatgagatccccacgaagaaaagtaaaaagcataaaaaacacaaaaacaagaagaagaagaaaaaaaaggagaaagagaagaaatacaagcggcagccagaggagtcagagtccaagacgaaatcacacgacgacggcaacatcgatctcgagtccgactccttccttaagtttgatagcgagcctagcgctgtggctcttgaactccctacgagggccttcggcccttccgagaccaatgaaagcccggctgttgtgctggaacctccggtggtgtccatggaggtaagcgagcctcatattctggagactctgaaaccggcaactaagaccgctgagttgagtgtcgtgtcaacatcagtgatctcagaacaatcggaacaatccgtagctgttatgcctgagccttcaatgactaaaatcctggatagctttgcggctgcccctgtaccaacaaccaccctggtcctcaaatcctcagagcccgtagtcaccatgagcgtggagtatcagatgaagagcgtgctcaagtccgtagagtctaccagcccggagccctccaagattatgctcgtcgagccccctgttgccaaagtgctggagccttcagaaactttggtggtgtcctctgaaactccaacggaggtgtaccccgagccgagtacatctacaacaatggatttcccagaatcctctgccatcgaagccctgcgccttccagaacagcccgtggacgtcccaagtgagatcgctgattcttctatgaccagaccgcaggagctccctgaattgcccaagacaactgcattggaacttcaggagagctctgttgcctccgccatggagttaccaggacccccagccacctctatgcctgaactgcagggccctcccgtaactccggttctggaattgccgggcccctcagcaacaccggttcctgaactgccagggccactcagcacacctgtgcccgagctcccagggccacctgcgacagccgtaccagagctaccaggtccttcggtcactcctgtcccccagctttcacaggaattacctgggctgcccgcaccttccatgggactggaacccccacaggaagtacctgagccacctgtgatggcccaagagctgcctgggttgcctctcgttacagcagccgtggaactgcctgagcagcccgccgtaaccgtagcgatggagttgaccgaacagcctgtcacaaccacggagctggagcagcctgtcggtatgacaacagtcgaacatccgggacacccggaggttactaccgcaacggggctgctgggtcagccggaagccacaatggttctggaactccccggccagcccgtcgccacaactgccctcgagttgccaggccagcctagcgtaacaggcgttcccgagctgcctggactcccatctgctactagagccctggagctgagtggccagcctgtggccacgggtgccctcgagctgccagggccacttatggccgccggcgccctggaattcagtgggcagagcggggccgctggtgctctggagctattgggccagcccctcgccacgggtgtgttagagctccctggccagccaggggcccctgaactgccgggacagcccgtggcaacagtggcgctggaaatcagcgtgcagagtgtcgtgactacctcagagttatcaaccatgaccgtcagtcagtccctcgaagtcccgtcaacaacagctctagagagttacaatacagtggctcaagaactgcccacgaccctggttggtgaaaccagtgtgaccgtaggcgtggaccccctgatggcccctgaatcgcatattctagcgagcaatactatggagacccacatattggctagcaatactatggatagccaaatgctggcttctaatacgatggactcacagatgttggcctctaacactatggacagccagatgctagcaagctccacgatggactcacagatgctggcgacctcctccatggacagccagatgttggctacctcgtctatggactctcagatgcttgcaactagcaccatggatagtcagatgctcgctactagttctatggactcccagatgttggccaccagtagcatggactcccaaatgttggccacttcgtctatggactcacaaatgctcgctacaagttctatggattcccagatgctggcgacttctaccatggattcacagatgcttgcaacctctacaatggactcccagatgctagcgacaagcagtatggattcccaaatgctcgcatctggcactatggattcgcagatgctggcatcaggaacgatggacgcacagatgctggcctcaggcaccatggacgctcaaatgctagcctccagtacccaggattcggcaatgctgggttccaaatccccagacccttatcgtcttgcccaggatccttacagactcgcacaggatccatatcgacttgggcacgatccttatcgtctggggcatgacgcctaccgtctcggacaagacccgtaccgactggggcacgacccatatagattaactcctgatccatatcgaatgagtcctcgcccgtaccggattgcgccccgctcctatcgtattgccccaagaccctatagattggccccgcggccactgatgcttgctagccggcggagtatgatgatgagttacgccgccgaacgatccatgatgtcttcctacgagcgcagtatgatgtcttatgaacgcagcatgatgtctccgatggcggagaggagtatgatgtcggcctatgaacggagcatgatgagcgcctacgaacgtagcatgatgagccccatggctgagcgctccatgatgtcagcttacgagcggagcatgatgtctgcatacgagagatcaatgatgtcacccatggctgatcgctctatgatgagcatgggggcggacagaagcatgatgtctagctactccgcggccgacagatctatgatgtccagttactcagcagccgataggagtatgatgtcctcgtatacggccgatcgcagtatgatgagcatggctgctgactcttataccgactcatatactgacacgtataccgaagcctacatggttccccctttgccgcctgaagaaccacctacaatgccaccgcttccacccgaagaaccccctatgacccccccattgccacctgaggaacctccggaaggacccgcactcccaaccgagcagagcgcactaactgcggagaacacctggcccactgaagttcctagctcccctagcgaggaatcagttagccaacctgaacccccagtctcacagagcgagatctctgagccatccgccgtgccaacggactacagtgtgtccgcgtcagatccctctgtcctcgtgagtgaggctgcggtgaccgtccctgagccccctccagagcctgagagttccattaccctaactccagtggagtcagccgtggttgcagaggagcacgaagtcgtgcctgaacgccccgtgacatgcatggtttccgagacacccgcgatgagcgcggagcccacagtactggctagcgagcctcccgtgatgtctgaaacagctgaaacatttgatagtatgagagccagcggccacgtcgcctctgaagtgagcactagtcttttagtccctgccgtgacaactcctgttctcgctgagagtatcttggagcctcctgccatggcagctcccgagagttctgccatggcagtcctggaatcaagtgcagtgactgtgctggagtctagcaccgttaccgtgctggaatccagcaccgtaacagtgcttgagccgagcgttgttaccgtgccagaaccccccgtagtagccgagcctgattatgtcacaatcccagtgccggtcgtctccgctctcgagcctagtgtccctgtgttagaacctgctgtgagtgtactccagccatctatgatagtgtcagagccctctgtgtcagtgcaggagtccacagtcaccgtgtcagagccagctgtgaccgtatctgagcaaacccaggtaattcctactgaagttgcaatcgaaagtacacctatgatcttagagagtagcattatgtccagtcacgtcatgaaaggtatcaatctttctagcggtgaccaaaatttggctcccgaaataggaatgcaggagatagctctgcactccggtgaagaaccacacgcagaagaacatctcaagggggatttctacgagagtgagcacggaatcaatatcgatcttaacattaataatcacctgatagcgaaagaaatggagcacaacacagtatgtgccgcaggaactagcccagttggagagatcggtgaggaaaagattctccctacttccgagacaaaacagcgtactgttttggatacttatccaggggtgtcagaggccgatgccggggagactctctcctcgactggcccattcgcccttgagcctgatgcaaccggaacctccaagggaatcgagtttactacagcaagtaccctaagcctggtaaacaaatatgacgtggatttgtcccttaccacacaagatacagaacacgacatggtgattagcactagcccgtccgggggctccgaagctgacatcgaaggcccacttccagctaaggacatccatctggacctgccatccaataacaatttagtttcaaaagacactgaggaacctcttcctgttaaagagtcagatcagacccttgccgccttgctgtccccgaaagagtccagcgggggtgagaaggaggtgcccccgcccccaaaggagaccctgcccgatagcggctttagtgccaacatcgaagacatcaacgaggctgacttagttaggccactactccctaaggatatggagcgtctgacctcgctgcgggccggtatcgaaggacccctccttgctagcgatgtgggcagagacaggtctgccgctagtcccgtggtcagtagtatgcccgaacgggcctccgagagcagctcggaggagaaggatgactacgaaatctttgtaaaggtgaaagacacccatgaaaagagcaagaaaaacaaaaatagagataaaggcgaaaaggaaaaaaagcgggactcatcactcaggtctcgcagtaaacggtccaagagctcagaacacaagagcagaaaacgaaccagcgaatccagaagtcgcgcacggaagcgctctagcaaatcgaaatcccaccgatctcagacaagaagccgcagtcgatcaagaagaagacgcagatcaagccgctctagatccaaatcacggggccgccgtagtgtctcaaaggaaaagcgcaagagaagcccaaagcacagatcaaaatcacgcgaaaggaaacgaaagcggagttccagtagagataaccggaagactgtgagggctcggtcaagaacaccttctaggcgtagccggtcacacactcctagccgtcggaggaggtcccggtccgtgggccgtcgccgcagtttctccatctccccctcaaggcgcagcaggactccctctcggcggagccggacaccttcccgacggagccgcacgcctagtcggaggtccagaacaccttctcgaaggtccaggaccccaagcaggcggagccgcaccccaagtagaagacgtcgatcgcgctctgtggtccgaaggaggtcgttctcaatcagcccagttcggctgaggagatcccgcacaccactacggaggcggttcagccgttctcccattcggcgcaagaggagccgatcttccgagcgtggtcgctcccccaaacggcttacagacttggataaagcacagctacttgagatcgccaaggcaaatgcagccgcaatgtgtgcgaaagcaggggtaccgttaccacccaacctcaagccagcaccacctcccaccatcgaggagaaggtggctaagaagagtgggggggccacaattgaggaactgaccgaaaaatgtaagcaaattgcacagtccaaggaggacgacgatgtgatcgtcaataagcctcacgtgtcggatgaggaagaggaggaacctcccttttatcaccacccattcaaactgtcggaacctaagcctatcttctttaatttaaatatcgctgccgcaaaacctacaccaccaaagagtcaagttacactgacaaaggaatttcccgtgtcctcaggatcacagcataggaagaaagaggccgactctgtgtacggggagtgggtgcctgtagaaaaaaacggcgaggagaacaaagacgatgacaacgttttttcgtctaacctgcccagtgaggggcgtgtgaagcgacagggtcgtgtgcgcagacagatgaagcagccagccgccagccatctcactgtaacccgctgcaatagcctctgcgggactaagccgcagagtgaaaaacatcgcattgcggagaatagcgttataacatcgctacccaacatcgggccaagccttcatttgtgggaaggatctccaaggtacaactatctggcctccagattcgcctcgcgtctctactcatcccgcttctggtggtag

SEQ ID NO: 223249 - DNA, 7281 bp, Artificial Sequence
  derived and/or modified sequence
atggccacaaacatcgagcagatttttcgatcttttgttgtcagcaagtttagggaaatacagcaggaacttagttcaggtcggaatgaaggacagcttaacggagaaaccaacactccaatagaagggaaccaagctggcgacgcggccgccagcgctaggagcctgccaaatgaggagattgtgcagaagattgaggaggtgctgagtggagtgctggataccgagctcaggtacaagcccgacctgaaggagggaagtagaaagtcgcgctgcgtaagcgtgcagacagatcctactgacgagattcccactaaaaagagtaaaaagcacaagaagcataaaaacaaaaagaagaagaaaaaaaaggagaaggagaaaaagtataaacgccagcccgaggaatctgagtccaagactaagagccatgacgacgggaacatcgatctggagtccgattcctttcttaagttcgacagcgagcctagtgccgttgctttagaattgcccaccagggccttcgggccctccgaaaccaatgaatccccagcagtcgtgctggagccacccgtggttagcatggaggtgagtgaaccccatatactcgagacgctaaagcccgcgacaaaaacagccgaactgtcagtcgtcagtacttctgtgattagcgagcagtccgaacagagcgtagcagtcatgcctgagccatccatgacaaaaatactcgacagcttcgccgccgctcctgtaccaaccactaccctcgtgctgaagtcctccgagccagtagtgactatgtccgtagagtatcaaatgaaatcggtgctgaaatcagtggagagcaccagtcccgaaccatctaaaataatgctagtcgagccgccggttgccaaagtgctggaaccaagtgaaacactggttgtgagtagtgaaactcctactgaagtctaccccgagccttccactagcaccacgatggatttcccagagtctagtgcgatcgaagctttgcggttgccagaacagcctgtagacgtcccaagcgagatcgccgacagctcaatgacccggccacaggaacttcccgagctgcctaaaacaactgcgctggaactgcaggagagctctgtcgcttccgccatggaattgcccggcccccccgctacgtccatgcccgaactgcaaggacctcccgtgaccccggtgctggaactccctgggccgtccgctaccccagtgcccgaactacccggtccccttagcacccctgtccctgagctcccggggcctccggctactgccgtgccagagctgcccgggcccagcgtcacaccagtaccccaacttagccaggagctccccggcctccctgctccgagtatgggcctcgagccgccacaggaagtcccagaaccaccagtgatggcccaggagctgccaggactgccgctcgtgactgcagccgtagagttaccagaacagcctgcagtgacggtggccatggagctgaccgagcagcccgtcacaaccacagaattggaacagccggtcggaatgactacagtggagcaccccggtcacccagaggtaactactgctactggactgctggggcagcctgaggcaactatggtgctggagcttcctggccagcctgttgcaacaacagcgctggaactgcctggacaaccttctgttactggggtccccgagttaccaggactgccatctgccacccgagcgctggagctgtctggacagcccgtggccactggtgccctggaacttcctgggcccctcatggccgccggtgcactggaattcagcgggcagagtggagcggcaggcgccctggagttactcgggcagccattagctacaggtgtgctggagcttcccggacagcctggggcacctgaacttccagggcaacccgtggccacagtcgccctcgagattagcgtacagagcgttgtcactaccagcgagctgtctacgatgacagtaagccaatccctcgaagtgccctcaactaccgcgctggaaagctataatactgtggctcaagaattacccactactctggtgggggagacatctgttacagtcggtgtcgatccactgatggccccagaatcgcacatactggctagtaatacaatggagactcacattctggcgagcaatactatggattctcagatgttagcctcaaacacaatggactcacaaatgctggcatctaacaccatggatagccagatgcttgctagctcgacaatggatagccaaatgctggcaacatcttctatggacagtcagatgcttgccacatcttcaatggactcccagatgttagccaccagcacgatggactctcagatgctggccacaagctccatggattcacagatgctcgctacttctagcatggattctcaaatgttggcaaccagctcaatggactcgcagatgctagccacgagcagcatggactcgcagatgctggcaacctctactatggattctcagatgttggcaaccagtacaatggactctcagatgctggctacctcttctatggattcacagatgctggcctccgggactatggattctcagatgttagcttctggcacaatggatgcacaaatgctggccagcggaaccatggatgcacagatgctcgcttcctcaacccaggactcagccatgctaggcagtaagagccccgatccctacagattggcccaagatccctacaggttagcgcaagacccctataggctcggtcacgatccatacagactcggccacgacgcctatcgactcggccaggatccgtatcggcttgggcatgatccttaccggctcacacccgacccctaccgcatgagccctcgcccctacaggatcgcaccacgttcgtaccggatcgctcctagaccttacaggctcgcaccacgcccactgatgctggcgtccagaagaagtatgatgatgtcctatgctgccgagagatccatgatgtcaagttatgaacgtagcatgatgtcgtacgaaaggtctatgatgtcccccatggccgaacggagcatgatgtccgcctatgaacgctccatgatgagcgcttatgaaaggagcatgatgagcccaatggcggaacggtcaatgatgtctgcatatgagcgatccatgatgtccgcctatgagcggtcaatgatgagtcccatggctgacagatctatgatgtcaatgggagcagacagaagcatgatgtcatcttactcagccgccgaccgctccatgatgagctcgtacagtgctgccgatcggagtatgatgagttcttacaccgccgaccgaagtatgatgagcatggccgccgacagctatacagacagctatactgacacatacacagaagcttatatggtgcctccccttccacctgaagagccccccaccatgcctccacttcccccagaagagccccccatgacaccacctctgccacctgaagagccccctgagggcccggctttgcccactgagcaatcagcgctcactgccgagaatacttggcccaccgaggtgccatcaagtcctagcgaagaatctgtatctcagcctgagccaccagtatcacagagcgaaattagcgagccctccgctgttcccaccgattacagcgttagtgcctccgacccaagcgtattagtgtctgaagccgcagtgacggtacccgaacctcctcctgagcccgaatcatctattactctcactccagtcgaaagcgcagttgtcgcagaagaacacgaggtggtgcctgagagacccgtgacctgcatggtctcggagactccagcaatgagcgcagaacccaccgtgttggcttcagagccccctgtgatgtctgagactgccgagacctttgattcaatgagagcaagcggacacgtcgcgagcgaggtctccacttcccttctggtgcctgctgtgaccactcctgttttagccgaatcaatcctcgagcctccagctatggcagctcccgagtctagcgccatggctgtcctcgaaagctccgccgtaactgtgctggagagcagcaccgtgactgtgctcgagtcctctactgttacagtactggaaccttcagtagttacggttccagagccacctgtcgtggccgagcctgactacgtgactatcccggtgcctgttgtcagtgcgctggagccttctgtgcccgtcctggagcccgctgtgagcgttttgcagccatctatgatcgtcagcgagccaagtgtgagtgtgcaggagtctacagttacagtctcagagcccgccgtaaccgttagcgaacaaacccaggtgataccaacagaagtggccattgagagcacacccatgatcctggaatcctccatcatgtcttcacacgtcatgaaaggcatcaacctgagctctggcgatcaaaatctggctccagaaatcggcatgcaggagatagccctgcattcaggtgaagagccgcatgccgaggagcacttgaaaggcgatttctacgagtccgagcatggtattaacatcgacctcaatattaacaaccacctgattgcaaaggagatggaacacaacacggtttgcgcagctggcacctcacctgtgggcgaaatcggtgaagaaaaaattctccctacgagcgagaccaaacaacgaacagtgctagatacctatccaggagtgtcggaagccgacgccggtgagacattatcctcaacaggcccatttgcgctggagcctgatgctacaggaactagcaaagggatagagttcactactgccagcaccctgagcctggtaaacaaatatgacgtcgatctgtccctaactacccaggatacagaacatgacatggtcatatcaacctccccttcaggtggctctgaagccgatatcgaagggccgctgcccgctaaggatatccacttagacctgccgagtaacaacaatctggtgagcaaggacaccgaggagcctctgcccgtgaaggaatcagaccaaactctcgcggcgctcttgtcccctaaggaaagtagtggcggcgagaaagaggtgcctccacctcccaaggagacccttcccgatagtggcttcagcgctaatatagaggatatcaacgaggccgatctcgtcagaccattgctccctaaagatatggagaggcttacaagcctcagagctgggatcgaaggaccgctgctggcctctgacgtgggccgcgatagatctgccgcctcccctgtggtcagttcgatgccagagcgcgcctccgagagcagttcagaggaaaaggacgattacgaaatcttcgtcaaagtcaaagatacacacgagaagagtaaaaagaataaaaatcgcgataagggggagaaggagaagaaaagagatagctctctcagaagcaggtcaaaaagaagtaaatcaagcgagcataagagtcggaagcgtactagtgaatcaaggagtagggcacggaaacggagttcaaagagcaagtcgcatcgctcacaaacgagaagtcgcagccggtcccggcgtcgcaggagaagctcccggtccagaagtaagtcccgcggccggcgttcagtgtcaaaggaaaagagaaagaggagcccaaagcatcgcagtaaatctcgggaacgaaagaggaagcgctcttcctcccgcgataataggaagacagtccgggcgagatcccgcacgccaagccggcggagccgctcccacactcctagtcgccggcgccgaagccgttctgtcggccgacgcagatctttttcaatatcccccagtcgaagaagcaggaccccatcaagacgtagccgaacaccgtctcggagatccaggaccccttcaaggcgcagccgcactccaagccggagatcacggaccccctctcggaggagcagaaccccatctaggaggcgtaggtcacgaagcgtggtgagaagaaggagtttttccattagccccgtacggctgcgtcggtcccgaacccccctccggcgtcggttttctagaagccctatccgtaggaaaaggtctcggagtagcgagaggggacgctccccgaaaaggctcactgatcttgataaggctcagctgcttgagattgcgaaagcaaacgctgccgctatgtgtgccaaggcaggagttccgctgccaccaaaccttaagccagctcctcctccaaccattgaggagaaggttgccaagaaatcaggcggtgccaccatagaggaactgacagagaaatgcaaacagatcgcacagtccaaggaggatgatgatgtgattgtgaacaagccgcacgtgtcagacgaagaagaagaagagcccccattctaccaccatccatttaaactgagcgagccgaagccaatttttttcaacttaaatatcgctgcggcgaaacccaccccaccaaaatcacaggtcacactcacgaaggagtttccggtctcctccggctcccagcatagaaagaaagaagccgatagcgtgtatggggaatgggtgccggtggagaaaaacggtgaagaaaacaaggacgacgataatgtttttagctctaatctgccttctgagcccgtcgatattagcactgctatgagcgagcgcgctctggcacaaaagcgcctttctgaaaacgcttttgacctcgaggctatgagcatgttaaaccgcgctcaggagcgcatagacgcgtgggcacagctgaacagtatcccaggccagtttacaggatctacaggagtccaggtgctgactcaggaacagctggcgaataccggcgcccaggcttggatcaaaaaagatcagtttctgcgggctgcaccagtcacaggaggtatgggggctgtactcatgaggaaaatggggtggagggagggtgagggactcggtaagaacaaggaggggaataaagagccaattctggtagatttcaagaccgacaggaaagggttagttgccgtgggcgaaagagcacagaagcgctccggtaactttagcgccgctatgaaagatctttccggtaaacacccggtatcagccctgatggaaatctgtaacaagaggcgatggcaacctcccgagtttttgctagttcatgattctgggccagaccacagaaaacattttctctttcgtgtgctgcgcaatggcgcactgacgaggcctaactgcatgttttttctgaatcgctactag

SEQ ID NO: 223250 - DNA, 6978 bp, Artificial Sequence
  derived and/or modified sequence
atggccaccaacatcgagcagatcttccgcagctttgtggtgtccaagttccgggagatccagcaggagctgagcagcggcagaaatgaaggccagctgaatggagagaccaacacccccatcgagggcaaccaggccggagatgctgctgccagcgcccggagcctgcccaatgaggagatcgtgcagaagattgaggaggtgctgagcggcgtgctggacacagagctgcgctacaagccagacctgaaggagggcagcaggaagagccgctgtgtgtctgtgcagacagaccccacagatgagatccccaccaagaagagcaagaagcacaagaagcacaagaacaagaagaagaagaagaagaaggagaaggagaagaagtacaagaggcagcctgaggagagcgagagcaagaccaagagccatgatgatggcaacatcgacctggagagtgacagcttcctgaagtttgacagcgagcccagcgctgtggccctggagctgcccacccgggccttcggccccagcgagaccaatgaatctccagctgtggtgctggagccccctgtggtgtccatggaggtgtctgagccccacatcctggagaccctgaagccagccaccaagacagctgagctgtctgtggtgtccaccagcgtcatcagcgagcagagcgagcagagcgtggccgtgatgcctgagcccagcatgaccaagatcctggacagctttgctgctgcccctgtgcccaccaccaccctggtgctgaagagcagcgagcctgtggtgaccatgtctgtggagtaccagatgaagtctgtgctgaagtctgtggagagcaccagccctgagcccagcaagatcatgctggtggagccccctgtggccaaggtgctggagcccagcgagaccctggtggtgagcagcgagacccccacagaggtgtacccagagcccagcaccagcaccaccatggacttccctgagagcagcgccatcgaggccctgcggctgcctgagcagcctgtggatgtgcccagcgagattgctgacagctccatgacccggccccaggagctgcctgagctgcccaagaccacagccctggagctgcaggagagctctgtggccagcgccatggagctgcccggccccccagccacctccatgcctgagctgcagggcccccctgtgacccctgtgctggagctgcccggccccagcgccacccctgtgcctgagctgcccggccccctgagcacccctgtgcctgagctgcccggccccccagccacagctgtgcctgagctgcccggccccagcgtgacccctgtgccccagctgagccaggagctgcccggcctgcctgcccccagcatgggcctggagcccccccaggaggtgcctgagccccctgtgatggcccaggagctgcccggcctgcccctggtgacagctgctgtggagctgcctgagcagcctgctgtgacagtggccatggagctgacagagcagcctgtgaccaccacagagctggagcagcctgtgggcatgaccaccgtggagcaccctggccaccctgaggtgaccacagccaccggcctgctgggccagcctgaggccaccatggtgctggagctgcccggccagcctgtggccaccacagccctggagctgcccggccagcccagcgtgactggagtgcctgagctgcccggcctgcccagcgccacccgggccctggagctgagcggccagcctgtggccactggagccctggagctgcccggccccctgatggctgctggggccctggagttcagcggccagagcggggctgctggggccctggagctgctgggccagcccctggccactggagtgctggagctgcccggccagcccggggcccctgagctgcccggccagcctgtggccaccgtggccctggagatctctgtgcagagcgtggtgaccaccagcgagctgagcaccatgacagtgtcccagagcctggaggtgcccagcaccacagccctggagagctacaacacagtggcccaggagctgcccaccaccctggtgggggagacctctgtgacagtgggcgtggaccccctgatggcccctgagagccacatcctggccagcaacaccatggagacccacatcctggccagcaacaccatggacagccagatgctggccagcaacaccatggacagccagatgctggccagcaacaccatggacagccagatgctggccagcagcaccatggacagccagatgctggccaccagctccatggacagccagatgctggccaccagctccatggacagccagatgctggccaccagcaccatggacagccagatgctggccaccagctccatggacagccagatgctggccaccagctccatggacagccagatgctggccaccagctccatggacagccagatgctggccaccagctccatggacagccagatgctggccaccagcaccatggacagccagatgctggccaccagcaccatggacagccagatgctggccaccagctccatggacagccagatgctggccagcggcaccatggacagccagatgctggccagcggcaccatggatgcccagatgctggccagcggcaccatggatgcccagatgctggccagcagcacccaggacagcgccatgctgggcagcaagagcccagacccctaccgcctggcccaggacccctaccgcctggcccaggacccctaccgcctgggccatgacccctaccgcctgggccatgatgcctaccgcctgggccaggacccctaccgcctgggccatgacccctaccgcctgaccccagacccctacaggatgagcccccggccctaccgcatcgcccccaggagctacagaattgccccccggccctaccgcctggccccccggcccctgatgctggccagccgccgctccatgatgatgtcctatgctgctgagaggtccatgatgagcagctatgaaagatccatgatgtcctatgaaagatccatgatgagccccatggccgagaggtccatgatgtctgcctatgaaagatccatgatgtctgcctatgaaagatccatgatgagccccatggccgagaggtccatgatgtctgcctatgaaagatccatgatgtctgcctatgaaagatccatgatgagccccatggctgaccgctccatgatgtccatgggcgctgaccgctccatgatgagcagctacagcgctgctgaccgctccatgatgagcagctacagcgctgctgaccgctccatgatgagcagctacacagctgaccgctccatgatgtccatggctgctgacagctacacagacagctacacagacacctacacagaggcctacatggtgccccccctgcccccagaggagccccccaccatgccacccctgcccccagaggagccccccatgaccccacccctgcccccagaggagcccccagagggccctgccctgcccacagagcagagcgccctgacagctgagaacacctggcccacagaggtgcccagcagccccagcgaggagagcgtgtcccagcctgagccccctgtgtcccagagcgagatcagcgagcccagcgctgtgcccacagactacagcgtgtctgccagtgaccccagcgtgctggtgtctgaggccgctgtgacagtgcctgagcccccacctgagcctgagagcagcatcaccctgacccctgtggagagcgctgtggtggccgaggagcacgaggtggtgcctgagaggcctgtgacctgcatggtgtctgagaccccagccatgtctgctgagcccaccgtgctggccagcgagccccctgtgatgtctgaaacagctgagacctttgacagcatgagggccagcggccacgtggccagcgaggtgtccaccagcctgctggtgcctgctgtgaccacccctgtgctggccgagagcatcctggagcccccagccatggccgcccctgagagcagcgccatggctgtgctggagagcagcgctgtgacagtgctggagagcagcacagtgacagtgctggagagcagcacagtgacagtgctggagcccagcgtggtgacagtgcctgagccccctgtggtggccgagccagactatgtgaccatccctgtgcctgtggtgtctgccctggagcccagcgtgcctgtgctggagcctgctgtgtctgtgctgcagcccagcatgattgtgtctgagcccagcgtgtctgtgcaggagagcacagtgacagtgtctgagcctgctgtgacagtgtctgagcagacccaggtgatccccacagaggtggccatcgagagcacccccatgatcctggagagcagcatcatgagcagccacgtgatgaagggcatcaacctgagcagcggggaccagaacctggcccctgagatcggcatgcaggagatcgccctgcacagcggggaggagccccatgctgaggagcacctgaagggggacttctatgagagcgagcacggcatcaacatcgacctgaacatcaacaaccacctgattgccaaggagatggagcacaacacagtgtgtgccgccggcaccagccctgtgggggagattggagaggagaagatcctgcccaccagcgagaccaagcagaggacagtgctggacacctacccaggagtgtctgaggctgatgctggggagaccctgagcagcacaggcccctttgccctggagccagatgccaccggcaccagcaagggcatcgagttcaccacagccagcaccctgagcctggtgaacaagtatgatgtggacctgagcctgaccacccaggacacagaacatgacatggtgatcagcaccagccccagcggcggcagcgaggccgacatcgagggccccctgcctgccaaggacatccacctggacctgcccagcaacaacaacctggtgtccaaggacacagaggagcccctgcctgtgaaggagagtgaccagaccctggccgccctgctgagccccaaggagagcagcggcggggagaaggaggtgcccccaccacccaaggagaccctgcctgattctggcttcagcgccaacatcgaggacatcaatgaagctgacctggtgcggcccctgctgcccaaggacatggagcggctgaccagcctgcgggccggcatcgagggccccctgctggccagtgatgtgggccgggacagatctgctgccagccctgtggtgtcctccatgcctgagcgggccagcgagagcagcagcgaggagaaggatgattatgagatctttgtgaaggtgaaggacacccatgagaagagcaagaagaacaagaacagagacaagggggagaaggagaagaagagggacagcagcctgcggagccgcagcaagaggagcaagagcagcgagcacaagagcaggaagaggaccagcgagagccgcagccgggccaggaagaggagcagcaagagcaagagccacaggagccagaccaggagccgcagccgcagcagaagaagaagaagaagcagccgcagccgcagcaagagccggggcagaagatctgtgtccaaggagaagaggaagaggagccccaagcacaggagcaagagccgggagaggaagaggaagaggagcagcagccgggacaacaggaagacagtgcgggcccggagcaggacccccagcagaagaagccgcagccacacccccagcagaagaagaagaagccgctctgtgggcagaagaagaagcttcagcatcagccccagcagaagaagcaggacccccagccgccgcagcaggacccccagcagaagaagcaggacccccagccgccgcagcaggacccccagcagaagaagcaggacccccagccgccgcagcaggacccccagcagaagaagaagaagccgctctgtggtgagaagaagaagcttcagcatcagccctgtgcggctgcggcgcagcaggacccccctgcggcggcgcttcagccgcagccccatccggaggaagaggagccgcagcagcgagcggggccgcagccccaagaggctgacagacctggacaaggcccagctgctggagatcgccaaggccaatgctgctgccatgtgtgccaaggccggcgtgcccctgccccccaacctgaagccagcccccccacccaccatcgaggagaaggtggccaagaagtctggaggagccaccatcgaggagctgacagagaagtgcaagcagatcgcccagagcaaagaagatgatgatgtgattgtgaacaagccccacgtgtctgatgaggaggaggaggagccccccttctaccaccaccccttcaagctgtctgagcccaagcccatcttcttcaacctgaacattgctgctgccaagcccaccccacccaagagccaggtgaccctgaccaaggagttccctgtgagcagcggcagccagcacaggaagaaggaggccgacagcgtgtatggagagtgggtgcctgtggagaagaatggagaggagaacaaggatgatgacaacgtgttcagcagcaacctgcccagcgagcctgtggacatcagcacagccatgtctgagcgggccctggcccagaagaggctgtctgaaaatgcctttgacctggaggccatgtccatgctgaacagagcccaggagagaattgatgcctgggcccagctgaacagcatccctggccagttcaccggcagcactggagtgcaggtgctgacccaggagcagctggccaacacaggagcccaggcctggatcaagaagggccagatcctggtggccgtgttcctgcccaggtctgtgcctgctgtgctcttcaccaccctgctgctgccccggccccgcatcagcagctag

SEQ ID NO: 223251 - DNA, 6912 bp, Artificial Sequence
  derived and/or modified sequence
atggccaccaacatcgagcagatcttccgcagctttgtggtgtccaagttccgggagatccagcaggagctgagcagcggcagaaatgaaggccagctgaatggagagaccaacacccccatcgagggcaaccaggccggagatgctgctgccagcgcccggagcctgcccaatgaggagatcgtgcagaagattgaggaggtgctgagcggcgtgctggacacagagctgcgctacaagccagacctgaaggagggcagcaggaagagccgctgtgtgtctgtgcagacagaccccacagatgagatccccaccaagaagagcaagaagcacaagaagcacaagaacaagaagaagaagaagaagaaggagaaggagaagaagtacaagaggcagcctgaggagagcgagagcaagaccaagagccatgatgatggcaacatcgacctggagagtgacagcttcctgaagtttgacagcgagcccagcgctgtggccctggagctgcccacccgggccttcggccccagcgagaccaatgaatctccagctgtggtgctggagccccctgtggtgtccatggaggtgtctgagccccacatcctggagaccctgaagccagccaccaagacagctgagctgtctgtggtgtccaccagcgtcatcagcgagcagagcgagcagagcgtggccgtgatgcctgagcccagcatgaccaagatcctggacagctttgctgctgcccctgtgcccaccaccaccctggtgctgaagagcagcgagcctgtggtgaccatgtctgtggagtaccagatgaagtctgtgctgaagtctgtggagagcaccagccctgagcccagcaagatcatgctggtggagccccctgtggccaaggtgctggagcccagcgagaccctggtggtgagcagcgagacccccacagaggtgtacccagagcccagcaccagcaccaccatggacttccctgagagcagcgccatcgaggccctgcggctgcctgagcagcctgtggatgtgcccagcgagattgctgacagctccatgacccggccccaggagctgcctgagctgcccaagaccacagccctggagctgcaggagagctctgtggccagcgccatggagctgcccggccccccagccacctccatgcctgagctgcagggcccccctgtgacccctgtgctggagctgcccggccccagcgccacccctgtgcctgagctgcccggccccctgagcacccctgtgcctgagctgcccggccccccagccacagctgtgcctgagctgcccggccccagcgtgacccctgtgccccagctgagccaggagctgcccggcctgcctgcccccagcatgggcctggagcccccccaggaggtgcctgagccccctgtgatggcccaggagctgcccggcctgcccctggtgacagctgctgtggagctgcctgagcagcctgctgtgacagtggccatggagctgacagagcagcctgtgaccaccacagagctggagcagcctgtgggcatgaccaccgtggagcaccctggccaccctgaggtgaccacagccaccggcctgctgggccagcctgaggccaccatggtgctggagctgcccggccagcctgtggccaccacagccctggagctgcccggccagcccagcgtgactggagtgcctgagctgcccggcctgcccagcgccacccgggccctggagctgagcggccagcctgtggccactggagccctggagctgcccggccccctgatggctgctggggccctggagttcagcggccagagcggggctgctggggccctggagctgctgggccagcccctggccactggagtgctggagctgcccggccagcccggggcccctgagctgcccggccagcctgtggccaccgtggccctggagatctctgtgcagagcgtggtgaccaccagcgagctgagcaccatgacagtgtcccagagcctggaggtgcccagcaccacagccctggagagctacaacacagtggcccaggagctgcccaccaccctggtgggggagacctctgtgacagtgggcgtggaccccctgatggcccctgagagccacatcctggccagcaacaccatggagacccacatcctggccagcaacaccatggacagccagatgctggccagcaacaccatggacagccagatgctggccagcaacaccatggacagccagatgctggccagcagcaccatggacagccagatgctggccaccagctccatggacagccagatgctggccaccagctccatggacagccagatgctggccaccagcaccatggacagccagatgctggccaccagctccatggacagccagatgctggccaccagctccatggacagccagatgctggccaccagctccatggacagccagatgctggccaccagctccatggacagccagatgctggccaccagcaccatggacagccagatgctggccaccagcaccatggacagccagatgctggccaccagctccatggacagccagatgctggccagcggcaccatggacagccagatgctggccagcggcaccatggatgcccagatgctggccagcggcaccatggatgcccagatgctggccagcagcacccaggacagcgccatgctgggcagcaagagcccagacccctaccgcctggcccaggacccctaccgcctggcccaggacccctaccgcctgggccatgacccctaccgcctgggccatgatgcctaccgcctgggccaggacccctaccgcctgggccatgacccctaccgcctgaccccagacccctacaggatgagcccccggccctaccgcatcgcccccaggagctacagaattgccccccggccctaccgcctggccccccggcccctgatgctggccagccgccgctccatgatgatgtcctatgctgctgagaggtccatgatgagcagctatgaaagatccatgatgtcctatgaaagatccatgatgagccccatggccgagaggtccatgatgtctgcctatgaaagatccatgatgtctgcctatgaaagatccatgatgagccccatggccgagaggtccatgatgtctgcctatgaaagatccatgatgtctgcctatgaaagatccatgatgagccccatggctgaccgctccatgatgtccatgggcgctgaccgctccatgatgagcagctacagcgctgctgaccgctccatgatgagcagctacagcgctgctgaccgctccatgatgagcagctacacagctgaccgctccatgatgtccatggctgctgacagctacacagacagctacacagacacctacacagaggcctacatggtgccccccctgcccccagaggagccccccaccatgccacccctgcccccagaggagccccccatgaccccacccctgcccccagaggagcccccagagggccctgccctgcccacagagcagagcgccctgacagctgagaacacctggcccacagaggtgcccagcagccccagcgaggagagcgtgtcccagcctgagccccctgtgtcccagagcgagatcagcgagcccagcgctgtgcccacagactacagcgtgtctgccagtgaccccagcgtgctggtgtctgaggccgctgtgacagtgcctgagcccccacctgagcctgagagcagcatcaccctgacccctgtggagagcgctgtggtggccgaggagcacgaggtggtgcctgagaggcctgtgacctgcatggtgtctgagaccccagccatgtctgctgagcccaccgtgctggccagcgagccccctgtgatgtctgaaacagctgagacctttgacagcatgagggccagcggccacgtggccagcgaggtgtccaccagcctgctggtgcctgctgtgaccacccctgtgctggccgagagcatcctggagcccccagccatggccgcccctgagagcagcgccatggctgtgctggagagcagcgctgtgacagtgctggagagcagcacagtgacagtgctggagagcagcacagtgacagtgctggagcccagcgtggtgacagtgcctgagccccctgtggtggccgagccagactatgtgaccatccctgtgcctgtggtgtctgccctggagcccagcgtgcctgtgctggagcctgctgtgtctgtgctgcagcccagcatgattgtgtctgagcccagcgtgtctgtgcaggagagcacagtgacagtgtctgagcctgctgtgacagtgtctgagcagacccaggtgatccccacagaggtggccatcgagagcacccccatgatcctggagagcagcatcatgagcagccacgtgatgaagggcatcaacctgagcagcggggaccagaacctggcccctgagatcggcatgcaggagatcgccctgcacagcggggaggagccccatgctgaggagcacctgaagggggacttctatgagagcgagcacggcatcaacatcgacctgaacatcaacaaccacctgattgccaaggagatggagcacaacacagtgtgtgccgccggcaccagccctgtgggggagattggagaggagaagatcctgcccaccagcgagaccaagcagaggacagtgctggacacctacccaggagtgtctgaggctgatgctggggagaccctgagcagcacaggcccctttgccctggagccagatgccaccggcaccagcaagggcatcgagttcaccacagccagcaccctgagcctggtgaacaagtatgatgtggacctgagcctgaccacccaggacacagaacatgacatggtgatcagcaccagccccagcggcggcagcgaggccgacatcgagggccccctgcctgccaaggacatccacctggacctgcccagcaacaacaacctggtgtccaaggacacagaggagcccctgcctgtgaaggagagtgaccagaccctggccgccctgctgagccccaaggagagcagcggcggggagaaggaggtgcccccaccacccaaggagaccctgcctgattctggcttcagcgccaacatcgaggacatcaatgaagctgacctggtgcggcccctgctgcccaaggacatggagcggctgaccagcctgcgggccggcatcgagggccccctgctggccagtgatgtgggccgggacagatctgctgccagccctgtggtgtcctccatgcctgagcgggccagcgagagcagcagcgaggagaaggatgattatgagatctttgtgaaggtgaaggacacccatgagaagagcaagaagaacaagaacagagacaagggggagaaggagaagaagagggacagcagcctgcggagccgcagcaagaggagcaagagcagcgagcacaagagcaggaagaggaccagcgagagccgcagccgggccaggaagaggagcagcaagagcaagagccacaggagccagaccaggagccgcagccgcagcagaagaagaagaagaagcagccgcagccgcagcaagagccggggcagaagatctgtgtccaaggagaagaggaagaggagccccaagcacaggagcaagagccgggagaggaagaggaagaggagcagcagccgggacaacaggaagacagtgcgggcccggagcaggacccccagcagaagaagccgcagccacacccccagcagaagaagaagaagccgctctgtgggcagaagaagaagcttcagcatcagccccagcagaagaagcaggacccccagccgccgcagcaggacccccagcagaagaagcaggacccccagccgccgcagcaggacccccagcagaagaagcaggacccccagccgccgcagcaggacccccagcagaagaagaagaagccgctctgtggtgagaagaagaagcttcagcatcagccctgtgcggctgcggcgcagcaggacccccctgcggcggcgcttcagccgcagccccatccggaggaagaggagccgcagcagcgagcggggccgcagccccaagaggctgacagacctggacaaggcccagctgctggagatcgccaaggccaatgctgctgccatgtgtgccaaggccggcgtgcccctgccccccaacctgaagccagcccccccacccaccatcgaggagaaggtggccaagaagtctggaggagccaccatcgaggagctgacagagaagtgcaagcagatcgcccagagcaaagaagatgatgatgtgattgtgaacaagccccacgtgtctgatgaggaggaggaggagccccccttctaccaccaccccttcaagctgtctgagcccaagcccatcttcttcaacctgaacattgctgctgccaagcccaccccacccaagagccaggtgaccctgaccaaggagttccctgtgagcagcggcagccagcacaggaagaaggaggccgacagcgtgtatggagagtgggtgcctgtggagaagaatggagaggagaacaaggatgatgacaacgtgttcagcagcaacctgcccagcgagggccgggtgaagaggcagggccgggtgcggcggcagatgaagcagcctgctgccagccacctgactgtgacccgctgcaacagcctgtgtggcaccaagccccagagcgagaagcacagaattgctgagaacagcgtcatcaccagcctgcccaacatcggccccagcctgcacctgtgggagggcagcccccgctacaactacctggccagcagatttgccagccggctgtacagcagccgcttctggtggtag

SEQ ID NO: 223252 - DNA, 7281 bp, Artificial Sequence
  derived and/or modified sequence
atggccaccaacatcgagcagatcttccgcagctttgtggtgtccaagttccgggagatccagcaggagctgagcagcggcagaaatgaaggccagctgaatggagagaccaacacccccatcgagggcaaccaggccggagatgctgctgccagcgcccggagcctgcccaatgaggagatcgtgcagaagattgaggaggtgctgagcggcgtgctggacacagagctgcgctacaagccagacctgaaggagggcagcaggaagagccgctgtgtgtctgtgcagacagaccccacagatgagatccccaccaagaagagcaagaagcacaagaagcacaagaacaagaagaagaagaagaagaaggagaaggagaagaagtacaagaggcagcctgaggagagcgagagcaagaccaagagccatgatgatggcaacatcgacctggagagtgacagcttcctgaagtttgacagcgagcccagcgctgtggccctggagctgcccacccgggccttcggccccagcgagaccaatgaatctccagctgtggtgctggagccccctgtggtgtccatggaggtgtctgagccccacatcctggagaccctgaagccagccaccaagacagctgagctgtctgtggtgtccaccagcgtcatcagcgagcagagcgagcagagcgtggccgtgatgcctgagcccagcatgaccaagatcctggacagctttgctgctgcccctgtgcccaccaccaccctggtgctgaagagcagcgagcctgtggtgaccatgtctgtggagtaccagatgaagtctgtgctgaagtctgtggagagcaccagccctgagcccagcaagatcatgctggtggagccccctgtggccaaggtgctggagcccagcgagaccctggtggtgagcagcgagacccccacagaggtgtacccagagcccagcaccagcaccaccatggacttccctgagagcagcgccatcgaggccctgcggctgcctgagcagcctgtggatgtgcccagcgagattgctgacagctccatgacccggccccaggagctgcctgagctgcccaagaccacagccctggagctgcaggagagctctgtggccagcgccatggagctgcccggccccccagccacctccatgcctgagctgcagggcccccctgtgacccctgtgctggagctgcccggccccagcgccacccctgtgcctgagctgcccggccccctgagcacccctgtgcctgagctgcccggccccccagccacagctgtgcctgagctgcccggccccagcgtgacccctgtgccccagctgagccaggagctgcccggcctgcctgcccccagcatgggcctggagcccccccaggaggtgcctgagccccctgtgatggcccaggagctgcccggcctgcccctggtgacagctgctgtggagctgcctgagcagcctgctgtgacagtggccatggagctgacagagcagcctgtgaccaccacagagctggagcagcctgtgggcatgaccaccgtggagcaccctggccaccctgaggtgaccacagccaccggcctgctgggccagcctgaggccaccatggtgctggagctgcccggccagcctgtggccaccacagccctggagctgcccggccagcccagcgtgactggagtgcctgagctgcccggcctgcccagcgccacccgggccctggagctgagcggccagcctgtggccactggagccctggagctgcccggccccctgatggctgctggggccctggagttcagcggccagagcggggctgctggggccctggagctgctgggccagcccctggccactggagtgctggagctgcccggccagcccggggcccctgagctgcccggccagcctgtggccaccgtggccctggagatctctgtgcagagcgtggtgaccaccagcgagctgagcaccatgacagtgtcccagagcctggaggtgcccagcaccacagccctggagagctacaacacagtggcccaggagctgcccaccaccctggtgggggagacctctgtgacagtgggcgtggaccccctgatggcccctgagagccacatcctggccagcaacaccatggagacccacatcctggccagcaacaccatggacagccagatgctggccagcaacaccatggacagccagatgctggccagcaacaccatggacagccagatgctggccagcagcaccatggacagccagatgctggccaccagctccatggacagccagatgctggccaccagctccatggacagccagatgctggccaccagcaccatggacagccagatgctggccaccagctccatggacagccagatgctggccaccagctccatggacagccagatgctggccaccagctccatggacagccagatgctggccaccagctccatggacagccagatgctggccaccagcaccatggacagccagatgctggccaccagcaccatggacagccagatgctggccaccagctccatggacagccagatgctggccagcggcaccatggacagccagatgctggccagcggcaccatggatgcccagatgctggccagcggcaccatggatgcccagatgctggccagcagcacccaggacagcgccatgctgggcagcaagagcccagacccctaccgcctggcccaggacccctaccgcctggcccaggacccctaccgcctgggccatgacccctaccgcctgggccatgatgcctaccgcctgggccaggacccctaccgcctgggccatgacccctaccgcctgaccccagacccctacaggatgagcccccggccctaccgcatcgcccccaggagctacagaattgccccccggccctaccgcctggccccccggcccctgatgctggccagccgccgctccatgatgatgtcctatgctgctgagaggtccatgatgagcagctatgaaagatccatgatgtcctatgaaagatccatgatgagccccatggccgagaggtccatgatgtctgcctatgaaagatccatgatgtctgcctatgaaagatccatgatgagccccatggccgagaggtccatgatgtctgcctatgaaagatccatgatgtctgcctatgaaagatccatgatgagccccatggctgaccgctccatgatgtccatgggcgctgaccgctccatgatgagcagctacagcgctgctgaccgctccatgatgagcagctacagcgctgctgaccgctccatgatgagcagctacacagctgaccgctccatgatgtccatggctgctgacagctacacagacagctacacagacacctacacagaggcctacatggtgccccccctgcccccagaggagccccccaccatgccacccctgcccccagaggagccccccatgaccccacccctgcccccagaggagcccccagagggccctgccctgcccacagagcagagcgccctgacagctgagaacacctggcccacagaggtgcccagcagccccagcgaggagagcgtgtcccagcctgagccccctgtgtcccagagcgagatcagcgagcccagcgctgtgcccacagactacagcgtgtctgccagtgaccccagcgtgctggtgtctgaggccgctgtgacagtgcctgagcccccacctgagcctgagagcagcatcaccctgacccctgtggagagcgctgtggtggccgaggagcacgaggtggtgcctgagaggcctgtgacctgcatggtgtctgagaccccagccatgtctgctgagcccaccgtgctggccagcgagccccctgtgatgtctgaaacagctgagacctttgacagcatgagggccagcggccacgtggccagcgaggtgtccaccagcctgctggtgcctgctgtgaccacccctgtgctggccgagagcatcctggagcccccagccatggccgcccctgagagcagcgccatggctgtgctggagagcagcgctgtgacagtgctggagagcagcacagtgacagtgctggagagcagcacagtgacagtgctggagcccagcgtggtgacagtgcctgagccccctgtggtggccgagccagactatgtgaccatccctgtgcctgtggtgtctgccctggagcccagcgtgcctgtgctggagcctgctgtgtctgtgctgcagcccagcatgattgtgtctgagcccagcgtgtctgtgcaggagagcacagtgacagtgtctgagcctgctgtgacagtgtctgagcagacccaggtgatccccacagaggtggccatcgagagcacccccatgatcctggagagcagcatcatgagcagccacgtgatgaagggcatcaacctgagcagcggggaccagaacctggcccctgagatcggcatgcaggagatcgccctgcacagcggggaggagccccatgctgaggagcacctgaagggggacttctatgagagcgagcacggcatcaacatcgacctgaacatcaacaaccacctgattgccaaggagatggagcacaacacagtgtgtgccgccggcaccagccctgtgggggagattggagaggagaagatcctgcccaccagcgagaccaagcagaggacagtgctggacacctacccaggagtgtctgaggctgatgctggggagaccctgagcagcacaggcccctttgccctggagccagatgccaccggcaccagcaagggcatcgagttcaccacagccagcaccctgagcctggtgaacaagtatgatgtggacctgagcctgaccacccaggacacagaacatgacatggtgatcagcaccagccccagcggcggcagcgaggccgacatcgagggccccctgcctgccaaggacatccacctggacctgcccagcaacaacaacctggtgtccaaggacacagaggagcccctgcctgtgaaggagagtgaccagaccctggccgccctgctgagccccaaggagagcagcggcggggagaaggaggtgcccccaccacccaaggagaccctgcctgattctggcttcagcgccaacatcgaggacatcaatgaagctgacctggtgcggcccctgctgcccaaggacatggagcggctgaccagcctgcgggccggcatcgagggccccctgctggccagtgatgtgggccgggacagatctgctgccagccctgtggtgtcctccatgcctgagcgggccagcgagagcagcagcgaggagaaggatgattatgagatctttgtgaaggtgaaggacacccatgagaagagcaagaagaacaagaacagagacaagggggagaaggagaagaagagggacagcagcctgcggagccgcagcaagaggagcaagagcagcgagcacaagagcaggaagaggaccagcgagagccgcagccgggccaggaagaggagcagcaagagcaagagccacaggagccagaccaggagccgcagccgcagcagaagaagaagaagaagcagccgcagccgcagcaagagccggggcagaagatctgtgtccaaggagaagaggaagaggagccccaagcacaggagcaagagccgggagaggaagaggaagaggagcagcagccgggacaacaggaagacagtgcgggcccggagcaggacccccagcagaagaagccgcagccacacccccagcagaagaagaagaagccgctctgtgggcagaagaagaagcttcagcatcagccccagcagaagaagcaggacccccagccgccgcagcaggacccccagcagaagaagcaggacccccagccgccgcagcaggacccccagcagaagaagcaggacccccagccgccgcagcaggacccccagcagaagaagaagaagccgctctgtggtgagaagaagaagcttcagcatcagccctgtgcggctgcggcgcagcaggacccccctgcggcggcgcttcagccgcagccccatccggaggaagaggagccgcagcagcgagcggggccgcagccccaagaggctgacagacctggacaaggcccagctgctggagatcgccaaggccaatgctgctgccatgtgtgccaaggccggcgtgcccctgccccccaacctgaagccagcccccccacccaccatcgaggagaaggtggccaagaagtctggaggagccaccatcgaggagctgacagagaagtgcaagcagatcgcccagagcaaagaagatgatgatgtgattgtgaacaagccccacgtgtctgatgaggaggaggaggagccccccttctaccaccaccccttcaagctgtctgagcccaagcccatcttcttcaacctgaacattgctgctgccaagcccaccccacccaagagccaggtgaccctgaccaaggagttccctgtgagcagcggcagccagcacaggaagaaggaggccgacagcgtgtatggagagtgggtgcctgtggagaagaatggagaggagaacaaggatgatgacaacgtgttcagcagcaacctgcccagcgagcctgtggacatcagcacagccatgtctgagcgggccctggcccagaagaggctgtctgaaaatgcctttgacctggaggccatgtccatgctgaacagagcccaggagagaattgatgcctgggcccagctgaacagcatccctggccagttcaccggcagcactggagtgcaggtgctgacccaggagcagctggccaacacaggagcccaggcctggatcaagaaggaccagttcctgcgggccgcccctgtgactggaggcatgggcgctgtgctgatgaggaagatgggctggagggagggggagggcctgggcaagaacaaggagggcaacaaggagcccatcctggtggacttcaagacagacaggaagggcctggtggccgtgggggagcgggcccagaagaggagcggcaacttctctgctgccatgaaggacctgagcggcaagcaccctgtgtctgccctgatggagatctgcaacaagaggcgctggcagcccccagagttcctgctggtgcatgacagcggccctgaccacaggaagcacttcctgttccgggtgctgagaaatggagccctgacccggcccaactgcatgttcttcctgaaccgctactag

SEQ ID NO: 223253 - DNA, 6978 bp, Artificial Sequence
  derived and/or modified sequence
atggccaccaacatcgagcagatcttccggagcttcgtggtgagcaaattccgcgagatacagcaggaactgagctccggaagaaacgaagggcaactgaacggagagacaaacactcccatagaaggcaaccaggccggtgatgccgcagcgtctgctaggagcctgcccaacgaggaaattgttcagaagatcgaagaagttctgtcaggagtgctcgatacagaactccgctacaagccggatctgaaagagggctcccgcaagtctagatgtgtcagtgtgcagactgatccgactgacgaaatcccaacaaagaagtccaagaaacataaaaagcacaagaacaaaaaaaagaaaaagaagaaggaaaaggagaagaaatacaaaagacagccagaggaatccgaaagcaaaaccaaatcccatgacgacgggaacatagatttagagtcagactcattcttaaaattcgactcagagccatcagctgtcgccctggaactaccaacccgagcttttggccctagcgagaccaacgagagcccagccgtcgtgctagagccaccagtcgttagcatggaggtgtccgaaccacacattctggagaccctcaaacctgcgactaaaacagcagaattgtccgtcgtgtctacgtccgtgatctccgagcaaagcgagcagagcgtggccgtgatgcctgaaccgtctatgacgaagattctggactcttttgctgcagccccagttcccacaacaacgcttgtgctgaagagttcagaacccgtagtcactatgtctgtggagtatcagatgaagtctgttctgaaatccgtggagtcgacctccccggagccaagcaagattatgcttgttgaaccgcctgtggccaaggtcctcgagccaagcgaaactcttgttgtgtctagtgagacaccaaccgaggtgtacccagaaccaagtacatcaaccactatggacttcccagagagttcagccatagaggccttacggctgccagaacagccagtcgacgtcccttccgaaatagcagattcctccatgacaaggccccaggaactgccagaacttccaaaaaccaccgccctggaactccaggagtcatcagtggccagcgcaatggaactgccgggcccccctgcaacctctatgcctgagctgcagggtccacctgtgaccccagtactggagctgcctggaccatcagccacacccgtacccgagctccctggcccattgagcacccctgtgcctgagcttcctgggcctccagccacagcagttcccgagttacccgggcctagcgtgactccagtgccccagctgagtcaggagctaccgggactgcctgccccgagcatgggtctggagcccccgcaggaagttccggagccacccgttatggctcaagagcttccggggctgcctttggtcacagctgccgtcgagctgcctgagcaacctgccgtcactgtggctatggaactgacggagcagcccgtgacgacgacagagctggaacagccggttggcatgacaaccgtcgaacaccctggtcatccagaagtgactaccgccaccggcttactggggcaacccgaagccacgatggtactggagctcccaggacagccagtggcaacgactgccttagagctgccaggccagccttctgtgacaggcgtccctgagctgccaggcctgccttcagcaacgagggccctcgagctgagtggacagccggttgctactggcgcccttgagctcccagggcctctgatggcagcaggagcgctagaatttagtgggcagtccggcgctgccggcgctctggaactcttagggcagcctcttgcaacgggagtgctggagctgcctgggcagcccggggcccccgagctgccgggacagccagtggctacagtggcactcgagattagtgttcagtcggtcgttaccaccagcgagctgagcaccatgacagttagccaatcacttgaagtccctagcactaccgcactggaaagttacaacacagtggctcaggagttgcccaccacactggtgggcgagacctctgtgaccgtcggggtggatccactgatggcgcccgagagtcacatcctggcttctaatacaatggagacccacattttagccagtaacaccatggacagtcagatgctggcgtcaaacactatggactctcagatgctggcctctaataccatggactcccagatgctggcaagttcaactatggattcccaaatgctcgctacatcctcaatggattcccagatgttagccacatcctctatggattctcagatgctagctacatctacaatggactcacagatgctcgctacctccagcatggacagtcagatgttggctacatccagcatggatagtcagatgcttgccactagcagtatggattctcaaatgctggccacgtcaagtatggactcacagatgcttgctacatccactatggactcgcagatgctcgcaacttctaccatggactcacagatgctggccacctctagcatggactctcagatgcttgcttctggcaccatggacagccagatgctggccagcggaaccatggacgcacagatgctggcctcgggaaccatggatgcgcagatgttggcttcctctacccaggatagcgctatgctggggagtaagagtcccgacccgtacaggctggcccaggacccatatcggctggcccaagacccctacagacttggccatgatccgtaccgcctggggcacgacgcataccggttgggccaggacccatacagacttggacatgatccctaccggctgacccctgacccataccgcatgtcacccaggccatatcggattgcaccgaggtcctaccggatagccccccggccttaccgcttagcaccccgcccgttgatgctggccagcagaagaagtatgatgatgagctacgcagcggagcgctctatgatgtcctcttatgaaaggagcatgatgtcctacgaaagaagtatgatgagcccaatggctgaacgttccatgatgtccgcttacgagcgtagtatgatgtctgcgtacgagaggtctatgatgtcccccatggccgagcgatccatgatgagtgcctacgaacggagtatgatgagtgcctatgagcggtcaatgatgtcccctatggccgatagaagcatgatgtctatgggagctgacagaagtatgatgtcgtcatactctgctgccgataggtcaatgatgtctagctactcagccgccgacaggagcatgatgtccagctacaccgccgatcggtccatgatgtctatggcggcagacagctatacagacagttataccgatacctataccgaggcctatatggtaccaccactcccacccgaggagccacctactatgccacctctccctccagaggaaccgccaatgacgcccccactacccccagaagagcctcctgagggtccagctctccctactgagcaatcggcacttactgctgagaacacttggccgaccgaggttcccagctctccatcagaggaatctgtctctcaacccgagcccccagttagccagtcggagattagtgagccaagcgctgtgccaactgactacagcgtatctgcaagcgatccctccgtgctggtgtccgaagcagctgttacagtccctgaaccccccccagagccagagtcctctataacactgacgccagtggagtccgccgtagtagcagaggagcatgaggtagtacccgagagacctgtgacttgtatggtttccgagaccccggccatgagcgcggagcccaccgtgttagcgtctgaaccccccgttatgtcagaaacagctgagactttcgattccatgagggcttctggccacgtggcatcagaggtgtcaactagtctcctggtgccagccgtcactactcccgtactggcagaaagtattctagaacccccagccatggcggcccccgagagttccgccatggctgtactggagtcttctgctgtgactgtgcttgaatccagcaccgtgactgtgctcgagtcgagcaccgttaccgtacttgagccctcagtggtaaccgttcccgagccaccagtggtggcagaaccagactatgttacaatcccagttccggtagtgagtgcactagaacccagtgtcccagtgttagaaccggcggttagcgtattacaaccttctatgatcgtgtcagagccttctgtaagcgttcaggaaagcacagttacagtgagcgagccagctgttacggtttctgagcaaacccaggtgatcccaacagaagtcgctatcgaatcgactccaatgatccttgagtcttctatcatgtcgtctcacgtgatgaaagggataaatctgagcagtggggaccagaatctggcaccggagatcggcatgcaggaaatagctcttcattccggggaagaaccccacgctgaagagcacctgaaaggcgacttctatgagtctgagcacggcatcaacatagacctgaacatcaacaaccacttaatcgctaaggagatggaacacaacactgtctgtgccgccggaacatcgcccgtcggagaaatcggagaggaaaaaatcctgccaacgagcgagacaaagcagcgtaccgtgctggatacctatccaggggttagcgaagcagacgcaggcgagactctttcatccaccggcccgtttgcccttgaaccagacgccactggaacttctaaagggatcgaattcacaacagcctctacactgagcctcgtgaataaatacgacgtagatctgtctctaacaacccaagacactgaacacgatatggtcatctcgaccagcccctccggcggctcggaggcagacatcgaaggccctctcccggctaaggacatacatttagatctgccgtctaataacaatctggtcagcaaagacactgaggaaccgcttcctgtcaaagagtctgatcaaaccttggctgcactgctgtccccaaaggaaagctcagggggcgagaaggaggtccccccacctcctaaagagaccctaccagatagcggtttttccgccaatatcgaggatataaacgaggctgatctggtcaggcccctcctccccaaggatatggaaagattgacatccctccgcgccggaattgagggccctttgcttgcatccgacgtgggacgggaccgatcggccgcaagccccgtggtgagctccatgccggagagggccagcgaatcatcctctgaagagaaggacgattatgaaatcttcgtcaaagtaaaggacacgcatgaaaagtcaaaaaagaataaaaacagagataagggcgagaaagagaagaaacgagactccagtctgcgttctagatcgaagagaagtaagtcttctgagcacaaatccagaaagaggacgtcggaaagcagaagtcgcgcacgcaaaagaagctccaagagcaaaagtcatcggtctcagacccgtagtagaagcaggagccggagacgtaggcgctccagcaggtcacggtccaagtctcgcggccggagatcagtgtcgaaggaaaagagaaaacggagtcccaagcatcgttcaaaaagccgcgagagaaagcggaagcggtcttcatcgagggataatcgaaaaaccgtcagagcgcggtcccgcactccatcacgcagatcacggagccataccccctccagaagaagacgttcacgatctgttgggaggcgccgatccttcagcatctcacctagccgaaggtcccgcacacctagtcggcgctcccgtactccttctcgtaggtctcgcacaccctctcgccggagtaggactccctcccggcgctctagaacacctagcagacgtagcaggacaccatccagacgccgacgctcgagaagcgtggttcggagacgatcattctccatttcccccgttaggttacgtcgcagccgcactcccttgcgccgcagattctcaaggtcgcctatacggagaaagagatcgaggagcagcgaacgggggagatccccaaaacgtcttactgacctggacaaggctcagcttctggaaatcgcgaaggctaacgctgctgccatgtgcgctaaggctggtgtccctcttccccctaacctcaagccagctccaccacctactatcgaagaaaaagtcgctaagaagtcagggggagccacaatcgaggaattaactgagaagtgtaagcaaatagctcaatccaaggaagacgacgatgtaatcgtgaataaacctcatgtttccgatgaggaagaggaagagccccctttttaccaccatcccttcaaactcagcgagcccaagcccatatttttcaatctgaatattgccgccgccaagccaactcccccaaaaagccaggttaccctgaccaaggagttcccggtgagctccggcagtcaacaccgcaaaaaggaagccgactctgtgtacggggaatgggtcccggtagagaagaacggggaagaaaataaagacgacgacaatgttttcagtagcaacctgccatctgaacctgtcgatatttcgacagcaatgagcgagcgtgcactcgcccagaaaaggcttagcgagaacgcctttgacctggaggctatgtctatgctgaatcgcgcccaggaacgcatcgatgcatgggctcagttaaatagtatccctggccagttcactggcagtacaggcgtgcaagtgcttactcaggaacagctcgcaaacacaggggctcaagcctggattaagaaagggcagatattggtggccgtgttcctgcctcggtccgtgcccgctgtgctgtttacaaccctgttactccctcggcccaggatatcctcatag

SEQ ID NO: 223254 - DNA, 6912 bp, Artificial Sequence
  derived and/or modified sequence
atggccaccaacatcgagcagatcttccggagcttcgtggtgagcaagtttcgggaaattcagcaggagctctccagcggaaggaacgagggacagctaaacggcgaaactaatacccctatcgagggcaaccaggctggtgacgcagcagcaagtgcaagatcacttccgaatgaggaaatcgtgcagaagatcgaagaggtattgtctggggttcttgacaccgaactgcgctataaacccgacttgaaagaaggcagccgcaagtcccgctgtgtgtccgtgcaaacagaccccactgatgaaatccccaccaagaaatctaagaagcacaagaagcataaaaacaagaagaaaaagaagaagaaggagaaagagaagaaatataagcgacaacccgaggagtcagagtctaagacaaagtctcacgacgatggtaacatcgatttggagagtgactcatttttaaagtttgactccgaacccagcgccgtggcactcgaacttccgactagggcctttggcccttcagaaaccaatgaaagccctgccgtggtgctggagccccctgtcgtcagtatggaggtgtccgagcctcatatcctagagaccctgaagcccgcgacaaagacagccgagctctctgtcgtcagcaccagcgtgatatctgagcagagtgagcagtctgttgccgtgatgccggaaccatcaatgaccaagatactggactcgtttgccgccgcgccagtgcccaccactaccttggtccttaaatcgagcgagcctgtggtaactatgtcggtggagtatcagatgaaatctgtgctgaaatccgtagaatctacttctccagagcctagcaagataatgttggtggaaccccccgtcgccaaagttttggaaccctccgaaactctggtggtgtcaagtgagactcctacagaggtttatcctgagccatctacatccaccaccatggacttcccagaatcaagtgctatcgaagctctgaggttgccagagcagccagtggacgtgccttctgagatcgcggacagtagcatgaccaggcctcaagagctgccagaacttcccaagaccactgcgcttgagttgcaggagtccagtgtggctagtgctatggagcttcctggccctccagctacttcaatgccggaactgcagggaccacctgtgaccccggtgcttgagttgcctgggccctcggctactccagtgcctgagttgccgggccccctgtcaacccccgtgcccgaactgccggggcccccagccaccgcagtcccagaactgcccgggcccagcgtaacccccgtgccgcaactgtcccaagagttgcccggcctccccgcaccatcaatgggactggaaccaccacaggaagtgccagaaccaccagttatggcacaggagttgccggggctgcctctcgtcacagcagccgtggagctgccagagcagcccgccgttacagttgcaatggagctgaccgaacaacctgtcaccacgaccgaactagaacagccagtaggaatgacaaccgttgaacatcccggccaccccgaagtcaccaccgccacgggcctgttgggccagccagaggccaccatggtgctggagctccctggccagccagttgcaactaccgcccttgaactacccggacagccgagcgtgacaggagtgccagagcttcccggcttgccgtcagcgacccgcgccttagagctgtcagggcagcccgtagccacaggcgctctcgaactgcccggccctctgatggccgcgggggccctcgaatttagcgggcagtccggggccgccggcgccctcgaactgttgggacaaccacttgctaccggcgtcctagaactcccaggacagcctggagccccagagctgcctgggcagccagtggcaactgtggctctggagatttccgtgcagtccgtggtgacaacatccgaactctcgacaatgacagtgtctcaatctctggaggtgccatccacaactgctctggaatcttacaacactgtggcacaggagctgcctaccactctggtgggagagaccagcgtcacagttggcgtcgatcctctaatggcccccgaaagccacattctggccagcaataccatggaaacccacatccttgcttccaacacgatggacagtcagatgcttgcttctaataccatggatagccagatgctcgccagcaataccatggattcacaaatgctcgcctctagtaccatggattcgcagatgctggcgacgagttctatggattcccagatgctcgccacctcatcaatggattcacagatgctggccaccagcaccatggatagtcagatgcttgcaacctcttccatggatagccagatgctggcgacctcatcgatggattcacagatgctagctacttcttccatggacagtcaaatgctggcaacatcttccatggacagccagatgctggccacatccaccatggactctcagatgctggccacatccactatggattcacaaatgcttgcaacatcgtctatggacagtcaaatgctcgcctctgggaccatggactcacagatgctggcttcagggacgatggatgcacagatgctggcctcagggactatggatgctcagatgttggcctcctccacacaagactcagctatgcttggatctaagtctccggatccttaccgacttgcacaagacccctaccgcttggcccaggacccttatcgcctaggacacgatccctaccgccttggccatgatgcctacaggctggggcaggatccttatcggctgggtcatgatccataccggttaacgcccgatccatacagaatgagccctagaccctatcggatcgctccacgatcttaccggatcgctcctagaccttaccggcttgctccgcgcccacttatgctggcctctaggcgttctatgatgatgtcctacgctgcagaaaggagtatgatgagcagctacgaacggagcatgatgtcttatgagcggagtatgatgagcccaatggccgaaagaagtatgatgtctgcatacgaaaggtcaatgatgtccgcttatgaacgatctatgatgtctccaatggcggaacgctcaatgatgtctgcttacgagaggagcatgatgtccgcatacgagcgctcaatgatgtcccccatggcagacaggtcgatgatgagcatgggagctgatcgcagtatgatgagttcatattcagctgccgataggtctatgatgagcagctacagcgccgccgaccgttcaatgatgagctcatatactgctgatcgtagtatgatgagcatggccgccgattcatacaccgacagctacacggacacctacactgaggcgtatatggtgcccccattgccaccagaagagcctcccaccatgcccccgctgcctccggaagagccccccatgactcctcccctgccgcccgaagagccccccgaggggccagcgctccctacagaacaatcagctctaaccgctgaaaatacttggcctacagaagttccttcatcccccagtgaggagagtgtctctcagccggagcctccagtcagccagtctgaaatctctgagcctagcgccgtgccgacagattactcagtcagtgcctcagatccctccgtgctcgtgagcgaggccgccgtgaccgtaccggaacccccacctgagccagaatcttctatcacactcacccctgtggagagcgccgtcgtggctgaagagcacgaagttgttcctgagcggcctgtgacttgtatggtatcagagacaccagccatgagcgccgagccaaccgtgctggcctccgagcctcccgtgatgtccgagacagccgaaaccttcgactccatgcgcgccagcggccacgttgcttccgaggtatccaccagcttactggtccccgcagtgacaaccccggtcttggcggagagtatccttgaaccgcctgctatggccgcccccgagtcctctgccatggcagtgttggagagctctgctgttacagtacttgaaagcagtacagttacagttctggagagttcgaccgtcaccgtgctggaaccaagcgtggttactgtgcccgagcctcctgtggtcgcagaacccgattacgtcaccattcccgtccccgtggtttctgctctggagccctctgtaccggttttagaaccagctgtgagcgtgctgcagccctctatgatcgtgagcgaaccaagcgtttctgtgcaggaaagcacagtgaccgtttcagagcccgccgtgaccgtaagtgaacagacccaggttatccccactgaagttgcaattgagtccactcctatgattctggagtcctctatcatgagctcccatgtcatgaagggcataaatctgagttcaggggatcagaatctagctcctgaaatcggtatgcaggagattgctttgcactccggtgaggagccacacgccgaggagcacctaaagggagacttctacgagagcgagcatggcattaatatcgacttgaacattaacaaccacctgatcgctaaagagatggaacataatacggtttgtgctgcgggcacttcaccagttggggagatcggtgaagagaagatattgcctacctccgagacaaagcagagaacagtgctagacacttaccccggggtgtccgaagctgacgccggcgagacccttagtagtaccggtccatttgctcttgagcccgatgccaccggcacatctaaaggtatagagtttaccacggcttctaccctgtccctcgtcaacaaatatgacgtggacctctcactcaccacccaagatacggagcatgatatggtcatctccacctctccctccggcggcagcgaggccgatatcgagggacccctccccgccaaggacatccacctcgacctcccatctaataataacctggtgagtaaggataccgaagaaccactcccagtgaaggaaagcgaccagaccctcgccgcactgctgagtcctaaggagagtagtgggggtgaaaaagaagtccctcccccaccgaaagaaacactgccagactctggtttttctgccaatatcgaggatataaatgaggccgacctggtgagaccattactacccaaggacatggagcgcctgacaagcttgcgagcagggatcgagggaccactgctagcctctgacgtgggccgcgatcgctcagctgccagtcctgttgtcagttcaatgccagaacgggctagcgagtcatccagcgaagagaaggacgattacgaaatctttgtcaaggtgaaggatacacacgaaaagtctaaaaaaaacaaaaatcgggacaagggtgagaaggagaaaaagagggatagcagtctgaggagccgttctaaaagaagtaaatccagtgaacacaaaagccgtaagaggaccagcgaatcacgaagccgtgcccgcaagagatcctctaaaagtaagagtcatagaagccagacacgtagcaggtccagaagtaggcgacgcagacgctcatcacgttcacgatccaagagtagaggacggaggagtgtatccaaggaaaaacggaagcgtagtccaaagcaccgaagtaaaagccgcgaacgcaagagaaagcggtcatcgagtcgcgataacagaaagactgtgagagctcgctctagaaccccctcacggagaagcaggtcacacaccccctcacgccgtagacgaagccgctctgtgggacgaagacgtagcttctctatcagccccagcaggcgttcgcgcacccccagccggaggagccgcacaccctcccggcggtctagaacaccctcgaggagaagtaggaccccatcccgccgctcacgaacgccatctcgacggtctaggacgcccagtaggaggcggaggagcagatctgtcgtgagacggcggtcgttttccatttctcccgttaggttgaggaggagccgcactcctttacgtcggaggttttcccgctctccaattcggcggaaacgaagccggagcagcgagcggggaaggtcccctaaacggctgacagacctcgacaaggcccagctgctggagattgcaaaagccaacgccgctgccatgtgcgctaaggccggcgtgccactgcccccgaacctgaagcctgctccgccccccaccattgaggaaaaggtagccaagaaatccggcggcgccaccatcgaggaattaactgagaaatgtaaacagatcgcccagtcaaaggaggatgacgacgtcattgtgaataagccacacgtgtcagatgaagaggaagaggagccgcccttctatcaccatcctttcaaactaagcgagccgaaaccaatcttcttcaacctgaacattgctgctgccaaaccaacccctcccaagtcccaggtcacactcacaaaggagttccccgtgtcttcgggctcacagcaccgcaagaaggaggcggattctgtgtatggtgaatgggtgcctgtcgagaaaaacggggaggagaataaggatgacgacaacgttttcagttcaaacctgcctagcgaggggcgcgtcaaaagacaggggagggtgagacgccagatgaagcagcccgcagcgtctcatttgaccgtaacccgatgcaattccctgtgcggcacaaagccacagagcgagaaacaccgcatagccgagaacagtgtcataacatccctcccaaatattggaccgagtctgcatttatgggaagggagtcccaggtacaattatctcgcttccagatttgcctccagactgtactcatctaggttctggtggtag

SEQ ID NO: 223255 - DNA, 7281 bp, Artificial Sequence
  derived and/or modified sequence
atggccaccaacatcgagcagatcttccggagcttcgtggtgagcaaattccgggagattcagcaggaactcagcagcggacgaaatgaaggccaactgaatggagaaaccaatactcctatcgaggggaaccaagcaggggatgccgccgcttccgctagatctctgcctaacgaggaaatcgtacaaaagatcgaagaagtactatctggtgtgttagacacagagctaaggtataaacctgacctcaaagagggtagcaggaaaagcagatgtgtttccgtacaaactgaccctaccgacgagatacccactaagaaatccaaaaagcacaaaaagcataagaataaaaaaaaaaagaaaaaaaaagagaaagagaaaaagtataaaaggcagccggaagaaagcgagtccaagacgaaaagccacgatgacgggaacatcgatctcgaatctgattcctttctgaagtttgactcagaaccttccgcagttgccctggaattacccactagagcttttggcccatcggagacaaatgagagcccagctgttgtgctggaaccaccagtcgtgagcatggaggtgtcggagcctcacatccttgagaccctgaagcctgccaccaaaaccgctgaactctcagtcgtctctacttcggtgattagtgagcagtcagaacagtccgtggcagtcatgccagaaccttctatgactaaaatactggatagttttgccgccgctccagtccctacgacgaccctcgttctcaagagctccgagcccgtggtgaccatgagcgttgagtaccagatgaagtcagtgcttaagtctgtcgagagcacctcgcctgagccaagtaagattatgctagtcgagcccccggtggccaaggtattagagccttctgaaaccctcgtcgtgtctagtgagactccgaccgaggtgtatcctgagccttcgacctcgaccactatggattttcctgagagttccgccatcgaagcactgagactgcccgaacaacccgtggacgttccctccgaaattgctgactcaagcatgactcgtcctcaagagctcccagagctaccgaagacaaccgcccttgagctgcaggaatcatccgttgcttctgctatggaattaccgggcccaccggcgacctccatgcccgaacttcaggggccgcctgttacgcccgtgctcgaactccccgggccgtcagcgacaccagtaccggagctgccaggcccgctgtctactccggtgcccgagctccctggccccccagccactgcagttcccgagttaccgggtccgtcagtaacaccagtgccccaactctcacaggaacttcccgggcttcccgcccctagtatgggcttggagcctcctcaggaggtgcctgaaccccccgttatggcccaggaattgcccgggctgcccttggtaacagcggcagtggaactacccgaacagccagctgtaacggtagccatggagttgacagaacagccagtgacaactaccgaactggaacagcccgtgggaatgactacagtggagcatcctggccatcctgaggttactaccgcaaccggtctgctaggacagccagaggccaccatggtgctggagctccccggacagcccgtcgctacgactgcactggagcttcccgggcagccttcggtgaccggagttcctgagctaccaggcctgcccagcgcaacacgagccttagagctgtcagggcaacccgtcgcaacaggcgcactcgaactgcctggcccccttatggccgccggcgctctggaattctccggccagagtggggccgccggagcccttgagctgctcggccagcccctcgcaaccggcgtccttgagctgccaggtcagcctggcgcaccagaactgcctggtcaacccgtggctacagtggctctggagatctccgtgcagagtgtcgttactacctcagagctgtctacaatgaccgtttctcaatccctggaagtgcctagtaccactgccctggaatcttataacaccgtcgcacaggaactccccactacactggtgggggaaacttcagtcaccgtaggagttgacccacttatggcccccgagtcccacattctcgcaagcaatacgatggagactcacatcctggcctccaatactatggatagccaaatgctcgcatccaataccatggactctcaaatgctggcctccaataccatggactcacagatgctagcaagcagtacaatggactcccagatgctggctacttccagtatggacagccagatgttggcaacctccagcatggactcccagatgttggcgacatctacaatggacagccagatgctagccacatccagcatggactcgcagatgcttgccacttcttccatggattcccagatgctcgccaccagtagtatggattctcagatgcttgccacttcgtcaatggacagccagatgctcgccacgtccaccatggacagtcagatgcttgccacctccactatggacagccagatgcttgccacaagtagtatggatagccaaatgctagcatccgggacaatggattcccagatgctggcctcagggacaatggatgcccaaatgttggcatccggcaccatggacgcccagatgttggcctcaagcacccaggatagtgctatgctggggtctaagtcccctgatccatacaggctggcacaagacccttatcggctggcccaagacccctataggcttggacatgacccgtatcgtctcggccacgatgcgtaccgcctaggccaggacccctaccgattagggcacgatccatacagactgacccccgacccctacagaatgagcccaaggccctaccggatcgctccacggtcatacaggatagcccctaggccctacagactggccccacgacccctgatgttagcatcacgcagatctatgatgatgtcctatgccgcagagagaagcatgatgagttcctacgagagatctatgatgagttatgagcgatctatgatgtctcccatggcagaaaggtcaatgatgtcagcctatgagcgctccatgatgtcggcctatgaaagatccatgatgagcccaatggccgagcggtcaatgatgagcgcctacgagagaagcatgatgagcgcctacgagaggagtatgatgagcccaatggcagatcgcagtatgatgtcgatgggagccgaccggtcaatgatgtcttcctactctgcggccgacagatccatgatgtcttcatactcagctgccgatcggtccatgatgagctcctacactgctgaccggagtatgatgtccatggcagcagattcgtatacggactcttataccgatacctatacggaagcatatatggttcccccacttccacctgaggaacctccgaccatgcccccattgcccccagaggagccaccaatgactccacccctgccacctgaagagccacctgagggcccagccctcccaaccgagcagagcgcgctgaccgctgaaaatacttggcccaccgaagtaccatcctctccatctgaggaatccgtgtcccagccagagcctcccgtgtcacaatcagaaatcagcgagccttcagccgtccccaccgattacagtgtgtcagcttcagacccctctgtcctggtgtcagaagcagctgtaacggtgccagagcccccacctgaacccgagagtagcattactctcactccagtggaatcagccgtcgtagccgaggagcacgaggtcgtgcctgagcggcccgtcacatgtatggtgagtgagacccccgcgatgagcgccgagcctacagtgctggccagcgagcctccagttatgtcagagacagcagaaaccttcgactctatgagggcttcaggccatgtggcgtcagaggtgtccacctcccttctggtaccagccgtcacaaccccagtgctagcagagagcattctagagccccccgccatggcggcacccgaaagcagtgcgatggctgtgttggagtcctccgcagttactgttctagagtcctctaccgtcaccgtgctggagagctcaactgtcaccgttctggagccctcagtggtgaccgttcctgaacctccggtggttgccgagcctgactacgtgacgatccccgtgcctgtggtgtccgcccttgagcctagcgttcctgtcctagagcctgccgtaagcgtgctgcagccttccatgatcgtatctgagccctcggtttccgttcaggaatccacagtgacggtttcagaaccggcagtcacagtgtccgaacagacacaggtaattcctaccgaggtcgccattgagagtacaccaatgattctggaatcgagtatcatgtcttcacacgtaatgaagggcatcaacctgtcatctggtgatcaaaatttagccccagaaattgggatgcaggagattgctctgcattcaggagaggagccacatgctgaagagcatctaaaaggcgacttttacgaaagtgaacatggcatcaacattgacctaaacataaacaaccatctgattgcgaaggagatggagcacaatacagtatgtgcagcagggacaagcccggttggtgagataggcgaagagaaaatcctgccaacatccgagaccaagcagaggaccgtgttggacacgtaccccggggtatcagaggctgacgcgggggagaccctgtcctccactggccccttcgcgctcgagcccgatgctactggaacatcaaagggcatcgaatttactacagccagtactctctcgctcgtgaataaatatgatgtggatctgtccttaaccacccaggatactgaacacgatatggtgatttccacatcgccttctggcgggagcgaagctgatatagaaggccctcttcctgccaaagatattcacttggacttgccgtccaataataatctggtcagcaaggacaccgaggagcctctcccagtcaaggagagtgatcagacactggcggccctgttgagtcctaaagagtcatccggcggggagaaggaagttcctccccccccaaaggaaacgttgcctgatagcggattctccgccaacatcgaagacattaatgaagcagatcttgttcgtcccttgttgccaaaagatatggagagactgacatcactacgcgccggaattgagggcccattgttggcctccgacgtcggccgcgataggtctgcagcatcgccagtggtcagctccatgccagaacgggccagcgagagttcctcagaagagaaagatgactacgagatctttgtgaaggtcaaagacacacacgagaagagcaagaaaaataagaatagggacaagggtgaaaaggaaaagaagagagattcttctttgcgatctcggagcaaaagaagcaaatcctcagagcataagagccgcaagcgaacttccgagtcaagaagtcgagcgcggaaaagaagctctaaatcaaagtcccatcgctcgcaaacacggagccgctcccgatccaggcggaggcgccgctctagccgcagcaggtcaaaaagtagaggtaggcgatccgtcagtaaggaaaaacggaagaggtcacccaagcatcgctctaaatccagagagaggaagcgcaaaagatcaagctcacgcgataacagaaagacagtgcgggctaggtccagaacacccagtcggcgctcccgtagccacacccccagccgcagacggcggtcacgatctgtgggcaggaggcggtccttttccatttcaccttcacgaaggtcaagaactccatcccggaggagccgcaccccgtccagacggagtagaaccccatcgcggcgtagtcgcaccccctcccgccggtcccgtaccccgagcagaaggtctagaaccccttctcggaggagaagatcacgttcagtcgtgcgacggcggtcattcagcatctcacctgtgaggctcaggagaagtcgaacccccctcaggcgtagattctctcggtcaccgattcggagaaagaggagtcgttcttcagaaagaggaagatctccaaagagattgacggacttagacaaagcacagctgctcgagatcgccaaagcgaacgcggctgctatgtgtgccaaggccggggtaccactccctccgaatctaaagcccgcaccgccaccgacaattgaggaaaaggtggctaaaaaatccggcggcgctacaattgaagaacttaccgagaagtgcaaacaaatcgctcaaagtaaggaggacgacgatgttattgtgaataaaccccacgtcagcgacgaggaggaagaggagccacccttttatcaccacccatttaaactcagtgagcctaaacccatctttttcaacctgaatatagcggctgcaaagcccacaccccctaaatcacaagtcactctgaccaaagagtttcccgtcagtagtggctcacagcaccgtaaaaaggaggcggactcagtatacggggaatgggtccccgtggagaagaacggcgaggaaaacaaagacgatgacaacgtgttttcttcgaatttgccaagcgaacccgtggacattagcacagccatgtccgagcgggctctggcccagaagagattgagcgagaatgccttcgatttggaggctatgtcaatgctgaacagagcacaagaaaggattgacgcttgggcgcagttgaacagcattcccggccaattcactgggtcaacaggcgtccaggtgttaacccaggaacagttggcgaataccggggcgcaggcatggatcaagaaggatcagttcttacgtgcagcccccgtgaccggcggcatgggcgccgtcctgatgcggaagatggggtggagggagggcgagggcctgggaaaaaacaaggaagggaacaaggaaccaattctcgttgacttcaaaacagaccgtaagggcctcgttgctgtgggagaacgagcacagaagagaagcggcaatttttcagctgctatgaaggaccttagtgggaagcatcctgtgagcgcattgatggagatctgcaataaaagacgctggcaacctcctgaatttcttctcgtgcacgacagcggtcccgatcatcggaaacattttctgttcagagtcctgagaaacggggccctgacacggcccaattgtatgttctttctgaaccggtattag

SEQ ID NO: 223256 - DNA, 6978 bp, Artificial Sequence
  derived and/or modified sequence
atggctacaaacatcgagcaaattttcagatccttcgttgtgtccaagttccgtgagatccagcaggagctttctagtgggaggaatgagggacaacttaatggcgagacaaacacacccattgagggaaaccaggctggcgatgctgcagcatcagctaggtccctgccaaatgaagaaatcgtgcagaagatagaagaagtgctgagcggcgttctggacactgagcttaggtacaagcccgacctcaaagagggcagcagaaagtcgagatgcgtctcggtgcagactgatcccaccgacgagatccccactaagaagagtaaaaagcacaagaagcacaaaaataagaagaagaagaagaaaaaggaaaaggaaaagaagtataagcgccaaccggaggaatctgagagcaagacaaagagccacgacgatgggaacatcgacctcgagtctgattcgttcctgaagtttgactcagaaccatctgctgtcgctctcgaacttccaacccgtgcgtttgggcctagcgaaactaacgagtcacctgctgtcgtgttggagcctcctgtagtttcaatggaagtgagcgaacctcatattctcgaaacattgaaacccgcaaccaaaacagccgaactgtccgtggtgagcacttcagtgataagtgaacaatcggagcaaagtgtggccgtcatgcctgagccctcaatgaccaaaatcctagacagttttgcggcagctcctgtgcctacaaccaccctcgtgctcaagtccagcgagccggttgtcaccatgagtgttgagtaccaaatgaagtcagtgctgaaatccgtggaatctacgagcccggagccctcaaagatcatgctggtggaaccgccagttgctaaagttctcgagccctctgagacactggttgtgtctagcgagaccccgacggaagtgtacccggagccatcgacttccactaccatggatttcccggagtccagcgctatcgaagcccttcgcctacctgagcagccagtggacgtgcctagcgagattgctgattcttcaatgacaagaccacaggagctgcccgaactgcctaaaaccacagcacttgagctgcaggaatcctccgttgcatctgctatggaacttccaggcccaccggctacatctatgcctgagctgcagggaccccctgtaacgccagttcttgagctccctggaccttctgccacaccggttcccgaactgccaggacccctcagcactccagtccccgaattgccaggccctcccgcaaccgccgtgcctgagttgcctggcccttcagtcaccccggtcccacagctgtcccaagaactccccggacttcctgctccttctatgggtttggagccccctcaggaggtccctgagcccccagtaatggcacaggagttaccaggactcccgctggtcacagccgctgtggagttacccgagcagcctgccgtgactgtagcaatggagctgaccgagcagcctgtgacaaccaccgaactggagcagcctgtaggaatgactaccgtggagcaccccggacacccggaggtgaccaccgcaacggggctgctgggacagcccgaggccaccatggtcctggagctgcccggtcagcctgtggcaacgactgccctggagctccctgggcagccctctgtaacaggcgtgcctgaattaccaggtctcccttcagcaacgagagcactggagctcagcgggcagccagtggcaactggggctctagaactccccggaccactgatggccgctggggctcttgaattcagcggtcagtcaggcgctgccggtgcacttgagctgctgggccagcccctggcgaccggcgtattggaattaccaggacagcctggagcccctgagttgccagggcagccggtagccaccgtggcactagagatttctgtccagtctgttgttactacgtccgaattatccaccatgacagtgagtcagtctttggaagtgccttcaacaactgccctggaatcttacaacaccgtggcacaggagttgccaactacactggttggagaaacgtccgtaactgttggggtcgaccctttgatggcaccagaaagccatatcctcgcttctaacaccatggagactcacattctggcttctaatactatggattcccagatgctggctagcaacacaatggatagccagatgctggcttctaatactatggacagtcagatgttggcatcttccacaatggatagtcagatgttggctacctcatcgatggacagtcagatgctggcaacaagctctatggattcccagatgctggccacctctacaatggattcgcagatgctggctacttcttcgatggattctcagatgttggctaccagctctatggatagtcagatgctagccacctcctctatggacagccagatgcttgccacatcgtccatggatagccaaatgcttgctacaagcacgatggactcacaaatgttggcgacctccaccatggactctcagatgctcgccacatctagcatggattctcaaatgctggccagtggcaccatggacagccagatgctggcctcagggactatggacgcgcagatgctggcatctggaactatggatgcccagatgctggcttcctccacccaggactcagccatgctgggctcaaagtcccctgacccctaccgcctagcccaggacccttacaggctggcgcaggatccatatcgtctgggccacgatccctatcggctgggtcatgatgcatatagactcggtcaagacccataccgactgggtcatgatccatacaggctgacacctgatccatacaggatgtcgcctaggccctatagaatcgcccctcgcagctacagaatcgcccctcgaccctatagactcgccccaagacctttaatgctggccagtcgacggtcaatgatgatgagttacgccgctgaacggtcaatgatgtcctcctacgaaaggtctatgatgagttacgaacgtagtatgatgtcccctatggctgaacgatcaatgatgtcggcttatgaacggagtatgatgtcagcatatgaacgatctatgatgtcacccatggccgagagatcaatgatgtccgcatacgaacgatccatgatgtctgcatatgagcggtcaatgatgtctcctatggcagataggtcgatgatgagcatgggtgcagacaggagcatgatgagttcctactcagccgcagatcgaagtatgatgtccagttattccgccgctgatcggtcgatgatgtcatcatatacagctgataggtctatgatgtctatggctgctgattcctacactgatagctataccgacacatatactgaggcatacatggtgcctcccctgcccccagaagagcctcctactatgcctccactgccccctgaagaacccccaatgacacctcctctgcctcccgaagagccacccgagggccctgcattgccgacagaacagagcgcactgactgcagagaacacctggccgacagaggtaccatctagtccttcagaagaatcggtcagtcagcctgagccccctgtaagtcagtctgaaatcagtgagccctccgcggtcccaaccgactactcggtttccgcgtcggacccctctgtcttggtgtcagaggcagccgtcaccgtccccgaaccgccaccggagccagaatcgtccatcacactcaccccagtggagtccgcggtcgtcgcggaggagcacgaagttgttcccgagaggcccgtgacctgcatggtgagcgagactcccgctatgtctgccgaacctaccgtgttggcaagcgagccccctgttatgagcgagaccgctgagaccttcgactctatgcgtgcttccggtcatgtggccagcgaggtatcaacatccctgctagttccagccgtaaccaccccagtgctggctgagtcaatcctggagccacccgctatggccgcacctgagtcaagtgccatggctgtcctggaatcttcagccgtgaccgttcttgagagttcaaccgtgacggttctggaaagctccacagtgacggtactagaaccttccgtggttacagtgcctgagccacctgtagtggccgagcccgactatgtaaccatccccgtgccggtggtttctgcactcgagccaagtgtgccggtcctggagccagctgtgtcagtcctgcaaccgtcaatgattgtatcagaaccctcggtgagcgtccaggaatctacagtgaccgtctccgaaccggctgtgaccgttagcgagcaaacacaagtcattccaaccgaagtagccattgaaagtacaccgatgattcttgaatccagtatcatgagttctcacgtaatgaagggaatcaaccttagcagtggggatcaaaacctggctcccgaaattggcatgcaggaaatcgcattgcattctggggaggagccccacgccgaagagcacctgaaaggtgacttctatgagagtgagcacggcatcaatattgaccttaatattaacaaccacctgatcgccaaagagatggagcacaacactgtgtgcgctgcagggactagcccagtcggggagataggagaggagaagatcctgccgactagcgaaaccaagcagagaaccgtcctggacacataccctggcgtgagcgaggccgatgctggggagaccctatcaagcaccggaccttttgcactggagccagatgccactggaacctcaaaggggatagagtttacaacagcttcaacgttatcccttgtgaacaagtatgacgtcgatttatcactaacaacccaggataccgagcatgacatggtcatatcaacaagtccctccggtggttccgaggcagatattgaaggtccgctccctgctaaggacatccacttggatctgccctccaacaataatctagtgtcgaaggacaccgaagaaccgttgcccgtgaaggaatcagaccaaaccttggctgctcttctcagccccaaagaaagcagtggtggggagaaagaggtccccccaccacctaaggagacactgccagattcaggattctctgccaacatagaggacatcaacgaggccgatctggtgagacccctgctgcctaaagatatggagcggctgacatcattaagggccggaatagaaggtccactcctggcatccgatgtgggtagggacagaagtgcggcatcccccgtcgtgtcctctatgcctgaacgcgcttcagaaagcagcagcgaggagaaggacgattatgagatctttgtgaaagtcaaggacacacacgagaaatcaaagaaaaataagaatcgcgacaaaggagagaaggaaaagaagagggacagctctctgaggagccgctccaagcggtctaaaagcagtgaacacaaatcaaggaagaggacgtcagaatctcgctcgcgcgctcgcaaaaggagtagtaagtctaagagtcataggagccagacccgcagccgatcaaggtctcggcgacgccgtcgtagctctagaagcaggtctaagtcaagggggaggaggagcgtgtctaaagaaaaacgtaagagatcacccaagcaccgatcgaagtcccgagagcggaagcgtaaacggtcctcatcaagagacaatcgcaagacggtgagggcgagatcacggacaccgagcagacggtcccgaagccataccccatctagacgccgtaggagcagaagcgtcggtagaagaagatctttctctatcagcccctcaagacgaagcagaaccccttctagaagaagccgtaccccatctcgccgttcacgtacaccatcgaggcggtcccgtactccgtccagacgttcccgcaccccttcaagacgttcccgcaccccatcaaggaggcggcgttcgagatcagtggtgaggcggagatcattcagcatatcaccggtccggctgcggagatcccggacgccattacgaagaagattctcacgctcaccaattcggaggaagcgatcccgaagcagcgagcggggacgcagtcccaagcgcctcaccgatcttgataaggctcagctacttgagatagccaaggcgaacgccgcagctatgtgtgccaaggcaggcgtgcccctccccccaaacctgaagccagcaccgccacccacaatcgaggagaaggtggccaagaagtctggcggagccacaatcgaagagctcactgagaagtgcaagcagatcgcacagtctaaagaggacgacgacgtcatcgtcaataagccccatgttagcgacgaggaggaggaggaacctcctttctaccaccatccttttaagctttccgaacccaaacccatctttttcaacctcaacatcgccgcagctaaacccactcctccaaagtcgcaggtcactttgactaaagaattccctgtttcctccgggtcccaacacagaaaaaaggaagccgacagcgtttacggcgaatgggtaccagtcgaaaagaacggggaggaaaacaaagacgatgacaatgtctttagctctaatttgccctccgagcctgttgatatttctaccgccatgagcgaacgcgcacttgcgcaaaagcggctgtctgaaaatgccttcgacctcgaagccatgtcaatgctgaacagagctcaggagcggatagatgcatgggcccagctcaactcgatccctgggcaattcactggtagtactggcgttcaggtcctgacacaggagcagctggctaatacgggtgcccaggcctggataaagaagggtcagatcctggtggcggtgtttttgcctcggagcgtccccgctgtactgtttacgaccctccttctccctaggccccgaatatccagttac

SEQ ID NO: 223257 - DNA, 6911 bp, Artificial Sequence
  derived and/or modified sequence
atggctactaacatcgagcagatatttaggtctttcgtagtgtccaaatttcgggagattcaacaggagctgtcgagcggtagaaatgagggccagctgaacggagagaccaacacgcctatcgaggggaaccaggccggagatgcagccgcatccgctagatcactcccaaatgaagaaatagtgcagaagattgaggaggtcctctcaggcgtgctggacacagaacttcggtataaaccagatttgaaggagggtagccggaagtcccggtgtgtctcagtgcagactgacccaactgacgagatccccactaaaaagtccaaaaagcataaaaagcacaaaaacaagaaaaagaagaagaaaaaggaaaaagaaaagaagtacaagagacagcccgaggagtccgaatccaaaaccaaatcccacgatgacggaaacattgatctggaaagtgattcgttcctgaagtttgatagcgaaccttcggcggtcgccctcgagttaccgacaagagcctttggtccatccgaaaccaacgagagtcccgcagtggttctggaaccccctgttgtatctatggaggttagtgagcctcatattctagagacattgaaaccagctacaaagacagcagagctgtccgtagtgtcgactagtgtgatcagcgagcaaagcgagcagtccgttgccgtgatgccggaaccttctatgacaaaaattctggatagcttcgcagcggcacctgtgccgaccaccacgctcgtcttaaaatcttctgaacccgtcgttaccatgtcagtcgaataccagatgaagtctgtgctgaaaagtgtggaatcgacatccccagagccatcaaaaatcatgctcgtagaaccccctgtggccaaggtgctggagccgagcgaaactcttgtggtctccagtgagacccctacagaagtttatccagagcccagcacctctaccaccatggacttccctgagtcctctgcgattgaagctcttcgactgcctgaacagcctgttgacgttcccagtgagatagctgattcatcgatgactcgaccccaagaacttcctgagctgcctaagacgactgcactggaacttcaggagtcatctgtggcctcagccatggaactgccagggcctcccgctacttcgatgcccgaattgcaagggcctcccgttacccccgtgttggaacttcctggcccttctgccaccccggtaccggagttgcctggtccactgagcacgcctgttcctgaattacctggacccccagccacagcagtgccggagcttcctggcccttctgtgactcccgtccctcaactctctcaggagctccccggacttcccgctcccagcatgggtctagagcctcctcaggaggtacccgaaccgccagtgatggcacaggagcttcccggactgcccttggtaaccgcggctgtagaactgcccgaacagcccgcagtgaccgtggccatggagctgacggagcagccagtgaccactaccgaactggagcagccggtcggtatgactacagtagagcacccagggcacccggaggtgaccacagctacaggactgctgggacagcctgaagcaaccatggtcttggagcttccagggcagcccgtagctaccacagcattggaattaccagggcagccttccgtgacgggagttcccgaactgcccggactgccgtctgccactagggcattggagctgtctggacaaccggtcgcgactggggctctcgagctaccgggtcccctgatggccgcaggagccctggagttttccggccagagcggcgctgccggtgcattggagctgctaggacaacccctcgccactggcgtcctggagcttccaggccagccaggcgctcctgagctgcctggccaacccgttgcaaccgtagctctggaaatctcagttcagagtgtggtcaccacctccgaattgtctactatgaccgttagtcagagcttggaggtccccagcacgaccgctttggagtcatataacaccgtcgcacaagaactgcccacaacgctcgtgggggagactagcgtgacagtgggggtcgatcctctgatggcccctgagagccatatcctcgcttcaaataccatggagactcatatccttgcttctaatactatggattctcagatgttggcttcaaacacaatggacagtcaaatgctcgcaagcaacacaatggacagccagatgctggctagctctaccatggactcccaaatgctggccacatcatccatggactcacagatgttagccacgtccagcatggactcccagatgctggctacgagcactatggactctcaaatgttagcaacctcctctatggatagtcagatgctggctacatctagcatggacagtcaaatgctggctacatccagcatggattctcagatgctggccaccagcagtatggactcacagatgctcgcaacctctacaatggatagccagatgttggcaacgtccactatggacagtcagatgcttgcgacaagtagcatggacagtcagatgttggcgagcggaacaatggatagccaaatgcttgcctccggcaccatggacgcccagatgttggcctcaggcacaatggatgcccagatgctggcttcatcaacccaggatagtgccatgcttggaagcaagtcgcccgacccctaccgcctggctcaagacccatacaggcttgcccaggacccatatcggctcggtcatgacccctatagactgggacacgacgcctacaggctaggccaggacccgtaccggttgggacatgacccttacaggctcacccctgatccctataggatgagcccacgcccataccggatcgctcccagaagctatagaatcgctccgagaccttacagattggctccacgcccactcatgctcgcatccagacggtccatgatgatgtcttacgccgcagagcggagcatgatgagctcatatgagcgcagcatgatgagctacgaaagaagcatgatgagccccatggccgagagatcgatgatgagcgcctatgagcgctcaatgatgtctgcgtacgagagatctatgatgtccccaatggctgagcgatctatgatgagcgcttatgagcgttctatgatgagtgcttatgagaggagcatgatgagccccatggccgacagaagtatgatgtctatgggggctgacaggtccatgatgtccagctactctgcagccgatcggagcatgatgagctcttactcagctgcagaccggagcatgatgtcgtcctacacagctgaccggagcatgatgagcatggctgccgatagttacaccgacagttataccgatacctatacagaagcctacatggtgcctccactgcccccagaagaaccgcctacaatgccgccactgcccccagaagagcctcccatgactcctccacttccccctgaggagccacctgaggggcctgcactgcctacagagcagtccgcattaactgccgaaaacacctggccaacggaagtgccatcatcgccctccgaagaatctgtctcacaacccgaaccacccgtttcacagtctgagatcagtgaaccatctgctgtgcccaccgactactccgtctcagcttccgacccctccgttcttgtgagcgaggccgctgtgactgttcctgagccaccacccgaacccgagagtagcatcactctcactcccgtcgaaagtgccgtagtggccgaggagcatgaggtcgtgcccgaaaggcccgtcacctgtatggtctctgaaacacctgcgatgtccgctgagccaaccgtgctggcttccgagcccccagtcatgtcagagaccgccgaaacctttgactcaatgcgagcctccggccatgtggcttccgaggtcagcacatctttactagtacccgcagtaacgaccccagttctagcggaaagcatacttgaaccgcctgccatggctgcacctgaatcatccgcgatggccgtgctcgagtcctctgcagtcactgtgctggaatctagtacagttacagtgctggaatcaagcacggtgacagttcttgaaccctcagtagtaactgtgccggagccaccagtggtggcggagcccgactacgtgacaattcccgttcccgtggtgagtgcccttgagccaagcgtccctgtactggagcccgcagtgtcagtcctccagccctccatgattgtgtcagaaccatccgtgtccgtgcaggagtctacagtcactgtgtccgaacccgcagtgacagtgtctgagcagacccaggtaatacccaccgaggtggcaattgaatccacacccatgattctggaaagcagcatcatgtcttctcacgtcatgaaagggattaacctttccagtggcgaccagaatctggccccagagatcggaatgcaggagattgccctgcacagcggcgaggaaccacacgcggaggagcacctcaagggggatttctacgaaagtgagcacggaataaacatagacctcaacatcaacaaccatttgatcgccaaggaaatggaacacaataccgtgtgtgccgctggtacatcaccagtaggggagattggcgaagagaagattctgccaaccagtgagacgaagcagaggacagtgttggatacatatcccggagtgtctgaggcagatgcaggtgagacactttcgtcaactggaccctttgccctggagcctgatgccaccgggacttcaaaaggcattgaatttaccaccgctagcacccttagtctggtaaataagtacgacgtcgatctgtctctcaccactcaagataccgagcacgatatggttattagcaccagtcctagcggtggaagtgaagcagacattgaaggccctttacccgctaaggacatccatttggacttgccatccaacaacaacctggtcagcaaggacacagaggaaccacttcccgtgaaagaatcagaccaaactctggctgcgctgctcagccctaaagagtcttccggtggggaaaaggaagttcccccacccccaaaggagacactccccgactcggggttctccgcaaacattgaagacattaacgaagctgatcttgtacgacctctgctccccaaggacatggagcgcctgaccagcttaagggctggaattgaggggcctctgctcgcatctgacgtaggccgagataggtccgcagcgtcccccgtcgtgagttctatgcccgaacgcgcaagtgagtccagctctgaggagaaggatgactatgaaatcttcgtgaaagttaaggatacacatgagaagtccaaaaagaacaaaaatagagacaagggggaaaaagaaaagaagcgggacagcagcttacggagccgcagcaagcggtccaaatctagcgagcataagtcacggaaacggacttcagaatctcgcagtagagcacgcaaaagaagctcaaaaagcaaatcccaccgctcacaaaccaggagcagatcccgaagcagaagaaggcgccgttccagtaggagtaggagcaagagccgtggtcgcaggtctgtgtccaaggaaaagaggaaacggtcaccaaagcatagaagcaaatcacgggagaggaaaaggaaacgctccagctctagggataatagaaagacagtgcgggctcgctcacgcacgccgtcaagaagaagtcgatcccacacaccgtcacgtaggcgccgttccagatctgtaggacgccgaagatccttcagcattagtcccagtcgaagatctaggaccccctctcggcgttcaagaactccaagccgccgaagccgcacaccctcacgcagatctagaactccttcccgtcggagcaggactccgagcaggaggtcgaggacgccaagtcgcaggcgacgcagtcgcagcgtggtcagacgaaggtcattcagcatcagtcccgtcaggcttaggagaagcaggacacctctccgaaggaggtttagcaggagccccattagaagaaaaagatcccggagtagcgagagagggagatctcctaagcggttgacagacctggataaggcacaattgctggaaatagccaaggctaatgcagccgctatgtgcgccaaggctggggtgcctttaccccctaatctaaaacccgctcctcccccaacaattgaagagaaagtagcgaaaaagagtggaggcgcaaccattgaagaattgacagagaaatgtaagcagattgcacagtcaaaggaagatgacgacgtaatcgtcaacaagcctcatgtgtctgacgaagaagaggaagaaccccctttttatcatcatccttttaagctgtctgagcccaagccaatctttttcaatttgaacatcgcagccgctaaaccgacacccccaaagtctcaggtgacgctcaccaaagagttccccgttagctccgggagccagcatcggaagaaggaggccgacagtgtgtacggagaatgggtgccggtggagaagaacggtgaagaaaataaagatgacgacaacgtttttagttctaacctaccaagcgaagggagagtgaaacgccaggggcgtgtgcggaggcagatgaagcagccagctgcctcccatttaactgtgacgcgctgtaattctctgtgtgggactaagcctcagagcgaaaagcaccggattgctgagaactccgtgatcacaagcttgcccaatatcggacccagtctgcacttatgggaagggtcaccaagatacaattaccttgcatctaggtttgcctcccgactgtattccagcagattctggtggta

SEQ ID NO: 223258 - DNA, 7280 bp, Artificial Sequence
  derived and/or modified sequence
atggcaacaaacattgagcagatttttcgttctttcgttgtgtccaagttccgggagatccagcaggaactgagcagcggacgaaatgaagggcagctgaatggggagacaaacacacccatcgagggaaaccaggcaggcgatgccgcagcatctgcacggtccttgcccaatgaagagatcgtgcaaaaaatcgaggaagtgctcagtggcgtcttggatacagaactcaggtacaagcccgacctgaaggaggggtccaggaagtcacgctgtgtatcggtacagaccgaccccaccgacgaaataccaaccaagaagagtaaaaagcataaaaaacacaaaaacaaaaaaaagaagaaaaaaaaggagaaggagaagaaatacaagcgacagcctgaggagagcgaaagcaaaaccaagagtcacgacgatggaaacattgatctcgagtccgactcattcctgaagtttgacagcgagccatccgccgtggccttggagctcccgacaagggcctttggaccatcggaaactaatgaatcccccgctgtagttctcgaaccgccagtggtctcaatggaggtgtcagagccccacattctggaaaccctgaagcccgcaaccaagacagccgagctgtccgttgtgtcgaccagtgtaatctccgaacaatcagagcagtccgtggcagttatgccggaacccagtatgacgaaaatcctggatagtttcgccgctgctccggtcccaaccaccactctagtattgaagtctagtgaacctgtggtcacaatgtcagtcgagtatcagatgaaatccgtcctgaaatccgtggaatcgacctctcccgagccctccaagatcatgctcgtcgagccccctgtggcaaaagtgctagagccttctgagacccttgtggtgagttccgagacccctactgaggtttatccagaacccagcacgtctacaaccatggattttcccgaatccagcgcaatcgaagcattaaggctccccgagcagcccgtagacgtaccaagcgagattgcagattctagtatgactagacctcaggaactgccagaactgcccaaaaccacagctctggagctccaagaaagttccgttgcgagcgccatggaattgccaggaccaccagcaacctccatgccagaactgcagggacctccagttactcccgtgctcgaactgcccggtccatccgctacccctgtgccagagttacccggaccgctgtctacccccgtccctgagctgcctggcccaccagctactgccgtcccagaactgcccggtcccagtgtcactcctgtcccgcagctgagccaggaattaccgggactcccagctccttccatgggacttgagccaccacaagaggtacccgaaccgcctgtgatggcccaggagctaccgggactcccgttggtcacagctgccgtagaattgcctgaacagccagctgtgacagtggccatggagttgacggagcagcccgtgacaacaacagaactggagcagcctgtagggatgaccacagtggaacatcctggacaccctgaggtgaccaccgcaaccggcctgctcggtcaaccagaggctaccatggtcctagaactccccggacaacccgttgcgactaccgccctcgaacttcctggccaaccctccgtcaccggcgtgccagagctacctggtctgcctagcgctacacgtgcgctcgagcttagtggccaaccagtcgcgaccggggctctagaactgccgggtcccctgatggctgcaggcgcactcgagttttctggccaaagtggggctgccggtgccttggaactgctgggtcagccattggccacgggtgtgctggagctaccgggacaaccaggcgctcctgagctgccaggccagccagtagcaaccgtggctctggaaattagcgtacaaagcgtggtgactactagcgagctaagcactatgacagtatcccagtctctggaagtgccgtcgaccactgccctggagtcctacaacacagtcgctcaggaactgcccaccaccctggttggagagacctccgtcacagtgggagtggaccccttaatggcacccgaatcccatatcctggcctccaacacaatggagactcatattctagcttcgaacacaatggattcacagatgctagcctcaaatactatggacagtcagatgctggcgagcaacactatggactcgcagatgctggctagctcgacgatggactcccagatgctcgcgacatcgagcatggatagtcaaatgttggcgacgagtagcatggacagccagatgcttgccacctctaccatggactcccagatgctggccaccagttccatggactctcagatgctggcaacttctagtatggactcccaaatgcttgccacctcttccatggattctcaaatgctggccacctcaagcatggatagtcagatgttagccaccagtacaatggattcccaaatgctcgctacttccacaatggactcccagatgttggctactagctccatggatagccaaatgctagcttccgggacaatggactctcaaatgttggcctcgggaacgatggacgctcagatgctggcgtctggaaccatggatgctcaaatgctggcaagctcaacacaagatagcgctatgctggggagcaaatcacctgatccttatagactcgcacaagatccttatcgtcttgctcaggacccgtaccgcctggggcacgacccttatcgcctggggcacgacgcgtatagactaggacaggacccttatagattaggtcacgatccctacagactgactcctgatccatatagaatgtcaccaaggccctaccgaattgcccctcgatcctaccgcattgccccaaggccctacagactcgcgccacgacctctgatgcttgcctcgagacgcagtatgatgatgtcctatgccgcagaacgcagtatgatgtcatcgtacgagcgatctatgatgtcatatgagcggagtatgatgagtcctatggcagagcggtccatgatgagcgcctatgagcgttctatgatgagcgcctacgagaggtcaatgatgtcaccaatggcagaacgaagcatgatgagcgcatatgagagatcgatgatgtctgcgtatgagagatcaatgatgagtccgatggcagaccgctccatgatgagcatgggcgctgaccgctctatgatgtcttcatacagcgctgcggatcgatccatgatgtcctcctattcagccgcagacagatccatgatgtcaagttatactgccgatcggtctatgatgagcatggccgcagattcgtatacagattcctatactgatacctatactgaggcctacatggtccctccactgcctcccgaagaaccccctaccatgcccccattgccccctgaagaacctcctatgaccccacccctccctcctgaggagccacctgagggaccagctctgcccacggagcagtctgcactcaccgctgagaacacctggcccactgaagttcccagctctcccagcgaggagtccgtttcacaaccagagcctccagtctcccagtcagaaatcagtgagccatcagctgtacccacagactacagcgtgtccgcgagcgatccaagtgtgctggtgagcgaggcggcagtgacagtgccagaacccccaccagagcctgagagctcaatcactctgacccctgtcgagtctgctgtggtggccgaggagcacgaggtggttcccgagcgaccagtaacctgtatggtcagcgagacacctgctatgtccgctgagcccactgtactggccagtgagcctcctgtcatgagtgaaacagccgagacattcgactcaatgcgggcatcggggcacgtcgcttccgaggtgagcacctctttgttggtgccagccgtcacaacaccagtgcttgcagagagtatccttgagccccctgcaatggccgctccagaatcgtccgcgatggcagtgctggaaagctccgcagtaactgttctggagtcttcgacggtgactgtgctcgaatcctcaacagtaactgtgctggaaccgtccgtggtgaccgtgcctgaacccccagtggtagctgaacccgattatgtgacaatcccagtgccagtcgtgtccgcgctggaaccctccgttcctgtgctcgaacccgctgtgagcgttctccaaccttctatgattgtgtccgagccaagcgttagtgtgcaggaatcaacggtcacggtcagcgagcctgcggtaactgtaagcgaacaaacccaggttattcctactgaagtcgcaatagagagcacacctatgatacttgagtcttctatcatgtcctcccacgttatgaaggggatcaatttgtcaagcggggaccagaatctggcaccagagattgggatgcaggagattgcactccactcaggcgaagaaccccacgcagaggagcacttgaagggcgacttctacgagagcgaacatggcataaatatcgatttgaatattaacaatcacttgatagccaaagaaatggaacacaacactgtgtgtgctgccggaacctctcccgtgggcgagatcggggaggagaagatcctgcctacctctgaaactaagcaacgcaccgtgctggacacttaccccggagtcagtgaggcggacgctggtgaaacactctcttccaccggtccgtttgcgctggaaccggatgcaactggtaccagtaaggggatagagttcacaaccgcaagcacactttctctggtgaacaaatatgacgtcgaccttagcttaacgacacaggacactgaacacgatatggttatatccacttcacccagcgggggatctgaggccgacattgagggacccctgcctgccaaggacatccacttagacttgccatctaataataacttagtaagtaaagacactgaggagcctctccccgtaaaagagtcagaccagacactggctgccctgctttcccccaaggagtccagtggtggtgagaaagaggtgcctccaccaccaaaggaaactttaccggactctggattcagtgccaacatcgaggatatcaatgaggcagacctggttcggcctctgctccccaaggatatggaacgactgacttcattgcgtgccggaatcgaaggacccctcttggcgtcggacgtgggtcgggatcgcagcgctgcgtcacccgtggtatcgtccatgcccgagagagcttcagagagctcttctgaagagaaggacgactacgagatattcgtaaaagtgaaggatactcacgagaagtccaagaaaaacaagaacagggacaaaggtgaaaaggagaaaaaaagggattcatctcttcggagccgaagtaagcgttccaagagctctgaacacaaatcccgtaagagaacctccgaatccagaagccgggctcggaagcgcagttctaaatcgaaatctcaccgatcccagacgaggtcaagaagccggagtagacgcagacgacggtcatctagatcacgcagcaagagccggggtcggcgttctgtctctaaagaaaagcgcaagcggtccccaaaacaccgcagcaaatcgagagagaggaagagaaagcgttcatccagcagagacaaccggaagacggtcagggccagatctaggaccccaagtaggcggagcagatcccacaccccttctcggagacggagatccagaagtgtgggacggaggcgatcattttctataagccccagcaggcggtctagaaccccctcgcggagatcacgaacgccatcaagaagaagccgcacccccagccggcgttccagaactccctccagaagatcccgcacgccctctcggagatcccgcaccccttccagacggaggcgatcgagaagcgtggtgaggcggaggtctttcagcatttcccccgtgagacttcgtcggagtagaacaccgttgagacgcagattcagccgttcccccattcgcagaaagagatcacgtagcagcgagcgcggacgcagccctaagaggctgactgacctagacaaagcccagcttctcgaaatcgcaaaggcaaatgccgctgctatgtgcgcgaaggcaggggtcccactgcctccaaacttgaaacccgcacctccgccaactatcgaggagaaggtcgctaaaaaatccgggggtgccaccattgaagaactcacagagaagtgcaagcagattgcacaatctaaggaagacgacgacgtcattgtgaacaagccccatgtctctgatgaggaagaggaggaaccacccttttaccaccacccgttcaaactgtctgaacctaaacctatcttcttcaacctcaatatcgccgctgccaagccaacccctcctaagtcacaggtcacactgactaaagagtttccagtgtcatctgggagtcagcaccgaaagaaggaggcagatagtgtgtacggcgagtgggtcccagtggagaaaaacggcgaggaaaataaagacgacgacaacgtgttctccagcaatcttccgtccgagcccgtagacatcagcacggcaatgtctgagcgagctctggcccagaaacggctatctgaaaatgctttcgatttagaagctatgagtatgctcaaccgcgctcaagaaaggattgacgcctgggcccagctgaattccataccaggccagtttactggatccaccggggtgcaggtcctgacccaagaacagctcgcaaatacaggagcacaggcttggatcaaaaaggatcagtttctgagagcggctcccgtgactggaggaatgggagccgtgctgatgcgcaagatgggctggcgagagggggagggccttggcaagaataaggaagggaataaagagcccatacttgtcgacttcaagactgatcgtaaaggcttagtcgctgtgggtgaaagggctcagaaacgcagcggtaacttcagcgctgcaatgaaagatctctcaggaaaacaccctgtaagcgccctcatggaaatttgcaataaaaggaggtggcaacccccagagtttcttcttgtgcacgacagcggcccagaccatcgcaagcatttcctgtttcgcgtccttaggaacggtgccctaacaaggcccaattgcatgttttttttgaaccgctacta

SEQ ID NO: 223259 - DNA, 8492 bp, Artificial Sequence
  derived and/or modified sequence
ggagcctggaggactagcgaggaggagttgagagaacggagcggacgccatggcgaccaacatcgagcagatttttaggtctttcgtggtcagtaaattccgggaaattcaacaggagctttccagtggaaggaatgaaggccagctgaatggtgaaacaaatacacccattgaaggaaaccaggcgggtgatgcagctgcctctgccaggagtctaccaaatgaagaaatagtgcagaagatagaggaagtactttctggggtcttagatacagaactacgatataagccagacttgaaagagggctccagaaaaagtagatgcgtatctgtacaaacagatcctactgatgaaattcccactaaaaagtcaaagaagcataaaaagcacaaaaacaaaaagaagaaaaagaagaaagaaaaggaaaaaaaatataaaagacagccagaagaatctgagtcaaagacgaaatctcatgatgatgggaacatagatttagaatctgattcctttttaaagtttgattctgaaccttcagctgtggcgctggagcttcctacaagagcatttggcccatctgagaccaatgaatcccctgcagttgtgctagaacctcctgtagtatcaatggaggtatcagagccacacatcttagaaactctgaagccagctacaaaaactgcagaactgtcagttgtatctacatcagtaatctcagagcagtcagagcagtctgtggcagtaatgccagaaccatccatgacaaagattctggattcctttgcagcagcaccagtgcctactacaacactggtgttgaagtcatctgagccagttgtaacaatgtcagtggagtatcagatgaagtctgtgctgaaatctgtggagagcacatctccagagccatcaaagatcatgttggtagagcccccagtagcaaaagtgttagagccttcagaaacccttgtggtatcatcagagacacctactgaggtgtaccctgagccaagcacatcaacaacaatggattttccagagtcatctgcaattgaagcgctaagattgccagagcagcctgtagacgtaccatcggagattgcagattcatccatgacaagaccgcaggagttgccggagctgcctaagaccacagcgttggagctgcaggagtcgtcggtggcctcagcgatggagttgccggggccacctgcgacctccatgccggagttgcaggggccccctgtgactccagtgctggagttacctgggccctctgctaccccggtgccagagttgccagggcccctttctaccccagtgcctgagttgccagggccccctgcgacagcagtgcctgagttgccagggccctctgtgacaccagtgccacagttgtcgcaggaattgccagggcttccagcaccatccatggggttggagccaccacaggaggtaccagagccacctgtgatggcacaggagttgccagggctgcctttggtgacagcagcagtagagttgccagagcagcctgcggtaacagtagcaatggagttgaccgaacaacctgtgacgacgacagagttggagcagcctgtggggatgacaacggtggaacatcctgggcatcctgaggtgacaacggcaacagggttgctggggcagcctgaggcaacgatggtgctggagttgccaggacagccagtggcaacgacagcgctggagttgccggggcagccttcggtgactggggtgccagagttgccagggctgccttcggcaactagggcactggagttgtcggggcagcctgtggcaactggggcactagagttgcctgggccgctcatggcagctggggcactggagttctcggggcagtctggggcagctggagcactggagcttttggggcagcctctggcaacaggggtgctggagttgccagggcagcctggggcgccagagttgcctgggcagcctgtggcaactgtggcgctggagatctctgttcagtctgtggtgacaacatcggagctgtcaacgatgaccgtgtcgcagtccctggaggtgccctcgacgacagcgctggaatcctataatacggtagcacaggagctgcctactacattagtgggggagacttctgtaacagtaggagtggatcccttgatggccccagaatcccatatattagcttctaacaccatggagacccatatattagcatccaacaccatggactcccaaatgctagcgtccaacaccatggactcccagatgctagcatccaacaccatggactcccagatgttagcgtctagcaccatggactcccagatgttagcaactagctccatggactcccagatgttagcaactagctccatggactcccagatgttagcaactagcactatggactcccagatgttagcaaccagttccatggactcccagatgttagcaaccagctccatggactcccagatgttagcaaccagctccatggactcccagatgttagcaaccagctccatggactcccagatgttagcaaccagcaccatggattctcagatgttagcaaccagcaccatggactcccagatgttagcaactagctcaatggattcccagatgttagcatctggcactatggactctcaaatgttagcttctggcaccatggatgctcagatgttagcgtctggtaccatggatgcccagatgttagcgtctagtacccaagattctgctatgttgggttcaaaatctcctgatccctataggttagctcaggatccttacaggttagctcaggatccctataggttgggccatgacccctatagattaggtcatgatgcttacaggttaggacaagacccttatagattaggccatgatccctacagactaactcctgatccctataggatgtcacctagaccctacaggatagcacccaggtcctatagaatagcacccaggccatataggttagcacctagacccctgatgttagcatctagacgttctatgatgatgtcctatgctgcagaacgttccatgatgtcatcttacgaacgctctatgatgtcttatgagcggtctatgatgtcccctatggctgaacgctctatgatgtcagcctacgagcgctctatgatgtcagcctacgagcgctctatgatgtcccctatggctgagcgctctatgatgtcagcttatgaacgctccatgatgtcagcttatgaacgctccatgatgtccccaatggctgatcgatctatgatgtccatgggtgctgaccggtctatgatgtcgtcatactctgctgctgaccggtctatgatgtcatcgtactctgcagctgaccgatctatgatgtcatcttatactgctgatcgttcaatgatgtctatggctgctgattcttacaccgattcttacactgacacatatacagaggcatatatggtgccacctttgcctcctgaagagcccccaacaatgccaccgttgccacctgaggagccaccaatgacaccaccattgcctcctgaggaaccaccagagggtccagcattgcccactgagcagtcagcattaacagctgaaaatacttggcctacagaggtgccatcatcaccatctgaagagtctgtatcgcagcctgagcctcctgtgagtcaaagtgagatttcggagccttcagcagtgcctactgattattcagtgtcagcatcagatccctcagttttagtatcagaggctgctgtgactgttccagaaccaccaccagagccagaatcttcaattacgttaacacctgtagagtctgcagtagtagcagaagaacatgaagttgttccagagagaccagtgacttgtatggtatctgaaactcccgccatgtcagctgaaccaactgtgttagcatcagagcctcctgttatgtcagagacagcagaaacatttgattccatgagagcctcaggacatgttgcctcagaagtatctacatccttgttggttccagcagtaactactccagtgctggcagagagcattctggagccgccagccatggctgccccagagtcttcagctatggctgtcctggagtcttcggctgtgaccgtcctggagtcttcgactgtgactgtcctggagtcttcgactgtaactgtcctggagccttcggttgtgactgtcccggagcctcctgttgtggctgagccagactatgttaccattcctgtgccagttgtttctgcgctggagccttctgtgcctgttctggaaccagcggtgtcagtccttcaaccttctatgattgtttcagaaccatctgtttctgtccaggaatcgactgtgacagtttcagagcctgctgtcacagtctcagagcagactcaagtaataccaactgaggtggctatagagtccacaccaatgatactggaatctagtatcatgtcatcacatgttatgaaaggaattaatctatcctctggtgatcaaaatcttgctccagagattggcatgcaggagattgcattgcattcaggtgaagaaccacatgctgaggaacacctgaaaggtgacttttacgaaagtgaacatggtataaatatagaccttaatataaataatcatttaattgctaaagagatggaacataatacagtgtgtgctgctggtactagtcctgttggggaaattggtgaagagaaaattttgcccaccagtgagactaaacagcgcacagtattggatacctaccctggtgttagtgaagctgatgcaggagaaactctatcttctactggtccttttgctctggaacctgatgcaacaggaactagtaagggtattgaatttaccacagcatctactctcagtttagttaataaatatgatgttgatttatctttaactactcaagatactgaacatgacatggtaatttccaccagtcctagtggtggtagtgaagctgacattgaagggcctttgcctgctaaagatattcatcttgatttaccatctaataataaccttgttagtaaggatacagaagaaccattacctgtaaaagagagtgaccagacattagcagctctgctcagccctaaagaaagtagtggaggagaaaaagaagtacctccccctcctaaagagacactgcctgattcaggattttctgccaatattgaggatattaatgaagcagatttagtgagaccgttacttcctaaggacatggaacgtcttacaagccttagagctggcattgaaggacctttacttgcaagtgatgttggacgtgacagatctgctgccagcccggttgtaagtagtatgccagaaagagcttcagagtcttcttcagaggaaaaagatgattatgaaatttttgtaaaagttaaggacactcacgaaaaaagcaagaaaaataagaaccgtgataagggggagaaagagaagaaaagagactcttcattaagatctcgaagtaagcgttccaaatcttctgaacacaaatcacgcaagcgtaccagtgaatctcgttctagggcaagaaagagatcatctaagtccaagtctcatcgctctcagacacgttcacggtcacgttcaagacgcaggaggagaagcagcagatcaagatcaaagtctagaggaagaagatctgtatcaaaagagaagcgcaaaagatctccaaagcacagatccaagtctagggaaagaaaaagaaaaagatcaagctccagggataaccgaaagacagttagagctcgaagtcgaaccccaagtcgtcggagtcggagtcatactccaagtcgtcgacgaaggtctagatctgtgggtagaagaaggagctttagcatttccccaagccgccgcagccgcacccccagccgccgcagccgcacccccagccgccgcagccgcacccccagccgccgcagccgcacccccagccgccggagccgcacccctagccgtcggagccgcaccccaagccgccggagaagatcaaggtctgtggtaagaagacgaagcttcagtatctcaccagtcagattaaggcgatcaagaacacccttaagaagaaggtttagcagatctcccatccgtcgtaaaagatccaggtcttctgaacgaggcagatcacccaaacgtctgacagatttggataaggctcaattacttgaaatagccaaagctaatgcagctgccatgtgtgctaaggctggtgtccctttaccaccaaacctaaagcctgcacctccacctactatagaagagaaagttgctaaaaagtcaggaggagctactatagaagaactaactgagaaatgtaaacagatcgcacagagtaaagaagatgatgatgtaatagtgaataaacctcatgtttcggatgaagaggaagaagaacctcctttttatcatcatccctttaaactcagtgaacccaaacctatttttttcaatctgaatattgctgcagcaaaaccaactccaccaaaaagccaggtaacattaacaaaagaattccctgtatcatctggatctcaacatcggaaaaaagaagcggatagtgtttatggagaatgggttcctgtggagaaaaatggtgaagaaaacaaagatgatgataatgttttcagcagcaatttgccctcagagcctgtggacatctctacagcaatgagtgaacgggcacttgctcagaaaagactcagtgagaatgcatttgatcttgaagccatgagcatgttaaatagagctcaggaaaggattgatgcctgggctcagctgaactctattcctggccagttcacaggaagtacaggagtacaggttttgacacaagaacagttggccaatactggtgcccaagcctggattaaaaagggccaaatccttgtagctgtcttcttgccccggtcagtgccagccgtactattcacaacactgctgctaccgaggcctaggatcagttcttaagagcagccccggtaactggaggaatgggagccgttttgatgagaaaaatgggctggagagaaggagaaggattaggaaaaaacaaagaaggcaataaggaacccatcctagttgattttaagacagaccgaaaaggtcttgttgcagtaggagaaagagcacaaaagaggtctgggaacttctctgctgcaatgaaagatctgtcaggcaaacatcctgtgtctgctttgatggagatctgtaataaaagaaggtggcaaccacctgaatttctattggtccatgatagtggccctgatcatcgcaaacattttctctttagggtattgagaaatggagcccttaccagacccaattgtatgtttttcttgaataggtattgataaatggaagcgcttaccagcccagctttgccagccctaataagaagcatgctaaagccacagcagctactgtggttcttcaagcaatgggccttgtaccaaaggacctcatggctaatgccacttgcttcaggagtgcctcacgtagatagattgaggttttataataatcatttcagaattttactctgcatcacaatgtatttcctctttaatgttgtaaatatttggcaatttaagacattgtgtaaaaagcaatctgtaaaaacatctccaggctttgatttttgtaccatggaaattgtatttaaccatacagggttttggtatgtttatattgtttaccttagtgatgtatttgtttaagtggctaacatccaaacgactgtttgaaggcatcagagtaatcttcagtgtggaatgttaaataacgcttttatactgtattttgtactatgatgtaactccccttccttatggctaggctactgtaacacttgcctgtaatcagtgaagggctgtgcaccttgtactatttcacaatgggttctgctggacagataatgggccagtgttattgaggtgatcaagatctgttccacagggctaatgccaccatctcccctcaaaattttgtagaggttctaaaaagaaagtggtatgttgtgtgatgatcagcactaagtcctgcattcctgttaaagccacttgggtcataagaagggagtaaaaaatgaagtctgactagaattctattgcagaggccagtacatttagtatggcattgagttgtgatatagttttactttgatgtgcattttgaatttcagctacacctagatagacgtaaaatgataattaaaatgctgtaaccaacttatctaataaaattggcaaccagccactattttgttgactatgagaaagttaaaagtttatgttaatttttagggtctgatagaatatttcatgtgtattacagtggtattcatatgctatgtctctaaactttattttcaaaagcttaaggcccaaatacaaacttctctggaataaacgtggtgttttattttctgggttat

SEQ ID NO: 223260 - DNA, 7477 bp, Artificial Sequence
  derived and/or modified sequence
ggaggagttgagagaacggagcggacgccatggcgaccaacatcgagcagatttttaggtctttcgtggtcagtaaattccgggaaattcaacaggagctttccagtggaaggaatgaaggccagctgaatggtgaaacaaatacacccattgaaggaaaccaggcgggtgatgcagctgcctctgccaggagtctaccaaatgaagaaatagtgcagaagatagaggaagtactttctggggtcttagatacagaactacgatataagccagacttgaaagagggctccagaaaaagtagatgcgtatctgtacaaacagatcctactgatgaaattcccactaaaaagtcaaagaagcataaaaagcacaaaaacaaaaagaagaaaaagaagaaagaaaaggaaaaaaaatataaaagacagccagaagaatctgagtcaaagacgaaatctcatgatgatgggaacatagatttagaatctgattcctttttaaagtttgattctgaaccttcagctgtggcgctggagcttcctacaagagcatttggcccatctgagaccaatgaatcccctgcagttgtgctagaacctcctgtagtatcaatggaggtatcagagccacacatcttagaaactctgaagccagctacaaaaactgcagaactgtcagttgtatctacatcagtaatctcagagcagtcagagcagtctgtggcagtaatgccagaaccatccatgacaaagattctggattcctttgcagcagcaccagtgcctactacaacactggtgttgaagtcatctgagccagttgtaacaatgtcagtggagtatcagatgaagtctgtgctgaaatctgtggagagcacatctccagagccatcaaagatcatgttggtagagcccccagtagcaaaagtgttagagccttcagaaacccttgtggtatcatcagagacacctactgaggtgtaccctgagccaagcacatcaacaacaatggattttccagagtcatctgcaattgaagcgctaagattgccagagcagcctgtagacgtaccatcggagattgcagattcatccatgacaagaccgcaggagttgccggagctgcctaagaccacagcgttggagctgcaggagtcgtcggtggcctcagcgatggagttgccggggccacctgcgacctccatgccggagttgcaggggccccctgtgactccagtgctggagttacctgggccctctgctaccccggtgccagagttgccagggcccctttctaccccagtgcctgagttgccagggccccctgcgacagcagtgcctgagttgccagggccctctgtgacaccagtgccacagttgtcgcaggaattgccagggcttccagcaccatccatggggttggagccaccacaggaggtaccagagccacctgtgatggcacaggagttgccagggctgcctttggtgacagcagcagtagagttgccagagcagcctgcggtaacagtagcaatggagttgaccgaacaacctgtgacgacgacagagttggagcagcctgtggggatgacaacggtggaacatcctgggcatcctgaggtgacaacggcaacagggttgctggggcagcctgaggcaacgatggtgctggagttgccaggacagccagtggcaacgacagcgctggagttgccggggcagccttcggtgactggggtgccagagttgccagggctgccttcggcaactagggcactggagttgtcggggcagcctgtggcaactggggcactagagttgcctgggccgctcatggcagctggggcactggagttctcggggcagtctggggcagctggagcactggagcttttggggcagcctctggcaacaggggtgctggagttgccagggcagcctggggcgccagagttgcctgggcagcctgtggcaactgtggcgctggagatctctgttcagtctgtggtgacaacatcggagctgtcaacgatgaccgtgtcgcagtccctggaggtgccctcgacgacagcgctggaatcctataatacggtagcacaggagctgcctactacattagtgggggagacttctgtaacagtaggagtggatcccttgatggccccagaatcccatatattagcttctaacaccatggagacccatatattagcatccaacaccatggactcccaaatgctagcgtccaacaccatggactcccagatgctagcatccaacaccatggactcccagatgttagcgtctagcaccatggactcccagatgttagcaactagctccatggactcccagatgttagcaactagctccatggactcccagatgttagcaactagcactatggactcccagatgttagcaaccagttccatggactcccagatgttagcaaccagctccatggactcccagatgttagcaaccagctccatggactcccagatgttagcaaccagctccatggactcccagatgttagcaaccagcaccatggattctcagatgttagcaaccagcaccatggactcccagatgttagcaactagctcaatggattcccagatgttagcatctggcactatggactctcaaatgttagcttctggcaccatggatgctcagatgttagcgtctggtaccatggatgcccagatgttagcgtctagtacccaagattctgctatgttgggttcaaaatctcctgatccctataggttagctcaggatccttacaggttagctcaggatccctataggttgggccatgacccctatagattaggtcatgatgcttacaggttaggacaagacccttatagattaggccatgatccctacagactaactcctgatccctataggatgtcacctagaccctacaggatagcacccaggtcctatagaatagcacccaggccatataggttagcacctagacccctgatgttagcatctagacgttctatgatgatgtcctatgctgcagaacgttccatgatgtcatcttacgaacgctctatgatgtcttatgagcggtctatgatgtcccctatggctgaacgctctatgatgtcagcctacgagcgctctatgatgtcagcctacgagcgctctatgatgtcccctatggctgagcgctctatgatgtcagcttatgaacgctccatgatgtcagcttatgaacgctccatgatgtccccaatggctgatcgatctatgatgtccatgggtgctgaccggtctatgatgtcgtcatactctgctgctgaccggtctatgatgtcatcgtactctgcagctgaccgatctatgatgtcatcttatactgctgatcgttcaatgatgtctatggctgctgattcttacaccgattcttacactgacacatatacagaggcatatatggtgccacctttgcctcctgaagagcccccaacaatgccaccgttgccacctgaggagccaccaatgacaccaccattgcctcctgaggaaccaccagagggtccagcattgcccactgagcagtcagcattaacagctgaaaatacttggcctacagaggtgccatcatcaccatctgaagagtctgtatcgcagcctgagcctcctgtgagtcaaagtgagatttcggagccttcagcagtgcctactgattattcagtgtcagcatcagatccctcagttttagtatcagaggctgctgtgactgttccagaaccaccaccagagccagaatcttcaattacgttaacacctgtagagtctgcagtagtagcagaagaacatgaagttgttccagagagaccagtgacttgtatggtatctgaaactcccgccatgtcagctgaaccaactgtgttagcatcagagcctcctgttatgtcagagacagcagaaacatttgattccatgagagcctcaggacatgttgcctcagaagtatctacatccttgttggttccagcagtaactactccagtgctggcagagagcattctggagccgccagccatggctgccccagagtcttcagctatggctgtcctggagtcttcggctgtgaccgtcctggagtcttcgactgtgactgtcctggagtcttcgactgtaactgtcctggagccttcggttgtgactgtcccggagcctcctgttgtggctgagccagactatgttaccattcctgtgccagttgtttctgcgctggagccttctgtgcctgttctggaaccagcggtgtcagtccttcaaccttctatgattgtttcagaaccatctgtttctgtccaggaatcgactgtgacagtttcagagcctgctgtcacagtctcagagcagactcaagtaataccaactgaggtggctatagagtccacaccaatgatactggaatctagtatcatgtcatcacatgttatgaaaggaattaatctatcctctggtgatcaaaatcttgctccagagattggcatgcaggagattgcattgcattcaggtgaagaaccacatgctgaggaacacctgaaaggtgacttttacgaaagtgaacatggtataaatatagaccttaatataaataatcatttaattgctaaagagatggaacataatacagtgtgtgctgctggtactagtcctgttggggaaattggtgaagagaaaattttgcccaccagtgagactaaacagcgcacagtattggatacctaccctggtgttagtgaagctgatgcaggagaaactctatcttctactggtccttttgctctggaacctgatgcaacaggaactagtaagggtattgaatttaccacagcatctactctcagtttagttaataaatatgatgttgatttatctttaactactcaagatactgaacatgacatggtaatttccaccagtcctagtggtggtagtgaagctgacattgaagggcctttgcctgctaaagatattcatcttgatttaccatctaataataaccttgttagtaaggatacagaagaaccattacctgtaaaagagagtgaccagacattagcagctctgctcagccctaaagaaagtagtggaggagaaaaagaagtacctccccctcctaaagagacactgcctgattcaggattttctgccaatattgaggatattaatgaagcagatttagtgagaccgttacttcctaaggacatggaacgtcttacaagccttagagctggcattgaaggacctttacttgcaagtgatgttggacgtgacagatctgctgccagcccggttgtaagtagtatgccagaaagagcttcagagtcttcttcagaggaaaaagatgattatgaaatttttgtaaaagttaaggacactcacgaaaaaagcaagaaaaataagaaccgtgataagggggagaaagagaagaaaagagactcttcattaagatctcgaagtaagcgttccaaatcttctgaacacaaatcacgcaagcgtaccagtgaatctcgttctagggcaagaaagagatcatctaagtccaagtctcatcgctctcagacacgttcacggtcacgttcaagacgcaggaggagaagcagcagatcaagatcaaagtctagaggaagaagatctgtatcaaaagagaagcgcaaaagatctccaaagcacagatccaagtctagggaaagaaaaagaaaaagatcaagctccagggataaccgaaagacagttagagctcgaagtcgaaccccaagtcgtcggagtcggagtcatactccaagtcgtcgacgaaggtctagatctgtgggtagaagaaggagctttagcatttccccaagccgccgcagccgcacccccagccgccgcagccgcacccccagccgccgcagccgcacccccagccgccgcagccgcacccccagccgccggagccgcacccctagccgtcggagccgcaccccaagccgccggagaagatcaaggtctgtggtaagaagacgaagcttcagtatctcaccagtcagattaaggcgatcaagaacacccttaagaagaaggtttagcagatctcccatccgtcgtaaaagatccaggtcttctgaacgaggcagatcacccaaacgtctgacagatttggataaggctcaattacttgaaatagccaaagctaatgcagctgccatgtgtgctaaggctggtgtccctttaccaccaaacctaaagcctgcacctccacctactatagaagagaaagttgctaaaaagtcaggaggagctactatagaagaactaactgagaaatgtaaacagatcgcacagagtaaagaagatgatgatgtaatagtgaataaacctcatgtttcggatgaagaggaagaagaacctcctttttatcatcatccctttaaactcagtgaacccaaacctatttttttcaatctgaatattgctgcagcaaaaccaactccaccaaaaagccaggtaacattaacaaaagaattccctgtatcatctggatctcaacatcggaaaaaagaagcggatagtgtttatggagaatgggttcctgtggagaaaaatggtgaagaaaacaaagatgatgataatgttttcagcagcaatttgccctcagagggccgggttaaacggcagggccgggttagacgacagatgaaacaacccgcagcttctcatttgacagtaactcgatgcaattcactttgtggaaccaagccacaaagtgaaaagcatcgaattgcagagaacagtgttatcacatccctacccaacattgggccctccctgcacttgtgggaaggtagtccaaggtacaactatttagcttcccgatttgcttcaaggctctatagctctagattttggtggtagcaaatttatcgggtggagggattgatcggagagggcagatcctcaggttcaacacaagaactggattggaaaaggtcattgtaggttgatgtgagcatcttgggtacatagcccattgcccttaatgatggtttcttactgtttctctgggttgtttgtcagatagcctttaattttaattatttttccttccctttgctaccttggcccttttaaattcttgtgtttaacctaatgctcagccttggtactccattcccttctccttcccctctttgctactattaaaagtcggagaagtggaattcaaacgttgaaatttccacggggctatagttgtatcttaataatgccaagtgtcaaaacaaccccattaaaatgccgcctgattaaataatgtgctgctaaatatagtgcacatgaaaacagcaagactgtatatatatgtaaatatatatatatatctgtatctttgtatgtatctctgtatctgtacctttgctgtatcttttaataaacagtttacttttatttaa

SEQ ID NO: 223261 - DNA, 8813 bp, Artificial Sequence
  derived and/or modified sequence
ctcccggatgcatatccctgtcgaaactgaacttggcgccacctgagagcgcctgaaagccgtgtgttaaacaccgggttgcccttcttgctcttcttcctcttcgcctttaatctcaggcacttagcaagcctgttaaggctcccaaacactgctggggactgacaacttatgcggacacggtcgcctcaagagagacggctcctgtaatggcgcctgcgtcagacactaacatggcggacatagtcgtgcgcggcgcaaacgtcagcacctctaccccagccgctcagaaacagcagaggagagcagggccgtgctcactgattggtccctcggtggagcgggccggaccgggcattccctttggagccaatcaggaaggcgagagaccgaattggcccgtgcgcctcctcccgaggcatgctgggagcctggaggactagcgaggaggagttgagagaacggagcggacgccatggcgaccaacatcgagcagatttttaggtctttcgtggtcagtaaattccgggaaattcaacaggagctttccagtggaaggaatgaaggccagctgaatggtgaaacaaatacacccattgaaggaaaccaggcgggtgatgcagctgcctctgccaggagtctaccaaatgaagaaatagtgcagaagatagaggaagtactttctggggtcttagatacagaactacgatataagccagacttgaaagagggctccagaaaaagtagatgcgtatctgtacaaacagatcctactgatgaaattcccactaaaaagtcaaagaagcataaaaagcacaaaaacaaaaagaagaaaaagaagaaagaaaaggaaaaaaaatataaaagacagccagaagaatctgagtcaaagacgaaatctcatgatgatgggaacatagatttagaatctgattcctttttaaagtttgattctgaaccttcagctgtggcgctggagcttcctacaagagcatttggcccatctgagaccaatgaatcccctgcagttgtgctagaacctcctgtagtatcaatggaggtatcagagccacacatcttagaaactctgaagccagctacaaaaactgcagaactgtcagttgtatctacatcagtaatctcagagcagtcagagcagtctgtggcagtaatgccagaaccatccatgacaaagattctggattcctttgcagcagcaccagtgcctactacaacactggtgttgaagtcatctgagccagttgtaacaatgtcagtggagtatcagatgaagtctgtgctgaaatctgtggagagcacatctccagagccatcaaagatcatgttggtagagcccccagtagcaaaagtgttagagccttcagaaacccttgtggtatcatcagagacacctactgaggtgtaccctgagccaagcacatcaacaacaatggattttccagagtcatctgcaattgaagcgctaagattgccagagcagcctgtagacgtaccatcggagattgcagattcatccatgacaagaccgcaggagttgccggagctgcctaagaccacagcgttggagctgcaggagtcgtcggtggcctcagcgatggagttgccggggccacctgcgacctccatgccggagttgcaggggccccctgtgactccagtgctggagttacctgggccctctgctaccccggtgccagagttgccagggcccctttctaccccagtgcctgagttgccagggccccctgcgacagcagtgcctgagttgccagggccctctgtgacaccagtgccacagttgtcgcaggaattgccagggcttccagcaccatccatggggttggagccaccacaggaggtaccagagccacctgtgatggcacaggagttgccagggctgcctttggtgacagcagcagtagagttgccagagcagcctgcggtaacagtagcaatggagttgaccgaacaacctgtgacgacgacagagttggagcagcctgtggggatgacaacggtggaacatcctgggcatcctgaggtgacaacggcaacagggttgctggggcagcctgaggcaacgatggtgctggagttgccaggacagccagtggcaacgacagcgctggagttgccggggcagccttcggtgactggggtgccagagttgccagggctgccttcggcaactagggcactggagttgtcggggcagcctgtggcaactggggcactagagttgcctgggccgctcatggcagctggggcactggagttctcggggcagtctggggcagctggagcactggagcttttggggcagcctctggcaacaggggtgctggagttgccagggcagcctggggcgccagagttgcctgggcagcctgtggcaactgtggcgctggagatctctgttcagtctgtggtgacaacatcggagctgtcaacgatgaccgtgtcgcagtccctggaggtgccctcgacgacagcgctggaatcctataatacggtagcacaggagctgcctactacattagtgggggagacttctgtaacagtaggagtggatcccttgatggccccagaatcccatatattagcttctaacaccatggagacccatatattagcatccaacaccatggactcccaaatgctagcgtccaacaccatggactcccagatgctagcatccaacaccatggactcccagatgttagcgtctagcaccatggactcccagatgttagcaactagctccatggactcccagatgttagcaactagctccatggactcccagatgttagcaactagcactatggactcccagatgttagcaaccagttccatggactcccagatgttagcaaccagctccatggactcccagatgttagcaaccagctccatggactcccagatgttagcaaccagctccatggactcccagatgttagcaaccagcaccatggattctcagatgttagcaaccagcaccatggactcccagatgttagcaactagctcaatggattcccagatgttagcatctggcactatggactctcaaatgttagcttctggcaccatggatgctcagatgttagcgtctggtaccatggatgcccagatgttagcgtctagtacccaagattctgctatgttgggttcaaaatctcctgatccctataggttagctcaggatccttacaggttagctcaggatccctataggttgggccatgacccctatagattaggtcatgatgcttacaggttaggacaagacccttatagattaggccatgatccctacagactaactcctgatccctataggatgtcacctagaccctacaggatagcacccaggtcctatagaatagcacccaggccatataggttagcacctagacccctgatgttagcatctagacgttctatgatgatgtcctatgctgcagaacgttccatgatgtcatcttacgaacgctctatgatgtcttatgagcggtctatgatgtcccctatggctgaacgctctatgatgtcagcctacgagcgctctatgatgtcagcctacgagcgctctatgatgtcccctatggctgagcgctctatgatgtcagcttatgaacgctccatgatgtcagcttatgaacgctccatgatgtccccaatggctgatcgatctatgatgtccatgggtgctgaccggtctatgatgtcgtcatactctgctgctgaccggtctatgatgtcatcgtactctgcagctgaccgatctatgatgtcatcttatactgctgatcgttcaatgatgtctatggctgctgattcttacaccgattcttacactgacacatatacagaggcatatatggtgccacctttgcctcctgaagagcccccaacaatgccaccgttgccacctgaggagccaccaatgacaccaccattgcctcctgaggaaccaccagagggtccagcattgcccactgagcagtcagcattaacagctgaaaatacttggcctacagaggtgccatcatcaccatctgaagagtctgtatcgcagcctgagcctcctgtgagtcaaagtgagatttcggagccttcagcagtgcctactgattattcagtgtcagcatcagatccctcagttttagtatcagaggctgctgtgactgttccagaaccaccaccagagccagaatcttcaattacgttaacacctgtagagtctgcagtagtagcagaagaacatgaagttgttccagagagaccagtgacttgtatggtatctgaaactcccgccatgtcagctgaaccaactgtgttagcatcagagcctcctgttatgtcagagacagcagaaacatttgattccatgagagcctcaggacatgttgcctcagaagtatctacatccttgttggttccagcagtaactactccagtgctggcagagagcattctggagccgccagccatggctgccccagagtcttcagctatggctgtcctggagtcttcggctgtgaccgtcctggagtcttcgactgtgactgtcctggagtcttcgactgtaactgtcctggagccttcggttgtgactgtcccggagcctcctgttgtggctgagccagactatgttaccattcctgtgccagttgtttctgcgctggagccttctgtgcctgttctggaaccagcggtgtcagtccttcaaccttctatgattgtttcagaaccatctgtttctgtccaggaatcgactgtgacagtttcagagcctgctgtcacagtctcagagcagactcaagtaataccaactgaggtggctatagagtccacaccaatgatactggaatctagtatcatgtcatcacatgttatgaaaggaattaatctatcctctggtgatcaaaatcttgctccagagattggcatgcaggagattgcattgcattcaggtgaagaaccacatgctgaggaacacctgaaaggtgacttttacgaaagtgaacatggtataaatatagaccttaatataaataatcatttaattgctaaagagatggaacataatacagtgtgtgctgctggtactagtcctgttggggaaattggtgaagagaaaattttgcccaccagtgagactaaacagcgcacagtattggatacctaccctggtgttagtgaagctgatgcaggagaaactctatcttctactggtccttttgctctggaacctgatgcaacaggaactagtaagggtattgaatttaccacagcatctactctcagtttagttaataaatatgatgttgatttatctttaactactcaagatactgaacatgacatggtaatttccaccagtcctagtggtggtagtgaagctgacattgaagggcctttgcctgctaaagatattcatcttgatttaccatctaataataaccttgttagtaaggatacagaagaaccattacctgtaaaagagagtgaccagacattagcagctctgctcagccctaaagaaagtagtggaggagaaaaagaagtacctccccctcctaaagagacactgcctgattcaggattttctgccaatattgaggatattaatgaagcagatttagtgagaccgttacttcctaaggacatggaacgtcttacaagccttagagctggcattgaaggacctttacttgcaagtgatgttggacgtgacagatctgctgccagcccggttgtaagtagtatgccagaaagagcttcagagtcttcttcagaggaaaaagatgattatgaaatttttgtaaaagttaaggacactcacgaaaaaagcaagaaaaataagaaccgtgataagggggagaaagagaagaaaagagactcttcattaagatctcgaagtaagcgttccaaatcttctgaacacaaatcacgcaagcgtaccagtgaatctcgttctagggcaagaaagagatcatctaagtccaagtctcatcgctctcagacacgttcacggtcacgttcaagacgcaggaggagaagcagcagatcaagatcaaagtctagaggaagaagatctgtatcaaaagagaagcgcaaaagatctccaaagcacagatccaagtctagggaaagaaaaagaaaaagatcaagctccagggataaccgaaagacagttagagctcgaagtcgaaccccaagtcgtcggagtcggagtcatactccaagtcgtcgacgaaggtctagatctgtgggtagaagaaggagctttagcatttccccaagccgccgcagccgcacccccagccgccgcagccgcacccccagccgccgcagccgcacccccagccgccgcagccgcacccccagccgccggagccgcacccctagccgtcggagccgcaccccaagccgccggagaagatcaaggtctgtggtaagaagacgaagcttcagtatctcaccagtcagattaaggcgatcaagaacacccttaagaagaaggtttagcagatctcccatccgtcgtaaaagatccaggtcttctgaacgaggcagatcacccaaacgtctgacagatttggataaggctcaattacttgaaatagccaaagctaatgcagctgccatgtgtgctaaggctggtgtccctttaccaccaaacctaaagcctgcacctccacctactatagaagagaaagttgctaaaaagtcaggaggagctactatagaagaactaactgagaaatgtaaacagatcgcacagagtaaagaagatgatgatgtaatagtgaataaacctcatgtttcggatgaagaggaagaagaacctcctttttatcatcatccctttaaactcagtgaacccaaacctatttttttcaatctgaatattgctgcagcaaaaccaactccaccaaaaagccaggtaacattaacaaaagaattccctgtatcatctggatctcaacatcggaaaaaagaagcggatagtgtttatggagaatgggttcctgtggagaaaaatggtgaagaaaacaaagatgatgataatgttttcagcagcaatttgccctcagagcctgtggacatctctacagcaatgagtgaacgggcacttgctcagaaaagactcagtgagaatgcatttgatcttgaagccatgagcatgttaaatagagctcaggaaaggattgatgcctgggctcagctgaactctattcctggccagttcacaggaagtacaggagtacaggttttgacacaagaacagttggccaatactggtgcccaagcctggattaaaaaggatcagttcttaagagcagccccggtaactggaggaatgggagccgttttgatgagaaaaatgggctggagagaaggagaaggattaggaaaaaacaaagaaggcaataaggaacccatcctagttgattttaagacagaccgaaaaggtcttgttgcagtaggagaaagagcacaaaagaggtctgggaacttctctgctgcaatgaaagatctgtcaggcaaacatcctgtgtctgctttgatggagatctgtaataaaagaaggtggcaaccacctgaatttctattggtccatgatagtggccctgatcatcgcaaacattttctctttagggtattgagaaatggagcccttaccagacccaattgtatgtttttcttgaataggtattgataaatggaagcgcttaccagcccagctttgccagccctaataagaagcatgctaaagccacagcagctactgtggttcttcaagcaatgggccttgtaccaaaggacctcatggctaatgccacttgcttcaggagtgcctcacgtagatagattgaggttttataataatcatttcagaattttactctgcatcacaatgtatttcctctttaatgttgtaaatatttggcaatttaagacattgtgtaaaaagcaatctgtaaaaacatctccaggctttgatttttgtaccatggaaattgtatttaaccatacagggttttggtatgtttatattgtttaccttagtgatgtatttgtttaagtggctaacatccaaacgactgtttgaaggcatcagagtaatcttcagtgtggaatgttaaataacgcttttatactgtattttgtactatgatgtaactccccttccttatggctaggctactgtaacacttgcctgtaatcagtgaagggctgtgcaccttgtactatttcacaatgggttctgctggacagataatgggccagtgttattgaggtgatcaagatctgttccacagggctaatgccaccatctcccctcaaaattttgtagaggttctaaaaagaaagtggtatgttgtgtgatgatcagcactaagtcctgcattcctgttaaagccacttgggtcataagaagggagtaaaaaatgaagtctgactagaattctattgcagaggccagtacatttagtatggcattgagttgtgatatagttttactttgatgtgcattttgaatttcagctacacctagatagacgtaaaatgataattaaaatgctgtaaccaacttatctaataaaattggcaaccagccactattttgttgactatgagaaagttaaaagtttatgttaatttttagggtctgatagaatatttcatgtgtattacagtggtattcatatgctatgtctctaaactttattttcaaaagcttaaggcccaaatacaaacttctctggaataaa

SEQ ID NO: 223262 - protein, 1188 aa, Artificial Sequence
  derived and/or modified sequence
MEPNSLQWVGSPCGLHGPYIFYKAFQFHLEGKPRILSLGDFFFVRCTPKDPICIAELQLLWEERTSRQLLSSSKLYFLPEDTPQGRNSDHGEDEVIAVSEKVIVKLEDLVKWVHSDFSKWRCGFHAGPVKTEALGRNGQKEALLKYRQSTLNSGLNFKDVLKEKADLGEDEEETNVIVLSYPQYCRYRSMLKRIQDKPSSILTDQFALALGGIAVVSRNPQILYCRDTFDHPTLIENESICDEFAPNLKGRPRKKKPCPQRRDSFSGVKDSNNNSDGKAVAKVKCEARSALTKPKNNHNCKKVSNEEKPKVAIGEECRADEQAFLVALYKYMKERKTPIERIPYLGFKQINLWTMFQAAQKLGGYETITARRQWKHIYDELGGNPGSTSAATCTRRHYERLILPYERFIKGEEDKPLPPIKPRKQENSSQENENKTKVSGTKRIKHEIPKSKKEKENAPKPQDAAEVSSEQEKEQETLISQKSIPEPLPAADMKKKIEGYQEFSAKPLASRVDPEKDNETDQGSNSEKVAEEAGEKGPTPPLPSAPLAPEKDSALVPGASKQPLTSPSALVDSKQESKLCCFTESPESEPQEASFPSFPTTQPPLANQNETEDDKLPAMADYIANCTVKVDQLGSDDIHNALKQTPKVLVVQSFDMFKDKDLTGPMNENHGLNYTPLLYSRGNPGIMSPLAKKKLLSQVSGASLSSSYPYGSPPPLISKKKLIARDDLCSSLSQTHHGQSTDHMAVSRPSVIQHVQSFRSKPSEERKTINDIFKHEKLSRSDPHRCSFSKHHLNPLADSYVLKQEIQEGKDKLLEKRALPHSHMPSFLADFYSSPHLHSLYRHTEHHLHNEQTSKYPSRDMYRESENSSFPSHRHQEKLHVNYLTSLHLQDKKSAAAEAPTDDQPTDLSLPKNPHKPTGKVLGLAHSTTGPQESKGISQFQVLGSQSRDCHPKACRVSPMTMSGPKKYPESLSRSGKPHHVRLENFRKMEGMVHPILHRKMSPQNIGAARPIKRSLEDLDLVIAGKKARAVSPLDPSKEVSGKEKASEQESEGSKAAHGGHSGGGSEGHKLPLSSPIFPGLYSGSLCNSGLNSRLPAGYSHSLQYLKNQTVLSPLMQPLAFHSLVMQRGIFTSPTNSQQLYRHLAAATPVGSSYGDLLHNSIYPLAAINPQAAFPSSQLSSVHPSTKL

SEQ ID NO: 223263 - DNA, 3567 bp, Artificial Sequence
  derived and/or modified sequence
atggaaccgaattcgttacaatgggtgggtagcccatgcggcctccatggcccatatattttctataaggcattccaattccaccttgagggtaaaccgcgaatattgtcactgggcgacttcttctttgttaggtgtactccaaaggacccaatctgcatcgccgagctgcagctcctttgggaggagcgcacaagccggcagttgctgtcctccagcaagctctactttctgccagaagataccccccaaggtagaaattcagaccacggggaagacgaggtgatagcagtgtccgagaaagtaattgtcaaactggaagacctcgtcaagtgggtgcatagtgattttagtaaatggaggtgcggcttccacgctgggcctgtcaaaaccgaggcacttggacgcaacggtcagaaggaagctctgctgaaatataggcagtctacactgaacagcggactgaacttcaaggacgtgctaaaggagaaggccgatctgggcgaggacgaggaggaaaccaacgtaattgtgttgagctacccacagtactgtagatatcggtctatgctgaaaagaattcaggacaagccctcctccatcctgactgaccagtttgctctcgccctcggtggaatcgctgtcgtgtctagaaatccccagattttatactgccgggatacatttgatcaccctacgctgattgagaacgagtcgatatgtgacgagttcgcacccaatttgaaggggcgcccccggaagaaaaaaccgtgtccccagcgccgggattctttcagcggtgtgaaggattccaataacaactcggatggcaaagctgtagctaaggtaaaatgcgaagcacggagcgcattgacaaagcccaagaataaccacaactgtaaaaaagtgtccaatgaagagaagcccaaagttgcaatcggcgaagaatgcagggccgatgagcaagctttcctggtggcattgtataaatatatgaaggagcggaagaccccgattgagagaataccttatttgggatttaaacagattaacctttggacaatgttccaggccgcacaaaaactcggtgggtatgaaacaattaccgctagacggcagtggaaacacatctacgacgagctcggcggtaaccctggaagtacctctgcagcaacgtgtacaagaagacactatgaacgactgattctgccatatgaaaggtttatcaaaggtgaagaagataagcccctgccccctataaagcctcgaaagcaagaaaacagctctcaggaaaacgaaaataaaactaaggtgagcggaacaaagcgcatcaagcacgaaattcccaagtctaagaaggaaaaggagaatgccccaaaaccccaggacgcggcagaggtctcctcagaacaggagaaggagcaggagaccctaatcagtcagaaaagcatcccagaacccttacccgccgctgatatgaagaagaagattgagggctaccaggaattctcagcaaaacccctggccagcagagtcgacccagaaaaagataatgagaccgaccaggggtctaatagcgagaaggtggcagaggaggccggcgagaagggtccaacaccccctctgcccagcgcaccactggccccagaaaaggattctgctctggtcccaggggcctccaagcagccgttgacatccccctccgccttggtggactccaagcaggagtccaagctgtgctgcttcaccgagtcaccggaatcggagccccaggaagcttcgttcccaagcttccctaccacccaaccacccttagccaatcagaatgaaacagaggatgacaagttgcctgcgatggctgattacatcgcgaattgtactgttaaagtggaccagttaggctccgatgacatccataacgcactcaagcagactcccaaggtgttagtcgtgcaatcattcgacatgttcaaggataaagatctcactggaccaatgaacgaaaaccatgggctgaattatacgcccctactgtatagtagagggaaccctggcattatgagcccattagccaagaaaaagttgcttagccaggtgtctggcgcttcattgagctcctcgtacccctatggctcacccccacccctaatcagcaaaaagaagctgattgcaagagacgatctgtgtagcagcctaagtcaaacacaccatgggcagagtaccgatcacatggctgtgtcacggcccagtgttatccagcacgtccaaagttttcgaagtaagccgagcgaggaaagaaagaccattaacgacatttttaagcatgagaaactgagtcgaagtgatccccacagatgcagttttagcaaacatcatttgaacccccttgccgatagctatgtcttaaagcaagagatccaagagggcaaagacaagctactcgagaaacgtgctctgccgcactctcacatgccctccttcctggcagacttttatagttctccccatcttcattctctttaccgacacacggagcaccaccttcataatgaacagacctctaaatatccatccagggacatgtatcgggaatccgaaaattcctccttcccatcccatcgacaccaggaaaaacttcatgtgaactatttgacatccctccacttacaggacaagaagtccgcagccgctgaggcccccacagacgaccagcctactgatctgtccctgcctaaaaaccctcataaaccaaccggcaaagtactgggtctggcccattctactacaggtccacaggagagtaagggcatttcccagttccaggttcttggctctcagtcccgcgactgccaccctaaggcatgccgggtaagtcccatgacaatgtcaggacctaaaaagtacccggaatccctgagcagaagcgggaagcctcaccacgtgcgattggaaaacttcaggaagatggagggcatggtgcatcctatactgcaccgtaagatgagtccccagaatataggggctgctcgccccatcaaaagatccctggaagacctggacctagttatcgctggcaagaaagcacgagctgtgagccccttagaccctagcaaggaggtgtcaggaaaggaaaaagcaagcgaacaagagtctgagggtagcaaagccgcacacggcggacactcaggagggggctcagaaggacataagttgcccttgtcctctccaatttttccgggtctgtattcaggtagcctttgcaatagcgggctgaattcaaggcttccggccgggtattcccacagcctccagtatcttaaaaatcagactgtcctcagcccccttatgcagcctctggcctttcacagcctggtgatgcaacgagggatattcaccagccctactaacagtcagcaactgtacaggcatctcgcggcggcgactccagttgggagttcctacggagacttgttgcacaattctatatacccactcgccgccattaatccacaagccgcctttccaagttcacagctctcctcagtgcatccttccacgaaattatag

SEQ ID NO: 223264 - DNA, 3567 bp, Artificial Sequence
  derived and/or modified sequence
atggagcccaacagcctgcagtgggtgggcagcccctgtggcctgcacggcccctacatcttctacaaggccttccagttccacctggagggcaagccccgcatcctgagcctgggggacttcttctttgtgcgctgcacccccaaggaccccatctgcatcgccgagctgcagctgctgtgggaggagaggaccagccggcagctgctgagcagcagcaagctgtacttcctgcctgaggacaccccccagggcaggaacagcgaccacggggaggatgaggtgattgctgtgtctgagaaggtgattgtgaagctggaggacctggtgaagtgggtgcacagcgacttcagcaagtggaggtgtggcttccacgccggccctgtgaagacagaggccctgggcagaaatggccagaaggaggccctgctgaagtaccggcagagcaccctgaacagcggcctgaacttcaaggatgtgctgaaggagaaggctgacctgggagaagatgaggaggagaccaacgtgattgtgctgagctacccccagtactgccgctaccgctccatgctgaagaggatccaggacaagcccagcagcatcctgacagaccagtttgccctggccctgggcggcattgctgtggtgtccaggaacccccagatcctgtactgccgggacacctttgaccaccccaccctgattgaaaatgaaagcatctgtgatgaatttgcccccaacctgaagggccggcccaggaagaagaagccctgcccccagaggcgggacagcttcagcggcgtgaaggacagcaacaacaacagtgatggcaaggctgtggccaaggtgaagtgtgaggcccggagcgccctgaccaagcccaagaacaaccacaactgcaagaaggtgtccaatgaggagaagcccaaggtggccatcggggaggagtgcagagcagatgagcaggccttcctggtggccctgtacaagtacatgaaggagaggaagacccccatcgagcgcatcccctacctgggcttcaagcagatcaacctgtggaccatgttccaggccgcccagaagctgggcggctatgagaccatcacagcccggcggcagtggaagcacatctatgatgagctgggcggcaaccctggcagcaccagcgctgccacctgcaccaggaggcactatgaaagactcatcctgccctatgagcgcttcatcaagggggaggaggacaagcccctgccccccatcaagcccaggaagcaggagaacagcagccaggagaatgaaaacaagaccaaggtgtctggcaccaagaggatcaagcatgagatccccaagagcaagaaggagaaggaaaatgcccccaagccccaggatgctgctgaggtgtcctctgagcaggagaaggagcaggagaccctcatcagccagaagagcatccctgagcccctgcctgctgctgacatgaagaagaagattgagggctaccaggagttcagcgccaagcccctggccagccgggtggaccctgagaaggacaatgaaacagaccagggcagcaacagcgagaaggtggccgaggaggccggggagaagggccccaccccacccctgcccagcgcccccctggcccctgagaaggacagcgccctggtgcctggggccagcaagcagcccctgaccagccccagcgccctggtggacagcaagcaggagagcaagctgtgctgcttcacagagagccctgagagcgagccccaggaggccagcttccccagcttccccaccacccagccccccctggccaaccagaatgaaacagaagatgacaagctgcctgccatggctgactacatcgccaactgcaccgtgaaggtggaccagctgggcagtgatgacatccacaatgccctgaagcagacccccaaggtgctggtggtgcagagctttgacatgttcaaggacaaggacctgaccggccccatgaatgaaaaccacggcctgaactacacccccctgctgtacagccggggcaaccctggcatcatgagccccctggccaagaagaagctgctgagccaggtgtctggggccagcctgagcagcagctacccctacggcagccccccacccctcatcagcaagaagaagctgattgccagagatgacctgtgcagcagcctgagccagacccaccacggccagagcacagaccacatggctgtgtcccggcccagcgtcatccagcacgtgcagagcttccgcagcaagcccagcgaggagaggaagaccatcaatgacatcttcaagcatgagaagctgagcagaagtgacccccaccgctgcagcttcagcaagcaccacctgaaccccctggccgacagctatgtgctgaagcaggagatccaggagggcaaggacaagctgctggagaagagggccctgccccacagccacatgcccagcttcctggccgacttctacagcagcccccacctgcacagcctgtaccgccacacagagcaccacctgcacaatgagcagaccagcaagtaccccagccgggacatgtaccgggagagcgagaacagcagcttccccagccaccgccaccaggagaagctgcacgtgaactacctgaccagcctgcacctgcaggacaagaagtctgctgctgctgaggcccccacagatgaccagcccacagacctgagcctgcccaagaacccccacaagcccaccgggaaggtgctgggcctggcccacagcaccaccggcccccaggagagcaagggcatcagccagttccaggtgctgggcagccagagccgggactgccaccccaaggcctgccgggtgagccccatgaccatgagcggccccaagaagtacccagagagcctgagccgcagcggcaagccccaccacgtgcggctggagaacttcaggaagatggagggcatggtgcaccccatcctgcacaggaagatgagcccccagaacatcggggccgcccggcccatcaagaggagcctggaggacctggacctggtgattgctgggaagaaggcccgggctgtgagccccctggaccccagcaaggaggtgtctgggaaggagaaggccagcgagcaggagagcgagggcagcaaggccgcccacggcggccacagcggcggcggcagcgagggccacaagctgcccctgagcagccccatcttccctggcctgtacagcggcagcctgtgcaacagcggcctgaacagccggctgcctgctggctacagccacagcctgcagtacctgaagaaccagacagtgctgagccccctgatgcagcccctggccttccacagcctggtgatgcagaggggcatcttcaccagccccaccaacagccagcagctgtaccgccacctggccgccgccacccctgtgggcagcagctatggagacctgctgcacaacagcatctaccccctggccgccatcaacccccaggccgccttccccagcagccagctgagctctgtgcaccccagcaccaagctgtag

SEQ ID NO: 223265 - DNA, 3567 bp, Artificial Sequence
  derived and/or modified sequence
atggagcccaacagcctgcagtgggtgggcagcccctgcggcctgcatggcccgtatatcttctataaggctttccagtttcacctggagggcaagccccgtattctgtccctgggagacttctttttcgtgcgttgcacccccaaggatcccatctgcattgccgaattgcagctgctgtgggaagagcgaacttcccgccaacttctgagctcatccaagctgtactttctgccggaggatactccccagggcagaaacagcgaccatggtgaagacgaagtaatcgccgtcagcgagaaggtcatcgtcaagctcgaagaccttgttaagtgggtgcattcagacttctcaaagtggagatgcggttttcacgccggtcccgtgaaaaccgaggccctcggaaggaacggacagaaggaggcgctgttaaaataccgtcagagcacactgaattcaggcctgaactttaaagatgtcctgaaagagaaggcggatctgggagaggatgaagaagagactaatgtgatcgtgttaagttaccctcagtactgcagatacagatcgatgttaaagcgcatccaggacaaaccttcaagtattctcacagaccaatttgccctggctctcgggggaatagccgtcgtgtctcggaatcctcagattctgtattgccgggatacattcgaccaccccacactaatcgaaaatgaaagcatctgtgacgagttcgcccctaatctgaagggaaggcctcgcaagaagaagccctgtcctcagcgaagagacagcttttccggcgttaaggactccaataacaatagtgatggcaaagccgttgccaaagtcaaatgcgaggcgcgctctgcactgaccaagccaaagaacaaccataactgcaaaaaagtgtctaacgaggagaagcctaaagttgcaataggtgaagagtgcagagccgatgaacaggcctttctggtggccttgtataagtatatgaaggagcgcaaaacgcccatagaaagaatcccgtatctgggattcaagcaaataaatctctggaccatgtttcaagcggcccagaagctgggaggatacgagaccatcaccgctcgccgtcagtggaagcatatatacgatgagctgggaggaaaccccggtagcacctccgctgccacctgtactcgcaggcattacgagagactgatccttccttatgaacgtttcatcaaaggtgaagaagataagcccctgccaccaatcaaaccaaggaaacaagagaacagttcgcaggaaaacgagaataagaccaaggtttccggaactaaacggatcaaacacgagatcccgaagtccaagaaggagaaggagaatgcaccaaagccccaggatgcggccgaggtgagcagcgagcaggagaaggagcaagaaacgctgatctcacagaaatccattcccgaacccctgcccgccgctgacatgaaaaagaagatcgaaggataccaagaattctccgccaagcccctggccagccgggttgacccagagaaggacaatgaaaccgatcagggctcaaactccgagaaggttgccgaggaagctggggaaaaggggccaacaccccctctgccaagcgccccactggcgccagaaaaagacagcgcattggtgcccggcgcatcgaaacaaccactcacatccccgtccgccctcgtagacagtaagcaggagagtaagctgtgctgtttcacagagtcacccgagtcagaacctcaggaggccagcttccctagcttcccgactacgcagcctcccctggctaatcagaatgaaacagaagatgacaagctgccagcgatggcagactacattgcaaattgtacagttaaagttgaccaactgggctcagatgatattcacaatgccctgaagcagacgccaaaggtattggtggtgcagtcttttgatatgttcaaggataaggatttgactgggccaatgaacgaaaaccatggacttaactataccccattgctctactctaggggcaatcccggtatcatgtctcccctggccaagaagaagctgctgagtcaggtatccggcgcgtccctgagctcgagctatccctacggttcacccccacctctcatcagcaaaaagaaactaatcgcacgcgatgacctttgttcctccttgtcgcagactcaccacggtcagtccacagatcacatggctgtgtcgaggccttccgtcatacagcatgtccagagttttcgctcaaaaccatcagaagagagaaagacaattaatgacatcttcaagcacgagaaactatctcgctccgaccctcatcgatgctctttttctaaacaccatctgaatccactagcagatagttacgtacttaagcaggaaattcaggaagggaaggacaagctgctggagaagagggctctaccacactcgcacatgccttcctttctggccgacttctacagcagtccacaccttcatagcctgtataggcatactgaacatcatctgcataatgagcaaacaagcaagtacccctccagggacatgtatagagaaagcgagaattcatctttcccctcccaccgtcaccaggaaaagctccacgtaaactatctgacgagtctccatctacaggataagaaatccgcagccgcggaagcgcccacggatgaccagcccacagacctttcacttccaaaaaatccgcacaagcccactggcaaagtccttggcctggcgcattcgacaactggtccacaagagtctaagggaatttctcagttccaggtgttgggcagccagtcacgcgactgtcatcctaaggcctgccgggtgtcccctatgactatgtctgggccgaagaagtatccagagtccctgtctcggtccggtaagccccatcatgtccgcctcgaaaacttccgtaagatggagggcatggtccacccaatactccacagaaagatgtcaccccagaatattggagctgcccggcccattaaacgttcccttgaagacttggatctggtcattgcgggaaagaaggcacgggcagtctctccgctggacccaagcaaagaggttagcggtaaggagaaagcttccgaacaagaaagcgagggatccaaggccgctcacggcggccacagtggtggagggagtgaaggccataagctgcctctctcatccccaatatttccagggctttacagtggtagcttatgcaactctgggctcaacagtagactccctgctgggtactcccactccttacagtacttgaaaaaccagacggtactttcccctctgatgcagccgttagcttttcattctcttgtaatgcagagagggattttcactagcccaaccaactcccagcagttgtaccgccaccttgcggcggccactccagtggggagctcctacggcgatctcctgcacaactctatctaccccttggcagcaataaaccctcaggctgccttcccatcctctcaattgtccagcgtgcatccgagtacgaagctctag

SEQ ID NO: 223266 - DNA, 3567 bp, Artificial Sequence
  derived and/or modified sequence
atggaacctaactctctgcagtgggttggctccccatgcgggctgcacggcccatatatcttctataaggcatttcagttccacttggaaggtaaaccaaggattctgtccttaggtgacttcttctttgtccgctgtactcctaaggatccaatctgtattgctgaactccagctgctgtgggaagagcgcacatcacgacagctccttagttcaagtaaactctacttcctcccagaagacaccccacagggccgaaattcagaccacggagaggacgaagtgatcgctgttagtgaaaaggtcattgtgaaactcgaggatctggtgaagtgggtgcattcagacttcagcaagtggcggtgtggctttcacgccggaccagttaagaccgaggcattgggcaggaacggccaaaaggaggccttgctgaagtaccggcaaagcactctaaacagcggactgaatttcaaagatgtcctgaaggaaaaagcagatctgggagaagatgaagaagagaccaatgttattgtgctgtcttacccccaatactgtcgctatcgctctatgctcaagcgcattcaggacaagccaagttcaatcctgacggaccagtttgcgctcgccctgggaggcatcgctgtggtgtcgcgcaacccacaaatactctattgtagggatacattcgaccacccaaccctaatcgagaatgagagcatatgcgacgagttcgcccctaacctgaagggaagacccagaaaaaagaaaccctgcccccaaagacgggactctttttcaggcgttaaagattccaacaacaactccgacggaaaggctgtcgccaaggtgaagtgcgaagcccgaagcgcccttactaagcccaaaaacaatcataattgtaagaaggtgagtaacgaggagaaaccgaaggttgcgatcggcgaggaatgtagggctgacgagcaggctttcctggtggccctatacaaatacatgaaggaaaggaagacacccatcgaacgcataccctacctgggctttaaacaaatcaacctctggacaatgtttcaggcggctcagaagctcgggggatatgaaacaatcaccgcccgaaggcagtggaaacacatttacgacgagctgggcggaaaccctggatccacatccgctgctacttgcactcgaaggcattatgagaggcttattctgccctacgaaaggtttatcaaaggagaggaggataagcccctccctcccataaaaccacggaagcaggaaaacagcagtcaggagaatgagaataagaccaaagttagcggaaccaagaggattaagcatgaaattcccaagtctaagaaggagaaagagaatgcgccaaagccacaagacgccgcagaggtgagctctgagcaggagaaagaacaggagacccttatctcacagaagtcgattcccgagcccctgccagccgctgacatgaagaagaaaatcgagggctaccaagagttttcagccaaaccactggctagccgagtggaccctgaaaaagataatgagacggatcaaggttccaatagcgagaaggtggccgaggaagcgggtgaaaagggacctaccccgcctcttcccagcgctcccctcgcccctgagaaagacagtgccttggtgccaggtgcctccaagcagccccttacctccccatccgcactggtagacagcaagcaagaatccaagctttgttgcttcacagaaagtcctgagtccgagcctcaggaggcatccttcccaagctttcccaccacacaacccccactggcaaaccaaaacgagacggaggacgacaaactgccagctatggcggattacattgctaactgcactgtcaaggtcgaccaactgggatcagacgacatccacaacgcgttgaagcagacacctaaggtcctcgtggtgcagtccttcgatatgttcaaagacaaggatttgaccggaccgatgaatgagaaccatggcctgaattacactcctcttctgtattccaggggaaaccctggcattatgtcccccctggctaagaagaaattgctgtctcaggttagcggcgctagcctcagcagctcctacccttacggcagcccccctcccttgatttcaaaaaaaaagctgatcgcacgggatgatttatgctcatccctgtcccaaactcaccacggacaatcaacggatcatatggccgtttctcgcccttctgtgattcagcatgtgcagtctttccggtccaagccgagtgaggagagaaaaactatcaatgatatattcaagcatgaaaagctatcaagatcggatccccaccgctgctcatttagcaaacatcaccttaacccattggcagacagctacgtacttaaacaggaaatccaggaggggaaggacaaactgctggagaagcgggcactacctcacagtcatatgcccagcttcctggccgacttctacagtagtccgcatctacacagcctgtaccgtcacactgaacatcacctacacaatgaacagactagcaaatatccctctagggacatgtatcgggaatcagaaaactcctcttttccatcccatcggcatcaggagaagctacacgtcaactatctgacctccctacatctgcaggacaaaaagagtgccgcagccgaggccccaactgatgaccagcctacggatttgagcctccctaagaaccctcataagcctactggaaaagtcctgggactggcccacagcactaccgggccacaggagtctaaggggatttctcagttccaggtgttgggatcccagtccagggactgccatccgaaggcatgcagggtctccccgatgacgatgtctggccctaaaaaatacccagagagcctttctagaagtggcaagccccatcatgtccgattggagaattttcggaaaatggagggaatggtgcacccaattttacacagaaaaatgtctccccagaatatcggggctgcacgcccaattaagagatctctggaagacctggatcttgtgattgctggtaaaaaggcccgagccgtgagccccttagatcccagcaaggaagttagtggtaaggagaaagcaagcgagcaggagagcgaaggaagcaaggctgctcatgggggacacagtggcggaggatccgagggccataagctgccattgtcaagcccgatctttccaggtctgtactccggctccctgtgcaacagcggacttaatagccggctccccgctggttatagccactccctgcagtatctcaaaaaccagacggtactttccccactgatgcagcctttggcttttcactctttagtgatgcagagaggcatttttacgagccccacgaacagccagcaactgtataggcacctggccgctgccacgcccgtgggcagtagctatggggatctccttcataacagcatctaccctttggcggctatcaaccctcaagctgccttcccatcgtcccaactgtctagcgtgcatcctagcacgaagctgtag

SEQ ID NO: 223267 - DNA, 7891 bp, Artificial Sequence
  derived and/or modified sequence
atcagacgatatcccagacaggagcggttagagagagaggaatcacatctccacacagttttagggtgctttttatttttacaaatcttcttgtgtgttttttgccttgatccatcctcttcccgccgagatcgtatggcgcctttctctcgattatgaatttgatcaatccatctttggaagaaaacccacatagttttttcaggagctgaaaattgagtcgttatagaaatattaggacatattttcaatcatttcggtgcccgaagggaggcaagagctcagttttatattgagacattacgccggctgaaggcagagaatgcgtttccctgccaggacctgatgcaatccattcaagccaacaagtttggagagaatgttgagttcaatcaattcagaacgtcgagatggagcccaactcactccagtgggtcggctcaccgtgtggcttgcacggaccttacattttctacaaggcttttcaattccaccttgaaggcaaaccaagaattttgtcccttggcgactttttctttgtaagatgtacgccaaaggatccgatttgcatagcggagctccagctgttgtgggaagagaggaccagccggcaacttttatccagctctaaactttatttcctcccagaagacactccccagggcagaaatagcgaccatggcgaggatgaagtcattgctgtttccgaaaaggtgattgtgaagcttgaagacctggtcaagtgggtacattctgatttctccaagtggagatgtggcttccacgctggaccagtgaaaactgaggccttgggaaggaatggacagaaggaagctctgctgaagtacaggcagtcaaccctaaacagtggactcaacttcaaagacgttctcaaggagaaggcagacctgggggaggacgaggaagaaacgaacgtgatagttctcagctacccccagtactgccggtaccgctcgatgctgaaacgcatccaggataagccatcttccattctaacggaccagtttgcattggccctggggggcattgcagtggtcagcaggaaccctcagatcctgtactgtcgggacacctttgaccacccgactctcatagaaaacgagagtatatgcgatgagtttgcgccaaatcttaaaggcagaccacgcaaaaagaaaccatgcccacaaagaagagattcattcagtggtgttaaggattccaacaacaattccgatggcaaagccgttgccaaggtgaaatgtgaggccaggtcagccttgaccaagccgaagaataaccataactgtaaaaaagtctcaaatgaagaaaaaccaaaggttgccattggtgaagagtgcagggcagatgaacaagccttcttggtggcactttataaatacatgaaagaaaggaaaacgccgatagaacgaataccctatttaggttttaaacagattaacctttggactatgtttcaagctgctcaaaaactgggaggatatgaaacaataacagcccgccgtcagtggaaacatatttatgatgaattaggcggtaatcctgggagcaccagcgctgccacttgtacccgcagacattatgaaagattaatcctaccatatgaaagatttattaaaggagaagaagataagcccctgcctccaatcaaacctcggaaacaggagaacagttcacaggaaaatgagaacaaaacaaaagtatctggaaccaaacgcatcaaacatgaaatacctaaaagcaagaaagaaaaagaaaatgccccaaagccccaggatgcagcagaggtttcatcagagcaagaaaaagaacaagagactttaataagccagaaaagcatccctgagcctctcccagcagcagacatgaagaaaaaaatagaagggtatcaggaattttcagcgaagcccctggcatccagagtagacccagagaaggacaacgaaacagaccaaggttccaacagtgagaaggtggcagaggaggcgggagagaaggggcccacacctccactcccaagtgctcctctggccccagaaaaagattcagccttggtccctggggccagcaaacagccactcacctctcctagtgccctggtggactcaaaacaagaatccaaactgtgctgttttacagagagccctgaaagtgaaccccaagaagcatccttccccagcttccccaccacacagccaccgctggcaaaccagaatgagacggaggatgacaaactgcccgccatggcagattacattgccaactgcaccgtgaaggtggaccagctgggcagtgacgacatccacaatgcgctcaagcagaccccaaaggtccttgtggtccagtcgtttgacatgttcaaagacaaagacctgactgggcccatgaacgagaaccatggacttaattacacgcccctgctctactctaggggcaacccaggcatcatgtccccactggccaagaaaaagcttttgtcccaagtgagtggggccagcctctccagcagctacccttatggctccccaccccctttgatcagcaaaaagaaactgattgctagggatgacttgtgttccagtttgtcccagacccaccatggccaaagcactgaccatatggcggtcagccggccatcagtgattcagcacgtccagagtttcagaagcaagccctcggaagagagaaagaccatcaatgacatctttaagcatgagaaactgagtcgatcagatccccaccgctgcagcttctccaagcatcaccttaacccccttgctgactcctacgtcctgaagcaagaaattcaggagggcaaggataaactcttagagaaaagggccctcccccattcccacatgcctagcttcctggctgacttctactcgtcccctcatctccatagcctctacagacacaccgagcaccatcttcataatgaacagacatccaaatacccttccagggacatgtacagggaatcggaaaacagttcttttccttcccacagacaccaagaaaagctccatgtaaattatctcacgtccctgcacctgcaagacaaaaagtcggcggcagcagaagcccctacggatgatcagcctacagatctgagccttcccaagaacccgcacaaacctaccggcaaggtcctgggcctggctcattccaccacagggccccaggagagcaaaggcatctcccagttccaggtcttaggcagccagagtcgagactgtcaccccaaagcctgtcgggtatcacccatgaccatgtcaggccctaaaaaataccctgaatcgctttcaagatcaggaaaacctcaccatgtgagactggagaatttcaggaagatggaaggcatggtccacccaatcctgcaccggaaaatgagcccgcagaacattggggcggcgcggccgatcaagcgcagcctggaggatttggaccttgtgattgcagggaaaaaggcccgggcagtgtctcccttagacccatccaaggaggtctctgggaaggagaaggcctctgagcaggagagtgaaggcagcaaagcagcgcacggtgggcattccgggggcggatcagaaggccacaagcttcccctctcctcccctatcttcccaggtctgtattccgggagcctgtgtaactcgggcctcaactccaggctcccggctgggtattctcattctctgcagtacttgaaaaaccagactgtgctttctccactcatgcagcccctggctttccactcgcttgtgatgcaaagaggaatttttacatcaccgacaaattctcagcagctgtacagacacttggctgcggctacacctgtaggaagttcatatggggaccttttgcataacagcatttaccctttagctgctataaatcctcaagctgcctttccatcttcccagctgtcatccgtgcaccccagtacaaaactgtaggctcagctctgcccagcagtccaaagcggcatggccaacagagcttcactccttacccaggagtgctggcttatagagttagaagtcagtatttcttctaatctgaggctatgatcagtcccagctgtaggggcccagaggggaggtgaacatgcctgatttttgtgggacaactctagcccacaaactgactggctggtgagtcttgactcccttccaacacagatgcccaggcacctccagatcattcacttcgcacgtgggccttgtgaagggatttgtgaatatccaggaagaacttagaggaccccatctgagttcggatggtcaggaaacaatctgggcaaaaaagaggcaggcatttcaaaggaaggggcaaggaagactggcaaacagatggcaagggatgcccctctttttcataaaactctccaaggttcaatcaatgcaatgtatagtgaaacttcaatagatctttcattttgacactattaaacaatccagagaagtaaacactgttaaattgactgtatatatttgcttcttaaaactacctgtatcactgtttgctcacctaatttatatacaggtagttccattttctcccagttccttctcgtctttttttttttttttttttttttttttattaaatggtattgcttttgtttgcaggtctttttgtttttgttttgtttttgaggctgactgactgtcctagttgttgtgtgtttgtaatttttccacatcttattttgagcagctttgggtggtaaagttattgtttacaaattgaagcaactgattctagtggaacaaatgaaaaagaaacagtcaagcacacaatagtgcaaagaacgttcctttgtagatccgcaacttaaggattttgttcctcataaatggcatagttgaaagagcttatacactgcttacccagccaaatgctttgctttgaagtattgggttctgtgaaaatattgagcattgtacttaccttatctaggctgtgaaactgtcctacataccagagaatcataaaaacaaaaacctcactggcagcaagctgccgaataacaacagagtctagaggacatatttgtgggctgcacagatattttaggaatttcagaaattagaacaggagccaaaatgatttacattggcgttggcactgattcctttaaatggtctgggaaagggggttgggaagaggatggagctcaactggccagaagaggagcagctgcagtcctgatagcttctctagcctcggtcttttgagtgataagtagtcatgttgttttcatccagttggtttcttgtcattcccaagaagaatctcccaggccacatctttggggataactgacatactggattagccttttcaaaagaaaagtcatcctatttggttttatggggtgtgagttttgtgtgtacacacacagaaacatgtaaggtggtttgggtcatgtttttaaccacctggcaatacagtccactttctggtttcttttattgtgggaagtaaatggtcaagctgctcaggcagtgaaaagatgtggagaatgtccgttgtcattcttgccactgtattccatttgctaccgagatataacattaaggtggacacattttctaactgtattaattaaaagtcaatggatacagagagtggattttctccccaagtcccatccctgctgaagaccgcttggatgaactccccaacccactgtgcccctcccgcaacactaccagtagactttagaaccatagttaactaagtcttttacctctgagatacttaattctgggaaaattggtgacaattttcaacttctaaataggtaactcgactgcaaaataatcaaaactgataacaatgaaactgcggctcttaaacaaagccatgcatgccgtgcatttgtattgaaatgtctccatgatatgaagccaaatattcaatgtaacatacttaatatccaaaggtggaaacaaaagaatgtagagatccagtgttaagagttccatttgcttcaattaattatttaccttcctgtggaataatatatatatatatatttaatagaaccatagatagactagtagaatttagattataaatgtgtgagtgcagattatcctgctattgcacaagctagaggggggaaaaatctcaattccagctggcaagatgctagccaggacacatataagaaagttgcactagattgaatggtcacagaatcggaggacatggaagaaaaaggaaacttcggtggttctgcagcagacatgggctaggtcatatgtggtttctatgagttcgtgtctcaaaaaaaaaaggagggggggcatctgtccccggtggagctcacctatttggaatatggggcatttgttttttccactgcaatgatttcagtctggtttcatcatgttggaattcgatcacaccattttcaaacaatgttaacatagtccagcttttgtttttctcatctcttctgagaggagactcactgtttctgtctgaggaagctcataccctcggcaaaacatcaggacaaataaagagaaatgggggtacgcattcccaacagaagcagtgtgttatttgttttaaaactctgaacagagatcttggaaatctttcaaaaagaccattgaattcttcattggctgagaacgacgttttaaaatgtcttaaataaggctttgtttgcattgtttgagttcaaggggccttattattgaatggaattgcacaagcctttctttgtgcaatcaaaccattgttattggtagttctgtaaaggaaactgtggaatcgaattggcagtggagtcataaatctatttactgagtgtggcttccaagaaatgttgcaattcaaaatgcactaagtctgtgatttattggagatttggagattctaaataatatttttaaaaaacttccatgcaacttctggtttaatgtttggcaactccacatgataaaaaaataaaaacagcccaaccgagtttcggaattaagtattcttctagtaagtgattcaaacttgtaatatttgccacaggactgacttatttatttactagctagaagctcttaagttcacttgtttatcagggcatatacagaagggtttgttaaaactcgatgttaactttacaactttctgacctggtgcatgaattctcaagtactgtatttcactgtgttggtgtgtctgatggaaatttcgaggtggtcccacaaaaatattttatgtagtgtgccttcaaagagaaccatttatttctcttcacttatcgtcccacaaagtcacatttggtggtggtcagccaagtcgcatctggtctagttttactcttgtcccaattttaaagagaaatgggaatgagtttgccctggtgagacccataccattgcaatgattatcttgagcacttaaagtccagtgttggctgttagtgtatttgatattctgcctgtctcctcatggttgaaatatgtctgaagaatagcagcataatctcttggctgtttatacttttttaaactttcctgtgttgtaaatattgtatacttttggtgattccagctatgtaacctctatgctctgtaaggtgattatttgtatatagcaacatggcccagtgatattatatagtttcccaatggagaggttattgagtaacctttgcattagtttaaacactaccagaagaatgctgagccaactataaacactcaattttgtatgttttccaaattgtacttattactgcttttgatactgtattacgtgccaatagtttcccaatcacatagcaggcaagagatattttgtactttttgatccactgtaatatttaataaaaaatgttactatctgtttc

SEQ ID NO: 223268 - DNA, 3567 bp, Artificial Sequence
  derived and/or modified sequence
atggagcccaacagcctgcagtgggtgggcagcccctgcggcctgcacggcccctacatcttctacaaggccttccagttccacctggagggcaagcccagaatcctgagcctgggcgacttcttcttcgtgagatgcacccccaaggaccccatctgcatcgccgagctgcagctgctgtgggaggagagaaccagcagacagctgctgagcagcagcaagctgtacttcctgcccgaggacaccccccagggcagaaacagcgaccacggcgaggacgaggtgatcgccgtgagcgagaaggtgatcgtgaagctggaggacctggtgaagtgggtgcacagcgacttcagcaagtggagatgcggcttccacgccggccccgtgaagaccgaggccctgggcagaaacggccagaaggaggccctgctgaagtacagacagagcaccctgaacagcggcctgaacttcaaggacgtgctgaaggagaaggccgacctgggcgaggacgaggaggagaccaacgtgatcgtgctgagctacccccagtactgcagatacagaagcatgctgaagagaatccaggacaagcccagcagcatcctgaccgaccagttcgccctggccctgggcggcatcgccgtggtgagcagaaacccccagatcctgtactgcagagacaccttcgaccaccccaccctgatcgagaacgagagcatctgcgacgagttcgcccccaacctgaagggcagacccagaaagaagaagccctgcccccagagaagagacagcttcagcggcgtgaaggacagcaacaacaacagcgacggcaaggccgtggccaaggtgaagtgcgaggccagaagcgccctgaccaagcccaagaacaaccacaactgcaagaaggtgagcaacgaggagaagcccaaggtggccatcggcgaggagtgcagagccgacgagcaggccttcctggtggccctgtacaagtacatgaaggagagaaagacccccatcgagagaatcccctacctgggcttcaagcagatcaacctgtggaccatgttccaggccgcccagaagctgggcggctacgagaccatcaccgccagaagacagtggaagcacatctacgacgagctgggcggcaaccccggcagcaccagcgccgccacctgcaccagaagacactacgagagactgatcctgccctacgagagattcatcaagggcgaggaggacaagcccctgccccccatcaagcccagaaagcaggagaacagcagccaggagaacgagaacaagaccaaggtgagcggcaccaagagaatcaagcacgagatccccaagagcaagaaggagaaggagaacgcccccaagccccaggacgccgccgaggtgagcagcgagcaggagaaggagcaggagaccctgatcagccagaagagcatccccgagcccctgcccgccgccgacatgaagaagaagatcgagggctaccaggagttcagcgccaagcccctggccagcagagtggaccccgagaaggacaacgagaccgaccagggcagcaacagcgagaaggtggccgaggaggccggcgagaagggccccaccccccccctgcccagcgcccccctggcccccgagaaggacagcgccctggtgcccggcgccagcaagcagcccctgaccagccccagcgccctggtggacagcaagcaggagagcaagctgtgctgcttcaccgagagccccgagagcgagccccaggaggccagcttccccagcttccccaccacccagccccccctggccaaccagaacgagaccgaggacgacaagctgcccgccatggccgactacatcgccaactgcaccgtgaaggtggaccagctgggcagcgacgacatccacaacgccctgaagcagacccccaaggtgctggtggtgcagagcttcgacatgttcaaggacaaggacctgaccggccccatgaacgagaaccacggcctgaactacacccccctgctgtacagcagaggcaaccccggcatcatgagccccctggccaagaagaagctgctgagccaggtgagcggcgccagcctgagcagcagctacccctacggcagccccccccccctgatcagcaagaagaagctgatcgccagagacgacctgtgcagcagcctgagccagacccaccacggccagagcaccgaccacatggccgtgagcagacccagcgtgatccagcacgtgcagagcttcagaagcaagcccagcgaggagagaaagaccatcaacgacatcttcaagcacgagaagctgagcagaagcgacccccacagatgcagcttcagcaagcaccacctgaaccccctggccgacagctacgtgctgaagcaggagatccaggagggcaaggacaagctgctggagaagagagccctgccccacagccacatgcccagcttcctggccgacttctacagcagcccccacctgcacagcctgtacagacacaccgagcaccacctgcacaacgagcagaccagcaagtaccccagcagagacatgtacagagagagcgagaacagcagcttccccagccacagacaccaggagaagctgcacgtgaactacctgaccagcctgcacctgcaggacaagaagagcgccgccgccgaggcccccaccgacgaccagcccaccgacctgagcctgcccaagaacccccacaagcccaccggcaaggtgctgggcctggcccacagcaccaccggcccccaggagagcaagggcatcagccagttccaggtgctgggcagccagagcagagactgccaccccaaggcctgcagagtgagccccatgaccatgagcggccccaagaagtaccccgagagcctgagcagaagcggcaagccccaccacgtgagactggagaacttcagaaagatggagggcatggtgcaccccatcctgcacagaaagatgagcccccagaacatcggcgccgccagacccatcaagagaagcctggaggacctggacctggtgatcgccggcaagaaggccagagccgtgagccccctggaccccagcaaggaggtgagcggcaaggagaaggccagcgagcaggagagcgagggcagcaaggccgcccacggcggccacagcggcggcggcagcgagggccacaagctgcccctgagcagccccatcttccccggcctgtacagcggcagcctgtgcaacagcggcctgaacagcagactgcccgccggctacagccacagcctgcagtacctgaagaaccagaccgtgctgagccccctgatgcagcccctggccttccacagcctggtgatgcagagaggcatcttcaccagccccaccaacagccagcagctgtacagacacctggccgccgccacccccgtgggcagcagctacggcgacctgctgcacaacagcatctaccccctggccgccatcaacccccaggccgccttccccagcagccagctgagcagcgtgcaccccagcaccaagctgtag

SEQ ID NO: 223269 - protein, 757 aa, Artificial Sequence
  derived and/or modified sequence
MPALPLDQLQITHKDPKTGKLRTSPALHPEQKADRYFVLYKPPPKDNIPALVEEYLERATFVANDLDWLLALPHDKFWCQVIFDETLQKCLDSYLRYVPRKFDEGVASAPEVVDMQKRLHRSVFLTFLRMSTHKESKDHFISPSAFGEILYNNFLFDIPKILDLCVLFGKGNSPLLQKMIGNIFTQQPSYYSDLDETLPTILQVFSNILQHCGLQGDGANTTPQKLEERGRLTPSDMPLLELKDIVLYLCDTCTTLWAFLDIFPLACQTFQKHDFCYRLASFYEAAIPEMESAIKKRRLEDSKLLGDLWQRLSHSRKKLMEIFHIILNQICLLPILESSCDNIQGFIEEFLQIFSSLLQEKRFLRDYDALFPVAEDISLLQQASSVLDETRTAYILQAVESAWEGVDRRKATDAKDPSVIEEPNGEPNGVTVTAEAVSQASSHPENSEEEECMGAAAAVGPAMCGVELDSLISQVKDLLPDLGEGFILACLEYYHYDPEQVINNILEERLAPTLSQLDRNLDREMKPDPTPLLTSRHNVFQNDEFDVFSRDSVDLSRVHKGKSTRKEENTRSLLNDKRAVAAQRQRYEQYSVVVEEVPLQPGESLPYHSVYYEDEYDDTYDGNQVGANDADSDDELISRRPFTIPQVLRTKVPREGQEEDDDDEEDDADEEAPKPDHFVQDPAVLREKAEARRMAFLAKKGYRHDSSTAVAGSPRGHGQSRETTQERRKKEANKATRANHNRRTMADRKRSKGMIPS

SEQ ID NO: 223270 - protein, 240 aa, Artificial Sequence
  derived and/or modified sequence
MPALPLDQLQITHKDPKTGKLRTSPALHPEQKADRYFVLYKPPPKDNIPALVEEYLERATFVANDLDWLLALPHDKFWCQVIFDETLQKCLDSYLRYVPRKFDEGVASAPEVVDMQKRLHRSVFLTFLRMSTHKESKDHFISPSAFGEILYNNFLFDIPKILDLCVLFGKGNSPLLQKMIGNIFTQQPSYYSDLDETLPTILQVFSNILQHCGLQGDGANTTPQKLEERGRLTPSDMPLL

SEQ ID NO: 223271 - DNA, 2274 bp, Artificial Sequence
  derived and/or modified sequence
atgcccgccctacccctggaccagttgcagatcacccacaaggatccaaagactggcaaacttcggacttctcctgccttgcaccccgaacagaaagccgaccgctacttcgtactgtataagcccccacctaaggataatatcccagcactcgtggaagagtacttggaacgtgcaactttcgtggccaatgatttggactggttgctggccttgccacacgataaattctggtgccaagtgatcttcgatgagacgctgcagaaatgcctggacagctacttgcggtacgtgcctcgaaaattcgatgaaggggttgcatctgctccagaagtggtggacatgcaaaaacgcttgcaccgatcagttttcctgacctttcttcgtatgtcaactcataaggagtctaaggaccatttcatctcacccagtgcgttcggagagattctctataataatttcctgttcgacattcccaagatcctggatctctgcgtcctgtttggtaagggtaatagtccactactgcagaagatgataggcaacatttttacccaacagcccagttactatagcgacttggacgaaactttacccacgattcttcaggtgttttctaacatcttgcagcactgcggcctacagggtgacggcgctaatacgacaccacagaagcttgaagagcgcggccgactgaccccaagtgatatgccactccttgagctgaaggatattgtgctgtacctttgcgatacctgcactacgctttgggctttccttgatatcttcccactggcgtgccagacatttcagaagcatgatttctgttatcggctggctagtttttacgaggccgctatccccgagatggagtccgcgataaaaaagagacgccttgaagactctaaacttcttggagacttgtggcagagattgagccactctcgcaagaaacttatggaaatctttcacattatactgaatcagatttgtcttctccctatactggaatcctcatgcgacaacatccagggctttatagaggaattcttacagatctttagcagcctgctacaggagaaacgttttctaagggattatgacgccctgtttcccgtggctgaggacatttctctcttgcaacaggcctcaagtgtactggatgagacccggactgcatatattttacaagcagttgaatctgcttgggagggagtggataggaggaaagctacagatgcgaaggatccaagcgtgatagaagaaccgaatggcgagccaaacggagtgaccgtgactgccgaggctgtgtcccaggccagttctcatcctgagaattctgaggaggaagaatgcatgggcgctgccgctgctgtgggccctgccatgtgtggtgtagagttggactccctcatcagtcaagtgaaggacctccttccagatcttggggaggggttcatattggcttgcctagagtattatcactacgacccggaacaggtgattaataacatcctcgaggaacggctggcacctaccctgtcccagctcgacaggaatctggatagagagatgaaaccagatcccactccactgctgacctctagacacaacgtgttccaaaatgatgagttcgacgtttttagcagggattccgtggacctgtctagagtgcataaggggaagagcacgcggaaagaggagaatacgaggtctctgttgaacgacaaaagggccgttgcagctcagcgccaacgttatgagcagtattccgttgtcgtcgaggaagtccccctgcaaccgggtgagtcacttccatatcacagtgtgtattacgaagacgagtatgatgacacttacgacggcaatcaggtgggggctaatgacgccgacagcgacgatgagctgatctcccggaggcccttcaccataccccaggtgcttaggactaaagtgcccagagaggggcaagaagaagatgatgatgatgaagaagatgacgcagacgaggaagctcctaagccagatcattttgtgcaggatccggccgtgctgagagagaaagccgaagcgagacgaatggcattcctggcaaagaagggctacaggcacgacagctctacagctgttgccggctcgcctcggggccatggccaaagtcgggaaaccacacaggagaggcgcaaaaaggaagccaataaagcaactagagctaatcacaaccgtcgaaccatggccgatagaaagcggtctaaggggatgataccatcttag

SEQ ID NO: 223272 - DNA, 2274 bp, Artificial Sequence
  derived and/or modified sequence
atgccggctctcccactcgaccaattgcagatcactcacaaggatcctaagactggaaagttaaggaccagccccgctctgcatcctgagcagaaagctgatcgctactttgtgttgtacaaacccccgccaaaagacaatattcccgctctcgtggaagagtacctggaacgggcaacgttcgtggctaacgatctggactggctccttgctctaccccacgacaaattttggtgccaagtgatattcgatgagactcttcagaagtgcctcgacagctatctccgttacgtcccacgcaaattcgatgaaggcgtcgcatcagcccctgaggtggtcgacatgcaaaagcgcttgcataggtctgtcttcctcacgttcttacgcatgtcaacgcacaaggagagcaaggatcattttatctctccctctgcctttggggagatcttatacaataactttttattcgacattcctaaaatactcgacttgtgtgtgctgttcggcaaaggcaatagcccgctgctccaaaagatgattgggaatatattcactcagcaaccgtcctactactccgatctggacgagactcttcccactattctgcaggtcttttccaatattctacagcattgcggcttgcagggcgacggcgcaaataccaccccccagaaactcgaggaaagagggaggctaaccccatcagacatgccattacttgagctgaaagatattgtgttgtatctgtgtgacacatgtaccacactgtgggccttcttggatatttttcctctggcatgtcagacttttcagaagcatgacttctgctacagattggccagcttctacgaagcggccattccagaaatggaaagcgccatcaaaaaacgccgtctggaagacagtaaattacttggggacctctggcaaaggctaagtcactccaggaaaaagttgatggaaattttccacattatcttaaatcagatttgtctactccccattctggagagtagctgcgataacattcagggctttatcgaggagttcttgcagatcttttcttccctccttcaggagaaacgattcctgcgcgactacgatgctttgtttcctgtggccgaagatatttccctgttgcaacaggccagctccgtcctcgacgaaacacgcacggcctatatcctacaggccgtggagtccgcgtgggaaggcgtcgaccgccgcaaggcaaccgacgctaaggacccttcggttatcgaagagccgaacggcgaaccgaacggcgtcactgtgacagctgaagccgtgtcacaggccagctctcacccagaaaacagtgaggaagaggagtgtatgggcgccgccgccgcggtgggcccagccatgtgtggggtggaactcgacagtctgatcagtcaggtcaaagacctcctaccagacttgggcgagggattcatcctggcatgccttgagtattaccattacgatccagaacaggtaatcaacaacattctggaggagagattggcacctacgctctcccagcttgataggaacctggaccgagagatgaagcctgaccctacgcccttgttaacatctaggcataatgtattccagaatgacgaatttgacgtgttttcccgcgattcagtcgacctgtcacgggtgcataagggaaagagcaccagaaaagaggagaatactaggtccttgctcaacgataagcgagccgttgctgcccagagacagaggtatgagcagtatagcgtcgttgtagaagaggttcctctgcaacccggcgaatccctgccataccacagcgtttactacgaagacgagtacgacgacacttatgacggtaatcaggtgggcgcaaacgatgcagattccgatgatgagctgatttctaggaggccattcacgatcccccaggtccttcgcacgaaagtcccaagagagggccaggaggaagacgacgatgatgaggaggacgacgccgacgaggaggctccaaagcccgatcactttgtccaagacccagctgtactccgtgaaaaagcagaggctcgaagaatggccttcctcgctaagaaggggtaccgtcatgattcaagcacagcggtagccgggagccctagaggccacgggcaaagccgtgagacaacacaggagcgacgaaaaaaggaggctaataaagccacaagggccaaccataatcggcgcaccatggctgaccgtaagcgctcgaaggggatgatcccatcgtag

SEQ ID NO: 223273 - DNA, 2274 bp, Artificial Sequence
  derived and/or modified sequence
atgcctgccctgcccctggaccagctgcagatcacccacaaggaccccaagacaggcaagctgcggaccagccctgccctgcaccctgagcagaaggctgaccgctactttgtgctgtacaagcccccacccaaggacaacatcccagccctggtggaggagtacctggagcgggccacctttgtggccaatgacctggactggctgctggccctgccccatgacaagttctggtgccaggtgatctttgatgagaccctgcagaagtgcctggacagctacctgcgctacgtgcccaggaagtttgatgaaggagtggccagcgcccctgaggtggtggacatgcagaagaggctgcacaggagcgtcttcctgaccttcctgaggatgagcacccacaaggagagcaaggaccacttcatcagccccagcgccttcggggagatcctgtacaacaacttcctgtttgacatccccaagatcctggacctgtgtgtgctgtttgggaagggcaacagccccctgctgcagaagatgattggcaacatcttcacccagcagcccagctactacagcgacctggatgagaccctgcccaccatcctgcaggtgttcagcaacatcctgcagcactgcggcctgcagggagatggagccaacaccaccccccagaagctggaggagcggggccgcctgacccccagcgacatgcccctgctggagctgaaggacatcgtgctgtacctgtgtgacacctgcaccaccctgtgggccttcctggacatcttccccctggcctgccagaccttccagaagcatgacttctgctaccgcctggccagcttctatgaagctgccatccctgagatggagagcgccatcaagaagaggcggctggaggacagcaagctgctgggggacctgtggcagaggctgagccacagcaggaagaagctgatggagatcttccacatcatcctgaaccagatctgcctgctgcccatcctggagagcagctgtgacaacatccagggcttcatcgaggagttcctgcagatcttcagcagcctgctgcaggagaagcgcttcctgcgggactatgatgccctcttccctgtggccgaggacatcagcctgctgcagcaggccagctctgtgctggatgagaccaggacagcctacatcctgcaggccgtggagagcgcctgggagggcgtggacaggaggaaggccacagatgccaaggaccccagcgtcatcgaggagcccaacggggagcccaacggggtgacagtgacagctgaggccgtgtcccaggccagcagccacccagaaaattctgaggaggaggagtgcatgggcgctgctgctgctgtgggccctgccatgtgtggggtggagctggacagcctcatcagccaggtgaaggacctgctgcctgacctgggggagggcttcatcctggcctgcctggagtactaccactatgaccctgagcaggtgatcaacaacatcctggaggagcggctggcccccaccctgagccagctggacaggaacctggaccgggagatgaagccagaccccacccccctgctgaccagccgccacaacgtgttccagaatgatgaatttgatgtgttcagccgggacagcgtggacctgagccgggtgcacaagggcaagagcaccaggaaggaggagaacaccaggagcctgctgaatgacaagagagctgtggccgcccagaggcagagatatgagcagtacagcgtggtggtggaggaggtgcccctgcagcctggagagagcctgccctaccacagcgtgtactatgaagatgaatatgatgacacctatgatggcaaccaggtgggcgccaatgatgctgacagtgatgatgagctgatcagcagaagacccttcaccatcccccaggtgctgcggaccaaggtgccccgggagggccaggaggaggatgatgatgatgaagaagatgatgctgatgaggaggcccccaagccagaccactttgtgcaggaccctgctgtgctgcgggagaaggccgaggcccggaggatggccttcctggccaagaagggctacagacatgacagcagcacagctgtggccggcagcccccggggccacggccagagccgggagaccacccaggagaggaggaagaaggaggccaacaaggccacccgggccaaccacaacagaaggaccatggctgacaggaagaggagcaagggcatgatccccagctag

SEQ ID NO: 223274 - DNA, 2274 bp, Artificial Sequence
  derived and/or modified sequence
atgcccgccctgcccctggaccagctgcagatcacccacaaggaccccaaaactggtaaactgaggaccagccccgcactccaccccgagcaaaaagccgataggtattttgtcctgtataagccaccacctaaggacaacattcctgcccttgtggaagagtaccttgagagggctacattcgtagccaacgacctggattggttactggccttgccccatgacaagttctggtgccaggtgatcttcgacgagaccttgcaaaaatgcctcgactcctatcttaggtatgttccgagaaagttcgacgaaggggttgcttccgctcctgaggtggttgatatgcaaaagcgcctgcatagaagcgtgttcttgacctttctgcgcatgagtacccataaggagtccaaagatcatttcataagcccttcagctttcggagagatcctatataataattttctgtttgatattccgaagatccttgatctttgtgtgttgttcggaaagggtaattctcctttgctccaaaaaatgatcggtaacatcttcactcaacagccttcctattactcagatctcgatgagacccttcccactattcttcaggtgttcagtaacatcctacagcattgcggactccagggtgacggagcgaataccactccccagaaactagaagagagaggcagactgactccctccgatatgcctctcctggaactaaaagacatcgtgctatatctctgcgatacctgcacgacactctgggcatttctcgacatcttccctctggcatgccaaactttccagaagcacgatttttgttatagattagcttccttttacgaggccgcaatacctgagatggagtctgccatcaagaagagacgtctggaagacagcaaactgctgggagacctctggcagcgactgagtcactccagaaagaaactgatggagatctttcacatcatcctaaaccaaatctgcttgttaccgatcctggagtcgtcatgtgataatattcaggggttcatagaggagttccttcaaatcttttcaagcctgcttcaggagaaaaggtttctgagggattatgacgctctattcccagtcgcggaggatatttccctactccagcaggcttcttccgtgctcgatgaaacaaggaccgcctacatcctccaggctgtggagtcagcttgggaaggcgtggataggcggaaggcaaccgatgctaaggatccctcagttatcgaggagcccaacggagagcccaacggagtcaccgttacagctgaggctgtgtcccaggccagctcgcaccctgaaaattcagaggaagaagagtgtatgggcgccgccgcagctgtcggccctgctatgtgtggcgtggaactagatagcctgataagccaggtaaaagacttgcttccagacctgggcgaggggttcatactagcatgtttagaatattatcactacgaccccgagcaggtcatcaataacatactggaagagcgactggccccaacccttagccagctcgaccggaatctggatcgcgaaatgaaacctgatccaactccgctcctcaccagccgacacaatgtctttcaaaatgatgaatttgacgtttttagtcgcgacagcgtcgatctgtctcgggtgcacaaaggtaagagtactcggaaggaggagaacactcgcagccttctcaacgacaagagggctgttgccgcccaaagacaaaggtacgagcagtattccgtggtagtcgaggaggtgccactgcagccgggagaaagtttgccataccactcggtatactacgaagacgagtacgacgacacatacgatggcaatcaagttggagccaacgatgccgattctgatgatgagctgattagcaggaggccgtttactatcccacaagttctgcggacgaaagtgcccagagagggccaggaggaggacgacgacgatgaagaagatgacgccgacgaggaggcaccgaaaccagatcattttgtgcaggaccctgccgtgctgagagaaaaggccgaggcaaggagaatggccttcctcgcaaaaaaaggctatcgccatgattcatccaccgccgtggcgggctctccacggggtcacggacaatcccgtgagacaacccaggaaaggcgtaaaaaagaggcaaacaaagctactcgcgcaaatcacaatagacgcaccatggcagatcggaagcgcagcaaaggcatgataccttcttag

SEQ ID NO: 223275 - DNA, 2274 bp, Artificial Sequence
  derived and/or modified sequence
atgcccgccctgcccctggaccagctgcagatcacccacaaggacccaaagacaggcaaacttcggacctcacctgccctgcacccagaacagaaggcagatcggtatttcgtgttgtataaaccccctccgaaggataacattcccgcgttagtggaggaataccttgaacgggctaccttcgtggctaacgatctagactggcttctcgctttacctcacgacaagttttggtgtcaggtaatctttgatgagaccttgcagaagtgtctcgattcgtacctgagatacgtgcctcgcaaatttgatgaaggggtggctagcgcaccagaggtggtggatatgcagaagcggctgcaccggtcagtgttcctgactttcctgcggatgagtacccataaagaaagtaaggaccattttatctcccccagcgccttcggcgagatcctgtacaataacttccttttcgacatcccaaagatcctggatctgtgcgtgcttttcggaaaggggaatagtcccctgctgcagaagatgatcggtaacattttcacgcagcaaccttcatactactcagatctcgacgaaaccttaccaacgatcctccaggtcttctccaatattctgcagcattgcggcctgcagggggacggggcaaacaccacccctcagaaacttgaggaaaggggtcggttgaccccaagcgatatgccccttcttgagctaaaagatatagtactgtacctgtgtgacacttgcactactctatgggctttcctggacatcttcccattggcttgccaaacctttcagaagcacgatttctgctatcgtttagcctctttctacgaggctgcgatccccgaaatggaatccgcgattaagaaacgaaggctggaggacagcaaactcttaggtgacctgtggcaacgcctcagccactcccggaagaaactgatggagatcttccacatcatcctcaatcagatctgcctgctgcctatcttggaatcaagttgtgataatattcaggggtttattgaagagtttctgcagatcttttcctcactcctccaggagaagcggttccttcgtgactatgatgctttattccccgtagctgaagatatttcattactccaacaggcatcgagcgtgctggatgaaactcggacagcctatatactgcaggctgtagagtccgcgtgggagggtgtggatcggcggaaagcaacagacgccaaggatccatccgtcatcgaggagcccaatggcgagcccaacggtgtgacagtcaccgccgaggcagtctcacaggccagcagtcacccggaaaactcagaagaagaggagtgtatgggtgccgccgcagcagtaggccctgccatgtgcggcgtcgagctagattcccttatttcccaggtgaaggatctgttgccggacctaggagaaggattcatcctagcttgcctggaatattaccattacgaccccgagcaagttatcaacaatatcctggaggaacgtctggcacctaccctgtctcagttagacaggaacttggatagagagatgaagccggatcccaccccactgctgacatctcgacataatgtgtttcagaatgacgagtttgacgtattttccagggattccgttgacctcagccgagtccacaaagggaagagtacgaggaaagaagagaataccagatctctactaaacgataagagagccgttgccgcacagcggcagagatatgaacagtatagtgtcgtggtggaggaagtccccctccagccaggggaatccctgccctaccactccgtatactacgaggacgagtacgatgacacgtatgacggaaaccaggtgggggccaatgatgctgactccgacgacgaattgatatcacgtcgcccctttacaattcctcaggtccttagaactaaggtgccccgcgaagggcaagaggaggatgatgatgacgaggaggacgacgctgatgaggaggcacccaagcccgaccattttgtacaggatcccgctgtgctgcgcgaaaaggcagaggcccggcgaatggctttcttagccaagaaaggataccggcacgatagctctactgcagtagctgggtcccccaggggccacgggcagtccagggaaactacccaggaacgcaggaagaaggaagctaacaaggctactagagctaatcataatcggcgtacaatggcagacagaaagcgtagcaaaggtatgatcccctcctag

SEQ ID NO: 223276 - DNA, 2274 bp, Artificial Sequence
  derived and/or modified sequence
atgcccgcactcccccttgaccaacttcagattacacataaggaccccaagacaggaaagttgcgcaccagtcccgctctgcaccctgagcaaaaagcagataggtactttgtgctatacaagccccctcccaaagacaatatcccagccctagttgaggaatatttggagcgagctactttcgtggcgaatgacttagactggctgctggccttgcctcacgataagttttggtgccaggtgatctttgatgagaccctgcaaaagtgtcttgatagctacttgcgctatgttccccgtaagtttgatgaaggcgttgcatctgctccggaggtagttgacatgcagaaacggctgcataggtctgtgttcttgacattcctccgtatgtctacccacaaagaaagcaaggaccacttcatatctcccagcgcatttggcgagattctgtacaacaatttcctgtttgacattcctaagatattagatctgtgcgtcctgtttggtaaaggcaactccccccttctgcagaagatgattggcaatatctttacacaacagcctagttactatagtgatttggatgaaactctgcccacaattctgcaagttttttcaaatatccttcagcactgcggcctccagggagacggcgctaatacaacaccacagaaattggaagagcgtggaagactgacccccagcgacatgccactcttggagctgaaagatatcgtactctatctatgcgacacttgcacaaccctgtgggccttcctggatatttttcccttggcctgccaaaccttccagaagcacgatttctgctatcgacttgcctctttttacgaagccgcaatacctgagatggaatctgctatcaagaagcggaggctggaagactcgaaacttttaggggacttgtggcagcgactgagtcactctcgcaagaaactgatggaaatcttccatattatactgaaccagatttgcctcctgcccatcctagagtccagttgcgacaacatacaagggtttatcgaggaattcctgcaaatattctcctccctgctccaggaaaagcggttcttgcgggattacgacgccctgttccccgtcgccgaggatatcagtctgttgcagcaggcctcttcagtgcttgacgagacaaggacagcttatatactacaagccgttgagagtgcctgggaaggcgtggaccgacgtaaggccacggacgctaaagacccatctgtgatagaagagcctaatggggagcccaatggggtcacagttaccgcagaggcagtcagtcaggcatcatctcaccccgagaactccgaagaggaagaatgcatgggcgctgcagccgcagtgggtccagctatgtgcggggtagagcttgattcattaataagccaagtgaaggatcttctgccggacctgggtgaaggcttcatcttggcctgtctcgagtattaccactacgacccagagcaggtgattaataacatattagaggagcgactggctcctactctcagtcaactggacagaaatctggaccgcgaaatgaaacctgacccaactcccctgcttaccagtcggcataacgtctttcaaaatgatgaattcgatgtgttttcacgtgattctgtcgacctgagccgtgtgcataagggcaaaagtacaaggaaggaggaaaatacacggtcgctactcaacgacaaacgcgctgtcgcagcgcagaggcagcgatatgagcagtactccgtcgttgtcgaggaggtccctctccagcctggagagagtttgccataccactctgtttactacgaggacgagtatgacgacacctacgacggcaatcaggttggcgcaaatgacgccgatagtgatgatgaattaatcagccgacgtcctttcaccatcccacaggtgctgaggaccaaggtgccccgagaaggacaggaggaggacgacgacgacgaggaggatgatgctgacgaagaggctcctaagcccgaccatttcgttcaagacccagctgttttaagggagaaagccgaagctagacggatggcattcctggccaaaaaggggtatcgacacgactcgtccacagccgtggcaggaagcccccgtggtcacgggcagtccagggaaactactcaggagcgccgtaaaaaggaagcaaacaaagctaccagagctaatcacaatcgtaggacaatggctgataggaagcggtccaaggggatgatcccttcatag

SEQ ID NO: 223277 - DNA, 2274 bp, Artificial Sequence
  derived and/or modified sequence
atgcccgctttgcccctggaccagctgcagattacacataaagatccgaagaccgggaagctccgtaccagtcccgcactacacccagaacaaaaggccgatcgatactttgtgctgtataaaccccctccaaaagataacatccctgccctggtggaagagtacctcgaaagagccactttcgtggccaatgatttggactggctcctggccctccctcacgacaaattctggtgtcaagtaatcttcgacgaaactttgcagaaatgcctggattcgtatctcagatatgtacccagaaagtttgacgagggggtggcctcagctcccgaggtcgtggatatgcaaaagagactgcaccggagcgtctttcttactttcctgcgtatgtcaacgcacaaggagagcaaggatcatttcatcagtccgtctgcatttggggagattctgtataacaatttcctattcgatatcccgaaaattctggatctgtgtgtgctgttcggcaagggcaactctccactattacagaaaatgattggcaacatctttacccagcagccttcatattactctgatctggatgagaccttgcctactattctgcaggtattcagcaacatcctgcagcactgtggcttgcagggggacggtgcaaatactacaccccagaagttagaggaaagaggacggttaacgcctagtgacatgcccttactcgagctgaaggacattgttctttacctctgcgatacttgtaccaccctgtgggcttttctggacatatttcccttggcctgtcaaacttttcagaagcacgatttctgttatagacttgcttcattttatgaagccgcaattcccgaaatggaatcagcgatcaaaaaacgcagacttgaagatagcaaactgctgggagacctctggcagcggctgagtcacagcaggaagaaactgatggaaatcttccatattatcctgaatcaaatctgtctacttcccattctggagtcctcttgcgataacatccagggatttattgaggagttcctccagatcttctcctccctgttacaagaaaaaagattcttgagggactacgacgccctattcccagtggccgaggacatttcactcctgcagcaggcatccagtgtgttagacgagactaggacagcttatatcctgcaggctgtggaatccgcttgggagggggtcgaccgtaggaaagccaccgacgccaaggatccctccgtgattgaggaacccaacggtgagcctaacggagttacggtgaccgccgaagccgtcagccaggctagctcccatcctgaaaacagcgaggaagaagagtgcatgggggctgctgctgcagtgggccctgctatgtgcggagtcgagctggattccttgatcagtcaggtcaaggacctgctgcccgatctgggggaggggttcattttggcttgtctggagtactaccactacgatccagaacaggtcattaacaacatcctagaagagcgcctggctccgaccttgtcacaattggaccggaacctggacagagaaatgaagccagatcccacacccctgctgacaagcaggcacaacgtattccagaatgacgagtttgacgtcttctcgagggactcagttgacctcagccgtgtacacaaaggaaaaagtactcggaaggaggagaatacacggtccctgctgaatgacaagcgtgcagtggcagcccagagacagaggtacgagcagtattccgtcgtcgtggaagaagtgcctcttcagccgggtgagtccctgccttatcactctgtgtattatgaagacgagtacgacgacacatatgacgggaaccaggtgggggcaaacgacgctgactccgatgacgaattgatttcccggaggccattcacgattccacaggtgctgcggactaaagttcctcgagagggtcaggaagaggacgacgacgacgaggaggatgatgctgacgaagaagcacccaaacccgaccatttcgttcaggatccggctgtgctccgtgagaaagccgaggccaggcgcatggcatttctggctaagaagggatacaggcacgactcgtcaaccgcagtcgccggttctcctaggggacacgggcagagtcgggaaactacccaagaaagacgtaaaaaagaagccaataaagctacccgagctaaccataacagacggactatggctgatcggaagcgtagcaaggggatgatcccatcttag

SEQ ID NO: 223278 - DNA, 2793 bp, Artificial Sequence
  derived and/or modified sequence
agtttgaccccggaagtgcgggcgctcagggagctgtcaccgtggtcggcggcggcggcggcggcggcggcacagagccggtggtggagccgccgaggagggtcacgcagcacaatgccagctctgcccctggaccaactccagatcacccacaaggacccgaagacaggaaagctgaggacttcaccagcgctgcaccccgagcagaaggcagaccggtattttgtgttatacaaaccgccccctaaagacaacattcccgccctagtggaggagtacctggaacgcgccaccttcgtagccaatgacctcgactggctcctggccttgcctcacgataaattctggtgccaggtgatctttgacgagactctacagaagtgcctggactcctacctgcgctatgtcccccgcaaattcgacgagggggtggcctcagcccctgaggttgttgacatgcagaagcgcctccatcgaagtgtttttctcaccttcctccgcatgtccactcacaaggaatccaaagatcacttcatttccccttctgcgtttggagaaatcctctacaataacttcctctttgacattccaaagatcctggacctctgcgtgctctttggaaaaggcaactcaccactgctccagaagatgataggaaacatctttacacagcagccaagttactacagtgacctggatgaaaccctgcctaccatccttcaggtcttcagcaatatcctccagcactgtggtttgcaaggggacggggccaataccacaccccagaagcttgaggagaggggccgattgacccccagtgacatgcctctcctggaattaaaggacattgttctctacctttgtgatacctgcaccacactttgggcctttctggatatcttccctttggcttgccagaccttccagaagcacgacttttgttacagactagcttccttctacgaagcagcaattcccgaaatggagtctgcaattaagaagaggaggcttgaagatagcaagcttcttggtgacctgtggcagaggctctcccattccaggaagaagctaatggagattttccacatcatcctgaaccagatctgcctccttcccatcctagaaagcagctgtgacaacattcagggcttcatcgaagagttccttcagatcttcagctccttgctgcaggagaagaggttcctccgggactatgatgcactcttccccgtggccgaagacatcagcttgctgcagcaggcctcatcagtcttggacgagacgcggactgcctacatcctccaggcagtcgagagtgcatgggaaggggtggacagacggaaagccacagatgctaaagacccatcggtgattgaggagcctaatggggagcctaacggggtcacggtgacagcagaggcagtcagtcaagcatcatcacatccggagaactcggaggaagaggagtgcatgggagcagccgcggctgtgggccctgccatgtgtggggtggaactggactctctcatctcccaagtgaaggacctgctgccagaccttggtgagggcttcatcctggcctgcctggagtactaccactacgacccagagcaggtgatcaacaatatcctggaggagcggctggcccccaccctcagccagctggaccgcaacctagacagagaaatgaaaccagaccctacacccctgctgacgtctcgccacaacgtcttccagaatgacgagtttgatgtgttcagcagggactcagtagacctgagccgggtgcacaagggcaagagcaccaggaaggaggaaaacacgcggagtttgctgaacgacaagcgtgcagtggcggcacagcggcagcgctacgagcagtacagcgtggtggtggaggaggtgccactgcagccaggcgagagcctgccctaccacagtgtctactacgaggatgagtacgatgacacatacgatggcaaccaggtgggcgccaatgatgcagactctgatgacgagctcatcagccgcaggccattcaccatccctcaggtgctgagaaccaaagtgcctagagaagggcaggaggaggatgacgacgatgaggaagacgatgctgacgaggaggctcccaagcccgaccattttgttcaggaccctgcagtgctgagagagaaggcagaagccaggcgcatggcctttctcgccaagaaagggtaccggcatgacagctcaacagcagtggccggcagcccccgaggccatgggcagagccgcgagacaacccaggaacgcaggaagaaggaagccaacaaggcgacaagagccaaccacaaccggagaaccatggccgaccgcaagaggagcaaaggcatgatcccatcctgagacctggtgcagggccagtggggaggcagcggcaccagactcaccaggccgtgctcccatcgcctggggcctcctcactaggggccccaagttcaactcaacccctcaacagcctcagctttgcagcccctgagaaggccgcctctcatctaccagccagccatgagcgccttcctgcagaacacacagtgccttatgccacagccgaagaatccgtggggccggcaagcaggcaccttcccccagctgcgctagcgggaaagagatggggatggagtcccaaggcaagcgccccaaacctcgggccacaagacaccacttcccctttaccctggacagcaggaaacctgtatattcaaaaacacaaaaagtcctgctaataaaatttttgaccctttcaaacga

SEQ ID NO: 223279 - DNA, 2823 bp, Artificial Sequence
  derived and/or modified sequence
gcagtttgaccccggaagtgcgggcgctcagggagctgtcaccgtggtcggcggcggcggcggcggcggcggcacagagccggtggtggagccgccgaggccacctcgtgtatgcagagaccatgtgtgtctgatctgctgggatcctagagctggaacaggagggtcacgcagcacaatgccagctctgcccctggaccaactccagatcacccacaaggacccgaagacaggaaagctgaggacttcaccagcgctgcaccccgagcagaaggcagaccggtattttgtgttatacaaaccgccccctaaagacaacattcccgccctagtggaggagtacctggaacgcgccaccttcgtagccaatgacctcgactggctcctggccttgcctcacgataaattctggtgccaggtgatctttgacgagactctacagaagtgcctggactcctacctgcgctatgtcccccgcaaattcgacgagggggtggcctcagcccctgaggttgttgacatgcagaagcgcctccatcgaagtgtttttctcaccttcctccgcatgtccactcacaaggaatccaaagatcacttcatttccccttctgcgtttggagaaatcctctacaataacttcctctttgacattccaaagatcctggacctctgcgtgctctttggaaaaggcaactcaccactgctccagaagatgataggaaacatctttacacagcagccaagttactacagtgacctggatgaaaccctgcctaccatccttcaggtcttcagcaatatcctccagcactgtggtttgcaaggggacggggccaataccacaccccagaagcttgaggagaggggccgattgacccccagtgacatgcctctcctggaattaaaggacattgttctctacctttgtgatacctgcaccacactttgggcctttctggatatcttccctttggcttgccagaccttccagaagcacgacttttgttacagactagcttccttctacgaagcagcaattcccgaaatggagtctgcaattaagaagaggaggcttgaagatagcaagcttcttggtgacctgtggcagaggctctcccattccaggaagaagctaatggagattttccacatcatcctgaaccagatctgcctccttcccatcctagaaagcagctgtgacaacattcagggcttcatcgaagagttccttcagatcttcagctccttgctgcaggagaagaggttcctccgggactatgatgcactcttccccgtggccgaagacatcagcttgctgcagcaggcctcatcagtcttggacgagacgcggactgcctacatcctccaggcagtcgagagtgcatgggaaggggtggacagacggaaagccacagatgctaaagacccatcggtgattgaggagcctaatggggagcctaacggggtcacggtgacagcagaggcagtcagtcaagcatcatcacatccggagaactcggaggaagaggagtgcatgggagcagccgcggctgtgggccctgccatgtgtggggtggaactggactctctcatctcccaagtgaaggacctgctgccagaccttggtgagggcttcatcctggcctgcctggagtactaccactacgacccagagcaggtgatcaacaatatcctggaggagcggctggcccccaccctcagccagctggaccgcaacctagacagagaaatgaaaccagaccctacacccctgctgacgtctcgccacaacgtcttccagaatgacgagtttgatgtgttcagcagggactcagtagacctgagccgggtgcacaagggcaagagcaccaggaaggaggaaaacacgcggagtttgctgaacgacaagcgtgcagtggcggcacagcggcagcgctacgagcagtacagcgtggtggtggaggaggtgccactgcagccaggcgagagcctgccctaccacagtgtctactacgaggatgagtacgatgacacatacgatggcaaccaggtgggcgccaatgatgcagactctgatgacgagctcatcagccgcaggccattcaccatccctcaggtgctgagaaccaaagtgcctagagaagggcaggaggaggatgacgacgatgaggaagacgatgctgacgaggaggctcccaagcccgaccattttgttcaggaccctgcagtgctgagagagaaggcagaagccaggcgcatggcctttctcgccaagaaagggtaccggcatgacagctcaacagcagtggccggcagcccccgaggccatgggcagagccgcgagacaacccaggaacgcaggaagaaggaagccaacaaggcgacaagagccaaccacaaccggagaaccatggccgaccgcaagaggagcaaaggcatgatcccatcctgagacctggtgcagggccagtggggaggcagcggcaccagactcaccaggccgtgctcccatcgcctggggcctcctcactaggggccccaagttcaactcaacccctcaacagcctcagctttgcagcccctgagaaggccgcctctcatctaccagccagccatgagcgccttcctgcagaacacacagtgccttatgccacagccgaagaatccgtggggccggcaagcaggcaccttcccccagctgcgctagcgggaaagagatggggatggagtcccaaggcaagcgccccaaacctcgggccacaagacaccacttcccctttaccctggacagcaggaaacctgtatattcaaaaacacaaaaag

SEQ ID NO: 223280 - DNA, 2274 bp, Artificial Sequence
  derived and/or modified sequence
atgcccgccctgcccctggaccagctgcagatcacccacaaggaccccaagaccggcaagctgagaaccagccccgccctgcaccccgagcagaaggccgacagatacttcgtgctgtacaagcccccccccaaggacaacatccccgccctggtggaggagtacctggagagagccaccttcgtggccaacgacctggactggctgctggccctgccccacgacaagttctggtgccaggtgatcttcgacgagaccctgcagaagtgcctggacagctacctgagatacgtgcccagaaagttcgacgagggcgtggccagcgcccccgaggtggtggacatgcagaagagactgcacagaagcgtgttcctgaccttcctgagaatgagcacccacaaggagagcaaggaccacttcatcagccccagcgccttcggcgagatcctgtacaacaacttcctgttcgacatccccaagatcctggacctgtgcgtgctgttcggcaagggcaacagccccctgctgcagaagatgatcggcaacatcttcacccagcagcccagctactacagcgacctggacgagaccctgcccaccatcctgcaggtgttcagcaacatcctgcagcactgcggcctgcagggcgacggcgccaacaccaccccccagaagctggaggagagaggcagactgacccccagcgacatgcccctgctggagctgaaggacatcgtgctgtacctgtgcgacacctgcaccaccctgtgggccttcctggacatcttccccctggcctgccagaccttccagaagcacgacttctgctacagactggccagcttctacgaggccgccatccccgagatggagagcgccatcaagaagagaagactggaggacagcaagctgctgggcgacctgtggcagagactgagccacagcagaaagaagctgatggagatcttccacatcatcctgaaccagatctgcctgctgcccatcctggagagcagctgcgacaacatccagggcttcatcgaggagttcctgcagatcttcagcagcctgctgcaggagaagagattcctgagagactacgacgccctgttccccgtggccgaggacatcagcctgctgcagcaggccagcagcgtgctggacgagaccagaaccgcctacatcctgcaggccgtggagagcgcctgggagggcgtggacagaagaaaggccaccgacgccaaggaccccagcgtgatcgaggagcccaacggcgagcccaacggcgtgaccgtgaccgccgaggccgtgagccaggccagcagccaccccgagaacagcgaggaggaggagtgcatgggcgccgccgccgccgtgggccccgccatgtgcggcgtggagctggacagcctgatcagccaggtgaaggacctgctgcccgacctgggcgagggcttcatcctggcctgcctggagtactaccactacgaccccgagcaggtgatcaacaacatcctggaggagagactggcccccaccctgagccagctggacagaaacctggacagagagatgaagcccgaccccacccccctgctgaccagcagacacaacgtgttccagaacgacgagttcgacgtgttcagcagagacagcgtggacctgagcagagtgcacaagggcaagagcaccagaaaggaggagaacaccagaagcctgctgaacgacaagagagccgtggccgcccagagacagagatacgagcagtacagcgtggtggtggaggaggtgcccctgcagcccggcgagagcctgccctaccacagcgtgtactacgaggacgagtacgacgacacctacgacggcaaccaggtgggcgccaacgacgccgacagcgacgacgagctgatcagcagaagacccttcaccatcccccaggtgctgagaaccaaggtgcccagagagggccaggaggaggacgacgacgacgaggaggacgacgccgacgaggaggcccccaagcccgaccacttcgtgcaggaccccgccgtgctgagagagaaggccgaggccagaagaatggccttcctggccaagaagggctacagacacgacagcagcaccgccgtggccggcagccccagaggccacggccagagcagagagaccacccaggagagaagaaagaaggaggccaacaaggccaccagagccaaccacaacagaagaaccatggccgacagaaagagaagcaagggcatgatccccagctag

SEQ ID NO: 223281 - protein, 564 aa, Artificial Sequence
  derived and/or modified sequence
MATAERRALGIGFQWLSLATLVLICAGQGGRREDGGPACYGGFDLYFILDKSGSVLHHWNEIYYFVEQLAHKFISPQLRMSFIVFSTRGTTLMKLTEDREQIRQGLEELQKVLPGGDTYMHEGFERASEQIYYENRQGYRTASVIIALTDGELHEDLFFYSEREANRSRDLGAIVYCVGVKDFNETQLARIADSKDHVFPVNDGFQALQGIIHSILKKSCIEILAAEPSTICAGESFQVVVRGNGFRHARNVDRVLCSFKINDSVTLNEKPFSVEDTYLLCPAPILKEVGMKAALQVSMNDGLSFISSSVIITTTHCSDGSILAIALLILFLLLALALLWWFWPLCCTVIIKEVPPPPAEESEEEDDDGLPKKKWPTVDASYYGGRGVGGIKRMEVRWGEKGSTEEGAKLEKAKNARVKMPEQEYEFPEPRNLNNNMRRPSSPRKWYSPIKGKLDALWVLLRKGYDRVSVMRPQPGDTGRCINFTRVKNNQPAKYPLNNAYHTSSPPPAPIYTPPPPAPHCPPPPPSAPTPPIPSPPSTLPPPPQAPPPNRAPPPSRPPPRPSV

SEQ ID NO: 223282 - DNA, 1695 bp, Artificial Sequence
  derived and/or modified sequence
atggcaaccgccgagagaagggctctgggtatcggcttccagtggctgtccctcgctactctggtgctgatctgtgccggccaggggggtagaagggaggatggtggccccgcctgttacggggggttcgacctctatttcatactcgacaaatcgggatcagtattgcatcactggaacgagatatactactttgtcgagcagctggctcacaaattcatatctcctcagctgcggatgagcttcatagtgttctcaacccgcggcacaacgctgatgaaactgacagaagatcgcgaacaaataagacagggactcgaggagctgcagaaagttctgccaggcggcgacacctacatgcatgaaggattcgaaagagcttcagagcaaatttactacgaaaacaggcagggatataggacagcctccgtgataattgctctgacagacggcgaactccacgaggatttgtttttctattcagagcgcgaagctaacaggtcacgggacctcggagccatcgtgtattgtgtcggcgtcaaagacttcaacgaaactcagctggcccgcatagcagactctaaggatcacgtctttcccgtcaatgatggttttcaggctcttcagggcattattcatagtattttaaaaaagtcatgtattgagatcctcgccgctgagccctccaccatctgcgcaggcgaatcattccaggtagtggtgagaggaaatgggtttaggcacgcccgaaacgtggatagagtactctgttctttcaagataaatgactcggtcaccctgaacgagaagccttttagtgttgaggatacttacctgctgtgcccagcccctattctgaaagaggtgggcatgaaagccgccttacaggtatcaatgaatgacggattgtcctttatcagctcctcagtgataattacgactacccattgcagcgacgggtcaatcttggcaattgctctccttattctctttctactgctggccctagctctgctgtggtggttctggcctctatgttgtacggttatcattaaggaagtgcctccaccccctgctgaggagagtgaagaggaggacgacgacggcctgcccaagaaaaaatggccgacggtggacgcctcttactacggtggccgaggagtgggtggaattaaaagaatggaggtgaggtggggggagaagggctccaccgaagaaggagccaaactggagaaggccaagaacgcgcgtgtgaagatgcccgagcaggaatatgaatttcccgaacctagaaacttaaataacaatatgcgtcgcccatccagccctaggaaatggtattcccccatcaagggcaagttggacgccctctgggttcttcttcggaagggctatgatagagtgtcagtgatgagaccccagccgggtgatacaggcaggtgtatcaatttcactagagtgaaaaataaccagccagccaaatatccactgaataacgcctatcacaccagttcacctcctcctgctcctatttacaccccccctccccccgcccctcactgtcctccacccccaccatctgcccctactccacccataccaagcccaccaagcactttgccgccccccccccaggccccccccccaaaccgagctccacctcccagccggcctcccccgcggcccagcgtctag

SEQ ID NO: 223283 - DNA, 1695 bp, Artificial Sequence
  derived and/or modified sequence
atggccacagctgagcggcgggccctgggcatcggcttccagtggctgagcctggccaccctggtgctgatctgtgccggccagggcggcagaagagaagatggcggccctgcctgctacggcggctttgacctgtacttcatcctggacaagagcggctctgtgctgcaccactggaatgagatctactactttgtggagcagctggcccacaagttcatcagcccccagctgaggatgtccttcatcgtgttcagcacccggggcaccaccctgatgaagctgacagaagatcgggagcagatccggcagggcctggaggagctgcagaaggtgctgcccggcggggacacctacatgcatgagggctttgagcgggccagcgagcagatctactatgagaaccggcagggctacagaacagccagcgtcatcatcgccctgacagatggagagctgcatgaagatctcttcttctacagcgagcgggaggccaacagaagccgggacctgggcgccatcgtgtactgtgtgggcgtgaaggacttcaatgagacccagctggccagaattgctgacagcaaggaccacgtgtttcctgtgaatgatggcttccaggccctgcagggcatcatccacagcatcctgaagaagagctgcatcgagatcctggccgctgagcccagcaccatctgtgccggggagagcttccaggtggtggtgagaggaaatggcttcagacatgccagaaatgtggacagagtgctgtgcagcttcaagatcaatgacagcgtgaccctgaatgagaagcccttctctgtggaggacacctacctgctgtgcccagcccccatcctgaaggaggtgggcatgaaggccgccctgcaggtgtccatgaatgatggcctgtccttcatcagcagcagcgtcatcatcaccaccacccactgcagtgatggcagcatcctggccatcgccctgctgatcctcttcctgctgctggccctggccctgctgtggtggttctggcccctgtgctgcaccgtcatcatcaaggaggtgcccccacctcctgctgaggagagcgaggaggaggatgatgatggcctgcccaagaagaagtggcccaccgtggatgccagctactatggaggccggggcgtgggcggcatcaagaggatggaggtgcgctggggcgagaagggcagcacagaggagggcgccaagctggagaaggccaagaatgcccgggtgaagatgcctgagcaggagtatgagttccctgagcccaggaacctgaacaacaacatgaggcggcccagcagccccaggaagtggtacagccccatcaagggcaagctggatgccctgtgggtgctgctgaggaagggctatgacagagtgtctgtgatgaggccccagcccggggacaccggccgctgcatcaacttcaccagggtgaagaacaaccagcctgccaagtaccccctgaacaatgcctaccacaccagcagccccccaccagcccccatctacaccccacctcctccagccccccactgccccccacctcctccttctgcccccaccccacccatccccagcccccccagcaccctgcccccaccaccccaggcccccccacccaacagagcccccccacccagccggcccccaccccggcccagcgtgtag

SEQ ID NO: 223284 - DNA, 1695 bp, Artificial Sequence
  derived and/or modified sequence
atggccaccgccgagcggcgggccctgggcatcggcttccagtggctttctttggccacccttgtgttgatctgtgctggacagggcgggaggcgggaggatgggggaccagcatgttacggagggttcgacctgtatttcatactggataaatccggcagtgtattgcaccattggaacgagatatactacttcgtggaacagctcgctcataaatttatttcaccccagctgcgcatgtccttcatagtgttcagtacacggggtaccacactgatgaagctgacagaagacagagaacagatccgccagggcttggaggagctgcagaaagtactacctggcggcgatacatacatgcacgaggggttcgagcgcgcaagtgagcagatatactacgagaatagacagggctaccgcacagcctcagtgataatcgccctaaccgacggcgaattacacgaagacttgttcttttatagcgagcgagaagctaacaggagtagagaccttggggctatcgtgtactgcgttggtgtgaaagactttaatgaaacacagttggccagaatagccgattcaaaggatcacgtgtttcccgttaatgatggtttccaggcactccagggaataattcactcgatcctgaagaagagctgtattgagattctggcagctgagccctccacaatttgcgcaggcgagtcattccaggttgtcgtcagggggaacggcttccgacatgcaaggaatgtggatcgtgtgctctgctcttttaagatcaatgatagtgtaaccctaaacgagaaacctttctcagtcgaggacacatatctgctttgtcctgcaccaatcctgaaggaagtggggatgaaagcggctctccaggtgtccatgaacgatggattgtctttcatctcgtcatcagttataattacaactacacactgcagcgacggaagcattttggccatcgcgctcctcatcctgtttctcctccttgcgcttgccctgctttggtggttctggcctttgtgttgcaccgtaatcataaaagaggtgccacccccaccggcggaggaatcggaagaggaagatgacgacgggctccctaagaagaaatggccaactgtggacgcctcctactacggtggacgtggtgtcggtggcattaaaagaatggaagtgcgttggggagagaaggggtcaaccgaagagggcgccaagttggagaaagctaagaacgcccgtgtgaagatgccggagcaagaatatgagttccctgaaccgcgaaatctgaacaataacatgaggcggccaagtagtcccagaaagtggtactcccccatcaagggcaaactagacgctctgtgggttctactgaggaaaggctatgacagagtatcagtcatgcgtccccaacccggggacaccggccgttgcattaacttcactcgagtgaaaaacaaccagcctgctaaatacccgctcaataacgcataccacacctccagccctccgccggctccaatatatactccgcctccacctgcgccgcattgcccccctccaccccctagcgctcctacacccccgattccctcaccaccctctactcttcctccgcctccccaggccccacctccgaatagggctcctcccccgtctcgcccccctccacgtccatcagtatag

SEQ ID NO: 223285 - DNA, 1695 bp, Artificial Sequence
  derived and/or modified sequence
atggccacagccgagaggcgcgctctcggtatcggttttcagtggctttccctggcaaccctcgtgcttatatgtgccggtcagggcggacgacgggaagacgggggacccgcatgctacggagggttcgacctttactttatccttgataaatcaggaagtgtgctacaccattggaatgagatttattacttcgtggagcagctggcacataagttcatctcacctcagttgcggatgtccttcatcgtgttctcaacacggggtaccactctgatgaaactgaccgaggaccgagagcagatcaggcagggactcgaggagcttcagaaggttctgcccggtggcgacacctacatgcacgaaggattcgaaagagcatcagaacagatctactatgaaaaccggcagggataccgtacagcatctgtgattattgcgcttaccgacggcgaattacacgaagatctttttttctactctgaacgggaagcaaaccgtagtagggacctgggtgctatcgtgtattgcgtgggggtgaaggactttaatgagacacaactagcacgcattgcagatagcaaagatcacgttttccccgtgaacgatggtttccaggccctccagggcatcatacattcaatactcaaaaagtcatgcattgagatcctggcggctgagccatctactatttgcgcaggagagagttttcaagtcgtcgtgcgtgggaacggattccgacacgccaggaatgtagaccgggttctttgttcattcaagatcaatgatagcgttacactgaatgagaaacccttcagcgtcgaggatacatacctgctatgccctgccccaatccttaaggaggtgggcatgaaggcagccctgcaggtgtctatgaatgatggcctgtcttttattagcagctccgttattattactaccacacattgcagtgacggcagtatactggcaattgcacttttaattctgtttctgttattggcactggcactgctctggtggttctggccactgtgttgcaccgttattatcaaagaggtgccaccgccacctgcagaagagtctgaagaagaggacgacgatgggctccccaagaagaaatggcctaccgtcgatgcgtcttactatggcggaaggggggtgggcggaataaagcgtatggaagtgcggtggggggaaaagggaagcaccgaggaaggcgctaaactagagaaggccaaaaatgcccgtgtcaagatgccggagcaagagtatgagttcccagagccaagaaatctaaacaacaacatgaggcggccatcaagccccagaaagtggtacagccccattaaaggaaaactcgatgcactgtgggtgctcctgagaaaaggctacgatcgggtgtcagttatgagaccacaacccggagatacaggccgttgcatcaatttcacacgcgttaagaacaaccaaccagccaaataccccctgaataatgcttaccatacttcctcaccccctcccgctcctatctacaccccgcctcctcccgcaccacactgtccccctccccctccctcagctccaactccacccatcccaagtccaccctccacactgccccctccaccccaagcaccacccccaaatcgtgctccccctccaagccgacccccacccaggccatctgtatag

SEQ ID NO: 223286 - DNA, 5859 bp, Artificial Sequence
  derived and/or modified sequence
gacggaactccttccattgcaaaagctcggcgcggcctcgggagctgcccggcggccccggaccgaggcagccctcccctttaaaagaagcggaggacaggattgggatccttgaaacccgaaacccagaaacagcatcggagcggaaaccagaggggaaaccttgaactcctccagacaattgcttccggggagttgcgagggagcgagggggaataaaggacccgcgaggaagggcccgcggatggcgcgtccctgagggtcgtggcgagttcgcggagcgtgggaaggagcggaccctgctctccccgggctgcgggccatggccacggcggagcggagagccctcggcatcggcttccagtggctctctttggccactctggtgctcatctgcgccgggcaagggggacgcagggaggatgggggtccagcctgctacggcggatttgacctgtacttcattttggacaaatcaggaagtgtgctgcaccactggaatgaaatctattactttgtggaacagttggctcacaaattcatcagcccacagttgagaatgtcctttattgttttctccacccgaggaacaaccttaatgaaactgacagaagacagagaacaaatccgtcaaggcctagaagaactccagaaagttctgccaggaggagacacttacatgcatgaaggatttgaaagggccagtgagcagatttattatgaaaacagacaagggtacaggacagccagcgtcatcattgctttgactgatggagaactccatgaagatctctttttctattcagagagggaggctaataggtctcgagatcttggtgcaattgtttactgtgttggtgtgaaagatttcaatgagacacagctggcccggattgcggacagtaaggatcatgtgtttcccgtgaatgacggctttcaggctctgcaaggcatcatccactcaattttgaagaagtcctgcatcgaaattctagcagctgaaccatccaccatatgtgcaggagagtcatttcaagttgtcgtgagaggaaacggcttccgacatgcccgcaacgtggacagggtcctctgcagcttcaagatcaatgactcggtcacactcaatgagaagcccttttctgtggaagatacttatttactgtgtccagcgcctatcttaaaagaagttggcatgaaagctgcactccaggtcagcatgaacgatggcctctcttttatctccagttctgtcatcatcaccaccacacactgttctgacggttccatcctggccatcgccctgctgatcctgttcctgctcctagccctggctctcctctggtggttctggcccctctgctgcactgtgattatcaaggaggtccctccaccccctgccgaggagagtgaggaagaagatgatgatggtctgcctaagaaaaagtggccaacggtagacgcctcttattatggtgggagaggcgttggaggcattaaaagaatggaggttcgttggggagaaaagggctccacagaagaaggtgctaagttggaaaaggcaaagaatgcaagagtcaagatgccggagcaggaatatgaattccctgagccgcgaaatctcaacaacaatatgcgtcggccttcttccccccggaagtggtactctccaatcaagggaaaactcgatgccttgtgggtcctactgaggaaaggatatgatcgtgtgtctgtgatgcgtccacagccaggagacacggggcgctgcatcaacttcaccagggtcaagaacaaccagccagccaagtacccactcaacaacgcctaccacacctcctcgccgcctcctgcccccatctacactcccccacctcctgcgccccactgccctcccccgccccccagcgcccctacccctcccatcccgtccccaccttccacccttccccctcctccccaggctccacctcccaacagggcacctcctccctcccgccctcctccaaggccttctgtctagagcccaaagttcctgctctgggctctctcagaaacttcaggagatgttagaacaagtctttccagttagagaagaggagtggtgataaagcccactgaccttcacacattctaaaaattggttggcaatgccagtataccaacaatcatgatcagctgaaagaaacagatattttaaattgccagaaaacaaatgatgaggcaactacagtcagatttatagccagccatctatcacctctagaaggttccagagacagtgaaactgcaagatgctctcaacaggattatgtctcatggagaccagtaagaaaatcatttatctgaaggtgaaatgcagagttggataagaaatacattgctgggtttctaaaatgctgccttcctgcctctactccacctccatccctggactttggacccttggcctaggagcctaaggaccttcacccctgtgcaccacccaagaaagaggaaaactttgcctacaactttggaaatgctggggtccctggtgtggtaagaaactcaacatcagacgggtatgcagaaggatgttcttctgggatttgcaggtacataaaaaatgtatggcatcttttccttgcaaattcttccagtttccaagtgagaaggggagcaggtgtttactgatggaaaaggtatgttgctatgttgatgtgtaagtgaaatcagttgtgtgcaatagacaggggcgtattcatgggagcatcagccagtttctaaaacccacaggccatcagcagctagaggtggctggctttggccagacatggaccctaaatcaacagacaatggcattgtcgaagagcaacctgttaatgaatcatgttaaaaatcaaggtttggcttcagtttaaatcacttgaggtatgaagtttatcctgttttccagagataaacataagttgatcttcccaaaataccatcattaggacctatcacacaatatcactagttttttttgtttgtttgttttttgttttttttcttggtaaagccatgcaccacagacttctgggcagagctgagagacaatggtcctgacataataaggatctttgattaacccccataaggcatgtgtgtgtatacaaatatacttctctttggcttttcgacatagaacctcagctgttaaccaaggggaaatacatcagatctgcaacacagaaatgctctgcctgaaatttccaccatgcctaggactcaccccatttatccaggtctttctggatctgtttaatcaataagccctataatcacttgctaaacactgggcttcatcacccagggataaaaacagagatcattgtcttggacctcctgcatcagcctattcaaaattatctctctctctagctttccacaaatcctaaaattcctgtcccaagccacccaaattctcagatcttttctggaacaaggcagaatataaaataaatatacatttagtggcttgggctatggtctccaaagatccttcaaaaatacatcaagccagcttcattcactcactttacttagaacagagatataagggcctgggatgcatttattttatcaataccaatttttgtggccatggcagacattgctaatcaatcacagcactatttcctattaagcccactgatttcttcacaatccttctcaaattacaattccaaagagccgccactcaacagtcagatgaacccaacagtcagatgagagaaatgaaccctacttgctatctctatcttagaaagcaaaaacaaacaggagtttccagggagaatgggaaagccagggggcataaaaggtacagtcaggggaaaatagatctaggcagagtgccttagtcagggaccacgggcgctgaatctgcagtgccaacaccaaactgacacatctccaggtgtacctccaaccctagccttctcccacagctgcctacaacagagtctcccagccttctcagagagctaaaaccagaaatttccagactcatgaaagcaaccccccagcctctccccaaccctgccgcattgtctaatttttagaacactaggcttcttctttcatgtagttcctcataagcaggggccagaatatctcagccacctgcagtgacattgctggacccctgaaaaccattccataggagaatgggttccccaggctcacagtgtagagacattgagcccatcacaactgttttgactgctggcagtctaaaacagtccacccaccccatggcactgccgcgtgattcccgcggccattcagaagttcaagccgagatgctgacgttgctgagcaacgagatggtgagcatcagtgcaaatgcaccattcagcacatcagtcatatgcccagtgcagttacaagatgttgtttcggcaaagcattttgatggaatagggaactgcaaatgtatgatgattttgaaaaggctcagcaggatttgttcttaaaccgactcagtgtgtcatccccggttatttagaattacagttaagaaggagaaacttctataagactgtatgaacaaggtgatatcttcatagtgggctattacaggcaggaaaatgttttaactggtttacaaaatccatcaatacttgtgtcattccctgtaaaaggcaggagacatgtgattatgatcaggaaactgcacaaaattattgttttcagcccccgtgttattgtccttttgaactgtttttttttttattaaagccaaatttgtgttgtatatattcgtattccatgtgttagatggaagcatttcctatccagtgtgaataaaaagaacagttgtagtaaattattataaagccgatgatatttcatggcaggttattctaccaagctgtgcttgttggtttttcccatgactgtattgcttttataaatgtacaaatagttactgaaatgacgagacccttgtttgcacagcattaataagaaccttgataagaaccatattctgttgacagccagctcacagtttcttgcctgaagcttggtgcaccctccagtgagacacaagatctctcttttaccaaagttgagaacagagctggtggattaattaatagtcttcgatatctggccatgggtaacctcattgtaactatcatcagaatgggcagagatgatcttgaagtgtcacatacactaaagtccaaacactatgtcagatgggggtaaaatccattaaagaacaggaaaaaataattataagatgataagcaaatgtttcagcccaatgtcaacccagttaaaaaaaaaattaatgctgtgtaaaatggttgaattagtttgcaaactatataaagacatatgcagtaaaaagtctgttaatgcacatcctgtgggaatggagtgttctaaccaattgccttttcttgttatctgagctctcctatattatcatactcagataaccaaattaaaagaattagaatatgatttttaatacacttaacattaaactcttctaactttcttctttctgtgataattcagaagatagttatggatcttcaatgcctctgagtcattgttataaaaaatcagttatcactataccatgctataggagactgggcaaaacctgtacaatgacaaccctggaagttgctttttttaaaaaaataataaatttcttaaatcaactcttttttctggttgtctgtttgttataaagtgcaacgtattcaagtcctcaatatcctgatcataataccatgctataggagactgggcaaaacctgtacaatgacaaccctggaagttgcttttttaaaaaaaataataaatttcttaaatcaa

SEQ ID NO: 223287 - DNA, 1695 bp, Artificial Sequence
  derived and/or modified sequence
atggccaccgccgagagaagagccctgggcatcggcttccagtggctgagcctggccaccctggtgctgatctgcgccggccagggcggcagaagagaggacggcggccccgcctgctacggcggcttcgacctgtacttcatcctggacaagagcggcagcgtgctgcaccactggaacgagatctactacttcgtggagcagctggcccacaagttcatcagcccccagctgagaatgagcttcatcgtgttcagcaccagaggcaccaccctgatgaagctgaccgaggacagagagcagatcagacagggcctggaggagctgcagaaggtgctgcccggcggcgacacctacatgcacgagggcttcgagagagccagcgagcagatctactacgagaacagacagggctacagaaccgccagcgtgatcatcgccctgaccgacggcgagctgcacgaggacctgttcttctacagcgagagagaggccaacagaagcagagacctgggcgccatcgtgtactgcgtgggcgtgaaggacttcaacgagacccagctggccagaatcgccgacagcaaggaccacgtgttccccgtgaacgacggcttccaggccctgcagggcatcatccacagcatcctgaagaagagctgcatcgagatcctggccgccgagcccagcaccatctgcgccggcgagagcttccaggtggtggtgagaggcaacggcttcagacacgccagaaacgtggacagagtgctgtgcagcttcaagatcaacgacagcgtgaccctgaacgagaagcccttcagcgtggaggacacctacctgctgtgccccgcccccatcctgaaggaggtgggcatgaaggccgccctgcaggtgagcatgaacgacggcctgagcttcatcagcagcagcgtgatcatcaccaccacccactgcagcgacggcagcatcctggccatcgccctgctgatcctgttcctgctgctggccctggccctgctgtggtggttctggcccctgtgctgcaccgtgatcatcaaggaggtgccccccccccccgccgaggagagcgaggaggaggacgacgacggcctgcccaagaagaagtggcccaccgtggacgccagctactacggcggcagaggcgtgggcggcatcaagagaatggaggtgagatggggcgagaagggcagcaccgaggagggcgccaagctggagaaggccaagaacgccagagtgaagatgcccgagcaggagtacgagttccccgagcccagaaacctgaacaacaacatgagaagacccagcagccccagaaagtggtacagccccatcaagggcaagctggacgccctgtgggtgctgctgagaaagggctacgacagagtgagcgtgatgagaccccagcccggcgacaccggcagatgcatcaacttcaccagagtgaagaacaaccagcccgccaagtaccccctgaacaacgcctaccacaccagcagccccccccccgcccccatctacaccccccccccccccgccccccactgccccccccccccccccagcgcccccaccccccccatccccagcccccccagcaccctgcccccccccccccaggcccccccccccaacagagcccccccccccagcagacccccccccagacccagcgtgtag

SEQ ID NO: 223288 - protein, 756 aa, Artificial Sequence
  derived and/or modified sequence
MAWSPPATLFLFLLLLGQPPPSRPQSLGTTKLRLVGPESKPEEGRLEVLHQGQWGTVCDDNFAIQEATVACRQLGFEAALTWAHSAKYGQGEGPIWLDNVRCVGTESSLDQCGSNGWGVSDCSHSEDVGVICHPRRHRGYLSETVSNALGPQGRRLEEVRLKPILASAKQHSPVTEGAVEVKYEGHWRQVCDQGWTMNNSRVVCGMLGFPSEVPVDSHYYRKVWDLKMRDPKSRLKSLTNKNSFWIHQVTCLGTEPHMANCQVQVAPARGKLRPACPGGMHAVVSCVAGPHFRPPKTKPQRKGSWAEEPRVRLRSGAQVGEGRVEVLMNRQWGTVCDHRWNLISASVVCRQLGFGSAREALFGARLGQGLGPIHLSEVRCRGYERTLSDCPALEGSQNGCQHENDAAVRCNVPNMGFQNQVRLAGGRIPEEGLLEVQVEVNGVPRWGSVCSENWGLTEAMVACRQLGLGFAIHAYKETWFWSGTPRAQEVVMSGVRCSGTELALQQCQRHGPVHCSHGGGRFLAGVSCMDSAPDLVMNAQLVQETAYLEDRPLSQLYCAHEENCLSKSADHMDWPYGYRRLLRFSTQIYNLGRTDFRPKTGRDSWVWHQCHRHYHSIEVFTHYDLLTLNGSKVAEGHKASFCLEDTNCPTGLQRRYACANFGEQGVTVGCWDTYRHDIDCQWVDITDVGPGNYIFQVIVNPHYEVAESDFSNNMLQCRCKYDGHRVWLHNCHTGNSYPANAELSLEQEQRLRNNLI

SEQ ID NO: 223289 - DNA, 2271 bp, Artificial Sequence
  derived and/or modified sequence
atggcctggagtcccccagccaccctgttcctgttcttactgttgttgggacagccaccaccctccagacctcaaagtctcgggaccacgaaactgcgcctagtgggtccagagtcaaagcctgaagaaggacgcctcgaggtgctgcaccagggtcagtgggggacggtgtgcgatgacaactttgcaatacaggaagccacggttgcctgtcggcagctgggctttgaggccgcactgacttgggcccatagcgctaaatatggccagggggaaggacccatatggttagataacgttcggtgtgtggggaccgaatcctcactggaccagtgcgggagcaatggttggggagtctcagactgctcccatagtgaggacgtaggggttatttgccaccctcgccgacaccgcgggtacctttccgaaacagtgagtaatgcattaggaccccagggacgcagactggaggaggtccggttgaaaccaattctggcttcagcgaaacagcactcaccggtgaccgagggagctgttgaagtcaagtatgagggccactggagacaggtttgcgaccagggatggaccatgaacaactcccgggtcgtttgcggaatgctgggctttccaagtgaagtccccgtggacagtcactattacaggaaagtgtgggacttaaaaatgcgggatcctaaatcacgcctcaaatcactcacaaacaagaatagcttttggatccaccaagtaacgtgtttgggaacagagccccatatggccaactgtcaggttcaggtggctcccgcccgtggcaagctacgtcccgcttgtccaggcggcatgcatgcagtggtctcctgtgtagcgggaccccactttaggcctcctaagacaaaacctcagcgtaagggaagctgggccgaagagcccagggtccgcctgcggtctggagctcaagtgggcgagggtcgggtcgaagttctgatgaacagacagtgggggacggtgtgcgatcacagatggaacctgatctccgcttccgtggtctgccgccagctgggctttggtagtgccagggaagctctcttcggcgcaagactggggcaggggctggggccaatccatttgtccgaggttcggtgtcgcggatacgaacggacactgtccgactgccctgcccttgagggatctcagaatggatgtcagcacgagaacgacgccgccgtacgctgtaatgtgccaaacatgggattccagaatcaggtcagacttgcgggcgggagaatacccgaagaaggcctgctcgaagttcaagtcgaggttaatggtgtgccacggtggggatctgtgtgttcagaaaactggggcctcacagaagccatggtcgcatgtcgacagttgggactgggcttcgccatccatgcatacaaagagacatggttttggtcgggcactccgagggctcaagaagtggtgatgtctggggtacgttgttccgggacagagctggcattgcagcagtgtcagcggcacgggccagttcattgcagtcacggaggtggaagattcctggccggggttagctgcatggatagtgccccagatctggtaatgaatgcccagctagtgcaggagaccgcctacttggaggacagaccactgtctcagctctactgcgcccacgaagaaaactgcctcagtaagtctgccgaccacatggactggccgtacggctatagaaggctattgagatttagtacccaaatatacaacctgggcagaacagacttccgcccaaagacggggagggatagctgggtatggcaccagtgccacagacactatcattcaatagaggtgtttacccattatgatttgctcacactaaacggctctaaggtggccgaaggacataaggcaagtttctgcttagaggacaccaactgcccaaccggtctccagaggagatatgcctgcgccaacttcggcgagcagggcgtgaccgtgggttgctgggatacatacaggcacgacatcgattgccaatgggtcgacataaccgatgtgggacccggcaactacatatttcaggtgattgttaatccgcattatgaggtggcagaatctgacttttccaataatatgcttcagtgccggtgtaagtatgatggacacagagtgtggcttcataattgccacactggcaatagctaccccgccaatgccgagttgtccctggaacaagaacaaaggcttcgaaacaatctgatctag

SEQ ID NO: 223290 - DNA, 2271 bp, Artificial Sequence
  derived and/or modified sequence
atggcctggagccccccagccaccctcttcctgttcctgctgctgctgggccagcccccacccagccggccccagagcctgggcaccaccaagctgcggctggtgggccctgagagcaagccagaggagggccgcctggaggtgctgcaccagggccagtggggcaccgtgtgtgatgacaactttgccatccaggaggccaccgtggcctgccggcagctgggctttgaggccgccctgacctgggcccacagcgccaagtatggccagggcgagggccccatctggctggacaacgtgcgctgtgtgggcacagagagcagcctggaccagtgtggcagcaatggctggggcgtgtctgactgcagccacagtgaagatgtgggcgtcatctgccaccccaggaggcaccggggctacctgtctgagaccgtgtccaatgccctgggcccccagggccggcggctggaggaggtgcggctgaagcccatcctggccagcgccaagcagcacagccctgtgacagaaggagctgtggaggtgaagtatgagggccactggaggcaggtgtgtgaccagggctggaccatgaacaacagccgggtggtgtgtggcatgctgggcttccccagcgaggtgcctgtggacagccactactacaggaaggtgtgggacctgaagatgagggaccccaagagccggctgaagagcctgaccaacaagaacagcttctggatccaccaggtgacctgcctgggcacagagccccacatggccaactgccaggtgcaggtggccccagcccggggcaagctgcggcctgcctgccctgggggcatgcatgctgtggtgtcctgtgtggccggcccccacttccggccccccaagaccaagccccagaggaagggctcctgggccgaggagccccgggtgcggctgcggagcggggcccaggtgggggagggccgggtggaggtgctgatgaaccggcagtggggcaccgtgtgtgaccaccgctggaacctgatcagcgcctctgtggtgtgccggcagctgggcttcggcagcgcccgggaggccctgtttggagcccggctgggccagggcctgggccccatccacctgtctgaggtgcgctgccggggctatgaaagaaccctgagtgactgcccagccctggagggcagccagaatggctgccagcatgaaaatgatgctgctgtgcgctgcaatgtgcccaacatgggcttccagaaccaggtgcggctggccggcggccgcatccctgaggagggcctgctggaggtgcaggtggaggtgaatggagtgccccgctggggctctgtgtgcagcgagaactggggcctgacagaggccatggtggcctgccggcagctgggcctgggctttgccatccacgcctacaaggagacctggttctggagcggcaccccccgggcccaggaggtggtgatgtctggagtgcgctgcagcggcacagagctggccctgcagcagtgccagagacatggccctgtgcactgcagccatggaggcggccgcttcctggccggcgtgtcctgcatggattctgccccagacctggtgatgaatgcccagctggtgcaggagacagcctacctggaggaccggcccctgagccagctgtactgtgcccacgaggagaactgcctgagcaagtctgctgaccacatggactggccctacggctacagaaggctgctgcgcttcagcacccagatctacaacctgggccgcacagacttccggcccaagacaggccgggacagctgggtgtggcaccagtgccaccgccactaccacagcattgaggtgttcacccactatgacctgctgaccctgaatggcagcaaggtggccgagggccacaaggccagcttctgcctggaggacaccaactgccccaccggcctgcagaggagatatgcctgtgccaactttggagagcagggcgtgacagtgggctgctgggacacctacagacatgacatcgactgccagtgggtggacatcacagatgtgggccctggcaactacatcttccaggtgattgtgaacccccactatgaggtggccgagagtgacttcagcaacaacatgctgcagtgccgctgcaagtatgatggccaccgggtgtggctgcacaactgccacactggaaacagctacccagccaatgctgagctgagcctggagcaggagcagaggctgaggaacaacctgatctag

SEQ ID NO: 223291 - DNA, 3653 bp, Artificial Sequence
  derived and/or modified sequence
ggctggggggccgcgggcgggaggcggataaaaaggccccagggcgcccggggagggagcccgttagcgctgctccgccgcggcgcccgcccagccccggactgtccgcgctccatctggtatcttggcctcagctgtccttgaagtcaccatggcgtggtccccaccagccaccctctttctgttcctgctgctgctaggccagccccctcccagcaggccacagtcactgggcaccactaagctccggctggtgggcccagagagcaagccagaggagggccgcctggaggtgctgcaccagggccagtggggcaccgtgtgtgatgacaactttgctatccaggaggccacagtggcttgccgccagctgggcttcgaagctgccttgacctgggcccacagtgccaagtacggccaaggggagggacccatctggctggacaatgtgcgctgtgtgggcacagagagctccttggaccagtgcgggtctaatggctggggagtcagtgactgcagtcactcagaagacgtaggggtgatatgccacccccggcgccatcgtggctacctttctgaaactgtctccaatgcccttgggccccagggccggcggctggaggaggtgcggctcaagcccatccttgccagtgccaagcagcatagcccagtgaccgagggagccgtggaggtgaagtatgagggccactggcggcaggtgtgtgaccagggctggaccatgaacaacagcagggtggtgtgcgggatgctgggcttccccagcgaggtgcctgtcgacagccactactacaggaaagtctgggatctgaagatgagggaccctaagtctaggctgaagagcctgacgaataagaactccttctggatccaccaggtcacctgcctggggacagagccccacatggccaactgccaggtgcaggtggctccagcccggggcaagctgcggccagcctgcccaggtggcatgcacgctgtggtcagctgtgtggcagggcctcacttccgcccaccgaagacaaagccacaacgcaaagggtcctgggcagaggagccgagggtgcgcctgcgctccggggcccaggtgggcgagggccgggtggaagtgctcatgaaccgccagtggggcacggtctgtgaccacaggtggaacctcatctctgccagtgtcgtgtgtcgtcagctgggctttggctctgctcgggaggccctctttggggcccggctgggccaagggctagggcccatccacctgagtgaggtgcgctgcaggggatatgagcggaccctcagcgactgccctgccctggaagggtcccagaatggttgccaacatgagaatgatgctgctgtcaggtgcaatgtccctaacatgggctttcagaatcaggtgcgcttggctggtgggcgtatccctgaggaggggctattggaggtgcaggtggaggtgaacggggtcccacgctgggggagcgtgtgcagtgaaaactgggggctcaccgaagccatggtggcctgccgacagctcggcctgggttttgccatccatgcctacaaggaaacctggttctggtcggggacgccaagggcccaggaggtggtgatgagtggggtgcgctgctcaggcacagagctggccctgcagcagtgccagaggcacgggccggtgcactgctcccacggtggcgggcgcttcctggctggagtctcctgcatggacagtgcaccagacctggtgatgaacgcccagctagtgcaggagacggcctacttggaggaccgcccgctcagccagctgtattgtgcccacgaggagaactgcctctccaagtctgcggatcacatggactggccctacggataccgccgcctattgcgcttctccacacagatctacaatctgggccggactgactttcgtccaaagactggacgcgatagctgggtttggcaccagtgccacaggcattaccacagcattgaggtcttcacccactacgacctcctcactctcaatggctccaaggtggctgaggggcacaaggccagcttctgtctggaggacacaaactgccccacaggactgcagcggcgctacgcatgtgccaactttggagaacagggagtgactgtaggctgctgggacacctaccggcatgacattgattgccagtgggtggatatcacagatgtgggccccgggaattatatcttccaggtgattgtgaacccccactatgaagtggcagagtcagatttctccaacaatatgctgcagtgccgctgcaagtatgatgggcaccgggtctggctgcacaactgccacacagggaattcatacccagccaatgcagaactctccctggagcaggaacagcgtctcaggaacaacctcatctgaagctgtcactgcacactcctagctgctgccgatacaccagatacctcagcttattggagccatgcccttcacagagtcccaactcagaggaaaagggccagtgccaaggggcaccaagaacctgctcaggaagccttttgatggcaagatcaccaatccagatggtattgctccctcaggatggctctgggcctgcccctaagggcctgtggcctatggaatatgtcctccaggctttgctcagctgagctcctcttctgtaaggaaacccagtcatccctgaatcttgccacagagatccgggattcaggagctctcagtttcttagggatggactatggcccagtcccccatctaagtggtgctttgcaaatgtcttggaggagtataggacagaggaccaaaatacacagcaggtagtgttagctctctgctaggagctcaaagcaacacaacttgtatcaaaatcacaactggcagagaagctggtggatccaatcctttcttcatctgttgttatttagaactcacctctcacactctgttctttagtgtccttacctttatcttaccacacacatgggtgtttctattatccttggaagcacagacctcgggcatccccttattgcctgatgggccaacaccaacagttacggagtgcttgagaaggggcaagtttcacagaaatggccagatagggccttcctacagagcagcaagagtaggccaagcagaaagactgctgaggtaacacggaccccagcccctgtcagggcctctgccaaggaaataatatggaccatttacctggcaggcagtctgctctctctcaggatcaccacgcatctcaggattggtctaaacttcaagtctcaaccaagtgtctgaagtgaactttgcattgaataaatttttgccatggaaagaacatcaaacaagccactcatctctacagagataagaaaacaagtttggcagagcaagagacagaagaccgtggagaaatcagaagggggaacagtcagtttagttaaggatggaacctgggaaaggccaccattcctgcttgatggggctctgatttgctcttgctcaagtggaataaaaccccatggtcttcttgacatgattcttgatcttttctccactgagacacacttaagtgatgatccttacaggactgacaccctaatgccaataaaagttgctcattatggactgctacaaa

SEQ ID NO: 223292 - DNA, 2271 bp, Artificial Sequence
  derived and/or modified sequence
atggcctggagcccccccgccaccctgttcctgttcctgctgctgctgggacagccccccccttctcggcctcagtcgttgggtaccacgaaactgagacttgttggccccgagtccaaaccagaggagggcaggctagaggtgttgcaccagggacaatgggggaccgtctgcgatgataattttgcgattcaggaggcaacggtagcctgccgacagctgggttttgaagcggccctgacatgggcccattcagctaagtacggacagggagaaggacccatatggctggacaatgtaagatgcgtcggaaccgaaagtagcctggatcaatgcggaagcaacgggtggggtgtgtcggattgctctcactctgaagatgtaggggtaatctgccatcccagacggcatcgaggttatctcagcgagacagtgtccaatgcactgggccctcagggcaggaggctcgaggaagtcaggctgaagccgatcttagcatcagcaaagcagcactcacccgtgaccgagggagccgttgaggtaaagtatgagggacactggaggcaagtgtgtgatcagggctggacaatgaataatagcagggtggtgtgcggaatgctgggcttccccagcgaggttccagtcgattctcactattaccgcaaggtgtgggatctgaaaatgcgggaccccaagagtagattgaagagcttaaccaacaagaactccttttggattcaccaggtaacatgtctaggcaccgaacctcatatggctaattgtcaggtgcaggtcgcgccggcccgcgggaagcttcggcctgcttgcccgggcggcatgcacgctgttgttagttgcgtggcagggcctcatttccgccctcccaaaactaagcctcagcggaaagggagttgggcggaggagccaagggtgagactgaggtctggggcccaggtgggcgaggggagagttgaggtattgatgaatcgacaatggggcactgtctgtgaccaccggtggaatcttattagcgctagcgtagtctgccggcagcttgggtttggaagtgctagggaggccctgttcggagcccgacttggacaggggctgggccccatccatctttccgaggtaaggtgcaggggctatgagcgaaccttatctgactgtcctgcactggaaggctcccagaacggttgccaacacgagaatgacgcagccgtgcggtgcaacgtgcccaacatgggattccagaatcaagtgcggttggcaggcggcagaatccccgaggaggggctgctggaagttcaggttgaggtgaacggggtccccagatggggcagcgtttgctcagagaactggggacttacagaggccatggttgcctgcaggcagctaggcctcgggttcgctattcacgcttataaagagacgtggttttggtccggcacaccaagggcccaagaggtggtcatgagtggggtgagatgcagtggcacagagctggcgcttcagcagtgtcagcggcacggccctgtgcactgcagtcacgggggggggcgctttttagccggagtctcatgcatggattctgccccggatctcgtaatgaacgcgcagttagtgcaggagaccgcctatctcgaagatagaccactctctcagctgtactgcgcacacgaagagaattgtctctcgaaatctgcagaccacatggactggccttatgggtataggagattgctgcgctttagtactcaaatttacaatctcggccgaaccgacttccggcccaagacagggcgggactcttgggtttggcaccaatgccacagacactatcactcaattgaggttttcactcactacgacctattaacattaaacgggtcaaaggttgccgaaggccacaaagcatccttctgcctcgaggatactaactgtccgaccggcctccagagaaggtatgcgtgcgccaacttcggagagcagggtgtgaccgtgggatgctgggacacatatagacacgacatcgattgccagtgggtcgacatcactgatgtcggacccggcaactatattttccaggtaattgtgaacccgcattatgaggtggccgagtctgatttctccaataacatgcttcagtgccgatgcaaatacgacggtcacagagtgtggctccataattgccatacgggcaatagctatcctgccaacgctgagctgagcctcgagcaggaacagcgcctgcgtaataatctcatttag

SEQ ID NO: 223293 - DNA, 2271 bp, Artificial Sequence
  derived and/or modified sequence
atggcgtggagcccccctgcgaccctgttccttttcctccttttacttgggcagccgccaccctcacgaccccagtccctgggcaccacaaaactgcggctcgtcgggccagagtcaaagccagaggaggggcgacttgaggttttacaccagggccaatggggaaccgtctgtgacgacaacttcgcaatacaagaggccaccgttgcttgcaggcaactggggttcgaagccgctctgacttgggcccactctgctaaatacggccagggagaggggcctatttggctagacaatgtaaggtgtgtaggcaccgaatcttcactggatcaatgtgggtcaaacggttggggagtgagtgattgtagccactcagaggatgtcggcgttatttgtcatcctagacggcatcgcggttatctgagcgaaaccgtgtctaacgccctcggaccacaaggaaggagactagaggaagtgcgcctgaagcctattctcgcctcagccaaacagcattcccctgtaactgagggggctgttgaggtcaagtatgagggccactggcgtcaggtgtgtgaccaaggctggaccatgaataactctcgcgtggtgtgtggtatgctcggcttcccaagtgaagtccctgtcgattcccattattacaggaaagtatgggatttaaaaatgagagacccgaaatcacgcttaaagtctttgacaaataagaattccttctggatccaccaggtgacatgtttagggacagaaccccacatggccaactgtcaggtccaggtggcccctgccagaggaaaactgcgacccgcatgtcctggaggcatgcacgccgttgtgtcatgcgttgccggacctcactttcgacctccaaagaccaaacctcagagaaaagggtcatgggcggaagaaccacgagtgagactgcgatcaggagctcaggtgggcgaagggagagtcgaagtgctgatgaaccgacagtggggcactgtttgcgaccaccggtggaatctaattagcgcctcagtggtttgcaggcagttgggtttcggaagcgctagggaggctctgttcggggcaagattaggccagggcttagggccaattcatctcagcgaggtgaggtgcagagggtatgagcgcaccctctccgactgccctgctctggaaggaagccagaatggttgtcaacatgaaaacgacgctgctgtccgatgtaatgttcccaacatgggcttccagaatcaggtgagactggcaggaggcagaatacccgaggaaggattactggaggtccaagtcgaggtgaatggggtgcccagatgggggagtgtctgttccgagaattgggggctgaccgaagcaatggtggcttgccggcagctggggctcggctttgcaattcacgcctataaagagacctggttttggtcgggaactccacgagcccaagaggtcgtgatgtcaggcgtgaggtgctccggcactgagttagccctgcagcagtgtcagcgtcacggcccagtacactgtagccacggcggtgggagattcttggccggagtttcctgcatggacagcgccccagacttagttatgaatgctcagctggtgcaggaaacagcatatctggaagatcgacctttgagtcagctctactgtgcccatgaggaaaactgtctgtctaaaagcgccgatcacatggactggccttacggataccggcgtttgctgaggtttagtacgcagatttacaacctaggaagaaccgactttagaccgaagacaggccgagattcatgggtttggcaccaatgccataggcattatcattctatcgaggtcttcactcattatgacctgctcacacttaatgggagcaaagtggccgaaggccataaagcatctttttgcctggaggatacgaactgccccactggactccaacgtaggtatgcatgtgctaatttcggggagcagggagtgacagtaggctgctgggacacttatcgtcatgacatcgattgccagtgggtggatataaccgatgtgggaccaggcaactacatctttcaggtgatagtcaatcctcattatgaagttgccgaatcggatttttccaacaatatgctgcagtgtagatgtaaatacgatggccacagagtttggctgcataattgccacacaggcaactcctaccctgctaacgccgaattatctctcgagcaggaacagcggctgaggaataatctaatttag

SEQ ID NO: 223294 - DNA, 2271 bp, Artificial Sequence
  derived and/or modified sequence
atggcctggagcccccccgccaccctgttcctgttcctgctgctgctgggccagcccccccccagcagaccccagagcctgggcaccaccaagctgagactggtgggccccgagagcaagcccgaggagggcagactggaggtgctgcaccagggccagtggggcaccgtgtgcgacgacaacttcgccatccaggaggccaccgtggcctgcagacagctgggcttcgaggccgccctgacctgggcccacagcgccaagtacggccagggcgagggccccatctggctggacaacgtgagatgcgtgggcaccgagagcagcctggaccagtgcggcagcaacggctggggcgtgagcgactgcagccacagcgaggacgtgggcgtgatctgccaccccagaagacacagaggctacctgagcgagaccgtgagcaacgccctgggcccccagggcagaagactggaggaggtgagactgaagcccatcctggccagcgccaagcagcacagccccgtgaccgagggcgccgtggaggtgaagtacgagggccactggagacaggtgtgcgaccagggctggaccatgaacaacagcagagtggtgtgcggcatgctgggcttccccagcgaggtgcccgtggacagccactactacagaaaggtgtgggacctgaagatgagagaccccaagagcagactgaagagcctgaccaacaagaacagcttctggatccaccaggtgacctgcctgggcaccgagccccacatggccaactgccaggtgcaggtggcccccgccagaggcaagctgagacccgcctgccccggcggcatgcacgccgtggtgagctgcgtggccggcccccacttcagaccccccaagaccaagccccagagaaagggcagctgggccgaggagcccagagtgagactgagaagcggcgcccaggtgggcgagggcagagtggaggtgctgatgaacagacagtggggcaccgtgtgcgaccacagatggaacctgatcagcgccagcgtggtgtgcagacagctgggcttcggcagcgccagagaggccctgttcggcgccagactgggccagggcctgggccccatccacctgagcgaggtgagatgcagaggctacgagagaaccctgagcgactgccccgccctggagggcagccagaacggctgccagcacgagaacgacgccgccgtgagatgcaacgtgcccaacatgggcttccagaaccaggtgagactggccggcggcagaatccccgaggagggcctgctggaggtgcaggtggaggtgaacggcgtgcccagatggggcagcgtgtgcagcgagaactggggcctgaccgaggccatggtggcctgcagacagctgggcctgggcttcgccatccacgcctacaaggagacctggttctggagcggcacccccagagcccaggaggtggtgatgagcggcgtgagatgcagcggcaccgagctggccctgcagcagtgccagagacacggccccgtgcactgcagccacggcggcggcagattcctggccggcgtgagctgcatggacagcgcccccgacctggtgatgaacgcccagctggtgcaggagaccgcctacctggaggacagacccctgagccagctgtactgcgcccacgaggagaactgcctgagcaagagcgccgaccacatggactggccctacggctacagaagactgctgagattcagcacccagatctacaacctgggcagaaccgacttcagacccaagaccggcagagacagctgggtgtggcaccagtgccacagacactaccacagcatcgaggtgttcacccactacgacctgctgaccctgaacggcagcaaggtggccgagggccacaaggccagcttctgcctggaggacaccaactgccccaccggcctgcagagaagatacgcctgcgccaacttcggcgagcagggcgtgaccgtgggctgctgggacacctacagacacgacatcgactgccagtgggtggacatcaccgacgtgggccccggcaactacatcttccaggtgatcgtgaacccccactacgaggtggccgagagcgacttcagcaacaacatgctgcagtgcagatgcaagtacgacggccacagagtgtggctgcacaactgccacaccggcaacagctaccccgccaacgccgagctgagcctggagcaggagcagagactgagaaacaacctgatctag

SEQ ID NO: 223295 - protein, 391 aa, Artificial Sequence
  derived and/or modified sequence
MNEKSCSFHSKEELRDGQGERLSAGYSPSYDKDKSVLAFRGIPISELKNHGILQALTTEAYEWEPRVVSTEVVRAQEEWEAVDTIQPETGSQASSEQPGQLISFSEALQHFQTVDLSPFKKRIQPTIRRTGLAALRHYLFGPPKLHQRLREERDLVLTIAQCGLDSQDPVHGRVLQTIYKKLTGSKFDCALHGNHWEDLGFQGANPATDLRGAGFLALLHLLYLVMDSKTLPMAQEIFRLSRHHIQQFPFCLMSVNITHIAIQALREECLSRECNRQQKVIPVVNSFYAATFLHLAHVWRTQRKTISDSGFVLKGVLFLLGRPRLNAQCPRSREPKVVARLVLAAVLPHPHFLKFQLTKISITHPLESASSPFSALTVALFWSYTYDKHIF

SEQ ID NO: 223296 - protein, 203 aa, Artificial Sequence
  derived and/or modified sequence
MNEKSCSFHSKEELRDGQGERLSAGYSPSYDKDKSVLAFRGIPISELKNHGILQALTTEAYEWEPRVVSTEVVRAQEEWEAVDTIQPETGSQASSEQPGQLISFSEALQHFQTVDLSPFKKRIQPTIRRTGLAALRHYLFGPPKLHQRLREERDLVLTIAQCGLDSQDPVHGRVLQTIYKKLTGSKFDCALHGNHWEDLGFQG

SEQ ID NO: 223297 - protein, 120 aa, Artificial Sequence
  derived and/or modified sequence
MNEKSCSFHSKEELRDGQGERLSAGYSPSYDKDKSVLAFRGIPISELKNHGILQALTTEAYEWEPRVVSTEVVRAQEEWEAVDTIQPETGSQASSEQPGQLISFSEALQHFQTVDLSPFK

SEQ ID NO: 223298 - DNA, 1176 bp, Artificial Sequence
  derived and/or modified sequence
atgaacgagaagagctgcagcttccacagcaaggaggagctgagagacggccagggcgagagactgagcgccggctacagccccagctacgacaaggacaagagcgtgctggccttcagaggcatccccatcagcgagctgaagaaccacggcatcctgcaggccctgaccaccgaggcctacgagtgggagcccagagtggtgagcaccgaggtggtgagagcccaggaggagtgggaggccgtggacaccatccagcccgagaccggcagccaggccagcagcgagcagcccggccagctgatcagcttcagcgaggccctgcagcacttccagaccgtggacctgagccccttcaagaagagaatccagcccaccatcagaagaaccggcctggccgccctgagacactacctgttcggcccccccaagctgcaccagagactgagagaggagagagacctggtgctgaccatcgcccagtgcggcctggacagccaggaccccgtgcacggcagagtgctgcagaccatctacaagaagctgaccggcagcaagttcgactgcgccctgcacggcaaccactgggaggacctgggcttccagggcgccaaccccgccaccgacctgagaggcgccggcttcctggccctgctgcacctgctgtacctggtgatggacagcaagaccctgcccatggcccaggagatcttcagactgagcagacaccacatccagcagttccccttctgcctgatgagcgtgaacatcacccacatcgccatccaggccctgagagaggagtgcctgagcagagagtgcaacagacagcagaaggtgatccccgtggtgaacagcttctacgccgccaccttcctgcacctggcccacgtgtggagaacccagagaaagaccatcagcgacagcggcttcgtgctgaagggcgtgctgttcctgctgggcagacccagactgaacgcccagtgccccagaagcagagagcccaaggtggtggccagactggtgctggccgccgtgctgccccacccccacttcctgaagttccagctgaccaagatcagcatcacccaccccctggagagcgccagcagccccttcagcgccctgaccgtggccctgttctggagctacacctacgacaagcacatcttctag

SEQ ID NO: 223299 - DNA, 1176 bp, Artificial Sequence
  derived and/or modified sequence
atgaacgagaagtcatgttccttccactctaaagaagaactgcgcgacggacaaggcgaacgcctttcagcgggatacagcccaagctatgataaggacaaatccgtgttggctttccgggggatcccaatctctgaactgaagaaccatggaatcctgcaagctctaaccactgaagcatatgaatgggagccccgtgtggtctctactgaggtggtgcgcgctcaagaggagtgggaggcggttgataccatccagcctgaaactggatctcaggcctcatccgagcagccagggcaactcatatcgttctccgaagccctccagcacttccagacggttgacctttctccctttaaaaaaagaatccagcccaccatcaggagaacaggcttagccgcactccgccactacttgtttggtccccccaagcttcatcagagattacgtgaggaacgcgatcttgtgctcaccatcgcccagtgcggactcgatagccaggatcctgttcatggacgcgtgctgcagactatctacaaaaaactgactggctcgaagtttgattgtgcactccacggcaatcattgggaagacttgggctttcagggcgccaaccctgccacggacctccgcggcgcgggcttcctggctctgctgcacctgttatacctggtgatggacagtaagacgttgcccatggcccaggagatcttcaggctgagtcgccaccacatacaacaatttccattctgcctgatgtcagtgaacatcacgcacatcgcaattcaggctctccgtgaggagtgcctcagcagagagtgcaaccgccagcagaaagtgatccccgtggtcaacagcttttacgccgcaacattcctgcaccttgctcacgtttggagaacacagagaaaaactattagcgacagcggttttgtcctcaaaggggtcctcttcctgctgggccggccacgtctcaatgcccagtgcccacgctcaagggaaccaaaggttgttgcccgactggtgctggctgcggtactcccccatcctcacttcttaaagtttcagctgaccaaaataagcatcacccatccgctagaatcagcaagcagcccattttccgctctgacggtggccctgttttggagctatacctacgataaacacatcttctag

SEQ ID NO: 223300 - DNA, 2685 bp, Artificial Sequence
  derived and/or modified sequence
ccccaagtttggaaagctcttttaacgagctgaggcttcgaagacctcagaggacttctctcagcactcacagaaacctcctacaccctcggatggcacaaagggactgttttcttactcttagtctgagtgactgccaaggaaggcaaaggtagagcaactggatctctggctctccacatagcttctgatctcagaccttactaaaatgctttctgggcccaaggacaaagctcacatgaacaaatgattttgagtcatgaatgaaaaatcttgctctttccatagtaaagaagaattaagagatggacagggtgaaagattgtctgctggatattctccatcatatgacaaggacaagagtgttctggctttcagaggaatccctatctcagagttgaagaaccatggcattctccaggctctgaccacagaagcttatgaatgggagccacgtgttgtgagtacagaggtggtcagagcccaagaagaatgggaagctgtggacaccatccagccagagacagggagccaagctagctcagagcagcctgggcagctaatctccttcagtgaggccctgcagcacttccagactgtggacctttcccccttcaagaaaagaatccagccaactattcgaaggactgggctcgccgccctccgacactacctcttcgggcctccaaagctccaccagcgccttcgggaagaaagggacttggtcctgaccattgctcagtgtggcctggatagccaagacccagtgcatggccgagtcctccagaccatctataagaagctgaccggctccaagtttgactgtgcccttcatggaaaccactgggaggacctgggctttcagggagcgaatccagccacagacctgagaggcgcaggcttccttgccctcctgcatctgctctacctggtgatggactcaaagaccttgccgatggcgcaggagattttccgcctgtctcgtcaccacatccagcaattccctttctgtttgatgtccgtgaacatcacccacattgccatccaggccttgagagaggagtgtctctccagagagtgtaatcggcagcagaaggtcatccccgtggtgaacagcttctatgccgccacattcctccacctcgcacatgtctggaggacacagcggaagaccatctcagactcgggctttgtcctcaaaggtgtgctctttcttctggggaggcctaggctgaatgcacagtgtcccaggtccagagagcccaaggtggttgctagactggttttggctgcagttcttccccatccacactttctcaaattccagcttaccaaaatctccatcacccaccccctggagtctgctagttctcctttctctgccctgactgtcgcccttttctggtcttatacttatgacaagcatatattctgatcaaaaattgggagccagggtccaatagttggactattcaaagttgcaattgtgcagacaaggtagagtgtgtggtccctgtggctgtagctggctccctagcctacctctctggtgatctctccatctgaggctccttcactttctctccatgggataggggttgggggtactccctagagctgctaggcttgaggccttgactgttgtgtcacccagagccccctcaagccttctgctccccaattctctctgttgcagagttggaagtattggccaagaagagcccacggcggctgctcaagaccctggagctgtacttggccagggtgtcaaagggacaggcctccttgttgggagcacagaagtgctatgggccagaagcccctcccttcaaggatctcaccttcacaggtgagagtgacctgcagtctcactcatccgaaggcgtatggctgatctgacctccgagatgaatggaggcttaaaggctgagctgcaggggctttcagggggtcagtggagccatgtcaggagcctggccaggccgcaccccttgctgtctcagcagatgggatataggaagctcctgggcttagctgtgggaagccaagtaccctcaccggcatgggacatgaggggcagctagacttcacccccttcccgcagacctgcctccagagcaaggagaattctgccttaatctgttgggctccagtctccgggttgaattccagtgtatcccactgggagtgaatggatcatgaggtgggatggccccatctggatgttctgcagatccccacatgggaggagattcccaagtagaggcagccagaattctgactccctggcagcagcagggctttcaggcaccagtgtctgtgttgttagaactcagaggaagaggcaggggcagcagccgacagggggcagcatgacccaagcaaggggcctgaggcctcagtgggggtagggcaaggaggtacctcacaggtgggtgtgaggccccctctggagtttctggccattcacttacccactctcttctccccctgacccccgctccattgtttatgatggaaaaacggacatttggctaggtgtctctcacggctgctccatcctagcccccacaagctggggcttcctcctgtagatgctgtgcatgccccatgatgagtttctggcctaattgagggaaggaggaaattcataccagcagttttcaaataaaagaattgttctaa

SEQ ID NO: 223301 - DNA, 1176 bp, Artificial Sequence
  derived and/or modified sequence
atgaatgagaagagctgcagcttccacagcaaggaggagctgagagatggccagggcgagcggctgtctgctggctacagccccagctatgacaaggacaagtctgtgctggccttccggggcatccccatcagcgagctgaagaaccacggcatcctgcaggccctgaccacagaggcctatgagtgggagccccgggtggtgtccacagaggtggtgcgggcccaggaggagtgggaggccgtggacaccatccagcctgagaccggcagccaggccagcagcgagcagcccggccagctgatctccttcagcgaggccctgcagcacttccagacagtggacctgagccccttcaagaagaggatccagcccaccatccggaggacaggcctggccgccctgcggcactacctgtttggcccccccaagctgcaccagaggctgcgggaggagcgggacctggtgctgaccatcgcccagtgtggcctggacagccaggaccctgtgcacggccgggtgctgcagaccatctacaagaagctgaccggcagcaagtttgactgtgccctgcacggcaaccactgggaggacctgggcttccagggcgccaacccagccacagacctgcggggagctggcttcctggccctgctgcacctgctgtacctggtgatggacagcaagaccctgcccatggcccaggagatcttccggctgagccgccaccacatccagcagttccccttctgcctgatgtctgtgaacatcacccacatcgccatccaggccctgcgggaggagtgcctgagccgggagtgcaaccggcagcagaaggtgattcctgtggtgaacagcttctatgctgccaccttcctgcacctggcccacgtgtggaggacccagaggaagaccatcagtgacagcggctttgtgctgaagggcgtgctcttcctgctgggccggccccggctgaatgcccagtgccccaggagccgggagcccaaggtggtggcccggctggtgctggccgctgtgctgccccacccccacttcctgaagttccagctgaccaagatcagcatcacccaccccctggagagcgccagcagccccttcagcgccctgactgtggccctcttctggagctacacctatgacaagcacatcttctag

SEQ ID NO: 223302 - DNA, 1176 bp, Artificial Sequence
  derived and/or modified sequence
atgaacgagaagagctgcagcttccacagcaaggaggagctgcgggacggccagggcgaacggctgagtgctggctattcgccgtcttatgataaggacaagagcgtgctcgcgtttcgtggaattccaatatctgaactcaagaaccacggtattctgcaggctctaacgactgaagcctatgaatgggagccgcgtgtagtgtctacagaagtggtgagagctcaagaagagtgggaggctgttgacactatccagcctgaaacgggatcacaagcctcgagtgaacagccaggtcagctgatctctttctcagaggcactccaacatttccaaaccgtggatctgagcccgttcaagaagaggattcagcctaccatcagacggacaggactagccgctctccgacactacctttttggcccaccgaagctgcatcaacggctgagagaggagagggatctggtcttgacaattgctcagtgtggtcttgacagccaggaccccgtccacggtagggtcctgcagaccatatataagaaattaaccggatccaagtttgactgcgccttgcacggaaaccactgggaggacctgggctttcaaggggccaatccagctaccgaccttagaggcgctggtttcctggcccttctgcacttgctctacctcgtgatggattcaaagacgctgccgatggctcaggaaatttttaggctgtccagacaccacattcagcagttcccattttgtcttatgtcagtaaacattacccacatcgccatccaggctctacgtgaagaatgccttagcagagaatgcaaccgtcagcagaaggtcattcccgtggtcaatagcttctacgcagccacatttcttcatctcgcccatgtctggagaacacagcgcaagaccatcagcgacagcggctttgtgctcaagggcgtgctttttcttttagggcgccctaggttgaatgctcagtgccccaggagcagagagcccaaggtcgtcgctcggctggtattggcagcggtattgcctcacccccatttcctcaagttccagctgaccaagatctcaattacgcatcccctagagtccgcatcttctcccttttctgcattaaccgtcgccctgttttggagttatacttacgacaaacacattttctag

SEQ ID NO: 223303 - DNA, 1176 bp, Artificial Sequence
  derived and/or modified sequence
atgaatgagaagtcttgtagctttcacagcaaggaggagcttagggatggtcaaggtgaacgactttcggcgggttattccccatcctacgataaagacaagagcgtgctagccttccgtggaatacccataagtgagctgaagaatcacggcattctgcaagcactgacaaccgaggcatatgagtgggagccaagggttgtgtctaccgaggtggtgagagcccaggaggagtgggaagccgtggacacaattcagcccgagacagggagccaagcaagcagcgagcagcccggacaactaatttcttttagcgaggcactccagcactttcaaacggttgacctcagccccttcaagaaaagaatacagcccaccatcagaaggacgggcctcgctgcactgaggcactacctttttggaccccctaagctgcatcagcgcctacgtgaggagcgcgatctcgtgctaacgatcgctcagtgtggcctggactcacaggaccccgttcatgggcgtgttcttcaaaccatttataaaaaacttaccggcagcaagttcgattgcgcattgcatggaaatcactgggaggatctaggctttcagggggctaaccccgctactgatttgagaggggctggctttcttgccctattacacttattgtacctggtcatggattccaagacattgccgatggcgcaggagatcttccgccttagcaggcatcacatccagcaatttccgttttgccttatgtctgtaaacatcacgcacatagccatccaggcacttcgggaagaatgtctctcccgggaatgcaaccgacaacagaaagtgatccctgttgtcaattctttctacgccgctacatttctgcatctcgcccatgtctggcggacccagcgcaaaacaatctccgattccgggtttgtgcttaagggtgtcctttttctgctgggccgacccagactaaacgcacagtgtccgcgttcccgggagcctaaagtggtcgccagactggtgcttgccgcagttctgccccatccccactttctgaaattccagctgaccaaaatcagtattacccatccactagagtcggctagcagcccgtttagcgctttaaccgttgccctgttctggtcatacacctacgataagcacatcttttag

SEQ ID NO: 223304 - protein, 261 aa, Artificial Sequence
  derived and/or modified sequence
MGSLPSRRKSLPSPSLSSSVQGQGPVTMEAERSKATAVALGSFPAGGPAELSLRLGEPLTIVSEDGDWWTVLSEVSGREYNIPSVHVAKVSHGWLYEGLSREKAEELLLLPGNPGGAFLIRESQTRRGSYSLSVRLSRPASWDRIRHYRIHCLDNGWLYISPRLTFPSLQALVDHYSELADDICCLLKEPCVLQRAGPLPGKDIPLPVTVQRTPLNWKELDSSLLFSEAATGEESLLSEGLRESLSFYISLNDEAVSLDDA

SEQ ID NO: 223305 - DNA, 786 bp, Artificial Sequence
  derived and/or modified sequence
atgggcagcctgcccagcagaagaaagagcctgcccagccccagcctgagcagcagcgtgcagggccagggccccgtgaccatggaggccgagagaagcaaggccaccgccgtggccctgggcagcttccccgccggcggccccgccgagctgagcctgagactgggcgagcccctgaccatcgtgagcgaggacggcgactggtggaccgtgctgagcgaggtgagcggcagagagtacaacatccccagcgtgcacgtggccaaggtgagccacggctggctgtacgagggcctgagcagagagaaggccgaggagctgctgctgctgcccggcaaccccggcggcgccttcctgatcagagagagccagaccagaagaggcagctacagcctgagcgtgagactgagcagacccgccagctgggacagaatcagacactacagaatccactgcctggacaacggctggctgtacatcagccccagactgaccttccccagcctgcaggccctggtggaccactacagcgagctggccgacgacatctgctgcctgctgaaggagccctgcgtgctgcagagagccggccccctgcccggcaaggacatccccctgcccgtgaccgtgcagagaacccccctgaactggaaggagctggacagcagcctgctgttcagcgaggccgccaccggcgaggagagcctgctgagcgagggcctgagagagagcctgagcttctacatcagcctgaacgacgaggccgtgagcctggacgacgcctag

SEQ ID NO: 223306 - DNA, 786 bp, Artificial Sequence
  derived and/or modified sequence
atgggttcgctgccaagtagaaggaagtcactccccagccccagtctgagcagtagcgttcagggtcaggggcccgtcaccatggaagctgagaggagtaaggccactgcagtggccctgggtagcttcccggccggtggcccagcagaattatccctgcggctgggggagcctctgaccattgtgagtgaagacggcgattggtggaccgttctgtctgaggtgagcgggcgagagtataatattccctcagtacatgtagccaaagtgagccatggttggctgtacgaggggttgtcacgcgagaaagctgaagaacttctgctgttgccgggcaaccccgggggggccttcctcattagagagtctcagaccagacggggctcctatagcctctctgttaggctgtcacgcccagcaagctgggatagaattagacactaccgaattcactgccttgacaacggctggctgtacattagcccacgcctgaccttccccagtctgcaagcgctggttgaccactacagcgagctggccgatgacatttgttgcttgctcaaggagccatgtgtactgcagcgcgccggtcctctgcccggcaaagatattcctctgccagtaaccgtgcaaagaactccacttaactggaaggagctggactcgtcactgttattcagtgaagccgctacgggggaagagagtttgctgagcgagggcctccgtgaaagtctgtctttttacatatccctaaacgacgaggccgtttccctggatgatgcatag

SEQ ID NO: 223307 - DNA, 786 bp, Artificial Sequence
  derived and/or modified sequence
atgggcagcctgcccagcaggaggaagagcctgcccagccccagcctgagcagctctgtgcagggccagggccctgtgaccatggaggccgagaggagcaaggccacagctgtggccctgggcagcttccctgctgggggccctgctgagctgagcctgcggctgggggagcccctgaccatcgtgtctgaagatggagactggtggacagtgctgtctgaggtgtctggccgggagtacaacatccccagcgtgcacgtggccaaggtgagccacggctggctgtatgagggcctgagccgggagaaggccgaggagctgctgctgctgcccggcaaccctgggggcgccttcctgatccgggagagccagacccggcggggcagctacagcctgtctgtgcggctgagcaggcctgcctcctgggaccgcatccgccactaccgcatccactgcctggacaatggctggctgtacatcagcccccggctgaccttccccagcctgcaggccctggtggaccactacagcgagctggctgatgacatctgctgcctgctgaaggagccctgtgtgctgcagagagctggccccctgcccgggaaggacatccccctgcctgtgacagtgcagaggacccccctgaactggaaggagctggacagcagcctgctcttcagcgaggccgccactggagaggagagcctgctgtctgagggcctgcgggagagcctgtccttctacatcagcctgaatgatgaagctgtgtccctggatgatgcctag

SEQ ID NO: 223308 - DNA, 786 bp, Artificial Sequence
  derived and/or modified sequence
atgggcagcctgcccagccggcggaagagcctgcccagccccagcttgtctagcagcgtgcaagggcagggacctgtaaccatggaagccgagcggtccaaagcaacggctgtcgccctgggctcctttcccgccggcggaccggctgagctctccttacgtctgggagagcctctgacgattgtgtcggaggacggcgattggtggactgtcctgagtgaggtctctggacgggaatacaacatcccctccgtccatgtagctaaggtgtctcacgggtggctctacgaaggtctgtccagggaaaaggccgaggaactcctcctgctgcccggcaaccccggtggagcctttctgatccgcgagtctcagacccgtcgaggctcctactcattgagcgtcagactgagccggcccgcttcatgggaccgcatccgccactatcggatccactgtcttgataatggttggctgtacatctccccgagattgacattcccatcactccaggctctggtggaccactacagtgagctggctgatgatatctgttgcctcctcaaggagccgtgtgttctgcagagggccgggcccctcccgggcaaggacatcccactcccggtcactgtgcaacggacaccattaaactggaaggaattagattcctctcttctgttttccgaggccgcgacgggtgaggagtccctgctgagcgaaggactgcgagagtccctcagtttctacatttcattgaacgacgaggcagtgagcctagatgatgcctag

SEQ ID NO: 223309 - DNA, 786 bp, Artificial Sequence
  derived and/or modified sequence
atgggaagtctgccttcaaggaggaagagcctgccttccccaagccttagctccagtgtgcaaggacagggacccgtcaccatggaggcagaacggtcaaaggccacggccgtcgccctcggatccttccccgcaggcggtccagccgaactcagtcttaggctcggggaaccgctcaccatcgtctctgaggacggtgattggtggaccgtgctgtctgaggtgagtggcagagagtataacattccatccgttcatgtcgctaaggtcagtcatgggtggttatacgaggggctcagcagggaaaaggcagaggaacttctgctgctccccggtaaccccggtggcgcattcctgatcagggagtcacagactcgtcggggtagttacagcttatctgtgcgtttgtctcgccctgcctcatgggatcggataaggcattaccgtattcactgtctggacaacgggtggttgtatatcagtcccaggctcactttccccagtctccaagcgctagtcgatcattattctgaattggccgacgatatctgttgtttgctcaaggagccatgtgttctgcagagggctgggcctttgccaggaaaagacataccgctccccgttaccgtgcaaagaaccccactaaattggaaggagctcgattcatcccttctcttctcagaagcggcaacaggcgaagaatcattgctgagcgaagggctacgcgagtctctctctttttatataagcctgaacgatgaggctgtgtctttagacgacgcttag

SEQ ID NO: 223310 - DNA, 2757 bp, Artificial Sequence
  derived and/or modified sequence
gtgagaaccacagagtctgcagtcggagctagagctccaaggaccccacgcctgtgtctctgtgacagagctcaaagggccctgggccttccctccctggctcggctgtgcttgggagggttccccagtccagaatccctaaggagcatggggcagctgatccatccctggtgtacaaactgctgactgcagacagatgctgagctacccaaaccaacacctagcctctccctgaagatcctcccaggctgagagagttctgggtgtcctaggaccaaggacactggcagacttccagaagggcccccaaagccctaacctgtccagccagagcatgcgtctcagcagagctgtcttcccaagcctttgatgacaaaccaatttccctcgatgatgtgcttctgagtgctctgctgaggaacaatgggaagtctgcccagcagaagaaaatctctgccaagcccaagcttgagttcctctgtccaaggccagggacctgtgaccatggaagcagagagaagcaaggccacagccgtggccctgggcagtttcccggcaggtggcccggccgagctgtcgctgagactcggggagccattgaccatcgtctctgaggatggagactggtggacggtgctgtctgaagtctcaggcagagagtataacatccccagcgtccacgtggccaaagtctcccatgggtggctgtatgagggcctgagcagggagaaagcagaggaactgctgttgttacctgggaaccctggaggggccttcctcatccgggagagccagaccaggagaggctcttactctctgtcagtccgcctcagccgccctgcatcctgggaccggatcagacactacaggatccactgccttgacaatggctggctgtacatctcaccgcgcctcaccttcccctcactccaggccctggtggaccattactctgagctggcggatgacatctgctgcctactcaaggagccctgtgtcctgcagagggctggcccgctccctggcaaggatatacccctacctgtgactgtgcagaggacaccactcaactggaaagagctggacagctccctcctgttttctgaagctgccacaggggaggagtctcttctcagtgagggtctccgggagtccctcagcttctacatcagcctgaatgacgaggctgtctctttggatgatgcctaggcccaaaggagaggccaaaagggaaaccaaggctgcacacctagaaccccaattcagcctcctgggcaccccagaggcaaggctgtgcactcagggagggagggtgggacacagaggtgcatctagggtcccacctgtacccttgctctttcctctcttagcccttagaagtcacctacttccttccagtgccatgatcccacctgcgacctctagtgcgagtgcagagaaggtgggaccagggccagggttccaaaaagagaataagcctcctggggggtctgacctagttagttcttgagtttggggtttccagtaccatctggatgccctgcctgttgagccccattctacatccccaccattaaccaggccccacccacaaggtagaaacaacccctagagtcaacgagaaagtcattttcagaaaatctacaagtctcgttgagaccaccaccatacctcagaaggtaggactgtggcctagaagggaaaggaaagctgagatgatgtcttaccgtagcagcagatcttggatggtccaggctctatgtgacctccagagcaaagagaaagacttcggacagtctaggtcctcaaatgtcccccattgaggacaacagccccagctctttttcttttttttgagacggagtcttgccctgttgcccatgctggagtgcaatggcacgatctcagctcactgcaacctccatctcctggattcaaacaattctcctgcctcagcctccagaatagctgggattacaggcgtacaccaccatgcctggctaatttttttgtatttttagtagacatggggtttcaccacattggccaggctggtgtcgaactcctgacctcaggtgatccacccaccttggcctcccaaagtgctgggattacaggtgtgagccacggcacccagcctagctctcagatctctatttcattttgtggcttaccattccctagcacactggccttgccatcttgtggccgaataaaaaataacacctcttaagtctagcacactgcagtgaggccaggcacctcagtgctgggcaggggcatcagaaggtgctaagccctctctccacaatgccaagacggagaccacagcctacaccaaatccagcccttgatttccctgctgcctccataaacagaaagaggtctgctggatccgctaagggatcagggagaggaagaaagagggatggggtgggaggcaccccctccagtgctcctactggttcccaagctacaggtggggtgggaaaggctttatcaggtatcatcaacaggttctcaattaaagatttgatttattcaagtatgtgaaaacattctacaatggaaactcttattagatgctgcatgtactgtgctatggaccacgcacatacagccatgctgtttcagaagacttgaaatgccattgatagtttaaaaactctacacccgatggagaatcgaggaagacaatttaatgtttcatctgaatccagaggtgcatcaaattaaatgacagctccacttggcaaa

SEQ ID NO: 223311 - protein, 559 aa, Artificial Sequence
  derived and/or modified sequence
MAGPTEAETGLAEPRALCAQRGHRTYARRWVFLLAISLLNCSNATLWLSFAPVADVIAEDLVLSMEQINWLSLVYLVVSTPFGVAAIWILDSVGLRAATILGAWLNFAGSVLRMVPCMVVGTQNPFAFLMGGQSLCALAQSLVIFSPAKLAALWFPEHQRATANMLATMSNPLGVLVANVLSPVLVKKGEDIPLMLGVYTIPAGVVCLLSTICLWESVPPTPPSAGAASSTSEKFLDGLKLLMWNKAYVILAVCLGGMIGISASFSALLEQILCASGHSSGFSGLCGALFITFGILGALALGPYVDRTKHFTEATKIGLCLFSLACVPFALVSQLQGQTLALAATCSLLGLFGFSVGPVAMELAVECSFPVGEGAATGMIFVLGQAEGILIMLAMTALTVRRSEPSLSTCQQGEDPLDWTVSLLLMAGLCTFFSCILAVFFHTPYRRLQAESGEPPSTRNAVGGADSGPGVDRGGAGRAGVLGPSTATPECTARGASLEDPRGPGSPHPACHRATPRAQGPAATDAPSRPGRLAGRVQASRFIDPAGSHSSFSSPWVIT

SEQ ID NO: 223312 - DNA, 1680 bp, Artificial Sequence
  derived and/or modified sequence
atggccggccccaccgaggccgagaccggcctggccgagcccagagccctgtgcgcccagagaggccacagaacctacgccagaagatgggtgttcctgctggccatcagcctgctgaactgcagcaacgccaccctgtggctgagcttcgcccccgtggccgacgtgatcgccgaggacctggtgctgagcatggagcagatcaactggctgagcctggtgtacctggtggtgagcacccccttcggcgtggccgccatctggatcctggacagcgtgggcctgagagccgccaccatcctgggcgcctggctgaacttcgccggcagcgtgctgagaatggtgccctgcatggtggtgggcacccagaaccccttcgccttcctgatgggcggccagagcctgtgcgccctggcccagagcctggtgatcttcagccccgccaagctggccgccctgtggttccccgagcaccagagagccaccgccaacatgctggccaccatgagcaaccccctgggcgtgctggtggccaacgtgctgagccccgtgctggtgaagaagggcgaggacatccccctgatgctgggcgtgtacaccatccccgccggcgtggtgtgcctgctgagcaccatctgcctgtgggagagcgtgccccccaccccccccagcgccggcgccgccagcagcaccagcgagaagttcctggacggcctgaagctgctgatgtggaacaaggcctacgtgatcctggccgtgtgcctgggcggcatgatcggcatcagcgccagcttcagcgccctgctggagcagatcctgtgcgccagcggccacagcagcggcttcagcggcctgtgcggcgccctgttcatcaccttcggcatcctgggcgccctggccctgggcccctacgtggacagaaccaagcacttcaccgaggccaccaagatcggcctgtgcctgttcagcctggcctgcgtgcccttcgccctggtgagccagctgcagggccagaccctggccctggccgccacctgcagcctgctgggcctgttcggcttcagcgtgggccccgtggccatggagctggccgtggagtgcagcttccccgtgggcgagggcgccgccaccggcatgatcttcgtgctgggccaggccgagggcatcctgatcatgctggccatgaccgccctgaccgtgagaagaagcgagcccagcctgagcacctgccagcagggcgaggaccccctggactggaccgtgagcctgctgctgatggccggcctgtgcaccttcttcagctgcatcctggccgtgttcttccacaccccctacagaagactgcaggccgagagcggcgagccccccagcaccagaaacgccgtgggcggcgccgacagcggccccggcgtggacagaggcggcgccggcagagccggcgtgctgggccccagcaccgccacccccgagtgcaccgccagaggcgccagcctggaggaccccagaggccccggcagcccccaccccgcctgccacagagccacccccagagcccagggccccgccgccaccgacgcccccagcagacccggcagactggccggcagagtgcaggccagcagattcatcgaccccgccggcagccacagcagcttcagcagcccctgggtgatcacctag

SEQ ID NO: 223313 - DNA, 1680 bp, Artificial Sequence
  derived and/or modified sequence
atggccggtcccactgaggcggaaacgggacttgctgagccccgggccctatgcgcccaaagaggacataggacctacgccagacgctgggtgtttctcctggccatcagtctactgaactgctcaaacgctaccctgtggttgtctttcgcacctgtcgcggatgtcattgccgaagatcttgtgctcagcatggaacagatcaactggctctccctcgtgtatctagtggtgtctacacccttcggagtggctgcgatctggattttagacagcgttggcctacgcgccgcgaccatcctgggagcatggctgaacttcgccggtagcgtactgagaatggttccgtgcatggtggtcggtacccaaaatccctttgcttttctgatggggggacagtccctgtgtgctctggcgcagtctctcgtcatattttcccccgccaagctcgccgccctttggttccccgagcatcagagagccacagctaatatgctggcaaccatgagcaatccactgggtgtgctcgttgccaatgtgctcagcccagtcttagtcaaaaaaggtgaagatattccccttatgctcggtgtctatactattcctgcgggtgtggtgtgcctgttgtcaaccatttgcttgtgggagtccgtcccacccacaccacccagcgcgggcgcggcatcctccaccagtgagaaatttctcgatgggctgaaacttctgatgtggaacaaagcttacgtgatactggcagtgtgtctgggcggcatgattggtatttctgctagttttagtgcgttattagagcaaatcctctgtgccagcggccattcaagtggttttagtggcctgtgtggcgccttgtttattaccttcggcatacttggagccttggcactaggcccctacgtggatcgcaccaagcattttaccgaggcaacaaagattggcctgtgcctcttcagtttggcttgtgtcccgtttgctttggtgtcccagcttcagggacagaccttggctcttgctgctacatgctccctgttaggcttgttcgggttttctgtgggtcccgtggccatggaactggcagtagagtgtagttttcccgttggtgagggagcggctacgggaatgatatttgtactcggtcaggctgagggtattctaattatgttggcaatgacagccctaacagtgaggagatcggagccatctctgtcgacgtgtcagcagggcgaggacccgctggactggactgtgtccttgttactcatggccggactatgtacattcttttcatgcatcctcgctgttttcttccatactccctatcgccgcctgcaggccgagtcgggggagcccccctccacacgaaacgcagtagggggggccgacagtgggcccggcgtggaccggggtggggctggaagggccggggtcctaggcccctcgactgcaacccccgagtgcactgctcgtggagcctcgttggaggaccctcgggggcccggatcccctcatcccgcctgtcaccgagcaacgccaagagcccagggcccagctgccacagacgccccttcgagacccggtcggcttgccggcagagtgcaggccagccgatttatcgatccagccggctcccactcctccttttcctcaccctgggtaattacctag

SEQ ID NO: 223314 - DNA, 2123 bp, Artificial Sequence
  derived and/or modified sequence
ctgagaagcacacaggctgtgaccggggcccttcccggaagggacattcggtttttgtggcagggacttccagcctgaggccgaaggaggagggtccaacttcacctttgcccgcccttcccccgcttttttgggtctcctttaactgggacggggcgggaccctcctccgtagtccttggggcggaactggccccccgtggcccggcccggcccggccccacctccgcccgcaggcggtcccggcccacgcgggaaggtccttaagcccgggcggccggcgggaccggcggagacccgtggaggccgccgacgatggcggggccgacggaggccgagacggggttggccgagccccgggccctgtgcgcgcagcggggccaccgcacctacgcgcgccgctgggtgttcctgctcgcgatcagcctgctcaactgctccaacgccacgctgtggctcagctttgcacctgtggctgacgtcattgctgaggacttggtcctgtccatggagcagatcaactggctgtcactggtctacctcgtggtatccaccccatttggcgtggcggccatctggatcctggactccgtcgggctccgtgcggcgaccatcctgggtgcgtggctgaactttgccgggagtgtgctacgcatggtgccctgcatggttgttgggacccaaaacccatttgccttcctcatgggtggccagagcctctgtgcccttgcccagagcctggtcatcttctctccagccaagctggctgccttgtggttcccagagcaccagcgagccacggccaacatgctcgccaccatgtcgaaccctctgggcgtccttgtggccaatgtgctgtcccctgtgctggtcaagaagggtgaggacattccgttaatgctcggtgtctataccatccctgctggcgtcgtctgcctgctgtccaccatctgcctgtgggagagtgtgccccccaccccgccctctgccggggctgccagctccacctcagagaagttcctggatgggctcaagctgctcatgtggaacaaggcctatgtcatcctggctgtgtgcttggggggaatgatcgggatctctgccagcttctcagccctcctggagcagatcctctgtgcaagcggccactccagtgggttttccggcctctgtggcgctctcttcatcacgtttgggatcctgggggcactggctctcggcccctatgtggaccggaccaagcacttcactgaggccaccaagattggcctgtgcctgttctctctggcctgcgtgccctttgccctggtgtcccagctgcagggacagacccttgccctggctgccacctgctcgctgctcgggctgtttggcttctcggtgggccccgtggccatggagttggcggtcgagtgttccttccccgtgggggagggggctgccacaggcatgatctttgtgctggggcaggccgagggaatactcatcatgctggcaatgacggcactgactgtgcgacgctcggagccgtccttgtccacctgccagcagggggaggatccacttgactggacagtgtctctgctgctgatggccggcctgtgcaccttcttcagctgcatcctggcggtcttcttccacaccccataccggcgcctgcaggccgagtctggggagcccccctccacccgtaacgccgtgggcggcgcagactcagggccgggtgtggaccgagggggagcaggaagggctggggtcctggggcccagcacggcgactccggagtgcacggcgaggggggcctcgctagaggaccccagagggcccgggagcccccacccagcctgccaccgagcgactccccgtgcgcaaggcccagcagccaccgacgcgccctcccgccccggcagactcgcaggcagggtccaagcgtccaggtttattgacccggctgggtctcactcctccttctcctccccgtgggtgatcacgtagctgagcgccttgtagtccaggttgcccgccacatcgatggaggcgaactggaacatctggtccacctgcgggcgggggcgaaagggctccttgcgggctccgggagcgaattacaagcgcgcacctgca

SEQ ID NO: 223315 - DNA, 1680 bp, Artificial Sequence
  derived and/or modified sequence
atggccggccccacagaagctgagaccggcctggccgagccccgggccctgtgtgcccagaggggccacaggacctacgcccggcgctgggtgttcctgctggccatcagcctgctgaactgcagcaatgccaccctgtggctgagctttgcccctgtggctgatgtgattgctgaggacctggtgctgtccatggagcagatcaactggctgagcctggtgtacctggtggtgtccacccccttcggcgtggccgccatctggatcctggacagcgtgggcctgcgggccgccaccatcctgggcgcctggctgaactttgctggctctgtgctgaggatggtgccctgcatggtggtgggcacccagaacccctttgccttcctgatgggcggccagagcctgtgtgccctggcccagagcctggtgatcttctccccagccaagctggccgccctgtggttccctgagcaccagagggccacagccaacatgctggccaccatgagcaaccccctgggcgtgctggtggccaacgtgctgagccctgtgctggtgaagaagggggaggacatccccctgatgctgggcgtgtacaccatcccagctggggtggtgtgcctgctgagcaccatctgcctgtgggagagcgtgccccccaccccacccagcgctggagctgccagcagcaccagcgagaagttcctggatggcctgaagctgctgatgtggaacaaggcctacgtgatcctggccgtgtgcctgggcggcatgattggcatcagcgccagcttcagcgccctgctggagcagatcctgtgtgccagcggccacagcagcggcttcagcggcctgtgtggggccctcttcatcaccttcggcatcctgggcgccctggccctgggcccctacgtggacaggaccaagcacttcacagaggccaccaagattggcctgtgcctcttcagcctggcctgtgtgccctttgccctggtgtcccagctgcagggccagaccctggccctggccgccacctgcagcctgctgggcctgtttggcttctctgtgggccctgtggccatggagctggccgtggagtgcagcttccctgtgggggagggcgccgccaccggcatgatctttgtgctgggccaggccgagggcatcctgatcatgctggccatgacagccctgactgtgagaagaagtgagcccagcctgagcacctgccagcagggcgaggaccccctggactggacagtgtccctgctgctgatggccggcctgtgcaccttcttcagctgcatcctggccgtgttcttccacaccccctaccgccgcctgcaggccgagagcggggagccccccagcaccagaaatgctgtgggcggcgctgacagcggccctggggtggaccggggcggggccggccgggccggcgtgctgggccccagcacagccaccccagagtgcacagcccggggggccagcctggaggacccccggggccctggcagcccccacccagcctgccaccgggccaccccccgggcccagggccctgctgccacagatgcccccagccggcccggccgcctggccggccgggtgcaggccagccgcttcattgatcctgctggcagccacagcagcttcagcagcccctgggtgatcacctag

SEQ ID NO: 223316 - DNA, 1680 bp, Artificial Sequence
  derived and/or modified sequence
atggccggccccaccgaggccgagaccggcctggccgagccccgggcgctgtgtgcccagagaggacaccgtacatatgcaaggaggtgggtcttcctgctggccatctcactattaaactgttccaacgcgaccctgtggctgtctttcgcccctgtcgctgatgtgatcgctgaggaccttgtactgagcatggaacagatcaactggctatctttagtctacttggttgttagtaccccttttggggttgcagctatttggatcctagactccgtgggactgcgcgccgccactatcttaggggcatggcttaattttgcaggttcagtgctgaggatggtcccgtgtatggtggtaggcactcaaaaccctttcgcatttcttatggggggtcagtccctgtgcgcgctcgcgcagagcctcgtcattttttcgcctgccaaactggccgcactatggtttcccgagcaccaacgtgccaccgcaaatatgcttgccaccatgagtaacccgctgggcgtgttggtcgcaaacgtcctttcaccagtgttggtgaaaaaaggtgaggacatcccgctaatgctgggggtgtacaccatcccagccggcgtggtgtgccttctctcgactatttgcttgtgggagtctgttcctcctactcctccttctgctggcgccgcctcctctacatctgagaaatttctggacggactgaagctgctcatgtggaataaggcctacgtgatcctggccgtttgcttgggcggcatgattggcatctctgctagcttctctgctctgctcgagcagattctgtgcgcgtctgggcatagctccggattcagcggcctatgtggcgccctgtttattaccttcggcattctaggggcattggctttaggcccttacgtagacaggactaaacactttacggaggcaaccaaaatcgggctctgtcttttcagcctggcatgcgtgcccttcgcactggtctctcagttgcaaggccaaaccttggccttggctgcaacttgttctttacttggtcttttcggattcagcgtcggacccgtagccatggagctcgctgttgagtgttctttcccggtgggagagggagcggccaccggcatgatctttgttctgggacaggctgagggcatcctaattatgttagccatgacagcactaacggtccgccggtctgaacctagcctttcaacatgccaacaaggcgaggaccctttggactggaccgtgagtctgcttctgatggcgggcctgtgcacattcttcagctgcatcctggcagttttctttcataccccctataggcgactgcaggcggagtcaggagagcctccatcaacacgcaacgcagtggggggagccgactccgggcctggggtcgaccgtggcggggcaggcagagcaggtgttctcggccccagtacggcaaccccagagtgcaccgccagaggagccagcttagaggaccctcggggccctggctccccacacccagcctgtcaccgcgctacccctcgcgcccaaggtccagctgctaccgacgccccatctaggcccggtaggctcgccgggagggtgcaggcttcacgttttatcgatccagcaggatcgcattccagcttttccagcccatgggtcatcacatag

SEQ ID NO: 223317 - DNA, 1680 bp, Artificial Sequence
  derived and/or modified sequence
atggcagggcctacagaagcggagaccggtttggcggaacctcgggctctgtgcgcacagaggggacaccgcacatacgcaagacgatgggtgttcctactggccattagtctgttgaactgttcaaacgctacactttggctatccttcgcgccagtcgcagatgtcatcgctgaggacctcgtgctgtcaatggaacagattaactggctttctttggtatacctcgtggtgtcaactcccttcggtgtggctgcaatttggatcctcgatagtgttgggctcagggctgccaccatcctaggggcttggttaaactttgctggatctgtccttagaatggttccctgcatggtggtcggcacacaaaacccctttgcctttctgatggggggtcagtcgctttgcgcactggctcaaagtttggtgatcttctcgcctgcaaagttggcagccttatggttcccagaacaccagcgggcaaccgctaatatgcttgcgaccatgagcaatcctctcggcgttctggtggccaacgtcttgtctcctgtccttgttaagaaaggagaagacattccgctgatgctcggggtgtatacaatccccgcaggggtggtgtgcctattaagtaccatttgtctgtgggagtccgtcccccctaccccaccatctgctggcgctgcttcttcaacctcagagaaatttctcgacggattgaagctccttatgtggaacaaggcatatgttattttggctgtgtgcctgggaggaatgatcggcatttcagccagtttttccgctctgttggaacagatcctgtgcgcatccgggcactcgtccggtttctccggattgtgtggagcactcttcatcacgtttggcatattaggggcattggccttgggcccttatgtggatcgcacaaagcatttcacagaggcaactaaaatcggtctttgccttttttctttggcttgtgtcccatttgccctggtgtctcagttgcaaggccagaccttggcgttggctgctacctgttcattgctgggactgttcgggttttctgtaggacctgtagctatggagctggctgttgagtgcagcttcccagtaggggaaggtgctgccacaggtatgattttcgtccttgggcaagccgaaggaatcctgataatgctggctatgaccgccctgactgtgaggcgcagtgaaccgtcattgagcacctgtcagcagggggaggacccactggattggacagttagcctccttctcatggcaggactctgtaccttcttcagttgcattctggcagtgttttttcatacaccatatagaaggctgcaggctgaaagcggagaaccacccagtacccgcaatgccgtggggggtgcagacagtggccctggagttgatcgcggaggggcaggacgggctggagtcctggggccatcaacagctacccccgaatgcacagctcggggagcttccctcgaggaccccagaggacctggaagccctcatccggcttgtcaccgcgctacgccaagagcacagggacccgcagccaccgacgctccttctcgtcccggaaggttggcaggacgcgtgcaggcctccaggttcatcgacccagccggtagccactctagcttcagcagcccatgggtaatcacatag

SEQ ID NO: 223318 - protein, 822 aa, Artificial Sequence
  derived and/or modified sequence
MKMKIQKKEKQLSNLKVLNHSPMSDASVNFDYKSPSPFDCSTDQEEKIEDVASHCLPQKDLYTAEEEAATLFPRKMTSHNGMEDSGGGGTGVKKKRKKKEPGDQEGAAKGSKDREPKPKRKREPKEPKEPRKAKEPKKAKEHKEPKQKDGAKKARKPREASGTKEAKEKRSCTDSAARTKSRKASKEQGPTPVEKKKKGKRKSETTVESLELDQGLTNPSLRSPEESTESTDSQKRRSGRQVKRRKYNEDLDFKVVDDDGETIAVLGAGRTSALSASTLAWQAEEPPEDDANIIEKILASKTVQEVHPGEPPFDLELFYVKYRNFSYLHCKWATMEELEKDPRIAQKIKRFRNKQAQMKHIFTEPDEDLFNPDYVEVDRILEVAHTKDAETGEEVTHYLVKWCSLPYEESTWELEEDVDPAKVKEFESLQVLPEIKHVERPASDSWQKLEKSREYKNSNQLREYQLEGMNWLLFNWYNRKNCILADEMGLGKTIQSITFLSEIFLRGIHGPFLIIAPLSTITNWEREFRTWTEMNAIVYHGSQISRQMIQQYEMVYRDAQGNPLSGVFKFHVVITTFEMILADCPDLKKIFWGRWKDILTHGRFKWHLNEKDMEMICRALLVYCVKHYKGDEKIKSFIWELITPTKDGQAQTLQNHSGLSAPVPRGRKGKKTKNQLLIPELKDADWLATCNPEVVLHDDGYKKHLKQHCNKVLLRVRMLYYLKAEILGEAAEKAFEGSPARELDVPLPDIDYMEIPVDWWDAEADKSLLIGVFKHGYERYNAMRADPALCFLEKVGMPDEKSLSAEQGVTDGTSDIPERQHR

SEQ ID NO: 223319 - protein, 2715 aa, Artificial Sequence
  derived and/or modified sequence
MKMKIQKKEKQLSNLKVLNHSPMSDASVNFDYKSPSPFDCSTDQEEKIEDVASHCLPQKDLYTAEEEAATLFPRKMTSHNGMEDSGGGGTGVKKKRKKKEPGDQEGAAKGSKDREPKPKRKREPKEPKEPRKAKEPKKAKEHKEPKQKDGAKKARKPREASGTKEAKEKRSCTDSAARTKSRKASKEQGPTPVEKKKKGKRKSETTVESLELDQGLTNPSLRSPEESTESTDSQKRRSGRQVKRRKYNEDLDFKVVDDDGETIAVLGAGRTSALSASTLAWQAEEPPEDDANIIEKILASKTVQEVHPGEPPFDLELFYVKYRNFSYLHCKWATMEELEKDPRIAQKIKRFRNKQAQMKHIFTEPDEDLFNPDYVEVDRILEVAHTKDAETGEEVTHYLVKWCSLPYEESTWELEEDVDPAKVKEFESLQVLPEIKHVERPASDSWQKLEKSREYKNSNQLREYQLEGMNWLLFNWYNRKNCILADEMGLGKTIQSITFLSEIFLRGIHGPFLIIAPLSTITNWEREFRTWTEMNAIVYHGSQISRQMIQQYEMVYRDAQGNPLSGVFKFHVVITTFEMILADCPELKKIHWSCVIIDEAHRLKNRNCKLLEGLKLMALEHKVLLTGTPLQNSVEELFSLLNFLEPSQFPSETAFLEEFGDLKTEEQVKKLQSILKPMMLRRLKDDVEKNLAPKQETIIEVELTNIQKKYYRAILEKNFSFLTKGANQHNMPNLINTMMELRKCCNHPYLINGAEEKILEDFRKTHSPDAPDFQLQAMIQAAGKLVLIDKLLPKLIAGGHKVLIFSQMVRCLDILEDYLIQRRYTYERIDGRVRGNLRQAAIDRFCKPDSDRFVFLLCTRAGGLGINLTAADTCIIFDSDWNPQNDLQAQARCHRIGQSKAVKVYRLITRNSYEREMFDKASLKLGLDKAVLQDINRKGGTNGVQQLSKMEVEDLLRKGAYGALMDEEDEGSKFCEEDIDQILQRRTHTITIQSEGKGSTFAKASFVASGNRTDISLDDPNFWQKWAKIAELDTEAKNEKESLVIDRPRVRKQTKHYNSFEEDELMEFSELDSDSDERPTRSRRLNDKARRYLRAECFRVEKNLLIFGWGRWKDILTHGRFKWHLNEKDMEMICRALLVYCVKHYKGDEKIKSFIWELITPTKDGQAQTLQNHSGLSAPVPRGRKGKKTKNQLLIPELKDADWLATCNPEVVLHDDGYKKHLKQHCNKVLLRVRMLYYLKAEILGEAAEKAFEGSPARELDVPLPDIDYMEIPVDWWDAEADKSLLIGVFKHGYERYNAMRADPALCFLEKVGMPDEKSLSAEQGVTDGTSDIPERGNTDKEDNAEDKVDGLQKQTESSSDGGDGVFSEKKDDSRAAQDGSDPDKSPWPVSSALTARLRRLVTVYQRCNRKELCRPEILGPGNQGYWVQEEMFRRTSEMDLINKEAQKRWTRREQADFYRTVSSFGVVYDQEKKTFDWTQFRIISRLDKKSDESLEQYFYSFVAMCRNVCRLPTWKDGGPPDTTIYVEPITEERAARTLYRIELLRKVREQVLKCPQLHERLQLCRPSLYLPVWWECGKHDRDLLIGTAKHGLNRTDCYIMNDPQLSFLDAYRNYAQHKRSGTQAPGNLCCLYQTNSKLYESLTYSQMSRTSESLENEPENLVRVESRDDHLSLPDVTCENFISKVQDVISINHDESLLPESLESMMYGKKVLSQEPSSFQESPSTNTESRKDVITISISKDGNCQSGGPEAEIASGPTFMGSLEAGGVAQANIKNGKHLLMSISKEGELCCSEAGQRPENIGQLEAKCLASPSLNPGNESGFVDMCSLSVCDSKRNLSSDQQLIDLLENKSLESKLILSQNHSDEEEEEEENEEENLAMAVGMGERPEVLHLTEPTTNISREKNQGFQDETKKGSLEVANQTPGLQRAFPAPAACQCHCKHMERWMHGLENDEFEIEKPKAYIPDLFKSKTNTIAMEGEPTAIPSQPFKVKHELLKEPWKESAEGQNVFPTYPLEGSELKSEDMDFENKDDYDRDGNCHSQDYPGKYSEEESKSSTSGITGDIGDELQEARAPTIAQLLQEKTLYSFSEWPKDRVIINRLDNICHVVLKGKWPSSQQYEPSGTLPTPVLTSSAGSRTSLSEPEAAEHSFSNGAALAAQIHKESFLAPVFTKDEQKHRRPYEFEVERDAKARGLEQFSATHGHTPIILNGWHGESAMDLSCSSEGSPGATSPFPVSASTPKIGAISSLQGALGMDLSGILQAGLIHPVTGQIVNGSLRRDDAATRRRRGRRKHVEGGMDLIFLKEQTLQAGILEVHEDPGQATLSTTHPEGPGPATSAPEPATAASSQAEKSIPSKSLLDWLRQQADYSLEVPGFGANFSDKPKQRRPRCKEPGKLDVSSLSGEERVPAIPKEPGLRGFLPENKFNHTLAEPILRDTGPRRRGRRPRSELLKAPSIVADSPSGMGPLFMNGLIAGMDLVGLQNMRNMPGIPLTGLVGFPAGFATMPTGEEVKSTLSMLPMMLPGMAAVPQMFGVGGLLSPPMATTCTSTAPASLSSTTKSGTAVTEKTAEDKPSSHDVKTDTLAEDKPGPGPFSDQSEPAITTSSPVAFNPFLIPGVSPGLIYPSMFLSPGMGMALPAMQQARHSEIVGLESQKRKKKKTKGDNPNSHPEPAPSCEREPSGDENCAEPSAPLPAEREHGAQAGEGALKDSNNDTN

SEQ ID NO: 223320 - protein, 525 aa, Artificial Sequence
  derived and/or modified sequence
  misc_feature (1)..(1): Xaa can be any naturally occurring amino acid
XASKTVQEVHPGEPPFDLELFYVKYRNFSYLHCKWATMEELEKDPRIAQKIKRFRNKQAQMKHIFTEPDEDLFNPDYVEVDRILEVAHTKDAETGEEVTHYLVKWCSLPYEESTWELEEDVDPAKVKEFESLQVLPEIKHVERPASDSWQKLEKSREYKNSNQLREYQLEGMNWLLFNWYNRKNCILADEMGLGKTIQSITFLSEIFLRGIHGPFLIIAPLSTITNWEREFRTWTEMNAIVYHGSQISRQMIQQYEMVYRDAQGNPLSGVFKFHVVITTFEMILADCPELKKIHWGRWKDILTHGRFKWHLNEKDMEMICRALLVYCVKHYKGDEKIKSFIWELITPTKDGQAQTLQNHSGLSAPVPRGRKGKKTKNQLLIPELKDADWLATCNPEVVLHDDGYKKHLKQHCNKVLLRVRMLYYLKAEILGEAAEKAFEGSPARELDVPLPDIDYMEIPVDWWDAEADKSLLIGVFKHGYERYNAMRADPALCFLEKVGMPDEKSLSAEQGVTDGTSDIPERQHR

SEQ ID NO: 223321 - DNA, 10389 bp, Artificial Sequence
  derived and/or modified sequence
atgaccaatgggtctgtgttttggaccggcgaagcccaatggcgcgacagggaaggcgggcccgagatgggttagggtgtccttgcagggtgtctgagctaaacttcaccaaataatagctgtttgtattttggctgctgcaggagccattttagaaataaatatcttccttcaatagatgaaaatgaaaatacagaaaaaagagaagcagttgtcaaatttaaaagttttgaatcactccccaatgtctgatgcctctgtcaattttgactacaaatctccatccccatttgactgcagcactgatcaagaagagaaaattgaagatgttgctagtcactgtctgcctcagaaggacctgtatactgctgaagaggaagctgctaccctttttcctaggaaaatgacatcccataatgggatggaggacagtggaggaggaggtactggagtgaagaagaaacggaagaaaaaggagccaggagaccaagagggtgcagcaaagggaagcaaggacagagagcccaagccaaagaggaaacgagaaccgaaagagccaaaggaacccagaaaggccaaggagccgaagaaggccaaggagcacaaggagccgaagcaaaaagatggggcaaagaaggcacggaagccccgggaggcctcgggcaccaaggaggccaaagagaagaggagctgcactgactctgcagccaggacgaagtccaggaaggccagcaaggagcaaggaccaaccccagtggagaaaaagaagaaaggaaaaaggaaaagtgaaactacagtggagagtttagagctggatcagggcctgacgaacccatctctgcggagtcctgaggagtccactgagtctacagacagccagaaacgacgctcgggaaggcaagtaaagcgcagaaaatacaatgaggacctggacttcaaagtggtggatgatgatggggaaacaattgctgttcttggagctggtcgaacatctgcactctcagcctctacactggcctggcaggcggaggagcctccagaagatgatgcaaacatcattgagaagatcctggcatctaagactgtccaggaggttcacccaggagaacctccgttcgacttggagctgttctacgttaagtatagaaatttttcctacttacattgtaaatgggccacaatggaagagctcgaaaaggatcctcgcatcgcacagaagatcaagcgatttaggaataaacaagcccagatgaagcacatttttacggagcctgatgaagacttgttcaatccagactatgtagaagttgatcgcatcttggaggtggcccacaccaaggatgcagaaacaggggaggaggtaacacattacctggtgaagtggtgctcactaccatatgaagaaagcacgtgggagctagaggaagatgtagatcctgcaaaagttaaagaatttgaatctcttcaagttctccctgaaattaagcatgtggagcggcctgcttcagactcctggcagaaacttgagaagtctcgcgagtataagaacagtaaccagctccgggagtaccagctggaagggatgaactggcttctttttaactggtataacagaaaaaactgtattttggctgatgagatgggcctagggaaaaccatccagtccatcacattcctttcagaaatatttctgagaggaatccacggcccttttctcattatcgcccctctctccaccatcactaactgggagcgggagttccggacatggacagagatgaatgccattgtgtaccacggcagccagatcagcaggcagatgatccagcagtatgaaatggtgtacagagacgcccagggaaaccccctttcaggagtcttcaagttccacgtcgtcatcacaacatttgaaatgatcctagcagactgcccagagttgaagaagattcactggagctgtgtgataattgatgaagcccacagactgaagaataggaactgcaaacttctggagggtctaaagcttatggccctggaacataaagtgcttctcactggaacacccttgcagaactctgtggaggagctcttcagtttgttaaattttctggagccatcacagtttccttcagagaccgctttcttggaggaatttggagatctgaaaacagaggagcaggtaaagaaactgcagtctatcctaaaaccaatgatgcttcggcggctgaaagatgatgtggaaaagaaccttgctcccaaacaagagacgatcattgaggtggaactgaccaatatccagaaaaagtactaccgtgccatcctcgagaagaacttttccttcctgaccaagggggcaaatcagcacaacatgcccaatctcatcaacaccatgatggagctgaggaagtgctgtaaccatccctacctgatcaatggagcagaggagaaaattctagaagatttccgaaaaacccacagccctgatgcccctgactttcagctgcaggccatgattcaggcagcaggaaagcttgtgttgattgataaactactccctaagctgattgcaggtggccacaaagtactcatcttctcccagatggtgcgctgcctcgacatcctagaagattacctcatccagagaagatacacctatgagcgaattgatgggcgagtacggggaaacctgcgccaggcagccatcgaccggttctgtaagccagattcagaccgctttgtctttcttctgtgcaccagagcgggaggcctggggatcaatctcacagctgctgatacctgcatcatatttgattctgactggaacccacaaaatgacttgcaggctcaggcccgatgtcaccgcataggccagagcaaagctgtgaaggtgtatcgcctcatcactcgaaattcctacgagcgcgagatgtttgacaaggccagcctaaagctggggctggacaaggctgttcttcaggacatcaaccgaaagggcggcaccaatggggtacagcagctctcaaaaatggaggtggaggacctactccggaaaggtgcttatggagccttaatggatgaagaagatgaaggctccaagttctgtgaagaagacatagaccagattctgcagaggcgaacgcacaccatcaccatccagtctgaggggaaagggtccacttttgccaaggctagctttgtggcttcaggaaacagaacagatatttccttagatgatcctaacttttggcagaaatgggctaaaatagctgaactagacactgaagcaaagaatgaaaaggaaagcttagtgatcgaccgacctcgcgtgagaaagcagaccaaacactacaactcgtttgaggaagacgagctcatggagttttcagagttagacagcgactcagacgaaaggcccacgagatccaggcgcctcaatgacaaagccaggcgctacctccgagcggagtgcttccgggtagagaagaacctgctcatctttggctggggccggtggaaggacatcctgactcatggccgattcaagtggcatctgaacgagaaggacatggagatgatttgccgtgccctcctggtgtactgtgtcaagcattataagggggacgagaagatcaagagtttcatttgggaactgatcacacctaccaaagatgggcaagcccagaccctccagaaccactcaggcttatctgccccagtccccagagggaggaaggggaagaagacgaagaaccagttgctaatcccagagctaaaggatgcagattggctagccacctgcaaccccgaggtggtcttgcatgatgatggctataagaaacacctcaaacagcactgcaacaaagtacttttgcgagtccggatgctgtactacctaaaagctgaaatactgggagaagcagctgagaaagcatttgaaggatctcctgccagggagctggatgtacctctgcctgacatcgactacatggagatcccagtggactggtgggatgctgaagccgataagtcacttctcattggcgtgttcaagcatggttatgaaaggtacaatgccatgcgagcagacccagcactttgcttcctggagaaagttgggatgcccgatgagaagtccctttctgcagaacagggtgttacagatgggacctcagacattcctgaaagaggcaacacagataaagaagacaatgctgaggacaaagtagatggcctccagaaacaaacggagagttccagtgatggaggtgatggcgtttttagcgaaaagaaggatgacagccgggcagcccaggatggctccgacccagacaaatcgccctggccagtttcctccgccctcacagctcgtctcagacgtctggtcactgtttaccagcgctgcaaccgcaaggaactgtgccggcctgaaattctgggaccaggtaaccaaggatattgggttcaggaagagatgttcaggagaacctcagaaatggacctcatcaacaaggaagcccaaaagaggtggactaggagagaacaagcagacttctatagaacagtgtcttcctttggtgttgtttacgatcaagaaaagaaaacctttgactggacacagttccgcatcatttcccgtttggacaagaagtcggatgagagcctggaacagtatttttatagttttgtggccatgtgccggaatgtctgtcgtctacccacatggaaagatggcggtcccccagataccaccatctacgttgaacccatcactgaggaacgtgctgcaagaactctgtaccgcattgaactgttacggaaagtccgagagcaagtgctcaagtgccctcagctgcatgaacgcctccagctgtgcaggcccagcctctacctcccagtctggtgggagtgtgggaagcatgatcgagacctgctcatcggcactgccaaacatgggctgaaccgcactgactgttacatcatgaacgacccccagctgtccttcctggatgcctatagaaactatgcccagcataaaagatctggcacccaggcaccaggaaatctctgttgcctttaccagaccaactccaagttatatgaatctcttacatattctcaaatgagtaggacttcagagtcccttgaaaatgaacctgaaaatctagtgagagtagaaagcagagatgatcatctcagcctgcctgatgtgacatgtgaaaactttatttctaaagttcaggatgtcatttccatcaaccatgatgaaagtctgctgcctgagtccttagagagcatgatgtatggtaagaaggtgctcagccaagaaccaagctcttttcaggagagcccaagtaccaatactgaatctagaaaagatgttattaccatctcaataagcaaagatgggaactgccagtctggtggccctgaggcagaaatagcttctggccctacttttatgggtagcttagaagcaggaggagtagctcaagcaaacatcaaaaatggaaaacatttgttgatgtctatttcaaaggaaggggagctctgctgcagtgaggcaggacagagacctgaaaacattggccagctggaagccaagtgtttagcttccccttccttgaatccaggaaatgaaagtgggtttgtagatatgtgcagtcttagtgtctgtgactccaaaagaaacctgtcatcagatcagcaattaattgatttattggaaaacaaaagcttagaaagtaaattgattttgagtcagaaccacagtgatgaggaggaagaagaggaggaaaacgaggaggaaaacttagccatggcagtaggcatgggggaaaggccagaggtattgcatctcacggagcccactactaacatctcaagggaaaagaaccaaggcttccaagatgaaaccaagaaaggaagcttagaggtggcaaaccagactcctgggctacagagggctttccccgctccagcagcctgtcagtgccactgcaaacacatggagaggtggatgcatggcctcgagaatgatgaatttgaaatcgagaaacccaaggcttatatcccagatctgttcaaaagtaaaaccaatactatcgccatggagggtgaacccactgctattccatcacagccgtttaaagtgaagcatgagcttttaaaagaaccttggaaagaaagtgcagaggggcaaaacgttttccccacatatcctcttgaaggaagtgagctcaaatcagaagacatggattttgagaataaagatgattatgatagagacggaaactgccatagtcaagattatccagggaagtactctgaagaggagagcaagagctcaacatcgggcatcacaggagacattggggatgagctacaggaggctcgagctcccactattgctcagctgctacaggagaaaactctctattccttctctgagtggccaaaggaccgcgtgataattaaccgcctagataatatctgccacgtggtgttaaaggggaagtggccctctagccagcagtatgagccctcaggcacactgcccaccccggtattaaccagcagtgctggttctcgaaccagcctctcagagccggaagcagcagaacacagcttcagcaacggcgcagcattggcggcccagatccacaaggagagcttcttagctccagtattcacaaaggatgaacaaaagcacaggcgtccctatgagtttgaggtggagagggatgcaaaggctcggggcctggagcagttctctgccacccacgggcacacccctatcatcctcaatggctggcatggggagtcagctatggacctctcctgctcatcagaggggtccccaggagccacatcccctttcccagtgagcgccagcacccctaagattggggctatcagttcacttcagggagcccttggcatggacttgtctgggattctgcaagctggcctgatccatcctgtgactggacagattgtcaatggaagcctcagaagagatgatgcagccacgaggaggcggagagggaggcggaaacatgttgaaggagggatggacctcatctttttgaaggagcagacacttcaggcgggaatcttggaagtccatgaagacccagggcaggccaccttgagcaccacacaccctgaggggccagggcctgccacctcggctcctgagccagctacggcagccagcagccaagccgagaaatccattcccagcaagagtctgcttgactggctaaggcagcaggctgactactccttagaagttcctggctttggggcaaatttttcagacaaaccaaagcagaggaggccacgctgtaaagaacctggaaaattagatgtcagctccctgagcggggaagagagagttcctgccatccccaaggagccaggactgagggggtttcttccagaaaacaagttcaatcacactctggctgagcctattcttcgagatacgggcccccgcaggagggggaggcggcctcggagcgaactcctgaaggctccttccattgtggcagactctccctctggaatggggccactgttcatgaatggactgattgctgggatggacctggtaggacttcagaacatgagaaatatgccaggcatccccctcaccgggctggtggggtttccagctggctttgccacgatgccaacaggtgaagaggtcaaaagtaccctgagcatgctgcccatgatgctgccaggcatggctgctgtgccccagatgtttggtgttgggggactcctcagtccacccatggcaaccacctgcacttccactgctccggcgtctctatcaagcacaacgaaaagtggtacggcagtgactgaaaagactgcggaagacaagccgagtagccatgatgtgaaaacagacactttagctgaggacaagcctggtccaggtccattttctgatcagtctgaacctgcaataactactagtagtcctgtggcttttaacccatttctcatcccaggagtatctcctggactcatttacccatccatgttcctctcccctggtatgggcatggctctgccagccatgcagcaggccagacactcggaaatagtaggtctggagagccagaagaggaagaagaagaagacaaagggggacaaccccaactcccacccagagcctgctcccagctgtgaaagggagcccagcggtgatgagaactgtgccgaacccagtgcccctttgcccgcagagagagaacatggggcacaggctggggagggggcactcaaagactccaacaacgacaccaattagaacttttttcatttaagaaattattgtgacttgtaagtttcttatcccataaaggtttgttacttccctcacttcacctccataagaacctgtgtttccataagtaagattacgtacctgatttcctgtctgagaactatggtaacagatgttaatagttgcagggtctcaccacttcattagataagtgttgtctacctagtctaggaggcacagaattctcattctgttatccagttcattccagcaatcatagttaatacagtacttggtgacacgccctacccccttctcttccaagtttcccactcacttgaggaggaaaaatggcaaaagaaagctgtctagggttttaccattgaagggtggaagaacagagacaaagaggagctctttttctgtgagctgggttgcacaggaagaatgtcacagggaaccaaaaagcacagaaaaaggaagtgctggtgcatatttttgagttaaaatatttccctattttatcatgattactaagtgagtagtatagacagaagtatataactaatggttgaaaatacatatattcatttctttataaaaaacaaaaaccttaccggtagtaatataatttcccccttggtggtttttcagacacctgcagcaagaagaaatactgactgactaggcattattttctatacatccctctcaccagtgaaaagattcctcttgctgcgagaaagctttacccaccatgagttattgctgtcgacgggggtggggcaaggacccgcgctccgtagagctacacgctgcttcacaagcacacggctagcgctctgctctcacctggttcgcttacagatttctctagccattaatttgcctctctgtgtttaaagagcaccaggaccgaatggattttcacttcaggctttccttcaccaagaataaggttctttctggagcctgcaagaagacagttgcccaacactttgacacttgctagtaggtcctttgatcaagagtgtctgaggctgtcaaatgtgtgccaccctttataatacagctatgaaaagttacttctccattaatttctccattctgtttatatcttacagttggacccaaattccaaattatcagttaatcgaaactacattgcaagtcaacattattttctcttcttcctcagcttctccatgtttaggaactgagaaagaacctgcctaagcagcacttccccatgtcctttcaccttcatgttaacgtcccttctgatggtctcactcttcacaggtagttcacactctgagacttgaagtaagctcatggttcagtactctgggggcgcagggctgcgcaggacccttggaaatgttgcaagtgttactagtaccagtttcactttttgttgtcacaatttactgtattttttactttttctgttacagttttgctaatttatcagaaggtccaaaagtctgacataactatttcattttgcattatttatttatgatgcttttttcattgtcttttatacatttgggattataaattatgtaaatgttaaaatgagcatctcaaagaagtctgttaaatcatgactgaaaaaaatcaatcagatgtatcttcaaaaagtggagtcccagttttatgaatcagagatataaaccagaaattctataactgatcatagaagaagaatccagtaattgaacaaatcctatttaatgacatccttgtagcatagatggtctataatgctgaccacagatttcttagaaatgctgctctctctatttaactaacattttgttcagttttgcctccagtggaagcagaaagggttttttcagctgttaaatcctaaaaatcaatataatttatttatgtaagaaaaataactcaatcaatatatttttgaaccttttaagtactaattttctttttatcaagtagaaaaaaaaatgtatttgccctaaatccttaaaatacaaatgctataaaaattcctgtatcttgaaagccttactgcaaatgagtattatagacatccagcagagtctggttttctttgt

SEQ ID NO: 223322 - DNA, 2469 bp, Artificial Sequence
  derived and/or modified sequence
atgaaaatgaaaatccagaaaaaggaaaaacagctatctaatctgaaagttctgaatcacagccctatgtccgatgcttccgttaacttcgactacaagagcccctctcctttcgattgttccacagatcaagaggaaaagattgaggacgtcgcttcccattgtctaccacaaaaggacctgtacactgccgaagaggaggctgctactctatttccccggaaaatgacctcccacaatgggatggaggactccggcggcggcggcaccggggtgaagaagaagcgcaagaaaaaggagccaggggatcaggagggcgcagctaaaggatcaaaggaccgagagccgaaaccgaagcgtaaacgagaacccaaagagcccaaggagccgcgcaaagctaaggagcccaaaaaggccaaggaacacaaagagcctaagcagaaggacggtgcaaagaaagcaagaaagcctcgagaggcaagtgggactaaggaagccaaggaaaagaggtcttgtacggactcagcggcgcgcaccaagtcgcgcaaagccagtaaagaacagggacccactcctgtcgaaaagaagaagaagggaaagcgcaagagtgaaacgacagtcgagagccttgagctggaccaaggtttgacaaaccccagcttgcgtagccccgaggaatccacagagtcaaccgactcccagaagcgtcgaagcggaagacaggtgaagcgcagaaagtataatgaagacctagactttaaagtcgttgacgacgatggcgagactatcgctgtgctaggcgcaggacgcacgtccgctctctctgcctcaaccctagcttggcaggccgaggagccccctgaggatgacgctaatataatagagaagattctcgcgagcaagaccgtccaagaagtccaccctggcgagcctccattcgatctcgaactgttctacgtgaagtacaggaatttttcctatctccactgcaagtgggctaccatggaggaactagagaaagatccgagaatcgctcagaagatcaagaggtttcgcaacaaacaagcacagatgaagcatatatttaccgagcccgatgaggatctcttcaaccctgattatgtagaggtggaccggattctagaggtggcacatacgaaagatgccgaaaccggcgaggaagtgacacactacctggttaagtggtgttcgctgccctacgaggaaagcacctgggaactcgaggaagatgttgatcctgccaaggtgaaagagttcgagtcactacaggtccttcccgagatcaaacacgtggagaggcccgcgagtgacagctggcaaaagctggagaaatctagggaatataagaacagcaatcaactgagggagtaccagctcgagggcatgaactggcttctcttcaattggtacaacagaaaaaattgtatcttggccgacgaaatgggcctgggcaaaactattcagtctattacgtttctttccgaaatttttcttagaggaatccacggaccatttcttattatcgccccactgtctaccatcaccaactgggagcgggaattcaggacctggaccgagatgaacgccatcgtgtaccacggatcacagatatctaggcaaatgatccagcagtatgagatggtgtaccgggatgcccaggggaatcctctgtcgggggtcttcaaattccacgtcgtcattaccaccttcgaaatgattcttgctgactgccccgatctgaaaaagatcttctggggtcggtggaaagacatattgacgcatgggcggttcaagtggcatctgaatgagaaagacatggaaatgatttgtcgtgccctcctagtctattgtgtgaaacattataagggagacgagaagatcaaatcctttatctgggaacttattacgccaactaaggacggacaggcccagactttacaaaatcactccggcctgtcagcacccgtacctagaggcagaaaagggaaaaagacaaagaatcaattattgatacccgagttgaaagatgccgattggctggccacatgcaatccagaggtcgtgctgcatgacgacggctataagaagcatctcaaacagcactgtaacaaggtgctgctgcgagtgcgaatgctctactacctgaaggccgagatactgggagaggctgccgagaaggcctttgaaggcagtccagcgcgtgaactcgatgtgcctctgcccgatatagattacatggaaattcctgttgactggtgggatgccgaagcggacaagtctctcctaatcggggttttcaaacacggctatgagcggtacaatgctatgagagccgatcctgccttgtgctttctggaaaaagtgggtatgccggatgagaagtccttaagtgctgaacagggggtgacagacggcactagtgatattcccgaacgccagcatagatag

SEQ ID NO: 223323 - DNA, 8148 bp, Artificial Sequence
  derived and/or modified sequence
atgaaaatgaagattcagaaaaaggagaagcagttgagcaacttaaaggttctgaatcactctcctatgagcgacgcctctgtcaactttgactataagagcccttcaccattcgactgctccacggatcaggaggagaaaatcgaagatgtggccagtcactgcctcccccagaaagatttgtacaccgctgaagaggaggccgccactctgtttccccgcaagatgacatcccataacggaatggaggattccggaggcggtgggaccggggtcaaaaagaaaagaaaaaaaaaggaacccggcgaccaggaaggcgccgcaaagggctcaaaggaccgagagcccaagcctaagaggaaacgagaaccaaaggagcctaaagaaccacggaaggccaaggaacctaagaaggctaaggaacacaaggagcccaaacagaaagacggcgccaaaaaggctcgaaagcctagagaggcaagcggaacaaaggaggccaaggaaaagcggtcgtgcactgattcggctgcacgcaccaagtcaagaaaagccagtaaggagcaggggcctaccccggtggagaaaaagaagaagggaaaaagaaaaagcgagacgacagtggagtctctcgaactcgaccaggggcttacaaacccgtctctgaggagccccgaggaatccaccgagtcaacggatagccagaagcgcagatcaggacgccaagtcaagcgcagaaagtataacgaggacctagatttcaaggtggtggacgatgacggagagacaattgcagttctgggcgcaggcagaacttcagctctgtccgcctcaactttggcgtggcaggcagaggagcctcccgaagacgatgccaacattatcgagaaaatattggccagtaagactgtacaagaggtccacccaggcgagccccctttcgacctcgagctcttctacgtgaaatatcggaatttcagttatttgcattgtaagtgggccacgatggaggagcttgaaaaagatccgagaatagcccagaaaattaaaagattccgcaacaaacaggcacagatgaagcacatttttacagaacccgatgaggacctcttcaatcccgactacgttgaggtcgaccggattctggaggttgcccacacgaaggatgcggagaccggagaggaggtcacccactatctggtgaagtggtgctcactcccctatgaggagagcacctgggagttggaagaggacgttgatcctgcaaaggtgaaagagtttgagtctttacaagtgttacccgagattaaacacgtcgagaggccagcatcagacagctggcagaagttggaaaaatcacgggagtacaaaaactcgaatcaactgagggaataccagctagagggcatgaattggctgcttttcaactggtataaccgtaaaaactgtattcttgccgacgaaatgggcctgggtaagacaatccagtcaatcacttttctttctgaaattttcctgaggggcattcacgggccatttttaattattgctcccctttcaactatcaccaactgggagcgtgaattcagaacatggacagaaatgaacgcaatagtctaccatgggagtcagataagtcggcaaatgattcagcagtacgaaatggtgtatagggatgctcaagggaacccactttctggagtatttaaattccacgtggtgataacaaccttcgaaatgattctcgccgactgtcccgaattgaaaaaaatccactggtcatgcgttatcattgatgaggcccaccgcctgaagaatcgcaattgcaagctcctggagggcctgaagctgatggccctcgagcacaaggtgctgctgacaggtacacccctccagaactcagtggaggaattgttttctctgttgaattttctcgagccctctcagtttccatctgagactgcatttctagaagagtttggcgatctcaaaaccgaagagcaagtgaaaaagctgcaatcaattctgaagcccatgatgctacgtagacttaaagatgatgttgagaagaacctcgcccccaagcaagagactataattgaagttgagctgactaatatccagaagaaatactatcgcgcaatccttgagaagaactttagttttctcaccaaaggggccaaccaacacaacatgcccaatctcatcaacacaatgatggagctgcgaaagtgctgcaaccatccttatctaataaacggagccgaggaaaagattctggaggacttcagaaagacccatagccccgacgcccccgacttccaacttcaggcgatgatccaggctgcgggaaaactggtgttgatagacaaactcctacccaagctcattgctggagggcataaggtgttgatctttagccagatggtgaggtgcctggatatactcgaggattatctgattcagcggcggtacacatacgagagaatagacggcagggtccgcggcaacttacgccaagccgcaatcgaccgattttgcaagccagatagcgatcggtttgtcttcctattgtgtactagggccggcgggttgggcatcaatctgacagccgcagacacttgcattattttcgactctgattggaacccgcagaacgaccttcaagctcaggcaaggtgtcataggatcgggcagtcaaaggccgtaaaggtttatcggctaatcaccagaaactcttatgagcgcgaaatgtttgataaggctagtctgaagcttggcctggacaaggcagtgctccaggacatcaatcgcaaaggcggcacaaatggagttcagcagctgagtaagatggaggtggaagacctgctgcgaaagggggcatatggtgctttaatggacgaggaagacgagggttccaagttttgtgaggaagatattgatcagatactgcagcggaggacgcacacaataactatccaaagcgagggtaaaggctccacctttgcaaaagcttcttttgtcgcatcaggaaacaggaccgatatctctctggacgacccaaatttttggcagaagtgggccaagatcgccgaactggacacagaagccaagaatgaaaaggaatctctcgtcatcgaccgccctcgtgtgagaaagcagaccaagcattacaattccttcgaagaggacgagttaatggagttctctgagcttgacagtgactccgatgagcgccctaccaggtctcggcgtttaaacgacaaagcacgcagatatcttcgagccgagtgcttccgtgtcgagaaaaatctgcttattttcggctggggtcggtggaaggacatcctcacgcacggtcgctttaaatggcacctgaatgaaaaggatatggagatgatctgccgtgcactgttggtgtattgcgtgaagcactacaaaggggacgagaagataaaatccttcatctgggagctgattacaccaactaaagatggtcaagcacagaccttacaaaatcatagcggcttgtccgctcctgtgccaagaggaagaaaagggaaaaaaactaaaaaccagctcctgattcccgaactgaaagacgccgactggctcgcgacatgtaatcctgaggtggtgctgcatgatgatgggtacaagaaacacctcaaacagcactgcaacaaagtactgttgcgggtgagaatgctgtattacctcaaggccgaaattttgggtgaagcagccgagaaagcctttgaaggcagcccggccagggagttagacgttcccctgcctgacatcgattatatggagattccggtggactggtgggatgcagaagctgataagtcattacttattggcgtttttaagcacggctacgagagatataacgccatgcgcgctgaccctgcactgtgttttcttgaaaaggtggggatgcccgacgagaagagtctcagcgcggagcagggggtcaccgacggtacctcagatatccccgagcggggaaacactgacaaggaggataacgctgaagacaaggttgatggactgcagaagcagactgagtcctcatccgacggcggcgatggtgtcttcagtgagaagaaggatgatagccgcgctgctcaggatggctctgatccagataagagcccctggccagtctcatccgcacttactgccagacttcgaagattagtgacggtctatcagagatgtaacaggaaggaactctgtaggcccgagatcttggggcccgggaatcagggctactgggtacaggaagagatgtttcggcgtacctccgagatggacctgatcaataaggaagcccagaagcggtggactagacgggagcaggccgacttctacagaacagtgtccagctttggagtggtatacgatcaggaaaagaagacttttgattggactcagttcaggatcatcagtcgactcgataaaaaaagcgatgagtcattagaacaatatttttacagcttcgttgcaatgtgtagaaacgtgtgtagacttccaacttggaaggatgggggtccaccagacaccacaatctacgtagaaccaatcactgaagaacgtgctgcccgcaccttgtatagaatcgaactcctccgaaaagtgcgggagcaggtactcaagtgtcctcagctgcacgaaagactccagttatgtcgcccctccctgtacctgcctgtctggtgggagtgtggcaagcatgatagggacctgttgattggcacggccaaacacggccttaataggaccgactgttatataatgaacgacccgcagctatcctttctggatgcttacagaaattatgcccagcacaaacgttcagggacccaagcaccgggtaacctctgttgcttgtatcagactaattctaagctttacgaatccctgacttactcccagatgtctagaactagcgaatcccttgaaaacgagccagagaacttagtccgggtggaatctagggatgatcacttgagccttcctgacgtgacatgcgaaaattttatatccaaggtccaggacgttatatctatcaaccacgacgagagcctgctgcccgagtcacttgagtcaatgatgtatggaaagaaggtgctgagtcaggagccttcctcatttcaagagagtcccagcaccaacaccgagagcagaaaggatgtaataacaatcagtatcagcaaggatggcaattgccagtccggtggtccagaggccgaaatcgccagcggtccaaccttcatgggctcattagaggccggaggcgtcgcacaagccaatataaagaacgggaagcatctgctgatgagcatcagcaaagaaggagagctctgctgcagtgaggccggccagaggcctgagaacattggtcaactcgaggctaagtgtttagcttcccctagcctgaatcccggcaatgagtccgggttcgtcgacatgtgttcgctttccgtgtgcgactctaaacgtaatctctctagcgaccaacagctcattgatctccttgaaaataaatccctggagtctaaacttattctgtcccaaaatcactccgacgaggaagaggaagaggaggagaatgaggaggagaatttggcgatggccgtgggcatgggagagagacccgaggtgttgcacctgactgagcctactaccaatattagccgcgagaaaaaccagggatttcaggatgagaccaagaagggatcattagaggtggccaatcagacccccggcctccagagagcatttccggcacctgcagcctgtcaatgccattgtaaacatatggagaggtggatgcacggcctggaaaatgatgagttcgaaatcgaaaagcccaaagcctatatcccggatctattcaaaagtaagacaaacacgatcgccatggagggggaaccaacggccatccccagccagcccttcaaggttaagcatgagttgctcaaagaaccatggaaagaatccgccgaaggccaaaacgtcttccccacttatcccttggaagggtcagaattgaagagcgaagacatggatttcgaaaacaaggatgactatgatagggacggtaactgccacagccaggactatcctggaaaatatagcgaagaagagagcaaatcaagcacttctggtattaccggcgacattggcgacgaactgcaggaggcgcgcgcgcccactatagcacagctgctgcaggaaaagactctctacagtttttctgagtggcctaaggaccgggtgattattaataggcttgataacatttgccacgtggtgttgaagggcaagtggccatcctcccaacagtacgagccctccggcacactgcccacccccgtcctcaccagctccgctggttcccgaacatccctaagcgagccagaggccgccgagcacagtttttcaaacggtgccgctctcgccgcccagattcacaaggaatcctttctggccccggtttttactaaggatgagcagaagcaccgccgaccctacgagttcgaggtcgagcgcgatgcgaaggccagagggctggagcagtttagtgccacccacggtcacacaccgatcatactgaacggctggcatggtgagagtgcgatggatctatcctgttcttcggaaggctctcctggtgcgacatcaccctttccagtgagcgcctccactcccaagatcggcgccatctcttcactgcaaggagctcttggaatggacttaagcggtatactgcaggctggattaattcaccccgttaccgggcaaattgtcaacgggtctctgagacgggacgacgcagccacgagacggcgccgaggcagacgcaagcatgtagagggaggcatggacctgatttttctgaaggaacaaactctgcaggccggaatacttgaggtgcacgaggacccagggcaggctactctatctaccacccacccagagggacctggtccggctacctcagcccccgagccagctacagccgcgtcaagccaggcagaaaagtcgattccaagcaagtctcttcttgactggctccgccagcaggcggactactcactggaggtccccggattcggggccaatttttcggacaaacctaaacagagaagacccaggtgtaaagaacctggcaagctggatgtgtcatccctgtccggggaagaaagagtgcctgcaattccaaaggaacccggtctccgcggtttcctcccggagaataaatttaatcacaccttggctgagcccattttgagagacacaggtccaaggcgaagaggaagacgacccagaagcgagctgttgaaggccccaagtatcgtagcggattctccttctggcatgggcccactgttcatgaacgggttgatcgccggaatggatctggtaggtctgcaaaatatgcgaaacatgccaggtattccccttacaggactggtgggattccctgcaggtttcgcaactatgcccacgggggaagaagtgaagtctacgttgtccatgctccccatgatgttgccaggaatggcagccgtaccccaaatgttcggagttggcggccttctcagccccccaatggcaacgacctgtactagcacggctcccgccagcctttcttccacgacaaagtctggtaccgcagtgaccgaaaagacagccgaagataaaccttccagtcacgatgtgaagaccgataccctggccgaagacaagccagggcctggcccattcagcgatcagtctgaacctgccatcactacatcaagccctgttgctttcaatccattcctgataccgggggtctccccaggactcatctatccctctatgtttttgtcccccggaatggggatggctctgcctgcaatgcagcaggccaggcatagcgagattgttgggctagagagtcagaaacggaaaaagaagaaaacaaagggagataatccgaacagccaccccgagcctgcaccttcctgcgagagagaaccctcaggcgatgagaactgcgccgaaccctccgcccctctgccggctgaacgggaacacggagcacaggccggtgagggagctctgaaggacagcaacaatgataccaattag

SEQ ID NO: 223324 - DNA, 450 bp, Artificial Sequence
  derived and/or modified sequence
atgaagatgaagatccagaagaaagaaaagcagctgtccaatcttaaggtgctgaaccatagccctatgtccgacgcgtccgttaatttcgactacaagagccccagtccatttgactgtagtaccgaccaggaggaaaaaattgaagacgtagcgtcacactgccttccccaaaaggatctgtacacggccgaagaggaagccgcgacactgtttccacgcaagatgacatcgcataacggaatggaagactcagggggcggtggaacaggtgtgaagaagaagaggaaaaagaaggagccaggggatcaggaaggcgccgcaaaggggtcaaaagatcgggagcctaaacctaaaaggaagcgcgagccaaaggaacctaaagagccgagaaaagcaaaagaacccaaaaaagcaaaagaacataaagagcccaaacagaaagattag

SEQ ID NO: 223325 - DNA, 2469 bp, Artificial Sequence
  derived and/or modified sequence
atgaagatgaagatccagaagaaggagaagcagctgagcaacctgaaggtgctgaaccacagccccatgtctgatgcctctgtgaactttgactacaagagccccagcccctttgactgcagcacagaccaggaggagaagattgaagatgtggccagccactgcctgccccagaaggacctgtacacagctgaggaggaggccgccaccctcttccccaggaagatgaccagccacaacggcatggaggacagcggcggcggcggcaccggggtgaagaagaagaggaagaagaaggagcccggggaccaggagggcgccgccaagggcagcaaggaccgggagcccaagcccaagaggaagcgggagcccaaggagcccaaggagcccaggaaggccaaggagcccaagaaggccaaggagcacaaggagcccaagcagaaggatggagccaagaaggccaggaagccccgggaggccagcggcaccaaggaggccaaggagaagaggagctgcacagattctgctgcccggaccaagagcaggaaggccagcaaggagcagggccccacccctgtggagaagaagaagaagggcaagaggaagtctgagaccaccgtggagagcctggagctggaccagggcctgaccaaccccagcctgcggagccctgaggagagcacagagagcacagacagccagaagaggaggagcggccggcaggtgaagaggaggaagtacaatgaagacctggacttcaaggtggtggatgatgatggagagaccatcgctgtgctgggcgccggccgcaccagcgccctgagcgccagcaccctggcctggcaggccgaggagcccccagaagatgatgccaacatcatcgagaagatcctggccagcaagacagtgcaggaggtgcaccctggagagcccccatttgacctggagctgttctacgtgaagtacagaaacttctcctacctgcactgcaagtgggccaccatggaggagctggagaaggacccccgcatcgcccagaagatcaagcgcttcaggaacaagcaggcccagatgaagcacatcttcacagagccagatgaagatctcttcaacccagactatgtggaggtggaccgcatcctggaggtggcccacaccaaggatgctgagactggagaggaggtgacccactacctggtgaagtggtgcagcctgccctatgaggagagcacctgggagctggaggaggatgtggaccctgccaaggtgaaggagtttgagagcctgcaggtgctgcctgagatcaagcacgtggagaggcctgccagtgacagctggcagaagctggagaagagccgggagtacaagaacagcaaccagctgcgggagtaccagctggagggcatgaactggctgctcttcaactggtacaacaggaagaactgcatcctggctgatgagatgggcctgggcaagaccatccagagcatcaccttcctgtctgagatcttcctgcggggcatccacggccccttcctgatcatcgcccccctgagcaccatcaccaactgggagcgggagttccgcacctggacagagatgaatgccatcgtgtaccacggcagccagatcagccggcagatgatccagcagtatgagatggtgtacagagatgcccagggcaaccccctgtctggagtcttcaagttccacgtggtgatcaccacctttgagatgatcctggccgactgcccagacctgaagaagatcttctggggccgctggaaggacatcctgacccacggccgcttcaagtggcacctgaatgagaaggacatggagatgatctgccgggccctgctggtgtactgtgtgaagcactacaagggagatgagaagatcaagagcttcatctgggagctgatcacccccaccaaggatggccaggcccagaccctgcagaaccacagcggcctgagcgcccctgtgccccggggcaggaagggcaagaagaccaagaaccagctgctgatccctgagctgaaggatgctgactggctggccacctgcaaccctgaggtggtgctgcatgatgatggctacaagaagcacctgaagcagcactgcaacaaggtgctgctgcgggtgaggatgctgtactacctgaaggccgagatcctgggggaggccgctgagaaggcctttgagggcagccctgcccgggagctggatgtgcccctgcctgacatcgactacatggagatccctgtggactggtgggatgctgaggccgacaagagcctgctgattggagtcttcaagcacggctatgagcgctacaatgccatgagagctgaccctgccctgtgcttcctggagaaggtgggcatgccagatgagaagagcctgtctgctgagcagggcgtgacagatggcaccagtgacatccctgagcggcagcacaggtag

SEQ ID NO: 223326 - DNA, 8148 bp, Artificial Sequence
  derived and/or modified sequence
atgaagatgaagatccagaagaaggagaagcagctgagcaacctgaaggtgctgaaccacagccccatgtctgatgcctctgtgaactttgactacaagagccccagcccctttgactgcagcacagaccaggaggagaagattgaagatgtggccagccactgcctgccccagaaggacctgtacacagctgaggaggaggccgccaccctcttccccaggaagatgaccagccacaacggcatggaggacagcggcggcggcggcaccggggtgaagaagaagaggaagaagaaggagcccggggaccaggagggcgccgccaagggcagcaaggaccgggagcccaagcccaagaggaagcgggagcccaaggagcccaaggagcccaggaaggccaaggagcccaagaaggccaaggagcacaaggagcccaagcagaaggatggagccaagaaggccaggaagccccgggaggccagcggcaccaaggaggccaaggagaagaggagctgcacagattctgctgcccggaccaagagcaggaaggccagcaaggagcagggccccacccctgtggagaagaagaagaagggcaagaggaagtctgagaccaccgtggagagcctggagctggaccagggcctgaccaaccccagcctgcggagccctgaggagagcacagagagcacagacagccagaagaggaggagcggccggcaggtgaagaggaggaagtacaatgaagacctggacttcaaggtggtggatgatgatggagagaccatcgctgtgctgggcgccggccgcaccagcgccctgagcgccagcaccctggcctggcaggccgaggagcccccagaagatgatgccaacatcatcgagaagatcctggccagcaagacagtgcaggaggtgcaccctggagagcccccatttgacctggagctgttctacgtgaagtacagaaacttctcctacctgcactgcaagtgggccaccatggaggagctggagaaggacccccgcatcgcccagaagatcaagcgcttcaggaacaagcaggcccagatgaagcacatcttcacagagccagatgaagatctcttcaacccagactatgtggaggtggaccgcatcctggaggtggcccacaccaaggatgctgagactggagaggaggtgacccactacctggtgaagtggtgcagcctgccctatgaggagagcacctgggagctggaggaggatgtggaccctgccaaggtgaaggagtttgagagcctgcaggtgctgcctgagatcaagcacgtggagaggcctgccagtgacagctggcagaagctggagaagagccgggagtacaagaacagcaaccagctgcgggagtaccagctggagggcatgaactggctgctcttcaactggtacaacaggaagaactgcatcctggctgatgagatgggcctgggcaagaccatccagagcatcaccttcctgtctgagatcttcctgcggggcatccacggccccttcctgatcatcgcccccctgagcaccatcaccaactgggagcgggagttccgcacctggacagagatgaatgccatcgtgtaccacggcagccagatcagccggcagatgatccagcagtatgagatggtgtacagagatgcccagggcaaccccctgtctggagtcttcaagttccacgtggtgatcaccacctttgagatgatcctggccgactgcccagagctgaagaagatccactggagctgtgtgatcattgatgaggcccaccggctgaagaacagaaactgcaagctgctggagggcctgaagctgatggccctggagcacaaggtgctgctgaccggcacccccctgcagaacagcgtggaggagctgttcagcctgctgaacttcctggagcccagccagttccccagcgagacagccttcctggaggagtttggagacctgaagacagaggagcaggtgaagaagctgcagagcatcctgaagcccatgatgctgcggcggctgaaggatgatgtggagaagaacctggcccccaagcaggagaccatcatcgaggtggagctgaccaacatccagaagaagtactaccgggccatcctggagaagaacttctccttcctgaccaagggggccaaccagcacaacatgcccaacctgatcaacaccatgatggagctgaggaagtgctgcaaccacccctacctgatcaacggggctgaggagaagatcctggaggacttcaggaagacccacagcccagatgccccagacttccagctgcaggccatgatccaggccgccggcaagctggtgctgattgacaagctgctgcccaagctgattgctgggggccacaaggtgctgatcttcagccagatggtgcgctgcctggacatcctggaggactacctgatccagaggcgctacacctatgaaagaattgatggccgggtgcggggcaacctgcggcaggccgccatcgaccgcttctgcaagccagacagcgacagatttgtgttcctgctgtgcaccagggctgggggcctgggcatcaacctgacagctgctgacacctgcatcatctttgacagcgactggaacccccagaatgacctgcaggcccaggcccgctgccaccgcatcggccagagcaaggctgtgaaggtgtaccgcctcatcaccaggaacagctatgagcgggagatgtttgacaaggccagcctgaagctgggcctggacaaggctgtgctgcaggacatcaacaggaagggcggcaccaacggggtgcagcagctgagcaagatggaggtggaggacctgctgaggaagggggcctatggagccctgatggatgaggaggatgagggcagcaagttctgtgaagaagatattgaccagatcctgcagaggaggacccacaccatcaccatccagagcgagggcaagggcagcacctttgccaaggccagctttgtggccagcggcaacagaacagacatcagcctggatgaccccaacttctggcagaagtgggccaagattgctgagctggacacagaggccaagaatgagaaggagagcctggtgattgaccggccccgggtgaggaagcagaccaagcactacaacagctttgaggaggatgagctgatggagttcagcgagctggacagcgacagtgatgagcggcccaccaggagccggcggctgaatgacaaggcccggcgctacctgcgggcagagtgcttccgggtggagaagaacctgctgatcttcggctggggccgctggaaggacatcctgacccacggccgcttcaagtggcacctgaatgagaaggacatggagatgatctgccgggccctgctggtgtactgtgtgaagcactacaagggagatgagaagatcaagagcttcatctgggagctgatcacccccaccaaggatggccaggcccagaccctgcagaaccacagcggcctgagcgcccctgtgccccggggcaggaagggcaagaagaccaagaaccagctgctgatccctgagctgaaggatgctgactggctggccacctgcaaccctgaggtggtgctgcatgatgatggctacaagaagcacctgaagcagcactgcaacaaggtgctgctgcgggtgaggatgctgtactacctgaaggccgagatcctgggggaggccgctgagaaggcctttgagggcagccctgcccgggagctggatgtgcccctgcctgacatcgactacatggagatccctgtggactggtgggatgctgaggccgacaagagcctgctgattggagtcttcaagcacggctatgaaagatacaatgccatgagagctgaccctgccctgtgcttcctggagaaggtgggcatgccagatgagaagagcctgtctgctgagcagggcgtgacagatggcaccagtgacatccctgagcggggcaacacagacaaggaggacaatgctgaggacaaggtggatggcctgcagaagcagacagagagcagcagtgatggaggagatggagtcttcagcgagaagaaggatgacagccgggccgcccaggacggcagtgaccctgacaagagcccctggcctgtgagcagcgccctgacagcccggctgcggcggctggtgacagtgtaccagcgctgcaacaggaaggagctgtgcaggcctgagatcctgggccctggcaaccagggctactgggtgcaggaggagatgttccggaggaccagcgagatggacctgatcaacaaggaggcccagaagcgctggacccggcgggagcaggccgacttctacagaacagtgagcagctttggagtggtgtatgaccaggagaagaagacctttgactggacccagttccgcatcatcagccggctggacaagaagagtgatgagagcctggagcagtacttctacagctttgtggccatgtgcagaaatgtgtgccgcctgcccacctggaaggatggcggccccccagacaccaccatctacgtggagcccatcacagaggagagagctgcccggaccctgtaccgcatcgagctgctgaggaaggtgcgggagcaggtgctgaagtgcccccagctgcacgagcggctgcagctgtgccggcccagcctgtacctgcctgtgtggtgggagtgtgggaagcatgaccgggacctgctgattggaacagccaagcacggcctgaacagaacagactgctacatcatgaatgacccccagctgtccttcctggatgcctacagaaattatgcccagcacaagaggagcggcacccaggcccctggcaacctgtgctgcctgtaccagaccaacagcaagctgtatgagagcctgacctacagccagatgagcaggaccagcgagagcctggagaatgaacctgagaacctggtgcgggtggagagcagagatgaccacctgagcctgcctgatgtgacctgtgagaacttcatcagcaaggtgcaggacgtcatcagcatcaaccatgatgagagcctgctgcctgagagcctggagagcatgatgtatggcaagaaggtgctgagccaggagcccagcagcttccaggagagccccagcaccaacacagagagcaggaaggatgtgatcaccatcagcatcagcaaggatggcaactgccagagcggcggccctgaggccgagatcgccagcggccccaccttcatgggcagcctggaggccggcggcgtggcccaggccaacatcaagaatggcaagcacctgctgatgagcatcagcaaggagggggagctgtgctgcagcgaggccggccagaggcctgagaacatcggccagctggaggccaagtgcctggccagccccagcctgaaccctggaaatgaaagtggctttgtggacatgtgcagcctgtctgtgtgtgacagcaagaggaacctgagcagtgaccagcagctgattgacctgctggagaacaagagcctggagagcaagctgatcctgagccagaaccacagtgatgaggaggaggaggaggaggagaatgaggaggagaacctggccatggctgtgggcatgggagagaggcctgaggtgctgcacctgacagagcccaccaccaacatcagccgggagaagaaccagggcttccaggatgagaccaagaagggcagcctggaggtggccaaccagaccccaggcctgcagagggccttccctgccccagctgcctgccagtgccactgcaagcacatggagcgctggatgcacggcctggagaatgatgaatttgaaattgagaagcccaaggcctacatcccagacctcttcaagagcaagaccaacaccatcgccatggagggggagcccacagccatccccagccagcccttcaaggtgaagcatgagctgctgaaggagccctggaaggagagcgctgagggccagaatgtgttccccacctaccccctggagggcagcgagctgaagtctgaggacatggactttgagaacaaggatgattatgacagagatggcaactgccacagccaggactacccaggcaagtacagcgaggaggagagcaagagcagcaccagcggcatcactggagacattggagatgagctgcaggaggcccgggcccccaccatcgcccagctgctgcaggagaagaccctgtacagcttcagcgagtggcccaaggacagagtcatcatcaaccggctggacaacatctgccacgtggtgctgaagggcaagtggcccagcagccagcagtatgagcccagcggcaccctgcccacccctgtgctgaccagcagcgctggcagcaggaccagcctgtctgagcctgaggccgctgagcacagcttcagcaatggagctgccctggccgcccagatccacaaggagagcttcctggcccctgtgttcaccaaggatgagcagaagcaccggcggccctatgaatttgaggtggagagagatgccaaggcccggggcctggagcagttcagcgccacccacggccacacccccatcatcctgaatggctggcacggggagagcgccatggacctgagctgcagcagcgagggcagccctggggccaccagccccttccctgtgtctgccagcacccccaagatcggggccatcagcagcctgcagggcgccctgggcatggacctgagcggcatcctgcaggccggcctcatccaccctgtgacaggccagatcgtgaatggcagcctgcggagagatgatgctgccaccaggagaagaagaggccgcaggaagcacgtggagggcggcatggacctgatcttcctgaaggagcagaccctgcaggccggcatcctggaggtgcatgaagatcctggccaggccaccctgagcaccacccaccctgagggccctggccctgccaccagcgcccctgagcccgccacagctgccagcagccaggccgagaagagcatccccagcaagagcctgctggactggctgcggcagcaggccgactacagcctggaggtgcccggctttggagccaacttcagtgacaagcccaagcagaggcggccccgctgcaaggagcccgggaagctggatgtgagcagcctgagcggggaggagcgggtgcctgccatccccaaggagcccggcctgcggggcttcctgcctgagaacaagttcaaccacaccctggccgagcccatcctgcgggacaccggccccaggagaagaggccggcggcccaggtctgagctgctgaaggcccccagcatcgtggccgacagccccagcggcatgggccccctcttcatgaatggcctgattgctggcatggacctggtgggcctgcagaacatgaggaacatgcctggcatccccctgaccggcctggtgggcttccctgctggctttgccaccatgcccactggagaggaggtgaagagcaccctgtccatgctgcccatgatgctgcccggcatggctgctgtgccccagatgtttggagtgggcggcctgctgagcccccccatggccaccacctgcaccagcacagccccagccagcctgagcagcaccaccaagagcggcacagctgtgacagagaagacagctgaggacaagcccagcagccatgatgtgaagacagacaccctggccgaggacaagccaggccctggccccttcagtgaccagagcgagcccgccatcaccaccagcagccctgtggccttcaaccccttcctgatccctggggtgtccccaggcctcatctaccccagcatgttcctgagccctggcatgggcatggccctgcctgccatgcagcaggcccggcacagcgagatcgtgggcctggagagccagaagaggaagaagaagaagaccaagggggacaaccccaacagccaccctgagcccgcccccagctgtgagcgggagcccagcggagatgagaactgtgccgagcccagcgcccccctgcctgctgagcgggagcacggggcccaggccggggagggcgccctgaaggacagcaacaatgacaccaactag

SEQ ID NO: 223327 - DNA, 450 bp, Artificial Sequence
  derived and/or modified sequence
atgaagatgaagatccagaagaaggagaagcagctgagcaacctgaaggtgctgaaccacagccccatgtctgatgcctctgtgaactttgactacaagagccccagcccctttgactgcagcacagaccaggaggagaagattgaagatgtggccagccactgcctgccccagaaggacctgtacacagctgaggaggaggccgccaccctcttccccaggaagatgaccagccacaacggcatggaggacagcggcggcggcggcaccggggtgaagaagaagaggaagaagaaggagcccggggaccaggagggcgccgccaagggcagcaaggaccgggagcccaagcccaagaggaagcgggagcccaaggagcccaaggagcccaggaaggccaaggagcccaagaaggccaaggagcacaaggagcccaagcagaaggactag

SEQ ID NO: 223328 - DNA, 2469 bp, Artificial Sequence
  derived and/or modified sequence
atgaagatgaagatccagaagaaggagaagcagctgagcaacctgaaagtacttaatcactctccaatgtccgacgccagcgtcaactttgactacaagtcaccatctccatttgattgctctacggatcaggaagagaagatagaggatgttgctagccattgtcttccacagaaggatctttacacagctgaggaggaagccgccaccctttttccacggaaaatgacctcccataatggtatggaagactccggagggggtgggaccggagtgaagaaaaagcggaaaaagaaggagcctggcgaccaggagggggcagcaaaagggtctaaagatcgtgagcccaaaccaaagagaaaacgtgagcccaaggagcctaaggagcctagaaaagctaaagagcctaaaaaggccaaagaacataaggaacccaaacagaaggacggggccaagaaggctcggaaaccacgggaagccagtggaactaaagaagccaaggaaaagcggtcttgtacagattctgcagctagaactaagagccggaaggcttcaaaggagcaaggacccaccccagtcgaaaaaaaaaagaagggaaaaaggaaatctgagactacagtagagtccttggagttagatcaggggttaaccaaccccagcttacgcagccctgaggagtctaccgagtcaacagattctcagaagagacgttccggcaggcaggtgaaacgcaggaagtataacgaggacttagatttcaaggtggttgatgatgacggtgagaccattgccgtgctcggagccggtaggacttcagcattgtccgcctccaccctcgcctggcaagcagaagaacccccggaagatgatgccaacattattgaaaagatcctggccagtaaaacggttcaagaggttcatccaggtgagccaccattcgacctggagctgttctacgttaagtaccggaactttagctatcttcattgcaagtgggctaccatggaggaattggaaaaggacccccgtatcgcccaaaagatcaagagattcagaaataagcaggcccaaatgaagcatattttcaccgagcccgacgaggacctgttcaaccccgactacgtcgaagtcgataggattttagaggttgctcacactaaagacgcggagacaggggaagaagttactcactatctggtgaagtggtgctcactcccctacgaagaatccacctgggaattggaggaagacgtcgatcctgcgaaggtcaaagaatttgaatctttacaggtactgccagaaattaaacacgtcgagagacctgccagtgactcatggcagaagcttgaaaagtccagagagtataaaaattccaatcagctcagggaatatcagctggaaggtatgaactggctgttgtttaattggtacaatcgaaagaattgcattctcgccgatgaaatgggactgggaaaaactatacagtccatcacatttctgtccgagatctttttgcggggcatccatggcccgttcctgattattgcacccctgtccactatcactaactgggagagagaatttaggacatggacagagatgaatgcgatcgtttaccatgggagccagattagccgtcaaatgattcagcagtatgaaatggtgtatagggacgcacaggggaaccctctgtccggcgtcttcaaatttcacgttgttatcactacattcgagatgatcttggctgattgtccggacctgaaaaaaatattctgggggcgttggaaggatattctgacccacggtcgctttaagtggcacctgaacgaaaaggatatggaaatgatctgccgtgccctccttgtgtactgcgttaagcattataaaggggacgaaaagatcaagtcatttatctgggagctgatcacacccactaaagacggccaagctcagactctgcagaaccacagtggtctctcagctccagttccccgcggaaggaaaggaaaaaagactaaaaatcagctgctcattcctgaattaaaggatgctgattggctggccacatgtaacccagaggttgttctgcatgacgacggatataaaaagcacctgaaacaacattgtaataaggtcctcctcagggtgcgaatgctctactacttgaaagccgagattctcggcgaagcggcagaaaaagcattcgagggcagtcccgctagagaactcgacgttccacttcccgacatcgattatatggagattccggtggactggtgggacgcagaagctgacaagagcctgcttattggagtctttaaacacgggtatgaacgatataatgctatgcgcgctgacccggctctgtgtttcctggaaaaggtgggcatgccggacgaaaagagccttagcgccgagcaaggcgtgacagatggcacatccgatattcccgagcggcagcatcgctag

SEQ ID NO: 223329 - DNA, 8148 bp, Artificial Sequence
  derived and/or modified sequence
atgaagatgaagatccagaagaaggagaagcagctgagcaacctgaaagttctcaatcatagccccatgtctgacgcttccgttaactttgattacaagtcaccttcaccattcgactgtagcacagatcaagaggaaaagatcgaagatgtggcctctcattgtctcccacaaaaagatctgtacaccgccgaggaagaagcagctacattatttccacgaaagatgacctcacataacggaatggaggacagtggtggaggtggtactggtgttaagaaaaagaggaaaaagaaagagccgggagatcaggagggagccgctaagggctctaaggacagagagcctaaacctaagagaaaaagggaaccaaaggaaccaaaggaaccccggaaagctaaagagccgaagaaggcaaaagagcacaaagagcctaagcagaaagatggcgctaagaaggcgaggaaacctcgcgaagcttcggggacgaaagaagctaaggagaaaaggagctgcaccgactctgcagcaaggacaaaatctagaaaggcatctaaggagcagggcccaacaccagtggagaaaaaaaaaaagggcaaacgtaaaagcgagacaacagtggaatcactggaactcgaccaggggctgactaatccatctttgcggtcccctgaagaatcaacagagagtactgattcccaaaagagacgcagcgggaggcaggttaagcgaagaaagtataacgaggatctggattttaaagtggttgatgacgatggagaaaccatcgctgtcctaggcgccggtcgcacttccgccctgtcagcaagcaccttggcctggcaggcagaagaacctcccgaagacgatgccaacatcatcgagaagattcttgcctccaaaaccgtgcaggaggtgcatcctggagagcccccttttgacctcgaactcttctacgttaaataccgcaattttagctacctccattgtaagtgggccaccatggaggagctggagaaagatccgcggattgctcagaagatcaagcgtttccgtaacaaacaggcgcaaatgaaacacatttttactgagccggatgaagatctgttcaaccctgactatgtggaagtggatcgcatactggaggtagcccacacaaaggatgccgagacaggtgaggaagtgacgcactaccttgtcaaatggtgctctcttccctatgaggagagcacatgggagttagaagaagatgtcgatcccgcgaaagtcaaagaattcgagagcttgcaggtgttgcccgagatcaagcacgtggaacgacctgcctctgactcctggcagaaactggagaagagccgggagtataaaaactctaatcaacttagggagtatcagttggaggggatgaactggctactgtttaattggtacaaccggaagaactgcatcctggccgatgagatgggattggggaagaccatccaatccataacattcctctctgagatttttctccggggaattcacggcccgtttttgattatcgccccgttatccacgataaccaattgggagagagagttcaggacatggactgagatgaacgcgattgtctaccacggctcacaaatcagtcggcagatgattcagcagtatgagatggtctatcgagatgcccagggtaaccccctttcgggcgtgtttaagttccacgtagtgataacaacattcgaaatgatcctggcagactgtcctgagttgaagaaaattcactggtcctgtgtgatcattgacgaagcacaccgtttgaagaatcgcaattgtaagctcctggaaggtctaaaattgatggcattggagcacaaggtgcttctcaccgggacacccctgcaaaattctgtagaagagctgttttcgctcctgaatttcctcgaacctagtcagttcccgagcgagacagcattcttggaagagttcggtgatctgaaaaccgaggagcaggtgaaaaaactgcagtccatactgaagcctatgatgctgcgacgcctcaaggatgatgttgaaaaaaatttggcccccaaacaggagacaatcatagaggttgaactgaccaatattcagaagaaatattacagggcaatactggagaagaacttttcatttctgacaaagggggcgaaccagcataacatgcctaaccttattaatacaatgatggagctgcgcaaatgttgcaatcacccctacctcatcaacggggcggaagaaaagatcttagaggacttcagaaaaacacacagtccagatgccccggactttcagttacaggctatgattcaggcagctggcaagctggttctgattgacaagttgttgcccaagctaatcgctggagggcataaggtgctcatttttagtcagatggtgaggtgcctagatatcctcgaggactatcttattcagaggcgatacacctatgagcgcatcgatggccgcgttagagggaatctgcgccaggccgccatcgatcgtttttgcaagcctgactccgatcgattcgtttttcttttgtgtacaagagctggtgggctcggtatcaacctcacagccgccgacacgtgtattatcttcgacagcgactggaacccccagaatgatttacaagcacaggccaggtgccataggatcgggcaatcaaaggctgtcaaagtctacagattgatcaccaggaacagctacgagcgcgagatgttcgataaggcatcccttaagctcggcctggacaaggccgtgctgcaagacatcaatcgaaagggcggcactaatggggtccagcaactgagcaagatggaagttgaagatctgctgcgcaaaggtgcatatggggcactaatggatgaggaagacgagggcagcaagttttgcgaggaggacattgaccagattttgcaaaggagaactcataccatcacaattcagtcggaagggaaaggatcaaccttcgccaaggcatccttcgtggcctccgggaatagaacagacatctcccttgacgaccccaatttctggcaaaaatgggctaagatagcagagctagataccgaggcgaagaacgaaaaagagtccttagtgatcgatcgacctagagtgaggaagcagacaaagcattacaacagctttgaagaggacgaactgatggagttctccgagctcgattccgactccgatgaacgccccacccgctcccggcggctgaatgacaaagcaagacgatacctgagggcagagtgtttcagagtggagaaaaatctcctcatcttcggatggggccgctggaaagacatcctgactcacggcaggtttaagtggcacctgaatgagaaggacatggagatgatttgtagagcgctgctcgtgtactgtgtaaagcattacaagggagatgagaagataaagtcttttatctgggagctgatcacccctactaaagacgggcaggcacagaccctgcagaaccatagtggcttgagcgcaccagttccgagagggagaaagggcaaaaagactaagaatcagctcctgatccccgaattgaaggacgcagattggctggccacctgcaatccagaagtggttctgcatgatgacggctacaaaaagcatctgaaacaacattgtaataaggtactgcttcgggtgcgtatgctctactacctaaaggctgaaattctcggtgaagccgctgaaaaggcctttgaaggttctccagccagggagctcgatgtcccactacctgatatagattatatggagatcccggtcgactggtgggacgccgaggccgataaatctctattgattggcgtgtttaaacacggctatgaacggtataatgccatgagagccgatcccgcactgtgtttcctcgagaaagttggtatgcctgacgagaaatccctgtcggctgagcaaggcgtgactgatggtacaagcgacatccctgagcgcggcaacacggacaaagaggataatgcagaggacaaggtagatggtcttcaaaaacagacggagtctagctcagacggcggagatggagtgttttcagagaagaaggacgatagccgcgccgcgcaggacggcagcgatccggacaagagcccatggcctgtgagtagcgccctgaccgcccgccttaggagattggtaacagtataccagagatgcaacagaaaggaattgtgcaggcccgaaattttaggccctggcaaccaaggctattgggtacaggaggagatgtttagaaggacctcagaaatggaccttatcaataaagaggcccagaaacggtggactaggcgcgagcaagctgacttctatcggacagtctcctcgttcggcgtcgtgtatgaccaggagaaaaaaaccttcgactggacacaatttagaataataagtaggctggacaaaaagagtgatgaatcacttgaacagtatttctacagctttgtcgcaatgtgtcgaaatgtgtgtagactgcccacgtggaaagatggtggccctcctgatactactatctacgtggagccaataacggaggaaagggccgcccgcaccctgtatagaattgaacttctgcggaaagttcgcgagcaggttctgaagtgtccacagttgcacgaacgcctccagttatgtcggccttctctctacttgcctgtatggtgggaatgcggtaagcacgaccgggatcttctgataggaacagctaagcacggcttaaaccggacggattgttacattatgaacgatccccagctttcatttctggacgcttatcgcaattacgcacagcacaaacgttctgggactcaggcccctggtaatctgtgctgcttatatcaaacaaattctaaactgtacgagtcactgacatacagccaaatgagccgtacatctgaaagccttgaaaatgagcccgaaaatttagtccgtgtggaatccagagacgatcatttgtcactgcccgatgttacctgcgagaacttcatttccaaagtgcaggatgttatttcaattaatcacgacgagtcattactgcccgaatcccttgaatcgatgatgtacggtaagaaagtactttcccaggagccatccagctttcaggagtctccaagcacaaatacagaaagcaggaaggacgtgatcaccatatccatctcaaaggatggaaactgccaaagcggaggacctgaggctgagatcgctagcggccccacatttatgggttccttggaagctggcggtgttgctcaggcaaacattaagaatgggaaacacctgctgatgtccatttctaaggagggtgaactctgctgtagtgaagcaggccagcggcctgagaacatcggacagctggaagcgaaatgcttggctagcccttctttaaacccggggaatgaaagtgggtttgtcgatatgtgctctctgtctgtgtgcgattcaaagcggaacctgtctagcgatcagcagctgatcgacctgctagaaaataagtccctggagtctaagctgatcctgagtcagaaccactctgatgaggaagaggaggaggaagagaacgaggaggagaatctggccatggccgttggaatgggcgaacggcctgaggtgctgcacctcaccgagccaaccactaatatctctcgggaaaagaatcaaggatttcaggacgagaccaagaagggctctctggaggtggccaaccagacccccgggctccagagggccttcccggctcccgcagcttgccagtgccactgtaagcacatggaaagatggatgcacggtctcgagaacgacgagttcgagatcgagaagccaaaggcgtacattcctgacctgttcaagtcaaaaacgaataccatcgcgatggaaggcgaacccactgcaattccctcacagccatttaaagtcaagcacgaactgttaaaagagccttggaaggagagcgccgaagggcagaatgtctttcccacttacccactggagggttccgagctgaagagcgaggatatggactttgagaataaggacgactatgatagggatgggaactgtcattcccaggattaccccggcaagtattctgaagaggaatccaagtcttctaccagcggaattacgggagatattggcgacgaattacaggaggctagggctcccacaattgcccagctgttgcaagaaaagaccttgtacagtttttcggagtggcccaaggatcgtgtgattattaatcgcctggataatatttgtcacgtggtgctgaagggaaagtggccaagctcccaacagtacgaaccctcagggacattaccaactcccgtactcacctccagtgcggggagccgaaccagcctgtccgagcccgaggcggctgagcattccttctccaacggagccgccctggctgctcaaatccataaggaatctttcctggcaccagtatttactaaggacgaacagaagcatagaagaccatatgagtttgaggtggaacgtgacgcgaaggctcgagggcttgagcagttctctgcaacacatggtcatactccaattattctcaatgggtggcatggcgagtctgctatggatctaagctgtagctccgaggggtcccctggagcaacaagtccttttccagtgtccgcctcaaccccgaaaatcggcgctatctcgtctctgcagggagcactaggcatggatctgtctggaatactgcaggctggtcttattcacccagttactggccagatcgtgaatgggtcactgcgccgagatgacgccgctacacgtagaaggaggggcagacgcaaacacgtcgaagggggaatggatctcatttttttgaaagagcagaccttacaggccggtatactggaagtgcacgaagaccctggacaagccacccttagtaccacccatccagaaggacccgggccagccacctctgctcccgagcccgcaaccgcagcatcatctcaggcagagaagagcattccatccaagtctctcttggattggctgagacaacaggctgattattcactggaagtcccaggttttggggcaaacttctcagacaaacctaaacagagaaggccccgttgtaaagaacccggcaaattagatgtcagtagtctcagcggagaagaacgagtacccgccatccccaaggaaccgggtttgcgggggttcctccccgagaataaattcaatcacactctcgccgagcctatactgcgcgacacgggccctagaagacgggggagaaggcctagaagtgaattacttaaggccccatccatcgtggcggattctccaagtgggatgggccctctgtttatgaatggcctgattgcaggtatggacttggtgggattgcagaacatgaggaatatgcctggtattccacttacgggcttggtgggatttcctgccggcttcgctactatgcccaccggcgaagaggtaaagtcaactctatcaatgcttcccatgatgctccccggcatggcggcggtgccacagatgttcggcgtcggcggactcctgagcccacccatggctactacgtgcacttccaccgctccggcgtccctctctagcacaaccaagtcgggaaccgctgtgaccgaaaaaaccgctgaagacaaaccttctagccacgatgttaaaacagatacactggcagaggacaagccagggcccggccctttttctgatcagagtgagcccgcgattactactagcagtcctgtggcctttaaccctttcctgatccctggcgtttccccgggtctcatctatccatctatgttcctgtcccccggcatgggcatggctcttcccgccatgcagcaagctcgccatagcgagatagtgggactggaaagccaaaagcgcaagaaaaagaagacaaagggggataatcctaacagtcatccagaacccgcaccgtcgtgcgaaagggagcctagtggagatgagaactgcgccgaacctagtgctccactcccggcagagcgcgagcatggagcacaagctggcgaaggcgctctgaaggattctaataatgatacgaattag

SEQ ID NO: 223330 - DNA, 450 bp, Artificial Sequence
  derived and/or modified sequence
atgaagatgaagatccagaagaaggagaagcagctgagcaacctgaaggtgctgaatcacagccccatgtctgatgcaagcgttaacttcgattacaagtcaccatcgcccttcgactgttcaaccgatcaagaggaaaagatcgaggacgtcgccagccactgcctccctcagaaagacttgtatacggcagaggaggaggccgctaccttattcccacgcaagatgacatcccacaacggcatggaagactccgggggcgggggaacaggggttaaaaagaaaaggaagaagaaggagcctggggatcaagagggagccgcaaagggatccaaggacagagagccaaaacccaaacgcaaacgggagccaaaagagccgaaggagccgaggaaagccaaagaacccaagaaggctaaggagcataaggagcctaagcaaaaagactag

SEQ ID NO: 223331 - DNA, 2469 bp, Artificial Sequence
  derived and/or modified sequence
atgaaaatgaagatacagaaaaaagagaagcaactgagtaacctgaaagtactaaaccactctcccatgagcgacgcctctgttaatttcgactacaaatcaccttcaccatttgactgctcgaccgatcaggaagaaaaaatcgaggacgtcgcctctcattgtctgccccagaaagatctgtacacagctgaggaagaggccgcaaccttgttccccaggaaaatgacttcccataatggaatggaggactccggcggaggcggtaccggggtgaaaaaaaaacggaaaaagaaggagccaggggaccaagagggggctgcaaaagggagcaaggaccgggaaccaaagcccaagagaaagagagagcccaaagagccaaaggagccacgcaaggccaaggaacctaagaaggctaaggagcacaaggaaccaaaacagaaagacggggctaagaaggccagaaagccgcgtgaggcgtcaggcaccaaagaagctaaagaaaagcgttcatgcaccgactcggctgcacgtacaaagtctcgaaaggcctcaaaagaacagggacctacccccgtagaaaaaaagaagaaggggaaaagaaaatcagaaaccactgtggagtccctggagctcgatcaagggctgaccaaccccagcttacgatcaccagaggaaagcaccgaaagcactgactcccagaagaggcgctccgggaggcaggttaaacgaaggaagtataacgaagacttagatttcaaagtagtcgatgatgacggtgaaaccatcgccgtgctcggtgcaggcaggactagtgcattaagcgcctccacccttgcttggcaggcagaagaaccacccgaggacgacgccaacatcatcgagaaaattcttgcctccaagaccgtacaggaagtgcacccaggcgaacccccatttgatctggagttattctatgtcaagtataggaatttctcctacctgcactgcaagtgggctacaatggaggagctggaaaaagacccaaggatcgcccaaaagattaagcggtttcgcaataaacaagcccagatgaaacacatttttacagaacccgacgaagatcttttcaatcccgattacgtggaagtcgacaggattctggaagtagcccataccaaagatgccgagacaggggaggaggtgactcattatctggtgaaatggtgctcccttccttacgaagaatccacctgggagctggaagaggatgtagatcccgcaaaggtcaaggaattcgagtctcttcaagtgttgcccgagattaaacatgtggagcggcctgccagtgattcgtggcagaagctcgaaaaatcccgagagtacaaaaattcaaatcagctgcgggagtaccagctggaggggatgaactggctgctgttcaactggtacaaccgcaagaattgtatcctcgcagacgagatggggttaggaaaaacgattcagtctatcaccttcttgagcgagattttcctgcgaggaatacatggcccatttctgatcatcgcaccgctatccacaataaccaactgggagcgtgagttcaggacttggaccgagatgaacgccattgtgtaccatggaagtcagattagcaggcaaatgatccagcagtatgaaatggtgtatagggatgcacagggtaaccctctctcaggagtgtttaagttccacgtcgtcatcactacatttgagatgattctggctgactgcccagacctgaaaaagattttctggggaagatggaaagatattctgacacacggacgcttcaaatggcatctcaacgagaaggacatggaaatgatttgtcgggcactcctggtgtactgcgtaaagcattacaagggtgatgaaaagatcaaatcctttatttgggaactgatcacccctactaaggacggccaggcccaaacactgcagaatcattccgggctttccgctcctgtgccgagagggaggaaaggcaaaaaaacaaaaaaccagctgctgattcctgaactgaaagatgccgactggttagccacttgtaatccagaagtagtgctgcacgacgacgggtataagaaacatctgaagcagcactgtaacaaggtattactgcgggtgcggatgctctattacctgaaggccgagatcttgggtgaagctgctgaaaaggcattcgaggggtcgcctgcgagagagctagatgtccccctgccagatatagattacatggaaattccggtagactggtgggacgccgaggccgacaagagcctcctgataggcgtgtttaaacacggttacgaacgatacaatgctatgagagccgaccctgctctgtgttttctcgagaaggtgggaatgcctgatgagaaatcattatctgccgaacagggagtcactgatggtaccagcgacattccggaaagacagcatcgttag

SEQ ID NO: 223332 - DNA, 8147 bp, Artificial Sequence
  derived and/or modified sequence
atgaaaatgaaaattcagaagaaggagaagcaattgtccaacctcaaggtactcaaccattcccctatgtcagatgcatcagtgaacttcgactacaagagccccagtccctttgactgttctaccgaccaggaagagaagatcgaagacgttgcgagtcactgtctgccccagaaagacctgtatacggccgaggaagaagcggctaccctgttccctcgtaagatgacttcccacaacgggatggaagacagcggcggtggcggaactggggttaaaaagaaacgaaagaagaaggaacccggtgaccaggagggcgcagccaagggcagcaaggatagagagcctaagcctaagcgaaagagggaaccgaaagagcctaaggagccccgaaaggcaaaggagcccaaaaaggccaaagagcacaaagaacctaagcagaaagatggcgctaagaaggccagaaaacccagggaggcatcaggaactaaagaagctaaagagaaaagatcttgtaccgattcagctgctagaaccaagagtcgcaaagcaagtaaggagcagggacccactccagtcgagaagaagaaaaagggcaagagaaaatctgagaccaccgtcgaaagcctggagctggatcaaggcctgaccaatccctctctccggagccctgaggagtctaccgaatccacggatagccagaagcggcgttctggcaggcaagtgaaacgcaggaagtacaatgaagacctggatttcaaggtcgttgacgacgatggggagacaatagcagtactgggtgccggaagaaccagcgccctgtctgcatccacgttagcttggcaggctgaagaaccgccagaggacgatgctaacataatagagaagatactcgcaagcaagaccgtgcaggaagtgcaccctggcgagcctccgttcgatctggaactgttctatgtcaagtatagaaatttctcctacctgcactgtaagtgggccacaatggaagaacttgagaaggatccaaggattgcccaaaagattaagcggttcaggaataagcaggcacaaatgaaacatatcttcaccgaacctgacgaggacctgtttaaccctgactatgtggaggtggatcgtatcttggaagtggctcacaccaaagacgctgaaacaggggaagaggtgactcactatcttgtgaagtggtgtagcctgccctacgaggaaagcacatgggaactcgaagaagacgtcgatcccgctaaggtaaaggagttcgaaagcctgcaggtgcttccggagattaaacatgtggaaagacctgcctccgactcttggcagaaactggaaaaatcccgggaatacaaaaactcgaatcagctgcgtgaataccaacttgagggcatgaactggctcctgtttaattggtacaaccgaaagaattgcattctcgctgacgaaatggggcttggtaaaacaattcagtctatcacctttctctccgaaatttttttgcgtggcattcatggcccattcctcattatcgcacctctgagtacaattaccaattgggagcgggagttcaggacttggaccgaaatgaacgccatcgtgtaccacggaagtcagatttcgcgccagatgattcagcaatacgaaatggtttatcgcgatgcgcagggaaaccctctcagtggagtgtttaagtttcacgtggtaatcaccacctttgagatgattctggctgactgcccagaacttaagaagatccactggtcatgtgttatcattgacgaggcccaccgtctgaagaatagaaactgcaagttgctcgaaggactgaagcttatggcgctggaacataaagtcctgttgactggtacaccactgcagaattccgttgaagagctatttagtctgttaaatttcctcgaaccaagccagttccccagcgagacagctttcctcgaggagttcggggacctgaagacagaggaacaggtgaagaagttgcagtccatactcaagccgatgatgttacggagattgaaggatgatgtggaaaagaatctggccccaaagcaggagacaatcatagaggttgaactcacaaatattcagaagaagtactacagggcaatcctcgaaaagaatttcagctttcttaccaagggggctaaccaacacaatatgccaaacctgatcaataccatgatggagttacggaagtgctgcaaccacccatacctcatcaacggcgctgaggagaaaatcctggaggatttcagaaagactcactccccagatgccccagacttccagcttcaagcaatgatccaggccgcaggcaagttggtccttatcgataagctattgcctaaattgatagccggtgggcacaaagttcttatttttagccagatggtccgctgtctcgatatcctggaggactatttaatccagaggcgctacacttatgaaagaatcgacggaagggtgagagggaatttacggcaagctgcaatagatcgattctgcaagcccgattctgaccgattcgtgtttctgttgtgcacccgggctgggggactgggcattaacctaaccgctgcagacacgtgcataattttcgattccgactggaatccgcagaacgatctgcaggctcaggctcgctgtcaccggatcgggcagtcaaaggcagtcaaggtgtaccggctgattacaagaaactcttacgaaagggagatgttcgataaagcaagcttaaaactcggactcgacaaagccgtgttgcaggacataaaccgcaaagggggaacgaacggtgtgcagcaactgtctaaaatggaggtcgaggacctcttacgaaagggggcatatggtgcccttatggacgaagaggacgagggaagcaaattttgtgaggaagacatcgatcagatactgcagagaagaactcatactatcaccattcagagcgagggcaagggctctaccttcgccaaagcctccttcgtggcttcaggcaatcggacggatatcagtctcgatgaccccaacttttggcagaaatgggcgaagatcgctgagctggatacagaagcgaagaacgagaaagagtccctggtgattgacaggcctagggttcgcaagcagacaaaacactacaacagcttcgaggaggatgagttgatggagttttctgagctagactccgacagcgatgagaggcctacccgctctagacggttgaatgacaaggccagaaggtatcttcgcgctgagtgcttccgggttgagaagaacctgctaatcttcgggtggggcagatggaaggacatcctcacccacggcaggtttaaatggcatttgaacgagaaggacatggagatgatttgtcgagcattgctggtgtattgtgtcaaacattacaaaggagacgaaaagattaaaagctttatatgggagctcattacacccaccaaggatggacaggcccagactttgcagaatcatagcggtttatcagccccagtgccgagggggaggaaagggaagaagacaaaaaaccagcttctcatcccagaactgaaagacgccgactggctggcaacctgcaatccagaggtggtgctccacgacgatggatacaagaagcatctaaagcaacattgcaacaaagtgttgcttagggttagaatgctgtactacctcaaagctgagatccttggagaggctgcggagaaagcttttgagggctcacccgcaagagagttagatgtgccactgcctgatattgattatatggaaatccctgtagattggtgggatgcagaagctgacaagtcattgttaatcggcgtgtttaagcacggctatgagaggtataacgccatgcgggctgaccctgcgctctgctttctagagaaagtggggatgccggacgagaagagtttgtctgccgagcagggcgtcaccgatggaactagcgacattcctgagagaggtaatacagacaaagaagataacgccgaggataaggtggacggacttcagaagcagacagaatcatcctctgatggcggagacggagtgttcagcgagaagaaggacgatagcagagcagcccaggatggctccgatcccgacaaatccccatggccagtcagctctgctctgacagccaggctgagaagactcgtaacagtgtatcagagatgtaatagaaaagaactgtgccgaccagagatcctgggccctgggaaccagggctactgggttcaagaggaaatgtttcgtcggacttccgagatggacctgatcaacaaagaggcccaaaaacggtggacccgtagagagcaagccgacttctaccgtactgtgtcgtcctttggggtggtttacgatcaggaaaagaagacctttgactggacccagtttcggattatcagtcggctggacaagaaatccgatgaaagtctggaacagtatttctatagctttgtggcaatgtgtaggaacgtgtgcaggcttcccacgtggaaggacggtggaccacctgatactacgatctatgtcgagccaatcaccgaagaaagggctgcacggaccctgtataggattgaactactcaggaaagtgcgcgaacaggtactcaaatgtcctcagcttcatgagcgtttacaactatgtcgaccctcgctgtacttgcctgtatggtgggaatgcgggaaacatgatcgagatcttttaatcggtactgccaaacatgggctgaacaggactgactgctacatcatgaatgacccccagctgtcgttcctcgacgcctaccggaactatgctcagcacaagaggtccggcactcaggccccaggcaacctgtgctgcctttatcagaccaattccaagttgtacgagagcctaacatatagtcaaatgtctcggacgtctgaaagccttgagaacgagcctgagaatttagtccgggtggagtcacgagatgatcatctgtcactgcccgatgtgacgtgcgagaattttatcagcaaggtgcaggacgtcattagtataaatcacgatgagagcctcctccccgaaagcctggagtctatgatgtacggtaaaaaagtgctatctcaggagccaagctccttccaggagtccccctctacaaacaccgaaagccggaaagatgttataacaatttcaattagcaaagatggcaactgtcagagtgggggacccgaggccgagattgcttcggggccaacattcatggggtccctcgaggccggaggggtggcccaggcaaacatcaaaaacggaaaacacctgcttatgtcgatctcaaaggagggcgaactgtgttgttccgaggcaggccagagacccgagaacattggtcaactggaggcaaaatgcctcgcctcaccttccttgaacccagggaacgagagcggtttcgtggacatgtgttctctttctgtgtgtgatagtaagaggaacctcagcagcgaccagcagcttatcgacctgctcgaaaataaaagcctcgagagtaagcttatcctgtcacaaaaccatagcgacgaagaggaggaggaggaggaaaacgaagaagaaaaccttgccatggctgtcggtatgggggaaagacccgaggtcctgcacctgacagagcctaccacaaacatttctcgagaaaaaaatcagggcttccaagatgagacaaagaagggatccttagaagtcgccaatcagacaccaggcctgcagagagctttcccagcgccagctgcctgccagtgccattgtaagcacatggaaagatggatgcacggattggagaatgacgagttcgaaatcgagaagcccaaggcttacatccccgatctgtttaaaagtaaaaccaacacaatagctatggagggcgagcccaccgcaatcccgagccagcccttcaaagtaaagcatgaactgctgaaggagccttggaaagaatcagccgagggccagaacgtcttcccgacctaccctctggaaggcagcgagctcaaaagcgaggacatggattttgaaaataaggatgattatgatcgcgatggcaattgtcacagccaggactatcccggaaagtactccgaagaggaatcaaaatcatccaccagtggcattactggagatattggcgatgaattgcaggaggcgagggctcccactattgctcaacttctccaggaaaagacgctgtactctttctctgagtggcctaaggaccgagtgataatcaaccggcttgataatatctgccacgtggtgctcaaaggtaagtggccatctagccagcagtatgagccttccggaacgttacctacacccgtgctgacatcctcagccggaagtaggactagcctcagcgagcccgaggcagctgaacattccttctcaaacggtgccgctctggcagcccagattcacaaagaaagttttctcgcccctgtttttaccaaggacgaacagaagcacagacgcccttacgaattcgaggtcgagagggatgcaaaggcacgcggtttggagcagttttctgcaacgcacggacatacgcccattatcctgaatggatggcatggtgagtctgccatggatctgtcctgcagctctgaaggatccccaggtgccacatctccttttcctgtcagtgcctccactcctaagattggcgctatttccagcctgcagggcgcattaggcatggatctctcgggcattctacaggcgggtctgatccacccagtcacaggacaaatagtgaatggatccctaaggagagatgatgccgctactaggcgcaggcgcggacgccgaaagcacgttgaaggaggcatggacctcatctttttgaaagagcagaccctgcaagccggaatcctagaagttcacgaagaccccggacaggccactctcagcaccactcatcccgaaggcccagggcctgccactagcgccccagagccggctacagctgccagttcccaggccgagaaatcgataccctctaagtcacttcttgactggcttcgtcagcaggctgattatagtctcgaagtccccggtttcggtgcgaacttctctgacaaacccaagcagcgaagacccagatgtaaggagccaggtaagctggatgtgtctagtctgagcggcgaggaacgcgtgccagctataccaaaggaacctgggttgcgcggttttttgcccgagaataagttcaaccatacccttgcggaacctattcttagagacacaggaccgaggaggaggggccgacgcccacgcagtgaactgctcaaggcacctagcatagtggccgactctccgagtgggatggggccactgtttatgaacgggctgattgccggtatggatctggtaggcctgcagaacatgagaaatatgcctggcattccattgaccggcttagtgggcttcccagcgggttttgccaccatgcccacaggggaagaggtgaagtcgacgctgtccatgctgccgatgatgttgccaggcatggccgcagtgccccagatgtttggcgtcgggggactcttaagcccaccaatggcgactacctgtacatctactgctcccgcatcactgtcttctactaccaaaagcggaacggccgtcactgagaaaaccgccgaggataaaccaagcagtcacgacgtgaaaacagatactctcgcagaggacaaaccgggtcccggtcctttctccgaccagagcgagcccgctattaccacatcaagccccgtagcgttcaacccattcctgatcccaggagtgagccccggactgatttacccaagcatgtttttatcacctggcatggggatggctttacctgccatgcaacaagcaaggcactccgagattgtgggcctggaatctcagaaaagaaagaaaaaaaagactaaaggtgacaatccaaattcgcacccagaacctgcgcctagctgcgagagagagcctagcggagacgaaaattgtgctgagccaagtgcccctctgccggctgagcgagagcatggggctcaggctggggaaggcgctcttaaagatagcaataacgacactaacta

SEQ ID NO: 223333 - DNA, 450 bp, Artificial Sequence
  derived and/or modified sequence
atgaagatgaagatacagaagaaggaaaaacagttaagcaatctgaaagtgcttaatcactctcctatgagtgacgcaagtgtgaactttgactataaaagtccatctccattcgattgctccacagatcaggaagaaaagatagaggacgtggcttcccattgtctgccccaaaaggatctctatacagccgaggaggaggcagccactctgttcccaagaaagatgacctcccacaatggcatggaagattcaggaggcggaggaactggagttaagaaaaagagaaaaaaaaaagaacccggagatcaagaaggggcagcaaaggggtccaaggatagggaaccaaagccgaagaggaaacgggagcccaaagagccaaaggaacccagaaaagccaaagaaccgaaaaaggctaaagaacacaaagagcccaaacagaaggactag

SEQ ID NO: 223334 - DNA, 2647 bp, Artificial Sequence
  derived and/or modified sequence
atgaccaatgggtctgtgttttggaccggcgaagcccaatggcgcgacagggaaggcgggcccgagatgggttagggtgtccttgcagggtgtctgagctaaacttcaccaaataatagctgtttgtattttggctgctgcaggagccattttagaaataaatatcttccttcaatagatgaaaatgaaaatacagaaaaaagagaagcagttgtcaaatttaaaagttttgaatcactccccaatgtctgatgcctctgtcaattttgactacaaatctccatccccatttgactgcagcactgatcaagaagagaaaattgaagatgttgctagtcactgtctgcctcagaaggacctgtatactgctgaagaggaagctgctaccctttttcctaggaaaatgacatcccataatgggatggaggacagtggaggaggaggtactggagtgaagaagaaacggaagaaaaaggagccaggagaccaagagggtgcagcaaagggaagcaaggacagagagcccaagccaaagaggaaacgagaaccgaaagagccaaaggaacccagaaaggccaaggagccgaagaaggccaaggagcacaaggagccgaagcaaaaagatggggcaaagaaggcacggaagccccgggaggcctcgggcaccaaggaggccaaagagaagaggagctgcactgactctgcagccaggacgaagtccaggaaggccagcaaggagcaaggaccaaccccagtggagaaaaagaagaaaggaaaaaggaaaagtgaaactacagtggagagtttagagctggatcagggcctgacgaacccatctctgcggagtcctgaggagtccactgagtctacagacagccagaaacgacgctcgggaaggcaagtaaagcgcagaaaatacaatgaggacctggacttcaaagtggtggatgatgatggggaaacaattgctgttcttggagctggtcgaacatctgcactctcagcctctacactggcctggcaggcggaggagcctccagaagatgatgcaaacatcattgagaagatcctggcatctaagactgtccaggaggttcacccaggagaacctccgttcgacttggagctgttctacgttaagtatagaaatttttcctacttacattgtaaatgggccacaatggaagagctcgaaaaggatcctcgcatcgcacagaagatcaagcgatttaggaataaacaagcccagatgaagcacatttttacggagcctgatgaagacttgttcaatccagactatgtagaagttgatcgcatcttggaggtggcccacaccaaggatgcagaaacaggggaggaggtaacacattacctggtgaagtggtgctcactaccatatgaagaaagcacgtgggagctagaggaagatgtagatcctgcaaaagttaaagaatttgaatctcttcaagttctccctgaaattaagcatgtggagcggcctgcttcagactcctggcagaaacttgagaagtctcgcgagtataagaacagtaaccagctccgggagtaccagctggaagggatgaactggcttctttttaactggtataacagaaaaaactgtattttggctgatgagatgggcctagggaaaaccatccagtccatcacattcctttcagaaatatttctgagaggaatccacggcccttttctcattatcgcccctctctccaccatcactaactgggagcgggagttccggacatggacagagatgaatgccattgtgtaccacggcagccagatcagcaggcagatgatccagcagtatgaaatggtgtacagagacgcccagggaaaccccctttcaggagtcttcaagttccacgtcgtcatcacaacatttgaaatgatcctagcagactgcccagatctaaagaaaatcttctggggccggtggaaggacatcctgactcatggccgattcaagtggcatctgaacgagaaggacatggagatgatttgccgtgccctcctggtgtactgtgtcaagcattataagggggacgagaagatcaagagtttcatttgggaactgatcacacctaccaaagatgggcaagcccagaccctccagaaccactcaggcttatctgccccagtccccagagggaggaaggggaagaagacgaagaaccagttgctaatcccagagctaaaggatgcagattggctagccacctgcaaccccgaggtggtcttgcatgatgatggctataagaaacacctcaaacagcactgcaacaaagtacttttgcgagtccggatgctgtactacctaaaagctgaaatactgggagaagcagctgagaaagcatttgaaggatctcctgccagggagctggatgtacctctgcctgacatcgactacatggagatcccagtggactggtgggatgctgaagccgataagtcacttctcattggcgtgttcaagcatggttatgaaaggtacaatgccatgcgagcagacccagcactttgcttcctggagaaagttgggatgcccgatgagaagtccctttctgcagaacagggtgttacagatgggacctcagacattcctgaaaggcaacacagataa

SEQ ID NO: 223335 - DNA, 10818 bp, Artificial Sequence
  derived and/or modified sequence
atgaccaatgggtctgtgttttggaccggcgaagcccaatggcgcgacagggaaggcgggcccgagatgggttagggtgtccttgcagggtgtctgagctaaacttcaccaaataatagctgtttgtattttggctgctgcaggagccattttagaaataaatatcttccttcaatagatgaaaatgaaaatacagaaaaaagagaagcagttgtcaaatttaaaagttttgaatcactccccaatgtctgatgcctctgtcaattttgactacaaatctccatccccatttgactgcagcactgatcaagaagagaaaattgaagatgttgctagtcactgtctgcctcagaaggacctgtatactgctgaagaggaagctgctaccctttttcctaggaaaatgacatcccataatgggatggaggacagtggaggaggaggtactggagtgaagaagaaacggaagaaaaaggagccaggagaccaagagggtgcagcaaagggaagcaaggacagagagcccaagccaaagaggaaacgagaaccgaaagagccaaaggaacccagaaaggccaaggagccgaagaaggccaaggagcacaaggagccgaagcaaaaagatggggcaaagaaggcacggaagccccgggaggcctcgggcaccaaggaggccaaagagaagaggagctgcactgactctgcagccaggacgaagtccaggaaggccagcaaggagcaaggaccaaccccagtggagaaaaagaagaaaggaaaaaggaaaagtgaaactacagtggagagtttagagctggatcagggcctgacgaacccatctctgcggagtcctgaggagtccactgagtctacagacagccagaaacgacgctcgggaaggcaagtaaagcgcagaaaatacaatgaggacctggacttcaaagtggtggatgatgatggggaaacaattgctgttcttggagctggtcgaacatctgcactctcagcctctacactggcctggcaggcggaggagcctccagaagatgatgcaaacatcattgagaagatcctggcatctaagactgtccaggaggttcacccaggagaacctccgttcgacttggagctgttctacgttaagtatagaaatttttcctacttacattgtaaatgggccacaatggaagagctcgaaaaggatcctcgcatcgcacagaagatcaagcgatttaggaataaacaagcccagatgaagcacatttttacggagcctgatgaagacttgttcaatccagactatgtagaagttgatcgcatcttggaggtggcccacaccaaggatgcagaaacaggggaggaggtaacacattacctggtgaagtggtgctcactaccatatgaagaaagcacgtgggagctagaggaagatgtagatcctgcaaaagttaaagaatttgaatctcttcaagttctccctgaaattaagcatgtggagcggcctgcttcagactcctggcagaaacttgagaagtctcgcgagtataagaacagtaaccagctccgggagtaccagctggaagggatgaactggcttctttttaactggtataacagaaaaaactgtattttggctgatgagatgggcctagggaaaaccatccagtccatcacattcctttcagaaatatttctgagaggaatccacggcccttttctcattatcgcccctctctccaccatcactaactgggagcgggagttccggacatggacagagatgaatgccattgtgtaccacggcagccagatcagcaggcagatgatccagcagtatgaaatggtgtacagagacgcccagggaaaccccctttcaggagtcttcaagttccacgtcgtcatcacaacatttgaaatgatcctagcagactgcccagagttgaagaagattcactggagctgtgtgataattgatgaagcccacagactgaagaataggaactgcaaacttctggagggtctaaagcttatggccctggaacataaagtgcttctcactggaacacccttgcagaactctgtggaggagctcttcagtttgttaaattttctggagccatcacagtttccttcagagaccgctttcttggaggaatttggagatctgaaaacagaggagcaggtaaagaaactgcagtctatcctaaaaccaatgatgcttcggcggctgaaagatgatgtggaaaagaaccttgctcccaaacaagagacgatcattgaggtggaactgaccaatatccagaaaaagtactaccgtgccatcctcgagaagaacttttccttcctgaccaagggggcaaatcagcacaacatgcccaatctcatcaacaccatgatggagctgaggaagtgctgtaaccatccctacctgatcaatggagcagaggagaaaattctagaagatttccgaaaaacccacagccctgatgcccctgactttcagctgcaggccatgattcaggcagcaggaaagcttgtgttgattgataaactactccctaagctgattgcaggtggccacaaagtactcatcttctcccagatggtgcgctgcctcgacatcctagaagattacctcatccagagaagatacacctatgagcgaattgatgggcgagtacggggaaacctgcgccaggcagccatcgaccggttctgtaagccagattcagaccgctttgtctttcttctgtgcaccagagcgggaggcctggggatcaatctcacagctgctgatacctgcatcatatttgattctgactggaacccacaaaatgacttgcaggctcaggcccgatgtcaccgcataggccagagcaaagctgtgaaggtgtatcgcctcatcactcgaaattcctacgagcgcgagatgtttgacaaggccagcctaaagctggggctggacaaggctgttcttcaggacatcaaccgaaagggcggcaccaatggggtacagcagctctcaaaaatggaggtggaggacctactccggaaaggtgcttatggagccttaatggatgaagaagatgaaggctccaagttctgtgaagaagacatagaccagattctgcagaggcgaacgcacaccatcaccatccagtctgaggggaaagggtccacttttgccaaggctagctttgtggcttcaggaaacagaacagatatttccttagatgatcctaacttttggcagaaatgggctaaaatagctgaactagacactgaagcaaagaatgaaaaggaaagcttagtgatcgaccgacctcgcgtgagaaagcagaccaaacactacaactcgtttgaggaagacgagctcatggagttttcagagttagacagcgactcagacgaaaggcccacgagatccaggcgcctcaatgacaaagccaggcgctacctccgagcggagtgcttccgggtagagaagaacctgctcatctttggctggggccggtggaaggacatcctgactcatggccgattcaagtggcatctgaacgagaaggacatggagatgatttgccgtgccctcctggtgtactgtgtcaagcattataagggggacgagaagatcaagagtttcatttgggaactgatcacacctaccaaagatgggcaagcccagaccctccagaaccactcaggcttatctgccccagtccccagagggaggaaggggaagaagacgaagaaccagttgctaatcccagagctaaaggatgcagattggctagccacctgcaaccccgaggtggtcttgcatgatgatggctataagaaacacctcaaacagcactgcaacaaagtacttttgcgagtccggatgctgtactacctaaaagctgaaatactgggagaagcagctgagaaagcatttgaaggatctcctgccagggagctggatgtacctctgcctgacatcgactacatggagatcccagtggactggtgggatgctgaagccgataagtcacttctcattggcgtgttcaagcatggttatgaaaggtacaatgccatgcgagcagacccagcactttgcttcctggagaaagttgggatgcccgatgagaagtccctttctgcagaacagggtgttacagatgggacctcagacattcctgaaagaggcaacacagataaagaagacaatgctgaggacaaagtagatggcctccagaaacaaacggagagttccagtgatggaggtgatggcgtttttagcgaaaagaaggatgacagccgggcagcccaggatggctccgacccagacaaatcgccctggccagtttcctccgccctcacagctcgtctcagacgtctggtcactgtttaccagcgctgcaaccgcaaggaactgtgccggcctgaaattctgggaccaggtaaccaaggatattgggttcaggaagagatgttcaggagaacctcagaaatggacctcatcaacaaggaagcccaaaagaggtggactaggagagaacaagcagacttctatagaacagtgtcttcctttggtgttgtttacgatcaagaaaagaaaacctttgactggacacagttccgcatcatttcccgtttggacaagaagtcggatgagagcctggaacagtatttttatagttttgtggccatgtgccggaatgtctgtcgtctacccacatggaaagatggcggtcccccagataccaccatctacgttgaacccatcactgaggaacgtgctgcaagaactctgtaccgcattgaactgttacggaaagtccgagagcaagtgctcaagtgccctcagctgcatgaacgcctccagctgtgcaggcccagcctctacctcccagtctggtgggagtgtgggaagcatgatcgagacctgctcatcggcactgccaaacatgggctgaaccgcactgactgttacatcatgaacgacccccagctgtccttcctggatgcctatagaaactatgcccagcataaaagatctggcacccaggcaccaggaaatctctgttgcctttaccagaccaactccaagttatatgaatctcttacatattctcaaatgagtaggacttcagagtcccttgaaaatgaacctgaaaatctagtgagagtagaaagcagagatgatcatctcagcctgcctgatgtgacatgtgaaaactttatttctaaagttcaggatgtcatttccatcaaccatgatgaaagtctgctgcctgagtccttagagagcatgatgtatggtaagaaggtgctcagccaagaaccaagctcttttcaggagagcccaagtaccaatactgaatctagaaaagatgttattaccatctcaataagcaaagatgggaactgccagtctggtggccctgaggcagaaatagcttctggccctacttttatgggtagcttagaagcaggaggagtagctcaagcaaacatcaaaaatggaaaacatttgttgatgtctatttcaaaggaaggggagctctgctgcagtgaggcaggacagagacctgaaaacattggccagctggaagccaagtgtttagcttccccttccttgaatccaggaaatgaaagtgggtttgtagatatgtgcagtcttagtgtctgtgactccaaaagaaacctgtcatcagatcagcaattaattgatttattggaaaacaaaagcttagaaagtaaattgattttgagtcagaaccacagtgatgaggaggaagaagaggaggaaaacgaggaggaaaacttagccatggcagtaggcatgggggaaaggccagaggtattgcatctcacggagcccactactaacatctcaagggaaaagaaccaaggcttccaagatgaaaccaagaaaggaagcttagaggtggcaaaccagactcctgggctacagagggctttccccgctccagcagcctgtcagtgccactgcaaacacatggagaggtggatgcatggcctcgagaatgatgaatttgaaatcgagaaacccaaggcttatatcccagatctgttcaaaagtaaaaccaatactatcgccatggagggtgaacccactgctattccatcacagccgtttaaagtgaagcatgagcttttaaaagaaccttggaaagaaagtgcagaggggcaaaacgttttccccacatatcctcttgaaggaagtgagctcaaatcagaagacatggattttgagaataaagatgattatgatagagacggaaactgccatagtcaagattatccagggaagtactctgaagaggagagcaagagctcaacatcgggcatcacaggagacattggggatgagctacaggaggctcgagctcccactattgctcagctgctacaggagaaaactctctattccttctctgagtggccaaaggaccgcgtgataattaaccgcctagataatatctgccacgtggtgttaaaggggaagtggccctctagccagcagtatgagccctcaggcacactgcccaccccggtattaaccagcagtgctggttctcgaaccagcctctcagagccggaagcagcagaacacagcttcagcaacggcgcagcattggcggcccagatccacaaggagagcttcttagctccagtattcacaaaggatgaacaaaagcacaggcgtccctatgagtttgaggtggagagggatgcaaaggctcggggcctggagcagttctctgccacccacgggcacacccctatcatcctcaatggctggcatggggagtcagctatggacctctcctgctcatcagaggggtccccaggagccacatcccctttcccagtgagcgccagcacccctaagattggggctatcagttcacttcagggagcccttggcatggacttgtctgggattctgcaagctggcctgatccatcctgtgactggacagattgtcaatggaagcctcagaagagatgatgcagccacgaggaggcggagagggaggcggaaacatgttgaaggagggatggacctcatctttttgaaggagcagacacttcaggcgggaatcttggaagtccatgaagacccagggcaggccaccttgagcaccacacaccctgaggggccagggcctgccacctcggctcctgagccagctacggcagccagcagccaagccgagaaatccattcccagcaagagtctgcttgactggctaaggcagcaggctgactactccttagaagttcctggctttggggcaaatttttcagacaaaccaaagcagaggaggccacgctgtaaagaacctggaaaattagatgtcagctccctgagcggggaagagagagttcctgccatccccaaggagccaggactgagggggtttcttccagaaaacaagttcaatcacactctggctgagcctattcttcgagatacgggcccccgcaggagggggaggcggcctcggagcgaactcctgaaggctccttccattgtggcagactctccctctggaatggggccactgttcatgaatggactgattgctgggatggacctggtaggacttcagaacatgagaaatatgccaggcatccccctcaccgggctggtggggtttccagctggctttgccacgatgccaacaggtgaagaggtcaaaagtaccctgagcatgctgcccatgatgctgccaggcatggctgctgtgccccagatgtttggtgttgggggactcctcagtccacccatggcaaccacctgcacttccactgctccggcgtctctatcaagcacaacgaaaagtggtacggcagtgactgaaaagactgcggaagacaagccgagtagccatgatgtgaaaacagacactttagctgaggacaagcctggtccaggtccattttctgatcagtctgaacctgcaataactactagtagtcctgtggcttttaacccatttctcatcccaggagtatctcctggactcatttacccatccatgttcctctcccctggtatgggcatggctctgccagccatgcagcaggccagacactcggaaatagtaggtctggagagccagaagaggaagaagaagaagacaaagggggacaaccccaactcccacccagagcctgctcccagctgtgaaagggagcccagcggtgatgagaactgtgccgaacccagtgcccctttgcccgcagagagagaacatggggcacaggctggggagggggcactcaaagactccaacaacgacaccaattagaacttttttcatttaagaaattattgtgacttgtaagtttcttatcccataaaggtttgttacttccctcacttcacctccataagaacctgtgtttccataagtaagattacgtacctgatttcctgtctgagaactatggtaacagatgttaatagttgcagggtctcaccacttcattagataagtgttgtctacctagtctaggaggcacagaattctcattctgttatccagttcattccagcaatcatagttaatacagtacttggtgacacgccctacccccttctcttccaagtttcccactcacttgaggaggaaaaatggcaaaagaaagctgtctagggttttaccattgaagggtggaagaacagagacaaagaggagctctttttctgtgagctgggttgcacaggaagaatgtcacagggaaccaaaaagcacagaaaaaggaagtgctggtgcatatttttgagttaaaatatttccctattttatcatgattactaagtgagtagtatagacagaagtatataactaatggttgaaaatacatatattcatttctttataaaaaacaaaaaccttaccggtagtaatataatttcccccttggtggtttttcagacacctgcagcaagaagaaatactgactgactaggcattattttctatacatccctctcaccagtgaaaagattcctcttgctgcgagaaagctttacccaccatgagttattgctgtcgacgggggtggggcaaggacccgcgctccgtagagctacacgctgcttcacaagcacacggctagcgctctgctctcacctggttcgcttacagatttctctagccattaatttgcctctctgtgtttaaagagcaccaggaccgaatggattttcacttcaggctttccttcaccaagaataaggttctttctggagcctgcaagaagacagttgcccaacactttgacacttgctagtaggtcctttgatcaagagtgtctgaggctgtcaaatgtgtgccaccctttataatacagctatgaaaagttacttctccattaatttctccattctgtttatatcttacagttggacccaaattccaaattatcagttaatcgaaactacattgcaagtcaacattattttctcttcttcctcagcttctccatgtttaggaactgagaaagaaactgcctaagcagcacttccccatgtcctttcaccttcatgttaacgtcccttctgatggtctcactcttcacaggtagttcacactctgagacttgaagtaagctcatggttcagtactctgggggcgcagggctgcgcaggacccttggaaatgttgcaagtgttactagtaccagtttcactttttgttgtcacaatttactgtattttttactttttctgttacagttttgctaatttatcagaaggtccaaaagtctgacataactatttcattttgcattatttatttatgatgcttttttcattgtcttttatacatttgggattataaattatgtaaatgttaaaatgagcatctcaaagaagtctgttaaatcatgactgaaaaaaatcaatcagatgtatcttcaaaaagtggagtcccagttttatgaatcagagatataaaccagaaattctataactgatcatagaagaagaatccagtaattgaacaaatcctatttaatgacatccttgtagcatagatggtctataatgctgaccacagatttcttagaaatgctgctctctctatttaactaacattttgttcagttttgcctccagtggaagcagaaagggttttttcagctgttaaatcctaaaaatcaatataatttatttatgtaagaaaaataactcaatcaatatatttttgaaccttttaagtactaattttctttttatcaagtagaaaaaaaaatgtatttgccctaaatccttaaaatacaaatgctataaaaattcctgtatcttgaaagccttactgcaaatgagtattatagacatccagcagagtctggttttctttgttgtcgttgtgttgttgttgttttgtatggaaaagctgctttccccgggttccacttataacctccggtaggtcacagggttcaatgtggatctgacttaaaaacccaccagcatgctcaatcccttgttatccttatggaatctgtatgttaactctctgggtgttcaggcttctatttgactgctgttgtgaccctgtttgcaaaatgaatatgacactctgtggattatttgctctgtaaggcacaagtgcttcttatgattattttgacgtttccaagagcaaaagccaaatttaaactctcttcagcaaacttgagccttttcatctaattccatgtcactcacggccataactttccttgaccattcttcaccccatgtcttacataataaattgtggtcttgatcctggatttaaaaacaaaa

SEQ ID NO: 223336 - DNA, 2469 bp, Artificial Sequence
  derived and/or modified sequence
atgaagatgaagatccagaagaaggagaagcagctgagcaacctgaaggtgctgaaccacagccccatgagcgacgccagcgtgaacttcgactacaagagccccagccccttcgactgcagcaccgaccaggaggagaagatcgaggacgtggccagccactgcctgccccagaaggacctgtacaccgccgaggaggaggccgccaccctgttccccagaaagatgaccagccacaacggcatggaggacagcggcggcggcggcaccggcgtgaagaagaagagaaagaagaaggagcccggcgaccaggagggcgccgccaagggcagcaaggacagagagcccaagcccaagagaaagagagagcccaaggagcccaaggagcccagaaaggccaaggagcccaagaaggccaaggagcacaaggagcccaagcagaaggacggcgccaagaaggccagaaagcccagagaggccagcggcaccaaggaggccaaggagaagagaagctgcaccgacagcgccgccagaaccaagagcagaaaggccagcaaggagcagggccccacccccgtggagaagaagaagaagggcaagagaaagagcgagaccaccgtggagagcctggagctggaccagggcctgaccaaccccagcctgagaagccccgaggagagcaccgagagcaccgacagccagaagagaagaagcggcagacaggtgaagagaagaaagtacaacgaggacctggacttcaaggtggtggacgacgacggcgagaccatcgccgtgctgggcgccggcagaaccagcgccctgagcgccagcaccctggcctggcaggccgaggagccccccgaggacgacgccaacatcatcgagaagatcctggccagcaagaccgtgcaggaggtgcaccccggcgagccccccttcgacctggagctgttctacgtgaagtacagaaacttcagctacctgcactgcaagtgggccaccatggaggagctggagaaggaccccagaatcgcccagaagatcaagagattcagaaacaagcaggcccagatgaagcacatcttcaccgagcccgacgaggacctgttcaaccccgactacgtggaggtggacagaatcctggaggtggcccacaccaaggacgccgagaccggcgaggaggtgacccactacctggtgaagtggtgcagcctgccctacgaggagagcacctgggagctggaggaggacgtggaccccgccaaggtgaaggagttcgagagcctgcaggtgctgcccgagatcaagcacgtggagagacccgccagcgacagctggcagaagctggagaagagcagagagtacaagaacagcaaccagctgagagagtaccagctggagggcatgaactggctgctgttcaactggtacaacagaaagaactgcatcctggccgacgagatgggcctgggcaagaccatccagagcatcaccttcctgagcgagatcttcctgagaggcatccacggccccttcctgatcatcgcccccctgagcaccatcaccaactgggagagagagttcagaacctggaccgagatgaacgccatcgtgtaccacggcagccagatcagcagacagatgatccagcagtacgagatggtgtacagagacgcccagggcaaccccctgagcggcgtgttcaagttccacgtggtgatcaccaccttcgagatgatcctggccgactgccccgacctgaagaagatcttctggggcagatggaaggacatcctgacccacggcagattcaagtggcacctgaacgagaaggacatggagatgatctgcagagccctgctggtgtactgcgtgaagcactacaagggcgacgagaagatcaagagcttcatctgggagctgatcacccccaccaaggacggccaggcccagaccctgcagaaccacagcggcctgagcgcccccgtgcccagaggcagaaagggcaagaagaccaagaaccagctgctgatccccgagctgaaggacgccgactggctggccacctgcaaccccgaggtggtgctgcacgacgacggctacaagaagcacctgaagcagcactgcaacaaggtgctgctgagagtgagaatgctgtactacctgaaggccgagatcctgggcgaggccgccgagaaggccttcgagggcagccccgccagagagctggacgtgcccctgcccgacatcgactacatggagatccccgtggactggtgggacgccgaggccgacaagagcctgctgatcggcgtgttcaagcacggctacgagagatacaacgccatgagagccgaccccgccctgtgcttcctggagaaggtgggcatgcccgacgagaagagcctgagcgccgagcagggcgtgaccgacggcaccagcgacatccccgagagacagcacagatag

SEQ ID NO: 223337 - DNA, 8148 bp, Artificial Sequence
  derived and/or modified sequence
atgaagatgaagatccagaagaaggagaagcagctgagcaacctgaaggtgctgaaccacagccccatgagcgacgccagcgtgaacttcgactacaagagccccagccccttcgactgcagcaccgaccaggaggagaagatcgaggacgtggccagccactgcctgccccagaaggacctgtacaccgccgaggaggaggccgccaccctgttccccagaaagatgaccagccacaacggcatggaggacagcggcggcggcggcaccggcgtgaagaagaagagaaagaagaaggagcccggcgaccaggagggcgccgccaagggcagcaaggacagagagcccaagcccaagagaaagagagagcccaaggagcccaaggagcccagaaaggccaaggagcccaagaaggccaaggagcacaaggagcccaagcagaaggacggcgccaagaaggccagaaagcccagagaggccagcggcaccaaggaggccaaggagaagagaagctgcaccgacagcgccgccagaaccaagagcagaaaggccagcaaggagcagggccccacccccgtggagaagaagaagaagggcaagagaaagagcgagaccaccgtggagagcctggagctggaccagggcctgaccaaccccagcctgagaagccccgaggagagcaccgagagcaccgacagccagaagagaagaagcggcagacaggtgaagagaagaaagtacaacgaggacctggacttcaaggtggtggacgacgacggcgagaccatcgccgtgctgggcgccggcagaaccagcgccctgagcgccagcaccctggcctggcaggccgaggagccccccgaggacgacgccaacatcatcgagaagatcctggccagcaagaccgtgcaggaggtgcaccccggcgagccccccttcgacctggagctgttctacgtgaagtacagaaacttcagctacctgcactgcaagtgggccaccatggaggagctggagaaggaccccagaatcgcccagaagatcaagagattcagaaacaagcaggcccagatgaagcacatcttcaccgagcccgacgaggacctgttcaaccccgactacgtggaggtggacagaatcctggaggtggcccacaccaaggacgccgagaccggcgaggaggtgacccactacctggtgaagtggtgcagcctgccctacgaggagagcacctgggagctggaggaggacgtggaccccgccaaggtgaaggagttcgagagcctgcaggtgctgcccgagatcaagcacgtggagagacccgccagcgacagctggcagaagctggagaagagcagagagtacaagaacagcaaccagctgagagagtaccagctggagggcatgaactggctgctgttcaactggtacaacagaaagaactgcatcctggccgacgagatgggcctgggcaagaccatccagagcatcaccttcctgagcgagatcttcctgagaggcatccacggccccttcctgatcatcgcccccctgagcaccatcaccaactgggagagagagttcagaacctggaccgagatgaacgccatcgtgtaccacggcagccagatcagcagacagatgatccagcagtacgagatggtgtacagagacgcccagggcaaccccctgagcggcgtgttcaagttccacgtggtgatcaccaccttcgagatgatcctggccgactgccccgagctgaagaagatccactggagctgcgtgatcatcgacgaggcccacagactgaagaacagaaactgcaagctgctggagggcctgaagctgatggccctggagcacaaggtgctgctgaccggcacccccctgcagaacagcgtggaggagctgttcagcctgctgaacttcctggagcccagccagttccccagcgagaccgccttcctggaggagttcggcgacctgaagaccgaggagcaggtgaagaagctgcagagcatcctgaagcccatgatgctgagaagactgaaggacgacgtggagaagaacctggcccccaagcaggagaccatcatcgaggtggagctgaccaacatccagaagaagtactacagagccatcctggagaagaacttcagcttcctgaccaagggcgccaaccagcacaacatgcccaacctgatcaacaccatgatggagctgagaaagtgctgcaaccacccctacctgatcaacggcgccgaggagaagatcctggaggacttcagaaagacccacagccccgacgcccccgacttccagctgcaggccatgatccaggccgccggcaagctggtgctgatcgacaagctgctgcccaagctgatcgccggcggccacaaggtgctgatcttcagccagatggtgagatgcctggacatcctggaggactacctgatccagagaagatacacctacgagagaatcgacggcagagtgagaggcaacctgagacaggccgccatcgacagattctgcaagcccgacagcgacagattcgtgttcctgctgtgcaccagagccggcggcctgggcatcaacctgaccgccgccgacacctgcatcatcttcgacagcgactggaacccccagaacgacctgcaggcccaggccagatgccacagaatcggccagagcaaggccgtgaaggtgtacagactgatcaccagaaacagctacgagagagagatgttcgacaaggccagcctgaagctgggcctggacaaggccgtgctgcaggacatcaacagaaagggcggcaccaacggcgtgcagcagctgagcaagatggaggtggaggacctgctgagaaagggcgcctacggcgccctgatggacgaggaggacgagggcagcaagttctgcgaggaggacatcgaccagatcctgcagagaagaacccacaccatcaccatccagagcgagggcaagggcagcaccttcgccaaggccagcttcgtggccagcggcaacagaaccgacatcagcctggacgaccccaacttctggcagaagtgggccaagatcgccgagctggacaccgaggccaagaacgagaaggagagcctggtgatcgacagacccagagtgagaaagcagaccaagcactacaacagcttcgaggaggacgagctgatggagttcagcgagctggacagcgacagcgacgagagacccaccagaagcagaagactgaacgacaaggccagaagatacctgagagccgagtgcttcagagtggagaagaacctgctgatcttcggctggggcagatggaaggacatcctgacccacggcagattcaagtggcacctgaacgagaaggacatggagatgatctgcagagccctgctggtgtactgcgtgaagcactacaagggcgacgagaagatcaagagcttcatctgggagctgatcacccccaccaaggacggccaggcccagaccctgcagaaccacagcggcctgagcgcccccgtgcccagaggcagaaagggcaagaagaccaagaaccagctgctgatccccgagctgaaggacgccgactggctggccacctgcaaccccgaggtggtgctgcacgacgacggctacaagaagcacctgaagcagcactgcaacaaggtgctgctgagagtgagaatgctgtactacctgaaggccgagatcctgggcgaggccgccgagaaggccttcgagggcagccccgccagagagctggacgtgcccctgcccgacatcgactacatggagatccccgtggactggtgggacgccgaggccgacaagagcctgctgatcggcgtgttcaagcacggctacgagagatacaacgccatgagagccgaccccgccctgtgcttcctggagaaggtgggcatgcccgacgagaagagcctgagcgccgagcagggcgtgaccgacggcaccagcgacatccccgagagaggcaacaccgacaaggaggacaacgccgaggacaaggtggacggcctgcagaagcagaccgagagcagcagcgacggcggcgacggcgtgttcagcgagaagaaggacgacagcagagccgcccaggacggcagcgaccccgacaagagcccctggcccgtgagcagcgccctgaccgccagactgagaagactggtgaccgtgtaccagagatgcaacagaaaggagctgtgcagacccgagatcctgggccccggcaaccagggctactgggtgcaggaggagatgttcagaagaaccagcgagatggacctgatcaacaaggaggcccagaagagatggaccagaagagagcaggccgacttctacagaaccgtgagcagcttcggcgtggtgtacgaccaggagaagaagaccttcgactggacccagttcagaatcatcagcagactggacaagaagagcgacgagagcctggagcagtacttctacagcttcgtggccatgtgcagaaacgtgtgcagactgcccacctggaaggacggcggcccccccgacaccaccatctacgtggagcccatcaccgaggagagagccgccagaaccctgtacagaatcgagctgctgagaaaggtgagagagcaggtgctgaagtgcccccagctgcacgagagactgcagctgtgcagacccagcctgtacctgcccgtgtggtgggagtgcggcaagcacgacagagacctgctgatcggcaccgccaagcacggcctgaacagaaccgactgctacatcatgaacgacccccagctgagcttcctggacgcctacagaaactacgcccagcacaagagaagcggcacccaggcccccggcaacctgtgctgcctgtaccagaccaacagcaagctgtacgagagcctgacctacagccagatgagcagaaccagcgagagcctggagaacgagcccgagaacctggtgagagtggagagcagagacgaccacctgagcctgcccgacgtgacctgcgagaacttcatcagcaaggtgcaggacgtgatcagcatcaaccacgacgagagcctgctgcccgagagcctggagagcatgatgtacggcaagaaggtgctgagccaggagcccagcagcttccaggagagccccagcaccaacaccgagagcagaaaggacgtgatcaccatcagcatcagcaaggacggcaactgccagagcggcggccccgaggccgagatcgccagcggccccaccttcatgggcagcctggaggccggcggcgtggcccaggccaacatcaagaacggcaagcacctgctgatgagcatcagcaaggagggcgagctgtgctgcagcgaggccggccagagacccgagaacatcggccagctggaggccaagtgcctggccagccccagcctgaaccccggcaacgagagcggcttcgtggacatgtgcagcctgagcgtgtgcgacagcaagagaaacctgagcagcgaccagcagctgatcgacctgctggagaacaagagcctggagagcaagctgatcctgagccagaaccacagcgacgaggaggaggaggaggaggagaacgaggaggagaacctggccatggccgtgggcatgggcgagagacccgaggtgctgcacctgaccgagcccaccaccaacatcagcagagagaagaaccagggcttccaggacgagaccaagaagggcagcctggaggtggccaaccagacccccggcctgcagagagccttccccgcccccgccgcctgccagtgccactgcaagcacatggagagatggatgcacggcctggagaacgacgagttcgagatcgagaagcccaaggcctacatccccgacctgttcaagagcaagaccaacaccatcgccatggagggcgagcccaccgccatccccagccagcccttcaaggtgaagcacgagctgctgaaggagccctggaaggagagcgccgagggccagaacgtgttccccacctaccccctggagggcagcgagctgaagagcgaggacatggacttcgagaacaaggacgactacgacagagacggcaactgccacagccaggactaccccggcaagtacagcgaggaggagagcaagagcagcaccagcggcatcaccggcgacatcggcgacgagctgcaggaggccagagcccccaccatcgcccagctgctgcaggagaagaccctgtacagcttcagcgagtggcccaaggacagagtgatcatcaacagactggacaacatctgccacgtggtgctgaagggcaagtggcccagcagccagcagtacgagcccagcggcaccctgcccacccccgtgctgaccagcagcgccggcagcagaaccagcctgagcgagcccgaggccgccgagcacagcttcagcaacggcgccgccctggccgcccagatccacaaggagagcttcctggcccccgtgttcaccaaggacgagcagaagcacagaagaccctacgagttcgaggtggagagagacgccaaggccagaggcctggagcagttcagcgccacccacggccacacccccatcatcctgaacggctggcacggcgagagcgccatggacctgagctgcagcagcgagggcagccccggcgccaccagccccttccccgtgagcgccagcacccccaagatcggcgccatcagcagcctgcagggcgccctgggcatggacctgagcggcatcctgcaggccggcctgatccaccccgtgaccggccagatcgtgaacggcagcctgagaagagacgacgccgccaccagaagaagaagaggcagaagaaagcacgtggagggcggcatggacctgatcttcctgaaggagcagaccctgcaggccggcatcctggaggtgcacgaggaccccggccaggccaccctgagcaccacccaccccgagggccccggccccgccaccagcgcccccgagcccgccaccgccgccagcagccaggccgagaagagcatccccagcaagagcctgctggactggctgagacagcaggccgactacagcctggaggtgcccggcttcggcgccaacttcagcgacaagcccaagcagagaagacccagatgcaaggagcccggcaagctggacgtgagcagcctgagcggcgaggagagagtgcccgccatccccaaggagcccggcctgagaggcttcctgcccgagaacaagttcaaccacaccctggccgagcccatcctgagagacaccggccccagaagaagaggcagaagacccagaagcgagctgctgaaggcccccagcatcgtggccgacagccccagcggcatgggccccctgttcatgaacggcctgatcgccggcatggacctggtgggcctgcagaacatgagaaacatgcccggcatccccctgaccggcctggtgggcttccccgccggcttcgccaccatgcccaccggcgaggaggtgaagagcaccctgagcatgctgcccatgatgctgcccggcatggccgccgtgccccagatgttcggcgtgggcggcctgctgagcccccccatggccaccacctgcaccagcaccgcccccgccagcctgagcagcaccaccaagagcggcaccgccgtgaccgagaagaccgccgaggacaagcccagcagccacgacgtgaagaccgacaccctggccgaggacaagcccggccccggccccttcagcgaccagagcgagcccgccatcaccaccagcagccccgtggccttcaaccccttcctgatccccggcgtgagccccggcctgatctaccccagcatgttcctgagccccggcatgggcatggccctgcccgccatgcagcaggccagacacagcgagatcgtgggcctggagagccagaagagaaagaagaagaagaccaagggcgacaaccccaacagccaccccgagcccgcccccagctgcgagagagagcccagcggcgacgagaactgcgccgagcccagcgcccccctgcccgccgagagagagcacggcgcccaggccggcgagggcgccctgaaggacagcaacaacgacaccaactag

SEQ ID NO: 223338 - DNA, 450 bp, Artificial Sequence
  derived and/or modified sequence
atgaagatgaagatccagaagaaggagaagcagctgagcaacctgaaggtgctgaaccacagccccatgagcgacgccagcgtgaacttcgactacaagagccccagccccttcgactgcagcaccgaccaggaggagaagatcgaggacgtggccagccactgcctgccccagaaggacctgtacaccgccgaggaggaggccgccaccctgttccccagaaagatgaccagccacaacggcatggaggacagcggcggcggcggcaccggcgtgaagaagaagagaaagaagaaggagcccggcgaccaggagggcgccgccaagggcagcaaggacagagagcccaagcccaagagaaagagagagcccaaggagcccaaggagcccagaaaggccaaggagcccaagaaggccaaggagcacaaggagcccaagcagaaggactag

SEQ ID NO: 223339 - protein, 757 aa, Artificial Sequence
  derived and/or modified sequence
MDSLFVEEVAASLVREFLSRKGLKKTCVTMDQERPRSDLSINNRNDLRKVLHLEFLYKENKAKENPLKTSLELITRYFLDHFGNTANNFTQDTPIPALSVPKKNNKVPSRCSETTLVNIYDLSDEDAGWRTSLSETSKARHDNLDGDVLGNFVSSKRPPHKSKPMQTVPGETPVLTSAWEKIDKLHSEPSLDVKRMGENSRPKSGLIVRGMMSGPIASSPQDSFHRHYLRRSSPSSSSTQPQEESRKVPELFVCTQQDILASSNSSPSRTSLGQLSELTVERQKTTASSPPHLPSKRLPPWDRARPRDPSEDTPAVDGSTDTDRMPLKLYLPGGNSRMTQERLERAFKRQGSQPAPVRKNQLLPSDKVDGELGALRLEDVEDELIREEVILSPVPSVLKLQTASKPIDLSVAKEIKTLLFGSSFCCFNEEWKLQSFSFSNTASLKYGIVQNKGGPCGVLAAVQGCVLQKLLFEGDSKADCAQGLQPSDAHRTRCLVLALADIVWRAGGRERAVVALASRTQQFSPTGKYKADGVLETLTLHSLTCYEDLVTFLQQSIHQFEVGPYGCILLTLSAILSRSTELIRQDFDVPTSHLIGAHGYCTQELVNLLLTGKAVSNVFNDVVELDSGDGNITLLRGIAARSDIGFLSLFEHYNMCQVGCFLKTPRFPIWVVCSESHFSILFSLQPGLLRDWRTERLFDLYYYDGLANQQEQIRLTIDTTQTISEDTDNDLVPPLELCIRTKWKGASVNWNGSDPIL

SEQ ID NO: 223340 - DNA, 2274 bp, Artificial Sequence
  derived and/or modified sequence
atggacagcctgttcgtggaggaggtggccgccagcctggtgagagagttcctgagcagaaagggcctgaagaagacctgcgtgaccatggaccaggagagacccagaagcgacctgagcatcaacaacagaaacgacctgagaaaggtgctgcacctggagttcctgtacaaggagaacaaggccaaggagaaccccctgaagaccagcctggagctgatcaccagatacttcctggaccacttcggcaacaccgccaacaacttcacccaggacacccccatccccgccctgagcgtgcccaagaagaacaacaaggtgcccagcagatgcagcgagaccaccctggtgaacatctacgacctgagcgacgaggacgccggctggagaaccagcctgagcgagaccagcaaggccagacacgacaacctggacggcgacgtgctgggcaacttcgtgagcagcaagagacccccccacaagagcaagcccatgcagaccgtgcccggcgagacccccgtgctgaccagcgcctgggagaagatcgacaagctgcacagcgagcccagcctggacgtgaagagaatgggcgagaacagcagacccaagagcggcctgatcgtgagaggcatgatgagcggccccatcgccagcagcccccaggacagcttccacagacactacctgagaagaagcagccccagcagcagcagcacccagccccaggaggagagcagaaaggtgcccgagctgttcgtgtgcacccagcaggacatcctggccagcagcaacagcagccccagcagaaccagcctgggccagctgagcgagctgaccgtggagagacagaagaccaccgccagcagccccccccacctgcccagcaagagactgcccccctgggacagagccagacccagagaccccagcgaggacacccccgccgtggacggcagcaccgacaccgacagaatgcccctgaagctgtacctgcccggcggcaacagcagaatgacccaggagagactggagagagccttcaagagacagggcagccagcccgcccccgtgagaaagaaccagctgctgcccagcgacaaggtggacggcgagctgggcgccctgagactggaggacgtggaggacgagctgatcagagaggaggtgatcctgagccccgtgcccagcgtgctgaagctgcagaccgccagcaagcccatcgacctgagcgtggccaaggagatcaagaccctgctgttcggcagcagcttctgctgcttcaacgaggagtggaagctgcagagcttcagcttcagcaacaccgccagcctgaagtacggcatcgtgcagaacaagggcggcccctgcggcgtgctggccgccgtgcagggctgcgtgctgcagaagctgctgttcgagggcgacagcaaggccgactgcgcccagggcctgcagcccagcgacgcccacagaaccagatgcctggtgctggccctggccgacatcgtgtggagagccggcggcagagagagagccgtggtggccctggccagcagaacccagcagttcagccccaccggcaagtacaaggccgacggcgtgctggagaccctgaccctgcacagcctgacctgctacgaggacctggtgaccttcctgcagcagagcatccaccagttcgaggtgggcccctacggctgcatcctgctgaccctgagcgccatcctgagcagaagcaccgagctgatcagacaggacttcgacgtgcccaccagccacctgatcggcgcccacggctactgcacccaggagctggtgaacctgctgctgaccggcaaggccgtgagcaacgtgttcaacgacgtggtggagctggacagcggcgacggcaacatcaccctgctgagaggcatcgccgccagaagcgacatcggcttcctgagcctgttcgagcactacaacatgtgccaggtgggctgcttcctgaagacccccagattccccatctgggtggtgtgcagcgagagccacttcagcatcctgttcagcctgcagcccggcctgctgagagactggagaaccgagagactgttcgacctgtactactacgacggcctggccaaccagcaggagcagatcagactgaccatcgacaccacccagaccatcagcgaggacaccgacaacgacctggtgccccccctggagctgtgcatcagaaccaagtggaagggcgccagcgtgaactggaacggcagcgaccccatcctgtag

SEQ ID NO: 223341 - DNA, 2274 bp, Artificial Sequence
  derived and/or modified sequence
atggacagcctcttcgtggaggaagtagctgcctccctggttcgggagttcctctcccgcaaaggtttgaaaaaaacctgcgtcaccatggatcaggaacgtccaaggagcgatctctccattaacaatcgaaacgatctccggaaggtgctccacttagaatttctgtacaaggaaaacaaggccaaggaaaacccacttaagacttctctggagctgatcacccgatacttcctagatcattttggtaacaccgccaataattttacccaggataccccgattcctgcgctctccgttccgaagaagaataataaggtaccttccagatgctcagagaccactttggtgaatatatacgacctgtctgatgaggacgccggttggcggactagcctcagcgagacctcaaaggcacggcacgataacctagacggcgatgttcttggaaactttgtgtcttccaagagaccccctcataaatcgaagccaatgcaaaccgtccctggcgaaactccagtgctgacaagcgcttgggagaaaattgacaaactgcatagtgagccatcacttgacgtgaaaaggatgggcgaaaacagtagaccaaagagtggactaatcgtgcgggggatgatgtccggcccaattgccagctctccacaggatagcttccacagacattatttgcggcggagctcaccatccagttcgtcgacgcaacctcaggaagaaagccgcaaggtgcccgagctttttgtctgcacacagcaagatattctcgccagcagtaattcctcccctagccggacgagcctcggccagctctcggagcttactgtggagcgccagaaaacgaccgcatcctcacctccacacctcccaagcaagagattaccaccctgggaccgggctcgtccacgggacccatccgaggacacgcccgccgtggacggctcaaccgataccgatcgcatgccccttaaactttacctcccaggaggtaacagtaggatgacccaggaaagactcgagcgggcttttaaaagacagggcagccagcctgcacctgtgcgcaagaatcagttacttccgagcgataaagtggatggcgaactgggcgcattaaggcttgaagatgtagaagatgaactgattcgcgaagaggtgatcctctccccagttccatccgtccttaagctgcagaccgcaagtaagccgatcgatttgtcagtcgccaaggaaatcaagacattgctctttgggtccagtttctgctgctttaatgaggaatggaaacttcagtcattttctttttcaaacaccgcctccctcaagtacgggattgtccagaataagggcggcccatgcggcgtgctggctgcagtgcaaggatgtgtcctgcagaaactactgttcgagggcgactctaaagctgattgcgctcagggcctacagccatctgacgcccaccgtacacggtgcctggtgctggcattggccgacatcgtctggcgagctggaggacgggagagggccgtggtggcgctggcatccagaacacaacagttttcacctacaggaaagtacaaggctgatggggtcttagagacactcactctgcactctctaacatgctacgaggacctcgtaactttcctgcagcagagcattcaccaatttgaggtcgggccatatggctgcatcctcctcaccctctcagcaatattaagccggagcacagaactgatccggcaggacttcgacgtccccacaagtcacctaattggcgctcacggctactgtactcaggaactggtgaatttactcctgaccggtaaagccgtctcaaacgtctttaatgacgtcgtggaactggactcaggagatggaaatataacactactgcgtggcattgctgcccgaagtgatattgggtttcttagtctcttcgagcactacaatatgtgccaggtggggtgtttccttaaaacccctcggttccccatttgggtagtttgcagtgagtcacactttagtatactgttttccctgcagcccggcttgctccgggactggcgcactgagcgcctgttcgatctttattattacgatggattggccaatcagcaagagcagataaggctgacaattgacaccacacaaaccatcagtgaagatactgataacgacctcgtgccacctttggagctgtgtatccgaaccaaatggaagggagcatcagtgaattggaacggctctgaccccattctgtag

SEQ ID NO: 223342 - DNA, 2733 bp, Artificial Sequence
  derived and/or modified sequence
atactgcgccggacagacccagttgcctggtgctgcggcccggcgtgggcctcgtgggcagagccagagccagagccatggacagcctcttcgtggaggaggtggccgcctccttggtcagggagttcctcagcagaaagggcttaaagaagacatgtgtgaccatggaccaggaacgcccacgctctgacctcagcataaacaacagaaatgatcttcgaaaggttttgcatcttgaatttctctataaggagaacaaggcaaaggaaaatcctctaaaaacaagccttgaactcatcaccagatactttctggatcactttggaaatacggctaacaatttcactcaagataccccaatccctgcactctcagttccaaagaaaaataacaaagtgccatcaagatgctcagagactacactggtaaatatatatgacctttcagatgaagatgcaggatggagaacatcattgtcagaaacaagcaaagccagacatgacaatcttgatggagatgtacttggtaattttgtatcatctaaaaggcccccgcacaaaagtaagcccatgcagacggtcccgggtgaaactcctgtgttgacttctgcatgggagaagatagacaagcttcactcggagccttccttggatgtgaagaggatgggagagaattccaggccaaagtctggtctgattgtgcgaggcatgatgtctgggcccatcgccagctccccacaggattcttttcacagacactatctgagacggtcctcaccgtcaagcagctccacccaaccccaagaagagagccggaaggtccctgagctctttgtctgcacccaacaggacattctggcttcgagcaacagctccccctccaggacctccctgggtcagcttagtgaactgaccgtagaaaggcagaaaaccactgccagcagccctccccatctgcccagcaaacggctgcccccatgggacagggccaggccgagggatccctccgaggacaccccagcagtggacggcagcacagacacggacaggatgcccttgaagctctacttgcctggtggtaattccaggatgacccaggagaggctggaaagagcgttcaaacggcagggcagccagcccgcacctgtcaggaaaaatcagttgctgccgtctgacaaggtggatggtgagctgggtgccctgcggctcgaggatgtggaggatgagttgataagggaagaggtcatcctgtcgccagtcccatcagtgctcaagttgcagacagcatcaaaaccaattgacctctcagtagcaaaggaaataaagacccttctgtttggttccagcttttgctgtttcaatgaagaatggaaacttcagagtttttcctttagtaacacagcctcattaaaatacggcatagtgcagaacaagggtggtccttgcggagtcctggcagctgtccaaggctgtgtcctacagaaactcctgtttgaaggagatagcaaagccgactgtgctcagggactgcagccttcagatgcccaccggacccgctgcctcgtcctggccctcgcagacattgtgtggcgggcagggggccgagagagagccgttgttgcactggcttcgagaacacagcagttcagtccaacagggaaatacaaagcagatggagtcttagaaacacttacgcttcacagtttgacctgctatgaggacctggtgacttttcttcaacaaagcattcatcagtttgaagtgggcccctatggctgcatcctgctcaccctttctgccatcctgtccaggtctacagagctcatccgccaggactttgatgtccccaccagccacctgattggagcacatggctactgtacacaggaacttgtcaatctgctcctgactgggaaagctgtgtccaacgttttcaacgatgtggttgagctggattctggggatgggaacatcacacttctcagaggcattgctgcacgcagtgatattggcttcttatctctctttgagcattacaacatgtgccaggttggctgcttcctgaagaccccgaggttccccatctgggtggtttgcagtgagagccacttcagcatcctctttagcctgcagccggggctcctgcgtgactggaggactgagaggctctttgacttgtactactacgatggcctggccaaccagcaggagcagatccggctgaccattgacaccacccaaaccatctctgaggacacagacaacgaccttgtcccacccctcgagctctgcatcagaaccaagtggaagggggcatcagtgaactggaacggctcagaccccatcctgtgaccgttggatgtgggtaaaccctgtggtccaccactcatcacctcatcaccgaggatgacagctgaaccccaagcctctggggcaggtctcatgtaccccaacctgggtcagcatgactgcagaagcatccagagcctccctgccccttccatgaagggcccacccaagactgtgctggggacccagtgtgttgctgggtcccctcccagctgagctgtgactgctgagtactggaaggaggttgccagggtctctgctacctttgtctgcatccctcccttgctccctgctgggtggtccctcacccaggcctccaatgtggttggccctggggactcattacttctggtagctggctttctataaaaatgggtcaaaccca

SEQ ID NO: 223343 - DNA, 2274 bp, Artificial Sequence
  derived and/or modified sequence
atggacagcctgtttgtggaggaggtggccgccagcctggtgcgggagttcctgagcaggaagggcctgaagaagacctgtgtgaccatggaccaggagcggcccaggagtgacctgagcatcaacaacagaaatgacctgaggaaggtgctgcacctggagttcctgtacaaggagaacaaggccaaggagaaccccctgaagaccagcctggagctgatcacccgctacttcctggaccacttcggcaacacagccaacaacttcacccaggacacccccatcccagccctgtctgtgcccaagaagaacaacaaggtgcccagccgctgcagcgagaccaccctggtgaacatctatgacctgagtgatgaagatgctggctggaggaccagcctgtctgagaccagcaaggcccggcatgacaacctggatggagatgtgctgggcaactttgtgagcagcaagaggcctccccacaagagcaagcccatgcagacagtgcctggagagacccctgtgctgaccagcgcctgggagaagattgacaagctgcacagcgagcccagcctggatgtgaagaggatgggagagaacagccggcccaagagcggcctgattgtgcggggcatgatgagcggccccatcgccagcagcccccaggacagcttccaccgccactacctgcggcgcagcagccccagcagcagcagcacccagccccaggaggagagcaggaaggtgcctgagctgtttgtgtgcacccagcaggacatcctggccagcagcaacagcagccccagcaggaccagcctgggccagctgtctgagctgactgtggagcggcagaagaccacagccagcagccccccccacctgcccagcaagaggctgcccccctgggaccgggcccggccccgggaccccagcgaggacaccccagctgtggatggcagcacagacacagacaggatgcccctgaagctgtacctgcccggcggcaacagcaggatgacccaggagcggctggagcgggccttcaagaggcagggcagccagcctgcccctgtgaggaagaaccagctgctgcccagcgacaaggtggatggagagctgggcgccctgcggctggaggatgtggaggatgagctgatccgggaggaggtgatcctgagccctgtgcccagcgtgctgaagctgcagacagccagcaagcccatcgacctgtctgtggccaaggagatcaagaccctgctgtttggcagcagcttctgctgcttcaatgaggagtggaagctgcagagcttctccttcagcaacacagccagcctgaagtatggcatcgtgcagaacaagggcggcccctgtggggtgctggccgctgtgcagggctgtgtgctgcagaagctgctgtttgaaggagacagcaaggctgactgtgcccagggcctgcagcccagtgatgcccacaggacccgctgcctggtgctggccctggccgacatcgtgtggagggctgggggccgggagagagctgtggtggccctggccagcaggacccagcagttcagccccaccgggaagtacaaggcagatggagtgctggagaccctgaccctgcacagcctgacctgctatgaggacctggtgaccttcctgcagcagagcatccaccagtttgaggtgggcccctacggctgcatcctgctgaccctgagcgccatcctgagccgcagcacagagctgatccggcaggactttgatgtgcccaccagccacctgattggagcccacggctactgcacccaggagctggtgaacctgctgctgaccgggaaggctgtgtccaatgtgttcaatgatgtggtggagctggacagcggagatggcaacatcaccctgctgcggggcattgctgcccggagtgacatcggcttcctgagcctgtttgagcactacaacatgtgccaggtgggctgcttcctgaagaccccccgcttccccatctgggtggtgtgcagcgagagccacttcagcatcctcttcagcctgcagcccggcctgctgcgggactggaggacagagcggctgtttgacctgtactactatgatggcctggccaaccagcaggagcagatccggctgaccatcgacaccacccagaccatcagcgaggacacagacaatgacctggtgccccccctggagctgtgcatccgcaccaagtggaagggggcctctgtgaactggaatggaagtgaccccatcctgtag

SEQ ID NO: 223344 - DNA, 2274 bp, Artificial Sequence
  derived and/or modified sequence
atggacagcctgttcgtggaggaggtggccgccagcctggtgcgggagttcttatcaagaaagggtctcaaaaaaacgtgcgtgacaatggaccaggagcggccccgctctgacctgtcaataaacaatcggaacgacctacggaaggttcttcacctggaatttctctacaaagaaaacaaagctaaagagaaccctttgaagacttccctcgagttgatcactagatactttctggatcattttggcaatacagccaataacttcacacaggacacccctattcctgcgctgtcagtacctaaaaaaaacaacaaggtgcccagccgctgtagcgaaactacgctggtgaatatctacgacctgagcgacgaagacgctggatggaggacatcactgtctgagacgagtaaagcacgccacgacaacttagatggcgatgttctgggcaacttcgtgagctcaaagaggccacctcataaaagcaaaccgatgcagacagtgcccggagagactccagtactaaccagtgcttgggagaagatcgacaagttacactcggagcccagcttagacgtgaagagaatgggagagaactcacgtccgaagagcgggttaatagtgcgcgggatgatgagtggaccaatcgcatctagcccccaggactcttttcaccgtcattacctgcggaggtcttctccctcatcctcctctacgcagccccaggaagaaagtagaaaggtgccagaactgtttgtgtgcacacagcaggatatattggcttcctccaactcttctccttcaaggacatccctgggtcagttgagtgaactcactgtcgagaggcaaaagaccaccgcctccagtcctcctcatctcccatcaaagcggctacctccttgggaccgcgcccgtcctagggacccatccgaggacacgccagccgtcgacggcagcaccgatacagatcgcatgcccttgaaactttacttgcccgggggcaacagtcggatgactcaggagcgcctggagcgggccttcaagcggcaggggtcacaacctgctcctgtccgtaagaaccagctgctcccctccgacaaagtcgatggagagctcggcgcactgaggctggaagatgtagaagatgagctgatcagggaagaagtcattctcagcccagtccctagcgtactgaaactacagaccgcatccaagccaattgacctcagcgtggctaaggaaataaaaacgttgttattcgggtcctctttctgctgttttaacgaggagtggaaactgcagagtttctcattttcgaatacagccagtctgaagtacggaatcgtgcagaacaagggggggccgtgcggagtgttggctgccgtgcaaggctgcgtccttcagaagctgcttttcgaaggtgattcaaaagctgactgcgcccaggggcttcagcctagtgatgctcaccgaaccagatgtctggtgcttgccctcgcagacatagtctggcgggcggggggcagagagcgggcagttgtggctcttgcctcccggacgcagcaattttcgcccacaggaaagtacaaggcggatggagttctggaaactctcaccctccattccttaacctgctacgaggatctggtgacattcctgcagcagagtatccatcagttcgaggttggcccatatggctgcatcttactaaccctgagcgcaattctatcgaggtccaccgaacttatccggcaagattttgatgtgcctacgtcacacttgatcggagcccatggttactgtactcaggagctggttaatcttctcttaactggtaaggctgtatcaaacgtttttaacgacgtggttgagcttgatagcggtgacgggaacataacgttactgagaggaattgcagccagatcagatattggctttttgtccttgttcgagcactataatatgtgtcaggtcggctgttttttaaaaacgcccaggtttccaatctgggtggtctgctccgagtcccatttttccatcctcttttcgctgcagccaggtcttctgcgggactggcggacagaacggcttttcgatttgtattattatgatggcctagccaatcaacaagagcagatcaggcttacgatcgacaccacacagactataagcgaagacaccgataacgatctcgtgcctcctctggagctatgtattagaaccaaatggaaaggcgcgtctgtgaactggaacggatccgaccccattctctag

SEQ ID NO: 223345 - DNA, 2274 bp, Artificial Sequence
  derived and/or modified sequence
atggatagccttttcgtggaagaggttgccgctagccttgtcagggagtttctgtcacggaaaggactgaaaaaaacttgtgtgaccatggaccaggagcggcctagatcggatctatctatcaataatcgtaatgacctacgaaaagttctacacctcgaattcctctacaaggagaataaagctaaggaaaacccactgaaaactagcctagaactcataacccgctacttcttagaccacttcggcaacaccgcaaataatttcacccaggatacccccatacccgctctgtctgtccctaaaaaaaacaataaggtgcccagccggtgcagtgaaacaactctggtgaacatttacgaccttagtgatgaggatgcgggttggcgcacctcactgtccgagaccagtaaggccagacacgacaacctcgacggagacgtgttgggaaactttgtcagctcgaaacgacccccacacaaatccaaacctatgcagactgtccctggcgaaacacccgtgctgacctctgcttgggagaaaatagataaactgcatagcgagccaagcctcgatgttaaacgaatgggggagaactcccgcccaaaatccggtttgatcgttagaggtatgatgtccgggccaattgctagtagccctcaggattccttccacaggcactacctgcgtaggagctctccaagctccagtagcacccaaccccaggaagagtcaagaaaggttccagaattgttcgtatgcactcagcaggacattttggcgagttccaactcgtctccaagccggacttctctgggacagctgagtgagctcacagtggagcggcagaagacaaccgcctcttcacctcctcacctaccttcaaagagattacctccctgggatcgcgctcgccctcgcgacccaagtgaggacacaccagcagtcgatggttcgaccgatacagacagaatgcctctgaaactatacctgcccggagggaacagtcgcatgacccaggagagactggagcgtgcatttaaaaggcagggaagtcagccggctcctgttagaaagaaccagcttctcccgagtgacaaggttgatggagaactcggcgctttgagactcgaggacgtggaagacgaactgatccgggaagaagtgattcttagccccgtccctagtgtgctgaagttgcagaccgcatccaaacctatagatctttccgtggccaaggagataaaaacccttctcttcggctctagtttttgctgttttaacgaggaatggaagttgcaaagcttctccttctcaaacacggctagtctgaaatatggcatagtccaaaacaaagggggtccgtgcggcgtgcttgccgctgtccaaggctgtgtgctccaaaagcttctgttcgaaggtgacagcaaggcggattgtgcacagggtttgcagccatccgacgctcatcgcacacgctgtctggtgctcgccctcgctgacattgtatggcgagctgggggacgtgagcgtgctgtggtcgccctggcctccaggactcagcagttctcccctacaggcaaatacaaagcagatggggttctggagacgctgacattgcactctctaacctgttatgaagatctggtcaccttcctgcagcaatcgatccatcaattcgaagttggaccttacggctgtatcttgctgacacttagcgcaattctgtcccgcagtaccgagctgatccgacaagattttgacgtcccgactagccaccttatcggagctcatgggtactgtacacaagagctggtgaacctgttgctaaccgggaaggccgtgagtaacgtctttaatgacgtcgtcgagctggactccggcgacggcaacatcacactcctgaggggcatcgccgctcgctctgacattggctttcttagcctgtttgaacactacaacatgtgccaagtgggctgttttctcaaaacacctaggtttccgatttgggtggtgtgctccgaatcccacttcagtatcctgttttctctgcagcccggtttgttgcgcgattggagaaccgaaaggctattcgatctatattactacgacggactagccaaccagcaggagcagatcagattgaccatagatacaacccagaccataagcgaggacactgacaacgatctagtacccccactggaattgtgtatccgcacaaaatggaaaggggcaagtgtgaactggaacggttccgatcccatcttatag

SEQ ID NO: 223346 - DNA, 592 bp, Artificial Sequence
  derived and/or modified sequence
ggacgtgtctgtgctcctgtgtgtgaccagggttgaaaaagtcgcactgagatgtcctgccagcaaaaccagcagcagtgccagccccctcccaagtgccccccaaaatgcccacccaagtgtcctccaaagtgccgacctcagtgcccagccccatgcccacctccagtctcttcctgctgtggtcccagctctgggggctgctgcggctccagctctgggggctgctgcagctctgggggtggcggctgctgcctgagccaccacaggccccgtctcttccaccggcaccggcaccagagccccgattgttgtgagtgtgaaccttctgggggctctggctgctgccacagctctggggactgctgctgaccagacctcgaacatcacagagcaacccttatggagaaacttgcaaccaggacctgtcccagagtgatgcttctcctgcccctttttctcctttccttgggctgacacaccttgtgaggtgttttgtctgttgtcatggcccaagagcccatcctggatcctgatcttaccttcccactttacctcatacaacaataaagctcttttgcctcttcgtgaa

SEQ ID NO: 223347 - protein, 515 aa, Artificial Sequence
  derived and/or modified sequence
MVSIPEYYEGKNVLLTGATGFLGKVLLEKLLRSCPKVNSVYVLVRQKAGQTPQERVEEVLSGKLFDRLRDENPDFREKIIAINSELTQPKLALSEEDKEVIIDSTNIIFHCAATVRFNENLRDAVQLNVIATRQLILLAQQMKNLEVFMHVSTAYAYCNRKHIDEVVYPPPVDPKKLIDSLEWMDDGLVNDITPKLIGDRPNTYIYTKALAEYVVQQEGAKLNVAIVRPSIVGASWKEPFPGWIDNFNGPSGLFIAAGKGILRTIRASNNALADLVPVDVVVNMSLAAAWYSGVNRPRNIMVYNCTTGSTNPFHWGEVEYHVISTFKRNPLEQAFRRPNVNLTSNHLLYHYWIAVSHKAPAFLYDIYLRMTGRSPRMMKTITRLHKAMVFLEYFTSNSWVWNTENVNMLMNQLNPEDKKTFNIDVRQLHWAEYIENYCLGTKKYVLNEEMSGLPAARKHLNKLRNIRYGFNTILVILIWRIFIARSQMARNIWYFVVSLCYKFLSYFRASSTMRY

SEQ ID NO: 223348 - protein, 342 aa, Artificial Sequence
  derived and/or modified sequence
MVSIPEYYEGKNVLLTGATGFLGKVLLEKLLRSCPKVNSVYVLVRQKAGQTPQERVEEVLSGKLFDRLRDENPDFREKIIAINSELTQPKLALSEEDKEVIIDSTNIIFHCAATVRFNENLRDAVQLNVIATRQLILLAQQMKNLEVFMHVSTAYAYCNRKHIDEVVYPPPVDPKKLIDSLEWMDDGLVNDITPKLIGDRPNTYIYTKALAEYVVQQEGAKLNVAIVRPSIVGASWKEPFPGWIDNFNGPSGLFIAAGKGILRTIRASNNALADLVPVDVVVNMSLAAAWYSGVNRPRNIMVYNCTTGSTNPFHWGEVGMILPVFLNVRINLKEPRKKKKKK

SEQ ID NO: 223349 - DNA, 1548 bp, Artificial Sequence
  derived and/or modified sequence
atggtgagcatccccgagtactacgagggcaagaacgtgctgctgaccggcgccaccggcttcctgggcaaggtgctgctggagaagctgctgagaagctgccccaaggtgaacagcgtgtacgtgctggtgagacagaaggccggccagaccccccaggagagagtggaggaggtgctgagcggcaagctgttcgacagactgagagacgagaaccccgacttcagagagaagatcatcgccatcaacagcgagctgacccagcccaagctggccctgagcgaggaggacaaggaggtgatcatcgacagcaccaacatcatcttccactgcgccgccaccgtgagattcaacgagaacctgagagacgccgtgcagctgaacgtgatcgccaccagacagctgatcctgctggcccagcagatgaagaacctggaggtgttcatgcacgtgagcaccgcctacgcctactgcaacagaaagcacatcgacgaggtggtgtaccccccccccgtggaccccaagaagctgatcgacagcctggagtggatggacgacggcctggtgaacgacatcacccccaagctgatcggcgacagacccaacacctacatctacaccaaggccctggccgagtacgtggtgcagcaggagggcgccaagctgaacgtggccatcgtgagacccagcatcgtgggcgccagctggaaggagcccttccccggctggatcgacaacttcaacggccccagcggcctgttcatcgccgccggcaagggcatcctgagaaccatcagagccagcaacaacgccctggccgacctggtgcccgtggacgtggtggtgaacatgagcctggccgccgcctggtacagcggcgtgaacagacccagaaacatcatggtgtacaactgcaccaccggcagcaccaaccccttccactggggcgaggtggagtaccacgtgatcagcaccttcaagagaaaccccctggagcaggccttcagaagacccaacgtgaacctgaccagcaaccacctgctgtaccactactggatcgccgtgagccacaaggcccccgccttcctgtacgacatctacctgagaatgaccggcagaagccccagaatgatgaagaccatcaccagactgcacaaggccatggtgttcctggagtacttcaccagcaacagctgggtgtggaacaccgagaacgtgaacatgctgatgaaccagctgaaccccgaggacaagaagaccttcaacatcgacgtgagacagctgcactgggccgagtacatcgagaactactgcctgggcaccaagaagtacgtgctgaacgaggagatgagcggcctgcccgccgccagaaagcacctgaacaagctgagaaacatcagatacggcttcaacaccatcctggtgatcctgatctggagaatcttcatcgccagaagccagatggccagaaacatctggtacttcgtggtgagcctgtgctacaagttcctgagctacttcagagccagcagcaccatgagatactag

SEQ ID NO: 223350 - DNA, 1029 bp, Artificial Sequence
  derived and/or modified sequence
atggtgagcatccccgagtactacgagggcaagaacgtgctgctgaccggcgccaccggcttcctgggcaaggtgctgctggagaagctgctgagaagctgccccaaggtgaacagcgtgtacgtgctggtgagacagaaggccggccagaccccccaggagagagtggaggaggtgctgagcggcaagctgttcgacagactgagagacgagaaccccgacttcagagagaagatcatcgccatcaacagcgagctgacccagcccaagctggccctgagcgaggaggacaaggaggtgatcatcgacagcaccaacatcatcttccactgcgccgccaccgtgagattcaacgagaacctgagagacgccgtgcagctgaacgtgatcgccaccagacagctgatcctgctggcccagcagatgaagaacctggaggtgttcatgcacgtgagcaccgcctacgcctactgcaacagaaagcacatcgacgaggtggtgtaccccccccccgtggaccccaagaagctgatcgacagcctggagtggatggacgacggcctggtgaacgacatcacccccaagctgatcggcgacagacccaacacctacatctacaccaaggccctggccgagtacgtggtgcagcaggagggcgccaagctgaacgtggccatcgtgagacccagcatcgtgggcgccagctggaaggagcccttccccggctggatcgacaacttcaacggccccagcggcctgttcatcgccgccggcaagggcatcctgagaaccatcagagccagcaacaacgccctggccgacctggtgcccgtggacgtggtggtgaacatgagcctggccgccgcctggtacagcggcgtgaacagacccagaaacatcatggtgtacaactgcaccaccggcagcaccaaccccttccactggggcgaggtgggcatgatcctgcccgtgttcctgaacgtgagaatcaacctgaaggagcccagaaagaagaagaagaagaagtag

SEQ ID NO: 223351 - DNA, 5264 bp, Artificial Sequence
  derived and/or modified sequence
cactgcccgtccgctcttcagcagccggtcgcgggcggtggaaaagcgagtgaagagagcgcgacggcggcggcggcggcggcgcagctattgctggacggccagtgggagagcgaggcctgagcctctgcgtctaggatcaaaatggtttcaatcccagaatactatgaaggcaagaacgtcctcctcacaggagctaccggttttctagggaaggtgcttctggaaaagttgctgaggtcttgtcctaaggtgaattcagtatatgttttggtgaggcagaaagctggacagacaccacaagagcgagtggaagaagtccttagtggcaagctttttgacagattgagagatgaaaatccagattttagagagaaaattatagcaatcaacagcgaactcacccaacctaaactggctctcagtgaagaagataaagaggtgatcatagattctaccaatattatattccactgtgcagctacagtaaggtttaatgaaaatttaagagatgctgttcagttaaatgtgattgcaacgcgacagcttattctccttgcacaacaaatgaagaatctggaagtgttcatgcatgtatcaacagcatatgcctactgtaatcgcaagcatattgatgaagtagtctatccaccacctgtggatcccaagaagctgattgattctttagagtggatggatgatggcctagtaaatgatatcacgccaaaattgataggagacagacctaatacatacatatacacaaaagcattggcagaatatgttgtacaacaagaaggagcaaaactaaatgtggcaattgtaaggccatcgattgttggtgccagttggaaagaaccttttccaggatggattgataactttaatggaccaagtggtctctttattgcggcagggaaaggaattcttcgaacaatacgtgcctccaacaatgcccttgcagatcttgttcctgtagatgtagttgtcaacatgagtcttgcggcagcctggtattccggagttaatagaccaagaaacatcatggtgtataattgtacaacaggcagcactaatcctttccactggggtgaagttgagtaccatgtaatttccactttcaagaggaatcctctcgaacaggccttcagacggcccaatgtaaatctaacctccaatcatcttttatatcattactggattgctgtaagccataaggccccagcattcctgtatgatatctacctcaggatgactggaagaagcccaaggatgatgaaaacaataactcgtcttcacaaagctatggtgtttcttgaatatttcacaagtaattcttgggtttggaatactgagaatgtcaatatgttaatgaatcaactaaaccctgaagataaaaagaccttcaatattgatgtacggcagttacattgggcagaatatatagagaactactgcttgggaactaagaagtacgtattgaatgaagaaatgtctggcctccctgcagccagaaaacatctgaacaagttgcggaatatacgttatggttttaatactatccttgtgatcctcatctggcgcatttttattgcaagatcacaaatggcaagaaatatctggtactttgtggttagtctgtgttacaagtttttgtcatacttccgagcatccagcactatgagatactgaagaccaaggattcagcattagaacatctatacatatggtgatctaaatgtacaaaatgtaaaatgtataagtcatctcactttttgtcaagacattaaaccatcttagatcggagtgtgaagtaaattatggtatattttatgtaacattttaatgtttatgctcataaaacttagtgaacacactgtgttatgccagctcaaatctacagtagccaccaaaaccatgacttaatattttgagccctagaagaaaggggtgtgctgaggacaagagtggggaaataggaacactgaccagtataactgtgcaattctggaacatattaattaaaataatatgccttaacatatagtgaatttctaattctaatgttcagtgcaatggaagacatttatttggacagtaatactagcaaagttggtagatatttgattcttcattttttgtttttttcattagttgaagtgggttttagttttgtttaaaattataaccagcgtattttcacatcattctgtaagttaaatgatatcaaacatgaaagagatgttctcatttttctttttctgattaaacgtctgatgcatatcatttttctataagtaatcagttgcttttaaaatcagaaggctatattattctaatgaccctattcgatctaaatgggtttgagaatccatatcagcaacatacgtgttttttgacagaaagtgaaaacaaattccgtaaaactgttagtatcaaaaagaataggaatacagttttcttttccacattatgatcaaataaaaatcttgtgagattgtttatgttttgaagcaggaggatttcttgagatttgatggaagtgggagttgggaaggattcaccatacttgtgttctcctccctttataaattttattcataggacttttaaaaggcttgtgctatctttccagtgaaaactgaaagtgcattattatggaagaatgtatttgcaggtagtaatagcattaaaaaatatactcgtgtgtaaacacatactaattttgaccttgaaagatgaattccttcaagaaaaataaaataatgcttaagataatgtgtacgaaattaaataaaggactttatttacatactacataaggtagcaaactgttgaatgagtttgaaggtatcacttattttttatgcatgtgattttagctttagaaagaaatgcgttatagaaacaagtaatagcaagaaaattgatgtatattttaatgatacattaaaattcccttttaatcataatagttaactctacttactgttttaacatacatttgatttaacaaattgttcagcataacacttctaattaagtttatcaagttgtactgtattagataatcagcagtgtatctggagtatgtttaaagagaacagttcgcaatacaaaaagttacatggagctttacatcttaactttctttgtcaatttaaatgcaatgtataaaaagtttattttgctattgtgaaaaactaaatgtaaaggaaatcacctactttcatgcaggtgtataatcttgaaaaggaaaaatgcttccatgttgaagccagattttctgtagtaaaacttttaaatattattttaaaagaaatatgtatataaatatctctatattctttggaatgatactaaagtctctggtctaggaccataccttatataaaggtataagagaccatgacaatgtctgaaaatggaatagataatgatgccttttatttaaagtggcccacataatatacattgagtactccatctctccaaatgtatttccataatgtgttgaaaacatgctaacatttgtatgatttttatacttctgccgaatagacttagaatcagatgaattgtctgtgtgtcttgcaaaagagttggggacaacttgggcaggcctatgaagtgcatagggagtgtatgtcttctgaatggttttattgttcttgtaatctagcttaaagaaatgttaactgggagggtgctgaggccactcactgcattaattttgtgtgtttagagttctgttgtcaaaagaaaactaatgaataaattagtttgtcattctagaatttaaagttctaagattagtataaagagtatatagattgttaatccccaccagctagactttgaacttaagtcagacttaaagatttgagaaattatttgtgtcatttactagacgtgatttttagttctgtttgattatatttcctacacaaacttcttatttaacaggatagcctactaaattaaatgtttcttatttcacttaactcatttgattaaactgtattctaaaacatttggggtttttccccctattcagttttaatcttggaatatgcatttgtaaattgtgatgtcattgagactatatttatatttgacttggcaacattaacatgtcctaagacttagtgcagagaagcttggcagtacgttctttgacttaaggatggcataaaataatcatttttgaacctgtgtaataaagcttgaaagcagggaaaagaatttccttttcccccttttttgtgttgtctataggaattaacttgggattgttttgtgggtttttgtttgttttaaatgtaaattgagaatcttttataagaaataaaagcattattgggtgcctttgtttgtaaaccaaaaagtaataaatgaatccctatatttccattatagtatttattgtatttttatgttctgaaaattacccatggaacaatatgcttaggattacaggaagcagtccttacttacacttcttgtctgttttaggtgtacttgttaattcttatgtcctaattttatttaattctgagttccttacacagcattttagggaaagaatacaggcaggatgacactttgtgttaaagtgttatttttatgtattacctggaatgaggcaggtttttttctgttttctaaaaagagtaaccaagatacctccagggtgtcattgggttccagctgctctcctccacattgaatgatatcttgttaatttataggcacatttgtggtaatttatatgtctatagagtaagtataagagataattcattagtaataggaattaactgaccccttttggatgggggagagcatcaggctggggtcaggtaagtgtaaatggccttctgagcatgctcttctaggctgactcccagccctgacttgaaaccattagcgctaacttgctctgttttgagaaaaactttccaaacttttgcatgagaaactagaaaaaggaatgtatgccacgtaactggattacagaaatgagttaattgtctctgtgataaaaaaaaaaaatgaaatattttcttattgaattaatatttttgtcttgaagcattttctagtgatagaatgtatttgtcttttttcctggtggtaccctcttagcatatatctttgctatccttaagatcctaaacaaatcatctttgtcagttaagtatagttgcgcaaaaattgttaaatcctttgtctttattaaagaaaaatttgagtaacattaa

SEQ ID NO: 223352 - DNA, 1123 bp, Artificial Sequence
  derived and/or modified sequence
gagtgaagagagcgcgacggcggcggcggcggcggcgcagctattgctggacggccagtgggagagcgaggcctgagcctctgcgtctaggatcaaaatggtttcaatcccagaatactatgaaggcaagaacgtcctcctcacaggagctaccggttttctagggaaggtgcttctggaaaagttgctgaggtcttgtcctaaggtgaattcagtatatgttttggtgaggcagaaagctggacagacaccacaagagcgagtggaagaagtccttagtggcaagctttttgacagattgagagatgaaaatccagattttagagagaaaattatagcaatcaacagcgaactcacccaacctaaactggctctcagtgaagaagataaagaggtgatcatagattctaccaatattatattccactgtgcagctacagtaaggtttaatgaaaatttaagagatgctgttcagttaaatgtgattgcaacgcgacagcttattctccttgcacaacaaatgaagaatctggaagtgttcatgcatgtatcaacagcatatgcctactgtaatcgcaagcatattgatgaagtagtctatccaccacctgtggatcccaagaagctgattgattctttagagtggatggatgatggcctagtaaatgatatcacgccaaaattgataggagacagacctaatacatacatatacacaaaagcattggcagaatatgttgtacaacaagaaggagcaaaactaaatgtggcaattgtaaggccatcgattgttggtgccagttggaaagaaccttttccaggatggattgataactttaatggaccaagtggtctctttattgcggcagggaaaggaattcttcgaacaatacgtgcctccaacaatgcccttgcagatcttgttcctgtagatgtagttgtcaacatgagtcttgcggcagcctggtattccggagttaatagaccaagaaacatcatggtgtataattgtacaacaggcagcactaatcctttccactggggtgaagttggtatgattttacctgtgtttttgaatgttagaataaatcttaaagaaccaagaaaaaaaaaaaaaaaaaaa

SEQ ID NO: 223353 - DNA, 1548 bp, Artificial Sequence
  derived and/or modified sequence
atggtttctatccccgagtattatgagggcaaaaacgttctgcttacaggtgcaaccggatttctgggaaaagtactcctggaaaaactgctgaggtcatgtccaaaagtgaactctgtgtacgtgttagtccgacagaaagccggacaaacgcctcaagaaagagtagaggaggtgcttagtggcaagctctttgatcggctgagggacgagaacccagattttagggagaaaataatcgccatcaactctgagcttacccaacctaagttagccttatctgaggaagataaggaagtgattatcgactctacaaacatcatttttcactgcgcggctactgttcgatttaatgaaaacctccgggatgctgttcaactcaatgtcatcgccaccaggcagttaatcctcctggcgcagcagatgaagaacttggaggtcttcatgcacgtcagcaccgcatacgcgtactgcaatagaaaacatatcgacgaagtggtgtaccccccacctgtggaccctaagaagctgatcgactccctggaatggatggacgatggcctggttaatgatatcacacctaagcttataggagacaggcccaatacgtacatatacactaaagcactggctgaatacgtggtgcagcaggagggtgcaaagctcaacgtagctattgtgcggccttccattgtgggggcctcctggaaggagccgttcccagggtggatcgacaactttaatggccctagcgggctgtttattgctgcaggaaaagggattttacgcacgatccgggcgtccaacaatgctctggccgacctagtgcccgtggacgtcgtggtcaatatgtcacttgccgccgcttggtatagcggtgttaataggcctcgaaatatcatggtgtataactgcaccactggcagcacaaaccctttccattggggagaggtagaatatcacgtcatttcaacgtttaagcggaaccccttggagcaggcatttagacggcctaacgttaatctaacatccaatcacctgctgtatcactattggatcgccgtgtcacacaaagcccccgcctttctgtacgacatctatttgcgaatgactggtcgcagccccagaatgatgaaaactattactcgcctccacaaagcaatggtattcctcgaatattttactagcaactcctgggtatggaatacagaaaatgtcaacatgttaatgaatcagctcaatcccgaggacaagaagacatttaacatcgatgtgcggcagcttcactgggcggaatacatagagaattactgtttgggtaccaagaaatacgtactcaacgaggaaatgagcggcctcccggccgctagaaaacatttaaacaaactgagaaacatcagatatggatttaacaccatactggtaattctgatctggcggatcttcatcgcccgctcccagatggcacgcaacatatggtactttgtggtgagcttatgttataaattcctgtcctactttcgagccagctctactatgcgctattag

SEQ ID NO: 223354 - DNA, 1029 bp, Artificial Sequence
  derived and/or modified sequence
atggtgtccatccctgagtattatgagggcaaaaatgtgcttctgacaggcgccacaggctttctcggcaaggttctgttagagaagcttcttaggagctgtcccaaggtgaattcagtgtacgttttagtcaggcagaaagccggccaaaccccacaggagcgggttgaggaagtactctccggcaaactgttcgacagacttcgcgatgaaaaccctgattttagagaaaagattatagcaatcaactctgaactgacacagcctaagttagccctcagtgaggaggataaagaagtcattattgatagtacaaacattatttttcactgcgccgcaaccgtgcgcttcaacgagaacctcagagatgctgtccaactgaatgtaatcgctacccgtcagctgatactgttagcacagcaaatgaaaaatctggaggtgtttatgcatgtctctaccgcatatgcatactgtaatcgcaagcacatcgatgaggtggtctacccacctcctgtggaccccaagaaactaatcgactcattggagtggatggatgacggactcgtgaatgacattaccccgaagctgattggcgaccggcctaacacatatatctatactaaagccttggctgagtacgtggtgcagcaggaaggggcaaagctcaacgttgcaattgtccgcccgtcaattgtcggtgcctcatggaaagagccgttccccggttggatcgacaactttaacggaccttctggtttattcatcgctgctggcaaaggaatacttcggaccatccgcgcatccaataatgcccttgccgacttggtgccagtcgacgtggtggtgaacatgtcccttgcagctgcatggtacagtggcgtgaataggcctcgcaatatcatggtgtataactgcaccacagggtccaccaatccgttccactggggagaagtcggcatgatcttacctgtgtttctgaacgtccggatcaacctcaaggagcctcgaaagaagaaaaagaagaagtag

SEQ ID NO: 223355 - DNA, 1548 bp, Artificial Sequence
  derived and/or modified sequence
atggtgtccatccctgagtactatgagggcaagaatgtgctgctgaccggggccaccggcttcctgggcaaggtgctgctggagaagctgctgcggagctgccccaaggtgaacagcgtgtatgtgctggtgcggcagaaggccggccagaccccccaggagcgggtggaggaggtgctgagcggcaagctgtttgaccggctgagagatgaaaatccagacttccgggagaagatcatcgccatcaacagcgagctgacccagcccaagctggccctgtctgaggaggacaaggaggtgatcatcgacagcaccaacatcatcttccactgtgccgccaccgtgcgcttcaatgaaaacctgagagatgctgtgcagctgaatgtcatcgccacccggcagctgatcctgctggcccagcagatgaagaacctggaggtgttcatgcacgtgtccacagcctatgcctactgcaacaggaagcacattgatgaggtggtgtacccacctcctgtggaccccaagaagctgattgacagcctggagtggatggatgatggcctggtgaatgacatcacccccaagctgattggagaccggcccaacacctacatctacaccaaggccctggccgagtatgtggtgcagcaggagggcgccaagctgaatgtggccatcgtgcggcccagcatcgtgggcgcctcctggaaggagcccttccctggctggattgacaacttcaacggccccagcggcctcttcatcgctgctgggaagggcatcctgcggaccatccgggccagcaacaatgccctggccgacctggtgcctgtggatgtggtggtgaacatgagcctggccgccgcctggtacagcggcgtgaaccggcccaggaacatcatggtgtacaactgcaccaccggcagcaccaaccccttccactggggcgaggtggagtaccacgtgatcagcaccttcaagaggaaccccctggagcaggccttccggcggcccaacgtgaacctgaccagcaaccacctgctgtaccactactggattgctgtgagccacaaggccccagccttcctgtatgacatctacctgaggatgacaggccgcagccccaggatgatgaagaccatcacccggctgcacaaggccatggtgttcctggagtacttcaccagcaacagctgggtgtggaacacagaaaatgtgaacatgctgatgaaccagctgaaccctgaggacaagaagaccttcaacattgatgtgcggcagctgcactgggccgagtacatcgagaactactgcctgggcaccaagaagtatgtgctgaatgaggagatgagcggcctgcctgctgccaggaagcacctgaacaagctgaggaacatccgctatggcttcaacaccatcctggtgatcctgatctggaggatcttcatcgcccggagccagatggccaggaacatctggtactttgtggtgtccctgtgctacaagttcctgagctacttccgggccagcagcaccatgagatactag

SEQ ID NO: 223356 - DNA, 1029 bp, Artificial Sequence
  derived and/or modified sequence
atggtgtccatccctgagtactatgagggcaagaatgtgctgctgaccggggccaccggcttcctgggcaaggtgctgctggagaagctgctgcggagctgccccaaggtgaacagcgtgtatgtgctggtgcggcagaaggccggccagaccccccaggagcgggtggaggaggtgctgagcggcaagctgtttgaccggctgagagatgaaaatccagacttccgggagaagatcatcgccatcaacagcgagctgacccagcccaagctggccctgtctgaggaggacaaggaggtgatcatcgacagcaccaacatcatcttccactgtgccgccaccgtgcgcttcaatgaaaacctgagagatgctgtgcagctgaatgtcatcgccacccggcagctgatcctgctggcccagcagatgaagaacctggaggtgttcatgcacgtgtccacagcctatgcctactgcaacaggaagcacattgatgaggtggtgtacccacctcctgtggaccccaagaagctgattgacagcctggagtggatggatgatggcctggtgaatgacatcacccccaagctgattggagaccggcccaacacctacatctacaccaaggccctggccgagtatgtggtgcagcaggagggcgccaagctgaatgtggccatcgtgcggcccagcatcgtgggcgcctcctggaaggagcccttccctggctggattgacaacttcaacggccccagcggcctcttcatcgctgctgggaagggcatcctgcggaccatccgggccagcaacaatgccctggccgacctggtgcctgtggatgtggtggtgaacatgagcctggccgccgcctggtacagcggcgtgaaccggcccaggaacatcatggtgtacaactgcaccaccggcagcaccaaccccttccactggggcgaggtgggcatgatcctgcctgtgttcctgaatgtgcgcatcaacctgaaggagcccaggaagaagaagaagaagaagtag

SEQ ID NO: 223357 - DNA, 1548 bp, Artificial Sequence
  derived and/or modified sequence
atggtgagcatccccgagtactacgagggcaagaacgtgctgctgacgggcgctaccggcttcctaggtaaggtgctgctggagaagttgctgcgctcatgtccaaaagtcaacagcgtctacgttctggttcggcagaaagctgggcaaaccccccaggagagagtcgaagaggttctgtcaggcaagctctttgacaggctgagagacgaaaatcccgatttccgggaaaaaattatcgccatcaactccgagttaacccagcctaaacttgcactgtccgaggaggacaaggaggtcataatcgactccacgaatattatatttcattgtgctgccaccgtaaggttcaatgaaaacctgcgagacgcggttcaactgaatgtgattgcaactcgccagcttattctcctcgcccaacaaatgaagaacctagaagtctttatgcatgtgtctaccgcctatgcatattgcaatcgtaaacacatcgacgaggtggtttatcctcctcccgtggatcctaaaaaactgattgactcattagagtggatggacgacgggctggtgaatgatataacccccaaactgattggagaccggccaaacacctacatctacaccaaagcgctggccgaatacgtggttcagcaggagggtgccaagttgaacgtcgccattgttcgaccaagtatagtcggggcctcctggaaagagccctttccgggatggattgacaacttcaatggcccctcaggactgtttattgcggccgggaaaggtatactaagaactatcagagcctcaaataacgctctcgctgatctcgtgcccgttgacgttgtagtgaacatgagtctcgccgccgcctggtattccggggtgaaccgaccaagaaacatcatggtgtacaattgcacgaccgggtctaccaaccctttccactggggcgaggtggagtatcatgtgatctccaccttcaaaagaaaccctctggagcaggcctttaggcgccccaacgttaatttgaccagtaatcatcttttgtaccactactggatagcagtgtcacacaaagcccccgcattcttgtacgatatatacctccggatgacaggtaggtcaccacgaatgatgaaaacaattactagactccacaaggctatggtgttcctggaatatttcactagcaactcctgggtatggaatacagagaacgtgaatatgttaatgaaccagttgaacccagaagataaaaagactttcaacatcgacgtcagacagcttcattgggctgaatacatcgaaaactactgtttagggactaagaaatatgtcctgaatgaggaaatgagcggactacctgctgcaaggaaacacttaaataaactacgcaatattagatacgggtttaataccatccttgtcatcttgatttggcggatctttatcgcgaggtcacagatggcccgcaatatctggtactttgtcgtgagcctctgctacaaattcttgtcttatttcagggcttctagcaccatgcgctactag

SEQ ID NO: 223358 - DNA, 1029 bp, Artificial Sequence
  derived and/or modified sequence
atggtgagcatccccgagtactacgagggcaagaacgtgctgctgacaggtgccactgggttcctggggaaggtcctcctcgagaagttgctccggtcatgcccgaaagtgaactccgtgtacgtgctggtgcgccagaaagctgggcagaccccacaggaacgcgttgaggaggtcttgagtggcaaactctttgaccgcctgcgagacgaaaatcccgacttccgcgaaaagatcatcgctatcaacagtgagcttactcaacccaagttagcgctgtctgaggaggacaaggaggtgattatcgacagcaccaacatcattttccattgtgctgcaacggtgcgctttaacgaaaacctgagggacgcggttcagttaaacgtgattgctacacgccagttgattttgttggcccaacagatgaaaaacctggaggtcttcatgcatgtgtctaccgcatatgcatactgtaataggaaacacatagatgaggtggtgtacccccctcccgtggaccccaagaagctgatcgactcactcgaatggatggatgacggcctcgtgaacgatatcacacccaagttgataggagatcggcccaacacctacatttacaccaaggcactcgccgaatacgtggtgcagcaggaaggtgctaaattaaatgttgccatcgtgcggccttctattgtgggggcgtcttggaaagagcccttccccggatggattgacaatttcaacggaccatccgggttatttatcgccgcaggcaaggggattttgcgcacaatccgagcaagcaacaacgcgctggccgatctggtccccgtggacgtggttgtgaatatgtctctggcggccgcttggtacagcggggtgaatcggcctcgcaatattatggtgtacaattgcaccaccggtagcacgaacccctttcattggggagaagtgggcatgatcctacctgtgtttctgaacgtaagaatcaatctgaaggagcctcggaaaaagaagaagaagaaatag

SEQ ID NO: 223359 - DNA, 1548 bp, Artificial Sequence
  derived and/or modified sequence
atggttagcatacctgagtactacgaaggcaagaatgtcctactcactggcgcaaccggatttttgggcaaggtcctccttgagaaactgctgagaagctgtccgaaagtgaactcagtgtatgtgctagtgcgccagaaggcgggacagaccccccaagagcgcgttgaggaagttcttagtgggaagctgtttgatcggttgagggacgagaacccagattttcgcgaaaaaatcatcgcaatcaatagcgaactgacacaaccgaagttggcgctttctgaggaagataaagaggtgattattgactccactaatattatctttcactgcgcagcgactgtccgcttcaatgaaaacctgagggatgccgtccagctgaatgtcatcgccacaagacaactcatcttgctggcccagcagatgaagaatttggaggtttttatgcatgtgtcgactgcttacgcctattgtaaccggaagcacatcgacgaggtggtctatccaccacctgtcgatccgaagaagctcatcgactcgttagaatggatggacgatggcttggtcaacgacattactcctaagctgatcggagatcgccctaacacatatatatacacaaaggcccttgcagaatacgttgtgcagcaggagggggctaaattgaacgtggctattgtccgaccaagcattgtgggagccagttggaaggaaccattccccggttggatcgacaacttcaacggccctagtggcttgttcattgccgcaggaaaggggattctacgcacaataagagcgtcaaataatgcactcgcagatctcgtaccagtggacgtcgttgtgaatatgagccttgccgcagcgtggtattccggggtcaacaggcctcgaaacattatggtgtacaattgcacaacaggctcaaccaatcctttccactggggggaggtggaataccacgttatcagcacattcaagaggaaccctctggagcaggccttcagaagacctaatgtgaatttgacatcaaatcatctgctgtaccattactggatagcggtcagccacaaggctcccgcatttctgtatgatatctacttacgcatgacgggacgttctccacgtatgatgaagactattaccaggctgcataaagcaatggtgtttctggaatactttacatctaattcatgggtatggaataccgagaatgtgaacatgttgatgaaccagctgaacccagaagacaagaagaccttcaacatcgatgtacgccaactccattgggcggaatacatcgaaaactattgcttggggacaaaaaagtacgtgctcaacgaggaaatgtccggcttgccagctgctaggaagcatttgaacaaacttcgaaatatccggtatggattcaataccatcctggtgattctgatctggcgaatctttatagctaggtcacaaatggcacgcaacatttggtatttcgtagtaagtctgtgctacaagttcctcagttacttccgagctagttctactatgaggtattag

SEQ ID NO: 223360 - DNA, 1029 bp, Artificial Sequence
  derived and/or modified sequence
atggtcagcattcctgagtactatgaaggaaagaacgtcttgctcaccggggctacggggtttctgggaaaagtgcttctcgagaaactcctacgctcctgtcccaaggttaatagcgtgtatgtgctggtcagacagaaagccggtcagactccacaagagagagttgaggaggtgctttctggaaaattattcgacagattgcgcgacgagaatccggacttcagagagaagataattgcgatcaattcagaactgacccagccaaaacttgctttgagcgaagaagacaaggaggttattatcgactctaccaacatcatttttcattgtgccgcaaccgtgagattcaacgagaatctacgcgacgctgtgcagctcaatgtgatcgcgacacggcaactgatactcttggcgcagcagatgaaaaatctggaggtatttatgcatgttagcacagcctacgcgtattgcaatcgcaaacatattgacgaagtcgtgtatccccctcccgtggatcctaaaaagctgatcgattctctcgaatggatggacgatggattagttaatgacatcacacccaaactcattggagatcgcccaaacacgtatatttacacaaaggccctggccgagtacgtggtccaacaagaaggggctaagctgaacgtagccattgtccgacctagtattgtgggtgcgagctggaaggaaccgtttccaggatggatcgacaatttcaatggccctagcgggctctttatcgccgctggcaagggcatcctgcggacaataagagcctcgaataatgcacttgctgatctagtcccagtagacgtcgtggtaaacatgtctctggccgctgcttggtactccggagtgaatagacccagaaatattatggtatataattgtaccactggctcaacgaaccccttccactggggcgaggtaggcatgatcctgcccgtcttcctgaacgttagaatcaatttaaaagagccacgcaaaaagaaaaagaaaaaatag

SEQ ID NO: 223361 - protein, 841 aa, Artificial Sequence
  derived and/or modified sequence
MKLWIHLFYSSLLACISLHSQTPVLSSRGSCDSLCNCEEKDGTMLINCEAKGIKMVSEISVPPSRPFQLSLLNNGLTMLHTNDFSGLTNAISIHLGFNNIADIEIGAFNGLGLLKQLHINHNSLEILKEDTFHGLENLEFLQADNNFITVIEPSAFSKLNRLKVLILNDNAIESLPPNIFRFVPLTHLDLRGNQLQTLPYVGFLEHIGRILDLQLEDNKWACNCDLLQLKTWLENMPPQSIIGDVVCNSPPFFKGSILSRLKKESICPTPPVYEEHEDPSGSLHLAATSSINDSRMSTKTTSILKLPTKAPGLIPYITKPSTQLPGPYCPIPCNCKVLSPSGLLIHCQERNIESLSDLRPPPQNPRKLILAGNIIHSLMKSDLVEYFTLEMLHLGNNRIEVLEEGSFMNLTRLQKLYLNGNHLTKLSKGMFLGLHNLEYLYLEYNAIKEILPGTFNPMPKLKVLYLNNNLLQVLPPHIFSGVPLTKVNLKTNQFTHLPVSNILDDLDLLTQIDLEDNPWDCSCDLVGLQQWIQKLSKNTVTDDILCTSPGHLDKKELKALNSEILCPGLVNNPSMPTQTSYLMVTTPATTTNTADTILRSLTDAVPLSVLILGLLIMFITIVFCAAGIVVLVLHRRRRYKKKQVDEQMRDNSPVHLQYSMYGHKTTHHTTERPSASLYEQHMVSPMVHVYRSPSFGPKHLEEEEERNEKEGSDAKHLQRSLLEQENHSPLTGSNMKYKTTNQSTEFLSFQDASSLYRNILEKERELQQLGITEYLRKNIAQLQPDMEAHYPGAHEELKLMETLMYSRPRKVLVEQTKNEYFELKANLHAEPDYLEVLEQQT

SEQ ID NO: 223362 - DNA, 2526 bp, Artificial Sequence
  derived and/or modified sequence
atgaaactgtggatccacttgttttattcatccctcttggcatgtatcagtctccatagtcagaccccagtcctgtcttcacgcggctcatgtgattccctctgcaactgcgaggagaaggacggtaccatgcttataaattgcgaagccaagggtataaaaatggtcagcgagattagtgtcccaccatcccggccatttcaactgtcacttctaaacaatggactcactatgctgcacactaacgacttctctgggctgaccaatgccatttccatacacctgggattcaacaacattgcggatatagagattggcgccttcaacggtcttggcctgctgaaacaactccatattaatcataatagcctcgagatcctcaaggaagacaccttccacggtttggagaacctggaatttttacaggctgacaataactttatcactgtgattgaaccatcagctttctctaaactcaatcgcctgaaagttctcatcctgaatgacaacgcaatcgagtcattgcctcctaacatatttcgattcgtcccactaacacacctggacttaagaggaaatcaactgcagacactgccttacgtggggtttctggagcatatcgggaggatattggatctgcagttggaggataataagtgggcttgtaattgtgatttgctacagttgaagacttggctggagaatatgccaccccagtcaattatcggtgacgtggtgtgcaatagtcccccgtttttcaaagggagtatactgtctaggttaaagaaagaatccatctgcccaacaccccccgtctatgaggaacatgaagacccgtccggcagcctgcacctcgccgcaacatctagtattaatgattctcggatgagtaccaagaccacttccatactcaaattaccgactaaggctccgggactaatcccgtatatcactaagccttcaacacagttaccaggcccttattgtccaataccatgtaactgtaaggtgctgtctccatcgggtctgctgatccactgtcaggaacggaacatcgagagcctgtccgacctgaggccaccacctcagaacccgcggaaactgattctggcaggtaatattattcacagcctgatgaaatcagatcttgtcgaatactttaccttagagatgctgcatctaggtaataatcgcatcgaggtgctagaggaagggagctttatgaatctaacacgcctccagaagctgtatttgaacggtaatcacctcactaaactttcgaagggcatgtttctggggttgcataacctcgaatatctctacctcgaatataacgcaatcaaggaaatcctgcccggcactttcaacccaatgcccaagttgaaagtgctttatctgaacaacaatctacttcaagtcctgcccccccacatattctccggcgtacctctgacaaaggtgaacctgaaaaccaaccagtttacacacttgcccgtgtccaatatcctggacgatctggacctgctaacccaaattgatcttgaagataatccgtgggattgctcctgcgatctcgtgggcctacagcagtggatccagaagctaagcaaaaacacagttacagatgacattctgtgcaccagtccgggccatctggataagaaggaactcaaggccttaaactcagaaatcctgtgtccggggctcgtcaataatcccagcatgcccacgcagacaagttatctcatggtgaccacgcccgcaaccaccacgaacacagcggacacaatccttagatcactcacggatgctgtacctctgagcgtgctcatcttaggtttactaattatgttcattacaattgtgttctgtgcggccgggatagtggtgttggtactacatcgacggaggaggtacaaaaagaaacaagtcgacgaacagatgcgggataacagcccagtgcacctgcagtacagcatgtacggtcacaaaaccactcaccacaccacggagcgccctagtgcatcactgtacgaacagcacatggtgtctcccatggtccacgtgtacaggagcccttctttcggccctaaacacctggaagaggaagaggaacgaaacgaaaaggaaggcagcgacgcgaagcacttgcagcgcagtctgctcgaacaggaaaatcattctccccttacaggaagcaacatgaagtacaaaacaactaaccagtccacggagtttctatcctttcaggatgctagttcgctgtatcgcaacattttggagaaggagagggagttacagcaactcgggattaccgaatatctgcgcaagaatatcgcgcagcttcaacccgacatggaagcccactatccgggggctcatgaggagctgaaattgatggagacgctgatgtacagtagaccacgcaaggtgctcgtagagcaaactaaaaatgagtacttcgaattaaaagctaatctgcacgcagagcccgactatcttgaggtgctggaacagcagacctag

SEQ ID NO: 223363 - DNA, 2526 bp, Artificial Sequence
  derived and/or modified sequence
atgaagctgtggatccacctgttctacagcagcctgctggcctgcatcagcctgcacagccagacccctgtgctgagcagccggggcagctgtgacagcctgtgcaactgtgaggagaaggatggcaccatgctgatcaactgtgaggccaagggcatcaagatggtgtctgagatctctgtgccccccagccggcccttccagctgagcctgctgaacaacggcctgaccatgctgcacaccaatgacttcagcggcctgaccaatgccatcagcatccacctgggcttcaacaacattgctgacattgaaattggagccttcaacggcctgggcctgctgaagcagctgcacatcaaccacaacagcctggagatcctgaaggaggacaccttccacggcctggagaacctggagttcctgcaggccgacaacaacttcatcaccgtgattgagcccagcgccttcagcaagctgaaccggctgaaggtgctgatcctgaatgacaatgccatcgagagcctgccccccaacatcttccgctttgtgcccctgacccacctggacctgcggggcaaccagctgcagaccctgccctacgtgggcttcctggagcacatcggccgcatcctggacctgcagctggaggacaacaagtgggcctgcaactgtgacctgctgcagctgaagacctggctggagaacatgccaccccagagcatcattggagatgtggtgtgcaacagcccccccttcttcaagggcagcatcctgagccggctgaagaaggagagcatctgccccaccccacctgtgtatgaggagcacgaggaccccagcggcagcctgcacctggccgccaccagcagcatcaatgacagcaggatgagcaccaagaccaccagcatcctgaagctgcccaccaaggcccctggcctcatcccctacatcaccaagcccagcacccagctgcccggcccctactgccccatcccctgcaactgcaaggtgctgagccccagcggcctgctgatccactgccaggagaggaacatcgagagcctgagtgacctgcggcccccaccccagaaccccaggaagctgatcctggccggcaacatcatccacagcctgatgaagagtgacctggtggagtacttcaccctggagatgctgcacctgggcaacaacagaattgaggtgctggaggagggcagcttcatgaacctgacccggctgcagaagctgtacctgaatggaaaccacctgaccaagctgagcaagggcatgttcctgggcctgcacaacctggagtacctgtacctggagtacaatgccatcaaggagatcctgcccggcaccttcaaccccatgcccaagctgaaggtgctgtacctgaacaacaacctgctgcaggtgctgcccccccacatcttcagcggcgtgcccctgaccaaggtgaacctgaagaccaaccagttcacccacctgcctgtgagcaacatcctggatgacctggacctgctgacccagattgacctggaggacaacccctgggactgcagctgtgacctggtgggcctgcagcagtggatccagaagctgagcaagaacacagtgacagatgacatcctgtgcaccagccctggccacctggacaagaaggagctgaaggccctgaacagcgagatcctgtgccccggcctggtgaacaaccccagcatgcccacccagaccagctacctgatggtgaccaccccagccaccaccaccaacacagctgacaccatcctgcggagcctgacagatgctgtgcccctgtctgtgctgatcctgggcctgctgatcatgttcatcaccatcgtgttctgtgccgccggcatcgtggtgctggtgctgcacagaagaagacgctacaagaagaagcaggtggatgagcagatgagggacaacagccctgtgcacctgcagtacagcatgtatggccacaagaccacccaccacaccacagagcggcccagcgccagcctgtatgagcagcacatggtgagccccatggtgcacgtgtaccgcagccccagctttggccccaagcacctggaggaggaggaggagagaaatgagaaggagggcagtgatgccaagcacctgcagaggagcctgctggagcaggagaaccacagccccctgaccggcagcaacatgaagtacaagaccaccaaccagagcacagagttcctgtccttccaggatgccagcagcctgtacagaaacatcctggagaaggagcgggagctgcagcagctgggcatcacagagtacctgaggaagaacatcgcccagctgcagcctgacatggaggcccactacccaggggcccacgaggagctgaagctgatggagaccctgatgtacagccggcccaggaaggtgctggtggagcagaccaagaatgagtactttgagctgaaggccaacctgcatgctgagccagactacctggaggtgctggagcagcagacctag

SEQ ID NO: 223364 - DNA, 2526 bp, Artificial Sequence
  derived and/or modified sequence
atgaagctgtggatccacctgttctacagcagcctgctggcctgcattagcctgcactcacaaacaccagtgcttagttcaagaggatcctgcgactctttgtgtaactgcgaagagaaggacggtaccatgctgatcaattgcgaagctaagggaatcaaaatggtgagcgagatcagcgtcccaccatcgcgcccctttcaactgtcccttttgaacaacggcttaaccatgctccacacaaatgacttctcaggcctgaccaatgccatctcaattcatctggggttcaacaatatcgccgacatcgagataggtgctttcaatggccttggtctcctcaaacagctccatattaatcataacagcctggaaatcctgaaggaagatacttttcacggtctggagaatctagaatttctgcaggcagataacaactttatcaccgtcatcgagccctccgcctttagcaaactgaatcgtcttaaggtgctcatcctgaacgataacgctatcgaatctctccccccaaatatctttcgtttcgtcccactgacacaccttgatcttagaggaaaccagctgcagacactcccctatgtgggctttttggagcatatcggccgtatcttggacctgcagctagaagacaataagtgggcttgcaattgtgatctgcttcagctgaagacatggcttgagaatatgccaccccagtctataatcggagacgttgtatgtaacagtccccctttttttaagggaagtatcctctcacggctgaagaaggaaagcatctgcccaaccccacctgtttacgaggaacatgaggatccttctggctctttacaccttgccgctacatcctccatcaacgactcgagaatgagcactaagaccactagcattctgaagctgcctaccaaggcccccggtctgatcccttatatcacaaaaccaagtactcagctacctggcccctactgtccaattccttgcaactgtaaagtcctcagtcctagcggcctgctgatacattgccaggaacggaatatagagagcctgtctgatctaagacctccgccacagaatccccgcaagttgattctagccggaaatatcatccacagcttaatgaagagcgacttggtggagtacttcacattggagatgctgcacctggggaataatagaatagaggtgttggaagaaggaagtttcatgaatctgaccaggctgcagaaattgtacctgaacggcaatcacctgaccaaacttagcaaaggcatgttcctcggcctccacaatctcgaatatctgtatttggaatataatgctattaaggaaatactgcctgggactttcaatccaatgccaaagttgaaggtgctctatctgaataacaatcttttgcaggtgctacctcctcatatcttcagcggtgtgccactgaccaaggtcaatctaaagaccaaccagtttacacacctacctgtgagcaatattctcgatgacctggatttgcttacccagatcgacttagaagacaatccttgggactgctcgtgtgatcttgtcggactacaacagtggatccagaagctttctaagaacacagttaccgacgatattttgtgtaccagtcccggtcacttagataagaaagaactgaaggctctgaacagcgagatcttgtgccctggactagtaaacaatcccagtatgcctacccaaacatcatacttgatggtcaccacccctgctactaccacgaatactgccgacactatactgaggagcctgacagacgccgttccactctcagtgcttatcttggggctgcttataatgtttatcactattgtcttctgcgcagcaggaatcgtcgtgcttgtgctgcacaggcgacggcgatataaaaaaaagcaagtggacgagcagatgcgtgacaacagcccagtgcatctgcagtattcaatgtacgggcacaagactacacaccatactactgaaagacccagtgcatcactttatgaacagcatatggttagcccaatggtgcacgtgtatcggtccccaagctttgggcccaaacatttggaggaggaggaagagaggaatgagaaagagggtagcgatgccaagcacctccaacgttctcttttggaacaagagaatcatagcccactgaccggctcaaacatgaaatataaaacgactaaccagtcaactgaattcctgtctttccaggacgcctcttccctgtaccgcaatatcctagagaaagagcgggaactgcaacaactgggtattacggagtacttgcggaagaatatcgcacagttgcaaccagatatggaagcacattacccaggtgcccatgaggaactgaaacttatggagacactcatgtattccaggcccaggaaggtgctggtggaacagactaagaacgagtacttcgaactgaaggctaacttgcatgctgagcccgactatctggaggttctcgaacagcagacatag

SEQ ID NO: 223365 - DNA, 2526 bp, Artificial Sequence
  derived and/or modified sequence
atgaagttgtggatacacctgttctacagctccctcttagcgtgtattagcctccactctcaaacccctgtgctctctagccgtggctcttgtgattcactttgcaattgtgaggagaaagatggaacaatgttgattaattgcgaagccaaagggatcaaaatggtctcggaaatctctgttccgccttctcgaccctttcagctgtctcttcttaacaacgggttaaccatgctgcacaccaatgacttctctggcctgaccaacgcaattagtatccatctgggttttaacaatatagccgatattgagatcggtgccttcaatggactcggactactgaagcagctgcatattaaccacaattcacttgaaatcctcaaggaggacacattccatggcctggaaaacctggaatttctccaggccgataacaacttcattaccgtcatagaaccctctgcattttccaaattgaacaggttgaaggttctgattctgaatgataatgctattgaatctctgccgcctaatatatttcgttttgtacctttgacccacctggacctgcgaggcaaccagctgcagaccctaccctacgtggggttcctggagcacattggacggatcctggatctgcaactagaagacaataagtgggcctgtaactgtgatctcttgcagctgaaaacctggttagaaaatatgcctccccaaagtatcatcggcgacgttgtctgcaattctcccccattcttcaaaggaagcattctgtccaggctgaagaaagaatctatctgcccaacacccccagtgtatgaagaacacgaggacccatcagggagtctgcacctggctgctacaagctcaatcaatgattctagaatgtcaacaaagactacatctatcctaaaattacccactaaggccccaggcctcatcccttatataacaaaaccaagtacacagcttcctggtccctactgtcccataccgtgcaattgtaaggtgctgagccccagcggactgctcatccattgccaggaaagaaatatagagagtttgtctgatctgaggcctccaccccagaatcctcggaagctaattctggcagggaatatcatccactccctcatgaaatccgacctagtcgagtatttcacattggagatgcttcaccttggtaataatagaattgaagttctggaggaggggtctttcatgaatctcacacgcctacagaaactgtatctcaacggtaaccacctcacaaaactgtcaaaaggcatgtttttaggactgcacaacctggaatacctttacctggaatataacgcaataaaggagattctgccgggaactttcaacccaatgcctaaactcaaagtgctttacctgaacaacaatctgctgcaggtcttgcccccacatatcttctccggtgtgcccctgacaaaggttaatctcaagactaatcaattcactcatttgccagtgtcaaatattcttgacgacctggatttgctgactcaaattgacctggaagacaacccctgggattgttcttgcgacctcgtagggctacaacagtggatccagaaactgtccaaaaacaccgtaactgacgatatcctctgtacaagccctggacatctcgataagaaggagctgaaagcactgaacagtgaaatcctgtgcccaggactcgtcaacaatccaagcatgccaacacagaccagctatctaatggtcaccacccccgctactacgactaacacagcggacaccatattgcggtcactgacagatgcagtgccactgtcggtcttgatcctggggctcctgattatgtttatcacaattgtattctgcgcagctgggatcgttgtgctggttctgcacaggaggcgaagatataaaaagaagcaggttgacgagcagatgcgtgacaacagccctgttcatctgcaatactctatgtacgggcataagacaacgcatcataccaccgagcggccatctgcgagcttgtacgaacaacatatggtcagtccaatggtgcatgtctaccgatcaccatccttcggtcctaagcacctcgaggaagaggaggaaagaaatgaaaaagaagggtccgatgccaaacatttgcagagatcactgctcgagcaagaaaaccattctcccttgaccggcagcaatatgaaatataagacaacgaatcagtccacagagttcctatcttttcaagacgccagcagcctctataggaatatcctggagaaagagcgcgaactccagcaactgggcatcacggagtatctccggaaaaacattgcccagctgcaacctgatatggaggcccactacccaggagcacacgaggaactcaagctaatggagactttgatgtattctagacctcgcaaggtcctggtcgagcagacgaagaatgaatatttcgagctgaaggccaaccttcacgccgagcccgattatttggaagtactggaacagcaaacttag

SEQ ID NO: 223366 - DNA, 4318 bp, Artificial Sequence
  derived and/or modified sequence
atatgacactggcagattaaaacgctctgatggggaagggcttaaaggctgagtcaaaagccaagaagtctctttatttacgcctacctcccagcccttggcaatctgactaataacaaactgagctaacaagaaatactagaaaaggaggaaggagaacattgctgtagcttggatctacaacctaagaaagcaagagtgatcaatctcagctctgttaaacatcttgtttacttactgcattcagcagcttgcaaatggttaactatatgcaaaaaagtcagcatagctgtgaagtatgccgtgaattttaattgagggaaaaagggacaattgcttcaggatgctctagtatgcactctgcttgaaatattttcaatgaaatgctcagtattctatctttgaccagaggttttaactttatgaagctatgggacttgacaaaaagtgatatttgagaagaaagtacgcagtggttggtgttttcttttttttaataaaggaattgaattactttgaacacctcttccagctgtgcattacagataacgtcaggaagagtctctgctttacagaatcggatttcatcacatgacaacatgaagctgtggattcatctcttttattcatctctccttgcctgtatatctttacactcccaaactccagtgctctcatccagaggctcttgtgattctctttgcaattgtgaggaaaaagatggcacaatgctaataaattgtgaagcaaaaggtatcaagatggtatctgaaataagtgtgccaccatcacgacctttccaactaagcttattaaataacggcttgacgatgcttcacacaaatgacttttctgggcttaccaatgctatttcaatacaccttggatttaacaatattgcagatattgagataggtgcatttaatggccttggcctcctgaaacaacttcatatcaatcacaattctttagaaattcttaaagaggatactttccatggactggaaaacctggaattcctgcaagcagataacaattttatcacagtgattgaaccaagtgcctttagcaagctcaacagactcaaagtgttaattttaaatgacaatgctattgagagtcttcctccaaacatcttccgatttgttcctttaacccatctagatcttcgtggaaatcaattacaaacattgccttatgttggttttctcgaacacattggccgaatattggatcttcagttggaggacaacaaatgggcctgcaattgtgacttattgcagttaaaaacttggttggagaacatgcctccacagtctataattggtgatgttgtctgcaacagccctccattttttaaaggaagtatactcagtagactaaagaaggaatctatttgccctactccaccagtgtatgaagaacatgaggatccttcaggatcattacatctggcagcaacatcttcaataaatgatagtcgcatgtcaactaagaccacgtccattctaaaactacccaccaaagcaccaggtttgataccttatattacaaagccatccactcaacttccaggaccttactgccctattccttgtaactgcaaagtcctatccccatcaggacttctaatacattgtcaggagcgcaacattgaaagcttatcagatctgagacctcctccgcaaaatcctagaaagctcattctagcgggaaatattattcacagtttaatgaagtctgatctagtggaatatttcactttggaaatgcttcacttgggaaacaatcgtattgaagttcttgaagaaggatcgtttatgaacctaacgagattacaaaaactctatctaaatggtaaccacctgaccaaattaagtaaaggcatgttccttggtctccataatcttgaatacttatatcttgaatacaatgccattaaggaaatactgccaggaacctttaatccaatgcctaaacttaaagtcctgtatttaaataacaacctcctccaagttttaccaccacatattttttcaggggttcctctaactaaggtaaatcttaaaacaaaccagtttacccatctacctgtaagtaatattttggatgatcttgatttgctaacccagattgaccttgaggataacccctgggactgctcctgtgacctggttggactgcagcaatggatacaaaagttaagcaagaacacagtgacagatgacatcctctgcacttcccccgggcatctcgacaaaaaggaattgaaagccctaaatagtgaaattctctgtccaggtttagtaaataacccatccatgccaacacagactagttaccttatggtcaccactcctgcaacaacaacaaatacggctgatactattttacgatctcttacggacgctgtgccactgtctgttctaatattgggacttctgattatgttcatcactattgttttctgtgctgcagggatagtggttcttgttcttcaccgcaggagaagatacaaaaagaaacaagtagatgagcaaatgagagacaacagtcctgtgcatcttcagtacagcatgtatggccataaaaccactcatcacactactgaaagaccctctgcctcactctatgaacagcacatggtgagccccatggttcatgtctatagaagtccatcctttggtccaaagcatctggaagaggaagaagagaggaatgagaaagaaggaagtgatgcaaaacatctccaaagaagtcttttggaacaggaaaatcattcaccactcacagggtcaaatatgaaatacaaaaccacgaaccaatcaacagaatttttatccttccaagatgccagctcattgtacagaaacattttagaaaaagaaagggaacttcagcaactgggaatcacagaatacctaaggaaaaacattgctcagctccagcctgatatggaggcacattatcctggagcccacgaagagctgaagttaatggaaacattaatgtactcacgtccaaggaaggtattagtggaacagacaaaaaatgagtattttgaacttaaagctaatttacatgctgaacctgactatttagaagtcctggagcagcaaacatagatggagagtttgagggctttcgcagaaatgctgtgattctgttttaagtccataccttgtaaataagtgccttacgtgagtgtgtcatcaatcagaacctaagcacagcagtaaactatggggaaaaaaaaagaagaagaaaaagaaactcagggatcactgggagaagccatggcattatcttcaggcaatttagtctgtcccaaataaaataaatccttgcatgtaaatcattcaaggattatagtaatatttcatatactgaaaagtgtctcataggagtcctcttgcacatctaaaaaggctgaacatttaagtatcccgaattttcttgaattgctttccctatagattaattacaattggatttcatcatttaaaaaccatacttgtatatgtagttataatatgtaaggaatacattgtttataaccagtatgtacttcaaaaatgtgtattgtcaaacatacctaactttcttgcaataaatgcaaaagaaactggaacttgacaattataaatagtaatagtgaagaaaaaatagaaaggttgcaattatataggccatgggtggctcaaaactttgaacatttgagcttaaacaaatgccactctcatgcattctaaattaaaaagttaaaatgattaatagttcaggtggaagaaataagcatactttttgggttttctacacattttgtgtagacaattttaatgtcagtgctgctgtgaactaaagtatgtcatttatgctcaaagtttaattcttcttcttgggatattttaaaaatgctactgagattctgctgtaaatatgactagagaatatattgggtttgctttatttcataggcttaattctttgtaaatctgaatgaccataatagaaatacatttcttgtggcaagtaattcacagttgtaaagtaaataggaaaaattattttatttttattgatgtacattgatagatgccataaatcagtagcaaaaggcacttctaaaggtaagtggtttaagttgcctcaagagagggacaatgtagctttattttacaagaaggcatagttagatttctatgaaatatttattctgtacagttttatatagttttggttcacaaaagtaattattcttgggtgcctttcaagaaaattaaaaatactactcactacaataaaactaaaatgaaaa

SEQ ID NO: 223367 - DNA, 2526 bp, Artificial Sequence
  derived and/or modified sequence
atgaagctgtggatccacctgttctacagcagcctgctggcctgcatcagcctgcacagccagacccccgtgctgagcagcagaggcagctgcgacagcctgtgcaactgcgaggagaaggacggcaccatgctgatcaactgcgaggccaagggcatcaagatggtgagcgagatcagcgtgccccccagcagacccttccagctgagcctgctgaacaacggcctgaccatgctgcacaccaacgacttcagcggcctgaccaacgccatcagcatccacctgggcttcaacaacatcgccgacatcgagatcggcgccttcaacggcctgggcctgctgaagcagctgcacatcaaccacaacagcctggagatcctgaaggaggacaccttccacggcctggagaacctggagttcctgcaggccgacaacaacttcatcaccgtgatcgagcccagcgccttcagcaagctgaacagactgaaggtgctgatcctgaacgacaacgccatcgagagcctgccccccaacatcttcagattcgtgcccctgacccacctggacctgagaggcaaccagctgcagaccctgccctacgtgggcttcctggagcacatcggcagaatcctggacctgcagctggaggacaacaagtgggcctgcaactgcgacctgctgcagctgaagacctggctggagaacatgcccccccagagcatcatcggcgacgtggtgtgcaacagcccccccttcttcaagggcagcatcctgagcagactgaagaaggagagcatctgccccaccccccccgtgtacgaggagcacgaggaccccagcggcagcctgcacctggccgccaccagcagcatcaacgacagcagaatgagcaccaagaccaccagcatcctgaagctgcccaccaaggcccccggcctgatcccctacatcaccaagcccagcacccagctgcccggcccctactgccccatcccctgcaactgcaaggtgctgagccccagcggcctgctgatccactgccaggagagaaacatcgagagcctgagcgacctgagaccccccccccagaaccccagaaagctgatcctggccggcaacatcatccacagcctgatgaagagcgacctggtggagtacttcaccctggagatgctgcacctgggcaacaacagaatcgaggtgctggaggagggcagcttcatgaacctgaccagactgcagaagctgtacctgaacggcaaccacctgaccaagctgagcaagggcatgttcctgggcctgcacaacctggagtacctgtacctggagtacaacgccatcaaggagatcctgcccggcaccttcaaccccatgcccaagctgaaggtgctgtacctgaacaacaacctgctgcaggtgctgcccccccacatcttcagcggcgtgcccctgaccaaggtgaacctgaagaccaaccagttcacccacctgcccgtgagcaacatcctggacgacctggacctgctgacccagatcgacctggaggacaacccctgggactgcagctgcgacctggtgggcctgcagcagtggatccagaagctgagcaagaacaccgtgaccgacgacatcctgtgcaccagccccggccacctggacaagaaggagctgaaggccctgaacagcgagatcctgtgccccggcctggtgaacaaccccagcatgcccacccagaccagctacctgatggtgaccacccccgccaccaccaccaacaccgccgacaccatcctgagaagcctgaccgacgccgtgcccctgagcgtgctgatcctgggcctgctgatcatgttcatcaccatcgtgttctgcgccgccggcatcgtggtgctggtgctgcacagaagaagaagatacaagaagaagcaggtggacgagcagatgagagacaacagccccgtgcacctgcagtacagcatgtacggccacaagaccacccaccacaccaccgagagacccagcgccagcctgtacgagcagcacatggtgagccccatggtgcacgtgtacagaagccccagcttcggccccaagcacctggaggaggaggaggagagaaacgagaaggagggcagcgacgccaagcacctgcagagaagcctgctggagcaggagaaccacagccccctgaccggcagcaacatgaagtacaagaccaccaaccagagcaccgagttcctgagcttccaggacgccagcagcctgtacagaaacatcctggagaaggagagagagctgcagcagctgggcatcaccgagtacctgagaaagaacatcgcccagctgcagcccgacatggaggcccactaccccggcgcccacgaggagctgaagctgatggagaccctgatgtacagcagacccagaaaggtgctggtggagcagaccaagaacgagtacttcgagctgaaggccaacctgcacgccgagcccgactacctggaggtgctggagcagcagacctag

SEQ ID NO: 223368 - protein, 350 aa, Artificial Sequence
  derived and/or modified sequence
MEKQPQNSRRGLAPREVPPAVGLLLIMALMNTLLYLCLDHFFIAPRQSTVDPTHCPYGHFRIGQMKNCSPWLSCEELRTEVRQLKRVGEGAVKRVFLSEWKEHKVALSQLTSLEMKDDFLHGLQMLKSLQGTHVVTLLGYCEDDNTMLTEYHPLGSLSNLEETLNLSKYQNVNTWQHRLELAMDYVSIINYLHHSPVGTRVMCDSNDLPKTLSQYLLTSNFSILANDLDALPLVNHSSGMLVKCGHRELHGDFVAPEQLWPYGEDVPFHDDLMPSYDEKIDIWKIPDISSFLLGHIEGSDMVRFHLFDIHKACKSQTPSERPTAQDVLETYQKVLDTLRDAMMSQAREML

SEQ ID NO: 223369 - DNA, 1053 bp, Artificial Sequence
  derived and/or modified sequence
atggagaagcagccccagaacagcagaagaggcctggcccccagagaggtgccccccgccgtgggcctgctgctgatcatggccctgatgaacaccctgctgtacctgtgcctggaccacttcttcatcgcccccagacagagcaccgtggaccccacccactgcccctacggccacttcagaatcggccagatgaagaactgcagcccctggctgagctgcgaggagctgagaaccgaggtgagacagctgaagagagtgggcgagggcgccgtgaagagagtgttcctgagcgagtggaaggagcacaaggtggccctgagccagctgaccagcctggagatgaaggacgacttcctgcacggcctgcagatgctgaagagcctgcagggcacccacgtggtgaccctgctgggctactgcgaggacgacaacaccatgctgaccgagtaccaccccctgggcagcctgagcaacctggaggagaccctgaacctgagcaagtaccagaacgtgaacacctggcagcacagactggagctggccatggactacgtgagcatcatcaactacctgcaccacagccccgtgggcaccagagtgatgtgcgacagcaacgacctgcccaagaccctgagccagtacctgctgaccagcaacttcagcatcctggccaacgacctggacgccctgcccctggtgaaccacagcagcggcatgctggtgaagtgcggccacagagagctgcacggcgacttcgtggcccccgagcagctgtggccctacggcgaggacgtgcccttccacgacgacctgatgcccagctacgacgagaagatcgacatctggaagatccccgacatcagcagcttcctgctgggccacatcgagggcagcgacatggtgagattccacctgttcgacatccacaaggcctgcaagagccagacccccagcgagagacccaccgcccaggacgtgctggagacctaccagaaggtgctggacaccctgagagacgccatgatgagccaggccagagagatgctgtag

SEQ ID NO: 223370 - DNA, 1053 bp, Artificial Sequence
  derived and/or modified sequence
atggagaagcagccacagaactccagacgcgggctggccccgcgggaggtgccacctgcagtgggcctgctgctaatcatggcgctcatgaacaccctgctctatctctgcttggaccactttttcatcgccccccggcagtctacagtggacccaactcactgcccctatggccactttcgaatcggtcaaatgaaaaattgttctccttggctgagttgcgaggaactcaggaccgaggtgcggcagttgaagcgggttggagaaggcgcggtcaaacgggtattcctatccgagtggaaggagcacaaggtggccctctcccagctaacatctctggagatgaaggacgatttcctacacggcctgcaaatgctgaagtccctgcaagggacgcacgtagtcacccttctgggatattgcgaagacgataacactatgctgacagaatatcaccctttaggaagcctttctaacctggaagagaccctcaatctgtccaagtaccagaatgtgaacacttggcaacatcgcctggagcttgctatggattatgtttccataatcaactaccttcatcactctcctgtgggcacccgggtgatgtgtgactctaatgacctccctaaaactctgagccaatacctcttgacctctaattttagcattctggccaatgatctggatgccctccccctggtcaaccattcaagcgggatgctggtcaaatgcggccatcgggagctccacggggactttgttgcccctgagcagctgtggccgtacggcgaagacgttccttttcacgacgatctgatgcccagctatgacgagaaaatagatatatggaagatacctgacatcagttcctttctcttgggccatatcgaaggaagtgatatggtccggttccatttgttcgacatccacaaggcttgcaagagccagaccccctccgaacgccctaccgctcaagacgttctggagacctaccagaaggtcctcgataccctgcgtgatgccatgatgagccaggcaagagagatgctgtag

SEQ ID NO: 223371 - DNA, 1053 bp, Artificial Sequence
  derived and/or modified sequence
atggagaagcagccccagaacagcagaagaggcctggccccccgggaggtgcccccagctgtgggcctgctgctgatcatggccctgatgaacaccctgctgtacctgtgcctggaccacttcttcatcgccccccggcagagcacagtggaccccacccactgcccctacggccacttccgcatcggccagatgaagaactgcagcccctggctgagctgtgaggagctgaggacagaggtgcggcagctgaagagggtgggggagggcgctgtgaagagggtcttcctgtctgagtggaaggagcacaaggtggccctgagccagctgaccagcctggagatgaaggatgacttcctgcacggcctgcagatgctgaagagcctgcagggcacccacgtggtgaccctgctgggctactgtgaagatgacaacaccatgctgacagagtaccaccccctgggcagcctgagcaacctggaggagaccctgaacctgagcaagtaccagaatgtgaacacctggcagcaccggctggagctggccatggactatgtgtccatcatcaactacctgcaccacagccctgtgggcaccagggtgatgtgtgacagcaatgacctgcccaagaccctgagccagtacctgctgaccagcaacttcagcatcctggccaatgacctggatgccctgcccctggtgaaccacagcagcggcatgctggtgaagtgtggccaccgggagctgcacggggactttgtggcccctgagcagctgtggccctacggggaggatgtgcccttccatgatgacctgatgcccagctatgatgagaagattgacatctggaagatcccagacatcagcagcttcctgctgggccacatcgagggcagtgacatggtgcgcttccacctgtttgacatccacaaggcctgcaagagccagaccccatctgagcggcccacagcccaggatgtgctggagacctaccagaaggtgctggacaccctgagagatgccatgatgagccaggcccgggagatgctgtag

SEQ ID NO: 223372 - DNA, 1053 bp, Artificial Sequence
  derived and/or modified sequence
atggagaagcagccccagaacagccggcggggcctggccccccgggaagtccctccagccgtcgggctgctactgattatggcccttatgaatacactgctatatttgtgtctggaccatttcttcatcgccccccgccaatccacagtggaccccacacactgtccctacggccactttcgcataggccaaatgaaaaattgtagcccatggttgagttgtgaggaacttcgcaccgaggtcagacaactcaaaagagtaggcgaaggagccgttaagcgcgttttcctctccgagtggaaggagcacaaggtggcgttaagccagctaacttctctcgagatgaaagatgattttctacacggtttacagatgttgaaatcattgcagggtacgcatgtggtgactcttctaggatactgtgaagacgataataccatgttaacagaataccacccacttggcagcttgagtaacctggaggaaacactcaacttaagcaaatatcaaaacgtcaacacttggcaacacaggttggagctggctatggactacgtctccatcatcaattatctccaccattcccccgtaggcaccagagttatgtgcgatagtaacgacctcccgaagaccctgtctcagtacctgctgacgtccaatttcagcatccttgctaacgatctggacgctctccctctggtcaatcatagttctgggatgttggtgaaatgcggccaccgcgaactgcacggtgatttcgtggcccccgaacagctgtggccttacggagaggacgtgccattccacgacgatctaatgcccagctacgacgagaagattgacatctggaaaatcccagatattagctcattcctgcttggccatatagagggctcagacatggtccgattccatctcttcgatattcataaggcgtgtaagagccaaacaccatccgagcggcctactgcccaggatgttctggaaacgtatcaaaaggtcctggataccctgcgggacgctatgatgagccaagctcgcgagatgttatag

SEQ ID NO: 223373 - DNA, 1865 bp, Artificial Sequence
  derived and/or modified sequence
gcgtgctggcccggggtggcaggagccgcagaggcttgggctgcagaaaaaggatcctgtttgctgtgtaatcctgagaatggactgcaagagaggaaaaactgggcgtctgcttgggaatctattgtggaaacccagggtgtttcccgaccagtccctgggcgccaactagagtatggactgaccaggtacctggatggagacctgagctggagaaggagatgcgcttgggaggaaattgcagaggccgtcaacatggaaaagcagccccagaacagcaggagaggcctcgccccccgagaggtgccgccagctgttgggctgctgctgatcatggccctgatgaatactctgctctacctctgcctcgaccacttcttcatcgctcctcgacaatccactgtggaccccacacactgtccctatggtcacttcaggataggacagatgaaaaactgctcaccttggctgtcctgcgaggagctgagaacagaagtgagacagctgaagcgtgttggggaaggagctgtaaagagagtctttctgtctgagtggaaggagcacaaagttgcactctcacagctcaccagcctggagatgaaagatgatttcctccatggactgcagatgctgaaatctctccaaggcacacatgttgtcacgctgcttggctattgtgaggatgacaacactatgcttactgaatatcaccctctaggttccttgagtaacctggaagaaacactaaacctttcaaagtaccaaaatgtgaacacgtggcagcacaggctggagctggccatggactatgtcagcatcattaattacctgcaccacagccctgtgggcacacgggtcatgtgcgactccaacgacctgccgaagacactgtcccagtatctgctaacaagcaacttcagcattttggcaaatgacttggacgccttacccctggtgaaccacagctccgggatgctggtgaagtgcggccacagggagctgcatggggatttcgtggctccagagcaactgtggccctatggagaggacgtgcctttccacgatgatctcatgccctcatatgatgagaagattgacatttggaagatcccagacatctccagtttccttctggggcacattgaagggagtgatatggtccgattccatttgtttgatattcacaaagcatgcaagagccagactccctcagaaagacccactgcccaggacgttctggagacctaccagaaggtcttggatacacttagagatgccatgatgtctcaggcaagagagatgctgtgaaaaccagtccagccaatgaaggtgggattgaagggctgaatggaagttacagcattctactctgatggtggagttttttgcctgagtttcgtgttttattgttttttttatggcttagccatgtggttcgttgtccacatccacatgtacgtttgtatgtagtccacattggttgttagatttttttttttttctttgagatgcggtcttgctctgttgctgaggctggagtgcagtgatgtgatcttggctcactgcagcctctgcctcccaggttcaagcaattctcccacctcagcctcctgagtagctgggattacaggcacaccaccacgcctggctaatttttgtatttttagtggaggtggggtttcaccatgttggccaggctggtcccgaactcctgacttcctcggcctcccaaagtgttgggattacaggcatgggccactatgcctggccagttgttagatttccatggatttgtagtttccaaagtttctcgttattgatttctacttttcttccattgtggtctgagaaggtacttgatatga

SEQ ID NO: 223374 - DNA, 1053 bp, Artificial Sequence
  derived and/or modified sequence
atggaaaagcagccacagaattctcggcgtgggttagcccctagggaggttccgccagccgtcgggctccttttaattatggcgcttatgaatacactgctgtacctctgccttgatcactttttcattgcaccacgacagagcaccgtcgaccccacccattgtccctacggacatttccgcattggtcagatgaagaattgttccccttggctcagctgtgaagaactgcgcactgaagttaggcagctcaagcgggtgggtgaaggtgctgtaaagagggttttcctgagcgaatggaaagagcataaggtggcccttagccagctgactagccttgaaatgaaagacgattttctgcacggacttcaaatgctgaagagcttacagggaacacacgtagtgactcttctaggctactgcgaggatgataatactatgctcacagaatatcacccgctcggctctcttagcaacctggaagagactcttaatctgtccaagtaccagaatgttaatacatggcagcacaggctagagttggctatggactacgtgagcatcattaattatctgcaccactccccagtcgggaccagggtgatgtgtgactctaacgatttacccaagacactgtcgcagtacctgctaacttccaacttctcaattctggccaacgacttggatgcactgcccttagtgaatcatagcagcggcatgcttgtgaagtgcggccaccgggagctgcacggggacttcgttgcacctgaacaactctggccatatggtgaggacgttccgttccacgacgacttaatgccttcctacgatgagaagattgacatttggaaaataccagacatttcgagcttcctgctcgggcacattgagggttcagacatggtgagattccacctgttcgacatacataaagcatgtaaaagccagacccccagcgagcgcccaactgctcaagacgttctggaaacataccagaaggtcctcgacacactgagggacgccatgatgtctcaggcacgagagatgctctag

SEQ ID NO: 223375 - protein, 1896 aa, Artificial Sequence
  derived and/or modified sequence
MPLPPRSLQVLLLLLLLLLLLPGMWAEAGLPRAGGGSQPPFRTFSASDWGLTHLVVHEQTGEVYVGAVNRIYKLSGNLTLLRAHVTGPVEDNEKCYPPPSVQSCPHGLGSTDNVNKLLLLDYAANRLLACGSASQGICQFLRLDDLFKLGEPHHRKEHYLSSVQEAGSMAGVLIAGPPGQGQAKLFVGTPIDGKSEYFPTLSSRRLMANEEDADMFGFVYQDEFVSSQLKIPSDTLSKFPAFDIYYVYSFRSEQFVYYLTLQLDTQLTSPDAAGEHFFTSKIVRLCVDDPKFYSYVEFPIGCEQAGVEYRLVQDAYLSRPGRALAHQLGLAEDEDVLFTVFAQGQKNRVKPPKESALCLFTLRAIKEKIKERIQSCYRGEGKLSLPWLLNKELGCINSPLQIDDDFCGQDFNQPLGGTVTIEGTPLFVDKDDGLTAVAAYDYRGRTVVFAGTRSGRIRKILVDLSNPGGRPALAYESVVAQEGSPILRDLVLSPNHQYLYAMTEKQVTRVPVESCVQYTSCELCLGSRDPHCGWCVLHSICSRRDACERADEPQRFAADLLQCVQLTVQPRNVSVTMSQVPLVLQAWNVPDLSAGVNCSFEDFTESESVLEDGRIHCRSPSAREVAPITRGQGDQRVVKLYLKSKETGKKFASVDFVFYNCSVHQSCLSCVNGSFPCHWCKYRHVCTHNVADCAFLEGRVNVSEDCPQILPSTQIYVPVGVVKPITLAARNLPQPQSGQRGYECLFHIPGSPARVTALRFNSSSLQCQNSSYSYEGNDVSDLPVNLSVVWNGNFVIDNPQNIQAHLYKCPALRESCGLCLKADPRFECGWCVAERRCSLRHHCAADTPASWMHARHGSSRCTDPKILKLSPETGPRQGGTRLTITGENLGLRFEDVRLGVRVGKVLCSPVESEYISAEQIVCEIGDASSVRAHDALVEVCVRDCSPHYRALSPKRFTFVTPTFYRVSPSRGPLSGGTWIGIEGSHLNAGSDVAVSVGGRPCSFSWRNSREIRCLTPPGQSPGSAPIIININRAQLTNPEVKYNYTEDPTILRIDPEWSINSGGTLLTVTGTNLATVREPRIRAKYGGIERENGCLVYNDTTMVCRAPSVANPVRSPPELGERPDELGFVMDNVRSLLVLNSTSFLYYPDPVLEPLSPTGLLELKPSSPLILKGRNLLPPAPGNSRLNYTVLIGSTPCTLTVSETQLLCEAPNLTGQHKVTVRAGGFEFSPGTLQVYSDSLLTLPAIVGIGGGGGLLLLVIVAVLIAYKRKSRDADRTLKRLQLQMDNLESRVALECKEAFAELQTDIHELTNDLDGAGIPFLDYRTYAMRVLFPGIEDHPVLKEMEVQANVEKSLTLFGQLLTKKHFLLTFIRTLEAQRSFSMRDRGNVASLIMTALQGEMEYATGVLKQLLSDLIEKNLESKNHPKLLLRRTESVAEKMLTNWFTFLLYKFLKECAGEPLFMLYCAIKQQMEKGPIDAITGEARYSLSEDKLIRQQIDYKTLTLNCVNPENENAPEVPVKGLDCDTVTQAKEKLLDAAYKGVPYSQRPKAADMDLEWRQGRMARIILQDEDVTTKIDNDWKRLNTLAHYQVTDGSSVALVPKQTSAYNISNSSTFTKSLSRYESMLRTASSPDSLRSRTPMITPDLESGTKLWHLVKNHDHLDQREGDRGSKMVSEIYLTRLLATKGTLQKFVDDLFETIFSTAHRGSALPLAIKYMFDFLDEQADKHQIHDADVRHTWKSNCLPLRFWVNVIKNPQFVFDIHKNSITDACLSVVAQTFMDSCSTSEHKLGKDSPSNKLLYAKDIPNYKSWVERYYADIAKMPAISDQDMSAYLAEQSRLHLSQFNSMSALHEIYSYITKYKDEILAALEKDEQARRQRLRSKLEQVVDTMALSS

SEQ ID NO: 223376 - DNA, 5622 bp, Artificial Sequence
  derived and/or modified sequence
atgtgggccgaagcaggattaccccgagccggcggaggctctcaacctccattcaggactttctcggcctctgactggggcctgacccatctggtggtgcatgaacaaaccggagaagtgtacgtgggtgcagtgaacaggatctacaaattgtcgggtaatttgactctccttcgagcccacgtgaccggcccagtcgaagataacgagaagtgctatccccctccctcagtgcagagctgcccccatggcctcggcagcacagacaacgtgaacaagctgctcctcctcgactatgcagccaaccggctcctggcttgcggctccgcgagtcagggtatttgccagttcttgcggctcgacgacctcttcaagctcggagaaccccaccacagaaaagaacattacctgagcagtgtgcaagaggctgggtcaatggccggagtcctgattgctgggccccctgggcagggccaggccaaactgtttgtcggaacgcccatagatggaaaaagcgagtacttcccaacattgagttcccgaaggctgatggctaacgaagaagacgccgacatgttcggttttgtctatcaagatgagtttgtgtcctcccaactcaagattccctccgacacactgtctaaattccccgcgttcgacatctattacgtgtacagtttccgctcagaacagttcgtgtactatctgacgttgcagttagacactcaacttacaagtccggatgcggcaggcgaacacttcttcacctccaagattgttagactctgtgtggacgatcccaagttttactcttatgtggagtttcccatcggatgcgagcaggccggtgtggaataccggctcgtacaagatgcctatttgagtagacctggaagggctctcgcacatcaattgggcttggcggaggatgaggatgtgttgttcacagttttcgcacagggtcagaagaaccgagtgaagcctcccaaggagtccgccctatgtctgtttacactcagagcgattaaggaaaagattaaggagcggatccagtcatgctacagaggtgagggcaagctgtctctgccatggctactgaataaggagctcgggtgcatcaactcccctctacaaatcgacgacgatttctgcggtcaagacttcaatcagccacttggaggcacagtcacaatcgaaggtacccccctttttgtcgacaaggacgacggactgaccgcggtcgcagcttatgactatcgcgggcggacggtagtgtttgctggaacacgctcaggccgcattaggaaaatattagttgacctctcaaatcctggcggaagaccagctctggcttatgagagtgtggtggcacaagaagggtcccctatactgagggacctggtactgagcccgaatcatcagtatttatatgctatgactgaaaagcaagtgactcgggtgccagtcgagagttgcgttcagtacacaagctgcgaactatgtttggggtcaagagatccccattgcggctggtgcgtgctgcactctatttgcagtcggcgagacgcttgcgagcgggccgacgagcctcagcggttcgctgcagacctactccagtgtgtccagctcacagtgcaacccaggaatgttagcgtaacaatgagccaggtgccactcgttctacaggcttggaatgttcccgatttgtcagcaggcgtgaattgttctttcgaggattttactgaatcagaaagcgtactggaagacgggcggatccattgtcgcagcccatctgctcgggaggtagccccgatcaccaggggacaaggagatcagcgcgtggtgaagctatatctgaaatcaaaggagacaggcaagaaattcgccagcgtggacttcgtgttctataattgtagtgtccatcagagttgcctgtcgtgtgtgaacggaagcttcccatgccattggtgcaagtacaggcatgtgtgcacacacaatgtggcagattgtgctttccttgaaggacgggtaaacgtttctgaggattgtccgcaaatcctgcctagcacccaaatctatgtgcctgtgggtgtggtgaagccaataaccctcgccgctcgcaacctccctcagccgcagagcgggcagagaggatatgagtgtttgttccacatacccggatcaccagcgcgcgttacagcgcttcgtttcaacagctcaagcctgcagtgtcaaaatagctcctatagctacgagggcaacgatgtgagtgatttgccggtcaatctgagcgtggtttggaatggaaattttgtgattgataatcctcaaaacattcaggctcacttgtataagtgtcctgccctgagggaatcctgtgggctgtgcctcaaggcagatccaaggtttgaatgcgggtggtgcgtggcagagcgacgttgctctctgcggcatcactgcgccgccgataccccagcttcctggatgcatgccagacacgggtctagccgctgtaccgatcctaagattctgaagttatctccagagacaggccctcgtcagggagggacgagactgacaattactggagagaatctcgggctccgattcgaggacgtgcgtctgggcgtgagggtagggaaggttttatgctctccagtcgaatccgagtacatctcagcagagcaaatagtctgtgaaattggggatgctagttcagtgcgcgcacacgacgcccttgttgaggtgtgtgtcagagattgctcaccccattacagggccttatctcccaaacggtttacttttgtgacacctacattttacagggtcagtccatcccgtgggccactcagcggcggcacatggatcggcattgagggctcccatttaaatgccggatctgacgtggctgtgtccgttggtgggaggccttgctctttcagctggcgcaatagtagagaaatcagatgtttgaccccacctggtcagtctccggggagcgctcctatcattatcaacatcaaccgcgcacaattaacaaaccccgaagtcaagtataactacacagaggaccccacaattctgaggattgaccccgagtggtctattaactccggcggtacactgctgacggtgacggggaccaatctcgccactgtgagagagccacggattagagccaaatatgggggaatcgagcgcgagaacggatgcctggtttataatgacactactatggtctgccgcgccccatccgtggctaaccctgtccggtccccacccgagctgggggagcggccagatgagctcgggttcgtaatggataatgtgcggagtttactggtcctaaacagtacatcgttcctgtattatccagacccagtattggagcctttgtccccaacaggcctgttagaactcaagccctccagcccactgattctgaaaggccgtaacctgctgcctccggccccaggtaactctcggctgaactacactgttctcattggatccacaccatgtactctcactgtctccgaaacccagttattatgcgaggctcctaacctcacaggccagcataaggtcactgtgcgcgccggtggctttgaattcagccccggtactctccaggtgtactcagattcactccttaccctgcccgcaatcgtcggtattggtggaggaggaggcctgcttctgctggtgatcgtcgccgttctcattgcatacaagagaaagagtagggacgcggatcgcaccctgaaacgtctgcagcttcagatggacaatttggaatcaagggttgcccttgaatgcaaggaggcttttgctgagttacagaccgatattcatgagctgaccaatgatctggatggagccggaattccattcttggactataggacatatgccatgcgcgtgctgttcccgggtattgaagaccatcccgtgctgaaagagatggaggttcaagcaaatgtagaaaaatctcttacactgttcggccagcttctgaccaagaagcatttcctccttacattcatccggactcttgaggcccagcgttctttttccatgagggataggggtaatgtggcgtctctgatcatgactgccctgcaaggtgagatggagtatgcaaccggcgtcctcaagcagctcttgtccgacctgatagagaaaaacctagaaagtaagaatcacccaaaacttttgctgaggcgcaccgagtccgttgctgagaaaatgctgaccaattggttcacgttcctcctgtataagtttctgaaggaatgtgccggagagcctctctttatgctatactgtgctatcaagcaacagatggaaaagggaccaatagatgccatcacaggggaggctcgctacagccttagtgaggacaagctcatccggcagcagattgattataaaaccttgaccttaaattgcgtgaaccccgaaaacgagaacgcaccggaggtgcccgtcaaggggctggactgtgacaccgtgactcaagccaaggaaaagctcctggacgccgcctacaaaggcgtgccctactcgcagcgccctaaagccgctgacatggatctggaatggaggcagggccgaatggcacggatcatcctgcaggatgaggatgtaaccaccaaaatagataacgattggaaaaggcttaacaccctcgcacattatcaagtgactgatgggagctctgtagcactcgtacccaaacaaacgtctgcctataacatctctaatagttctacgtttacaaagtccctctcaaggtatgaaagtatgctgaggaccgcctccagtccggactccctgcggtctagaacgcccatgatcaccccagacctcgagtccgggaccaagctgtggcacctggttaaaaatcacgatcatcttgatcagagagagggcgatcggggctcaaagatggtgtctgagatttatcttaccagattactggccacaaagggaactctgcagaaatttgtggacgacttgtttgagactatcttttctaccgcccaccgaggctctgctctgcccttggccataaagtacatgtttgattttctggacgaacaggcagacaagcaccagatccacgatgccgatgtgcgacatacctggaagagcaactgcctccctttaaggttctgggtcaatgtgatcaagaaccctcagttcgttttcgacatccataagaacagtatcaccgacgcctgcctttccgtcgtggcccagacgtttatggatagctgtagcacatcggaacataagctcgggaaagactcaccctctaataagctgctgtatgccaaagatattccgaactataagtcgtgggttgagcggtactacgccgacattgctaagatgccagccatttctgaccaggatatgtctgcatacttggccgagcagtcccggctgcacctctcgcagtttaattctatgagcgctctgcacgagatctacagctatataacaaagtataaagacgagatcttggcggccctggagaaggacgagcaagcacgcagacaacgcctgagatccaagctagagcaggtcgtcgatactatggcattgtcatcttag

SEQ ID NO: 223377 - DNA, 5691 bp, Artificial Sequence
  derived and/or modified sequence
atgccactaccacctaggagccttcaggtgcttctgctgctgttactgctgctgctccttctacccggtatgtgggcagaggctggtctgccaagagccggaggcggatcacagccaccatttagaacgttcagtgcctctgattggggcctcacccacttggtcgtacacgagcagacaggtgaagtctatgtgggggctgtcaaccgaatctataaactgagcgggaatcttacgctactacgagcacatgtcacaggacccgtggaagacaatgagaaatgttatcccccgcccagtgttcagtcctgtccccacggtttgggatcaacagataacgtgaacaaactacttctgttagattatgccgctaataggctcctggcttgcggaagtgccagccaggggatatgtcaattcctgaggttggacgatctcttcaagctcggggaaccccatcatagaaaagagcattatttgtcaagcgtccaagaggcgggtagtatggccggggtgttgatagctggccccccgggacagggccaggccaagctgtttgtcggcacacctattgatgggaagagcgagtattttccaacattatcttcaaggcggcttatggcaaatgaggaagacgctgatatgttcggctttgtataccaggatgaattcgtcagtagtcagctcaagataccatcggacacccttagtaaatttccagcctttgacatctactacgtctactcctttagaagcgagcaatttgtgtactatctgacccttcagctggacacccagttaacgagccccgacgccgctggcgagcatttctttacttctaaaatcgttagactctgtgtggatgatcctaagttctattcctatgtggaatttccgatcgggtgtgaacaggctggagtcgaataccggctggtccaggacgcttatttgagccgcccggggcgtgcacttgcccatcagctggggctggccgaggacgaggacgtgctgttcaccgtgttcgctcagggacagaagaatcgggtgaagccacccaaggagtccgctttgtgtttgtttacgctgagggcaatcaaagaaaagataaaggagaggattcagtcgtgctacagaggagaggggaagctcagtttgccgtggttgctgaacaaagagctcggatgcatcaactccccattgcagatcgatgacgatttctgtgggcaggactttaaccaaccgctaggcggcaccgtgaccattgagggtacgccccttttcgttgataaagatgatggcctgactgctgtggccgcctatgattaccgaggccggaccgttgtcttcgccggcacgcggtctgggaggattcggaagattctggttgacctctccaatcccggtggccggccggccttggcttacgaaagtgtggttgcccaagagggttcaccaatcctgcgggatctcgtgttgtctccaaatcaccagtatctgtacgccatgacagaaaaacaagttactcgggtgcccgtggaatcatgcgtccagtacacgtcctgtgagttatgccttggaagccgtgatccacattgtggttggtgcgtactacacagcatctgttcccgcagagacgcctgtgagcgcgccgatgaaccccagcggttcgctgccgacctgttgcagtgtgtccaactgaccgtgcagccacgcaacgtgtccgtgacaatgagccaggtgcccttggtcctccaggcttggaacgtacccgacctgagcgcgggcgtgaactgtagcttcgaggacttcactgagtccgaatccgttctggaggatggaaggatccactgccggagtccatcagctcgcgaggtggcacccataactcgggggcagggagaccagagggtggtgaagctctacctcaagagtaaagaaacagggaagaagtttgcgtctgttgactttgttttctacaactgctccgtccaccagtcttgcctgagctgcgtcaatgggtccttcccatgccattggtgcaagtacaggcacgtatgcacacacaatgttgccgactgtgcttttttagaaggcagggtcaacgtttcggaggattgcccacagatcctcccctctacacaaatctacgtacccgtcggcgtggtgaaaccaataacgttagccgcacgtaatctgccccagccacaaagcggccaacgcggctacgaatgcctttttcatattcccggttcccccgcgcgtgtgacggcccttcggttcaatagctcctcattgcagtgccagaattccagctactcctatgagggaaacgatgtgtcagacttacctgtcaatcttagcgttgtctggaacgggaactttgtaatagacaacccccagaatattcaggcgcatctgtataagtgtcctgctctgcgggaaagctgtggattgtgccttaaggctgacccccgctttgaatgcggttggtgtgtagccgaaaggcggtgtagcctgaggcatcactgcgcagctgatacccctgcgtcgtggatgcacgcccgccatgggagcagcagatgtacagaccccaagatccttaagctctctccggagaccggtccgcgacagggaggcacaagactcaccataactggggaaaacctgggactgaggtttgaagatgtgcgactcggggtcagggtgggaaaggttctttgcagccctgttgagagtgagtatatctcggcagagcaaatcgtatgcgagattggtgacgcaagcagcgtcagagctcatgacgcactcgtcgaagtgtgtgtgcgggattgcagcccacattaccgggccttgagccctaaacgctttaccttcgttactcccaccttctatcgggtttctccaagcagaggcccccttagtggcgggacttggatcgggattgaagggagccacttgaatgccggaagcgacgtggccgtttcggtcgggggaaggccctgttccttttcatggaggaatagccgggaaatcaggtgcctgactcccccaggacaatcacctggttcagcccctattatcatcaacattaaccgtgcccaactgacaaacccagaagtgaaatataactacacagaggacccgacaatcctcagaatcgatcccgagtggagcatcaattccggtggcacccttctgacagtaacaggtacaaatttggctaccgtacgtgagccacggatcagggcgaagtatgggggaatcgaacgggagaacgggtgtttggtgtacaatgatactaccatggtgtgtagagctccttccgtggcaaaccccgtgaggagtccacctgaactcggcgaaagacccgatgagctgggattcgtgatggataatgtgagatccctgctcgttctgaattcaactagcttcctgtattacccagatcctgtgttagaacccctgtctccgacggggctactggaactcaagccaagcagccccctgattctcaaaggccggaatcttctgcctccagcccctggcaatagcaggctcaactacacagtgctgatcggttccacaccttgcactttgaccgtgtctgagacccagctcctgtgtgaggctcccaatctgaccggacagcacaaggtcaccgtgcgggctgggggcttcgagttctcacccggtacgctgcaggtctacagtgattccctcctgaccctgccagctatcgttggtataggaggcggcggggggttgctgctgctggtgatagttgccgtgcttatcgcttataaaaggaagagtagagatgctgataggacactgaagcgcttgcaattgcaaatggacaatctggagagtcgcgtggcactagaatgcaaggaggcattcgccgagctgcagacggatattcacgaactgacaaatgacctggatggtgcaggaatcccttttctggactaccgcacttatgctatgagggtcctgttcccagggatagaagaccacccggtgctcaaggagatggaggtgcaagctaacgttgagaagagtcttacgctattcggccagctattgaccaaaaaacacttcttactgacttttatacgcacattagaggcgcaacgatcctttagtatgcgtgacagggggaacgtcgcatccctgatcatgacagccctgcaaggtgaaatggagtacgctacaggcgtgttgaaacagctgttatctgacctgatagagaaaaacttagaatcgaagaaccacccaaaactgctcctcagaagaaccgagtcagttgctgagaaaatgctaaccaactggtttacctttctgctttataagtttctaaaggaatgcgccggggaacctctctttatgctatactgcgccattaaacagcaaatggagaagggccccatagacgccatcacaggcgaggcccgctactccctttctgaggataaactcattcggcaacagattgactacaagactttgacgctcaactgtgttaatccggagaacgagaacgcacctgaggtgccagttaagggactggactgcgataccgtcacgcaggcaaaggagaagttgttggacgctgcgtacaaaggtgtcccttactctcagcgtcctaaggccgccgacatggatctcgagtggcgacagggcagaatggcccgtatcattctgcaggacgaggatgtcaccacaaaaatcgataacgattggaaacggctgaacactctggcccattatcaggtcaccgacgggagctcagtagctctcgtgcctaagcagacctcagcctataacatctctaatagctctacttttactaaaagcctgagcaggtacgaatctatgctacgcacagccagctctcctgactcactccgatctcggacccccatgattaccccagacctcgaatccggcacgaagttgtggcacctggtgaagaatcacgaccatttggatcaaagagaaggcgatagggggagcaaaatggtgagcgagatttacttgacccgattgcttgcaaccaaaggtactctgcaaaaattcgttgatgatctgtttgagacaatcttcagcactgcccacaggggctccgccctgcctctggcaataaagtatatgtttgacttcctcgacgaacaggcagacaaacaccaaattcacgacgcggatgtcagacacacctggaagtcaaattgccttcccctgaggttttgggtcaatgtgattaaaaatccccaattcgtcttcgatatccataaaaacagcataacggacgcctgtctgtctgtggttgcccagacatttatggacagctgttcaacctcagagcacaaattagggaaagattccccaagtaataaactgttgtacgcaaaagacatcccaaactacaagagctgggtggaaagatactacgcggacatcgcaaaaatgcccgccataagtgatcaggacatgtcagcttatctcgctgagcagtcccggctgcacttgagccagtttaattccatgtctgcattgcacgaaatctactcctatataacaaagtacaaagacgagattttggctgccctggagaaggatgagcaggccagaagacaacggttgcggagcaagctcgagcaggttgtcgatactatggccctgagcagctag

SEQ ID NO: 223378 - DNA, 5622 bp, Artificial Sequence
  derived and/or modified sequence
atgtgggccgaggccggcctgccccgggccggcggcggcagccagccccccttccgcaccttcagcgccagtgactggggcctgacccacctggtggtgcatgagcagacaggagaggtgtatgtgggcgctgtgaaccgcatctacaagctgagcggcaacctgaccctgctgcgggcccacgtgactggacctgtggaggacaatgagaagtgctacccacctccttctgtgcagagctgcccccacggcctgggcagcacagacaacgtgaacaagctgctgctgctggactatgctgccaaccggctgctggcctgtggcagcgccagccagggcatctgccagttcctgcggctggatgacctcttcaagctgggggagccccaccacaggaaggagcactacctgagctctgtgcaggaggccggctccatggccggcgtgctgattgctggccccccaggccagggccaggccaagctgtttgtgggcacccccattgatggcaagtctgagtacttccccaccctgagcagccggcggctgatggccaatgaggaggatgctgacatgtttggatttgtgtaccaggatgaatttgtgagcagccagctgaagatccccagcgacaccctgagcaagtttcctgcctttgacatctactacgtgtacagcttccgctctgagcagtttgtgtactacctgaccctgcagctggacacccagctgaccagcccagatgctgctggggagcacttcttcaccagcaagatcgtgcggctgtgtgtggatgaccccaagttctacagctatgtggagttccccatcggctgtgagcaggccggcgtggagtaccgcctggtgcaggatgcctacctgagcaggcctggccgggccctggcccaccagctgggcctggctgaagatgaagatgtgctcttcaccgtgtttgcccagggccagaagaacagagtgaagccacccaaggagagcgccctgtgcctcttcaccctgcgggccatcaaggagaagatcaaggagcgcatccagagctgctacagaggagagggcaagctgagcctgccctggctgctgaacaaggagctgggctgcatcaacagccccctgcagattgatgatgacttctgtggccaggacttcaaccagcccctgggcggcaccgtgaccatcgagggcacccccctgtttgtggacaaggatgatggcctgacagctgtggccgcctatgactaccggggccgcacagtggtgtttgctggcaccaggagcggccgcatcaggaagatcctggtggacctgagcaaccctgggggccggcctgccctggcctatgagagcgtggtggcccaggagggcagccccatcctgcgggacctggtgctgagccccaaccaccagtacctgtatgccatgacagagaagcaggtgaccagggtgcctgtggagagctgtgtgcagtacaccagctgtgagctgtgcctgggcagccgggacccccactgcggctggtgtgtgctgcacagcatctgcagcagaagagatgcctgtgaaagagcagatgagccccagagatttgctgctgacctgctgcagtgtgtgcagctgactgtgcagcccagaaatgtgtctgtgaccatgagccaggtgcccctggtgctgcaggcctggaatgtgcctgacctgtctgctggggtgaactgcagctttgaggacttcacagaaagtgaatctgtgctggaggatggccgcatccactgccgcagccccagcgcccgggaggtggcccccatcacccggggccagggcgaccagagggtggtgaagctgtacctgaagagcaaggagaccgggaagaagtttgcctctgtggactttgtgttctacaactgcagcgtgcaccagagctgcctgagctgtgtgaatggcagcttcccctgccactggtgcaagtacagacatgtgtgcacccacaacgtggccgactgtgccttcctggagggccgggtgaatgtgtctgaggactgcccccagatcctgcccagcacccagatctacgtgcctgtgggcgtggtgaagcccatcaccctggccgccaggaacctgccccagccccagagcggccagaggggctatgagtgcctcttccacatccctggcagccctgcccgggtgacagccctgcgcttcaacagcagcagcctgcagtgccagaacagcagctacagctatgagggcaatgatgtgtctgacctgcctgtgaacctgtctgtggtgtggaatggaaactttgtgattgacaacccccagaacatccaggcccacctgtacaagtgcccagccctgcgggagagctgtggcctgtgcctgaaggctgaccccaggtttgaatgtggctggtgtgtggccgagcggcgctgcagcctgcggcaccactgtgccgctgacaccccagcctcctggatgcacgcccggcacggcagcagccgctgcacagaccccaagatcctgaagctgagccctgagaccggcccccggcagggcggcacccggctgaccatcaccggggagaacctgggcctgcgctttgaagatgtgcggctgggcgtgcgggtgggcaaggtgctgtgcagccctgtggagagcgagtacatctctgctgagcagatcgtgtgtgaaattggagatgccagctctgtgcgggcccatgatgccctggtggaggtgtgtgtgcgggactgcagcccccactaccgggccctgagccccaagcgcttcacctttgtgacccccaccttctacagagtgagccccagccggggccccctgagcggcggcacctggattggcatcgagggcagccacctgaatgccggcagtgatgtggccgtgtctgtgggcggccggccctgcagcttctcctggaggaacagccgggagatccgctgcctgaccccacctggccagagccctggcagcgcccccatcatcatcaacatcaacagagcccagctgaccaaccctgaggtgaagtacaactacacagaggaccccaccatcctgagaattgatcctgagtggagcatcaacagcggcggcaccctgctgactgtgacaggcaccaacctggccaccgtgcgggagccccgcatccgggccaagtatggaggcatcgagcgggagaatggctgcctggtgtacaatgacaccaccatggtgtgccgggcccccagcgtggccaaccctgtgcgcagccccccagagctgggggagaggccagatgagctgggctttgtgatggacaacgtgcgcagcctgctggtgctgaacagcaccagcttcctgtactacccagaccctgtgctggagcccctgagccccaccggcctgctggagctgaagcccagcagccccctcatcctgaagggcaggaacctgctgcccccagcccctggcaacagccggctgaactacacagtgctgattggcagcaccccctgcaccctgactgtgtctgagacccagctgctgtgtgaggcccccaacctgaccggccagcacaaggtgacagtgcgggccggcggctttgagttcagccctggcaccctgcaggtgtacagcgacagcctgctgaccctgcctgccatcgtgggcatcggcggcggcggcggcctgctgctgctggtgattgtggccgtgctgattgcctacaagaggaagagcagagatgctgacaggaccctgaagaggctgcagctgcagatggacaacctggagagccgggtggccctggagtgcaaggaggcctttgctgagctgcagacagacatccacgagctgaccaatgacctggatggagctggcatccccttcctggactaccgcacctacgccatgagggtgctcttccctggcatcgaggaccaccctgtgctgaaggagatggaggtgcaggccaacgtggagaagagcctgaccctgtttggccagctgctgaccaagaagcacttcctgctgaccttcatccgcaccctggaggcccagaggagcttctccatgagggacagaggaaatgtggccagcctcatcatgacagccctgcagggcgagatggagtatgccaccggggtgctgaagcagctgctgagtgacctgattgagaagaacctggagagcaagaaccaccccaagctgctgctgcggaggacagagagcgtggccgagaagatgctgaccaactggttcaccttcctgctgtacaagttcctgaaggaatgtgccggggagcccctcttcatgctgtactgtgccatcaagcagcagatggagaagggccccattgatgccatcaccggggaggcccgctacagcctgtctgaggacaagctgatccggcagcagattgactacaagaccctgaccctgaactgtgtgaacccagaaaatgaaaatgcccctgaggtgcctgtgaagggcctggactgtgacacagtgacccaggccaaggagaagctgctggatgctgcctacaagggcgtgccctacagccagaggcccaaggctgctgacatggacctggagtggaggcagggccgcatggcccgcatcatcctgcaggatgaagatgtgaccaccaagattgacaatgactggaagaggctgaacaccctggcccactaccaggtgacagatggcagctctgtggccctggtgcccaagcagaccagcgcctacaacatcagcaacagcagcaccttcaccaagagcctgagccgctatgagagcatgctgaggacagccagcagcccagacagcctgcggagcaggacccccatgatcaccccagacctggagagcggcaccaagctgtggcacctggtgaagaaccacgaccacctggaccagcgggagggggaccggggcagcaagatggtgtctgagatctacctgacccggctgctggccaccaagggcaccctgcagaagtttgtggatgacctgtttgagaccatcttcagcacagcccaccggggcagcgccctgcccctggccatcaagtacatgtttgacttcctggatgagcaggccgacaagcaccagatccatgatgctgatgtgcgccacacctggaagagcaactgcctgcccctgcgcttctgggtgaatgtcatcaagaacccccagtttgtgtttgacatccacaagaacagcatcacagatgcctgcctgtctgtggtggcccagaccttcatggacagctgcagcaccagcgagcacaagctgggcaaggacagccccagcaacaagctgctgtatgccaaggacatccccaactacaagtcctgggtggagcgctactatgctgacatcgccaagatgcctgccatcagtgaccaggacatgtctgcctacctggccgagcagagccggctgcacctgagccagttcaacagcatgtctgccctgcacgagatctacagctacatcaccaagtacaaggatgagatcctggccgccctggagaaggatgagcaggcccggcggcagaggctgcggagcaagctggagcaggtggtggacaccatggccctgagcagctag

SEQ ID NO: 223379 - DNA, 5691 bp, Artificial Sequence
  derived and/or modified sequence
atgcccctgccccccaggagcctgcaggtgctgctgctgctgctgctgctgctgctgctgctgcccggcatgtgggccgaggccggcctgcccagggctgggggcggcagccagccccccttccgcaccttcagcgccagtgactggggcctgacccacctggtggtgcatgagcagacaggagaggtgtatgtgggcgctgtgaaccgcatctacaagctgagcggcaacctgaccctgctgcgggcccacgtgacaggccctgtggaggacaatgagaagtgctaccccccacccagcgtgcagagctgcccccacggcctgggcagcacagacaacgtgaacaagctgctgctgctggactatgctgccaaccggctgctggcctgtggcagcgccagccagggcatctgccagttcctgcggctggatgacctcttcaagctgggggagccccaccacaggaaggagcactacctgagctctgtgcaggaggccggctccatggccggcgtgctgattgctggccccccaggccagggccaggccaagctgtttgtgggcacccccattgatggcaagtctgagtacttccccaccctgagcagccggcggctgatggccaatgaagaagatgctgacatgtttggatttgtgtaccaggatgaatttgtgagcagccagctgaagatccccagcgacaccctgagcaagtttcctgcctttgacatctactacgtgtacagcttccgctctgagcagtttgtgtactacctgaccctgcagctggacacccagctgaccagcccagatgctgctggggagcacttcttcaccagcaagatcgtgcggctgtgtgtggatgaccccaagttctacagctatgtggagttccccatcggctgtgagcaggccggcgtggagtaccgcctggtgcaggatgcctacctgagccggcccggccgggccctggcccaccagctgggcctggccgaggatgaagatgtgctcttcaccgtgtttgcccagggccagaagaacagagtgaagccacccaaggagagcgccctgtgcctcttcaccctgcgggccatcaaggagaagatcaaggagcgcatccagagctgctacagaggagagggcaagctgagcctgccctggctgctgaacaaggagctgggctgcatcaacagccccctgcagattgatgatgacttctgtggccaggacttcaaccagcccctgggcggcaccgtgaccatcgagggcacccccctgtttgtggacaaggatgatggcctgacagctgtggccgcctatgactaccggggccgcacagtggtgtttgctggcaccaggagcggccgcatcaggaagatcctggtggacctgagcaaccctgggggccgcccagccctggcctatgaatctgtggtggcccaggagggcagccccatcctgcgggacctggtgctgagccccaaccaccagtacctgtatgccatgacagagaagcaggtgaccagggtgcctgtggagagctgtgtgcagtacaccagctgtgagctgtgcctgggcagccgggacccccactgcggctggtgtgtgctgcacagcatctgcagcagaagagatgcctgtgagcgggcagatgagccccagagatttgctgctgacctgctgcagtgtgtgcagctgactgtgcagcccagaaatgtgtctgtgaccatgagccaggtgcccctggtgctgcaggcctggaatgtgcctgacctgtctgctggggtgaactgcagctttgaggacttcacagagagcgagagcgtgctggaggatggccgcatccactgccgcagccccagcgcccgggaggtggcccccatcacccggggccagggcgaccagagggtggtgaagctgtacctgaagagcaaggagaccgggaagaagtttgcctctgtggactttgtgttctacaactgcagcgtgcaccagagctgcctgagctgtgtgaatggcagcttcccctgccactggtgcaagtaccgccacgtgtgcacccacaacgtggccgactgtgccttcctggagggccgggtgaatgtgtctgaggactgcccccagatcctgcccagcacccagatctacgtgcctgtgggcgtggtgaagcccatcaccctggccgccaggaacctgccccagccccagagcggccagaggggctatgaatgtctcttccacatccctggcagccctgcccgggtgacagccctgcgcttcaacagcagcagcctgcagtgccagaacagcagctacagctatgagggcaatgatgtgtctgacctgcctgtgaacctgtctgtggtgtggaatggaaacttcgtcatcgacaacccccagaacatccaggcccacctgtacaagtgcccagccctgcgggagagctgtggcctgtgcctgaaggctgaccccaggtttgaatgtggctggtgtgtggccgagcggcgctgcagcctgcggcaccactgtgccgctgacaccccagcctcctggatgcacgcccggcacggcagcagccgctgcacagaccccaagatcctgaagctgagccctgagaccggcccccggcagggcggcacccggctgaccatcactggagagaacctgggcctgcgctttgaagatgtgcggctgggcgtgcgggtgggcaaggtgctgtgcagccctgtggagagcgagtacatctctgctgagcagatcgtgtgtgaaattggagatgccagctctgtgcgggcccatgatgccctggtggaggtgtgtgtgcgggactgcagcccccactaccgggccctgagccccaagcgcttcacctttgtgacccccaccttctacagagtgagccccagccggggccccctgagcggcggcacctggattggaattgagggcagccacctgaatgccggcagtgatgtggccgtgtctgtgggcggccggccctgcagcttctcctggaggaacagccgggagatccgctgcctgaccccacctggccagagccctggcagcgcccccatcatcatcaacatcaacagagcccagctgaccaaccctgaggtgaagtacaactacacagaggaccccaccatcctgagaattgatcctgagtggagcatcaacagcggcggcaccctgctgactgtgacaggcaccaacctggccaccgtgcgggagccccgcatccgggccaagtatggaggcatcgagagagaaaatggctgcctggtgtacaatgacaccaccatggtgtgccgggcccccagcgtggccaaccctgtgcgcagccccccagagctgggggagaggccagatgagctgggctttgtgatggacaacgtgcgcagcctgctggtgctgaacagcaccagcttcctgtactacccagaccctgtgctggagcccctgagccccaccggcctgctggagctgaagcccagcagccccctcatcctgaagggcaggaacctgctgcccccagcccctggcaacagccggctgaactacacagtgctgattggcagcaccccctgcaccctgactgtgtctgagacccagctgctgtgtgaggcccccaacctgaccggccagcacaaggtgacagtgcgggccggcggctttgagttcagccctggcaccctgcaggtgtacagcgacagcctgctgaccctgcctgccatcgtgggcattggaggcggcggcggcctgctgctgctggtgattgtggccgtgctgattgcctacaagaggaagagcagagatgctgacaggaccctgaagaggctgcagctgcagatggacaacctggagagccgggtggccctggagtgcaaggaggcctttgctgagctgcagacagacatccacgagctgaccaatgacctggatggagctggcatccccttcctggactaccgcacctacgccatgagggtgctcttccctggcatcgaggaccaccctgtgctgaaggagatggaggtgcaggccaacgtggagaagagcctgaccctgtttggccagctgctgaccaagaagcacttcctgctgaccttcatccgcaccctggaggcccagaggagcttctccatgagggacagaggaaatgtggccagcctcatcatgacagccctgcagggcgagatggagtatgccactggagtgctgaagcagctgctgagtgacctgattgagaagaacctggagagcaagaaccaccccaagctgctgctgcggaggacagaatctgtggccgagaagatgctgaccaactggttcaccttcctgctgtacaagttcctgaaggaatgtgccggggagcccctcttcatgctgtactgtgccatcaagcagcagatggagaagggccccattgatgccatcactggagaggcccgctacagcctgtctgaggacaagctgatccggcagcagattgactacaagaccctgaccctgaactgtgtgaacccagaaaatgaaaatgcccctgaggtgcctgtgaagggcctggactgtgacacagtgacccaggccaaggagaagctgctggatgctgcctacaagggcgtgccctacagccagaggcccaaggctgctgacatggacctggagtggaggcagggccgcatggcccgcatcatcctgcaggatgaagatgtgaccaccaagattgacaatgactggaagaggctgaacaccctggcccactaccaggtgacagatggcagctctgtggccctggtgcccaagcagaccagcgcctacaacatcagcaacagcagcaccttcaccaagagcctgagccgctatgaatccatgctgaggacagccagcagcccagacagcctgcggagcaggacccccatgatcaccccagacctggagagcggcaccaagctgtggcacctggtgaagaaccacgaccacctggaccagcgggagggggaccggggcagcaagatggtgtctgagatctacctgacccggctgctggccaccaagggcaccctgcagaagtttgtggatgacctgtttgagaccatcttcagcacagcccaccggggcagcgccctgcccctggccatcaagtacatgtttgacttcctggatgagcaggccgacaagcaccagatccatgatgctgatgtgcgccacacctggaagagcaactgcctgcccctgcgcttctgggtgaatgtcatcaagaacccccagtttgtgtttgacatccacaagaacagcatcacagatgcctgcctgtctgtggtggcccagaccttcatggacagctgcagcaccagcgagcacaagctgggcaaggacagccccagcaacaagctgctgtatgccaaggacatccccaactacaagtcctgggtggagcgctactatgctgacatcgccaagatgcctgccatcagtgaccaggacatgtctgcctacctggccgagcagagccggctgcacctgagccagttcaacagcatgtctgccctgcacgagatctacagctacatcaccaagtacaaggatgagatcctggccgccctggagaaggatgagcaggcccggcggcagaggctgcggagcaagctggagcaggtggtggacaccatggccctgagcagctag

SEQ ID NO: 223380 - DNA, 5622 bp, Artificial Sequence
  derived and/or modified sequence
atgtgggccgaggccggcctgccccgggccggcggcggcagccagcctccctttagaacttttagcgcatcagactggggactgacgcatctggttgttcacgagcagaccggcgaggtgtatgtgggcgctgtgaatcgaatttacaaactgtccggaaatttgaccttgctgcgcgctcacgtgaccgggcccgtggaagacaacgagaaatgctaccctcccccttccgttcagagctgtcctcacggactgggttcgaccgataacgtgaacaaattgttactgcttgattacgccgctaacaggctcctagcctgtggcagcgcaagtcagggcatatgccagtttttgcggctggatgacctctttaagttgggcgagccacaccacagaaaggaacactacctgtcatcagtgcaggaggccggtagtatggcaggggtactgattgcggggcctccaggccagggccaggctaagctgttcgtggggacaccgatcgacggtaagtcagagtacttccccactctctcctcaaggcggctaatggccaacgaggaggacgctgacatgttcggtttcgtctaccaggatgaatttgtcagctcacagctgaagattccttccgacaccctgtcaaaattccctgctttcgatatttactacgtctattcgttcagatccgaacaattcgtttattatttgacactgcagctggacacccaactgacatctcctgatgccgccggtgaacacttctttactagtaagattgtccgattgtgtgtggatgacccaaagttttactcctacgtcgaattccccattgggtgtgaacaggctggagtggagtatcggctggtccaggacgcttatcttagccgccccggtcgggcactggcccatcagttaggcctggctgaagacgaagacgttcttttcactgtatttgctcagggtcagaaaaaccgcgttaaaccacccaaagagtccgcactctgcctattcactctcagggccatcaaagagaagatcaaagaacggattcagtcatgctaccgcggtgaggggaagctttcactgccctggctgctgaacaaggagctgggttgtataaattcccccctgcagatagatgacgatttctgcggtcaggatttcaaccagcctctcggcggcacagttacgatcgagggcacacccttgtttgtcgataaagacgatggattgaccgccgtcgccgcgtacgattacaggggacggacggttgtctttgccggcactagaagcggccgcataagaaaaattcttgtagacctgtctaatccagggggccgccccgcgctcgcttatgaaagcgtcgtggcccaggaggggtcccctatactacgtgacctcgtgctgtcgccaaaccaccaatatctatatgccatgaccgagaaacaggtgaccagagtgcctgtagagagttgtgtccagtatacctcctgcgagctgtgcctggggagccgagacccacactgtgggtggtgcgtgctccacagtatctgtagtcgccgggacgcctgcgaacgggctgacgagccacagcgctttgcagccgacctcctgcagtgtgtgcagttgactgtgcagcctagaaatgtttcagtaactatgtcccaggttccacttgtgttgcaggcgtggaatgtgcctgatctgagcgcaggtgtaaattgcagctttgaggactttactgagtcggaatctgtactggaggacggcaggattcactgtcgaagtccatcagccagagaggtggccccgattaccagggggcagggcgatcagagggtcgttaaactttacttgaagtccaaggaaacagggaagaagtttgcatcggtagatttcgtgttctataattgttccgtgcaccagtcttgcctgagctgtgtaaacggatcattcccttgtcattggtgtaaatatcgtcatgtgtgcactcacaacgtcgctgattgcgcttttttggagggcagggtgaacgtgtccgaggattgtccccagatactgccaagcacacaaatctatgtgccagtcggcgtagtaaagcccatcactctcgccgctcggaaccttcctcagccacagtccggacagcgggggtatgaatgcctcttccacattccggggtccccagcccgagtgactgctctgcggttcaactcgtcttccctgcaatgccaaaattcctcgtactcctacgaagggaacgatgtaagcgacctgcccgtcaacctctccgtggtttggaacggaaactttgtgatcgataacccccaaaacatccaggctcatctgtacaagtgtccggctttgcgggagagttgtgggctatgcttaaaggcggatccacggtttgaatgtggatggtgtgtagctgaacggaggtgctccctgaggcaccattgtgccgcagatacacctgcttcatggatgcacgctcggcatggcagctctaggtgtacagaccctaaaatactgaaactaagcccggaaaccggccctcgccagggagggactcggctcaccattacgggagaaaatttaggccttcggttcgaggatgtcagattgggtgttcgggtggggaaggtcctctgcagcccagtggagtccgaatacatcagcgccgagcagatcgtgtgcgagatcggggacgcatcgagtgttcgcgcccatgacgctctcgtggaggtatgcgtccgggattgctcccctcattatagagccctctctcccaaacggtttacatttgttactcccacgttttatcgcgtgagcccctcacgaggccccctgtccggagggacctggatcggcatagaggggtctcatctgaatgccgggagcgacgtggctgtgtctgtggggggccgcccctgttccttctcctggagaaactctcgcgaaattcggtgcttgaccccccctggccagagccccggatccgcgccaatcattattaatatcaacagagcccagttgactaaccccgaggttaagtacaattacactgaagacccaacgatccttcgtattgatcccgaatggtctatcaacagcggcggaaccctactgaccgttactggtactaatttggcgacagttagggagcccagaatacgcgcgaagtacggaggtatcgaaagggagaatggttgtctggtatacaacgacactaccatggtgtgccgagcaccctccgttgctaaccctgtgagaagtcctcccgagctgggcgaacgtccagatgagttggggttcgtaatggataacgtgcgctctttactggtgttgaattctacttcgttcctgtactaccccgaccccgtgctggagccactgagcccaaccgggctgttggaacttaagcccagttcacctctgattctgaaaggaagaaacctgctcccacccgctccagggaatagcagactgaattatactgtgctcattggctcaaccccctgtaccctgaccgtttcagagactcaactcctctgtgaggccccaaacctgacgggccaacataaagtgaccgtgcgagctggaggattcgagttctccccaggcaccctgcaggtctactccgactcccttctcacccttcccgcgattgtaggtattggagggggcggaggactgctgctattggtcattgtagcggttctgatcgcctataagcggaagtctcgggatgccgacagaactctgaagaggttacagcttcagatggataacttggaaagccgcgttgcgttggagtgtaaagaggcttttgctgaattacaaacagatattcacgagctgactaacgatctggacggagcaggcatcccattcctggattatagaacgtacgccatgagggtcctgttccctggcatcgaagatcaccctgtcttgaaggagatggaggtgcaggctaatgtcgagaagtctcttactctctttggccagctcttgacgaagaaacacttcctactcaccttcattagaacccttgaagcacagcggtcattttccatgcgtgatagggggaacgtggcttctttgattatgaccgcattacagggagagatggagtacgcgacaggcgtgcttaaacagcttttatctgacctcatcgagaaaaacctggagagcaagaaccatcccaagctgctactgagacggaccgaatcagtggcagagaagatgctaacaaattggtttacttttctgctatacaaattcctgaaggaatgtgccggagaacccctgtttatgctgtactgcgccattaagcaacagatggagaaaggtccaatcgacgccatcaccggggaagctcggtactctttgagcgaggacaagctcatccggcaacagatcgattacaaaaccctgacgctgaactgtgtgaatccagaaaacgagaacgcccctgaggtgcccgtgaaagggttagattgtgataccgttacacaggcaaaagaaaagttgttagacgccgcttataaaggggtcccctacagccaaaggccaaaggctgccgatatggatctcgaatggaggcagggtaggatggcgcgcatcattctccaggatgaggatgtgaccaccaagatcgacaatgactggaagcgcttgaacactcttgcccattaccaggtgactgatgggtccagtgtcgcactcgtcccgaagcagacatcagcttataacatctctaattccagcacattcaccaaatcgcttagcagatacgagtctatgctccgaacggcctctagccctgacagtctaaggagccgaacacccatgatcactccggacctcgagtccggcaccaagctatggcatcttgtgaaaaaccacgatcacctcgatcagcgggagggggaccgcggcagtaagatggtgtccgaaatatacctcactcgactgctggccacaaaggggacactgcagaaatttgtggacgatcttttcgagaccatattctccacggcccaccggggcagtgccctgccactggccattaagtacatgtttgatttcctggatgagcaggcagataaacaccagattcatgatgcagatgtccgtcacacatggaaaagcaattgcttgcccttgagattttgggtcaatgtcatcaaaaacccgcagtttgttttcgatattcacaaaaactccattactgatgcatgcttgtcagtggttgctcagacgttcatggactcctgctctactagcgaacacaaattggggaaggatagcccctccaataagctcctctatgccaaggacatccccaactataaatcctgggtggagcgttattatgccgatatagccaaaatgccagccatatctgatcaggatatgtcagcctatttggcagagcaaagtcgcttgcacctgtcccagtttaattcaatgtcagccttacacgaaatttatagctatatcacaaaatacaaggatgaaattctcgccgctctggagaaggatgagcaggcccgaaggcaacggttgcggtcaaaactagagcaggttgtggatactatggccctgtcctcatag

SEQ ID NO: 223381 - DNA, 5691 bp, Artificial Sequence
  derived and/or modified sequence
atgcccctgcccccccggagcctgcaggtgctgctgctgctgctgttacttttactgttactcccagggatgtgggctgaagctggccttccccgcgctggagggggctcccagcctcctttcagaaccttcagtgccagtgattggggactgacacacctggtggtgcacgaacagacgggcgaagtgtacgtgggcgccgtaaatagaatttacaagctttctggcaatttgaccttgcttcgagcacacgtcaccggccccgtcgaagacaacgagaaatgttacccaccaccaagcgtgcagtcctgtccacatggccttggatctaccgataacgttaacaagctgttgctcctggactatgcggccaatagactcttggcttgcggatctgcttctcaaggaatttgccagttcttacgcctggatgatctgttcaagctgggcgagcctcaccacagaaaggaacactacctgtcaagtgtacaggaggccggttccatggccggagtgctcattgcaggcccccccggccaaggtcaggcaaaactatttgtgggcacacctatagatggcaaatctgaatattttcctaccctgtctagtcggcgattgatggctaacgaggaagacgccgacatgtttggttttgtgtaccaggatgaattcgtgtcatctcagttgaagataccgtccgacaccctaagtaagtttcctgcctttgacatttactacgtgtattctttcagatccgagcagttcgtgtactaccttacccttcagttggatactcagctcacctcacctgacgcagccggggaacacttctttaccagcaaaattgtgcgcctttgtgtggacgatccaaaattttattcctatgtagagtttcccattggatgtgagcaggccggggtggagtacaggctggttcaagacgcgtacctctcacgccctggccgggctctggcccaccaactgggcctggctgaagacgaggatgttctttttacggtgtttgcccagggtcagaaaaatcgcgtgaaaccaccaaaagagtcggccctctgcttattcaccctgagggcaataaaggaaaaaataaaggaacggattcaatcctgctaccgcggagagggaaagctgagcctaccttggctgctgaacaaggaactgggctgtatcaactcccctctgcagatcgacgacgacttctgcggtcaggacttcaatcagcctctagggggcaccgtaaccatagaaggcacccccctgttcgtcgacaaagatgatggactgaccgcggtcgcagcctacgactatagagggcgcaccgtggtctttgcggggactcggtcaggaagaattcgcaaaatactggtggacctgagcaatcctggcggacgacctgctctggcctatgaatctgtggtggcccaggagggttctcccattctccgcgacttagtgctgtcacccaaccaccagtatctttacgccatgactgaaaagcaagtgactagggtccctgtcgagtcatgcgttcagtatacatcctgcgaattgtgtctgggctctagggatccccattgcggctggtgcgttcttcattctatctgctcgagaagagacgcatgtgagagagccgatgagccccagcgcttcgctgccgatctgctgcagtgtgtgcagctcacagtgcagcctcgaaacgtttccgtcaccatgtctcaagtcccactggttctgcaggcatggaacgtgcccgacctttcagcaggagtcaactgctcctttgaggatttcacggagtctgaaagtgtactggaggacggacggatacactgccgaagtccgagcgcgagagaggtggcacctattactagaggccagggagaccagcgggtggtgaagctctacttaaaatctaaggaaactggtaaaaaatttgcttcagtggacttcgtgttctataattgtagcgttcaccagtcatgcttatcttgcgtgaacgggtctttcccatgtcactggtgtaaataccgccacgtctgtacccataacgtcgccgactgcgcattcttggaaggtcgggtaaacgtgagcgaggactgtccccagatcctaccctcaacacagatctatgtgcctgtgggcgtcgtgaagcctattacactggccgcccgtaatctgccacagccccaatcaggccagagagggtacgagtgcctttttcacatccccggctcccccgcgagggtgactgcattgaggttcaatagctctagtcttcagtgtcagaactccagttattcctacgaagggaatgatgtgagtgatctgccggtgaacctgagtgtggtttggaacgggaactttgtcatcgacaatcctcagaacatccaagcccacttgtacaagtgtcccgccctcagggagagctgtggcttgtgcctaaaggctgatcccagattcgagtgtggctggtgtgttgcagagcgtaggtgtagcttacgtcaccactgcgcagcagatactccggcgagctggatgcatgcccgtcatgggagttctcgttgcacagatccgaaaatcctgaagctgtctccggaaacgggcccaaggcaggggggcactcggctcactatcacgggcgagaatctgggcctacgatttgaagacgtgcgcctgggagttcgagtcggtaaggtcctgtgctcacctgtggagagcgagtacatctctgccgaacaaattgtgtgcgagatcggcgatgcatccagcgtcagagcccacgacgctcttgtcgaggtttgcgttagggactgcagcccccattatcgcgccctttctcctaaacgattcacatttgtgacccctacattttatagggtcagtcctagccgcggtcccttgtcagggggcacctggattgggattgaaggctcccacctgaacgctgggagtgacgtcgctgtttccgttgggggacgaccctgcagctttagctggcgcaattcccgagagattcggtgcttaaccccaccagggcagagtcccggaagcgcaccaatcattatcaacattaatcgtgcgcagctgactaacccggaggtcaagtataactacacagaagatcccactatattacgtattgaccccgagtggagtatcaacagcgggggcaccttattgacagttaccggaaccaatctggctacggtccgcgaaccgagaatccgtgcgaagtatggagggattgagcgagaaaacggctgtttggtttacaacgatacgaccatggtttgtcgggctccgagtgtggcaaaccccgtaagaagccccccagaactgggtgagaggcctgacgagcttggctttgtgatggacaacgttcggtccctcctggtgctgaactcaacgtccttcctttactaccctgaccctgtgctcgagccccttagccccactgggctgttggagttaaagccatcatcccctctgatcctcaagggtcgaaacctgctgcctccagcgcctggcaatagccggcttaactatactgtcctgatcgggtcgactccgtgcactctgactgtcagcgaaacgcaactgctctgtgaggcccctaacctcacgggacagcataaagttactgtgagagcaggaggtttcgagttcagtccagggactctgcaagtgtacagtgatagcctgttaacactgcccgctattgtcggtatcggtggtggcggcggcctgttactccttgttatcgtggccgtcttaatcgcttataagaggaagagtcgcgatgcagatcggaccctgaagcggctccagctgcagatggataacttagagtcccgcgttgccctcgaatgtaaagaggcttttgccgagctgcagactgatatccacgagcttacaaacgacttggatggcgctgggatccccttccttgactaccggacctatgcgatgcgtgtcctcttccccggtattgaggatcatccggtgctgaaagagatggaggtgcaggcaaacgttgagaagtcgttgaccttattcggccagcttttaacaaaaaagcattttctactaactttcattaggacgctagaggcgcagcggtccttttcgatgagggataggggaaatgtggccagcctgatcatgaccgcactgcagggggagatggagtatgctaccggtgtcctcaagcaactcctgtcagatctcatcgagaaaaacctagaaagcaagaaccaccctaagttacttctgcggcgaaccgaatcagtcgcagagaaaatgctcactaactggttcactttccttctctacaaatttctcaaggagtgcgctggagagcccttatttatgctgtactgtgcaattaagcagcagatggagaagggaccaatcgacgcaataaccggtgaagcacggtattcactctcggaggataagcttattcggcagcaaatcgactataaaacactaacgctgaactgcgttaacccagagaacgaaaatgcgccagaagtgcccgtgaagggattggactgtgatacagtgacccaagcgaaggagaaactcctcgacgctgcatacaaaggcgtaccatattcccaacgacccaaggccgctgacatggatcttgaatggagacagggccgcatggcccgtatcattctgcaggacgaagatgtgaccaccaagatcgacaatgactggaaacgcctcaatacacttgcacattaccaggtcacggatggcagttccgtcgcacttgtccctaaacagactagcgcctataatatttccaatagcagtacatttaccaaaagcctgagccggtacgagtctatgttacgaacagccagttcccccgactctctgcgatccagaactccaatgatcaccccagacctcgagtcagggacaaaactctggcatctggtaaaaaatcatgatcacttagatcagcgagagggagaccgtgggtcaaagatggtgagcgagatctacctaactcgattgcttgcgacgaagggtaccctgcagaagtttgtagatgacttgtttgaaactattttttcaactgcgcacaggggctctgcactgcccttggcaatcaagtatatgttcgatttcctcgatgaacaggctgacaagcaccagatccatgacgccgatgtgcggcatacttggaagtctaactgtctgcccttgcgattttgggtgaatgtcatcaaaaatcctcaattcgtgtttgacattcataagaacagtattaccgatgcctgtctcagtgtagtggcccagacttttatggatagttgttccacctctgaacacaaactaggaaaggactccccctctaataagctgttgtatgccaaggacattcccaattacaagagctgggtcgagaggtattacgcagatattgccaagatgcccgcgattagcgaccaggatatgtccgcctacctggccgaacagagtcgactccatctttcccagttcaacagcatgtcagctctccacgagatctattcctatataactaagtacaaagacgagattcttgctgctctggagaaagacgagcaagccaggcggcagcgcttgaggagcaaactggaacaagtggtagatacgatggcactgtcatcctag

SEQ ID NO: 223382 - DNA, 9066 bp, Artificial Sequence
  derived and/or modified sequence
atgccgctgccaccgcggagcctgcaggtgctcctgctgctgctgctgttgctgctgctgctgccgggcatgtgggctgaggcaggcttgcccagggcaggcgggggttcacagccccccttccgcaccttctcggccagcgactggggcctcacccacctagtggtgcatgagcagacaggcgaggtgtatgtgggcgcagtgaaccgcatctataagctgtcggggaacctgacactgctgcgggcccacgtcacgggccctgtggaggacaacgagaagtgctacccgccgcccagcgtgcagtcctgcccccacggcctgggcagtactgacaacgtcaacaagctgctgctgctggactatgccgctaaccgcctgctggcctgtggcagcgcctcccagggcatctgccagttcctgcgtctggacgatctcttcaaactgggtgagccacaccaccgtaaggagcactacctgtccagcgtgcaggaggcaggcagcatggcgggcgtgctcattgccgggccaccgggccagggccaggccaagctcttcgtgggcacacccatcgatggcaagtccgagtacttccccacactgtccagccgtcggctcatggccaacgaggaggatgccgacatgttcggcttcgtgtaccaggatgagtttgtgtcatcacagctcaagatcccttcggacacgctgtccaagttcccggcctttgacatctactatgtgtacagcttccgcagcgagcagtttgtctactacctcacgctgcagctagacacacagctgacctcgcctgatgccgccggcgagcacttcttcacgtccaagatcgtgcggctctgtgtggacgaccccaaattctactcgtacgttgagttccccattggctgcgagcaggcgggtgtggagtaccgcctggtgcaggatgcctacctgagccggcccggccgtgccctggcccaccagctgggcctggctgaggacgaggacgtgctgttcactgtgttcgcccagggccagaagaaccgcgtgaagccaccaaaggagtcagcactgtgcctgttcacgctcagggccatcaaggagaagattaaggagcgcatccagtcctgctaccgtggtgagggcaagctctccctgccgtggctgctcaacaaggagctgggctgcatcaactcgcccctgcagatcgatgacgacttctgcgggcaggacttcaaccagcccctggggggcacagtcaccattgaggggacgcccctgttcgtggacaaggatgatggcctgaccgccgtggctgcctatgactatcggggccgcactgtggtattcgccggcacgcgaagtggccgcatccgcaagatcctggtggacctctcaaaccccggtggccggcctgccctggcctacgagagcgtcgtggcccaggagggcagccccatcctgcgagacctcgtcctcagccccaaccaccagtacctctacgccatgaccgagaagcaggtgacgcgggtgcctgtggagagctgtgtgcagtacacgtcctgtgagctgtgtctggggtcacgggacccccactgtggctggtgtgtcctgcacagcatctgctcgcggcgggacgcctgtgagcgagcagacgagccccagcgctttgctgcggacctgctgcagtgtgtgcagctgactgtgcagccccgcaatgtgtctgtcaccatgtcccaggtcccacttgtgctgcaggcctggaacgtgcctgacctctcagctggcgtcaactgctccttcgaggacttcacggaatctgagagcgtcctggaggatggccggatccactgccgctcaccctccgcccgggaggtggcgcccatcacgcggggccagggagaccagcgggtggtgaaactctacctaaagtccaaggagacagggaagaagtttgcgtctgtggacttcgtcttctacaactgcagcgtccaccagtcctgcctgtcctgtgtcaacggctcctttccctgccactggtgcaaataccgccacgtgtgcacacacaacgtggctgactgcgccttcctggagggccgtgtcaacgtgtctgaggactgcccacagatcctgccctccacgcagatctacgtgccagtgggagtggtaaaacccatcaccctggccgcacggaacctgccacagccacagtcaggccagcgtggatatgagtgcctcttccacatcccgggcagcccggcccgtgtcaccgccctgcgcttcaacagctccagcctgcagtgccagaattcctcgtactcctacgaggggaacgatgtcagcgacctgccagtgaacctgtcagtcgtgtggaacggcaactttgtcattgacaacccacagaacatccaggcgcacctctacaagtgcccggccctgcgcgagagctgcggcctctgcctcaaggccgacccgcgcttcgagtgcggatggtgcgtggccgagcgccgctgctccctgcgacaccactgcgctgccgacacacctgcatcgtggatgcacgcgcgtcacggcagcagtcgctgcaccgaccccaagatcctcaagctgtcccccgagacgggcccgaggcagggcggcacgcggctcactatcacaggcgagaacctgggcctgcgattcgaagacgtgcgtctgggcgtgcgcgtgggcaaggtgctgtgcagccctgtggagagcgagtacatcagtgcggagcagatcgtctgtgagatcggggacgccagctccgtgcgtgcccatgacgccctggtggaggtgtgtgtgcgggactgctcaccacactaccgcgccctgtcacccaagcgcttcaccttcgtgacaccaaccttctaccgtgtgagcccctcccgtgggcctctgtcagggggcacctggattggcatcgagggaagccacctgaacgcaggcagtgatgtggctgtgtcggtcggtggccggccctgctccttctcctggaggaactcccgtgagatccggtgcctgacaccccccgggcagagccctggcagcgctcccatcatcatcaacatcaaccgcgcccagctcaccaaccctgaggtgaagtacaactacaccgaggaccccaccatcctgaggatcgaccccgagtggagcatcaacagcggtgggaccctcctgacggtcacaggcaccaacctggccactgtccgtgaaccccgaatccgggccaagtatggaggcattgagagggagaacggctgcctggtgtacaatgacaccaccatggtatgccgcgccccgtctgtggccaaccctgtgcgcagcccaccagagctgggggagcggccggatgagctgggcttcgtcatggacaacgtgcgctccctgcttgtgctcaactccacctccttcctctactaccctgaccccgtactggagccactcagccccactggcctgctggagctgaagcccagctccccactcatcctcaagggccggaacctcttgccacctgcacccggcaactcccgactcaactacacggtgctcatcggctccacaccctgtaccctcaccgtgtcggagacgcaactgctgtgcgaggcgcccaacctcactgggcagcacaaggtcacggtgcgggcaggtggcttcgagttctcgccagggacactgcaggtgtactcggacagcctgctgacgctgcctgccattgtgggcattggcggaggcgggggtctcctgctgctggtcatcgtggctgtgctcatcgcctacaagcgcaagtcacgagatgctgaccgcacactcaagcggctgcagctccagatggacaacctggagtcccgcgtggccctcgaatgcaaggaagcctttgcagagctgcagacagacatccacgagctgaccaatgacctggacggtgccggcatccccttccttgactaccggacatatgccatgcgggtgctctttcctgggatcgaggaccaccctgtgctcaaggagatggaggtgcaggccaatgtggagaagtcgctgacactgttcgggcagctgctgaccaagaagcacttcctgctgaccttcatccgcacgctggaggcacagcgcagcttctccatgcgcgaccgcgggaatgtggcctcgctcatcatgacggccctgcagggcgagatggaatacgccacaggcgtgctcaagcagctgctttccgacctcatcgagaagaacctggagagcaagaaccaccccaagctgctactgcgccggactgagtcggtggcagagaagatgctaactaactggttcaccttcctcttgtataagttcctcaaggagtgcgctggggagccgctgttcatgctgtactgcgccatcaagcagcagatggagaagggccccattgacgccatcacgggtgaggcacgctactccctgagtgaggacaagctcatccggcagcagattgactacaagacactgaccctgaactgtgtgaaccctgagaatgagaatgcacctgaggtgccggtgaaggggctggactgtgacacggtcacccaggccaaggagaagctgctggacgctgcctacaagggcgtgccctactcccagcggcccaaggccgcggacatggacctggagtggcgccagggccgcatggcgcgcatcatcctgcaggacgaggacgtcaccaccaagattgacaacgattggaagaggctgaacacactggctcactaccaggtgacagacgggtcctcggtggcactggtgcccaagcagacgtccgcctacaacatctccaactcctccaccttcaccaagtccctcagcagatacgagagcatgctgcgcacggccagcagccccgacagcctgcgctcgcgcacgcccatgatcacgcccgacctggagagcggcaccaagctgtggcacctggtgaagaaccacgaccacctggaccagcgtgagggtgaccgcggcagcaagatggtctcggagatctacttgacacggctactggccaccaagggcacactgcagaagtttgtggacgacctgtttgagaccatcttcagcacggcacaccggggctcagccctgccgctggccatcaagtacatgttcgacttcctggatgagcaggccgacaagcaccagatccacgatgctgacgtgcgccacacctggaagagcaactgcctgcccctgcgcttctgggtgaacgtgatcaagaacccacagtttgtgttcgacattcacaagaacagcatcacggacgcctgcttgtcggtggtggcccagaccttcatggactcctgctccacctctgagcacaagctgggcaaggactcaccctccaacaagctgctctacgccaaggacatccccaactacaagagctgggtggagaggtactatgcagacatcgccaagatgccagccatcagcgaccaggacatgagtgcgtatctggctgagcagtcccgcctgcacctgagccagttcaacagcatgagcgccttgcacgagatctactcctacatcaccaagtacaaggatgagatcctggcagccctggagaaggatgagcaggcgcggcggcagcggctgcggagcaagctggagcaggtggtggacacgatggccctgagcagctgagccccagctgtgatcatccagcatgatgcagcgtgaggacagctgagcagggaccgggacagccctcaccgcatgcgtgtggagtgtccggtggtgctcgggccgccgcagtgcagcgactgcccggccctccctcccctgcctcacccggtcgggtcccggctcttcctgtgtggaggtgatggtacctgccacaccacagctgcgcacacagctgcttgctcaggggccgggacagcactgggtgctcaggctggccaaggaccttcattgcctggcaagagctgcccagtggccttcatgggagaagggctgacctctgaggggctgaggggtgaggccagggccctccagggggaggggtagccagcttgggctgtccccttgagaccaggacaagaggctgggggtgtcagcattcccagctttccaagctgcccccaggcggcagagtctgagggtcccggggcccggttggcagctggagaaagaggcaaaaagcccgtagccgggcaagaggagctcaagtcggtctgggcccgttgccaccgactcccacctccagcacccatgcccgctgcaccgctgccatcctcagattcaccgcgtgctctgcgcggccgaggccggagcaccacatccacctcgccccagagaggctctgctccctcctatggaggggctgtgggccaggctgctcagactcctgggtggcttccagacggaccgggcagcccctctccgtcctcagggctgtgcctctgggagccactgggccaggggccccgggtcgcagagagcacgttcccgttatttattcccctccgcgtcctacacaggctgccctggcagctgtcttcaagggtaggctgagctccccaccctggagcccctgagggcggcccctgagcactcctctctctccactctctctgtccctgccccagcggcttccagtgtggcatctcagcagtgtcctggcccctccagagcagtgggacatctggggactgtttttgtgtttaggggaaaaaattctgctgcactctgcttgggccttgaggtctgtggcagggctcctctggcccgcagtggcctggatctatctgggccatgagtgacgggcagtgaccagagggactggaggccagcggtgtccacccttgccctcagcaagagagaatgcattcttaaaagaaagctgtacatgtatatatatgcatatatatatatgtggctctagcctcaggctccagccccagtggggtactgtacagttaactgaagaagaattttaaagacgatttgaacaagaaaatgaaggcagtgggaaagcaatgccaaatggttgtggagaaagtggccggagcctccctggagtggagcagccctgaagcctgtgccccccgacctgcgggccgctgttttggtttgacatgacaaggaaaggacttcctgctgaccctgagagcctctggggtgccgcggcaccacggggcatgcatgattgtgctagcgtttagtctgagttgatctttttaaaactgcaagtgttgaatactagaggttgttagacccttttttatgttttttaattaatcagtcacttgtaaaagcaaacaagcggtccatccccttttcaaggtcacttttttgatggtaccgaagatcccatggacattaagggacagctaactgtggccagactcagccccatgtccttggccaggcccaaggagaggactcggccccatggggtgtgccagtcttgcagtccgccccagctgagtagcgtgagccagatgacgccacagagacccgcctcttccctgaacgcgggtcggtgtggagtcagtgactgctgactcagggagctccttggccccgtgggcactgtgccagggctggggccttctgctgctgccacacccagctcaggcctgggccagcccctgcccccagcccactgagggggtgggcttactccctgggcagtcttgggggccagagctgaggccagtccatattacagtggctgggctgtttttttcagtagcccctagcattggctgggattcctgttcctgggtgcgcctccacctcccttctgatgtttcctggctatggtggggtgggaacctcagtttcccccaaagtcttccctggatgctggcttcaggttgaagtccctggttcttccagttcctcacgggttaggtaggggctcctgcatcaccttcagaatccagttccaacccccactctccttaggccttgtgctctgctctgccctgccaggctgcccttgtccatgtgagtagcatgggcgggtggtggggacggcagtggtgatgaagggggtgcaccacaggcctcatgaagcagttcccacatgggcgtgtggctggggcgtggccaccacagagcacatggctgtgtctaggcgcaagcactttagcagtatctgtttacatgcgcaaggatcaagccgactacctgtgctgtctactgggacagcagtctccgagctactccgtacctccctctgccaggtcgtggagttaggccccagtccctacttgtcactggttcccactgtgctcctaactgtgcagcacctgggagctctggcctggggctggaggccctggtaggagctgcagttggaggccgttctgtgcccagcagcggtgagcggctcccatgggccctgtgtctgcagggagccagggctgcggcacatgtgctgtgaaactggcacccacctggcgtgctgctgccgccacttgcttcctgcagcacctcctaccctgctccgtgtcctccctctccccgcgcctggctcaggagtgctggaaaagctcacgcctcggcctgggagcctggcctcttgatatacctcgagcttcccctgtgctccccagccccaggaccactggccccttggcctgaggggctgggggccccacgacctgcagcgtcgagtccgggagagagcccggagcggcgtgccatctcggctcggccttgctgagagcctccgccctggctttctccctgtctggattcagtggctcacgttggtgctacacagctagaatagatatatttagagagagagatatttttaagacaaagcccacaattagctgtcctttaacaccgcagaaccccctcccagaagaagagcgatccctcggacggtccgggcgggcaccctcagccgggctctttgcagaagcagcaccgctgactgtgggcccggccctcagatgtgtacatatacggctatttcctattttactgttcttcagatttagtacttgtaaataaacacacacattaaggagagattaaacatttttgctaaaagct

SEQ ID NO: 223383 - DNA, 5622 bp, Artificial Sequence
  derived and/or modified sequence
atgtgggccgaggccggactccccagagccggaggcggatctcagccacccttccggacttttagcgcctccgattggggattgacccatttagtcgtgcacgaacagacgggtgaagtgtatgttggcgctgtgaacaggatctataaactgtccggcaaccttactctcctgcgggcacacgtgaccgggccagttgaggataacgagaaatgttacccacccccaagcgtacaatcatgtccacacggcctcggaagcaccgataacgtaaacaagctgttgctgttggactatgccgctaacagactgctggcttgcggatccgcctcccaggggatttgccagttcctgcggctggacgacctctttaaactcggtgagccacaccacagaaaggaacattacctatcctccgttcaggaggctgggtcgatggccggagtgctcatcgctggacccccagggcagggccaggccaagctgttcgtgggcacccctatagatggcaagtctgaatactttccaaccctgtcttctcgccgactcatggccaacgaagaagacgccgatatgtttggcttcgtctatcaggacgaattcgtgagttctcagcttaaaatcccctcagatacattatcaaagttccctgctttcgacatctactacgtgtacagtttcagaagtgagcagttcgtctattatttgaccctacaactagacacccagcttacttcacccgacgcagccggtgagcatttctttaccagcaagatcgtcaggctgtgtgtcgatgaccctaagttttactcttacgttgagttccccattggctgtgagcaagccggtgtcgagtaccggttagtacaggacgcatacctgtctcgtcctgggagggccttggcccaccagttaggactcgcagaggatgaggacgttctctttaccgtatttgctcagggccagaagaatcgtgttaaacccccaaaggagagtgctctgtgtctgtttactctgagagccataaaggagaagattaaggagcgtatccagtcctgctatcgcggagaaggaaaactgagcctgccatggctcttgaacaaagagctgggttgtattaactctcctcttcagatcgatgatgacttttgtggccaagatttcaatcagccattagggggaactgttacaatagaaggcacgcccctatttgtcgacaaggacgatggcctcacagctgtggcggcatatgactataggggcagaaccgtggtgttcgcaggaactcgctcggggaggattcgcaaaatattagtagatctctccaatccaggaggccgacctgctctggcatacgaatcagttgtggctcaagagggatctcccattttgagagacctcgtgttgtctcctaatcaccaatacctctatgcaatgaccgagaaacaggtcaccagggtcccagtggagtcgtgtgtgcagtacacatcctgtgagctgtgtctgggcagtcgcgatccacattgtggttggtgcgtgctgcattcaatctgctcacggagagacgcttgtgagagagctgatgagccccaacggttcgcagctgaccttctgcagtgtgtgcagctgaccgtgcagccgagaaacgtctcagtgacaatgtcccaggtacccttggtcctccaggcctggaacgttccagatttgtcagcaggagtaaattgtagttttgaggactttactgagtctgagagcgtgctggaggatgggcgaatacattgtcggtctccctccgctcgagaagtcgcccctattaccagaggccagggggatcagagagtagtcaaattgtatctcaaatctaaggaaacagggaaaaagttcgcttcggtcgatttcgtgttctacaattgctccgtccatcagtcttgtcttagctgcgttaatgggtcctttccgtgtcactggtgcaagtataggcatgtctgcacccataatgtggctgattgcgcctttctggagggtagggtgaacgtgagtgaggattgccctcaaatcctgcccagcactcagatctatgtgcccgtgggtgtcgtgaagccgatcaccctggctgctcgcaaccttccccaacctcaatccggacagagagggtacgaatgtttatttcacattcccggttccccagccagagtgactgccttgaggttcaattcttcatctcttcagtgccagaacagttcttactcatacgaaggcaatgacgtcagtgatctccctgtgaacctgagcgtggtctggaatggcaactttgtaatcgacaacccacagaacatacaggcacatctgtacaaatgccctgccctcagagaatcctgtggcctttgtttgaaggccgatcctagattcgagtgtggatggtgtgtggccgagcggcgttgttcgcttcgccaccattgtgcggctgacactcccgctagctggatgcacgctcgtcacggaagctcacgctgcactgatcctaagatactgaagctctcacccgaaaccggcccacggcagggagggacccgcctcacaatcactggcgaaaatcttggccttcgctttgaggatgtgagattgggcgtgagggtgggcaaggtcctatgctctcctgtcgagtccgaatatatttctgctgagcagatcgtgtgcgaaattggcgatgcctcatccgtccgcgctcatgacgctttggtggaggtctgcgttagggattgttctccccactatagagcactgtctcccaagagattcacttttgtgaccccaactttttacagggtgagcccctctaggggccctctgtcaggcggtacatggataggcattgagggttctcatctgaacgccggatccgacgtggctgtctctgtgggcggaagaccctgctcctttagctggagaaactcaagagagatccgatgtctcacgccccctggacagagccccggatctgcgcctatcattatcaatatcaatcgagctcagctgacgaatcccgaagtgaaatataattacacagaagaccctacaatactgcgtatcgatcctgagtggagcataaactccggcggaactttgttgacagtcaccgggaccaatcttgccacagtgcgagagccacgtatccgcgcaaagtacggaggcattgaaagagagaatgggtgcctggtctacaatgacacaaccatggtatgtcgagcaccttcagttgcgaatcccgtgcggagtccaccagagttgggagagcggcctgacgaacttgggttcgtcatggataacgtccgttcactcctcgtattgaattccacctcttttctctactaccctgaccccgtgttggagccactcagcccaaccggactcctggaacttaagccctcaagccccctgatcctcaaaggaagaaacctgctgccaccagctcccggaaatagtcggctcaactacaccgtgctgattggctcaacaccatgtacgctcaccgtatcggaaacacagctgctttgcgaggcaccaaatctcaccggacagcacaaagtgaccgttagagcagggggatttgaatttagcccagggacactgcaggtctatagtgactctctgctcacactccctgccattgtgggaattggcggaggtgggggtcttctactcctcgtcatagtagctgtactgatcgcctataagcggaaatccagagatgctgaccggaccctgaagagattgcagcttcagatggacaatctggaatctagggtggctctagaatgtaaagaggcattcgccgaactgcagacagatattcacgagctgaccaacgacttagatggcgctggcatccccttccttgactatcgcacctatgccatgcgtgttctgtttcctggaatcgaggatcaccccgtcctcaaagaaatggaagtccaagcaaatgtggagaagagtcttaccctttttggtcaactcttgaccaaaaagcatttcctgttaacattcattcggactctagaggcacagcgctcgttcagcatgcgggaccgaggaaacgtcgcaagcctcatcatgaccgcactgcaaggtgagatggaatatgccactggcgtgctgaagcagctgctgagcgacctgatcgaaaagaacttagagagtaagaatcaccccaaactgctgctcaggagaaccgagtctgtcgctgagaaaatgttaacaaactggtttacatttctgctgtataagttccttaaggaatgcgcaggggagccactctttatgctgtattgcgctattaagcagcagatggagaagggcccaattgacgccattacaggggaggcacgctattccctgtccgaggataagttgatccgtcagcaaattgactacaagaccctgactctaaattgcgtaaacccagagaacgagaacgcacctgaggtgcccgtaaaaggtctggactgtgacaccgtgactcaagccaaagagaagctgctggatgcggcttacaaaggcgtaccgtattcacagaggccgaaggccgctgatatggatcttgagtggagacaaggcaggatggcgagaatcatcctccaggatgaagatgtgaccaccaagatcgacaacgactggaaaagactcaacacccttgcacactatcaagtgacagatggatcatccgtcgcactggtgcccaagcagactagcgcctataatatttccaatagctccacttttacaaaaagcctctccaggtacgagtctatgctgcggacagcgtctagtcctgatagcctcagaagccgcacacctatgatcaccccagatcttgagtctgggacaaaactgtggcatttggtcaaaaatcatgatcatctagaccagagggagggagatcggggaagcaagatggtaagtgagatctaccttactcggcttctggccacaaaagggacccttcagaaatttgtggacgatctgttcgagaccattttcagtaccgctcatcgagggagtgctctcccactggcaatcaagtatatgttcgacttcctcgacgaacaggctgacaagcaccagattcacgacgccgatgtgaggcacacctggaagtcgaactgcctaccactaagattttgggtcaacgtcataaagaacccccagttcgttttcgatattcacaaaaatagcatcactgatgcatgtctctcagtcgtcgcccaaacttttatggactcgtgctctacttcagagcacaagctaggcaaagattccccttcaaacaaactgctgtacgccaaggacatcccgaactataagagttgggtggaacggtattatgcggatatcgccaagatgcccgctatttcagatcaagacatgtctgcctacctcgcagagcaaagcaggctgcatcttagccaattcaacagtatgtctgcacttcacgaaatttatagttacattacgaagtacaaggatgaaatcctagcagccctcgagaaagacgaacaggcaagacgacaacgacttcgaagcaaactggaacaggtagttgatactatggccctcagctcatac

SEQ ID NO: 223384 - DNA, 5690 bp, Artificial Sequence
  derived and/or modified sequence
atgccactcccacccagaagccttcaggttttgctgctgctattgctgcttttactgctgctgcccggaatgtgggccgaagctggtttgccaagagctgggggagggagccagccgcctttcagaaccttcagcgcttccgattggggcctgacccacctcgtggtccatgaacaaacaggggaggtgtatgtcggcgcagttaatcgtatatataagttgtcgggtaatctcacattactgagagcccacgtgaccggacctgttgaagacaacgagaagtgttatccgcctccatctgttcagtcctgtccccacggcctgggctcaaccgacaacgtaaataaactgctcctgctggactatgcggcaaatcgtttgctggcctgtgggagcgcttcccaggggatctgccagttcctgcgcttggacgacctattcaagctgggcgagccccaccacagaaaggagcactacctctcgtccgttcaggaggcagggtcaatggcaggagtcctaatcgccggacccccagggcagggccaggccaagctgtttgtcggaactccaatcgatgggaagtccgaatacttccccactttgtcaagccgtaggttgatggcaaacgaagaagatgcagatatgttcggcttcgtgtatcaggacgaatttgttagtagtcagctgaagatcccctctgacaccctgagtaaatttccagcgtttgatatatactatgtctactccttcagatctgaacagttcgtctactacttgaccctgcagctggacacccagctgacatcccccgacgctgctggcgaacatttcttcacgagtaagatcgtgagactgtgtgtggacgacccaaagttttattcctatgtggagttccctatcggatgcgaacaggccggagtcgaataccggctggttcaggatgcctatctgagtaggccagggcgagcactcgcccatcagctggggttggccgaagacgaggatgtgcttttcactgtcttcgcccagggtcagaaaaatagagtaaaacctcccaaagaaagcgcactgtgtctgttcaccctcagggcaattaaagagaagatcaaagagaggatccagtcttgttaccggggagaaggcaaactgtcacttccatggctgctcaacaaggagttagggtgcatcaactccccactgcagatcgacgacgatttctgcggacaggatttcaaccagcctttaggtgggactgtaaccatcgaaggcactcccctgtttgtggacaaggacgatggactcacagctgtcgccgcttatgactaccgcggacggaccgtggttttcgcgggtactcgctctggccgtatcaggaagattcttgtggacctttctaaccccggagggcgtcccgcactggcctatgagagcgtggtcgcacaggaagggagccccattctccgagacctagtgttgtccccaaatcatcagtatttgtatgccatgaccgagaagcaggtcaccagagtgccagtcgagagttgcgttcaatacaccagctgtgagctgtgtctgggcagccgcgacccgcactgtggatggtgcgttctgcactcaatttgcagtcggagggatgcctgcgaacgcgcagatgagcctcagcggttcgctgctgatcttctccagtgcgtccagctgaccgtgcagcctaggaacgtaagtgtaacaatgtcacaggtccccctcgtactgcaggcatggaatgttccagacctatcagctggcgtgaattgctctttcgaagactttacagagtctgagtctgtactcgaagacggcagaatacactgccgctcaccgtctgccagagaagtggcccctattacccggggtcaaggagaccagcgtgtcgtgaagctatatcttaaaagtaaggagaccggcaaaaaattcgcgagcgtcgatttcgttttctacaactgcagcgttcaccaatcctgcctatcttgtgtgaatggatcttttccctgccactggtgtaaataccggcacgtctgtactcacaacgttgccgactgcgcgttcctcgaaggccgtgtgaacgtgtcagaagattgccctcagatactcccctctacacagatttacgtccctgtgggcgtcgtcaagcccatcactctggccgcacgcaaccttccccagccacagtctggccaaagaggctatgagtgtttgttccacatccctggttcccccgctagagtgaccgcgctgaggtttaacagcagctctcttcagtgtcaaaattccagttattcatatgagggaaacgatgtgtctgaccttcctgtaaacctgtcggtggtttggaacggcaacttcgtgatcgacaatcctcagaacatccaggcccatctgtacaaatgccctgctctgcgagaatcctgcggactctgcttgaaggctgatcccagattcgagtgcggatggtgcgtagccgaaaggcgctgtagtctgcgtcaccattgtgctgccgatacacctgcctcttggatgcacgctcgccatggaagctccaggtgcactgatccaaagatccttaagttgtctcccgagacggggcctcgacagggaggaacgcgactgaccatcacaggcgaaaatctcggcctgcggttcgaggatgtccgactcggagtacgcgtgggtaaggtgctgtgtagcccagtggaatctgaatacatctcagctgaacagatcgtatgtgagattggtgatgcatctagtgtgcgggcacatgatgccttggttgaggtgtgcgtgcgtgactgctcaccccactatagggcgctgtctccgaagcgttttacctttgtgacgcctaccttttaccgagtatctccctccaggggccctctgagcggcggaacctggatcgggattgagggaagccatctcaacgccggaagcgacgtggcggtgtcggtgggcggaaggccctgcagcttctcctggcgaaattctcgagagatcaggtgcctgactcccccaggccagtccccagggtcagcacccataataattaacattaatcgcgcacagctgacgaatccagaagtcaaatataactataccgaagatcctaccatactcagaatcgatccagagtggagtatcaattctggcggtactctcctcacagtcactggtaccaacctggcgaccgtacgcgagccgcgtatcagagccaagtacggcggaatagagcgcgaaaacggctgtctggtgtacaatgatacgacgatggtgtgcagggccccatcagttgcaaatcccgtacgcagtccccctgagttgggcgagcggcctgatgaattaggcttcgtcatggataatgtaaggtcacttctggtcctaaactcgaccagtttcctgtattaccccgaccctgtacttgaaccactgagtccaactggcctgctggaactgaaacctagcagtcctcttatattgaaggggagaaatcttctgccacctgcaccgggtaacagccgcttaaattataccgttctgatcggaagcacgccgtgtaccctgactgtgagcgagacccagctcctgtgcgaggctccaaatttgacagggcagcacaaagtgactgtgagagccggtggtttcgagttttcccctggcactctccaggtttacagtgactccctcttgactctccccgctatcgtagggatcggcggaggcggtggcctgctgctgctcgtgattgtagctgtactcatcgcatataaacggaaatcaagggatgccgacaggaccctgaagaggctccaactccagatggacaacttggagtctagagtagcactggaatgtaaggaggcattcgccgaattgcaaacagatattcacgagctgacaaatgatctggatggggctggcataccattcctggactacaggacatatgcaatgagagtgttatttcccggtatcgaggaccatcccgtgcttaaggagatggaggtccaggccaacgttgagaagagtctgacactattcgggcagctcttaacgaaaaaacactttcttctgactttcatcaggaccctagaagctcagcggtctttttcaatgagagatcgaggtaacgttgcttctttgatcatgactgcattgcagggagaaatggaatacgctacaggggtgttaaagcagctgctgagcgacttgattgagaaaaacctggagagtaaaaaccatccaaagctgctgctaaggaggacagagtcagttgccgaaaaaatgctcaccaactggttcacattcctgctgtacaaattccttaaggagtgcgctggcgagcctcttttcatgctgtattgcgccatcaagcagcaaatggagaaaggtcctattgacgcaatcaccggcgaagcccgatactccttgtccgaagataaattgatccggcagcagatagactacaaaactctgacactgaactgcgtaaaccctgaaaacgagaacgcccctgaggtgcccgtgaagggccttgactgtgacacagtgactcaagccaaagaaaaactgctggatgctgcctataaaggcgtgccatactctcagcggccaaaagccgctgatatggatctagaatggcgccaggggagaatggcacggatcatcctccaggatgaagacgtcactactaagattgataacgactggaagaggctcaataccttggctcattatcaagttacagatggctccagtgtggctctagtgcccaagcagacttctgcctacaacatttctaatagttcgacctttacaaaatcactgtcccggtatgaatcaatgctacggactgcttcaagcccagactccctgcgaagcagaacaccaatgataacaccggatttagagtccgggaccaagttatggcacttggttaaaaaccatgaccacctcgatcagcgggagggcgatcggggatcgaaaatggtgtccgaaatttatttaactcgcctgctggctacgaaaggcacactccagaagtttgtcgatgatctgtttgagacaatcttcagcacagcgcatcgcggaagtgcactgccactggcaataaaatacatgtttgattttcttgatgagcaagccgacaagcatcagatacatgatgctgacgttcggcatacgtggaagtcgaactgtctgcctctacgcttctgggtgaatgtcattaagaacccccaattcgtatttgatattcataaaaattcgatcactgacgcctgcctcagcgtggttgcccagacattcatggacagctgttcaacaagcgagcataagctggggaaagactcacctagtaataagcttttatacgccaaggacatcccaaactacaagtcctgggtcgaaagatactatgcggacattgccaaaatgccagccatcagcgatcaggacatgtccgcataccttgctgagcagtctagacttcatctcagccagttcaatagcatgtctgcgctccatgagatctattcttatatcactaaatacaaggatgaaatccttgcagccctggaaaaagacgagcaggcccgacgacagcggttgagaagtaaacttgaacaggttgttgatacaatggccttatcctccta

SEQ ID NO: 223385 - DNA, 5622 bp, Artificial Sequence
  derived and/or modified sequence
atgtgggccgaggccggcctgcccagagccggcggcggcagccagccccccttcagaaccttcagcgccagcgactggggcctgacccacctggtggtgcacgagcagaccggcgaggtgtacgtgggcgccgtgaacagaatctacaagctgagcggcaacctgaccctgctgagagcccacgtgaccggccccgtggaggacaacgagaagtgctaccccccccccagcgtgcagagctgcccccacggcctgggcagcaccgacaacgtgaacaagctgctgctgctggactacgccgccaacagactgctggcctgcggcagcgccagccagggcatctgccagttcctgagactggacgacctgttcaagctgggcgagccccaccacagaaaggagcactacctgagcagcgtgcaggaggccggcagcatggccggcgtgctgatcgccggcccccccggccagggccaggccaagctgttcgtgggcacccccatcgacggcaagagcgagtacttccccaccctgagcagcagaagactgatggccaacgaggaggacgccgacatgttcggcttcgtgtaccaggacgagttcgtgagcagccagctgaagatccccagcgacaccctgagcaagttccccgccttcgacatctactacgtgtacagcttcagaagcgagcagttcgtgtactacctgaccctgcagctggacacccagctgaccagccccgacgccgccggcgagcacttcttcaccagcaagatcgtgagactgtgcgtggacgaccccaagttctacagctacgtggagttccccatcggctgcgagcaggccggcgtggagtacagactggtgcaggacgcctacctgagcagacccggcagagccctggcccaccagctgggcctggccgaggacgaggacgtgctgttcaccgtgttcgcccagggccagaagaacagagtgaagccccccaaggagagcgccctgtgcctgttcaccctgagagccatcaaggagaagatcaaggagagaatccagagctgctacagaggcgagggcaagctgagcctgccctggctgctgaacaaggagctgggctgcatcaacagccccctgcagatcgacgacgacttctgcggccaggacttcaaccagcccctgggcggcaccgtgaccatcgagggcacccccctgttcgtggacaaggacgacggcctgaccgccgtggccgcctacgactacagaggcagaaccgtggtgttcgccggcaccagaagcggcagaatcagaaagatcctggtggacctgagcaaccccggcggcagacccgccctggcctacgagagcgtggtggcccaggagggcagccccatcctgagagacctggtgctgagccccaaccaccagtacctgtacgccatgaccgagaagcaggtgaccagagtgcccgtggagagctgcgtgcagtacaccagctgcgagctgtgcctgggcagcagagacccccactgcggctggtgcgtgctgcacagcatctgcagcagaagagacgcctgcgagagagccgacgagccccagagattcgccgccgacctgctgcagtgcgtgcagctgaccgtgcagcccagaaacgtgagcgtgaccatgagccaggtgcccctggtgctgcaggcctggaacgtgcccgacctgagcgccggcgtgaactgcagcttcgaggacttcaccgagagcgagagcgtgctggaggacggcagaatccactgcagaagccccagcgccagagaggtggcccccatcaccagaggccagggcgaccagagagtggtgaagctgtacctgaagagcaaggagaccggcaagaagttcgccagcgtggacttcgtgttctacaactgcagcgtgcaccagagctgcctgagctgcgtgaacggcagcttcccctgccactggtgcaagtacagacacgtgtgcacccacaacgtggccgactgcgccttcctggagggcagagtgaacgtgagcgaggactgcccccagatcctgcccagcacccagatctacgtgcccgtgggcgtggtgaagcccatcaccctggccgccagaaacctgccccagccccagagcggccagagaggctacgagtgcctgttccacatccccggcagccccgccagagtgaccgccctgagattcaacagcagcagcctgcagtgccagaacagcagctacagctacgagggcaacgacgtgagcgacctgcccgtgaacctgagcgtggtgtggaacggcaacttcgtgatcgacaacccccagaacatccaggcccacctgtacaagtgccccgccctgagagagagctgcggcctgtgcctgaaggccgaccccagattcgagtgcggctggtgcgtggccgagagaagatgcagcctgagacaccactgcgccgccgacacccccgccagctggatgcacgccagacacggcagcagcagatgcaccgaccccaagatcctgaagctgagccccgagaccggccccagacagggcggcaccagactgaccatcaccggcgagaacctgggcctgagattcgaggacgtgagactgggcgtgagagtgggcaaggtgctgtgcagccccgtggagagcgagtacatcagcgccgagcagatcgtgtgcgagatcggcgacgccagcagcgtgagagcccacgacgccctggtggaggtgtgcgtgagagactgcagcccccactacagagccctgagccccaagagattcaccttcgtgacccccaccttctacagagtgagccccagcagaggccccctgagcggcggcacctggatcggcatcgagggcagccacctgaacgccggcagcgacgtggccgtgagcgtgggcggcagaccctgcagcttcagctggagaaacagcagagagatcagatgcctgaccccccccggccagagccccggcagcgcccccatcatcatcaacatcaacagagcccagctgaccaaccccgaggtgaagtacaactacaccgaggaccccaccatcctgagaatcgaccccgagtggagcatcaacagcggcggcaccctgctgaccgtgaccggcaccaacctggccaccgtgagagagcccagaatcagagccaagtacggcggcatcgagagagagaacggctgcctggtgtacaacgacaccaccatggtgtgcagagcccccagcgtggccaaccccgtgagaagcccccccgagctgggcgagagacccgacgagctgggcttcgtgatggacaacgtgagaagcctgctggtgctgaacagcaccagcttcctgtactaccccgaccccgtgctggagcccctgagccccaccggcctgctggagctgaagcccagcagccccctgatcctgaagggcagaaacctgctgccccccgcccccggcaacagcagactgaactacaccgtgctgatcggcagcaccccctgcaccctgaccgtgagcgagacccagctgctgtgcgaggcccccaacctgaccggccagcacaaggtgaccgtgagagccggcggcttcgagttcagccccggcaccctgcaggtgtacagcgacagcctgctgaccctgcccgccatcgtgggcatcggcggcggcggcggcctgctgctgctggtgatcgtggccgtgctgatcgcctacaagagaaagagcagagacgccgacagaaccctgaagagactgcagctgcagatggacaacctggagagcagagtggccctggagtgcaaggaggccttcgccgagctgcagaccgacatccacgagctgaccaacgacctggacggcgccggcatccccttcctggactacagaacctacgccatgagagtgctgttccccggcatcgaggaccaccccgtgctgaaggagatggaggtgcaggccaacgtggagaagagcctgaccctgttcggccagctgctgaccaagaagcacttcctgctgaccttcatcagaaccctggaggcccagagaagcttcagcatgagagacagaggcaacgtggccagcctgatcatgaccgccctgcagggcgagatggagtacgccaccggcgtgctgaagcagctgctgagcgacctgatcgagaagaacctggagagcaagaaccaccccaagctgctgctgagaagaaccgagagcgtggccgagaagatgctgaccaactggttcaccttcctgctgtacaagttcctgaaggagtgcgccggcgagcccctgttcatgctgtactgcgccatcaagcagcagatggagaagggccccatcgacgccatcaccggcgaggccagatacagcctgagcgaggacaagctgatcagacagcagatcgactacaagaccctgaccctgaactgcgtgaaccccgagaacgagaacgcccccgaggtgcccgtgaagggcctggactgcgacaccgtgacccaggccaaggagaagctgctggacgccgcctacaagggcgtgccctacagccagagacccaaggccgccgacatggacctggagtggagacagggcagaatggccagaatcatcctgcaggacgaggacgtgaccaccaagatcgacaacgactggaagagactgaacaccctggcccactaccaggtgaccgacggcagcagcgtggccctggtgcccaagcagaccagcgcctacaacatcagcaacagcagcaccttcaccaagagcctgagcagatacgagagcatgctgagaaccgccagcagccccgacagcctgagaagcagaacccccatgatcacccccgacctggagagcggcaccaagctgtggcacctggtgaagaaccacgaccacctggaccagagagagggcgacagaggcagcaagatggtgagcgagatctacctgaccagactgctggccaccaagggcaccctgcagaagttcgtggacgacctgttcgagaccatcttcagcaccgcccacagaggcagcgccctgcccctggccatcaagtacatgttcgacttcctggacgagcaggccgacaagcaccagatccacgacgccgacgtgagacacacctggaagagcaactgcctgcccctgagattctgggtgaacgtgatcaagaacccccagttcgtgttcgacatccacaagaacagcatcaccgacgcctgcctgagcgtggtggcccagaccttcatggacagctgcagcaccagcgagcacaagctgggcaaggacagccccagcaacaagctgctgtacgccaaggacatccccaactacaagagctgggtggagagatactacgccgacatcgccaagatgcccgccatcagcgaccaggacatgagcgcctacctggccgagcagagcagactgcacctgagccagttcaacagcatgagcgccctgcacgagatctacagctacatcaccaagtacaaggacgagatcctggccgccctggagaaggacgagcaggccagaagacagagactgagaagcaagctggagcaggtggtggacaccatggccctgagcagctag

SEQ ID NO: 223386 - DNA, 5691 bp, Artificial Sequence
  derived and/or modified sequence
atgcccctgccccccagaagcctgcaggtgctgctgctgctgctgctgctgctgctgctgctgcccggcatgtgggccgaggccggcctgcccagagccggcggcggcagccagccccccttcagaaccttcagcgccagcgactggggcctgacccacctggtggtgcacgagcagaccggcgaggtgtacgtgggcgccgtgaacagaatctacaagctgagcggcaacctgaccctgctgagagcccacgtgaccggccccgtggaggacaacgagaagtgctaccccccccccagcgtgcagagctgcccccacggcctgggcagcaccgacaacgtgaacaagctgctgctgctggactacgccgccaacagactgctggcctgcggcagcgccagccagggcatctgccagttcctgagactggacgacctgttcaagctgggcgagccccaccacagaaaggagcactacctgagcagcgtgcaggaggccggcagcatggccggcgtgctgatcgccggcccccccggccagggccaggccaagctgttcgtgggcacccccatcgacggcaagagcgagtacttccccaccctgagcagcagaagactgatggccaacgaggaggacgccgacatgttcggcttcgtgtaccaggacgagttcgtgagcagccagctgaagatccccagcgacaccctgagcaagttccccgccttcgacatctactacgtgtacagcttcagaagcgagcagttcgtgtactacctgaccctgcagctggacacccagctgaccagccccgacgccgccggcgagcacttcttcaccagcaagatcgtgagactgtgcgtggacgaccccaagttctacagctacgtggagttccccatcggctgcgagcaggccggcgtggagtacagactggtgcaggacgcctacctgagcagacccggcagagccctggcccaccagctgggcctggccgaggacgaggacgtgctgttcaccgtgttcgcccagggccagaagaacagagtgaagccccccaaggagagcgccctgtgcctgttcaccctgagagccatcaaggagaagatcaaggagagaatccagagctgctacagaggcgagggcaagctgagcctgccctggctgctgaacaaggagctgggctgcatcaacagccccctgcagatcgacgacgacttctgcggccaggacttcaaccagcccctgggcggcaccgtgaccatcgagggcacccccctgttcgtggacaaggacgacggcctgaccgccgtggccgcctacgactacagaggcagaaccgtggtgttcgccggcaccagaagcggcagaatcagaaagatcctggtggacctgagcaaccccggcggcagacccgccctggcctacgagagcgtggtggcccaggagggcagccccatcctgagagacctggtgctgagccccaaccaccagtacctgtacgccatgaccgagaagcaggtgaccagagtgcccgtggagagctgcgtgcagtacaccagctgcgagctgtgcctgggcagcagagacccccactgcggctggtgcgtgctgcacagcatctgcagcagaagagacgcctgcgagagagccgacgagccccagagattcgccgccgacctgctgcagtgcgtgcagctgaccgtgcagcccagaaacgtgagcgtgaccatgagccaggtgcccctggtgctgcaggcctggaacgtgcccgacctgagcgccggcgtgaactgcagcttcgaggacttcaccgagagcgagagcgtgctggaggacggcagaatccactgcagaagccccagcgccagagaggtggcccccatcaccagaggccagggcgaccagagagtggtgaagctgtacctgaagagcaaggagaccggcaagaagttcgccagcgtggacttcgtgttctacaactgcagcgtgcaccagagctgcctgagctgcgtgaacggcagcttcccctgccactggtgcaagtacagacacgtgtgcacccacaacgtggccgactgcgccttcctggagggcagagtgaacgtgagcgaggactgcccccagatcctgcccagcacccagatctacgtgcccgtgggcgtggtgaagcccatcaccctggccgccagaaacctgccccagccccagagcggccagagaggctacgagtgcctgttccacatccccggcagccccgccagagtgaccgccctgagattcaacagcagcagcctgcagtgccagaacagcagctacagctacgagggcaacgacgtgagcgacctgcccgtgaacctgagcgtggtgtggaacggcaacttcgtgatcgacaacccccagaacatccaggcccacctgtacaagtgccccgccctgagagagagctgcggcctgtgcctgaaggccgaccccagattcgagtgcggctggtgcgtggccgagagaagatgcagcctgagacaccactgcgccgccgacacccccgccagctggatgcacgccagacacggcagcagcagatgcaccgaccccaagatcctgaagctgagccccgagaccggccccagacagggcggcaccagactgaccatcaccggcgagaacctgggcctgagattcgaggacgtgagactgggcgtgagagtgggcaaggtgctgtgcagccccgtggagagcgagtacatcagcgccgagcagatcgtgtgcgagatcggcgacgccagcagcgtgagagcccacgacgccctggtggaggtgtgcgtgagagactgcagcccccactacagagccctgagccccaagagattcaccttcgtgacccccaccttctacagagtgagccccagcagaggccccctgagcggcggcacctggatcggcatcgagggcagccacctgaacgccggcagcgacgtggccgtgagcgtgggcggcagaccctgcagcttcagctggagaaacagcagagagatcagatgcctgaccccccccggccagagccccggcagcgcccccatcatcatcaacatcaacagagcccagctgaccaaccccgaggtgaagtacaactacaccgaggaccccaccatcctgagaatcgaccccgagtggagcatcaacagcggcggcaccctgctgaccgtgaccggcaccaacctggccaccgtgagagagcccagaatcagagccaagtacggcggcatcgagagagagaacggctgcctggtgtacaacgacaccaccatggtgtgcagagcccccagcgtggccaaccccgtgagaagcccccccgagctgggcgagagacccgacgagctgggcttcgtgatggacaacgtgagaagcctgctggtgctgaacagcaccagcttcctgtactaccccgaccccgtgctggagcccctgagccccaccggcctgctggagctgaagcccagcagccccctgatcctgaagggcagaaacctgctgccccccgcccccggcaacagcagactgaactacaccgtgctgatcggcagcaccccctgcaccctgaccgtgagcgagacccagctgctgtgcgaggcccccaacctgaccggccagcacaaggtgaccgtgagagccggcggcttcgagttcagccccggcaccctgcaggtgtacagcgacagcctgctgaccctgcccgccatcgtgggcatcggcggcggcggcggcctgctgctgctggtgatcgtggccgtgctgatcgcctacaagagaaagagcagagacgccgacagaaccctgaagagactgcagctgcagatggacaacctggagagcagagtggccctggagtgcaaggaggccttcgccgagctgcagaccgacatccacgagctgaccaacgacctggacggcgccggcatccccttcctggactacagaacctacgccatgagagtgctgttccccggcatcgaggaccaccccgtgctgaaggagatggaggtgcaggccaacgtggagaagagcctgaccctgttcggccagctgctgaccaagaagcacttcctgctgaccttcatcagaaccctggaggcccagagaagcttcagcatgagagacagaggcaacgtggccagcctgatcatgaccgccctgcagggcgagatggagtacgccaccggcgtgctgaagcagctgctgagcgacctgatcgagaagaacctggagagcaagaaccaccccaagctgctgctgagaagaaccgagagcgtggccgagaagatgctgaccaactggttcaccttcctgctgtacaagttcctgaaggagtgcgccggcgagcccctgttcatgctgtactgcgccatcaagcagcagatggagaagggccccatcgacgccatcaccggcgaggccagatacagcctgagcgaggacaagctgatcagacagcagatcgactacaagaccctgaccctgaactgcgtgaaccccgagaacgagaacgcccccgaggtgcccgtgaagggcctggactgcgacaccgtgacccaggccaaggagaagctgctggacgccgcctacaagggcgtgccctacagccagagacccaaggccgccgacatggacctggagtggagacagggcagaatggccagaatcatcctgcaggacgaggacgtgaccaccaagatcgacaacgactggaagagactgaacaccctggcccactaccaggtgaccgacggcagcagcgtggccctggtgcccaagcagaccagcgcctacaacatcagcaacagcagcaccttcaccaagagcctgagcagatacgagagcatgctgagaaccgccagcagccccgacagcctgagaagcagaacccccatgatcacccccgacctggagagcggcaccaagctgtggcacctggtgaagaaccacgaccacctggaccagagagagggcgacagaggcagcaagatggtgagcgagatctacctgaccagactgctggccaccaagggcaccctgcagaagttcgtggacgacctgttcgagaccatcttcagcaccgcccacagaggcagcgccctgcccctggccatcaagtacatgttcgacttcctggacgagcaggccgacaagcaccagatccacgacgccgacgtgagacacacctggaagagcaactgcctgcccctgagattctgggtgaacgtgatcaagaacccccagttcgtgttcgacatccacaagaacagcatcaccgacgcctgcctgagcgtggtggcccagaccttcatggacagctgcagcaccagcgagcacaagctgggcaaggacagccccagcaacaagctgctgtacgccaaggacatccccaactacaagagctgggtggagagatactacgccgacatcgccaagatgcccgccatcagcgaccaggacatgagcgcctacctggccgagcagagcagactgcacctgagccagttcaacagcatgagcgccctgcacgagatctacagctacatcaccaagtacaaggacgagatcctggccgccctggagaaggacgagcaggccagaagacagagactgagaagcaagctggagcaggtggtggacaccatggccctgagcagctag

SEQ ID NO: 223387 - protein, 569 aa, Artificial Sequence
  derived and/or modified sequence
MPSSLFADLERNGSGGGGGGSSGGGETLDDQRALQLALDQLSLLGLDSDEGASLYDSEPRKKSVNMTECVPVPSSEHVAEIVGRQGCKIKALRAKTNTYIKTPVRGEEPVFVVTGRKEDVAMARREIISAAEHFSMIRASRNKNTALNGAVPGPPNLPGQTTIQVRVPYRVVGLVVGPKGATIKRIQQQTHTYIVTPSRDKEPVFEVTGMPENVDRAREEIEAHIALRTGGIIELTDENDFHANGTDVGFDLHHGSGGSGPGSLWSKPTPSITPTPGRKPFSSYRNDSSSSLGSASTDSYFGGGTSSSAAATQRLADYSPPSPALSFAHNGNNNNNGNGYTYTAGGEASVPSPDGCPELQPTFDPAPAPPPGAPLIWAQFERSPGGGPAAPVSSSCSSSASSSASSSSVVFPGGGASAPSNANLGLLVHRRLHPGTSCPRLSPPLHMAPGAGEHHLARRVRSDPGGGGLAYAAYANGLGAQLPGLQPSDTSGSSSSSSSSSSSSSSSSGLRRKGSRDCSVCFESEVIAALVPCGHNLFCMECANRICEKSEPECPVCHTAVTQAIRIFS

SEQ ID NO: 223388 - DNA, 1710 bp, Artificial Sequence
  derived and/or modified sequence
atgccttcaagcctcttcgcagacctggaaagaaatgggtcaggaggaggcggcggcggaagcagcggaggtggggaaacactcgatgaccagagggccctgcagctggccctcgatcagctgtcactactgggtttggattcagacgaaggtgcatccctgtacgacagcgagcctcgcaagaagtccgttaacatgacagaatgtgtcccggtgcccagtagtgaacacgtcgctgagatcgtcgggagacagggttgcaaaatcaaagcactgcgcgccaagactaatacatatatcaaaacccccgtgaggggagaggagcccgtttttgtggttaccggtcgaaaagaggacgttgctatggccagacgtgagatcataagcgctgccgaacatttttctatgattcgagctagccgcaataaaaatacggcgcttaatggggcagtaccagggcctcccaatttaccgggccaaaccacgatacaggtccgggtaccctacagggtggtcggtctagtggtcggcccaaagggagccaccattaaaagaatccagcagcaaacgcacacttacatagtcacacccagccgagacaaggagccagtctttgaggtcactggtatgcccgagaatgtcgatagagctagggaggaaatagaggctcatatagctctgagaactggcgggataatagagcttacagacgaaaatgattttcacgccaacggcacagatgtgggatttgacttgcatcacggaagcggaggcagcggacccgggtccctgtggtctaaaccaacccccagcatcactcctactcccggacgcaaacccttctcgtcctatagaaatgactcatcttcctcccttggcagcgcttctaccgactcttatttcggcggaggtacgtcatcatctgccgccgctacccagcgccttgccgattacagcccaccgagtcctgccctgtcatttgcccacaatgggaacaataacaataatgggaacggatacacatacactgctgggggagaggccagcgttccatctcccgacggttgtccagagctgcagccaacattcgacccagcccctgcaccccccccgggtgcacctttgatctgggcacagttcgagcgttcccccggggggggccctgcagctccagtgtccagcagctgttccagcagcgctagctctagtgccagcagctctagtgtagtgtttccgggaggcggtgcatccgccccgtcgaacgccaacctgggactgctagtccatcgaaggctgcaccccggcacatcttgcccaaggctgtcacctccattgcatatggcccccggcgccggagaacaccatctggcccgaagagtcagatctgaccccggaggcggcgggttggcctacgccgcctatgccaatgggctgggagctcagctacctggcctgcagccatccgatacttccggatcctctagctctagcagtagctcttcatcctcttcatctagtagttctggactccggcgaaagggcagtagagattgcagtgtctgcttcgaatccgaggtcatcgcggccctagttccttgcgggcataatctgttctgcatggagtgcgccaacaggatctgtgagaagagtgagccggagtgtccagtttgccacacggccgtcacgcaggctattagaatcttcagctag

SEQ ID NO: 223389 - DNA, 1710 bp, Artificial Sequence
  derived and/or modified sequence
atgcccagcagcctgtttgctgacctggagagaaatggcagcggcggcggcggcggcggcagcagcggcggcggggagaccctggatgaccagagggccctgcagctggccctggaccagctgagcctgctgggcctggacagtgatgaaggagccagcctgtatgattctgagcccaggaagaagtctgtgaacatgacagaatgtgtgcctgtgcccagcagcgagcacgtggccgagatcgtgggccggcagggctgcaagatcaaggccctgcgggccaagaccaacacctacatcaagacccctgtgcggggggaggagcctgtgtttgtggtgacaggcaggaaggaggatgtggccatggcccggcgggagatcatctctgctgctgagcacttctccatgatccgggccagcaggaacaagaacacagccctgaatggagctgtgcccggcccccccaacctgcccggccagaccaccatccaggtgcgggtgccctacagagtggtgggcctggtggtgggccccaagggggccaccatcaagaggatccagcagcagacccacacctacatcgtgacccccagccgggacaaggagcctgtgtttgaggtgacaggcatgccagaaaatgtggaccgggcccgggaggagattgaggcccacatcgccctgaggactggaggcatcatcgagctgacagatgaaaatgacttccacgccaacggcacagatgtgggctttgacctgcaccacggcagcggcggcagcggccctggcagcctgtggagcaagcccacccccagcatcacccccaccccaggcaggaagcccttcagcagctacagaaatgacagcagcagcagcctgggcagcgccagcacagacagctactttggaggcggcaccagcagcagcgctgctgccacccagaggctggccgactacagcccccccagccctgccctgagctttgcccacaacggcaacaacaacaacaatggaaatggctacacctacacagctggaggagaggcctctgtgcccagcccagatggctgcccagagctgcagcccacctttgatcctgccccagcccctcctcctggggcccccctcatctgggcccagtttgagaggagccctgggggcggccctgctgcccctgtgagcagcagctgcagcagcagcgccagcagcagcgccagcagcagctctgtggtgtttcctgggggcggggccagcgcccccagcaatgccaacctgggcctgctggtgcaccggcggctgcaccctggcaccagctgcccccggctgagcccccccctgcacatggcccctggagctggggagcaccacctggcccggcgggtgcggagtgaccccggcggcggcggcctggcctatgctgcctatgccaacggcctgggcgcccagctgcccggcctgcagcccagcgacaccagcggcagcagcagcagcagcagcagcagcagcagcagcagcagcagcagcagcggcctgcggaggaagggcagccgggactgcagcgtgtgctttgagagcgaggtgattgctgccctggtgccctgtggccacaacctcttctgcatggagtgtgccaaccgcatctgtgagaagtctgagccagaatgtcctgtgtgccacacagctgtgacccaggccatccgcatcttctcctag

SEQ ID NO: 223390 - DNA, 3528 bp, Artificial Sequence
  derived and/or modified sequence
tcaagaggcggggaggagaggaggaaaaagcgctgagtgagggcgggcgggcgggcgggagggagggagtggaggagccggggaggggctccttaaagaaacgcttctgtcgctcgcctgctcgcttttcgctcggcattgcggccagccagccgggcactcggggggcacgcgcggccaccgctagagctctgcccccaccccacccgccagcaggtctggggtggggacccaggtgggggctcctgcagccactgcccggtgcggaccgcacggagcgacccactcctcccagcaccgaggaagaagcaacggagccctcagcaggcgaccggcctccccgcccctgaccacccgcttcccggctgcctttgtggccgcagcttctcgccgccgagccgagggccggcgggggcgcggcgcgcacggccgagcgatgcccagctcgctgttcgcagacctggagcgcaacggcagcggcggcggcggcggcggcagcagcggagggggagagaccctggatgaccaaagagccctgcagctcgcgctcgaccagctctccctgctggggctggacagtgacgagggcgcctctctgtacgacagcgagccgcgcaagaagagcgtgaacatgaccgagtgcgtgccagtacccagttctgagcatgtcgccgagatcgtggggcggcaaggttgtaaaatcaaagcgctgcgggcgaagaccaatacttacatcaagaccccagttcgcggggaggagcctgtctttgttgtgacgggcaggaaggaggatgtggccatggctcggagggagatcatctctgctgccgagcacttctccatgatccgcgcctcccggaataagaacacggcactcaacggcgcggtgcctgggccgcccaacctgcccgggcagaccaccatccaagtgcgggtaccctaccgcgtggtggggctcgtggtggggcccaaaggcgccacaatcaagcgcatccagcagcagacgcacacgtacatcgtgacgcccagccgggataaggagccggtgttcgaggtgaccggcatgccagagaacgtggatcgcgctcgagaggagattgaggcgcacattgctctgcgtaccggcggcatcattgagctcacagacgagaacgacttccacgccaacggcaccgatgtgggcttcgatctgcatcatgggtccggcgggtccggcccaggcagcctctggagcaagcccacccccagcatcacgcccacccccggccgcaagcctttctctagctaccgcaacgacagctccagctcgcttggcagtgcttccacagactcttatttcggcggcgggaccagcagcagcgcagcggctacccagcgcctggcggactacagcccccctagccccgccctgagctttgcgcacaacggaaacaataacaataacggcaatgggtacacctacacagcggggggagaagcctcagtgccatcccccgacggctgccccgagctgcagcccacttttgacccggctcccgctcccccacctggggcaccacttatctgggcccagttcgagcggtccccgggaggcggacctgcagctccggtatcttcttcctgctcttcttctgcatcttcgtctgcttcttcctcctccgtggtcttccccgggggtggcgccagtgcgccctccaacgccaacctggggctattggtgcaccgccggctgcaccctggcaccagctgcccgcgcctgtctccacccttgcacatggccccgggggcgggagagcaccacctggctcgccgggtgcgcagcgacccgggtggaggaggcctggcctacgccgcttatgccaacgggctgggggcacagctgcctggcttgcagccgtcggacacgtcgggctcctcctcttcgtccagctcctcctccagctcttcatcctcttcctccgggcttcggcgtaaaggcagccgcgactgctccgtgtgcttcgagagcgaagtgattgccgcgctggtgccctgtggccacaacctcttctgcatggagtgcgccaatcgcatctgtgagaagagcgagcccgagtgcccggtctgccacaccgcggtcactcaggccatccgcatcttttcttaaaggcagcgggcgctgctagtgcgcaccgtgctgggggaagggggaacccctccccaccctctttccccagcgctcgcctgcctccctgggtgccccccctctcccttctccttcccggccccaccaacactctgagatccgagaggagcttggaaagctgtagtatccgctcatttttaaaatttaatttttaagtaaaggaatttgccaggatatctgcatcaagagtactgtagcctgggaaacctgaacacctgaaatgcatgctctataaataataggaacggcgacattctagtaatgatagtttttacactgtacttaataggaagcttccaaaagaagaaaaccccacaagttttccattttcttaaagtaggaaaaaatgaacagtaataattatgatgaagatgatagtagtgctatgggatgtgtggactgtttagtgtgttcccctttgtgggtgggttcctatgatacttattatagaacacagtggatcctttttgaatgttcgtggaagggccaggagttcctgtgaaaccaggatactgcagctttattaaagttaaagaaactgtaacatatctcttatatattaaaaacgtttaaaagttttaaagagaaattgcattaatacagattgaagtattttattcttttttgacttgaaaaattatatttcatattgcaaagatgtttacaagtattttaatttaagttcagtgaacttttttgtagctgggttaaatctttttattttagtatggccttatggcaaagaacactgtattattttaataatcacacaattgtgacggaattacaaccataaaatgtgtaatgttttgaacagtattctgttgggatggagattttataggttcagacaaatcttctagatctgcttcacccagcatattttctattcagtgatataaagcatattttattctatattattacaaaaacggaaatgtataaacatgtcaaaaagaactgttgatgctttctaacatttgtataaatagaattcagtgcaagttacaaaaattctgttgcaccactctagttttagtatttctattttaatacatttgtttaccacttgtttatgtatatgtaggtgatgttacttgagcttaaatgtactttactgagcaaagtttaaaaaacaaagtatattttattttatgataaagggcctttaacctcatggtcaaatactaatattatatttgctgagacaagatttgaaattgtatcaagagttttatttttctgacatttaaagttctacataataaaggtaaaacttaagtaatggtgctacttcattttttaagtatttctatataaataaaatattgaagaaaatctta

SEQ ID NO: 223391 - DNA, 1710 bp, Artificial Sequence
  derived and/or modified sequence
atgcccagcagcctgttcgccgacctggagcggaacggcagcggcgggggtggaggagggtcctctggagggggtgaaacactggacgatcaacgagctctgcagttggccctggaccagttgtcactcctggggcttgattcggacgagggcgcaagtctgtatgactcggaacccaggaaaaaatctgtgaatatgactgaatgcgttcccgtgccatcttccgagcatgtggctgaaattgtcgggaggcagggatgcaaaatcaaagctctgcgggcaaaaacaaacacttacataaaaaccccagttcggggagaagagccagtgttcgtggtgaccgggcggaaggaggacgtggcaatggctcgcagagagattatctctgctgccgaacacttctccatgatacgcgcctcccggaataaaaacaccgcactgaatggggctgtcccaggccccccaaacctacctggccaaactacgatccaggtcagagttccctacagagtcgtgggacttgttgtcggccctaagggagctaccataaaaaggatccagcagcagacccacacctacatcgtcactcctagcagagacaaggagcctgttttcgaagtgaccggaatgcctgaaaacgtggatagggcaagagaagagatcgaggcccatattgctttgagaacagggggaatcattgaactcacagacgaaaacgatttccacgccaatgggactgacgtaggctttgatctacatcatgggagcgggggctctggcccgggcagcctctggtctaaacctacgccatccatcacccccactcctggacgtaagcccttttctagttataggaacgacagttcaagttctctcgggtccgccagcactgactcctatttcggtggaggcacgtcatccagtgccgcagccacgcagagacttgcggattactcacctcccagtccggcactttctttcgcccacaacggaaacaacaataataacgggaacggatatacgtatactgctggaggggaggccagcgttcctagcccagacggctgtccagaacttcagcccaccttcgacccagctccggccccccccccgggcgcacctttaatctgggcccagttcgaacgcagccctggcggtggcccggcagcacccgtgtctagttcctgttcgtcaagcgcatcgtccagcgcctccagcagtagcgtcgtcttccccggcggaggggcaagcgccccttccaacgccaatctgggcttgctcgtgcaccgccggctacatcccggaacatcctgtccccggctctccccaccactgcacatggctcccggggccggagagcaccacctcgcgcgaagagttaggagcgatcccgggggcggagggttggcctacgccgcctacgctaatggcttaggagctcaattgcctggattgcagccatctgacacctccggcagttccagctctagttcatcgagcagcagctctagttcatcaagctccggtctccgccggaagggctccagagactgctctgtgtgctttgaatctgaggtaatcgctgcattggttccttgcggtcacaatttattttgcatggagtgtgcaaataggatttgtgaaaaaagcgagcccgagtgcccagtctgccacaccgccgtgacccaggccattcggatcttttcctag

SEQ ID NO: 223392 - DNA, 1710 bp, Artificial Sequence
  derived and/or modified sequence
atgcccagctctctgttcgcagaccttgaaagaaatggatccggcggtggaggtggaggttcttcgggcggtggcgaaaccctggatgaccaacgggcattgcagctggctctggatcaactgtctctgctaggtttggacagcgacgaaggagcttcactctacgatagcgagccaagaaaaaagagcgttaatatgacagaatgcgtaccagtccccagctccgaacacgtagcagagattgtggggagacagggatgcaagatcaaggcactgcgagcaaagaccaatacatatattaagactccagtgagaggtgaagagccagtgtttgtggtaaccgggaggaaagaagacgtggccatggccaggagagagattatttcagcggcagagcatttttccatgatcagggcttcccggaacaagaacaccgccctcaatggtgcagttccaggaccacccaatctccccggtcagactactattcaggtgcgggtgccttatagggtcgttggcctggtcgtgggccctaaaggcgcaaccatcaaaagaatccagcagcaaacccacacttacattgtgaccccgtcacgggacaaagaaccggtctttgaggtgacagggatgccggaaaatgttgaccgggctcgcgaagagatcgaggcacatatagccttgcgcacgggtgggattatcgagctcacggatgagaacgacttccatgccaatggaacggatgtgggctttgatctgcaccacggttcgggcggaagcggacctggctccctgtggagtaagccaacccccagcatcactcctacaccgggtcgaaaacccttcagttcttatcgtaatgattcaagctcgtctttgggatcagcctccactgactcttacttcggtggaggaactagtagcagcgctgccgcaacacagagactggctgactatagccccccttccccggctttaagttttgcccacaatggaaataacaataacaatggaaatggctacacctatactgcaggaggagaggctagcgtcccgtctccagacggctgtccagagcttcagcccacatttgatccggcacccgcaccgccacctggtgccccactgatctgggcccaattcgaacggtctcctggaggaggaccagcagcaccagtctcttcgtcgtgctcatcctcggcgtcctcttccgctagcagcagtagcgtggtatttcctggaggcggagccagcgctcctagcaacgcgaatttggggttgctcgttcaccgcaggttgcaccccggtacatcatgtccacgcctgtctcctccccttcatatggctcctggcgctggggagcaccatctggccaggcgagtccggtcagaccctggaggagggggactcgcttacgccgcttacgcaaacgggctgggcgcacagctcccagggctgcagccgagcgatacgagtggctcctcttctagctcatcatcgtccagcagctcttctagcagttcatcaggcctgagacggaaggggagcagggattgttccgtgtgcttcgaaagcgaggtcattgccgctctggtgccctgtggccacaatctcttttgtatggagtgcgcgaaccgcatttgcgagaagtctgagccagaatgcccggtctgccataccgctgttacccaggctattcggatcttctcatag

SEQ ID NO: 223393 - DNA, 1710 bp, Artificial Sequence
  derived and/or modified sequence
atgcccagcagcctgttcgccgacctggagagaaacggcagcggcggcggcggcggcggcagcagcggcggcggcgagaccctggacgaccagagagccctgcagctggccctggaccagctgagcctgctgggcctggacagcgacgagggcgccagcctgtacgacagcgagcccagaaagaagagcgtgaacatgaccgagtgcgtgcccgtgcccagcagcgagcacgtggccgagatcgtgggcagacagggctgcaagatcaaggccctgagagccaagaccaacacctacatcaagacccccgtgagaggcgaggagcccgtgttcgtggtgaccggcagaaaggaggacgtggccatggccagaagagagatcatcagcgccgccgagcacttcagcatgatcagagccagcagaaacaagaacaccgccctgaacggcgccgtgcccggcccccccaacctgcccggccagaccaccatccaggtgagagtgccctacagagtggtgggcctggtggtgggccccaagggcgccaccatcaagagaatccagcagcagacccacacctacatcgtgacccccagcagagacaaggagcccgtgttcgaggtgaccggcatgcccgagaacgtggacagagccagagaggagatcgaggcccacatcgccctgagaaccggcggcatcatcgagctgaccgacgagaacgacttccacgccaacggcaccgacgtgggcttcgacctgcaccacggcagcggcggcagcggccccggcagcctgtggagcaagcccacccccagcatcacccccacccccggcagaaagcccttcagcagctacagaaacgacagcagcagcagcctgggcagcgccagcaccgacagctacttcggcggcggcaccagcagcagcgccgccgccacccagagactggccgactacagcccccccagccccgccctgagcttcgcccacaacggcaacaacaacaacaacggcaacggctacacctacaccgccggcggcgaggccagcgtgcccagccccgacggctgccccgagctgcagcccaccttcgaccccgcccccgcccccccccccggcgcccccctgatctgggcccagttcgagagaagccccggcggcggccccgccgcccccgtgagcagcagctgcagcagcagcgccagcagcagcgccagcagcagcagcgtggtgttccccggcggcggcgccagcgcccccagcaacgccaacctgggcctgctggtgcacagaagactgcaccccggcaccagctgccccagactgagcccccccctgcacatggcccccggcgccggcgagcaccacctggccagaagagtgagaagcgaccccggcggcggcggcctggcctacgccgcctacgccaacggcctgggcgcccagctgcccggcctgcagcccagcgacaccagcggcagcagcagcagcagcagcagcagcagcagcagcagcagcagcagcagcggcctgagaagaaagggcagcagagactgcagcgtgtgcttcgagagcgaggtgatcgccgccctggtgccctgcggccacaacctgttctgcatggagtgcgccaacagaatctgcgagaagagcgagcccgagtgccccgtgtgccacaccgccgtgacccaggccatcagaatcttcagctag

SEQ ID NO: 223394 - protein, 159 aa, Artificial Sequence
  derived and/or modified sequence
MDVVEVAGSWWAQEREDIIMKYEKGHRAGLPEDKGPKPFGSYNNNIDHFGMQHETELPPLTAREVKQIRREISRKSKWVKMLGEWDTYKNSRKLIDRAYQGIPMNIRGPMWSVLLNIEEIKLKNPGRYQIMKEKGKRSSEHIQQMDLDAAGTTLHPPGV

SEQ ID NO: 223395 - protein, 291 aa, Artificial Sequence
  derived and/or modified sequence
MDVVEVAGSWWAQEREDIIMKYEKGHRAGLPEDKGPKSFGSYNNNVDHLGIVHETELPPLTAREVKQIRREISRKSKWVKMLGEWDTYKNSRKLIDRAYQGIPMNIRGPMWSVLLNIEEIKLKNPGRYQIMKEKGKRSSEHIQQMDLDVSGTLRRHIFFRDRYGTKQRELLYILLAYEEYNPEVGYCRDLSHIAALFLLYLPEEDAFWALVQLLASERHSLQGFHSPNGGTVQGLQDQQEHVVATSLPNTMWHQSASRRRPGVARGHVFGTGSLMPGPGMMTLCSSILGPL

SEQ ID NO: 223396 - protein, 291 aa, Artificial Sequence
  derived and/or modified sequence
MDVVEVAGSWWAQEREDIIMKYEKGHRAGLPEDKGPKPFRSYNNNVDHLGIVHETELPPLTAREAKQIRREISRKSKWVDMLGDWEKYKSSRKLIDRAYKGMPMNIRGPMWSVLLNIEEMKLKNPGRYQIMKEKGKRSSEHIQRIDRDVSGTLRKHIFFRDRYGTKQRELLHILLAYEEYNPEVGYCRDLSHIAALFLLYLPEEDAFWALVQLLASERHSLQGFHSPNGGTVQGLQDQQEHVVATSQPKTMGHQSASRRRPGVARGHVFATGSLIPGPGMRTLCSSILGPL

SEQ ID NO: 223397 - DNA, 480 bp, Artificial Sequence
  derived and/or modified sequence
atggacgtggtggaggtggccggcagctggtgggcccaggagagagaggacatcatcatgaagtacgagaagggccacagagccggcctgcccgaggacaagggccccaagcccttcggcagctacaacaacaacatcgaccacttcggcatgcagcacgagaccgagctgccccccctgaccgccagagaggtgaagcagatcagaagagagatcagcagaaagagcaagtgggtgaagatgctgggcgagtgggacacctacaagaacagcagaaagctgatcgacagagcctaccagggcatccccatgaacatcagaggccccatgtggagcgtgctgctgaacatcgaggagatcaagctgaagaaccccggcagataccagatcatgaaggagaagggcaagagaagcagcgagcacatccagcagatggacctggacgccgccggcaccaccctgcacccccccggcgtgtag

SEQ ID NO: 223398 - DNA, 876 bp, Artificial Sequence
  derived and/or modified sequence
atggacgtggtggaggtggccggcagctggtgggcccaggagagagaggacatcatcatgaagtacgagaagggccacagagccggcctgcccgaggacaagggccccaagagcttcggcagctacaacaacaacgtggaccacctgggcatcgtgcacgagaccgagctgccccccctgaccgccagagaggtgaagcagatcagaagagagatcagcagaaagagcaagtgggtgaagatgctgggcgagtgggacacctacaagaacagcagaaagctgatcgacagagcctaccagggcatccccatgaacatcagaggccccatgtggagcgtgctgctgaacatcgaggagatcaagctgaagaaccccggcagataccagatcatgaaggagaagggcaagagaagcagcgagcacatccagcagatggacctggacgtgagcggcaccctgagaagacacatcttcttcagagacagatacggcaccaagcagagagagctgctgtacatcctgctggcctacgaggagtacaaccccgaggtgggctactgcagagacctgagccacatcgccgccctgttcctgctgtacctgcccgaggaggacgccttctgggccctggtgcagctgctggccagcgagagacacagcctgcagggcttccacagccccaacggcggcaccgtgcagggcctgcaggaccagcaggagcacgtggtggccaccagcctgcccaacaccatgtggcaccagagcgccagcagaagaagacccggcgtggccagaggccacgtgttcggcaccggcagcctgatgcccggccccggcatgatgaccctgtgcagcagcatcctgggccccctgtag

SEQ ID NO: 223399 - DNA, 480 bp, Artificial Sequence
  derived and/or modified sequence
atggacgtggtggaggtcgcaggatcatggtgggctcaggagcgagaagatattattatgaagtatgaaaaagggcaccgggcaggcttgccagaagataaaggtcctaaaccgttcggttcttacaacaacaacatcgaccactttggcatgcaacatgagaccgagctgccacccctgactgcgagggaggttaaacagattcgccgggaaatctcaagaaagtctaaatgggtgaagatgctgggggaatgggacacatataagaactcccgcaaactgatcgatcgcgcctatcagggcataccaatgaacatccgaggacccatgtggtcagttctgctgaatattgaagagattaaattaaagaatcctggccgttatcagatcatgaaagagaagggcaaaagatcctcagaacacatacagcagatggacctagatgctgcaggcacgaccctgcacccccccggcgtttag

SEQ ID NO: 223400 - DNA, 876 bp, Artificial Sequence
  derived and/or modified sequence
atggacgtcgtggaggtggcgggaagctggtgggcacaggagagagaggacatcataatgaaatacgaaaaagggcatagggccggcctgcccgaagataagggaccaaagagctttggctcatacaataataatgtagaccacctgggaatagtgcatgaaacagaactgccgcctctgaccgcccgcgaagtcaagcagatcagaagggaaatttcccgtaagagcaagtgggtcaaaatgctcggtgagtgggacacttacaaaaactctagaaagctgattgacagagcctaccagggcataccaatgaatattcgcggaccaatgtggagcgtgttgctgaatatcgaggagattaaattaaagaatcccgggaggtaccagattatgaaggagaaggggaagcggtcatccgaacacatacaacagatggatcttgacgtgtccggtacactccgaaggcacatttttttcagagaccgttatggaactaaacagcgcgagctgttgtacatcttacttgcatacgaggagtataatcctgaggttggatactgcagagatctatcccacatagctgcattgtttctgctgtatctgcccgaagaagacgcattttgggcgctagttcagcttctcgcttctgaacggcactcactccagggtttccacagccctaacggtggcaccgtccagggcttgcaagatcagcaagaacacgtggttgccacaagccttcccaacaccatgtggcatcagagtgcctccaggagacgcccaggcgttgccaggggccacgtcttcggcaccgggagccttatgccaggtccgggtatgatgactctctgtagctccattctgggacccctctag

SEQ ID NO: 223401 - DNA, 480 bp, Artificial Sequence
  derived and/or modified sequence
atggatgtggtggaggtggccggctcctggtgggcccaggagcgggaggacatcatcatgaagtatgagaagggccaccgggccggcctgcctgaggacaagggccccaagcccttcggcagctacaacaacaacatcgaccacttcggcatgcagcatgaaacagagctgccccccctgacagcccgggaggtgaagcagatcagaagagagatcagcaggaagagcaagtgggtgaagatgctgggggagtgggacacctacaagaacagcaggaagctgattgaccgggcctaccagggcatccccatgaacatccggggccccatgtggagcgtgctgctgaacatcgaggagatcaagctgaagaaccctggccgctaccagatcatgaaggagaagggcaagaggagcagcgagcacatccagcagatggacctggatgctgctggcaccaccctgcaccccccaggagtgtag

SEQ ID NO: 223402 - DNA, 876 bp, Artificial Sequence
  derived and/or modified sequence
atggatgtggtggaggtggccggctcctggtgggcccaggagcgggaggacatcatcatgaagtatgagaagggccaccgggccggcctgcctgaggacaagggccccaagagctttggcagctacaacaacaacgtggaccacctgggcatcgtgcatgaaacagagctgccccccctgacagcccgggaggtgaagcagatcagaagagagatcagcaggaagagcaagtgggtgaagatgctgggggagtgggacacctacaagaacagcaggaagctgattgaccgggcctaccagggcatccccatgaacatccggggccccatgtggagcgtgctgctgaacatcgaggagatcaagctgaagaaccctggccgctaccagatcatgaaggagaagggcaagaggagcagcgagcacatccagcagatggacctggatgtgtctggcaccctgcggcggcacatcttcttccgggacagatatggcaccaagcagcgggagctgctgtacatcctgctggcctatgaggagtacaaccctgaggtgggctactgccgggacctgagccacatcgccgccctcttcctgctgtacctgcctgaggaggatgccttctgggccctggtgcagctgctggccagcgagcggcacagcctgcagggcttccacagccccaacggcggcaccgtgcagggcctgcaggaccagcaggagcacgtggtggccaccagcctgcccaacaccatgtggcaccagagcgccagcagaagaagacctggggtggcccggggccacgtgtttggaacaggcagcctgatgcctggccctggcatgatgaccctgtgcagcagcatcctgggccccctgtag

SEQ ID NO: 223403 - DNA, 480 bp, Artificial Sequence
  derived and/or modified sequence
atggacgtggtggaggtggccggcagctggtgggcccaggagcgggaggatatcatcatgaagtacgaaaagggccacagagctggcctgccagaggataaggggcccaaacctttcggcagttacaataataacattgaccattttggaatgcagcacgagactgagctacctcccctcaccgcccgggaagttaagcagatcagacgagagatctcccggaagtcgaagtgggtgaagatgctgggcgaatgggacacttacaaaaacagtcgaaagctgatagacagggcctaccagggcattccaatgaacattagaggcccaatgtggagtgtgctgctgaacatcgaggagataaaactcaaaaatcctgggcgataccagatcatgaaagaaaaagggaaacgatcttccgagcacattcagcaaatggacctggacgctgcagggacaacactgcaccccccgggcgtatag

SEQ ID NO: 223404 - DNA, 876 bp, Artificial Sequence
  derived and/or modified sequence
atggacgtggtggaggtggccggcagctggtgggcccaggagcgggaagacattatcatgaagtacgaaaaagggcatcgcgccgggctaccagaagataagggaccaaagtcgtttggttcgtataataacaacgttgaccatctgggcatagtgcacgaaacagaactgccccctctcactgcgagggaggtcaagcaaatccgtagagaaatctctcggaagtctaagtgggtcaaaatgcttggggaatgggatacgtataaaaacagccgcaagttgatcgatcgggcctaccagggtattcctatgaacattaggggacctatgtggagcgtactcctcaacatcgaggagattaagctgaaaaacccaggtagataccaaatcatgaaggagaaaggaaagcggtcatctgagcacattcagcagatggacctcgatgttagtggaacacttagacggcatatattcttccgcgaccggtatggaactaagcagcgggagcttttatatattctccttgcctatgaggagtacaatccggaagttggttactgccgggacctgtcccacatcgccgccttgtttctcctgtatctgcccgaagaggatgctttttgggccttagttcaattgctggcaagcgagcgtcactcgttacaaggcttccatagtcccaatggtggcaccgtgcagggactccaggaccagcaagagcacgttgttgctacctcactccctaatacaatgtggcaccagagtgcctcgcgacgaaggcccggggtggccagaggtcacgtgtttggcactggatctctaatgcctggaccagggatgatgaccctttgttcatctatccttgggcccctgtag

SEQ ID NO: 223405 - DNA, 480 bp, Artificial Sequence
  derived and/or modified sequence
atggatgtcgtagaagtggccggtagctggtgggcgcaagagcgcgaggatatcatcatgaaatatgagaagggacatcgtgcaggcctcccagaagacaaggggcctaagcccttcggatcatataacaataacatcgaccattttgggatgcaacatgaaacggagttgcctcctttgactgcacgggaggtgaaacaaattcggcgtgagatcagcaggaagtcgaagtgggttaagatgcttggtgaatgggacacctataagaactcccgtaagctgattgatcgggcataccagggcatacccatgaacatacggggtcctatgtggagcgtgcttctgaacattgaagaaattaagttgaagaatcccggaaggtatcagattatgaaggagaaagggaagagatccagcgagcacatccagcagatggatttggacgccgctggaaccacgctgcatccccctggggtatag

SEQ ID NO: 223406 - DNA, 876 bp, Artificial Sequence
  derived and/or modified sequence
atggacgtcgtcgaggtggcgggaagctggtgggcccaggaacgagaggacatcattatgaagtatgagaaagggcacagggcgggtctgccagaggacaaaggccctaaatctttcggcagttataacaacaacgttgaccatctgggcattgttcacgagacagaactgcccccactcactgctagggaggtcaagcagattcgacgggagatcagcagaaaaagtaaatgggttaaaatgctgggtgaatgggatacatataaaaacagtcgaaagttaatagacagggcttaccagggcataccgatgaacatacgcggacctatgtggtccgtgcttctgaatatcgaggaaataaagctgaagaatcctggcaggtatcagattatgaaagaaaaaggtaaacgatcttccgaacatatacagcaaatggatctggacgtctctggtaccctgcgcagacatatattctttagggatcgatacggtacaaagcagagagagttgctctatatcctactcgcttacgaggagtacaaccccgaggttggctattgccgggaccttagtcatatagccgcactgtttctcttgtatctgcccgaagaggacgccttctgggctctggtccagctcctcgctagcgagcgacactccctgcagggattccattctcccaatggcggtactgtgcagggactgcaggaccaacaggagcacgtggtagccacatctctgccgaatactatgtggcaccagagcgccagcagacgacgtcctggagtggctaggggccatgtcttcgggactggttcacttatgccgggtcctgggatgatgacactttgcagctcaatacttgggcctttgtag

SEQ ID NO: 223407 - DNA, 876 bp, Artificial Sequence
  derived and/or modified sequence
atggacgtggtggaggtggccggcagctggtgggcccaggagagagaggacatcatcatgaagtacgagaagggccacagagccggcctgcccgaggacaagggccccaagcccttcagaagctacaacaacaacgtggaccacctgggcatcgtgcacgagaccgagctgccccccctgaccgccagagaggccaagcagatcagaagagagatcagcagaaagagcaagtgggtggacatgctgggcgactgggagaagtacaagagcagcagaaagctgatcgacagagcctacaagggcatgcccatgaacatcagaggccccatgtggagcgtgctgctgaacatcgaggagatgaagctgaagaaccccggcagataccagatcatgaaggagaagggcaagagaagcagcgagcacatccagagaatcgacagagacgtgagcggcaccctgagaaagcacatcttcttcagagacagatacggcaccaagcagagagagctgctgcacatcctgctggcctacgaggagtacaaccccgaggtgggctactgcagagacctgagccacatcgccgccctgttcctgctgtacctgcccgaggaggacgccttctgggccctggtgcagctgctggccagcgagagacacagcctgcagggcttccacagccccaacggcggcaccgtgcagggcctgcaggaccagcaggagcacgtggtggccaccagccagcccaagaccatgggccaccagagcgccagcagaagaagacccggcgtggccagaggccacgtgttcgccaccggcagcctgatccccggccccggcatgagaaccctgtgcagcagcatcctgggccccctgtag

SEQ ID NO: 223408 - DNA, 876 bp, Artificial Sequence
  derived and/or modified sequence
atggatgtggtggaggttgctggctcctggtgggctcaggagcgagaggatattatcatgaagtatgagaagggacacagagcaggcctgccggaagataagggccccaaacccttccgcagctataacaacaatgttgatcatctgggaatcgtgcacgaaacagagcttcctcccctgactgctagagaggcaaagcagatcaggagggagattagtaggaaatccaaatgggttgatatgctcggagactgggaaaaatacaagtcttcccgcaagctaatcgatagggcttataaggggatgcccatgaatattcgagggccgatgtggagtgtactgctgaacattgaggagatgaagctgaaaaaccctgggcgatatcagattatgaaggaaaaaggaaaaaggtcctccgagcatatacaacgcatcgacagggacgtttctggcacacttcggaagcacatcttctttagggatcgatatggaactaaacaaagggaattgttgcatattctgctggcctacgaagagtataatcccgaggtgggctactgtagggatctctcacacattgcggcactctttctgttatacctccccgaagaggacgccttctgggctctggttcagctgctggcatccgagaggcacagtctgcagggtttccactctccaaatggcggtactgtgcagggtctccaggaccagcaggagcatgtggtggccacctcccaacctaaaactatgggacaccagtcagcatctcggcgccgccccggggtggccaggggccacgttttcgccactggatccctcatccccggaccgggaatgagaacactctgcagcagtatcctgggcccactgtag

SEQ ID NO: 223409 - DNA, 876 bp, Artificial Sequence
  derived and/or modified sequence
atggatgtggtggaggtggccggctcctggtgggcccaggagcgggaggacatcatcatgaagtatgagaagggccaccgggccggcctgcctgaggacaagggccccaagcccttccgcagctacaacaacaacgtggaccacctgggcatcgtgcatgaaacagagctgccccccctgacagcccgggaggccaagcagatcagaagagagatcagcaggaagagcaagtgggtggacatgctgggggactgggagaagtacaagagcagcaggaagctgattgaccgggcctacaagggcatgcccatgaacatccggggccccatgtggagcgtgctgctgaacatcgaggagatgaagctgaagaaccctggccgctaccagatcatgaaggagaagggcaagaggagcagcgagcacatccagagaattgacagagatgtgtctggcaccctgaggaagcacatcttcttccgggacagatatggcaccaagcagcgggagctgctgcacatcctgctggcctatgaggagtacaaccctgaggtgggctactgccgggacctgagccacatcgccgccctcttcctgctgtacctgcctgaggaggatgccttctgggccctggtgcagctgctggccagcgagcggcacagcctgcagggcttccacagccccaacggcggcaccgtgcagggcctgcaggaccagcaggagcacgtggtggccaccagccagcccaagaccatgggccaccagagcgccagcagaagaagacctggggtggcccggggccacgtgtttgccaccggcagcctcatccctggccctggcatgaggaccctgtgcagcagcatcctgggccccctgtag

SEQ ID NO: 223410 - DNA, 876 bp, Artificial Sequence
  derived and/or modified sequence
atggacgtggtggaggtggccggcagctggtgggcccaggagcgggaggacatcatcatgaagtacgagaaaggccatcgggcaggtctgccagaagataaaggtcctaagcccttccggagttataataacaacgtagatcacctcgggatcgtacatgagacagagttaccaccattgaccgcacgcgaagcgaagcagattagacgcgagatttctcggaaatcgaagtgggtagacatgcttggtgattgggagaagtataagagttccaggaagctgatcgaccgcgcctataagggtatgcccatgaacattcggggtccgatgtggagcgtgttgcttaatatagaagagatgaagttgaagaacccaggacgataccaaatcatgaaggaaaaaggaaagcggtccagcgagcatatacagcgcatcgatcgcgacgttagcgggactctgagaaaacatatcttttttcgggataggtacggtacaaagcagagagagcttctccatatcctgctggcctacgaagagtacaaccccgaggtgggttattgtcgcgatctgtctcacatagccgccctcttcctcttatatcttccagaggaggacgccttctgggcccttgtgcagctcctggcgtctgaaaggcacagcctccagggctttcatagtcccaacggaggtacagtgcagggcctgcaggaccagcaggaacatgtggtcgctacttcacagccgaaaacaatggggcaccagagcgcctcccgccggagacccggagttgcacgaggacacgttttcgcgaccggtagcctgatccccggacctggaatgcggacactgtgttctagcatcctgggacctctgtag

SEQ ID NO: 223411 - DNA, 876 bp, Artificial Sequence
  derived and/or modified sequence
atggatgtcgtggaggtggcgggaagctggtgggcccaggaaagggaggatatcataatgaagtatgagaagggtcatcgcgctggactgcctgaggacaaagggcctaagccattccggagctataataataacgtggaccacttgggcatcgtgcacgaaaccgaactgccacctctgaccgcacgtgaggcgaaacagatcagacgggagatctcccgcaaatctaagtgggtcgacatgctgggggactgggagaagtataaaagctcccgcaagctgatcgaccgcgcatataaaggaatgcctatgaatataaggggacccatgtggtccgttctcctgaacattgaggaaatgaaactgaaaaatccaggcaggtaccagatcatgaaggaaaaaggcaagcgctcaagcgaacatatccagcgtatagaccgggacgtgagtggcaccctcaggaaacacatatttttcagggatcgctatgggacaaaacaacgagaactgctgcacatcctgttagcttacgaggagtataacccggaagtgggatattgtagggatctatcacacatcgccgcattgttcctgctgtatttacccgaagaggatgctttctgggctttagtccaattattggcaagcgaacgccacagcttgcagggtttccattcccccaacggcggtaccgtgcaggggttgcaggaccagcaggagcatgtagtcgctacttcccagccaaagactatggggcatcaatccgcgtcccggaggcgaccaggggtggccagaggccatgttttcgctactggttctctgatccccggtcccggaatgcggaccctctgttcaagcatcctcggcccactatag

SEQ ID NO: 223412 - protein, 1984 aa, Artificial Sequence
  derived and/or modified sequence
MELTPGAQQQGINYQELTSGWQDVKSMMLVPEPTRKFPSGPLLTSVRFSNLSPESQQQDVKSLEFTVEPKLQSVKHVKLSSVSLQQTIKSVELAPGSLPQRVKYGEQTPRTNYQIMESSELIPRPGHQFAKYAEMIPQPKYQIPKSANLISIPIYHATESSEMAQGLAYKGIDTVEKSVGLTPKLTGRAKESLGMLLQPDLQVPKFVDLTPMVRDQGSKFLGLTPEKSYQILETMELLSQSRPRVKDVGELYMKPLQQTVEYEGITPELKHYFTEAMGLTAEARIQANEFFGMTPKPTSQATGFAERSPRLCPQNLECVEVISEKRLQGEESVVLIPKSLHHVPDSASGMTPGLGHRVPESVELTSKSGVQVEKTLQLTPKPQHHVGSPGIISGLGHQVPESVNLTCKQWLQMEESLEVPLKQTSQVIGHEESVELTSEARQHREVSMGLTKSKNQSMKSPGTTPGPLGRIVEFMRISPEPLDQVTESARTQLQVAQSEEVILIDVPKVVQSVKVTPGPPFQIVKSVTIPRPTPQMVEYIELTPKLQYVRPSEHHTGPCLQDVKSTKLITKPKHQILETVELTGFQIVKTMLIPGPSLQIVKSEELAPGPIPQVVEPIGVALESGIEAINCVDLLPRPHLQELIVPAELTPSPCTQVKSAELTSPQTSPFEEHTILTHKQGLQAVKSTVIKTEPPKVMETEDLNLGHVCQNRDCQKLTSEELQVGTDFSRFLQSSSTTLISSSVRTASELGGLWDSGIQEVSRALDIKNPGTDILQPEETYIDPTMIQSLTFPLALHNQSSDKTANIVENPCPEILGVDVISKETTKRKQMEELENSLQRHLPQSWRSRSRTFQAESGVQKGLIKSFPGRQHNVWESHAWRQRLPRKYLSTMLMLGNILGTTMERKLCSQTSLAERATADTCQSIQNLFGIPAELMEPSQSLPEKGPVTISQPSVVKNYIQRHTFYHGHKKRMALRIWTRGSTSSIIQQYSGTRVRIKKTNSTFNGISQEVIQHMPVSCAGGQLPVLVKSESSLSIFYDREDLVPMEESEDSQSDSQTRISESQHSLKPNYLSQAKTDFSEQFQLLEDLQLKIAAKLLRSQIPPDVPPPLASGLVLKYPICLQCGRCSGLNCHHKLQTTSGPYLLIYPQLHLVRTPEGHGEVRLHLGFRLRIGKRSQISKYRERDRPVIRRSPISPSQRKAKIYTQASKSPTSTIDLQSGPSQSPAPVQVYIRRGQRSRPDLVEKTKTRAPGHYEFTQVHNLPESDSESTQNEKRAKVRTKKTSDSKYPMKRITKRLRKHRKFYTNSRTTIESPSRELAAHLRRKRIGATQTSTASLKRQPKKPSQPKFMQLLFQSLKRAFQTAHRVIASVGRKPVDGTRPDNLWASKNYYPKQNARDYCLPSSIKRDKRSADKLTPAGSTIKQEDILWGGTVQCRSAQQPRRAYSFQPRPLRLPKPTDSQSGIAFQTASVGQPLRTVQKDSSSRSKKNFYRNETSSQESKNLSTPGTRVQARGRILPGSPVKRTWHRHLKDKLTHKEHNHPSFYRERTPRGPSERTRHNPSWRNHRSPSERSQRSSLERRHHSPSQRSHCSPSRKNHSSPSERSWRSPSQRNHCSPPERSCHSLSERGLHSPSQRSHRGPSQRRHHSPSERSHRSPSERSHRSSSERRHRSPSQRSHRGPSERSHCSPSERRHRSPSQRSHRGPSERRHHSPSKRSHRSPARRSHRSPSERSHHSPSERSHHSPSERRHHSPSERSHCSPSERSHCSPSERRHRSPSERRHHSPSEKSHHSPSERSHHSPSERRRHSPLERSRHSLLERSHRSPSERRSHRSFERSHRRISERSHSPSEKSHLSPLERSRCSPSERRGHSSSGKTCHSPSERSHRSPSGMRQGRTSERSHRSSCERTRHSPSEMRPGRPSGRNHCSPSERSRRSPLKEGLKYSFPGERPSHSLSRDFKNQTTLLGTTHKNPKAGQVWRPEATR

SEQ ID NO: 223413 - DNA, 312 bp, Artificial Sequence
  derived and/or modified sequence
atgtgtgggtcgtactaccgcaattacaatggagggcacggctacggttgttgtggctacgggggcctgggttgcggctacggcggttgtggttacggatgctgcgggtatggaggacttggcttcggctacgggggtttggactgtggatacggtggcctgggttgtggctacggtagtttctgtgggtgtggttatcggggactggattgcggatatgggtgcgggtacggatatgttagtcacagcttctgcggatgtggctacagatgcggatcgggatacggaagctcctttggctactactactag

SEQ ID NO: 223414 - DNA, 6200 bp, Artificial Sequence
  derived and/or modified sequence
gttaaatctgtggcctttgcatcgaagccatgctttcaagatgtaaaacctatggagctgacaccaggggcccaacagcaaggtataaattatcaagagttgacttcaggatggcaagatgtgaaatcaatgatgttggtaccagagccaactaggaagttcccatcaggaccactgttgactagtgtcagattttcaaatttgtctccagaatcacagcaacaggatgtgaaatctttggagtttactgtagagccaaagttgcaaagcgtaaaacatgtgaaattatcttcagtgtctctgcagcaaactataaaatctgtggaattagcaccagggtcactgcctcaaagagtgaaatatggggagcaaactccaagaacaaattatcaaatcatggaatcctctgaactaatccctagaccagggcatcagtttgcaaaatatgcagagatgatcccacagccaaagtatcaaatccctaaatctgcaaatttgatttcaataccaatttatcacgccacagaatcttcagaaatggcacaaggattggcatataaaggcatagatactgtagagaaatctgtggggttgaccccaaagctaacaggtagagctaaggaatccttagggatgctgctgcagccagatcttcaggtaccaaaatttgttgatctgactccaatggtaagggatcaaggctcaaaattcttaggattaactccagagaaaagctaccaaatcctagaaactatggaattgctctctcagtcacggccccgagttaaggatgtgggggagttatatatgaagccactgcagcaaactgtggaatatgaagggattactccggaactcaagcattactttacagaagctatggggttgaccgctgaggcaaggatacaagcaaatgaattctttggaatgaccccaaagccaacaagtcaagccactggatttgcagagagatccccaaggctctgtcctcaaaacttagaatgtgtggaggtgatctctgagaaaagactgcaaggggaagaatctgtggtattgattccaaagtcattacatcacgtcccagattctgcttcagggatgacacctgggttaggacatcgagttcctgaatctgtggagttgacttctaagtcaggagtgcaggtagagaaaactttgcaattaacccccaaaccacagcatcatgtgggatctccagggataatatcagggttaggacatcaagtcccagaatctgtaaatctgacctgtaagcaatggctacaaatggaggaatctttagaggtgcccctgaagcaaacaagtcaagttataggacatgaagaatctgtagagctcacctctgaggcacggcagcacagggaggtatcaatggggctaacaaagtcaaagaatcaaagtatgaaatctccagggacaaccccaggaccactgggtcgaattgtagaatttatgaggattagtccagagccactagatcaagtcacagaatctgcaaggacacagcttcaagttgctcaatctgaagaggtaatcctcatagatgtcccaaaagttgttcaatctgtgaaagtgacccctggaccaccatttcaaattgtaaagtctgtgacgataccaaggccaacccctcaaatggtagaatatattgagttgactccaaaactgcaatatgtgagaccttcagagcaccacacagggccatgtttgcaagatgtgaaatctacaaaattaatcacaaagccaaaacaccagattttggaaacagtggagttgacagggtttcaaattgtaaaaactatgttaatcccagggccatcccttcaaatcgtaaaatctgaggagttagcaccaggaccaattcctcaggttgtagaaccaataggagtagccctagaatcaggaattgaagcaataaattgtgtggatttacttccaaggccacatcttcaagaactgatagtacctgcagaattaactccaagtccatgtactcaagtgaagtctgcagaattaacctcaccgcaaacatctccatttgaggaacatacaatattgactcataaacaagggcttcaggctgtgaaatctacagtgataaaaacagagcctcctaaagttatggaaactgaggatttgaatctaggacacgtgtgtcagaatagggactgtcagaagttaacatcagaagagttacaagtagggactgacttctctaggttcctacaaagctcttcaaccacactcatttcaagctctgtcagaacagcatctgaattaggaggactttgggattctgggatacaggaagtatccagagctttggatataaaaaaccctgggacagatattttgcagcctgaagagacctatatagaccctactatgatacaatctttaacttttcctttggcccttcataatcaaagctccgataagacagctaacattgtggaaaacccatgtcctgagattctaggagtggatgtaatatctaaagagacaactaagaggaagcaaatggaggagctagagaactcacttcagagacatctaccacaaagctggagatcacgatctaggacattccaggcagaatcaggggttcagaaaggtctcatcaagtctttcccgggcagacaacacaatgtctgggagagtcatgcctggaggcagcgactaccaagaaaatatctctccactatgctaatgctggggaatattttagggaccactatggaaaggaagctttgttctcaaacatctttagcagaaagagccactgcagatacctgtcaatctattcagaatttatttgggattccagctgaactgatggaaccttcccagagcctgccagagaagggtccagttactatttctcagccttctgtggtcaaaaactatattcagagacatactttttatcatggtcataagaaaagaatggccttaaggatatggacacgtggctccacatcttccataatacagcaatactctgggactagagtgagaataaagaagacaaactcaacgttcaatggtatatcccaagaagtcattcaacatatgcctgtctcatgtgcagggggccagcttcctgtcctggtaaagtcagagtcttccctcagcatattttacgatagagaagatcttgttccaatggaagaaagtgaggactcacagagtgattcccagacaaggatttctgagtcccaacactccctcaagccaaattatctttcccaggccaagactgacttctcagaacagttccagttgctagaagatctgcagctaaaaatagcagcaaaactcttaaggagtcaaataccccccgatgtgcctccacctctagcttcaggtctagtcctaaaataccctatctgcctacagtgtggccgatgttcaggacttaattgccatcataaattacagaccacttcggggccttatcttcttatctatccacagctccaccttgtacgcactcctgaaggccatggtgaggttcggttgcatcttggctttaggctgagaattgggaaaagatcccaaatctcaaagtatcgtgaaagagatagacccgtcatacggagaagccctatatcaccatcacaaaggaaagctaaaatctatactcaagcttccaagagtcctacttccacaatagatttgcagtctgggccttcccagtcccctgctcctgtacaagtctacatcaggcgaggacaacgcagcaggcctgacttagtagaaaagacaaaaactagagcacctgggcactatgaattcactcaagttcacaacctaccagagagtgactctgaaagcactcagaatgaaaaacgggctaaagtgagaaccaaaaagacctctgattcaaaatatccaatgaagagaatcaccaagcgacttagaaaacacagaaagttctacacaaacagtagaaccacaatagagagtccttctagggaattagcagcccatttaagaaggaagaggattggagcaactcagacaagtactgcctctttaaaaagacaacctaagaaaccttcccaacccaagttcatgcaactgctttttcagagcctaaagcgggcattccaaacagcacacagagttatagcttctgttgggcggaagcctgtggacgggacaaggccagacaatttgtgggcaagcaaaaactattatccaaaacaaaatgccagggactattgcttaccaagcagtatcaaaagagacaagaggtcagctgacaagctaacgccagcaggctcaaccattaagcaggaggacatattgtggggaggaacggtccagtgcagatcagctcaacagccaagaagagcttactctttccaacccagacctcttcgactgcccaagcccacagattcccaaagtggtattgctttccaaactgcctcagtggggcagcctctgagaactgttcaaaaggacagtagtagcagatcaaagaaaaacttctatagaaatgaaacctccagccaggagtctaagaacttgtccacaccaggaaccagagttcaggcccgaggaagaatcctacctggttcccctgtgaagagaacctggcaccgacatcttaaagacaaactcacacacaaggagcataaccaccccagcttctatagggagagaaccccacgcggtccttctgagagaacccgtcataacccctcttggagaaaccatcgcagtccctctgagagaagccaacgcagttccttggagagaagacatcacagtccctctcagaggagccactgcagtccctctaggaaaaaccattccagtccttctgagagaagctggcgcagtccgtctcagagaaatcactgcagtccccccgagaggagctgtcacagtctctctgaaaggggccttcacagtccctctcagaggagccatcgcggtccctctcagagaagacatcacagtccctcagagagaagccatcgcagtccctcagagagaagccatcgcagttcctctgagagaagacatcgcagtccctcccagaggagccatcgcggtccctcagagagaagccattgcagtccctctgagagaagacatcgcagtccctctcagaggagccatcgtggtccctctgagagaagacatcacagtccctctaagagaagccatcgcagtcccgctcggaggagccatcgcagtccctcagagagaagccatcacagtccctctgagagaagccatcacagtccctctgagagaagacatcacagtccctctgagagaagccattgcagtccctctgagagaagccattgcagtccctctgagagaagacatcgcagtccctctgagagaagacatcacagtccctcagagaaaagccatcacagtccctctgagagaagccatcacagtccctctgagagaagacgtcacagtcccttggagaggagccgtcacagtctcttggagaggagccatcgcagtccctctgagaggagatctcacaggtcctttgagaggagccatcgtaggatttctgagagaagtcacagtccctcagagaagagccacctcagtcccttggaaagaagccgttgcagtccctctgagaggagaggacacagttcctctgggaaaacctgtcacagtccctctgagagaagccatcgcagtccctccgggatgaggcaagggaggacctctgagaggagccatcgcagttcctgtgagagaacccgtcacagtccctctgagatgaggccagggaggccctctgggaggaaccattgcagtccctctgagaggagccgacgcagtccccttaaggagggactcaagtacagtttccctggagagaggcccagccatagtttgtctagagatttcaagaatcaaacaactctcctcgggaccacacataaaaatcccaaagcagggcaagtgtggaggcctgaagctactcgatgaggcgaggtccgcccctattattcattgtcctaagtcttcatcgtgctgccctttccaggcttctttcctgctcagccactgcctccaattcctgcgcccccagcgtggaaaggcttccatttctctctaccgggggggaggcgggtgagaatgggtctgtaatttctctaagatgaataaaggggcagtaaatg

SEQ ID NO: 223415 - DNA, 5955 bp, Artificial Sequence
  derived and/or modified sequence
atggagctgacccccggcgcccagcagcagggcatcaactaccaggagctgaccagcggctggcaggacgtgaagagcatgatgctggtgcccgagcccaccagaaagttccccagcggccccctgctgaccagcgtgagattcagcaacctgagccccgagagccagcagcaggacgtgaagagcctggagttcaccgtggagcccaagctgcagagcgtgaagcacgtgaagctgagcagcgtgagcctgcagcagaccatcaagagcgtggagctggcccccggcagcctgccccagagagtgaagtacggcgagcagacccccagaaccaactaccagatcatggagagcagcgagctgatccccagacccggccaccagttcgccaagtacgccgagatgatcccccagcccaagtaccagatccccaagagcgccaacctgatcagcatccccatctaccacgccaccgagagcagcgagatggcccagggcctggcctacaagggcatcgacaccgtggagaagagcgtgggcctgacccccaagctgaccggcagagccaaggagagcctgggcatgctgctgcagcccgacctgcaggtgcccaagttcgtggacctgacccccatggtgagagaccagggcagcaagttcctgggcctgacccccgagaagagctaccagatcctggagaccatggagctgctgagccagagcagacccagagtgaaggacgtgggcgagctgtacatgaagcccctgcagcagaccgtggagtacgagggcatcacccccgagctgaagcactacttcaccgaggccatgggcctgaccgccgaggccagaatccaggccaacgagttcttcggcatgacccccaagcccaccagccaggccaccggcttcgccgagagaagccccagactgtgcccccagaacctggagtgcgtggaggtgatcagcgagaagagactgcagggcgaggagagcgtggtgctgatccccaagagcctgcaccacgtgcccgacagcgccagcggcatgacccccggcctgggccacagagtgcccgagagcgtggagctgaccagcaagagcggcgtgcaggtggagaagaccctgcagctgacccccaagccccagcaccacgtgggcagccccggcatcatcagcggcctgggccaccaggtgcccgagagcgtgaacctgacctgcaagcagtggctgcagatggaggagagcctggaggtgcccctgaagcagaccagccaggtgatcggccacgaggagagcgtggagctgaccagcgaggccagacagcacagagaggtgagcatgggcctgaccaagagcaagaaccagagcatgaagagccccggcaccacccccggccccctgggcagaatcgtggagttcatgagaatcagccccgagcccctggaccaggtgaccgagagcgccagaacccagctgcaggtggcccagagcgaggaggtgatcctgatcgacgtgcccaaggtggtgcagagcgtgaaggtgacccccggcccccccttccagatcgtgaagagcgtgaccatccccagacccaccccccagatggtggagtacatcgagctgacccccaagctgcagtacgtgagacccagcgagcaccacaccggcccctgcctgcaggacgtgaagagcaccaagctgatcaccaagcccaagcaccagatcctggagaccgtggagctgaccggcttccagatcgtgaagaccatgctgatccccggccccagcctgcagatcgtgaagagcgaggagctggcccccggccccatcccccaggtggtggagcccatcggcgtggccctggagagcggcatcgaggccatcaactgcgtggacctgctgcccagaccccacctgcaggagctgatcgtgcccgccgagctgacccccagcccctgcacccaggtgaagagcgccgagctgaccagcccccagaccagccccttcgaggagcacaccatcctgacccacaagcagggcctgcaggccgtgaagagcaccgtgatcaagaccgagccccccaaggtgatggagaccgaggacctgaacctgggccacgtgtgccagaacagagactgccagaagctgaccagcgaggagctgcaggtgggcaccgacttcagcagattcctgcagagcagcagcaccaccctgatcagcagcagcgtgagaaccgccagcgagctgggcggcctgtgggacagcggcatccaggaggtgagcagagccctggacatcaagaaccccggcaccgacatcctgcagcccgaggagacctacatcgaccccaccatgatccagagcctgaccttccccctggccctgcacaaccagagcagcgacaagaccgccaacatcgtggagaacccctgccccgagatcctgggcgtggacgtgatcagcaaggagaccaccaagagaaagcagatggaggagctggagaacagcctgcagagacacctgccccagagctggagaagcagaagcagaaccttccaggccgagagcggcgtgcagaagggcctgatcaagagcttccccggcagacagcacaacgtgtgggagagccacgcctggagacagagactgcccagaaagtacctgagcaccatgctgatgctgggcaacatcctgggcaccaccatggagagaaagctgtgcagccagaccagcctggccgagagagccaccgccgacacctgccagagcatccagaacctgttcggcatccccgccgagctgatggagcccagccagagcctgcccgagaagggccccgtgaccatcagccagcccagcgtggtgaagaactacatccagagacacaccttctaccacggccacaagaagagaatggccctgagaatctggaccagaggcagcaccagcagcatcatccagcagtacagcggcaccagagtgagaatcaagaagaccaacagcaccttcaacggcatcagccaggaggtgatccagcacatgcccgtgagctgcgccggcggccagctgcccgtgctggtgaagagcgagagcagcctgagcatcttctacgacagagaggacctggtgcccatggaggagagcgaggacagccagagcgacagccagaccagaatcagcgagagccagcacagcctgaagcccaactacctgagccaggccaagaccgacttcagcgagcagttccagctgctggaggacctgcagctgaagatcgccgccaagctgctgagaagccagatcccccccgacgtgcccccccccctggccagcggcctggtgctgaagtaccccatctgcctgcagtgcggcagatgcagcggcctgaactgccaccacaagctgcagaccaccagcggcccctacctgctgatctacccccagctgcacctggtgagaacccccgagggccacggcgaggtgagactgcacctgggcttcagactgagaatcggcaagagaagccagatcagcaagtacagagagagagacagacccgtgatcagaagaagccccatcagccccagccagagaaaggccaagatctacacccaggccagcaagagccccaccagcaccatcgacctgcagagcggccccagccagagccccgcccccgtgcaggtgtacatcagaagaggccagagaagcagacccgacctggtggagaagaccaagaccagagcccccggccactacgagttcacccaggtgcacaacctgcccgagagcgacagcgagagcacccagaacgagaagagagccaaggtgagaaccaagaagaccagcgacagcaagtaccccatgaagagaatcaccaagagactgagaaagcacagaaagttctacaccaacagcagaaccaccatcgagagccccagcagagagctggccgcccacctgagaagaaagagaatcggcgccacccagaccagcaccgccagcctgaagagacagcccaagaagcccagccagcccaagttcatgcagctgctgttccagagcctgaagagagccttccagaccgcccacagagtgatcgccagcgtgggcagaaagcccgtggacggcaccagacccgacaacctgtgggccagcaagaactactaccccaagcagaacgccagagactactgcctgcccagcagcatcaagagagacaagagaagcgccgacaagctgacccccgccggcagcaccatcaagcaggaggacatcctgtggggcggcaccgtgcagtgcagaagcgcccagcagcccagaagagcctacagcttccagcccagacccctgagactgcccaagcccaccgacagccagagcggcatcgccttccagaccgccagcgtgggccagcccctgagaaccgtgcagaaggacagcagcagcagaagcaagaagaacttctacagaaacgagaccagcagccaggagagcaagaacctgagcacccccggcaccagagtgcaggccagaggcagaatcctgcccggcagccccgtgaagagaacctggcacagacacctgaaggacaagctgacccacaaggagcacaaccaccccagcttctacagagagagaacccccagaggccccagcgagagaaccagacacaaccccagctggagaaaccacagaagccccagcgagagaagccagagaagcagcctggagagaagacaccacagccccagccagagaagccactgcagccccagcagaaagaaccacagcagccccagcgagagaagctggagaagccccagccagagaaaccactgcagcccccccgagagaagctgccacagcctgagcgagagaggcctgcacagccccagccagagaagccacagaggccccagccagagaagacaccacagccccagcgagagaagccacagaagccccagcgagagaagccacagaagcagcagcgagagaagacacagaagccccagccagagaagccacagaggccccagcgagagaagccactgcagccccagcgagagaagacacagaagccccagccagagaagccacagaggccccagcgagagaagacaccacagccccagcaagagaagccacagaagccccgccagaagaagccacagaagccccagcgagagaagccaccacagccccagcgagagaagccaccacagccccagcgagagaagacaccacagccccagcgagagaagccactgcagccccagcgagagaagccactgcagccccagcgagagaagacacagaagccccagcgagagaagacaccacagccccagcgagaagagccaccacagccccagcgagagaagccaccacagccccagcgagagaagaagacacagccccctggagagaagcagacacagcctgctggagagaagccacagaagccccagcgagagaagaagccacagaagcttcgagagaagccacagaagaatcagcgagagaagccacagccccagcgagaagagccacctgagccccctggagagaagcagatgcagccccagcgagagaagaggccacagcagcagcggcaagacctgccacagccccagcgagagaagccacagaagccccagcggcatgagacagggcagaaccagcgagagaagccacagaagcagctgcgagagaaccagacacagccccagcgagatgagacccggcagacccagcggcagaaaccactgcagccccagcgagagaagcagaagaagccccctgaaggagggcctgaagtacagcttccccggcgagagacccagccacagcctgagcagagacttcaagaaccagaccaccctgctgggcaccacccacaagaaccccaaggccggccaggtgtggagacccgaggccaccagatag

SEQ ID NO: 223416 - DNA, 5955 bp, Artificial Sequence
  derived and/or modified sequence
atggagttgacccctggcgcgcaacagcagggaattaattaccaggagcttaccagcggctggcaggacgtgaagtcaatgatgctcgttccggaacctacacgaaagttcccttccggccctctgctgaccagcgtcagattctccaacctcagccctgagtctcaacagcaggatgtcaagagcctcgagttcactgtggaacccaagctccagtcggtaaaacatgtgaagctgagcagcgtgagtctgcagcaaacaattaagagtgtggagttagcaccagggagcctgcctcaaagagtcaaatacggcgagcaaactcctcgaaccaactatcaaatcatggagagcagtgaactgattccacgtccaggacaccaatttgccaagtacgccgagatgattccccagcccaaataccagattcccaagtctgccaatctgatttccatccccatctatcatgctactgagtctagcgaaatggcccaggggctggcttacaaaggaatcgacacagtggaaaaaagtgtgggtttgactcccaaacttaccggccgggcaaaagaatccctcggtatgcttctgcagcctgacctgcaggtccctaaatttgttgatctgacacctatggtgagagatcagggcagtaaatttctgggcctcacccccgagaaaagctatcagatccttgagactatggagctgctcagccagtctcggcctcgagtgaaggacgtcggggagctgtacatgaaacctctgcagcagaccgtagaatatgagggtattacacccgaacttaagcattactttacagaggcaatgggtttgacggctgaagctcgaatacaggccaacgaattcttcggaatgacgcctaagcccaccagtcaggcaaccggatttgcggaacggtctccgagattatgtccacagaatctcgaatgcgtggaagtcatttcagagaaacgactccaaggagaagagagcgtggttcttatacctaaatccctgcatcacgtgcccgacagcgcaagtgggatgacaccggggctcggacaccgtgtcccagagagcgtggaactcacctccaaatctggcgtccaggtggagaagaccctgcagttaactccaaagccccagcaccacgtcgggtcccccgggattatctcagggctgggccaccaagtcccagagagtgtaaacctgacatgtaaacagtggcttcagatggaagaatcattagaggtgccccttaagcagacctctcaggtcatcggtcacgaggaatccgttgagctcacgagcgaagcacggcagcatcgcgaagtgtctatgggcctcactaagagcaaaaaccagtccatgaaatcccccggtacgacaccgggcccacttggccgcatagtcgaatttatgcgtatctcgccagaacccctggaccaggtaactgagtcagcacgaactcaacttcaggtcgctcagtccgaggaagtcatcctcatcgatgtgccaaaggtcgtccagtcagtgaaagtgacccctggtccgcctttccagatagtgaaatctgtcacaatcccgcgccctacccctcagatggtcgaatacatcgagctgacgccaaagctccagtacgtacggccaagcgaacaccataccggaccgtgcctccaggacgtgaagtccactaaactaattaccaagccaaagcaccagatcctggagaccgtggagcttaccggctttcaaatcgtaaagacgatgctgatccccggccccagcctccagatcgtcaagtccgaggagctcgcaccaggccctataccacaggtagtcgagccaattggagtggcactagagtcgggaatcgaagccattaattgtgttgacttgttaccccgcccacacctgcaggagctgatcgtcccagctgaattaacgccaagtccctgcacgcaggtaaaaagtgcagagttgacatctcctcagacatcaccatttgaggaacacaccatcttgacgcacaaacaggggctgcaggctgtcaagagtactgttatcaaaacggaaccaccaaaagtgatggaaaccgaggacttgaaccttggccacgtctgtcagaacagagactgccaaaaactcactagcgaagaactgcaggtggggacagacttttcccggttcctccaaagtagtagcaccacactcatctcatcctccgtccgcacagcttcggagttgggtggcctttgggactccggtatacaggaggtcagtcgggccttggacattaaaaaccctggcaccgacattctacagcccgaggaaacttacattgaccctaccatgatccaatcactcacattccccctcgcactacataaccaatcatccgacaaaacagcgaacatcgttgaaaatccgtgcccagaaatactgggcgttgacgtgatctctaaggaaactactaagaggaaacaaatggaagaactagaaaactccctccaacgccaccttcctcagagctggaggtcccgctcccgaacgttccaggccgagtccggcgtgcagaaaggtttgatcaaaagcttcccaggtcgccagcacaatgtttgggaaagtcacgcatggagacagcggctacccaggaaatacctgtcaaccatgttaatgctgggcaacattctcggaactactatggaacgcaaactctgttctcagacatctctagccgagagagctacagcagatacatgccagtctatccagaacttgttcggtatcccagcagaactgatggagccatcacagtccctgcctgagaaaggaccagtgaccatcagtcagccaagtgtggtcaagaattacatccagagacacaccttttatcatggccataagaagcggatggccctgcggatttggacccgcggttctacttcctctatcattcagcagtacagcggaacaagggtacgcatcaagaagacaaatagcaccttcaacggtatcagccaggaagttatccagcatatgcccgttagttgtgccggggggcaactaccggtgctagtaaagtctgagagcagcctctccattttttacgacagagaagacctggtgcctatggaggaaagtgaggattctcaaagtgactcacagaccagaatctccgagagtcagcactcactgaagcctaattacttatctcaggcaaagacggacttcagcgagcagttccagctcctcgaggatctgcagttgaaaattgctgctaaattgttgagatctcagatacctccggacgttcccccccctctggctagtggccttgtgctcaaataccctatatgtctgcagtgcggtaggtgctcgggactgaattgccaccacaaactacagacgacctccggtccttacttgttgatctacccacagctgcacctggttcgtactcccgagggccacggagaggtccggttgcacctggggttccgccttagaattggtaaaaggagccagatcagtaaatacagggaacgggacagacctgtaatcagaagatccccaatctcacccagccaacgcaaagcaaagatttacacccaggccagtaaatcgcctacatctacaatagacttacagtctggacccagccagtctccggcacctgtgcaggtctatattaggcgtggtcagaggtcaagacccgacttagtggagaagacaaagacacgggctccaggccactatgagttcactcaggtgcacaatctgccggaatcagattctgagtccactcaaaacgaaaagagagctaaagtccgcaccaaaaagacctctgactccaaataccccatgaagcgtatcaccaaacggctccggaaacacagaaagttttatacaaactcgaggaccactatcgaaagccccagcagagagctggccgcccacctgcggaggaaacggattggagctactcagacgtcaacagcctcattgaagcgacagcctaagaagccaagtcagccaaaatttatgcaactgctctttcagagtctgaaaagagcctttcagacagcccaccgagtgatcgctagtgtcgggcgaaagccggtcgacgggactagacctgacaatctctgggctagtaagaattattacccaaagcagaatgcccgcgactactgtctgccttcttctattaaaagagacaagcgctctgccgacaagctgactcccgcagggagcacaattaagcaggaggacatactgtggggcgggaccgtacagtgcaggagcgcgcaacaacccaggcgagcctacagctttcagccacggcctctccgcctgcctaaacctacggactctcagtcaggaatagccttccagaccgcatccgtaggtcagccattgaggacggtccagaaagattcttcgtctcggagcaaaaaaaacttttatcgcaatgagacctcttcccaggaaagtaagaatctcagcacgcccggcacgcgcgttcaggctcgcgggaggatattgccaggtagccctgtcaaaaggacatggcaccgccacctgaaggacaagctcactcacaaggagcataaccatcccagcttctatcgggaacgtacaccccgcggaccatctgagagaactagacataacccaagctggcgcaaccaccggagtccttctgagagaagccaaagaagcagcttggagaggcggcatcatagccccagccagagaagccactgcagcccctctaggaaaaatcactctagcccttccgaacgttcctggcgatctccaagccagaggaatcactgtagcccacccgaaagaagctgtcactctttgtcagagaggggcctgcacagccccagtcagcgctctcacaggggaccatctcagcggcgccaccattccccctctgaaaggtcacacagatcacccagcgagcgatcacaccggtctagttccgagcggcgccatcgcagcccatcccagaggtctcacagggggccaagtgagcggagccactgctctcctagcgagcgccgccatcggtctcccagtcagcgcagccacagaggacctagtgaacgaagacatcattcgccttcaaaacgatcccacagaagtcctgctagacgatcccatcggtcaccatcggagcgcagtcaccactcccctagcgagcgcagtcaccattcaccaagcgaacggaggcaccattcaccttccgagcgcagtcactgtagtccctcagagcgatcccactgttcgccatcagagcggaggcaccgttctccctccgagagaagacaccacagtccatccgaaaagagccaccattcaccgagtgagcgatcacaccattcgccaagtgaacgccgacgacactctccgcttgagcgaagcagacatagcttgctcgaacgatctcaccgttctccttcggagcgccggagccacaggtccttcgagcggtctcatcggaggatctcagagcgttcacactctccgtcagaaaagtctcacttgagccccctggagcgctcgagatgcagccccagtgaacgtagaggccactcatcaagcggaaaaacttgtcacagcccttccgaacgttcccaccgctctccatccggaatgagacagggccgcaccagcgaaaggtcccaccgatcttcctgcgagcggacacggcactcacctagcgagatgcggcccgggaggccatcaggcaggaaccactgcagcccgagcgagaggagcaggcgctcgcctctgaaagaagggctgaaatattctttccccggtgagcgaccctctcactcactctctcgggattttaagaatcagaccacccttttgggcacaactcacaaaaatccaaaggccggccaggtctggagacctgaggccactaggtag

SEQ ID NO: 223417 - DNA, 495 bp, Artificial Sequence
  derived and/or modified sequence
atggggcaaaaaaagacaatgggtacggagcgaagtagaggaggaaagaggggcccccaaccaggagctgagcggcccgaagagcccggcgccaccttctctaagaaaccccctgagggcgcccgggcgcctaggtgcctgagccgaccgacggcccctaagtccggcgcctgcttggctcggaggaggccccctggctcgccgtgttcgattcgcgacgcccctttccatacgggcgatgacaggtttctagctagggagaatttcccgaacgttctgcagcccttacctcggatgttcgccgtgcagcaagccgcggattttgagtcgcagtgcccaagacgctgggactcccgcaagcggccctcagaagggctgccatctgcgggctggggccgttggagaggtagacccatccatctcggcctgtgggtgagtgggtctgtgaggagaaaggtaagtggctcgcacgtgagtcggtctcttcatttgtag

SEQ ID NO: 223418 - DNA, 5955 bp, Artificial Sequence
  derived and/or modified sequence
atggagctgacccctggggcccagcagcagggcatcaactaccaggagctgaccagcggctggcaggatgtgaagtccatgatgctggtgcctgagcccaccaggaagttccccagcggccccctgctgacctctgtgcgcttcagcaacctgagccctgagagccagcagcaggatgtgaagagcctggagttcaccgtggagcccaagctgcagagcgtgaagcacgtgaagctgagctctgtgtccctgcagcagaccatcaagtctgtggagctggcccctggcagcctgccccagagggtgaagtacggggagcagacccccaggaccaactaccagatcatggagagcagcgagctgatccccaggcctggccaccagtttgccaagtatgcagagatgatcccccagcccaagtaccagatccccaagagcgccaacctgatcagcatccccatctaccacgccacagagagcagcgagatggcccagggcctggcctacaagggcatcgacacagtggagaagtctgtgggcctgacccccaagctgaccggccgggccaaggagagcctgggcatgctgctgcagcctgacctgcaggtgcccaagtttgtggacctgacccccatggtgcgggaccagggcagcaagttcctgggcctgaccccagagaagagctaccagatcctggagaccatggagctgctgagccagagccggccccgggtgaaggatgtgggggagctgtacatgaagcccctgcagcagacagtggagtatgagggcatcaccccagagctgaagcactacttcacagaggccatgggcctgacagctgaggcccgcatccaggccaatgagttcttcggcatgacccccaagcccaccagccaggccaccggctttgctgagaggagcccccggctgtgcccccagaacctggagtgtgtggaggtgatcagcgagaagaggctgcagggcgaggagagcgtggtgctgatccccaagagcctgcaccacgtgcctgacagcgccagcggcatgaccccaggcctgggccaccgggtgcctgagagcgtggagctgaccagcaagagcggcgtgcaggtggagaagaccctgcagctgacccccaagccccagcaccacgtgggcagccctggcatcatcagcggcctgggccaccaggtgcctgagagcgtgaacctgacctgcaagcagtggctgcagatggaggagagcctggaggtgcccctgaagcagaccagccaggtgattggccacgaggagagcgtggagctgaccagcgaggcccggcagcaccgggaggtgtccatgggcctgaccaagagcaagaaccagagcatgaagagccctggcaccaccccaggccccctgggcagaattgtggagttcatgaggatcagccctgagcccctggaccaggtgacagagagcgcccggacccagctgcaggtggcccagagcgaggaggtgatcctgattgatgtgcccaaggtggtgcagagcgtgaaggtgaccccaggcccccccttccagatcgtgaagtctgtgaccatcccccggcccaccccccagatggtggagtacatcgagctgacccccaagctgcagtatgtgcggcccagcgagcaccacacaggcccctgcctgcaggatgtgaagagcaccaagctgatcaccaagcccaagcaccagatcctggagaccgtggagctgaccggcttccagatcgtgaagaccatgctgatccctggccccagcctgcagatcgtgaagtctgaggagctggcccctggccccatcccccaggtggtggagcccatcggcgtggccctggagagcggcatcgaggccatcaactgtgtggacctgctgccccggccccacctgcaggagctgattgtgcctgctgagctgacccccagcccctgcacccaggtgaagtctgctgagctgaccagcccccagaccagcccctttgaggagcacaccatcctgacccacaagcagggcctgcaggccgtgaagagcaccgtcatcaagacagagccccccaaggtgatggagacagaggacctgaacctgggccacgtgtgccagaacagagactgccagaagctgaccagcgaggagctgcaggtgggcacagacttcagccgcttcctgcagagcagcagcaccaccctcatcagcagctctgtgaggacagccagcgagctgggcggcctgtgggacagcggcatccaggaggtgtcccgggccctggacatcaagaaccctggaacagacatcctgcagcctgaggagacctacatcgaccccaccatgatccagagcctgaccttccccctggccctgcacaaccagagcagtgacaagacagccaacatcgtggagaacccctgcccagagatcctgggcgtggatgtgatcagcaaggagaccaccaagaggaagcagatggaggagctggagaacagcctgcagaggcacctgccccagagctggaggagccgcagcaggaccttccaggccgagagcggcgtgcagaagggcctcatcaagagcttccctggccggcagcacaacgtgtgggagagccacgcctggaggcagaggctgcccaggaagtacctgagcaccatgctgatgctgggcaacatcctgggcaccaccatggagaggaagctgtgcagccagaccagcctggccgagcgggccacagctgacacctgccagagcatccagaacctgtttggcatcccagctgagctgatggagcccagccagagcctgcctgagaagggccctgtgaccatcagccagcccagcgtggtgaagaactacatccagaggcacaccttctaccacggccacaagaagaggatggccctgcgcatctggacccggggcagcaccagcagcatcatccagcagtacagcggcaccagggtgcgcatcaagaagaccaacagcaccttcaacggcatcagccaggaggtgatccagcacatgcctgtgtcctgtgccggcggccagctgcctgtgctggtgaagtctgagagcagcctgagcatcttctatgaccgggaggacctggtgcccatggaggagagcgaggacagccagagcgacagccagacccgcatcagcgagagccagcacagcctgaagcccaactacctgagccaggccaagacagacttcagcgagcagttccagctgctggaggacctgcagctgaagattgctgccaagctgctgcggagccagatccccccagatgtgcccccacccctggccagcggcctggtgctgaagtaccccatctgcctgcagtgtggccgctgcagcggcctgaactgccaccacaagctgcagaccaccagcggcccctacctgctgatctacccccagctgcacctggtgaggaccccagagggccatggagaggtgcggctgcacctgggcttccggctgcgcatcggcaagaggagccagatcagcaagtaccgggagcgggacaggcctgtgatccgccgcagccccatcagccccagccagaggaaggccaagatctacacccaggccagcaagagccccaccagcaccatcgacctgcagagcggccccagccagagccctgcccctgtgcaggtgtacatcagaagaggccagaggagcaggccagacctggtggagaagaccaagacccgggcccctggccactatgagttcacccaggtgcacaacctgcctgagagtgacagcgagagcacccagaatgagaagagggccaaggtgaggaccaagaagaccagtgacagcaagtaccccatgaagaggatcaccaagaggctgaggaagcacaggaagttctacaccaacagcaggaccaccatcgagagccccagccgggagctggccgcccacctgcggaggaagagaattggagccacccagaccagcacagccagcctgaagaggcagcccaagaagcccagccagcccaagttcatgcagctgctcttccagagcctgaagagggccttccagacagcccacagggtcatcgcctctgtgggcaggaagcctgtggatggcaccaggccagacaacctgtgggccagcaagaactactaccccaagcagaatgcccgggactactgcctgcccagcagcatcaagagggacaagaggtctgctgacaagctgaccccagctggcagcaccatcaagcaggaggacatcctgtggggcggcaccgtgcagtgccgcagcgcccagcagccccggcgggcctacagcttccagccccggcccctgcggctgcccaagcccacagacagccagagcggcatcgccttccagacagcctctgtgggccagcccctgaggacagtgcagaaggacagcagcagccgcagcaagaagaacttctacagaaatgagaccagcagccaggagagcaagaacctgagcaccccaggcaccagggtgcaggcccggggccgcatcctgcccggcagccctgtgaagaggacctggcaccgccacctgaaggacaagctgacccacaaggagcacaaccaccccagcttctaccgggagaggaccccccggggccccagcgagaggaccaggcacaaccccagctggaggaaccacaggagccccagcgagaggagccagaggagcagcctggagcggcggcaccacagccccagccagaggagccactgcagccccagcaggaagaaccacagcagccccagcgagaggtcctggaggagccccagccagaggaaccactgcagccccccagagaggagctgccacagcctgtctgagcggggcctgcacagccccagccagaggagccaccggggccccagccagaggaggcaccacagccccagcgagaggagccacaggagccccagcgagaggagccacaggagcagcagcgagcggcggcacaggagccccagccagaggagccaccggggccccagcgagaggagccactgcagccccagcgagcggcggcacaggagccccagccagaggagccaccggggccccagcgagcggcggcaccacagccccagcaagaggagccacaggagccctgcccggcgcagccacaggagccccagcgagaggagccaccacagccccagcgagaggagccaccacagccccagcgagcggcggcaccacagccccagcgagaggagccactgcagccccagcgagaggagccactgcagccccagcgagcggcggcacaggagccccagcgagcggcggcaccacagccccagcgagaagagccaccacagccccagcgagaggagccaccacagccccagcgagaggagaagacacagccccctggagaggagccgccacagcctgctggagaggagccacaggagccccagcgagcggcgcagccacaggagctttgagaggagccaccggcgcatcagcgagaggagccacagccccagcgagaagagccacctgagccccctggagaggagccgctgcagccccagcgagcggcggggccacagcagcagcggcaagacctgccacagccccagcgagaggagccacaggagccccagcggcatgaggcagggccgcaccagcgagaggagccacaggagcagctgtgagaggaccaggcacagccccagcgagatgaggcctggccggcccagcggcaggaaccactgcagccccagcgagaggagcagaagaagccccctgaaggagggcctgaagtacagcttccctggagagcggcccagccacagcctgagccgggacttcaagaaccagaccaccctgctgggcaccacccacaagaaccccaaggccggccaggtgtggaggcctgaggccaccaggtag

SEQ ID NO: 223419 - DNA, 5955 bp, Artificial Sequence
  derived and/or modified sequence
atggagctgacccccggcgcccagcagcagggcatcaactaccaggagcttacatctggttggcaggatgtaaaaagcatgatgctggtcccagagcccactcgcaaatttcccagcggcccactccttacctctgtgcgtttctctaacctgtccccagagtcccagcagcaggatgtaaaatctctggaattcaccgtggaaccgaaactccagtctgtgaaacatgtaaagctgtcaagcgtctctctgcagcaaacaataaaaagcgttgaactggcccctgggtctctaccccagcgggtcaagtatggtgagcagacaccccggaccaactaccagattatggaatcctccgagttgatacctagaccaggacaccaatttgcaaaatatgctgaaatgatcccacaacccaagtatcaaatccctaagtcagccaacttgatttcgattcccatataccacgccaccgaaagctccgagatggctcagggactggcatacaagggaatagatactgtagaaaagtcagtcggcctcacacctaagttgacagggcgggctaaggagtcacttggtatgctcttgcagcctgacctgcaagtcccgaaattcgtcgacctgacccccatggttcgagaccagggctccaagtttctgggcctcacgccagagaagagctatcaaattttggagacaatggaacttctctctcagagtcgtcctagagtcaaggacgtgggcgagctgtatatgaagcctctgcaacagacagtcgagtatgaaggtatcaccccggaactgaaacactacttcactgaggctatggggcttactgccgaggcacgtatacaagccaacgaattctttggtatgaccccgaaacccacaagtcaggccacaggatttgccgagcgtagcccccgcctgtgccctcagaatctggagtgcgtggaagtgatctcagaaaaacgtctgcagggcgaagagagtgtcgtgctgatccctaaatctctgcaccacgtccccgactctgcctctgggatgaccccaggcctaggacatcgtgtgccagaatctgtcgaattaacgagcaaatctggcgtgcaggtagagaagacgctgcagttgactccaaaaccccagcaccatgtgggatcgcctgggattatcagcggtctaggtcatcaggtacccgagagcgttaacttaacctgtaaacagtggttacaaatggaagaaagtcttgaagtccctctaaaacagacatctcaggtaattggtcatgaagagagcgtagaactcacgtctgaggcaaggcagcaccgagaagtgtcaatggggctgacaaagtccaagaatcaatccatgaagtcaccaggcactacgccgggtcccctgggccggatcgtggaatttatgcggatttctcctgagccgcttgaccaggtgacggaatctgcgcgcacccagctccaagttgcccagagtgaggaggttatactgatagacgtgcccaaggtcgtgcagtctgtgaaagtcacccccgggcctccattccaaatcgtaaagtctgttactatacccaggcccaccccacagatggtggagtacatcgagctcacccctaaactgcagtacgtccgcccttccgaacaccacacaggcccctgcctgcaggatgtcaagagcacaaagctgatcaccaaacctaaacatcaaatcctcgagacggtggagttgacaggatttcagattgtgaagacaatgttgatacccgggccctccctccaaattgtgaagtctgaagagctagctcctgggccgataccgcaggtcgtcgagcctatcggggtggcactggaaagcggaatagaagcgatcaactgtgtggaccttctaccaaggccccacctgcaggaactcattgtgccagccgaactaactccatccccttgcactcaggtgaaaagtgccgaactcacatctccgcagacctctccattcgaagaacatacgattttgactcataagcaggggctccaagccgttaaatccaccgtcattaaaaccgagccgcccaaggtgatggaaacagaagatctcaacctcggccacgtgtgccaaaaccgagactgtcagaagttgaccagcgaagagttacaggtgggcacggacttcagccggtttttacagagttccagtactacactgatcagctcctccgtgcgtacggcatccgagctgggcgggttatgggatagcggcattcaggaggtgtcacgggccctggatattaagaatcccggcaccgatattcttcagccagaggagacgtatatcgaccccaccatgatccagagtctcactttcccattagctctgcacaaccagtcttccgacaaaaccgcgaacattgttgaaaatccctgccccgagatccttggtgttgatgtgattagtaaggagactactaagcggaaacaaatggaggaactcgagaatagcctgcagagacatctccctcagagctggaggagtcggagccgcaccttccaagccgagagtggcgtgcaaaaaggtctgattaaatcctttccaggccgccagcacaacgtatgggagtcacacgcttggcgtcagagactgcccaggaagtatctatccaccatgctgatgctgggaaacatcctggggacgacaatggagagaaagctgtgtagccagacctcgctcgccgagagggcgaccgcggatacgtgccagagtattcaaaatctgtttggcatcccggccgagctcatggagccctctcagtcactgcctgagaagggcccggtgacaatctctcaaccctccgtagtgaagaattacattcagaggcataccttttatcatgggcacaaaaaacgaatggcactgagaatctggacacgggggtctaccagcagtattattcaacaatatagtgggacacgagtgcgcatcaagaagacaaactccactttcaacggtatatcccaagaggtgattcagcacatgccagtcagctgtgcgggcggccagttgcccgtactagtgaagagcgaatcatccctgagcattttctacgatcgggaggatctggttccgatggaagagtccgaggactcacagtccgacagccagacacgcatctctgaaagtcagcactcacttaagcccaattacttatcacaggctaagaccgatttttccgagcagttccagctcctcgaggacttgcagttgaagattgcagccaagctgctccgctcccaaattcccccggacgtaccccccccactggcctcaggcttagtgctgaagtaccccatatgtctgcaatgtggacgatgcagcggcctcaactgtcaccacaagctccagactacaagtgggccctatttgctgatctatccgcagctccatctggtaagaacacccgaagggcacggggaggttagactacatctcggctttagactgcgcattggaaaacggagtcagatctccaagtatagagaaagagatcgacctgttatcagaagaagcccgatctcacccagccagaggaaggccaagatctacacccaggcttcgaagtctcctacctccacaatcgatctgcaatcagggccgtctcagtctcctgcccctgttcaggtatacatcaggcgaggacagcgcagtcggccagacctagtggagaagactaaaacaagagcccccgggcattacgagtttactcaggtgcataatctgcccgaaagcgattctgagagcactcagaatgaaaagcgagccaaagttagaaccaagaaaacctccgactcaaaatacccaatgaaaaggattacgaagaggcttagaaaacatcggaagttctacacaaacagtcggacaactatagagtccccaagtcgggaattggccgctcatctcaggcggaaacggatcggggcgacccaaacatcgaccgctagcctgaaacggcagcctaaaaaacccagccagcccaagtttatgcagttgcttttccagtctctgaaaagggcttttcagaccgcccaccgcgtcattgccagtgtggggaggaaaccggtagacggaacgcgccctgacaatctgtgggcctctaagaactactaccctaaacaaaatgcaagagactactgtctgccctccagcatcaaacgggataagcggagcgcagacaagctcacacctgccggcagcaccatcaagcaggaagacatactctggggcggaacagtccaatgccgctctgcccagcagccccgccgggcttacagtttccagccacgtcctctgaggcttcctaaacccacggattctcaatctggcatcgccttccagacagcctctgtgggccagcctctgcgcacagtacagaaggattccagttcacgctccaaaaagaatttctatcggaatgagacttcctcacaagagtcgaagaacttatctacacctgggactagagtccaggctcggggtcggatcctcccaggttcccccgtgaagaggacttggcaccgacatctcaaagataagcttacgcacaaggaacataaccacccttcattttacagggagcggaccccccggggcccttctgaacgtaccagacataacccatcatggaggaatcacaggagtccctctgaacgaagccaaaggtcttccctggaacggcggcaccactccccgagtcagcgcagccattgttctccaagtcgaaagaaccattcgtcccctagtgaacggtcttggcggtcaccctcgcagagaaatcattgtagcccccctgagcggtcctgtcactctctctccgagagagggctgcattccccatctcaacgatctcacagagggccatcgcaacgaaggcaccatagcccttctgagaggagtcataggtcaccctccgagagaagccacaggtcgagcagcgaaaggcgtcatagaagtccttctcagaggagtcaccgaggcccaagtgagaggagccattgttctcccagcgaaagacgtcacagatctccatctcagagaagccatcgcggtccgtctgagaggcgccaccattcaccttctaagaggtcacacagatcgcccgcacgccgctcccatcggagtccttcggagagatcccaccacagcccctcagagaggagtcatcatagtccgtcagagcgcagacaccacagtccttctgagaggtcacattgctccccgagtgaacggtctcactgttcaccttccgaaaggagacaccgttccccttccgaaaggcggcaccattctccttctgaaaaaagccatcacagtccatccgagaggtcacaccacagcccatccgagcgtcgacgacattctcccttagaaagatctcgacatagcttactggagagatcacacaggagcccctcagaaaggaggtctcaccgcagtttcgaacgcagccacaggcgtatcagtgaacgctcgcatagtccctcagaaaaaagtcatttgagtcccctggagcgtagcaggtgttccccaagtgagcgtaggggacatagcagtagcggtaagacctgccactcccctagcgagcgctcacacaggagcccctcggggatgcgccagggcagaaccagtgaacgatcacaccgctcctcctgtgaaagaactcgccatagtcccagcgagatgaggcccggtagaccatcagggcggaaccactgcagccccagtgaacggtctagaagatctcctcttaaagagggcctgaagtattcatttcctggggagcgaccctcacattctttgagtcgcgacttcaaaaaccagacaactctgctcggaaccacgcataagaatcccaaggcaggccaggtctggcgccctgaggctacaaggtag

SEQ ID NO: 223420 - DNA, 5954 bp, Artificial Sequence
  derived and/or modified sequence
atggaattgacgcctggggctcagcagcaggggatcaactatcaggaattgacatcaggttggcaagacgttaaaagtatgatgctggtacccgaaccgaccaggaaattcccatccggccctctactcacctccgtaaggtttagtaacctttcaccggaatcccagcaacaggatgttaaaagtttggaatttactgtcgaacctaagctacagtcagtgaagcacgtgaagctgtctagcgtcagtctgcagcagacaataaagagcgtcgaactggcgcctggttcccttcctcagagagtgaagtatggagaacaaactccgcgaacaaactaccagataatggaatccagcgaattaatacctaggcctggacatcagtttgccaagtacgctgaaatgataccgcaaccgaagtaccagatacccaagagtgccaatctgatatctatccccatctatcacgcaaccgaatcatccgagatggcccaaggcctcgcatataaagggattgataccgtagagaaatctgtggggttaacccctaagctgacagggagagcaaaagagtctctgggaatgctcttacagcctgatctgcaggtccccaagtttgtggatctgacccctatggtgagggaccagggctctaaatttctcggactgactccagagaaaagctatcagatccttgagactatggagctgcttagccagtcgagacctagagtgaaggacgtgggcgaactgtacatgaagcctctccagcagactgtggaatacgagggcatcactcccgaactcaagcactactttaccgaggccatggggctgacagcggaggctaggatccaggcaaatgaattttttggaatgacaccaaaacccactagtcaggcgactggatttgccgaacggagccccaggctgtgtccccaaaatctggagtgcgtggaagtgatctccgagaagagactccaaggcgaggaatctgtcgttctcatcccgaaatctcttcaccacgtacctgattccgcatctggcatgactcctggcctcgggcatagagttcctgaaagtgttgagctgacgtccaagtctggtgttcaggtggagaaaacgctgcagctcacgccgaagccccagcaccatgtgggctcacctggcattattagcggcctgggccatcaggtacccgagagtgttaacctgacttgcaaacagtggcttcagatggaggaatcgctagaggtaccattgaaacagaccagtcaggtgataggacacgaggaatcagtcgagctcacctcagaagctcgacagcacagggaggtctctatgggtctcaccaagtccaagaatcagtcgatgaagtcccccggtacaactcctggtcctctggggaggatcgtggaattcatgaggatttcgcccgagccgctggatcaagtgactgagtctgcccgaacgcagctgcaggtcgcccagagcgaggaggtcatcctgattgacgttcccaaagttgtgcagagcgtcaaggttacaccagggcctccattccagattgtaaaatccgtgactattcccaggcccaccccccaaatggttgagtacattgaacttacacccaaattgcagtatgtccggcctagcgagcaccatactgggccttgccttcaggacgtgaagtctactaaactcatcacaaagccgaagcaccagattctggaaaccgtagagctgactggattccaaattgtgaaaactatgctgatcccagggccatctctgcagatagttaagagcgaagagctggctcctggaccaattccacaagtggtcgagcctattggggtagctctggaaagcggtatcgaagccattaattgtgtcgatctgttacctcggcctcatttgcaggaactaatcgtccccgcagagctcacccctagcccatgtacgcaggtcaaaagcgcggagctgactagtcctcaaacctcaccctttgaggagcatactatcctaacccacaagcagggtcttcaggctgtcaaatctactgtcatcaagacagaaccacccaaggtcatggaaaccgaagatctgaaccttggtcacgtatgccagaaccgtgattgccagaagttgacatctgaggagctacaggtcggcacagactttagccgtttcttacagtcgtctagtaccacattgatttccagcagcgtaagaactgcaagcgaactcgggggactgtgggattccggcattcaggaagtcagccgtgctttagatataaagaacccgggtacagatattcttcagcccgaagagacatatattgaccctacaatgattcaatcccttacctttcccttagctctgcataatcagtcttctgacaaaacagccaatatagtcgaaaacccatgccccgaaattctcggcgtcgacgtgatctccaaagaaacgaccaagcgaaagcaaatggaagaactcgagaattctctgcagaggcacctgccacagtcttggagatcacgttcgaggaccttccaggccgaatctggcgttcagaaggggcttataaagtcattcccgggaagacagcacaacgtctgggagagtcacgcctggcgccaacgactccctaggaagtacctgtcaacaatgctcatgttgggcaatatcttaggcaccaccatggaacgtaagctgtgtagccagaccagcctcgcggagcgtgctactgcagatacatgccagagcattcaaaacttgtttggaatcccagcagaactgatggaaccatctcagtcccttccagaaaaagggccagtgacaatttcccagccttccgtagtgaagaattacatccagaggcacacattctatcacggacataagaaaagaatggccttgcggatttggactaggggatcaacaagctccattattcagcagtactctggcactagagtgcggataaagaagactaacagtacgttcaatggaatttcacaggaggtcattcagcacatgcctgtgagctgcgccggaggtcagctgccagtgcttgtgaagagcgagtccagcctgtctattttttatgaccgggaggatcttgtgcccatggaagagtctgaagattcccagagtgacagccagactcgaatcagcgaatctcagcactcacttaagcctaactacctgtctcaggcaaaaactgacttctctgagcaattccagctgttggaagatctgcagttgaagatagcggctaagctgctgcggagccagattccacccgatgtccctccgcctctcgcttcagggttggtactgaagtatcctatctgtctgcagtgtggccgttgtagtgggttgaactgtcaccataagttgcagacgacatcaggcccttacctgctgatctaccctcagctccacttggtccgcactccagaaggccacggagaggtgagactccatctgggattccggctgagaatcggaaaaagatcccagatttctaagtatcgggagcgcgacagaccagtgatccggcgtagtccaatttccccgagccagcggaaagcgaagatttacacacaggcttcgaagtccccgacgagtacaattgatcttcagagtgggcctagccaatctcccgctcccgtccaggtgtacataagacgtggccagcgaagtagaccagacctggtcgagaaaactaagaccagagcacccggacattacgagttcacacaagttcacaatctccccgaatcggacagcgaatctactcagaacgagaagagggctaaggtcaggacgaaaaaaaccagcgatagcaaatatcccatgaaaagaatcactaaaaggctccggaagcaccggaagttttatacgaatagccgcactaccattgaatctccctcgcgggagctcgccgcacacctgcgcagaaaacgcatcggagctactcagaccagtactgcgagtttgaaacgtcaacccaaaaagccatctcaacctaaattcatgcagctgctctttcagagtttgaagcgcgcattccagaccgcacacagagttatcgccagtgtgggcagaaagccagttgacgggactagaccggacaacctgtgggcatccaagaattattaccccaaacagaacgctcgggactattgcttgccctcgtccattaaaagagataagcgtagcgccgacaaactgaccccagctgggagtacgataaaacaggaggatatcctgtggggcggtacagtgcagtgcagatcagcccagcagcctcggagggcttattctttccagcccaggcccctccggttacctaaaccaacagacagtcaatccggtatagccttccagaccgccagcgtgggtcagccacttcggacagttcaaaaggatagctcatccagatcaaaaaaaaacttttacaggaatgagacttccagccaggagagtaagaatttaagcactccagggaccagagtgcaggccaggggacgcattctccccggtagtccagtcaaaagaacatggcatcgccacttgaaagacaagctaacgcacaaggagcacaatcacccaagcttctatagggaacgaacgccccgagggccttctgaaagaacccgccacaatccatcctggaggaaccacagatctccctctgagcgcagccagcgctctagccttgaacgcaggcatcactctccttctcagaggagccactgttcacccagtcgcaagaaccatagcagtcccagcgagcggtcgtggcgaagcccatcacagcgaaatcattgtagtcccccagaaagatcatgccacagcttgtccgagaggggcctgcactcgccatctcagcggagccacaggggaccttcccagcgcagacaccactcaccctccgagcgttctcaccggtctccaagcgagcgctctcacaggtctagctctgaacggaggcatcggtcaccctctcagaggagccatcgcggaccaagtgaacgcagccattgctcacctagcgagcgcaggcaccgtagcccctcacagcgctcccacaggggtcctagcgagcgaaggcaccacagtccatctaaaaggtcccaccgctctccagcccgtcggagtcacaggagcccatcagagcggtcacatcactctccttccgagaggagtcaccattctccttccgaacgccgtcatcacagcccttctgagaggtctcactgcagtccatcagagcgctcccactgttcgccctccgagcgacgccaccgcagcccttccgaacgccgacaccattcacctagcgagaaaagccaccactctccaagcgagagaagtcaccatagccccagtgagaggaggcgccactcacctctcgagcgatctcgccatagcctgctggagagatctcaccgttcaccttcagaacggagatcccaccgctcttttgagcgctctcacaggagaatcagtgagcggtcccactccccaagcgagaaatcacacctcagcccactggagcggagtagatgctcaccatcggaacggaggggccactcatcctctgggaagacctgccactcaccctcagagcgctcccatcgatccccttcagggatgcggcaagggcgaacatctgagcggagccacaggagcagctgtgaaaggactaggcacagccccagcgagatgaggccaggtcggcctagtgggaggaatcactgcagcccgtcagaacgatccagaaggtcacctctgaaggagggtctgaagtacagctttcctggagagcgcccttcccactctctgtctagagatttcaagaaccaaaccactctactgggcactacacataagaatcccaaggcgggacaggtgtggaggcccgaagccaccaggta

SEQ ID NO: 223421 - DNA, 930 bp, Artificial Sequence
  derived and/or modified sequence
atgttgctcattttgctgagcgtagccttgctggcgctgagcagcgcccagagcttgaacgaggacgttagccaggaggagagtcccagtgtcattagtggaaaaccagaggggcgaagaccccagggcggaaaccagcctcaacgaaccccaccccctcccggtaagcctgaaggtcggccaccacagggaggcaaccaaagtcagggtcctcctcctcgacctggcaagccagagggaccaccaccccagggcggaaaccagagccagggacccccacctcgcccaggtaagcccgaaggtcagccgccacaaggcggaaaccagtctcaaggacctcctcctagaccaggtaagcctgagggtccccctccacagggcggaaaccagtcacagggacccccaccaagacctggcaaaccagaggggcctccaccgcaggggggaaaccagtcacagggcccacctccaagacccggtaaacccgagggaccacctcctcagggaggtaatcagtcgcagggtcctcccccacatcccggtaaacctgagggcccaccacctcagggcggaaaccagtcacaggggcctcctcccagacccggtaaaccggaaggtccccctccacagggagggaaccagtcccagggccctccaccacgtccgggaaaaccggaaggtccaccgagccagggcggtaataagccgcaaggaccccctccacacccgggtaaacctcagggaccacctccacaggaaggaaacaaaccacagaggcctccgcctccagggagaccccaaggacctcctccacccggaggaaacccccagcagccgctgccacctcctgctggcaagcctcaagggccaccaccccctccccaaggagggcgaccccatcggcctcctcagggccagccacctcagtag

SEQ ID NO: 223422 - protein, 670 aa, Artificial Sequence
  derived and/or modified sequence
MSSGKSARYNRFSGGPSNLPTPDVTTGTRMETTFGPAFSAVTTITKADGTSTYKQHCRTPSSSSTLAYSPRDEEDSMPPISTPRRSDSAISVRSLHSESSMSLRSTFSLPEEEEEPEPLVFAEQPSVKLCCQLCCSVFKDPVITTCGHTFCRRCALKSEKCPVDNVKLTVVVNNIAVAEQIGELFIHCRHGCRVAGSGKPPIFEVDPRGCPFTIKLSARKDHEGSCDYRPVRCPNNPSCPPLLRMNLEAHLKECEHIKCPHSKYGCTFIGNQDTYETHLETCRFEGLKEFLQQTDDRFHEMHVALAQKDQEIAFLRSMLGKLSEKIDQLEKSLELKFDVLDENQSKLSEDLMEFRRDASMLNDELSHINARLNMGILGSYDPQQIFKCKGTFVGHQGPVWCLCVYSMGDLLFSGSSDKTIKVWDTCTTYKCQKTLEGHDGIVLALCIQGCKLYSGSADCTIIVWDIQNLQKVNTIRAHDNPVCTLVSSHNVLFSGSLKAIKVWDIVGTELKLKKELTGLNHWVRALVAAQSYLYSGSYQTIKIWDIRTLDCIHVLQTSGGSVYSIAVTNHHIVCGTYENLIHVWDIESKEQVRTLTGHVGTVYALAVISTPDQTKVFSASYDRSLRVWSMDNMICTQTLLRHQGSVTALAVSRGRLFSGAVDSTVKVWTC

SEQ ID NO: 223423 - DNA, 2013 bp, Artificial Sequence
  derived and/or modified sequence
atgagcagcggcaagagcgccagatacaacagattcagcggcggccccagcaacctgcccacccccgacgtgaccaccggcaccagaatggagaccaccttcggccccgccttcagcgccgtgaccaccatcaccaaggccgacggcaccagcacctacaagcagcactgcagaacccccagcagcagcagcaccctggcctacagccccagagacgaggaggacagcatgccccccatcagcacccccagaagaagcgacagcgccatcagcgtgagaagcctgcacagcgagagcagcatgagcctgagaagcaccttcagcctgcccgaggaggaggaggagcccgagcccctggtgttcgccgagcagcccagcgtgaagctgtgctgccagctgtgctgcagcgtgttcaaggaccccgtgatcaccacctgcggccacaccttctgcagaagatgcgccctgaagagcgagaagtgccccgtggacaacgtgaagctgaccgtggtggtgaacaacatcgccgtggccgagcagatcggcgagctgttcatccactgcagacacggctgcagagtggccggcagcggcaagccccccatcttcgaggtggaccccagaggctgccccttcaccatcaagctgagcgccagaaaggaccacgagggcagctgcgactacagacccgtgagatgccccaacaaccccagctgcccccccctgctgagaatgaacctggaggcccacctgaaggagtgcgagcacatcaagtgcccccacagcaagtacggctgcaccttcatcggcaaccaggacacctacgagacccacctggagacctgcagattcgagggcctgaaggagttcctgcagcagaccgacgacagattccacgagatgcacgtggccctggcccagaaggaccaggagatcgccttcctgagaagcatgctgggcaagctgagcgagaagatcgaccagctggagaagagcctggagctgaagttcgacgtgctggacgagaaccagagcaagctgagcgaggacctgatggagttcagaagagacgccagcatgctgaacgacgagctgagccacatcaacgccagactgaacatgggcatcctgggcagctacgacccccagcagatcttcaagtgcaagggcaccttcgtgggccaccagggccccgtgtggtgcctgtgcgtgtacagcatgggcgacctgctgttcagcggcagcagcgacaagaccatcaaggtgtgggacacctgcaccacctacaagtgccagaagaccctggagggccacgacggcatcgtgctggccctgtgcatccagggctgcaagctgtacagcggcagcgccgactgcaccatcatcgtgtgggacatccagaacctgcagaaggtgaacaccatcagagcccacgacaaccccgtgtgcaccctggtgagcagccacaacgtgctgttcagcggcagcctgaaggccatcaaggtgtgggacatcgtgggcaccgagctgaagctgaagaaggagctgaccggcctgaaccactgggtgagagccctggtggccgcccagagctacctgtacagcggcagctaccagaccatcaagatctgggacatcagaaccctggactgcatccacgtgctgcagaccagcggcggcagcgtgtacagcatcgccgtgaccaaccaccacatcgtgtgcggcacctacgagaacctgatccacgtgtgggacatcgagagcaaggagcaggtgagaaccctgaccggccacgtgggcaccgtgtacgccctggccgtgatcagcacccccgaccagaccaaggtgttcagcgccagctacgacagaagcctgagagtgtggagcatggacaacatgatctgcacccagaccctgctgagacaccagggcagcgtgaccgccctggccgtgagcagaggcagactgttcagcggcgccgtggacagcaccgtgaaggtgtggacctgctag

SEQ ID NO: 223424 - DNA, 2013 bp, Artificial Sequence
  derived and/or modified sequence
atgtccagcggtaaatccgccaggtacaataggttctctggagggccttcaaacctgccaaccccggatgtgacaactggtacaagaatggagacaaccttcggccccgccttttcagcagtcacaacgattacaaaggctgacggcactagcacatacaagcagcattgtcgcaccccctcctcatccagcacgctggcttattccccacgagatgaggaagactctatgcctccaattagcacaccacggcgctccgactctgccatctcggttcgatctttgcacagcgagtcttcaatgtcactcagaagtaccttttcactgcccgaagaggaggaggaaccagagcccctggtgttcgcagaacagccgagcgtgaagttatgctgccagctttgttgtagtgtatttaaggaccctgtcattactacatgtgggcacacattctgccgacgttgcgcactcaagtcagaaaagtgtcctgtagacaatgtgaagcttactgttgtggtcaacaacatagcagtagctgagcaaattggggagctctttattcactgtaggcacgggtgtcgcgtggccggttctggcaaacccccgattttcgaagtcgaccccagagggtgtcctttcacaataaaattgagtgcgagaaaggaccacgagggttcttgtgactacaggcccgtgagatgcccgaacaacccgtcttgccccccattactgcgtatgaacctggaagcccatctaaaggaatgcgaacatattaagtgcccgcacagcaagtacggatgcacatttattgggaaccaggacacttacgagacccacctggagacgtgccgctttgagggcctgaaagagtttctgcagcagaccgatgatcgctttcatgagatgcacgtcgcactggcccagaaggatcaggagatcgcattcttacgctcaatgctcggcaagctctccgagaagatcgaccagctcgaaaagagccttgaactgaagtttgacgtgctagatgagaatcagagcaaactgagtgaggaccttatggagtttcggagagacgcgagcatgctaaatgacgagctgagtcacatcaacgccaggttaaacatggggatcttaggctcatacgacccacaacagatatttaagtgcaaggggacctttgttggccatcagggacccgtctggtgcctgtgtgtttattcaatgggcgatttgctcttcagcgggtcatccgacaagaccattaaagtgtgggacacctgcacaacctataaatgtcagaagacgctcgaaggccatgacggcatagtacttgcgctctgcatccagggctgtaagctttatagcggctcggcagactgcacaataatagtctgggacattcagaatcttcagaaagtgaacaccattcgcgctcacgataaccctgtctgtacccttgtttcatcccacaatgttctgtttagcgggtccttaaaggcaatcaaggtctgggacatcgttggcacggaattaaaactcaaaaaagagctcactgggctcaatcactgggtccgggccctggtggctgcacagagttatttatactccgggtcctaccaaacaatcaaaatctgggacattcggactcttgattgcatccacgtgttgcagacgtccggagggagcgtctattccatagcggtgaccaaccatcacatcgtctgcggcacttacgagaacctcattcacgtgtgggatatcgagtccaaggaacaggtgcggaccctcacaggccacgtggggacggtgtatgccttagccgttattagcacccctgaccagaccaaagtgttttctgcctcttatgatcgcagcctgcgggtgtggagcatggataatatgatctgcacccaaactctgctcagacaccaaggttctgtcacggcattggcagtgagcagggggcgcctcttttcaggagctgtggactccacagtcaaagtgtggacatgttag

SEQ ID NO: 223425 - DNA, 2013 bp, Artificial Sequence
  derived and/or modified sequence
atgagcagcggcaagagcgcccgctacaaccgcttcagcggcggccccagcaacctgcccaccccagatgtgaccaccggcaccaggatggagaccaccttcggccctgccttctctgctgtgaccaccatcaccaaggcagatggcaccagcacctacaagcagcactgcaggacccccagcagcagcagcaccctggcctacagccccagagatgaggaggacagcatgccacccatcagcaccccccggcggagtgacagcgccatctctgtgcgcagcctgcacagcgagagctccatgagcctgcggagcaccttcagcctgcctgaggaggaggaggagcctgagcccctggtgtttgctgagcagcccagcgtgaagctgtgctgccagctgtgctgcagcgtcttcaaggaccctgtgatcaccacctgtggccacaccttctgccgccgctgtgccctgaagtctgagaagtgccctgtggacaacgtgaagctgactgtggtggtgaacaacattgctgtggccgagcagattggagagctgttcatccactgccgccacggctgccgggtggccggcagcggcaagccacccatctttgaggtggacccccggggctgccccttcaccatcaagctgagcgccaggaaggaccacgagggcagctgtgactacagacctgtgcgctgccccaacaaccccagctgcccccccctgctgaggatgaacctggaggcccacctgaaggaatgtgagcacatcaagtgcccccacagcaaatatggctgcaccttcatcggcaaccaggacacctatgagacccacctggagacctgccgctttgagggcctgaaggagttcctgcagcagacagatgaccgcttccacgagatgcacgtggccctggcccagaaggaccaggagatcgccttcctgcgctccatgctgggcaagctgtctgagaagattgaccagctggagaagagcctggagctgaagtttgatgtgctggatgagaaccagagcaagctgtctgaggacctgatggagttcagaagagatgcctccatgctgaatgatgagctgagccacatcaatgcccggctgaacatgggcatcctgggcagctatgacccccagcagatcttcaagtgcaagggcacctttgtgggccaccagggccctgtgtggtgcctgtgtgtgtacagcatgggagacctgctcttcagcggcagcagtgacaagaccatcaaggtgtgggacacctgcaccacctacaagtgccagaagaccctggagggccatgatggcatcgtgctggccctgtgcatccagggctgcaagctgtacagcggcagcgctgactgcaccatcatcgtgtgggacatccagaacctgcagaaggtgaacaccatccgggcccatgacaaccctgtgtgcaccctggtgagcagccacaacgtgctcttcagcggcagcctgaaggccatcaaggtgtgggacatcgtgggcacagagctgaagctgaagaaggagctgaccggcctgaaccactgggtgcgggccctggtggccgcccagagctacctgtacagcggcagctaccagaccatcaagatctgggacatccgcaccctggactgcatccacgtgctgcagaccagcggcggctctgtgtacagcattgctgtgaccaaccaccacatcgtgtgtggcacctatgagaacctgatccacgtgtgggacatcgagagcaaggagcaggtgaggaccctgaccggccacgtgggcaccgtgtatgccctggccgtcatcagcaccccagaccagaccaaggtgttcagcgccagctatgacaggagcctgcgggtgtggagcatggacaacatgatctgcacccagaccctgctgcggcaccagggctctgtgacagccctggccgtgtcccggggccgcctcttcagcggggctgtggacagcacagtgaaggtgtggacctgctag

SEQ ID NO: 223426 - DNA, 2013 bp, Artificial Sequence
  derived and/or modified sequence
atgagcagcggcaagagcgcccggtacaaccggttcagcggcggcccaagcaatctccctacgcccgacgtgaccacaggcaccagaatggagacaacctttggacctgctttctccgccgtcactaccatcacaaaggctgatgggacaagtacgtacaaacagcattgtcgaacaccaagcagctcctctaccctagcctacagtccacgagatgaggaagactcgatgcctccaatcagtactcctcggaggagtgacagcgccatttcagtgaggtcattacactctgaatcttcaatgagcctgcgtagcactttttcactgccggaggaggaagaagagcccgagccccttgtgttcgccgaacagccctctgtgaaattatgctgtcaattatgttgctcagtgtttaaggatcccgtaatcaccacctgtggccacacattttgccgaaggtgcgcactaaaatctgagaaatgccccgttgacaatgtgaagttgacagtcgttgttaataatattgccgtggcagagcagatcggggagttgttcattcattgcaggcatggctgccgcgtggcgggtagtggcaaaccccctattttcgaagtcgaccctaggggctgtcctttcaccattaagttatctgcacgcaaggaccatgaaggttcctgtgactaccggcctgtgcgatgccctaataatccatcttgccctccactgcttcgcatgaacctcgaagctcacctgaaggagtgtgagcatattaagtgcccccacagtaagtatgggtgtacttttatcggaaatcaggatacttatgagactcatctggagacgtgcagatttgagggtcttaaggaattccttcaacagactgatgacagattccatgaaatgcacgttgcattggcccagaaggatcaggagatagctttcctgcgctctatgctgggcaagctgtctgaaaaaattgatcagcttgaaaaaagcctggaactcaagtttgatgtcttggacgaaaatcagtctaagcttagcgaggatcttatggagttcaggcgagatgcctccatgctgaatgatgaactgagccacattaacgcccgtctgaatatgggcattctcggaagttacgatcctcaacagatcttcaagtgtaagggcacctttgtgggccaccagggtcccgtttggtgcctctgcgtgtacagtatgggtgatctacttttttctggatcatcggacaagaccataaaggtatgggatacttgcaccacgtacaagtgtcagaagaccttagagggccacgacgggatcgtcctagcactttgcatacagggttgtaaactctactcaggatccgccgactgcactattatcgtctgggatattcaaaacctgcagaaagtcaatactataagagcacacgacaacccagtgtgtacccttgtcagctcgcataatgttctgttctccgggagcctgaaggctatcaaggtctgggatattgtcggaactgagctgaaacttaaaaaagagcttacaggattgaatcattgggtccgggcattagtagccgcccaatcctacttgtattctggcagttatcagacaatcaagatatgggacattcgaacactcgattgcatccacgttcttcagactagtggcgggagcgtttacagcatcgcagtgaccaatcatcatattgtttgcggcacgtacgaaaacctcatacatgtctgggacatcgaatctaaggaacaagtccgtacgctgactggtcatgtggggactgtatacgcccttgctgtcatctctaccccagaccagactaaggtgttcagcgccagctacgacaggagcctccgggtctggtccatggataatatgatttgtacccagactcttctgaggcatcagggaagtgttacagcactggccgtttcgagaggaaggctcttctccggggcagtcgattcgacagtgaaagtgtggacctgttag

SEQ ID NO: 223427 - DNA, 2013 bp, Artificial Sequence
  derived and/or modified sequence
atgtcatcagggaaaagcgccaggtataatcggttttccggtggcccatccaacctccccacgcctgacgtgacaaccggaactagaatggagactacattcggacctgccttctcagctgtgaccacgatcacaaaagctgacggcaccagcacgtacaaacagcactgtcgcacccctagctcctctagcacgcttgcctatagccctcgggatgaggaggattcaatgccccctatttccactcctcgaaggtccgatagcgccatctctgttaggtcactgcactcggaatccagtatgtcgctccgatcaaccttttctctcccagaggaggaggaggagccggaacctctcgtctttgccgagcaacctagcgtaaagttatgctgccagctgtgttgtagtgtgtttaaagatcctgtgatcacaacctgtggccacaccttctgccgcagatgcgccctgaagtcggaaaaatgccccgtagacaatgtgaagctgacagtggtggtcaacaacatagcagtcgccgagcaaattggcgagctgttcatacactgcagacatggatgtagagtcgctgggtcaggtaagccacctatttttgaggtggacccgcgtggctgcccattcacgataaagttgtccgcgaggaaggaccacgaggggagctgtgactaccggccagttcggtgtccaaacaatccgtcttgcccgccattactacgcatgaacctggaggctcacctgaaggagtgcgagcacatcaagtgcccccattctaaatatggatgcacattcattggaaaccaagatacgtacgagactcatctggagacatgccgcttcgagggtctgaaggaattcctgcagcagaccgatgatcgatttcacgagatgcacgtggctctggcacagaaagatcaggagatcgcttttctccgctccatgttggggaagctgagcgagaaaatagatcaattggaaaaaagcctggagctaaagttcgatgtgctcgacgagaatcaatctaaactgtccgaggacctgatggaatttaggagagatgcgtccatgctgaatgacgagctcagtcacattaatgctcgcctgaacatgggcatcctgggctcctacgatccccagcagatttttaagtgcaagggtacatttgtcggtcatcagggtcccgtgtggtgtctatgcgtgtattctatgggcgatttactgttcagcgggagtagtgataaaactattaaggtctgggacacttgcactacatacaaatgtcaaaaaaccctcgagggccacgatggaattgtgttagcactttgcatccaggggtgcaaactgtacagcggaagcgccgactgcaccattatcgtgtgggatattcaaaatttgcagaaagtcaatacaatcagggcacacgacaatcctgtatgtactctcgtgtcctcccataacgtgctgttctccggcagtttaaaagcaataaaagtgtgggacatcgtgggcactgagctaaagctgaagaaagagcttacagggttgaatcactgggtgcgggcacttgtcgctgcacagtcctacctgtatagtgggagttatcagactatcaagatatgggacatcaggaccctggactgtatacacgtgctgcagacgtccgggggatctgtctacagcatcgccgtgactaatcaccacatcgtatgtgggacttatgagaatttaattcacgtatgggacattgaaagtaaagagcaggtgcgaacgctgaccggccacgtgggaactgtttacgctttggccgtaataagtacacctgaccagaccaaggtctttagtgcaagctatgacaggtccttgagagtctggtccatggacaacatgatttgcacgcaaactctgctgcgtcaccagggcagtgttactgcgttagctgtttcaaggggccgtttattttcaggggcagttgactccacagtgaaggtgtggacctgttag

SEQ ID NO: 223428 - DNA, 3700 bp, Artificial Sequence
  derived and/or modified sequence
cggctcgcgcgtctagtccctttcccggccggcggccgagggggcatcatgaagcgggctggcggcgctgccgctcccgggcggccgcgggcgggaggtgcttcccaaggaccgtagatgcctctctagagcatgagctcaggcaagagtgcccgctacaaccgcttctccggggggcccagcaatcttcccaccccagacgtcaccacagggaccagaatggaaacgaccttcggacccgccttttcagccgtcaccaccatcacaaaagctgacgggaccagcacctacaagcagcactgcaggacaccctcctcctccagcacccttgcctactccccgcgggacgaggaggacagcatgccccccatcagcactccccgccgctccgactccgccatctctgtccgctccctgcactcagagtccagcatgtctctgcgctccacattctcactgcccgaggaggaggaggagccggagccactggtgtttgcggagcagccctcggtgaagctgtgctgtcagctctgctgcagcgtcttcaaagaccccgtgatcaccacgtgtgggcacacgttctgtaggagatgcgccttgaagtcagagaagtgtcccgtggacaacgtcaaactgaccgtggtggtgaacaacatcgcggtggccgagcagatcggggagctcttcatccactgccggcacggctgccgggtagcgggcagcgggaagccccccatctttgaggtggacccccgagggtgccccttcaccatcaagctcagcgcccggaaggaccacgagggcagctgtgactacaggcctgtgcggtgtcccaacaaccccagctgccccccgctgctcaggatgaacctggaggcccacctcaaggagtgcgagcacatcaaatgcccccactccaagtacgggtgcacgttcatcgggaaccaggacacttacgagacccacctggagacttgccgcttcgagggcctgaaggagtttctgcagcagacggatgaccgcttccacgagatgcacgtggctctggcccagaaggaccaggagatcgccttcctgcgctccatgctgggaaagctctcggagaagatcgaccagctagagaagagcctggagctcaagtttgacgtcctggacgaaaaccagagcaagctcagcgaggacctcatggagttccggcgggacgcatccatgttaaatgacgagctgtcccacatcaacgcgcggctgaacatgggcatcctaggctcctacgaccctcagcagatcttcaagtgcaaagggacctttgtgggccaccagggccctgtgtggtgtctctgcgtctactccatgggtgacctgctcttcagtggctcctctgacaagaccatcaaggtgtgggacacatgtaccacctacaagtgtcagaagacactggagggccatgatggcatcgtgctggctctctgcatccaggggtgcaaactctacagcggctctgcagactgcaccatcattgtgtgggacatccagaacctgcagaaggtgaacaccatccgggcccatgacaacccggtgtgcacgctggtctcctcacacaacgtgctcttcagcggctccctgaaggccatcaaggtctgggacatcgtgggcactgagctgaagttgaagaaggagctcacaggcctcaaccactgggtgcgggccctggtggctgcccagagctacctgtacagcggctcctaccagacaatcaagatctgggacatccgaacccttgactgcatccacgtcctgcagacgtctggtggcagcgtctactccattgctgtgacaaatcaccacattgtctgtggcacctacgagaacctcatccacgtgtgggacattgagtccaaggagcaggtgcggaccctcacgggccacgtgggcaccgtgtatgccctggcggtcatctcgacgccagaccagaccaaagtcttcagtgcatcctacgaccggtccctcagggtctggagtatggacaacatgatctgcacgcagaccctgctgcgtcaccagggcagtgtcaccgcgctggctgtgtcccggggccgactcttctcaggggctgtggatagcactgtgaaggtttggacttgctaacaggatccaggccaggctgtggtttcccctgaaccagccctggacctttctgagccaggctggccacatggggtggtctcggggtttctgcctgccccgtgggcataggtggacaggctctggcagccgggcagtgccctccccgtcccatgctcggcgagcctccctctactcggcactgtccttgctgcccagcccctctctgggtgccaggtacgacgcttgccccggcccaccctccatccccaccctccatccccaccctagatggagcgagggcctttttactcaccttttctaccgtttttagactgtatgtagatttggttacctcctggttgaaataaatgctccacagactgtggctgtgagtggggacagctcctcgggacaagggggctgtgtgtggccttgaggttggtgtgcacaggcactggctgctgtgagtgggggggcatggggcagtttcctttggtggaccccaggacttcggcccactccggggcctcccctccctgctaggaggcaactcgtcacacccaagctgctggcctccagtcccatctcccccaacacatgtgcccccaaaaagtgagccaggcacctctgtttcctgctgtttattgacagccgacggcagcgccttgcccagacctcccctgcccacctgctggagcccagcctgtgccgccctctgaggagaggcctggggggacagctgggcacgtccactcgcagggaaacacggggtgagacagcaggaaggggccctgcacgccgggacgccacctccgccagccgcctccacccgccccacaccacaatcgctggttttcggcattttttaaattttttttttaagaaacgtcaaagttgtgcccaacactgtggatcagcaaacacgatagaggagaccagtcagtacttcttggagggggcaggaggagagaggaaaagggagggcgagaatgaccacacaacacagccttggaccatgagcagaagcgtccgtgggaactccactggggtggatgggctgcctgcacagcccctggagagggggccaggcacaccctcagaggagctgcaagcccgtggcctggcctgctacatgccctgcttccacgtggctgccacgctgacacacccacattcaccaaacccacccgcgccctgggacgcagccacgccaggaggaggacacggccgccgagagcaaggcacaacctcgagttcttggggcgcagagaacttaggagagaagcacggaggagcccccggcagagcacccgcccccgggccccagccttccacctgtgctagcagcctggggcctccactctggccggaggaaggaccgcaggcagacagcctgggcctctaacagcttttgtccggagctagacttcgtgtcctttcagttggtaaatggttttctatagaatcaataatatttctttctttaaatatatatttgttaaagttatacctttttgtttctctggggaaatccgcctcagctcattcccaataaattaatactcttgatagctta

SEQ ID NO: 223429 - protein, 256 aa, Artificial Sequence
  derived and/or modified sequence
MKLLENSSFEAINSQLTVETGDAHIIGRIESYSCKMAGDDKHMFKQFCQEGQPHVLEALSPPQTSGLSPSRLSKSQGGEEEGPLSDKCSRKTLFYLIATLNESFRPDYDFSTARSHEFSREPSLSWVVNAVNCSLFSAVREDFKDLKPQLWNAVDEEICLAECDIYSYNPDLDSDPFGEDGSLWSFNYFFYNKRLKRIVFFSCRSISGSTYTPSEAGNELDMELGEEEVEEESRSGGSGAEETSTMEEDRVPVICI

SEQ ID NO: 223430 - protein, 70 aa, Artificial Sequence
  derived and/or modified sequence
MKLLENSSFEAINSQLTVETGDAHIIGRIESYSCKMAGDDKHMFKQFCQEGQPHVLEALSPPQTSGLSPS

SEQ ID NO: 223431 - DNA, 771 bp, Artificial Sequence
  derived and/or modified sequence
atgaagttgctggaaaacagtagtttcgaagcgattaattctcagctaaccgttgaaactggcgacgcccatattatagggagaattgaatcatactcctgcaagatggccggcgacgataaacacatgtttaagcagttttgccaagaaggtcaaccccatgtcctagaggccctgtcccccccgcagacatctgggctgtctccatctcgtttgtctaagtcccagggcggagaagaagagggacctttgagcgataagtgcagccgcaagacccttttttatcttatcgcaaccctgaacgaaagctttaggcctgattatgacttctcaacagcccgaagtcacgagttctctcgtgagcctagtctgtcttgggtggtcaatgccgtcaactgcagcctattctctgcggtgcgtgaggattttaaagatttaaagcctcagctgtggaatgccgtggatgaggaaatatgcttagccgagtgtgatatctattcttacaaccctgaccttgacagcgatccttttggcgaggacggatccctgtggtctttcaattactttttctacaataagcggctgaaaagaatagtatttttctcctgcagaagcatttctggatccacatacacacctagcgaggccggcaatgagttggacatggaactgggtgaggaggaggtcgaggaagagtcccggagtggaggatccggagccgaagagaccagcacaatggaagaagatagggttccggttatctgcatctag

SEQ ID NO: 223432 - DNA, 213 bp, Artificial Sequence
  derived and/or modified sequence
atgaagctgttggaaaatagttcgtttgaagccatcaactcccagctgacagtggagactggggacgcacatatcatcggcagaatcgaatcctatagttgcaagatggcaggagatgacaagcacatgtttaaacagttttgccaggagggtcagccacacgtattagaagcactctcccctccgcagacgtctggtctctcaccaagttag

SEQ ID NO: 223433 - DNA, 771 bp, Artificial Sequence
  derived and/or modified sequence
atgaaacttctcgagaacagttcattcgaagccattaacagccagctcacagtggaaaccggggacgcccacataataggcaggattgaaagttattcatgcaaaatggcgggagacgacaagcatatgtttaagcagttttgtcaggaagggcagccacacgttctggaggcactctcacccccccagacatccgggctctcaccttcccggctgagcaagagtcagggtggggaagaagagggtcctttgtccgataagtgctcacgaaagacactgttttacctgattgcgacactaaacgaaagcttccggcctgattacgactttagcacagcccgatcccatgagttttcgcgcgagccctcattgagttgggtcgttaacgcagtgaattgttccctgtttagcgcagtacgagaagacttcaaggatttgaaacctcagctctggaacgccgtagacgaagagatctgcttggccgagtgtgacatttattcttataatccagatctggacagtgatccgtttggtgaagatgggtccctctggtcttttaactacttcttctataacaagaggctgaagagaatcgtcttcttttcttgcaggtccatatcaggatcaacatacacaccttctgaggccggaaatgaactggacatggaacttggcgaagaagaggttgaagaggagtctcgatctggcgggagtggagcagaagaaactagcaccatggaagaggatagagtcccggtcatttgtatatag

SEQ ID NO: 223434 - DNA, 771 bp, Artificial Sequence
  derived and/or modified sequence
atgaagctgctggagaacagcagctttgaggccatcaacagccagctgactgtggagactggagatgcccacatcatcggcagaattgagagctacagctgcaagatggctggagatgacaagcacatgttcaagcagttctgccaggagggccagccccacgtgctggaggccctgagccccccccagaccagcggcctgagccccagccggctgagcaagagccagggcggggaggaggagggccccctgagtgacaagtgcagcaggaagaccctcttctacctgattgccaccctgaatgaaagcttccggccagactatgacttcagcacagcccggagccatgagttcagccgggagcccagcctgtcctgggtggtgaatgctgtgaactgcagcctcttctctgctgtgcgggaggacttcaaggacctgaagccccagctgtggaatgctgtggatgaggagatctgcctggccgagtgtgacatctacagctacaacccagacctggacagcgacccctttggagaagatggcagcctgtggagcttcaactacttcttctacaacaagaggctgaagagaattgtgttcttcagctgccgcagcatcagcggcagcacctacacccccagcgaggccggaaatgagctggacatggagctgggggaggaggaggtggaggaggagagccgcagcggcggcagcggggctgaggagaccagcaccatggaggaggacagagtgcctgtgatctgcatctag

SEQ ID NO: 223435 - DNA, 213 bp, Artificial Sequence
  derived and/or modified sequence
atgaagctgctggagaacagcagctttgaggccatcaacagccagctgactgtggagactggagatgcccacatcatcggcagaattgagagctacagctgcaagatggctggagatgacaagcacatgttcaagcagttctgccaggagggccagccccacgtgctggaggccctgagccccccccagaccagcggcctgagccccagctag

SEQ ID NO: 223436 - DNA, 1677 bp, Artificial Sequence
  derived and/or modified sequence
gttgtccggccgggggaggcggaggtcgctcgctcgctcgctcggctcgctgactcgccggagcgctctgtggcggtcggcggcaggtcggtcgcgagagcgggctctgtggaagggggcgaggctatgtcgcggtggcagcccggatgggccggcagggccgggagtaacgggacgtcgccgcggagcttcttcccccggatacagtgcggcccgagcggaggccgcggcgccgccctccgatcttgaagagcccgcgctgcgcggagcccgcccccgcctgcgcaccggcaccgacgcggagcgacccagcccagccagacccggcccggcgcggcctgatctaacccagccaggcaggcaatactagcccctctggagcacggagctccttccccaaagacatgaagctattggagaactcgagctttgaagccatcaactcacagctgactgtggagactggagatgcccacatcattggcaggattgagagctactcatgtaagatggcaggagacgacaaacacatgttcaagcagttctgccaggagggccagccccacgtgctggaggcactttctccaccccagacttcaggactgagccccagcagactcagcaaaagccaaggcggtgaggaggagggccccctcagtgacaagtgcagccgcaagaccctcttctacctgattgccacgctcaatgagtccttcaggcctgactatgacttcagcacagcccgcagccatgagttcagccgggagcccagccttagctgggtggtgaatgcagtcaactgcagtctgttctcagctgtgcgggaggacttcaaggatctgaaaccacagctgtggaacgcggtggacgaggagatctgcctggctgaatgtgacatctacagctataacccagacttggactcagatcccttcggggaggatggtagcctctggtccttcaactacttcttctacaacaagcggctcaagcgaatcgtcttctttagctgccgttccatcagtggctccacctacacaccctcagaggcaggcaacgagctggacatggagctgggggaggaggaggtggaggaagaaagcagaagcgggggcagtggggccgaggagaccagcaccatggaggaggacagggtcccagtgatctgtatttgatgaggaggagccgaggccccagcttcatccagcttcaaccaatgcctggacctgtccacctgagaggcccctggggcctccccagctgctggccagaccctggcgctgccacagtcctggcactgcccaaggccatacctgcctagccctttggctccatcctgtggatgcccactcacccctcagactcctgctgcccatgctgtggccggacttgtcagcagggggcctggtgggaggagcgactgccctgcccaaatgaactgccacagcagggacagctggaccgcagagtttatttttgtatttctactgggcctgcacactccagcccaaagggtctgtggccggaggccccacgagcaggccccagcagtcaccggctctggtcttgggccggccccggtgcccacctgtacccccacctcgcccatttggccgcgtgcactgagtgtcactttgctgcagctcgtttctttccaataaaagtttctgtgactta

SEQ ID NO: 223437 - DNA, 737 bp, Artificial Sequence
  derived and/or modified sequence
gacgtggcccaggcgggcgctgcctggtgactgcagcgccccagcggggccgagggaccgccctcctaggcgtctggagaaactaggcaatttttccgggtagagtggaggaacctgtagttttcctctccccgggccagaaagtagccaaaacgaaagagcgcccgcccaggtgaccgcagggcccggagtcccaggtgtcctggttcctaaccgggatgcagcctcttaccttggctgaggagcccagccagcctgagggagactgcaggagtcacgtcccgttgcggactcaagagttacccccatggtggctggagctcttttggagtgggcgtggagatggggaatgggaatgttgagcaacaatctcagccagcagccccagggtgagcagggtccccggtggtctagtctagtcccagaactcgcgtgttctgcagggggtatggctgacctggagcctggacttaccaccctcaggcaatactagcccctctggagcacggagctccttccccaaagacatgaagctattggagaactcgagctttgaagccatcaactcacagctgactgtggagactggagatgcccacatcattggcaggattgagagctactcatgtaagatggcaggagacgacaaacacatgttcaagcagttctgccaggagggccagccccacgtgctggaggcactttctccaccccagacttcaggactgagccccagc

SEQ ID NO: 223438 - DNA, 1098 bp, Artificial Sequence
  derived and/or modified sequence
cccgacgtggcccaggcgggcgctgcctggtgactgcagcgccccagcggggccgagggaccgccctcctaggcgtctggagaaactaggcaatttttccgggtagagtggaggaacctgtagttttcctctccccgggccagaaagtagccaaaacgaaagagcgcccgcccaggcaatactagcccctctggagcacggagctccttccccaaagacatgaagctattggagaactcgagctttgaagccatcaactcacagctgactgtggagactggagatgcccacatcattggcaggattgagagctactcatgtaagatggcaggagacgacaaacacatgttcaagcagttctgccaggagggccagccccacgtgctggaggcactttctccaccccagacttcaggactgagccccagcagactcagcaaaagccaaggcggtgaggaggagggccccctcagtgacaagtgcagccgcaagaccctcttctacctgattgccacgctcaatgagtccttcaggcctgactatgacttcagcacagcccgcagccatgagttcagccgggagcccagccttagctgggtggtgaatgcagtcaactgcagtctgttctcagctgtgcgggaggacttcaaggatctgaaaccacagctgtggaacgcggtggacgaggagatctgcctggctgaatgtgacatctacagctataacccagacttggactcagatcccttcggggaggatggtagcctctggtccttcaactacttcttctacaacaagcggctcaagcgaatcgtcttctttagctgccgttccatcagtggctccacctacacaccctcagaggcaggcaacgagctggacatggagctgggggaggaggaggtggaggaagaaagcagaagcgggggcagtggggccgaggagaccagcaccatggaggaggacagggtcccagtgatctgtatttgatgaggaggagccgaggccccagcttcatccagcttcaaccaatgcctggacctgtccacctgagaggcccctggggcctccccagctgctggccagaccctggcgctg

SEQ ID NO: 223439 - DNA, 771 bp, Artificial Sequence
  derived and/or modified sequence
atgaagctgctggagaacagcagcttcgaggccatcaacagccagttgacagttgagaccggagacgcacatatcataggacgaattgaatcctactcttgcaagatggccggggacgacaagcacatgttcaaacagttctgtcaggaaggtcaaccccatgttcttgaggcgctgtcacctcctcaaacatcagggttgtccccttctcggctgagcaagagccaggggggcgaggaggaaggccctctgtctgacaaatgttcaagaaagactctcttttacctgattgctactctgaatgaaagttttcgtccagactatgacttctccacagcaaggtcacatgagttcagcagggaacctagcctctcttgggtcgtcaatgctgtcaactgcagcctgttctcagcagtccgtgaagatttcaaggatctcaagccacaactctggaatgcagtagatgaagagatatgcctggcagaatgcgacatttatagttacaatcctgacctagactcagacccttttggcgaagatgggagcctgtggagtttcaattactttttttacaataaacgactgaagcgtatagtttttttctcttgccggtccatctctggatcaacctacacgccgtcggaggcggggaatgagctggacatggagctcggagaggaagaagttgaggaggagtctcggtcaggcggaagtggagctgaagaaacctccacgatggaggaagatcgggtccccgtaatttgcatatag

SEQ ID NO: 223440 - DNA, 213 bp, Artificial Sequence
  derived and/or modified sequence
atgaagctgctggagaacagcagcttcgaggccatcaacagccagctgaccgtcgagacgggcgacgcccacatcatcggacggattgagagctacagttgtaagatggccggtgatgataaacacatgtttaaacaattttgtcaggaaggccagccgcacgtgttggaggcactgtcacctcctcagacctccggactatcccccagctag

SEQ ID NO: 223441 - DNA, 771 bp, Artificial Sequence
  derived and/or modified sequence
atgaagctgctggagaacagcagcttcgaggccatcaacagccagcttaccgtcgagacgggtgacgctcacatcatagggcgaatcgagtcctattcctgcaaaatggccggcgatgacaagcatatgtttaagcagttctgtcaggaggggcagcctcacgtgctggaggcactgtctccaccccagacttccggcttgtcccccagcagactctccaagagccagggaggggaggaggaagggccactatcagacaaatgttctcgtaaaacactcttctaccttatcgcgactcttaacgagtcatttcgccctgactacgacttcagtaccgcgcggagtcatgagttttcacgtgagccatctttgagctgggtcgtaaacgctgtcaactgctcactgtttagcgccgttcgagaggatttcaaggatctgaagccgcagctgtggaacgccgttgatgaagaaatttgcctggctgagtgtgacatctacagctataatcccgatttggacagcgacccatttggagaagacggatcactttggtccttcaactacttcttctacaacaaaaggctgaaaagaatcgtcttcttttcttgcagatcaatctccggcagcacttatactcccagcgaagccggcaacgagctagatatggagctgggggaggaggaagtagaggaggaaagtagaagtggcgggtccggagccgaggagactagcacgatggaggaggatcgggtgcctgtgatctgtatttag

SEQ ID NO: 223442 - DNA, 771 bp, Artificial Sequence
  derived and/or modified sequence
atgaaactcctggagaatagctcctttgaagcaattaacagtcagctgacagtagagactggcgatgcccacattatcggtagaatcgagagctattcttgcaaaatggccggtgatgataagcacatgttcaagcagttctgccaagagggccaaccacacgtgctggaggccctaagcccaccgcaaacctccggtctttcaccgtccaggctatccaaatctcaggggggagaggaggaggggccactgagtgataaatgtagtagaaagactttgttttatctaattgccaccctcaacgagtctttccgccctgactacgacttttctacagcgagatcccacgagttctctcgggagccttccctgtcgtgggtcgttaatgccgtaaattgttcccttttttcggcggtgagggaggatttcaaagatttgaagccgcagctttggaacgccgttgatgaagagatttgcctcgcagagtgcgatatctactcgtataacccagacctggactctgatccatttggagaggatggtagcttgtggtcatttaactatttcttttataacaagagactgaagaggatcgtctttttttcatgccgcagtataagcggatccacgtataccccctcagaagccggaaatgaactggacatggaactgggggaggaggaggtggaagaagagtctaggtcaggaggatctggcgctgaagaaacatccacaatggaggaggacagagtgcccgtgatttgtatatag

SEQ ID NO: 223443 - DNA, 213 bp, Artificial Sequence
  derived and/or modified sequence
atgaaacttctggaaaattctagttttgaagccataaatagccagcttaccgtggaaactggggacgcccacataattggcagaatcgagtcttacagctgcaagatggcaggcgatgataaacatatgttcaagcagttctgtcaggagggccagcctcacgtgctggaggcacttagtcctccccagacctccggcctatccccatcttag

SEQ ID NO: 223444 - DNA, 771 bp, Artificial Sequence
  derived and/or modified sequence
atgaagctgttagagaactcctcttttgaggctataaactctcaactgacggtagagactggtgatgcacatattatcggtcgtatcgagagctactcctgcaaaatggccggagacgataagcacatgttcaagcagttctgtcaggagggccagccacacgtgttagaagccctgtctcccccacagacctccggcctcagcccctcacggctgtcaaagagccagggcggagaggaggaagggccactgtcagacaaatgctcaaggaaaactctcttctacctgattgcaactctgaacgaaagtttccgcccagattatgattttagtacagcaaggtcgcacgaatttagccgagagccttcattatcctgggtcgtgaacgccgtcaattgtagtttattttcagccgtgagagaggacttcaaggacctgaagcctcagctctggaatgcggttgacgaggaaatctgtcttgccgaatgtgacatttacagttacaacccggacttagactctgacccttttggcgaagacggatccctgtggtcctttaattactttttttataacaagagactaaagcgcatagtcttttttagctgtagatcaatttctggctccacatatactccttcagaggctgggaacgagctagatatggagctcggcgaggaggaggttgaggaggagtcacggtccgggggtagcggcgctgaggagactagtacaatggaagaagacagagtgcccgtgatctgtatatag

SEQ ID NO: 223445 - DNA, 771 bp, Artificial Sequence
  derived and/or modified sequence
atgaagctgctggagaacagcagcttcgaggccatcaacagccagctgaccgtggagaccggcgacgcccacatcatcggcagaatcgagagctacagctgcaagatggccggcgacgacaagcacatgttcaagcagttctgccaggagggccagccccacgtgctggaggccctgagccccccccagaccagcggcctgagccccagcagactgagcaagagccagggcggcgaggaggagggccccctgagcgacaagtgcagcagaaagaccctgttctacctgatcgccaccctgaacgagagcttcagacccgactacgacttcagcaccgccagaagccacgagttcagcagagagcccagcctgagctgggtggtgaacgccgtgaactgcagcctgttcagcgccgtgagagaggacttcaaggacctgaagccccagctgtggaacgccgtggacgaggagatctgcctggccgagtgcgacatctacagctacaaccccgacctggacagcgaccccttcggcgaggacggcagcctgtggagcttcaactacttcttctacaacaagagactgaagagaatcgtgttcttcagctgcagaagcatcagcggcagcacctacacccccagcgaggccggcaacgagctggacatggagctgggcgaggaggaggtggaggaggagagcagaagcggcggcagcggcgccgaggagaccagcaccatggaggaggacagagtgcccgtgatctgcatctag

SEQ ID NO: 223446 - DNA, 213 bp, Artificial Sequence
  derived and/or modified sequence
atgaagctgctggagaacagcagcttcgaggccatcaacagccagctgaccgtggagaccggcgacgcccacatcatcggcagaatcgagagctacagctgcaagatggccggcgacgacaagcacatgttcaagcagttctgccaggagggccagccccacgtgctggaggccctgagccccccccagaccagcggcctgagccccagctag

SEQ ID NO: 223447 - protein, 195 aa, Artificial Sequence
  derived and/or modified sequence
MENHKSNNKENITIVDISRKINQLPEAERNLLENGSVYVGLNAALCGLIANSLFRRILNVTKARIAAGLPMAGIPFLTTDLTYRCFVSFPLNTGDLDCETCTITRSGLTGLVIGGLYPVFLAIPVNGGLAARYQSALLPHKGNILSYWIRTSKPVFRKMLFPILLQTMFSAYLGSEQYKLLIKALQLSEPGKEIH

SEQ ID NO: 223448 - protein, 125 aa, Artificial Sequence
  derived and/or modified sequence
MAGIPFLTTDLTYRCFVSFPLNTGDLDCETCTITRSGLTGLVIGGLYPVFLAIPVNGGLAARYQSALLPHKGNILSYWIRTSKPVFRKMLFPILLQTMFSAYLGSEQYKLLIKALQLSEPGKEIH

SEQ ID NO: 223449 - DNA, 588 bp, Artificial Sequence
  derived and/or modified sequence
atggagaaccacaagagcaacaacaaggagaacatcaccatcgtggacatcagcagaaagatcaaccagctgcccgaggccgagagaaacctgctggagaacggcagcgtgtacgtgggcctgaacgccgccctgtgcggcctgatcgccaacagcctgttcagaagaatcctgaacgtgaccaaggccagaatcgccgccggcctgcccatggccggcatccccttcctgaccaccgacctgacctacagatgcttcgtgagcttccccctgaacaccggcgacctggactgcgagacctgcaccatcaccagaagcggcctgaccggcctggtgatcggcggcctgtaccccgtgttcctggccatccccgtgaacggcggcctggccgccagataccagagcgccctgctgccccacaagggcaacatcctgagctactggatcagaaccagcaagcccgtgttcagaaagatgctgttccccatcctgctgcagaccatgttcagcgcctacctgggcagcgagcagtacaagctgctgatcaaggccctgcagctgagcgagcccggcaaggagatccactag

SEQ ID NO: 223450 - DNA, 588 bp, Artificial Sequence
  derived and/or modified sequence
atggaaaatcataagagtaacaataaagaaaatatcaccattgttgatatcagtaggaaaattaatcagctgcccgaggccgaacgcaacctgctcgaaaacggatcggtgtacgtgggactgaatgctgctctttgcggtctcatagccaacagtttattccgcaggatactgaacgtcacaaaggctcgtatcgctgctgggcttcccatggctggcatccccttccttactacagaccttacctacaggtgcttcgtgtctttcccccttaacacgggcgacttagactgtgagacctgcacgatcactagatctggactcacaggcctcgtgatcggagggctgtaccccgtctttctagcgattccagtgaacggagggctggcagcccgctatcagtccgctttactccctcataagggcaatatccttagctactggatcaggacctcaaagcctgtatttcggaagatgctgttccccatcttgctgcaaaccatgtttagcgcctatttaggttccgagcagtataagttgctgataaaagcgctgcagttatctgagccagggaaagagattcactag

SEQ ID NO: 223451 - DNA, 588 bp, Artificial Sequence
  derived and/or modified sequence
atggagaaccacaagagcaacaacaaggagaacatcaccatcgtggacatcagcaggaagatcaaccagctgcctgaggccgagaggaacctgctggagaatggatctgtgtatgtgggcctgaatgctgccctgtgtggcctgattgccaacagcctcttccgccgcatcctgaatgtgaccaaggccagaattgctgctggcctgcccatggccggcatccccttcctgaccacagacctgacctaccgctgctttgtgtccttccccctgaacacaggagacctggactgtgagacctgcaccatcaccaggagcggcctgaccggcctggtgattggaggcctgtaccctgtgttcctggccatccctgtgaatggaggcctggccgcccgctaccagagcgccctgctgccccacaagggcaacatcctgagctactggatccgcaccagcaagcctgtgttcaggaagatgctgttccccatcctgctgcagaccatgttcagcgcctacctgggcagcgagcagtacaagctgctgatcaaggccctgcagctgtctgagcccgggaaggagatccactag

SEQ ID NO: 223452 - DNA, 588 bp, Artificial Sequence
  derived and/or modified sequence
atggagaaccacaagagcaacaacaaggagaacatcaccatcgtggacatctctagaaagattaaccagttgccggaagccgagagaaacctgctcgaaaatggctccgtttacgtgggtctgaacgcggctctgtgtggactcatcgctaacagtctgtttagaagaattctcaacgttactaaggcaagaattgccgccggcctgccgatggcagggatcccttttttgaccaccgacctcacttacagatgcttcgtcagcttccccctcaacaccggcgacctggactgtgagacgtgtaccatcacaaggagcggtctgaccggacttgtgatcggcggtctgtatcctgtgttcctggcaattccggtcaacggaggcctggcagcccggtatcagtcagccctactgcctcacaaaggaaatatcctgtcttactggatccgcacgtccaaacccgtgttccggaagatgctctttccaatcctgctgcaaacaatgttttccgcctacctcggatctgaacagtataaactgctgatcaaagcccttcagctcagtgagcccgggaaggagatccattag

SEQ ID NO: 223453 - DNA, 588 bp, Artificial Sequence
  derived and/or modified sequence
atggagaatcataaatctaacaataaagagaatatcaccatagtcgacatctcacgaaagattaatcagctgcccgaagctgaacggaatctattggaaaatggaagcgtctatgtaggccttaacgcggcactctgcgggcttattgcgaattccctgtttcggcgaatattgaacgtgacaaaggcgagaatcgccgcaggacttccaatggctggtattccatttctcacgacagacctcacatatagatgcttcgtgagttttcccctgaatactggcgatctggactgtgagacatgcaccattacaaggagcggcctcacagggctagtcataggcggtctttaccccgtcttcctggccatccccgtgaatggtggcctggccgcacgataccagtccgcactcctgccccataagggaaatatcctatcgtattggatccgaacatccaaacccgtgtttaggaagatgttgtttccaattctgctgcaaactatgttcagcgcctatctcggcagtgagcagtataaactgctgatcaaggcgctccagctctctgaacccggaaaggagatccattag

SEQ ID NO: 223454 - DNA, 739 bp, Artificial Sequence
  derived and/or modified sequence
aaagatggctgcgcccaggtaatttgagcaaaggccacagtgaactccggcgtggctgaggaaggaggaggcacccacaggctgctgggaggagagcataaggctcaaaatggaaaatcataaatccaataataaggaaaacataacaattgttgatatatccagaaaaattaaccagcttccagaagcagaaaggaatctacttgaaaatggatcggtttatgttggattaaatgctgctctttgtggcctcatagcaaacagtctttttcgacgcatcttgaatgtgacaaaggctcgcatagctgctggcttaccaatggcagggataccttttcttacaacagacttaacttacagatgttttgtaagttttcctttgaatacaggtgatttggattgtgaaacctgtaccataacacggagtggactgactggtcttgttattggtggtctataccctgttttcttggctatacctgtaaatggtggtctagcagccaggtatcaatcagctctgttaccacacaaagggaacatcttaagttactggattagaacttctaagcctgtctttagaaagatgttatttcctattttgctccagactatgttttcagcataccttgggtctgaacaatataaactacttataaaggcccttcagttatctgaacctggcaaagaaattcactgattttaaacaaatatgtaaacaaaaataaaatggtaaaaacag

SEQ ID NO: 223455 - DNA, 656 bp, Artificial Sequence
  derived and/or modified sequence
acgagtcagccaaagatggctgcgcccaggtaatttgagcaaaggccacagtgaactccggcgtggctgaggaaggaggaggcacccacaggctgctgggaggagagcataaggaatctacttgaaaatggatcggtttatgttggattaaatgctgctctttgtggcctcatagcaaacagtctttttcgacgcatcttgaatgtgacaaaggctcgcatagctgctggcttaccaatggcagggataccttttcttacaacagacttaacttacagatgttttgtaagttttcctttgaatacaggtgatttggattgtgaaacctgtaccataacacggagtggactgactggtcttgttattggtggtctataccctgttttcttggctatacctgtaaatggtggtctagcagccaggtatcaatcagctctgttaccacacaaagggaacatcttaagttactggattagaacttctaagcctgtctttagaaagatgttatttcctattttgctccagactatgttttcagcataccttgggtctgaacaatataaactacttataaaggcccttcagttatctgaacctggcaaagaaattcactgattttaaacaaatatgtaaacaaaaataaaatggtaaaaaca

SEQ ID NO: 223456 - protein, 1196 aa, Artificial Sequence
  derived and/or modified sequence
MGHFEKGQHALLNEGEENEMEIFGYRTQGCRKSLCLAGSIFSFGILPLVFYWRPAWHVWAHCVPCSLQEADTVLLRTTDEFQIYSWKKVIWIYLSALNSAFGLTPDHPLMTDEEYIINRAIRKPDLKVRCIKVQKIRYVWNYLEGQFQKIGSLEDWLSSAKIHQKFGSGLTREEQEIRRLICGPNTIDVEVTPIWKLLIKEVLNPFYIFQLFSVCLWFSEDYKEYAFAIIIMSIISISLTVYDLREQSVKLHHLVESHNSITVSVCGRKAGVQELESRVLVPGDLLILTGNKVLMPCDAVLIEGSCVVDEGMLTGESIPVTKTPLPKMDSSVPWKTQSEADYKRHVLFCGTEVIQAKAACSGTVRAVVLQTGFNTAKGDLVRSILYPKPVNFQLYRDAIRFLLCLVGTATIGMIYTLCVYVLSGEPPEEVVRKALDVITIAVPPALPAALTTGIIYAQRRLKKRGIFCISPQRINVCGQLNLVCFDKTGTLTRDGLDLWGVVSCDRNGFQEVHSFASGQALPWGPLCAAMASCHSLILLDGTIQGDPLDLKMFEATTWEMAFSGDDFHIKGVPAHAMVVKPCRTASQVPVEGIAILHQFPFSSALQRMTVIVQEMGGDRLAFMKGAPERVASFCQPETVPTSFVSELQIYTTQGFRVIALAYKKLENDHHATTLTRETVESDLIFLGLLILENRLKEETKPVLEELISARIRTVMITGDNLQTAITVARKSGMVSESQKVILIEANETTGSSSASISWTLVEEKKHIMYGNQDNYINIRDEVSDKGREGSYHFALTGKSFHVISQHFSSLLPKILINGTIFARMSPGQKSSLVEEFQKLDYFVGMCGDGANDCGALKMAHVGISLSEQEASVASPFTSKTPNIECVPHLIKEGRAALVTSFCMFKYMALYSMIQYVGVLLLYWETNSLSNYQFLFQDLAITTLIGVTMNLNGAYPKLVPFRPAGRLISPPLLLSVIFNILLSLAMHIAGFILVQRQPWYSVEIHSACTVQNESISELTMSPTAPEKMESNSTFTSFENTTVWFLGTINCITVALVFSKGKPFRQPTYTNYIFVLVLIIQLGVCLFILFADIPELYRRLDLLCTPVLWRASIVIMLSLNFIVSLVAEEAVIENRALWMMIKRCFGYQSKSQYRIWQRDLANDPSWPPLNQTSHSDMPECGRGVSYSNPVFESNEEQL

SEQ ID NO: 223457 - protein, 212 aa, Artificial Sequence
  derived and/or modified sequence
MHIAGFILVQRQPWYSVEIHSACTVQNESISELTMSPTAPEKMESNSTFTSFENTTVWFLGTINCITVALVFSKGKPFRQPTYTNYIFVLVLIIQLGVCLFILFADIPELYRRLDLLCTPVLWRASIVIMLSLNFIVSLVAEEAVIENRALWMMIKRCFGYQSKSQYRIWQRDLANDPSWPPLNQTSHSDMPECGRGVSYSNPVFESNEEQL

SEQ ID NO: 223458 - DNA, 1731 bp, Artificial Sequence
  derived and/or modified sequence
atgggccacttcgagaagggccagcacgccctgctgaacgagggcgaggagaacgagatggagatcttcggctacagaacccagggctgcagaaagagcctgtgcctggccggcagcatcttcagcttcggcatcctgcccctggtgttctactggagacccgcctggcacgtgtgggcccactgcgtgccctgcagcctgcaggaggccgacaccgtgctgctgagaaccaccgacgagttccagatctacagctggaagaaggtgatctggatctacctgagcgccctgaacagcgccttcggcctgacccccgaccaccccctgatgaccgacgaggagtacatcatcaacagagccatcagaaagcccgacctgaaggtgagatgcatcaaggtgcagaagatcagatacgtgtggaactacctggagggccagttccagaagatcggcagcctggaggactggctgagcagcgccaagatccaccagaagttcggcagcggcctgaccagagaggagcaggagatcagaagactgatctgcggccccaacaccatcgacgtggaggtgacccccatctggaagctgctgatcaaggaggtgctgaaccccttctacatcttccagctgttcagcgtgtgcctgtggttcagcgaggactacaaggagtacgccttcgccatcatcatcatgagcatcatcagcatcagcctgaccgtgtacgacctgagagagcagagcgtgaagctgcaccacctggtggagagccacaacagcatcaccgtgagcgtgtgcggcagaaaggccggcgtgcaggagctggagagcagagtgctggtgcccggcgacctgctgatcctgaccggcaacaaggtgctgatgccctgcgacgccgtgctgatcgagggcagctgcgtggtggacgagggcatgctgaccggcgagagcatccccgtgaccaagacccccctgcccaagatggacagcagcgtgccctggaagacccagagcgaggccgactacaagagacacgtgctgttctgcggcaccgaggtgatccaggccaaggccgcctgcagcggcaccgtgagagccgtggtgctgcagaccggcttcaacaccgccaagggcgacctggtgagaagcatcctgtaccccaagcccgtgaacttccagctgtacagagacgccatcagattcctgctgtgcctggtgggcaccgccaccatcggcatgatctacaccctgtgcgtgtacgtgctgagcggcgagccccccgaggaggtggtgagaaaggccctggacgtgatcaccatcgccgtgccccccgccctgcccgccgccctgaccaccggcatcatctacgcccagagaagactgaagaagagaggcatcttctgcatcagcccccagagaatcaacgtgtgcggccagctgaacctggtgtgcttcgacaagaccggcaccctgaccagagacggcctggacctgtggggcgtggtgagctgcgacagaaacggcttccaggaggtgcacagcttcgccagcggccaggccctgccctggggccccctgtgcgccgccatggccagctgccacagcctgatcctgctggacggcaccatccagggcgaccccctggacctgaagatgttcgaggccaccacctgggtgagcctgtgcagcagcgagaacctgagaagcttcttcaacgccagagccacctag

SEQ ID NO: 223459 - DNA, 3591 bp, Artificial Sequence
  derived and/or modified sequence
atgggccacttcgagaagggccagcacgccctgctgaacgagggcgaggagaacgagatggagatcttcggctacagaacccagggctgcagaaagagcctgtgcctggccggcagcatcttcagcttcggcatcctgcccctggtgttctactggagacccgcctggcacgtgtgggcccactgcgtgccctgcagcctgcaggaggccgacaccgtgctgctgagaaccaccgacgagttccagatctacagctggaagaaggtgatctggatctacctgagcgccctgaacagcgccttcggcctgacccccgaccaccccctgatgaccgacgaggagtacatcatcaacagagccatcagaaagcccgacctgaaggtgagatgcatcaaggtgcagaagatcagatacgtgtggaactacctggagggccagttccagaagatcggcagcctggaggactggctgagcagcgccaagatccaccagaagttcggcagcggcctgaccagagaggagcaggagatcagaagactgatctgcggccccaacaccatcgacgtggaggtgacccccatctggaagctgctgatcaaggaggtgctgaaccccttctacatcttccagctgttcagcgtgtgcctgtggttcagcgaggactacaaggagtacgccttcgccatcatcatcatgagcatcatcagcatcagcctgaccgtgtacgacctgagagagcagagcgtgaagctgcaccacctggtggagagccacaacagcatcaccgtgagcgtgtgcggcagaaaggccggcgtgcaggagctggagagcagagtgctggtgcccggcgacctgctgatcctgaccggcaacaaggtgctgatgccctgcgacgccgtgctgatcgagggcagctgcgtggtggacgagggcatgctgaccggcgagagcatccccgtgaccaagacccccctgcccaagatggacagcagcgtgccctggaagacccagagcgaggccgactacaagagacacgtgctgttctgcggcaccgaggtgatccaggccaaggccgcctgcagcggcaccgtgagagccgtggtgctgcagaccggcttcaacaccgccaagggcgacctggtgagaagcatcctgtaccccaagcccgtgaacttccagctgtacagagacgccatcagattcctgctgtgcctggtgggcaccgccaccatcggcatgatctacaccctgtgcgtgtacgtgctgagcggcgagccccccgaggaggtggtgagaaaggccctggacgtgatcaccatcgccgtgccccccgccctgcccgccgccctgaccaccggcatcatctacgcccagagaagactgaagaagagaggcatcttctgcatcagcccccagagaatcaacgtgtgcggccagctgaacctggtgtgcttcgacaagaccggcaccctgaccagagacggcctggacctgtggggcgtggtgagctgcgacagaaacggcttccaggaggtgcacagcttcgccagcggccaggccctgccctggggccccctgtgcgccgccatggccagctgccacagcctgatcctgctggacggcaccatccagggcgaccccctggacctgaagatgttcgaggccaccacctgggagatggccttcagcggcgacgacttccacatcaagggcgtgcccgcccacgccatggtggtgaagccctgcagaaccgccagccaggtgcccgtggagggcatcgccatcctgcaccagttccccttcagcagcgccctgcagagaatgaccgtgatcgtgcaggagatgggcggcgacagactggccttcatgaagggcgcccccgagagagtggccagcttctgccagcccgagaccgtgcccaccagcttcgtgagcgagctgcagatctacaccacccagggcttcagagtgatcgccctggcctacaagaagctggagaacgaccaccacgccaccaccctgaccagagagaccgtggagagcgacctgatcttcctgggcctgctgatcctggagaacagactgaaggaggagaccaagcccgtgctggaggagctgatcagcgccagaatcagaaccgtgatgatcaccggcgacaacctgcagaccgccatcaccgtggccagaaagagcggcatggtgagcgagagccagaaggtgatcctgatcgaggccaacgagaccaccggcagcagcagcgccagcatcagctggaccctggtggaggagaagaagcacatcatgtacggcaaccaggacaactacatcaacatcagagacgaggtgagcgacaagggcagagagggcagctaccacttcgccctgaccggcaagagcttccacgtgatcagccagcacttcagcagcctgctgcccaagatcctgatcaacggcaccatcttcgccagaatgagccccggccagaagagcagcctggtggaggagttccagaagctggactacttcgtgggcatgtgcggcgacggcgccaacgactgcggcgccctgaagatggcccacgtgggcatcagcctgagcgagcaggaggccagcgtggccagccccttcaccagcaagacccccaacatcgagtgcgtgccccacctgatcaaggagggcagagccgccctggtgaccagcttctgcatgttcaagtacatggccctgtacagcatgatccagtacgtgggcgtgctgctgctgtactgggagaccaacagcctgagcaactaccagttcctgttccaggacctggccatcaccaccctgatcggcgtgaccatgaacctgaacggcgcctaccccaagctggtgcccttcagacccgccggcagactgatcagcccccccctgctgctgagcgtgatcttcaacatcctgctgagcctggccatgcacatcgccggcttcatcctggtgcagagacagccctggtacagcgtggagatccacagcgcctgcaccgtgcagaacgagagcatcagcgagctgaccatgagccccaccgcccccgagaagatggagagcaacagcaccttcaccagcttcgagaacaccaccgtgtggttcctgggcaccatcaactgcatcaccgtggccctggtgttcagcaagggcaagcccttcagacagcccacctacaccaactacatcttcgtgctggtgctgatcatccagctgggcgtgtgcctgttcatcctgttcgccgacatccccgagctgtacagaagactggacctgctgtgcacccccgtgctgtggagagccagcatcgtgatcatgctgagcctgaacttcatcgtgagcctggtggccgaggaggccgtgatcgagaacagagccctgtggatgatgatcaagagatgcttcggctaccagagcaagagccagtacagaatctggcagagagacctggccaacgaccccagctggccccccctgaaccagaccagccacagcgacatgcccgagtgcggcagaggcgtgagctacagcaaccccgtgttcgagagcaacgaggagcagctgtag

SEQ ID NO: 223460 - DNA, 639 bp, Artificial Sequence
  derived and/or modified sequence
atgcacatcgccggcttcatcctggtgcagagacagccctggtacagcgtggagatccacagcgcctgcaccgtgcagaacgagagcatcagcgagctgaccatgagccccaccgcccccgagaagatggagagcaacagcaccttcaccagcttcgagaacaccaccgtgtggttcctgggcaccatcaactgcatcaccgtggccctggtgttcagcaagggcaagcccttcagacagcccacctacaccaactacatcttcgtgctggtgctgatcatccagctgggcgtgtgcctgttcatcctgttcgccgacatccccgagctgtacagaagactggacctgctgtgcacccccgtgctgtggagagccagcatcgtgatcatgctgagcctgaacttcatcgtgagcctggtggccgaggaggccgtgatcgagaacagagccctgtggatgatgatcaagagatgcttcggctaccagagcaagagccagtacagaatctggcagagagacctggccaacgaccccagctggccccccctgaaccagaccagccacagcgacatgcccgagtgcggcagaggcgtgagctacagcaaccccgtgttcgagagcaacgaggagcagctgtag

SEQ ID NO: 223461 - DNA, 1731 bp, Artificial Sequence
  derived and/or modified sequence
atgggccattttgaaaaaggtcagcatgccctgctcaatgagggcgaggagaacgaaatggaaatttttgggtataggacccaggggtgcagaaagtcattatgcctggcgggctccattttttcctttggcattctccccctggtcttctactggcgcccagcctggcacgtgtgggcccactgcgtgccctgttctcttcaggaagcagatacagtcctactgcgtaccaccgacgaatttcagatttattcctggaagaaagtgatatggatttatctgtcagcattaaacagtgcctttggcctgacacccgatcaccctctcatgaccgacgaggaatacattattaatcgagctatccggaagcccgatttgaaggtaaggtgcatcaaagtgcagaagattcgctacgtgtggaattatctagaggggcagtttcagaaaattgggtcactggaggattggctctcctctgccaagatccatcaaaagttcggcagcggacttaccagggaggagcaggagatcaggcggcttatttgcggtccaaacactatcgacgtggaagtgacgcctatctggaaactgctgatcaaggaggttctcaacccattctatatctttcagctcttttctgtgtgcttgtggttcagtgaggattacaaggagtacgccttcgccatcattattatgagtattatatcgatctccttgaccgtttatgatctgcgggaacagtctgtgaaactccaccatttagtggaaagtcataactccattaccgtttctgtatgtggacggaaagccggggtccaggaactagaatcacgcgtgctcgtcccaggagatctgctcatcctaactgggaacaaggtcctgatgccctgcgatgcagtactcattgagggctcctgcgtggtcgatgagggcatgctaacaggtgagagcattcccgtgaccaagacccccttgccaaagatggacagttcggtgccatggaaaacacagtcggaggccgactataaaagacacgtactgttttgtggcactgaagtgatccaggctaaggccgcctgctccggcactgtgagggccgtggtgttacagacaggatttaacacggccaaaggtgacctcgtacggtccatcctctatccgaaacccgtaaacttccagctgtatagagatgcgatccggtttctgctgtgtcttgttggcacggccacaatcggcatgatttacacattgtgcgtttatgttctttcaggcgagccacccgaggaagtagtgcgtaaggccttggacgtcatcactatcgctgtgcctcccgcactcccagccgccttgaccacggggatcatatacgcccagaggaggctgaagaagagggggatcttctgtatatcaccccaacggataaatgtttgcggacagctgaacctcgtctgcttcgacaaaactggcactctaacacgggatgggttggatttgtggggtgtggtatcctgcgacaggaatgggtttcaggaagtacactcctttgccagcggacaggccctgccttgggggccattatgtgccgccatggcctcatgccattcactgatactgttagacggcaccatccagggtgacccactcgacttgaagatgtttgaggccactacctgggtgtccctgtgcagctcagagaacctacggagcttttttaatgctagggctacctag

SEQ ID NO: 223462 - DNA, 3591 bp, Artificial Sequence
  derived and/or modified sequence
atggggcactttgagaagggccaacatgctctgttgaacgagggcgaagagaatgaaatggaaatattcggttaccggacccagggttgcaggaaaagtctttgcttagccggctccatcttttccttcggtatactcccgctggttttttactggcgtcccgcttggcatgtctgggcccactgtgtgccatgttcattgcaggaggctgataccgtcctcctgaggactaccgacgagttccaaatttattcttggaagaaggttatctggatttacctgagcgcattgaattctgctttcggcctaacgcccgatcacccgctcatgacagatgaagagtatatcattaatcgtgctattcgcaagcctgatcttaaggttaggtgcattaaggtacagaagatacgctatgtgtggaattacctagagggtcagtttcagaagataggcagcctcgaggactggttgagcagtgcaaagatacatcagaagtttggttctggccttacacgagaagaacaagagatacgccggctcatctgtgggccaaatacaatcgacgtagaggtcacgccaatttggaagctgcttatcaaggaggtcctgaatcccttctatattttccagctgttttccgtctgcctttggttcagcgaggactataaagaatacgcctttgccatcatcattatgtctatcattagcatcagtctcacagtttacgatctacgggaacagtctgttaagctgcaccacttagtcgaatcacataacagtataactgtgtccgtctgcggtcgcaaggcaggtgttcaagagctggagagcagagtgctggtccctggagacctccttatcctgactgggaataaggtgctgatgccctgcgatgcagtgctgattgaggggtcgtgtgtcgtggacgagggcatgctcactggtgaatccatccccgtaactaaaacacccttgccaaagatggatagttccgtgccttggaaaacacagtccgaggcagattataaacgacacgtgctattctgcggcactgaggtgattcaggcaaaagccgcgtgctctggaacagtgcgcgctgtggtgctccagaccggcttcaatactgctaaaggcgatttggtgagaagcattctatatcctaaaccagtcaatttccagctttaccgcgatgcaattcgatttctgctgtgtttagttggcaccgcgacaataggaatgatttatacactttgtgtgtacgttctgtcgggagagcctcctgaggaagtggtacgaaaagccttggacgtgatcactatagccgtgccccccgccctgccagcggccctgaccaccggcataatatacgcccagcgcaggctcaagaagagaggcatattttgcatttcccctcagaggatcaatgtatgcgggcagctgaatcttgtgtgtttcgataaaacaggtactctcacccgtgatggcctagacctgtggggagttgtgagctgtgatagaaatggatttcaggaggtccattcgtttgcatcaggccaagccctgccctggggacccctgtgcgcggctatggcgtcatgtcacagcttgatactcttggacggcaccatacagggtgatccgctcgatttaaagatgttcgaggccaccacatgggaaatggcctttagcggagatgatttccacatcaaaggagtgcccgcgcatgctatggtagtcaaaccttgtagaaccgcgagccaggttcccgtcgagggaatagctatcctccatcagttcccatttagtagtgctctacagcggatgaccgtgatcgttcaggagatggggggcgaccgcctagcctttatgaagggcgcacctgagagagtagcttccttctgccagcctgaaactgttcccacatcattcgtaagcgagctccagatttacactacccaaggtttcagggtgatcgcattagcttataaaaagcttgagaatgaccatcacgctacaactttgacaagggagaccgtggagagcgatctaatttttttgggactgcttattctcgagaatcggttgaaggaggagactaaacctgtgctggaagagttaatctcagcaagaatcaggactgttatgattacaggggacaacctacagactgctattactgtagcacgaaagtccggaatggtctctgaaagccagaaggtgattctgattgaagccaacgagaccaccggctcatcaagcgcctccattagctggacattagtcgaagaaaaaaaacatatcatgtacggaaatcaggacaattacatcaacatcagggacgaggtcagtgataaaggaagggagggctcctatcacttcgctctgaccggtaagtccttccacgtgatcagtcagcattttagttctctcctgcctaagattctcataaatggcacaatctttgcaagaatgagccccggccaaaaaagctcgctggtggaggagtttcaaaagcttgactattttgttggaatgtgtggagacggcgctaatgattgcggggcactcaaaatggcacacgtgggcattagcctatcagaacaggaagcatccgtggcatcaccctttactagcaagaccccgaacatagaatgcgtcccacatcttataaaggaagggcgcgcagccctggtgacatctttctgtatgttcaagtatatggccctttactcaatgatccagtacgtaggggtgctgctcttatactgggagactaacagcctgtctaattaccagttcctttttcaggacctcgctattactacactaataggcgtgaccatgaacctgaatggggcttatccaaagcttgtccctttccgacctgcgggcagactcatctcccccccactcctcctctccgtcatatttaacattctactctcccttgccatgcacatcgcagggtttatcctggtccagcgacagccatggtactctgtggagattcacagtgcctgtacagtccagaacgagtcaatttctgaactgacaatgtcaccaaccgcaccagagaagatggaaagcaacagcacattcacctctttcgagaacactactgtctggtttttgggcacgatcaactgcattaccgttgcgcttgttttttcaaaaggaaaaccattccggcagcctacttataccaactatatctttgtactggtgttaattattcagctaggggtgtgcctgtttattctgtttgctgacattccagagctgtaccggagactcgacctcttgtgcactccagtgctctggcgagcatcaatcgtgatcatgcttagtctgaatttcatcgtgagtctggtggctgaggaggccgtgattgagaatagggctctgtggatgatgatcaagcggtgtttcggttaccagagtaagtctcaatatcggatatggcagcgcgaccttgccaacgatccaagttggccaccattgaaccagactagccacagtgatatgcctgaatgcggtcggggggtgagctatagtaatccggtatttgagtccaatgaggagcagctttag

SEQ ID NO: 223463 - DNA, 639 bp, Artificial Sequence
  derived and/or modified sequence
atgcacattgctggttttatactggtccagaggcagccctggtacagtgtggagattcattctgcctgcacggtgcaaaatgagtccatctccgagcttactatgtcgccaactgccccagaaaagatggagagcaactctacttttacttcttttgagaacaccactgtttggtttctgggaacaataaactgcatcactgtggccctagtattttccaagggaaagcctttccgccagccaacctacacgaattacatctttgttttggttttgatcatccagttgggcgtgtgccttttcatcctctttgctgatatccctgaactgtaccggagactggacctgctctgtactcctgtgctctggcgagcatccatcgtaattatgttaagcctcaatttcatagtctcattagtggccgaagaggccgtgatcgaaaaccgggccctttggatgatgatcaagcgctgtttcggctatcagagtaaatctcagtatcggatctggcaacgcgacctcgctaatgacccaagttggcccccattgaaccagactagccatagtgacatgccagagtgcggacgaggcgtcagttactctaaccctgtcttcgagtctaatgaggagcagctttag

SEQ ID NO: 223464 - DNA, 1731 bp, Artificial Sequence
  derived and/or modified sequence
atgggccactttgagaagggccagcacgccctgctgaatgaaggagaagaaaatgagatggagatcttcggctaccgcacccagggctgcaggaagagcctgtgcctggccggcagcatcttctcctttggcatcctgcccctggtgttctactggaggcctgcctggcacgtgtgggcccactgtgtgccctgcagcctgcaggaggccgacacagtgctgctgcggaccacagatgagttccagatctacagctggaagaaggtgatctggatctacctgagcgccctgaacagcgccttcggcctgaccccagaccaccccctgatgacagatgaggagtacatcatcaacagagccatcaggaagccagacctgaaggtgcgctgcatcaaggtgcagaagatccgctacgtgtggaactacctggagggccagttccagaagattggcagcctggaggactggctgagcagcgccaagatccaccagaagtttggcagcggcctgacccgggaggagcaggagatccggcggctcatctgtggccccaacaccattgatgtggaggtgacccccatctggaagctgctgatcaaggaggtgctgaaccccttctacatcttccagctgttctctgtgtgcctgtggttcagcgaggactacaaggagtatgcctttgccatcatcatcatgagcatcatcagcatcagcctgactgtgtatgacctgcgggagcagagcgtgaagctgcaccacctggtggagagccacaacagcatcaccgtgtctgtgtgtggcaggaaggccggcgtgcaggagctggagagccgggtgctggtgcctggggacctgctgatcctgactggaaacaaggtgctgatgccctgtgatgctgtgctgattgagggcagctgtgtggtggatgagggcatgctgaccggggagagcatccctgtgaccaagacccccctgcccaagatggacagctctgtgccctggaagacccagagcgaggccgactacaagagacatgtgctcttctgtggcacagaggtgatccaggccaaggccgcctgcagcggcaccgtgcgggctgtggtgctgcagacaggcttcaacacagccaagggggacctggtgcgcagcatcctgtaccccaagcctgtgaacttccagctgtacagagatgccatccgcttcctgctgtgcctggtgggcacagccaccatcggcatgatctacaccctgtgtgtgtatgtgctgtctggagagcccccagaggaggtggtgaggaaggccctggatgtgatcaccatcgctgtgcccccagccctgcctgctgccctgaccaccggcatcatctatgcccagaggcggctgaagaagaggggcatcttctgcatcagcccccagaggatcaacgtgtgtggccagctgaacctggtgtgctttgacaagacaggcaccctgaccagagatggcctggacctgtggggcgtggtgtcctgtgacagaaatggcttccaggaggtgcacagctttgccagcggccaggccctgccctggggccccctgtgtgccgccatggccagctgccacagcctcatcctgctggatggcaccatccagggcgaccccctggacctgaagatgtttgaggccaccacctgggtgtccctgtgcagcagcgagaacctgcgctccttcttcaatgcccgggccacctag

SEQ ID NO: 223465 - DNA, 3591 bp, Artificial Sequence
  derived and/or modified sequence
atgggccactttgagaagggccagcacgccctgctgaatgaaggagaagaaaatgagatggagatcttcggctaccgcacccagggctgcaggaagagcctgtgcctggccggcagcatcttctcctttggcatcctgcccctggtgttctactggaggcctgcctggcacgtgtgggcccactgtgtgccctgcagcctgcaggaggccgacacagtgctgctgcggaccacagatgagttccagatctacagctggaagaaggtgatctggatctacctgagcgccctgaacagcgccttcggcctgaccccagaccaccccctgatgacagatgaggagtacatcatcaacagagccatcaggaagccagacctgaaggtgcgctgcatcaaggtgcagaagatccgctacgtgtggaactacctggagggccagttccagaagattggcagcctggaggactggctgagcagcgccaagatccaccagaagtttggcagcggcctgacccgggaggagcaggagatccggcggctcatctgtggccccaacaccattgatgtggaggtgacccccatctggaagctgctgatcaaggaggtgctgaaccccttctacatcttccagctgttctctgtgtgcctgtggttcagcgaggactacaaggagtatgcctttgccatcatcatcatgagcatcatcagcatcagcctgactgtgtatgacctgcgggagcagagcgtgaagctgcaccacctggtggagagccacaacagcatcaccgtgtctgtgtgtggcaggaaggccggcgtgcaggagctggagagccgggtgctggtgcctggggacctgctgatcctgactggaaacaaggtgctgatgccctgtgatgctgtgctgattgagggcagctgtgtggtggatgagggcatgctgaccggggagagcatccctgtgaccaagacccccctgcccaagatggacagctctgtgccctggaagacccagagcgaggccgactacaagagacatgtgctcttctgtggcacagaggtgatccaggccaaggccgcctgcagcggcaccgtgcgggctgtggtgctgcagacaggcttcaacacagccaagggggacctggtgcgcagcatcctgtaccccaagcctgtgaacttccagctgtacagagatgccatccgcttcctgctgtgcctggtgggcacagccaccatcggcatgatctacaccctgtgtgtgtatgtgctgtctggagagcccccagaggaggtggtgaggaaggccctggatgtgatcaccatcgctgtgcccccagccctgcctgctgccctgaccaccggcatcatctatgcccagaggcggctgaagaagaggggcatcttctgcatcagcccccagaggatcaacgtgtgtggccagctgaacctggtgtgctttgacaagacaggcaccctgaccagagatggcctggacctgtggggcgtggtgtcctgtgacagaaatggcttccaggaggtgcacagctttgccagcggccaggccctgccctggggccccctgtgtgccgccatggccagctgccacagcctcatcctgctggatggcaccatccagggcgaccccctggacctgaagatgtttgaggccaccacctgggagatggccttctctggagatgacttccacatcaagggcgtgcctgcccacgccatggtggtgaagccctgcaggacagccagccaggtgcctgtggagggcatcgccatcctgcaccagttccccttcagcagcgccctgcagaggatgacagtgattgtgcaggagatgggcggggaccggctggccttcatgaagggggcccctgagcgggtggccagcttctgccagcctgagaccgtgcccaccagctttgtgtctgagctgcagatctacaccacccagggcttccgggtcatcgccctggcctacaagaagctggagaatgaccaccacgccaccaccctgacccgggagaccgtggagagtgacctgatcttcctgggcctgctgatcctggagaaccggctgaaggaggagaccaagcctgtgctggaggagctgatcagcgcccgcatcagaacagtgatgatcactggagacaacctgcagacagccatcaccgtggccaggaagagcggcatggtgtctgagagccagaaggtgatcctgattgaggccaatgagaccaccggcagcagcagcgccagcatctcctggaccctggtggaggagaagaagcacatcatgtatggcaaccaggacaactacatcaacatcagagatgaggtgtctgacaagggccgggagggcagctaccactttgccctgaccgggaagagcttccacgtgatcagccagcacttcagcagcctgctgcccaagatcctgatcaatggcaccatctttgccaggatgagccctggccagaagagcagcctggtggaggagttccagaagctggactactttgtgggcatgtgtggagatggagccaatgactgtggggccctgaagatggcccacgtgggcatcagcctgtctgagcaggaggcctctgtggccagccccttcaccagcaagacccccaacattgaatgtgtgccccacctgatcaaggagggccgggccgccctggtgaccagcttctgcatgttcaagtacatggccctgtacagcatgatccagtatgtgggcgtgctgctgctgtactgggagaccaacagcctgagcaactaccagttcctgttccaggacctggccatcaccaccctcatcggcgtgaccatgaacctgaatggagcctaccccaagctggtgcccttccggcctgctggccgcctcatcagcccccccctgctgctgagcgtcatcttcaacatcctgctgagcctggccatgcacatcgccggcttcatcctggtgcagaggcagccctggtacagcgtggagatccacagcgcctgcaccgtgcagaatgaaagcatcagcgagctgaccatgagccccacagcccctgagaagatggagagcaacagcaccttcaccagctttgagaacaccaccgtgtggttcctgggcaccatcaactgcatcaccgtggccctggtgttcagcaagggcaagcccttccggcagcccacctacaccaactacatctttgtgctggtgctgatcatccagctgggcgtgtgcctcttcatcctgtttgctgacatccctgagctgtaccgccgcctggacctgctgtgcacccctgtgctgtggagggccagcatcgtcatcatgctgagcctgaacttcatcgtgtccctggtggccgaggaggccgtgattgaaaatagagccctgtggatgatgatcaagcgctgcttcggctaccagagcaagagccagtaccgcatctggcagagggacctggccaatgaccccagctggccacccctgaaccagaccagccacagcgacatgccagaatgtggccggggcgtgtcctacagcaaccctgtgtttgagagcaatgaggagcagctgtag

SEQ ID NO: 223466 - DNA, 639 bp, Artificial Sequence
  derived and/or modified sequence
atgcacatcgccggcttcatcctggtgcagaggcagccctggtacagcgtggagatccacagcgcctgcaccgtgcagaatgaaagcatcagcgagctgaccatgagccccacagcccctgagaagatggagagcaacagcaccttcaccagctttgagaacaccaccgtgtggttcctgggcaccatcaactgcatcaccgtggccctggtgttcagcaagggcaagcccttccggcagcccacctacaccaactacatctttgtgctggtgctgatcatccagctgggcgtgtgcctcttcatcctgtttgctgacatccctgagctgtaccgccgcctggacctgctgtgcacccctgtgctgtggagggccagcatcgtcatcatgctgagcctgaacttcatcgtgtccctggtggccgaggaggccgtgattgaaaatagagccctgtggatgatgatcaagcgctgcttcggctaccagagcaagagccagtaccgcatctggcagagggacctggccaatgaccccagctggccacccctgaaccagaccagccacagcgacatgccagaatgtggccggggcgtgtcctacagcaaccctgtgtttgagagcaatgaggagcagctgtag

SEQ ID NO: 223467 - DNA, 1731 bp, Artificial Sequence
  derived and/or modified sequence
atgggccacttcgagaagggccagcacgccctgctgaacgagggcgaagaaaacgagatggagattttcgggtacagaacacaagggtgccgcaagtctctctgccttgccgggagtatcttctcctttgggattctccccctggttttctactggaggccagcctggcatgtgtgggcccattgcgtcccttgcagcctgcaggaagctgacacagttctcctgcgtaccaccgatgaatttcaaatatacagttggaaaaaggttatttggatttatttgtctgctttaaacagtgcgttcggactgacacccgaccatcccctcatgaccgacgaagagtacatcatcaatcgagccatccgtaagccagatcttaaggttcgatgcataaaagtgcagaaaattcgctatgtgtggaattacctggagggacagttccagaaaattgggagcctggaggactggctctctagtgccaagatacaccagaaattcggatcaggcttgacacgggaggagcaggagatcaggcggctcatttgtggaccaaacaccatcgatgtggaagtgacacccatctggaaattgctaattaaagaggttctcaaccctttctacatctttcaactgtttagcgtgtgcctctggttttccgaggattacaaagaatatgcctttgccattataattatgagtattattagcatctcccttacagtctacgacttgcgagaacagtccgttaagctacaccatttggtggaatctcacaactccattaccgttagcgtgtgtggtcgtaaggccggtgttcaggagcttgaatctcgcgtgcttgtccctggagatttgctgattctgactggcaacaaagtcttgatgccttgcgacgcagtcctgattgaggggtcatgcgttgtggacgaaggtatgttaaccggagagagcattcccgtgacgaaaactcccctgccaaaaatggattcttcagtgccttggaaaactcagtccgaagccgattataagagacacgtcttattttgtgggacagaggtgatccaggcgaaggcagcctgttccgggacagtcagggcagtagtactgcagactgggtttaataccgctaaaggggacttggtgcgatccatcctgtatccgaagccagtaaacttccagctgtatcgggacgccattcgttttctgttgtgcctcgtggggacggctaccatcggaatgatctacaccttgtgcgtctacgtcctcagcggcgaaccccctgaggaggtcgtcaggaaggcgctggacgtcataactattgcggtcccacccgccctgcccgctgcgcttaccaccggaatcatatacgcgcagcgtcggcttaaaaagcgggggattttctgtattagcccccaaaggattaacgtttgcgggcagttgaacctagtgtgcttcgacaaaactggcacactcacgcgcgatggtctagatctgtggggggtagttagttgtgatcgcaatggctttcaggaggtccactctttcgcttccggacaggctttaccttggggacccctctgcgccgcgatggccagctgccattccctcatcctgcttgacggcaccatccagggggaccccctggatctgaagatgttcgaagctaccacctgggtctctctctgtagcagtgagaatttgaggtccttttttaacgcccgcgccacgtag

SEQ ID NO: 223468 - DNA, 3591 bp, Artificial Sequence
  derived and/or modified sequence
atgggccacttcgagaagggccagcacgccctgctgaacgagggcgaggaaaatgaaatggagatcttcggatacagaacccagggctgtagaaagtcattgtgcctcgctgggtccatattttccttcgggatccttcctctggttttctactggcggcctgcatggcatgtctgggcccactgcgtgccctgctccctacaagaggcggatacagtgctgctacgcactacagatgaatttcagatctactcctggaagaaagtgatctggatctacctttctgctctgaattccgcctttggtctcacacccgaccatccactcatgacggatgaggagtatatcattaatcgggccattcgcaaacccgatcttaaagtgagatgtattaaagtccagaaaataagatacgtctggaactatctcgaaggccagtttcagaaaattggatcactggaggactggctgtccagtgccaaaattcaccagaaattcggttccggcctgacaagagaagaacaagagatccggaggcttatttgtggtcccaataccattgatgtagaggttacacctatctggaagctgctcataaaagaggtcttgaacccattttacatcttccagctcttttcagtgtgcctgtggttttctgaagattataaagaatatgctttcgccatcataataatgagcatcattagcatctccctgacagtttacgatctgagggaacagagcgtgaagcttcaccatcttgtggagtcccataattccatcaccgtgtccgtttgtggtaggaaagcaggggtccaggagctggagagcagagtattggtgcccggtgatctgctcattttgacaggtaacaaggtcctgatgccctgcgacgctgtcctgatagagggctcctgtgtggtggatgaagggatgctcactggagaatcgatcccagttaccaagactcccttacctaagatggactcttcagtaccatggaagacgcagtcagaggccgattataagcgacacgtcctgttctgtggaacagaagttatccaggccaaagccgcttgttctggcactgtccgggctgtggtgcttcagaccggctttaatactgccaagggcgaccttgtgcggtcaattctttaccccaagcctgtcaatttccaactctaccgggacgctattcgcttccttttgtgtttggttggcacagctacgatcgggatgatttacaccctatgcgtttatgtcctgtccggcgagcccccagaggaagtagttcgcaaggctttggacgttataacaattgccgtgccgccagctttgccagccgcactgacaacaggaataatttacgcgcagcggaggctcaaaaaacgggggatcttttgcatctcccctcagcggattaatgtctgtggtcaactgaacctggtatgtttcgacaaaaccgggacactcactcgcgatggactcgacctatggggagtggtctcatgtgaccgtaacggattccaggaggtgcatagcttcgcttcagggcaggccttgccctggggtcccctttgcgcagcgatggcctcatgtcatagcctcattctgctcgacggcaccatccagggcgatcccctggacctgaagatgttcgaagccaccacttgggagatggccttttccggtgatgacttccatatcaagggtgtgccagcccacgccatggtggtcaagccatgtaggaccgcatcacaggtcccggtggaggggattgccattctccatcaattcccattcagttcagccctgcaaaggatgaccgtcatcgtgcaggagatggggggagatagactcgcgttcatgaaaggtgctcctgaacgggtggccagcttttgtcagccggaaactgtccccacttcctttgtttccgaacttcagatctacaccacccagggcttccgagtgattgccctcgcttacaaaaagctggagaatgaccaccacgccacgacccttacacgggaaaccgtggaaagtgatctcatctttctgggcctgctgatcctggaaaatcggttaaaggaagagaccaagccggttctggaggagctgatcagcgcgcgcatccgtaccgtgatgatcacaggagacaatctacagacagccatcaccgtggctagaaaaagcggaatggtcagtgagtctcagaaggtgattctgattgaagctaacgaaaccacaggctcgagtagtgcgtcaattagctggacactggtagaagaaaaaaagcacatcatgtatggtaaccaggataattacattaacattagggacgaggtcagcgataagggcagggaaggtagttatcacttcgcactgacaggcaagagttttcacgtgatttctcagcactttagttcccttctcccaaagatcttaatcaatgggacgatttttgcccgcatgagcccagggcagaaaagcagcctggtagaggaattccagaagctggattactttgtgggcatgtgcggagatggagccaatgattgcggagccttgaaaatggcacatgtcggaatcagtctgagtgaacaggaagcatctgtcgcctctccgttcaccagtaaaaccccgaatatcgagtgtgtcccccatctcattaaggagggtcgggcagctttggttacctcattttgcatgttcaagtacatggcactgtatagcatgattcagtatgtgggcgtgctacttttgtattgggagacaaattccctgtcaaactatcagttcctcttccaggacttggccataaccacgcttatcggtgtaactatgaatctgaatggggcctatcccaaactagtgccattccgacctgcgggtcgcttaatttccccgcctctgttgctgagtgtgatcttcaacatcttactgagtctcgctatgcacatcgcaggcttcattctggtgcagcgacagccttggtactcggtagagatacacagcgcttgtacggtccagaatgagtcaattagcgagctgaccatgtctccgactgcccctgaaaagatggaatctaacagcaccttcaccagcttcgaaaataccactgtgtggtttctgggtactattaactgcatcactgtggccctggtgttcagcaaaggcaaacccttccgacagcccacttataccaattacatcttcgtactagtcctaataattcaactgggagtctgtctgtttattctttttgccgatatccccgagctctatagacgcctcgaccttctctgcacacccgtgctgtggcgtgcttccatagtgatcatgctgagcctgaactttattgtgagtctggtggctgaagaggcagtgattgagaacagggccctctggatgatgatcaagagatgctttgggtatcaatctaaatcgcaataccgcatatggcaacgcgacctcgccaacgacccttcgtggccaccattaaaccagacgtcacactctgatatgccagaatgcgggagaggggtgagctactccaaccctgtgtttgagtcaaacgaggagcagttgtag

SEQ ID NO: 223469 - DNA, 639 bp, Artificial Sequence
  derived and/or modified sequence
atgcacatcgccggcttcatcctggtgcagcggcagccctggtacagcgtggaaatacacagcgcatgtacagttcagaatgaatctattagcgagttgacaatgtcgccaactgctcctgaaaaaatggaatccaattcgacttttacgtcatttgagaatactacggtgtggttcctgggtaccattaactgcattaccgtggcactcgttttctctaaaggtaagccctttcggcaacccacatatacaaactacatcttcgtgctggtactcattattcagctgggggtatgtctgtttatcctgtttgcagacatacccgagctgtacagacggctcgacctcctatgtacacccgtcttatggagggcatccatagtgatcatgctgagcctgaacttcatcgttagcctggtggctgaagaagctgttatcgagaaccgagccttgtggatgatgatcaaacggtgctttggctatcaatccaaatctcagtatcgcatttggcagagagatctggccaacgacccttcatggccccctttgaatcagacgagccactccgacatgcctgagtgtggaaggggggtaagctacagcaaccctgtgttcgaatctaacgaagaacagctttag

SEQ ID NO: 223470 - DNA, 1731 bp, Artificial Sequence
  derived and/or modified sequence
atggggcatttcgagaaggggcagcatgctctcctgaacgagggggaggagaacgaaatggagatttttggttatagaacacagggttgtagaaagagcttgtgcttagcagggtctatttttagttttggcattctaccacttgtgttctattggaggcccgcttggcacgtttgggcccactgtgtcccttgttctctgcaggaggccgatactgtgttgctcaggaccaccgatgaatttcagatctacagctggaagaaggtcatatggatatacctgagtgccctgaactctgcctttgggctcactccagatcatccactgatgaccgatgaggaatacatcatcaacagagctattaggaagcccgatttgaaggtgcgatgtattaaagtccagaagatccggtacgtttggaactatctagagggtcaattccaaaagatagggtcactggaggactggctctcatcagccaaaatccatcagaaatttggctccggtctgacccgcgaggaacaggaaatcaggcgtcttatatgtgggcctaacactattgacgtggaggttacccccatttggaaacttctaataaaggaggttcttaacccattttacatctttcagttattttctgtctgcttgtggttttcagaggactacaaagaatatgcctttgccattataatcatgtccattatcagcatttcattgacagtctatgacctgcgagagcagagcgtgaaactacaccatctggtggaaagccacaactcgattacggtgagtgtctgcggccgtaaggcaggcgttcaggaactcgagtccagagtcttagtgccgggtgacttgctcatactgaccggaaataaagtccttatgccctgtgatgcagtcttaatcgaggggtcctgtgtggttgatgaaggcatgcttaccggggaatctataccagtgaccaagacccctttacccaaaatggattcttcagtcccctggaaaacacagagtgaagcagactataagcgacatgtgctgttctgtgggacagaagtcattcaggcaaaagctgcatgttccggaaccgtaagagctgtggtactccaaaccggatttaacactgccaagggggatctggtgcgctctatcctctaccctaaacccgtgaacttccagctgtatcgcgatgccattagatttcttctctgtctagtgggcactgccacaattggcatgatttataccctttgcgtctatgtgctctccggcgaacctcccgaggaagtggttcgcaaggccctggacgtgattactatcgctgtgccacctgctctcccggctgcactgaccacaggcatcatttacgctcagcgtaggttgaaaaagcgaggaattttctgcatctccccgcaacgtattaatgtttgtggccagcttaacctggtgtgtttcgataagacggggacccttacaagggatggccttgacctatggggtgtggtttcctgtgatagaaatggatttcaggaggttcactctttcgcctccggacaggccctgccttggggacccctgtgtgccgcaatggcctcatgtcacagcctgatcctgctcgatgggacaattcagggagaccctttagatctcaagatgttcgaggccactacctgggtgagcttgtgctcaagcgagaatctaaggtcattctttaacgctcgggctacttag

SEQ ID NO: 223471 - DNA, 3591 bp, Artificial Sequence
  derived and/or modified sequence
atggggcacttcgagaaggggcagcacgcactccttaacgagggtgaagaaaacgagatggagatcttcggatatcgaactcaggggtgccgcaaaagcctgtgcctggccggttcaattttctccttcgggattctgcccctggtgttctattggcggccagcctggcacgtgtgggcccactgcgtgccgtgctcactgcaggaggcagataccgtgttgctaaggacaacagacgagtttcaaatttattcctggaagaaagttatatggatatacctgagcgccttgaattctgcatttggccttactcctgatcatccactgatgacggacgaagaatacattatcaatagggctattcgcaaaccagatctgaaagtaaggtgcatcaaagtccagaaaataaggtacgtgtggaattacctcgaagggcagttccagaagattggctccttggaggattggctgtcctctgcaaagattcaccaaaaatttggatctggattgactcgggaagaacaggagattcgcagactcatctgcggccctaacaccatcgatgtggaagttactccgatctggaagctattaattaaagaagtattgaatcccttctatatttttcagctgtttagtgtgtgcctctggttttccgaagactacaaagagtacgcattcgctatcattatcatgtccatcattagcatctcacttacagtctatgacttacgagagcagtccgttaagctgcatcacttagtggaatctcacaactccattactgtcagtgtgtgtggcagaaaggccggagtacaggagttagagtcacgagtcttggtcccaggcgacctgttgatcctgaccggtaataaggttctcatgccatgcgatgccgtgttgatagagggctcttgtgtggtcgacgaaggaatgctcactggggagtcaattccagttacaaaaacccctctgccaaaaatggactctagtgtaccctggaaaacccagtctgaagcggattataagcggcacgtactgttctgcgggaccgaggtgatccaggccaaagctgcgtgctccggaacagtacgcgctgtcgtcctgcagaccggtttcaacactgccaagggagatctcgttcgcagtattctgtaccctaagcccgttaacttccagctctacagagacgcgatcaggttccttctatgtctggtgggcacagctaccattggaatgatatacactctgtgcgtttacgtcctcagtggggagcccccagaggaagtggtgcgaaaagcacttgatgtgatcaccattgcggtgcctcccgcattgccggctgctctgacaacaggaattatttacgctcagcggaggttgaagaaacgtggaatattttgcattagtccacagcgaattaacgtgtgtgggcagttgaacctggtgtgctttgacaaaactggtaccctgaccagggatgggttagatttatggggcgtggtgtcatgtgatagaaatggattccaggaggtccattcattcgcgtctggccaggccctgccgtgggggcctttgtgcgcagcaatggctagttgtcacagtctcatccttcttgacgggacaattcagggcgaccctctagacttaaaaatgttcgaagcaacaacctgggaaatggcgttttctggtgatgacttccacataaagggcgtccctgcccatgcgatggtagtgaaaccctgcagaacagctagtcaggtgcctgtggagggaatcgccattctccaccagtttcccttcagctcagctttacagagaatgactgtgattgttcaggagatggggggagataggctcgcgtttatgaagggggctcctgaaagagtcgcatccttctgccagcccgagacggttcctacatccttcgttagcgaacttcagatctacaccacgcagggattccgggtgatcgcattggcctataaaaaactggaaaatgaccaccacgctaccacattgacacgagagacagtggagagcgaccttatctttctgggcctgctcatcctggaaaatagattaaaggaagaaactaagcccgtactggaggaattgatttcagcacgcatacgcactgtgatgatcacaggcgacaacttacagacagctatcaccgtcgccagaaaatcgggcatggtttcagagtctcagaaggtaatcctcatcgaggctaatgagacaaccggatcatccagcgcaagcatcagctggactcttgtggaggagaagaagcatataatgtatggcaatcaggacaattatataaacataagggacgaggtcagcgacaaggggcgtgagggttcttatcactttgctcttacaggcaagtccttccacgtgatctcccagcacttttctagcctcctccccaaaattctgattaacgggactatctttgctagaatgtcccccggacagaagtcatccctggtggaggagttccagaaattagactatttcgtcggcatgtgtggagacggcgctaatgactgcggggctcttaagatggctcacgttggcatctccctgtcagagcaggaagcatccgtggccagcccgtttacttctaagactcctaacatagagtgcgtaccccacttgattaaagagggcagagcagctctggtaacatccttctgcatgtttaaatacatggcgctctatagcatgattcagtatgtaggtgtacttctgctgtactgggagactaatagcctcagcaactaccagtttttgtttcaagatttggccatcactacgttaatcggtgtcaccatgaacctgaacggcgcttatcctaaactggttcccttccggcctgcaggacggcttatcagccccccactgctgttgagcgttattttcaacatcttactctctctcgccatgcacattgctgggttcatccttgtgcagcggcagccttggtactcagttgagattcatagtgcatgtacggtccaaaacgagagcatctctgaactcaccatgagcccaaccgccccagagaagatggaatccaactcaaccttcacttcttttgagaacactacagtgtggtttctgggcacaattaactgcatcactgtggccctagtgttttctaaggggaagcctttccgccaacccacgtacacaaactatatattcgtgttggttctcattattcagttgggggtgtgtctgttcattctgttcgctgatattcccgaactgtaccgtaggcttgatctcctgtgcacaccagttctgtggagggcatccatcgtgatcatgttgagtctaaatttcatcgtctccctggtcgccgaagaggccgttattgagaatagagcactgtggatgatgatcaagaggtgtttcggctatcagtctaaatcccagtacaggatctggcagcgggatctggccaacgatccttcatggccccctctgaatcagacttcacactcagacatgccggagtgcggacgtggggtttcttactccaatccagtcttcgagagtaacgaagaacagctgtag

SEQ ID NO: 223472 - DNA, 639 bp, Artificial Sequence
  derived and/or modified sequence
atgcatatcgctggattcatcctcgtccagcgccagccatggtacagcgtggagattcacagcgcatgcacggttcagaacgaaagcattagcgagctgaccatgtcccccactgcgccagaaaagatggagagcaatagcaccttcacaagctttgagaacacaacagtgtggtttctggggacaatcaattgcatcacggtggctttggtgttctctaagggcaagccattccgtcagcccacttatactaattacatttttgtgctggttctaattatccagctgggcgtctgcctgtttattttgttcgctgatatccctgagttatacaggcggctcgacctgctctgcactccagtcctctggcgagctagtatagtgattatgctcagcctcaactttatcgtgtccctagtggctgaagaggccgtaatcgagaaccgcgctctctggatgatgatcaaacgctgttttggttaccagtctaagtcacaataccgcatctggcagcgcgatttggccaatgacccctcttggccccctctcaatcagactagccactcggacatgccagaatgtggacgcggagttagctactccaatcccgtattcgagagcaatgaggaacagttatag

SEQ ID NO: 223473 - DNA, 2157 bp, Artificial Sequence
  derived and/or modified sequence
atgggacactttgagaagggccagcacgctctgctcaatgaaggagaagagaatgagatggagatatttggctatcggactcaaggctgccggaaaagtctctgccttgccggatccatcttctcatttggaatcctccccttggtgttttactggagaccagcatggcacgtatgggcacattgtgtcccatgttccttgcaagaagcagacactgtgttgctgaggacaacggatgaattccaaatttactcttggaaaaaggtaatatggatctacctgtcagcattaaacagcgcatttggtctcactcctgaccaccctctcatgacagatgaggagtatatcataaatagagccataagaaagccagacctaaaggtgagatgcatcaaagtgcagaaaataagatatgtttggaactacttagaaggacagttccagaaaattggttctttggaagactggcttagttctgccaagatacatcaaaaatttggatcaggcttgacaagagaagaacaggagattaggaggttaatatgtgggcctaatactatcgatgttgaagttacaccaatttggaaactgctcatcaaggaggttctaaatccattttatatatttcaactcttcagtgtctgtttgtggtttagtgaagactataaggaatatgcttttgccatcataatcatgtccataatttccatatctttgacagtatatgatctcagagagcaatctgtaaaactccaccatctcgtcgagtcacataatagcattacggtctctgtatgtgggagaaaagctggagttcaagagctggaatcacgcgtcctggtgcctggagatttattaattttgacagggaacaaagtgctaatgccatgtgatgccgttctgattgaaggcagctgtgtggtggatgaaggcatgctgacaggagaaagtattccagtcaccaaaactccgttacccaagatggatagctctgtgccctggaaaacacagagtgaagcggattacaagcggcatgtcctcttctgtggaacagaggttatccaggccaaggcagcttgctctgggaccgtgagagccgtggtactgcagactggattcaacactgcaaagggagaccttgtgagatccattctctaccctaagccagtgaattttcagttgtacagggatgccatcaggttcctcctgtgccttgtaggaacagccaccattgggatgatctatactctgtgtgtctatgtgcttagtggggaacctccagaggaggtggtgaggaaagcccttgacgtcatcacaattgcggttcctccggctctacctgctgctctgaccacaggcattatctatgcccagaggaggctgaagaagagaggcatcttctgcattagcccccagaggatcaacgtatgtggacagttaaaccttgtctgctttgacaagacaggcaccttaacaagggacggcttggacctctggggagtcgtgtcctgtgataggaatggctttcaggaagttcacagctttgcctcaggccaggctttgccatggggcccactgtgtgcagcgatggccagctgccactctctgatccttcttgatgggaccatccagggagaccctctggacctcaaaatgtttgaagccaccacctgggtaagcctctgctcttcagagaatctgagaagcttcttcaatgccagagcaacataggcaatatcagagctatctaattcttataaaaggtgaggtttccaatgtggagtacatttggtagtgaagggcaaaccaatctaaggctggtttcctcatctgtgcaatgaagctaataatagcatctacataatgagattgtgaggattaaatgagatgatgcagtaagaaaatccttggcactatgcctggcaaatattaaaggttcgatcatattaatataattgtacttattatgcagttatttcttgtctctctgtactgttctccgagcattgtctggtttcgaagattttccagaatatggggatcagaaaacattgctttctccagtgctcaggataactcatagattcacggggactataagtcttatttctattaatttcatattgattttatttccaagactagaaagaacaaaaa

SEQ ID NO: 223474 - DNA, 4208 bp, Artificial Sequence
  derived and/or modified sequence
aggcaatgagttctttccctgtaagttgggcacaaaaagatcggcatgggagcagcctcctttgagacagctgctctgagagaatgcaataagcagggagcagccagcaattcctcctagcagagggcgactcgtgggaggagttcagtttgccaagtattgtcatttgttgagagaaggtgtgtgctcaaggaggagttttaacctggaggatcattaactcttttagtcagctgaggagctgcggtggctcggcgagttggagttcatcctggaagcgtctgcacgacaaggtcagggaggaggtgtggaataactttttcatgggacactttgagaagggccagcacgctctgctcaatgaaggagaagagaatgagatggagatatttggctatcggactcaaggctgccggaaaagtctctgccttgccggatccatcttctcatttggaatcctccccttggtgttttactggagaccagcatggcacgtatgggcacattgtgtcccatgttccttgcaagaagcagacactgtgttgctgaggacaacggatgaattccaaatttactcttggaaaaaggtaatatggatctacctgtcagcattaaacagcgcatttggtctcactcctgaccaccctctcatgacagatgaggagtatatcataaatagagccataagaaagccagacctaaaggtgagatgcatcaaagtgcagaaaataagatatgtttggaactacttagaaggacagttccagaaaattggttctttggaagactggcttagttctgccaagatacatcaaaaatttggatcaggcttgacaagagaagaacaggagattaggaggttaatatgtgggcctaatactatcgatgttgaagttacaccaatttggaaactgctcatcaaggaggttctaaatccattttatatatttcaactcttcagtgtctgtttgtggtttagtgaagactataaggaatatgcttttgccatcataatcatgtccataatttccatatctttgacagtatatgatctcagagagcaatctgtaaaactccaccatctcgtcgagtcacataatagcattacggtctctgtatgtgggagaaaagctggagttcaagagctggaatcacgcgtcctggtgcctggagatttattaattttgacagggaacaaagtgctaatgccatgtgatgccgttctgattgaaggcagctgtgtggtggatgaaggcatgctgacaggagaaagtattccagtcaccaaaactccgttacccaagatggatagctctgtgccctggaaaacacagagtgaagcggattacaagcggcatgtcctcttctgtggaacagaggttatccaggccaaggcagcttgctctgggaccgtgagagccgtggtactgcagactggattcaacactgcaaagggagaccttgtgagatccattctctaccctaagccagtgaattttcagttgtacagggatgccatcaggttcctcctgtgccttgtaggaacagccaccattgggatgatctatactctgtgtgtctatgtgcttagtggggaacctccagaggaggtggtgaggaaagcccttgacgtcatcacaattgcggttcctccggctctacctgctgctctgaccacaggcattatctatgcccagaggaggctgaagaagagaggcatcttctgcattagcccccagaggatcaacgtatgtggacagttaaaccttgtctgctttgacaagacaggcaccttaacaagggacggcttggacctctggggagtcgtgtcctgtgataggaatggctttcaggaagttcacagctttgcctcaggccaggctttgccatggggcccactgtgtgcagcgatggccagctgccactctctgatccttcttgatgggaccatccagggagaccctctggacctcaaaatgtttgaagccaccacctgggaaatggctttttctggggacgatttccacatcaagggagtgccggcacatgccatggtagttaagccctgcagaacagccagccaggtcccagtggaaggaattgcaatcctgcatcagttcccattctcatcggcactgcaaagaatgacagtcattgtccaagagatgggaggtgaccgactggcattcatgaaaggtgcaccagagagggtggccagcttttgccaacctgagacagtacccactagttttgttagcgaacttcagatttacacgacacagggcttccgagtcatagcactggcctacaagaagctggaaaatgaccatcacgctactaccttgacgagggagacggtagaatcagacctgatatttctggggctgctgatcttggagaatcgattgaaggaagagacaaaacctgtcttggaagagctcatctcagcccggataaggactgtaatgatcacaggtgacaatcttcagactgcaataacagtggccagaaaatctggaatggtttctgaaagccagaaagtcattctcattgaggcaaatgaaaccaccgggtcctcatcagcatctatatcttggacgttagtagaagagaagaaacacattatgtatgggaatcaggacaattacattaacatcagggatgaagtctctgataaaggcagagaaggaagttaccattttgccctaactggaaaatcctttcatgttataagtcaacatttcagcagcctactgccaaagatattgatcaatgggaccatctttgcaagaatgtctcctgggcagaagtccagtctggtggaagaatttcagaaactggattactttgtaggtatgtgtggtgatggagccaatgactgtggggctctgaaaatggctcatgtgggcatctcattatcagagcaggaggcatctgtggcctcacctttcacttccaaaactccaaacattgagtgcgtacctcaccttatcaaggaaggacgtgcagctctcgttacctccttttgcatgtttaagtacatggctctgtacagcatgattcagtatgttggtgttctgctgctctactgggagacaaacagcctttcaaattaccagtttctgttccaggatctggccattacaactcttattggtgtaacaatgaatctgaatggtgcctaccctaagctggtgcctttcagacctgcaggacggctgatctctccacctctgctactctctgtgattttcaacattcttctcagcctggccatgcatattgcaggcttcatcctggttcagaggcagccttggtattccgtggagatacacagtgcctgcacagtacaaaatgaaagcatctcagagttaaccatgtctccaactgctccagaaaaaatggaaagtaatagcaccttcacaagttttgagaacactacagtctggttcttgggaacaatcaactgtatcactgtggctcttgtgttctctaaaggaaaaccatttagacagccaacttatacaaactatatatttgtccttgtgctgataatacagcttggtgtatgtctattcattctatttgctgatataccagaattatatagacgtttggatctgctctgcactcccgtcctgtggagggcctccattgtcatcatgctcagcttgaatttcattgtgtcccttgtggccgaggaggctgttattgaaaatcgagccctgtggatgatgattaaaagatgtttcggctatcagtcaaaaagccagtatcggatatggcagagggacttggcaaatgaccctagttggcccccgctaaaccaaacctcccactctgacatgccggagtgtggcagaggagtgtcttacagcaatccagtatttgagagcaatgaagaacaactctgaaggacatgtgatatccaagttgatattacagagaaacaatgacaaaagggaccagtttcattgattttaagaaatgagactcttgtaacatcagctggagttttggggctacctatcaaatcatggtgacaaactaaagtctgtttgataaaatactgtctacagagaagaacattgacccagaagagtgctttcctcttggcttctgaaggtattagaggcattcagtgaaggcaagaatgggccaagaatttctatgggccaagagacaagcaggctaaaggggaaaaatat

SEQ ID NO: 223475 - DNA, 1458 bp, Artificial Sequence
  derived and/or modified sequence
ggaataagaggggtaaatggaatagctgcatagcaacttggctctcaagcatcttaaatgttatcccttgacttctggcttccatggtttctgatgagaaattggctgctaatcttactgaagatcccttatagtgaatctgaatggtgcctaccctaagctggtgcctttcagacctgcaggacggctgatctctccacctctgctactctctgtgattttcaacattcttctcagcctggccatgcatattgcaggcttcatcctggttcagaggcagccttggtattccgtggagatacacagtgcctgcacagtacaaaatgaaagcatctcagagttaaccatgtctccaactgctccagaaaaaatggaaagtaatagcaccttcacaagttttgagaacactacagtctggttcttgggaacaatcaactgtatcactgtggctcttgtgttctctaaaggaaaaccatttagacagccaacttatacaaactatatatttgtccttgtgctgataatacagcttggtgtatgtctattcattctatttgctgatataccagaattatatagacgtttggatctgctctgcactcccgtcctgtggagggcctccattgtcatcatgctcagcttgaatttcattgtgtcccttgtggccgaggaggctgttattgaaaatcgagccctgtggatgatgattaaaagatgtttcggctatcagtcaaaaagccagtatcggatatggcagagggacttggcaaatgaccctagttggcccccgctaaaccaaacctcccactctgacatgccggagtgtggcagaggagtgtcttacagcaatccagtatttgagagcaatgaagaacaactctgaaggacatgtgatatccaagttgatattacagagaaacaatgacaaaagggaccagtttcattgattttaagaaatgagactcttgtaacatcagctggagttttggggctacctatcaaatcatggtgacaaactaaagtctgtttgataaaatactgtctacagagaagaacattgacccagaagagtgctttcctcttggcttctgaaggtattagaggcattcagtgaaggcaagaatgggccaagaatttctatgggccaagagacaagcaggctaaaggggaaaaatatgtgatctttcctcttaggacaggacaatactttcctttttataaaaatgagttgaggggaagtagtactgtgtatactcacggagttgtaatttttgaatttttacttcatcgatggaaaaactaatgcgtgggaaacattacaccaatctttactgtctgggttccttttctctgtagtacttttcagatttgaggctttttcttctgtttctggccttacccaacatattgttaaggataagcttagcctatgctgcaataaaaaacaactctcagata

SEQ ID NO: 223476 - DNA, 91 bp, Artificial Sequence
  derived and/or modified sequence
tggaatcatcatcgaaagcaagcgaatggaatcatcaaatggaaacgaatggaatcatcgaatggactcggatggaattgttgaatggact

SEQ ID NO: 223477 - protein, 360 aa, Artificial Sequence
  derived and/or modified sequence
MVTQILGAMESQVGGGPAGPALPNGPLLGTNGATDDSKTNLIVNYLPQNMTQDEFKSLFGSIGDIESCKLVRDKITGQSLGYGFVNYSDPNDADKAINTLNGLKLQTKTIKVSYARPSSASIRDANLYVSGLPKTMSQKEMEQLFSQYGRIITSRILVDQVTGVSRGVGFIRFDKRIEAEEAIKGLNGQKPLGAAEPITVKFANNPSQKTGQALLTHLYQSSARRYAGPLHHQTQRFRLDNLLNMAYGVKRFSPIAIDGMSGLAGVGLSGGAAGAGWCIFVYNLSPEADESVLWQLFGPFGAVTNVKVIRDFTTNKCKGFGFVTMTNYDEAAMAIASLNGYRLGERVLQVSFKTSKQHKA

SEQ ID NO: 223478 - DNA, 1083 bp, Artificial Sequence
  derived and/or modified sequence
atggtcactcagatccttggggctatggagtcacaagtgggtgggggccccgctggtcctgctctgccaaacggccctttactgggaacaaatggcgctaccgatgattcaaagacaaatctcatcgtgaactatctgccacagaacatgacacaggacgagttcaaatccctcttcggtagtatcggcgatatcgagtcatgcaaactagtgcgcgacaagattaccgggcaatctctcggatacggctttgttaattactcagaccctaatgatgctgacaaggccatcaacaccctgaatggacttaagctgcagaccaagaccataaaagtttcttatgctcgccctagcagcgcatccatcagagacgctaatctctacgtcagcggactgcccaagaccatgtctcagaaggaaatggaacaactcttctctcagtatggacgtataatcacgtcccgtatactagttgatcaggtgactggtgtctcacgaggcgtgggcttcataaggttcgacaagagaatcgaggcagaggaagcaatcaaagggttaaacggtcaaaaaccactgggcgccgcagagccaatcaccgtcaaattcgcaaacaatccaagtcaaaaaaccggccaggcactgctcactcacctatatcagagctcagccaggcgatacgcaggtcctttacaccaccaaacccaacggttccggcttgataacctgcttaacatggcctatggcgtcaaacgcttctcccctattgcgatcgacggcatgtctgggctcgctggcgtcggcctctcaggtggggctgccggtgccgggtggtgcatcttcgtgtacaatctctcgcctgaagctgacgagagtgttctgtggcagctttttgggccattcggcgccgtgaccaacgtcaaagtgattcgagatttcacgaccaacaaatgcaaagggttcggctttgtcacaatgactaattatgatgaggctgcaatggctattgcctccctgaacggctacagattaggtgaacgggtgctccaggtaagcttcaaaacatcaaaacagcacaaggcgtag

SEQ ID NO: 223479 - DNA, 1083 bp, Artificial Sequence
  derived and/or modified sequence
atggtgacccagatcctgggcgccatggagagccaggtgggcggcggccctgctggccctgccctgcccaacggccccctgctgggcaccaatggagccacagatgacagcaagaccaacctgattgtgaactacctgccccagaacatgacccaggatgagttcaagagcctgtttggcagcatcggggacatcgagagctgcaagctggtgcgggacaagatcaccggccagagcctgggctacggctttgtgaactacagcgaccccaatgatgctgacaaggccatcaacaccctgaatggcctgaagctgcagaccaagaccatcaaggtgtcctatgcccggcccagcagcgccagcatcagagatgccaacctgtatgtgtctggcctgcccaagaccatgagccagaaggagatggagcagctgttcagccagtatggccgcatcatcaccagccgcatcctggtggaccaggtgactggagtgtccagaggagtgggcttcatccgctttgacaagagaattgaagctgaggaggccatcaagggcctgaatggccagaagcccctgggcgctgctgagcccatcaccgtgaagtttgccaacaaccccagccagaagacaggccaggccctgctgacccacctgtaccagagcagcgcccggcgctatgccggccccctgcaccaccagacccagcgcttccggctggacaacctgctgaacatggcctatggagtgaagcgcttcagccccatcgccattgatggcatgagcggcctggccggcgtgggcctgtctggaggagctgctggagctggctggtgcatctttgtgtacaacctgagccctgaggctgatgaatctgtgctgtggcagctgtttggcccctttggagctgtgaccaacgtgaaggtgatccgggacttcaccaccaacaagtgcaagggcttcggctttgtgaccatgaccaactatgatgaagctgccatggccatcgccagcctgaatggctaccgcctgggggagcgggtgctgcaggtgtccttcaagaccagcaagcagcacaaggcctag

SEQ ID NO: 223480 - DNA, 1083 bp, Artificial Sequence
  derived and/or modified sequence
atggtgacccagatcctgggcgccatggagagccaggtgggcggcggtcccgctggccccgctctcccaaacgggcccctgctgggcaccaacggtgcaacagacgattcgaagaccaatctaatcgtgaactacctcccccagaatatgactcaggacgaattcaaatctctgttcggttccatcggggacattgaaagttgtaagctggttcgcgataagataacagggcagtcactcggctacggctttgtgaactactcagaccccaacgacgcagacaaagctatcaatactctgaatgggttgaagctgcagacaaaaaccatcaaggtatcctatgcccgtccttcttccgccagtattagagacgctaatctctatgtgtcaggtcttcctaagaccatgtctcagaaggagatggaacagctcttctctcaatatggtagaatcatcacctcccgaattctggtggatcaagtgacaggggtttctaggggagtgggatttatacgctttgacaagcggatagaggccgaagaggcaatcaaaggcctgaatggccaaaaaccactgggtgctgccgaaccgatcacagtcaagtttgccaataatccatcccaaaagacgggacaggcgctgctgacccacttataccagtcatctgctcgcagatatgcaggccctctgcatcatcagacccagagattccgcctggacaatttgttaaatatggcctatggggtgaaaagattctcgcctatcgcaatcgacggcatgagcgggctggccggcgtgggcctcagcgggggcgccgcgggtgctgggtggtgtatattcgtgtacaatctctcccctgaggctgacgaatccgttctctggcagctttttggccccttcggtgccgtgaccaacgtcaaggtgattagagatttcacaacaaacaagtgcaaggggttcggtttcgtgaccatgactaattatgatgaggctgcgatggcaatagcaagcctcaatggctacaggttgggtgagagggtactccaagtcagcttcaaaacctccaagcagcacaaggcatag

SEQ ID NO: 223481 - DNA, 1083 bp, Artificial Sequence
  derived and/or modified sequence
atggtgacccagatcctcggggcaatggagagccaggtggggggtggcccagcaggacctgctctgcctaatggcccacttctggggaccaatggggctactgacgactccaaaacaaatctcatcgtcaattatttgcctcaaaatatgacacaagatgagttcaaaagtctcttcggctcaataggggacatcgaatcgtgtaagctcgttcgggacaagataaccggacagagcctgggttacggattcgtgaactattcagatccgaatgacgccgacaaggccattaatactttgaacggacttaagttgcagacaaaaacaatcaaagttagctacgctcgcccatcctcagcctcaataagagacgctaacctatacgtatctggccttccaaaaacaatgtcacagaaagagatggaacaactgttcagtcagtacggacgaataattacatcgcggatcctggtcgaccaggttacaggggtatcacgtggggtgggtttcataagatttgacaaaaggatagaagccgaagaggcgatcaagggtcttaacggacagaagcccttgggggctgccgagcctataactgttaagttcgcaaacaatcccagccaaaagaccggtcaggctctgttaacacacctctaccagagtagcgccaggagatatgctggccctttgcatcaccagactcagagatttagactggataatctgttgaatatggcctatggcgtgaagaggttttctccaattgcaatcgacggcatgtccggactggccggagtgggcctgagtgggggagccgctggcgctgggtggtgtatattcgtatacaatctttctcccgaggctgacgagtctgtgttgtggcagctgtttggtccttttggtgcagtcacaaatgttaaggttatacgggacttcactaccaacaagtgcaagggattcggcttcgtcactatgaccaattatgacgaggcagccatggcaatcgccagccttaatgggtaccgtcttggagaacgagttctccaggtgtccttcaaaaccagcaaacagcataaggcctag

SEQ ID NO: 223482 - DNA, 1083 bp, Artificial Sequence
  derived and/or modified sequence
atggtgacccagatcctgggcgccatggagagccaggtgggcggcggccccgccggccccgccctgcccaacggccccctgctgggcaccaacggcgccaccgacgacagcaagaccaacctgatcgtgaactacctgccccagaacatgacccaggacgagttcaagagcctgttcggcagcatcggcgacatcgagagctgcaagctggtgagagacaagatcaccggccagagcctgggctacggcttcgtgaactacagcgaccccaacgacgccgacaaggccatcaacaccctgaacggcctgaagctgcagaccaagaccatcaaggtgagctacgccagacccagcagcgccagcatcagagacgccaacctgtacgtgagcggcctgcccaagaccatgagccagaaggagatggagcagctgttcagccagtacggcagaatcatcaccagcagaatcctggtggaccaggtgaccggcgtgagcagaggcgtgggcttcatcagattcgacaagagaatcgaggccgaggaggccatcaagggcctgaacggccagaagcccctgggcgccgccgagcccatcaccgtgaagttcgccaacaaccccagccagaagaccggccaggccctgctgacccacctgtaccagagcagcgccagaagatacgccggccccctgcaccaccagacccagagattcagactggacaacctgctgaacatggcctacggcgtgaagagattcagccccatcgccatcgacggcatgagcggcctggccggcgtgggcctgagcggcggcgccgccggcgccggctggtgcatcttcgtgtacaacctgagccccgaggccgacgagagcgtgctgtggcagctgttcggccccttcggcgccgtgaccaacgtgaaggtgatcagagacttcaccaccaacaagtgcaagggcttcggcttcgtgaccatgaccaactacgacgaggccgccatggccatcgccagcctgaacggctacagactgggcgagagagtgctgcaggtgagcttcaagaccagcaagcagcacaaggcctag

SEQ ID NO: 223483 - DNA, 4661 bp, Artificial Sequence
  derived and/or modified sequence
ggacttgaacacacgggaccggacaggaccgaccgaggggcggcggcgaaaggcagagcgccgcgatctctgtcgggaagcgcaacctccccgggccccgcggggccgcgcagggggcgtcctcaaccccgcgcccgctccctctttccatcccctgccgcccgcaggccaccccggggcccggccatccgcgcgcgcatccccgggttcgggcccgtccctggccctcgagggagccgccgccttcatcgccacatctgcagcggccgcaccagaggccgcccgggcgggaccccagcgtgagcatcgggcgcccccctaggagtgcaccacccccggagcccccctcaacacggaccgcgcccgccgggcacacaagaatggtcactcagatactgggggccatggagtctcaggtgggggggggcccggccggcccggccctgcccaacgggccactccttggtacaaatggagccactgacgacagcaagaccaacctcatcgtcaactacctgccccagaacatgacccaggatgagttcaagagtctcttcggcagcattggcgacatcgagtcctgcaagttggttcgggacaagatcacagggcagagccttggctacgggtttgtgaactattctgaccccaatgatgcagacaaagccatcaacaccctcaacggcctcaaattacagacgaagaccatcaaggtgtcctatgccagacccagttcagcatccatccgggatgctaacctgtacgtcagcgggctccccaagaccatgagccagaaagagatggagcagctcttctcccagtacggccgcatcatcacgtcccgcatcctggtggaccaggtcacaggtgtctctcggggtgtgggattcatccgctttgacaagaggattgaggccgaagaggctatcaaaggactgaatgggcagaagccgctgggcgcagctgagcccatcacagtcaagttcgcgaacaacccaagtcagaagacggggcaggcgctgctcacccacctctaccagtcatccgcccggcgctacgcaggccccctacaccatcagacccagcgtttccggctggacaatttgctcaacatggcctacggcgtcaagaggttctcgccgatcgccatcgatggtatgagcggcctggcgggcgtgggcctgtcggggggcgcggcgggcgccggctggtgcatcttcgtgtacaacctgtcaccggaggcagacgagagcgtgctgtggcagctgttcgggccttttggggcagtcaccaacgtcaaggtcatccgtgatttcaccaccaacaagtgcaagggtttcggcttcgtgaccatgaccaactatgacgaggcggccatggccatcgccagcctgaacggctatcgcctgggcgagcgcgtgctgcaggtctccttcaagaccagcaaacagcacaaggcgtgagcccaccccgcctgccctcccaccccctccccgggcagcagagagagagagagagaaagagagagagagagagagaaggggcccaagagagacagcacaggcagccccacggacgacgcgagggccccacgtccctgcggaagccacagggtgagcactctggggtgggagggtctgcagggaattgggggggtgcccggggatcccccgccccatcctcctgcccccaccccaggctgggctgttcactctctcgtcttggtttggttcatggtgaaggtttttgtttcttttttcggctaaaaagaatgcagagatgtgcccccacccccaccctcgaccacccccgatgggatggcttggggggctccagggggtgccctcccagacccccttgcccaggcctccccagcacctaggtggggcctggggtaggaggaacaggtttaaaaatccccaaaaaagcgaaccgtgaggaggggtgtgggcacccccggcccagtgccccctggtggaatgcgggggagcaggcagtggggctggaagcagaaacaaaatgaaaaaaaaaggggggtgggaggggaagaaaaactctatttttgtaaaaagggaaaaagacctcgtggagaatttttactggggattcttgaacttgaaaaaaaaaaacacaaaaaaagacaaaaaaaaaaaaagaaaatattttggcaggttatgtttaccaactggggcgggggtggggggggcccagggagcagggcttaggggctagcagcccacggggccacacagagaaacaaccacgcagacagtcacaccacggggacacacggacagacgcagacggacacagcgacatgccccagacacgttaagggactggttggccaaactcagacacgtggacagggatagacagaaagagacagaagctggggctacgtccatgtggacacagaccacagatgtgggcacacgaatccatccacctgtccacgtgcacacgtgaatgtagcgatagatatttggacatcaaatttggacaccaggtcacggagaaacacaaacaccacccaggaacacgcagacatatgcccatagcatcccacaggcccaggcaggaggtcccaccccagaccctgccccagacgctccctcaccctctcggccccctcgccctggcccccaggttctctgcagagatctctcctggacccccagcggtctccttggcgcccacgaacacaggcgtgcacacgcagcgcacatgcattgagacacacgatacctcgttccaccttggcgtcacggtgggctggaggcagcccccccccccacaacacttgaggccaaaggacacccctgtccccggggctcagcctccccctgggccgaggccttggcccacacagctgagggagaggcccagccctgagcctcccccaccaggactgggcctccccggcagcaagaccccggcactccccgccaggcccagggtggggtggatgggcccaaaggcccagccccacactcctttcccgtccacttgtcacctacctatcccctttcggtttgttgggtttttcgtctttccagattgcagtggacacagcccccgatctcgagccccggcccccggcttctgtctggacattgcatcgccctagttttctttctttaaaaaaaaaaaattccaacagaagccacaggccggagcccctgggagccctcgcaccgctccccaccccactcagcggccccatcggaactgagaattgcaaaacccccgactttagctatagttaagttgccttcccccggtgtccccacgtttggtgtctggctatggcgcccccatctgactgtccagctctctctcccccacccctcccggtgttgttattaaacgtctgtggagcttctgctgcaaggaacaaaaaagaaaaaaatcaaaaaagcgacaaaaaaacacaaacagaagaggaaaaaaaagcaacaaaaaaagaaaacacacagaagagatttaaaaaaaaaaaaggaaaaaaaaaaaagacataaactggcaccagttaactttcttgtacttttttgctgaatttagcttcttgtagttttaacttattgctatgttaactatttattctcctcgttgccctgtaaggacatccgtgtatatttctgttacttcatccggtttgcaagttaaaggaacgacaatgttctctttgtttctttaagttttgccgagacatggttatgcctaatttatttataaaaggggaagtggaatcattaaagtaataataattattaataacagtaatggtagccgagtggcacgcgggggcgtgtgctctgcgggacagtccccacggccagcgacgtccaggtcaccaatgggattctttttgctcttgtcttgagaattttttcagtcctatttagctggtgaaatccctagcttgttcttgatacacgaacctatttattctcgtggttttaagtcctccctgccctctctcctctcccctgcagcagggcagggacccctctcccctgctgtctcttggggctctctcccctccgccctctgcattcgggaacacgcacgtccgcgtgggaagcttgcagcagggcgtccgagcaataagggctgggtttgtcccccaccctggggggggccaggctccagagagggggcacctccccacacaccccccccccaccgaggcctaggcccctgccacccccaagactgggaggggacttctttttctaaaacacaaaactcagcccagccaggccccctccctggaggccagcccctccccgcagggggccaggccggggctcccaggcgagggggacttggggcttccacgtccctggggggcaggggccaggccaggggggagggggctcagcccctccacccctcccttcatcctgttatttattcggaaggtttcaaatcacgacagagtccatgttggaggtgataaaaaactgtaaaaaaaaaaaaaaaaaaaaagacaaaacaaaagacaaaaaaaaaaaaaaaacccaacaagaacacttcgcgttgcgtttagactatttattaccgggatcacaggcctggccgcggtaacagacttttacatggaattgtttaattatttgtacttttcatgccagaaaataaaagttcagaatctt

SEQ ID NO: 223484 - protein, 322 aa, Artificial Sequence
  derived and/or modified sequence
MTLEAIRYSRGSLQILDQLLLPKQSRYEAVGSVHQAWEAIRAMKVRGAPAIALVGCLSLAVELQAGAGGPGLAALVAFVRDKLSFLVTARPTAVNMARAARDLADVAAREAEREGATEEAVRERRETELCEHWEEHTRQRELPLRGPLGGTVLETRPYNQGARLTAFELVYEQIPATLITDSMVAAAMAHRGVSAVVVGADRVVANGDTANKVGTYQLAIVAKHHGIPFYVAAPSSSCDLRLETGKEIIIEERPGQELTDVNGVRIAAPGIGVWNPAFDVTPHDLITGGIITELGVFAPEELRTALTTTISSRDGTLDGPQM

SEQ ID NO: 223485 - DNA, 969 bp, Artificial Sequence
  derived and/or modified sequence
atgaccctggaggcgatccgatactctcgaggtagccttcagatcttggatcagctgctcctgccaaaacagagcagatatgaggccgtggggagcgtgcatcaggcgtgggaagcgatccgggcaatgaaagtgcgtggagccccagctattgccttagttgggtgcctgtcgctggctgtggaattacaggcaggagcaggcgggcccggtttggccgctctggtagcattcgttcgggacaaactgtcatttctagtgaccgcccgccccacggctgtgaacatggctcgcgcagcccgggatctggccgacgttgccgcacgggaggcagagagagaaggtgcgactgaggaggccgttcgtgagcgtagagagactgaactttgcgagcattgggaggaacacaccaggcagcgagagcttccgcttagaggtcccctgggcggaaccgttctagagacgcgcccttacaaccagggggcgagactgaccgccttcgagctagtatacgaacaaattcctgcaacgctgattacagattcaatggttgccgctgccatggcccacagaggagtgtctgcagttgtcgtgggagctgatcgggtcgtggcaaacggcgacacagctaacaaagttgggacctatcaactagccattgtcgctaagcaccatggcatccccttctatgttgcagctccaagctcttcatgcgacctccggttggagactggaaaagagatcattatcgaagagcgacctggccaggaactaacagacgtgaacggggtgagaatcgccgccccaggcatcggagtgtggaaccccgcatttgacgtgactccacacgatctgattacaggaggtatcataacagaactaggagtgttcgctccagaggagcttcgcaccgcattgactacaaccatttcgagtcgggacgggaccttggatggaccccagatgtag

SEQ ID NO: 223486 - DNA, 969 bp, Artificial Sequence
  derived and/or modified sequence
atgaccctggaggccatccgctacagccggggcagcctgcagatcctggaccagctgctgctgcccaagcagagccgctatgaagctgtgggctctgtgcaccaggcctgggaggccatccgggccatgaaggtgcggggggccccagccatcgccctggtgggctgcctgagcctggccgtggagctgcaggccggggccggcggccctggcctggccgccctggtggcctttgtgcgggacaagctgtccttcctggtgacagcccggcccacagctgtgaacatggcccgggccgcccgggacctggctgatgtggccgcccgggaggccgagcgggagggcgccacagaggaggccgtgcgggagcggcgggagacagagctgtgtgagcactgggaggagcacacccggcagcgggagctgcccctgcggggccccctgggcggcaccgtgctggagacccggccctacaaccagggcgcccggctgacagcctttgagctggtgtatgagcagatcccagccaccctcatcacagacagcatggtggccgccgccatggcccaccggggcgtgtctgctgtggtggtgggcgctgacagagtggtggccaacggggacacagccaacaaggtgggcacctaccagctggccatcgtggccaagcaccacggcatccccttctacgtggccgcccccagcagcagctgtgacctgcggctggagaccgggaaggagatcatcatcgaggagcggcccggccaggagctgacagatgtgaatggagtgagaattgctgcccctggcattggagtgtggaacccagcctttgatgtgacccctcatgacctgatcactggaggcatcatcacagagctgggcgtgtttgcccctgaggagctgaggacagccctgaccaccaccatcagcagcagagatggcaccctggatggcccccagatgtag

SEQ ID NO: 223487 - DNA, 969 bp, Artificial Sequence
  derived and/or modified sequence
atgaccctggaggccatccggtacagccggggcagcctgcagatccttgatcagctactcctgcccaaacagagtcgatacgaagcagtaggatctgtgcatcaggcctgggaggcaattcgggctatgaaagtgcggggggcacccgccatagctctggtgggctgcctgtccctggcggtggaattacaggcgggcgccggcgggccaggcctggctgccctggtggcctttgttcgggacaaactttctttcttagtgaccgcgcgaccaacagccgtcaatatggccagggctgccagagatctggcggatgtagctgcacgcgaggctgagagggagggcgccactgaggaagcggtgagagagcggcgcgagacggagttgtgcgagcactgggaagaacacactcgccagcgtgagctgcccctcaggggcccgcttgggggcactgtgctggagacccggccctataatcagggcgctcgtctgaccgcgttcgagttggtgtacgagcagatacctgccaccttgatcaccgacagcatggtggccgccgcgatggcacacaggggtgtgagtgccgtggtggtgggggctgacagagttgtggccaacggcgacacagccaataaggtcggaacataccagttagctattgtggctaagcatcacggcatccctttttacgtagccgccccatcttcgtcttgtgatttaagactggaaaccggcaaagaaatcataattgaagaacgtcctggtcaggaattgactgacgtaaacggcgtccgcatcgccgctcccggaatcggggtctggaatcctgccttcgatgttacacctcacgacctaatcactggcggcatcatcaccgaattgggggtgtttgcccccgaagaactacgcacggccttgacaaccaccatttcctcccgggatggcactctagatggacctcaaatgtag

SEQ ID NO: 223488 - DNA, 969 bp, Artificial Sequence
  derived and/or modified sequence
atgacgctggaggctatccggtatagccgtggaagtctccaaatcctagatcagctcctcctgcccaagcagagtagatatgaggcagtgggaagcgtgcatcaagcctgggaggccattcgggcaatgaaagtccgaggggctccagctatcgcactcgtgggctgcttatctctcgcagtcgagttacaggccggtgccggtggacccggtctagctgctctggtcgccttcgtgcgggacaaactgagcttcctcgtgaccgctcggccaacagcagtaaatatggcccgtgcagcgagagatctggcggacgtggccgctcgggaagcggagagggaaggggcaaccgaggaagcagttcgcgagcgtcgagagaccgaactatgcgaacattgggaggaacacaccaggcaaagggagctgcctcttcgcggacccctcggtggtactgttctcgaaacacggccatataaccagggagcacgactgaccgcattcgagctcgtctatgagcagattcccgctacccttataaccgattccatggtcgcagcggctatggcacaccggggagtgagcgctgtggtggtgggggctgatagggttgttgccaacggggacactgctaacaaggtgggaacgtatcagctggctattgtagccaagcaccacgggattccgttttacgtcgcagcacctagcagcagttgcgatctcagactagagaccggcaaggagattatcattgaagaaagaccaggccaggagctgaccgacgtgaacggcgtgcgaatcgcggctcccggaatcggcgtttggaatcctgccttcgatgtgacaccacatgatttgattacaggtggtattattactgaattgggagtgttcgctcctgaggaacttcggactgctctgaccactactatctcttccagagacggaaccctcgacggaccacagatgtag

SEQ ID NO: 223489 - DNA, 3036 bp, Artificial Sequence
  derived and/or modified sequence
ccccgctcccaagtgcgcgcggacccctagctccctctgagttgcgctgggcttggctgctgcaccatgaccctggaggcgatccgctactcgcggggctccctgcagatcctagaccagctgctgctgcccaagcagagccgctacgaggcggtgggctcggtgcaccaggcctgggaggccatccgcgccatgaaggtgcggggcgccccggccatagccctggtgggctgtctcagcctcgccgtggagctgcaggcgggcgccgggggaccgggactcgccgcgctcgtggccttcgtgcgcgacaagctgagcttcctcgtcaccgcccggcccaccgctgtcaacatggcccgcgccgcccgcgacctggctgatgttgcagcccgggaggccgaacgggagggcgctacggaagaggcggtccgggagagacgtgaaacggagctatgcgagcattgggaagagcataccaggcagagggaactgccactgcgagggcccctgggcgggactgtgctcgagacccggccctacaaccagggagcccggctgacggcctttgagctggtctatgagcagatccccgccacccttatcaccgacagcatggtggctgctgccatggcccataggggcgtgtcagctgtggtcgtgggagctgaccgcgtggttgccaacggcgacacagccaacaaggtgggcacctaccagctggccattgtcgccaagcaccatggcattcccttctacgtggctgcccccagctcttcatgtgacctccgtctggagaccggcaaggagatcattattgaagagcgaccgggccaggagctgaccgatgttaatggggtccggattgcagcacctgggattggagtttggaatcctgccttcgatgtcaccccccacgacctcatcactggtggcatcatcacagaactgggggtctttgcccctgaggagctccggacagccctaaccaccaccatctcttccagggatggaaccctagatggaccccagatgtaaccaactcagctctccctagcctgcctctctaggtttttcaatacatttcttgaatggctacccaaaagctgaccgtccagcccctgaccacacttgttcctagtgcagggagctcagacagggccttccatctagagcccagcacctagagccaggctgcccagattcaaatcctgactccgccacttttcccactgtatgatcttgggcaagtcacttcacctctctgtgccttggtttcctcatttataaaatgtggataacaggccgggcgcagtggctcacacctgtaatcccagcactttgggaggccgaggcaggtggatcacaagatcaggagattgagaccatcctggctaacatggtgaaaccccatctctactaaaaatacaaaaaattagccgggtgtggtggtgggcacctgcagtcccagctacttgggaggctgaggcaggagaatggcgtgaaactgggaggcagagcttgcagtgagccgagatagcgccactgcactccagcctgggcaacagagcgagactccgtctcaaaaataaatataattaattaattatttaattaaaaaaataaaaaataaatgtggataatactagtacctccctcttaaggtcagggctggagctagggtgacatctccagggcagaattttaagaggacaccaaaaaagctcagcaaccaagataaaaaatattttaaagcaatattttgttttgggttttttttttttgagatcaagtatcactcgttacccaggctggaatgtagaggcgagatctcagctcactgaaacctgtgcctccccggttcaagcgattctcctgccacagcctcctgagtagctgggattacaggcatgcgccaccatgcccagctaatttttctatttttagtagagacatgatttcaccatgttggccaggctggtctcgaactcctgactcaaatgatccccctgcctcagcctcccaaagtgctgggactacaggcatgagccactgtgcctgaccttacagcagtattttttaaaaatcaaaattaatgcaaaaatccatgatgaggccaggcttggtggctcatgcctgtaattccagcactttgggaggatcccttgagcccaggtgtttgagaccagtttgggtaacataggaagagcttgtctctacaaacaaaaatttaaaaacaatgagctgggcatggaactcacacctctagccccagctactcaggctgaagtgggaggatggcttgagcccaggagttcaaggatgcagtgtgctttgattgcactactgcacttcaccctaagcaacagagtgagaccccatctctttaaaaaaaaaaaaaaatccatgatgaacaaaacaagtatttgtttgagacggggtctcgctctgtcgcccaggctggagtacagtggtgccatctcagctcactgcaacctccgccttctgggttcaagcgactctcctgcctcagcctcccgagtagctgggattacaggagcctggcactatgcctggctaatttttgtatttttattggagacaccatgttagtcgtggctggtctccaactcctgacctcgggtgatccgcgccccgcggcctccgaaagtgctgggattacaagcgtgagccaccgtgcccggcctaaataaaattttgaagaggctagaaccccgcacttgtgccttgagcttactgacctcaacaccctggttccactaaaactttatttacaaaattatgctgccggtctgcaggatgtagtttaacaatttgattattttggatattaaaatattttttaagtcttgaaaatattgtttactattaccaaagtttttgaaccttcttaaattctgtaccagaggtgagtgccacaccctaacctagtctgagtttttatgtgtaaagatcataaaacgttgtaagttttctaaaacacataagctctcaataaacgttagcttatcattgtca

SEQ ID NO: 223490 - DNA, 969 bp, Artificial Sequence
  derived and/or modified sequence
atgaccctggaggccatcagatacagcagaggcagcctgcagatcctggaccagctgctgctgcccaagcagagcagatacgaggccgtgggcagcgtgcaccaggcctgggaggccatcagagccatgaaggtgagaggcgcccccgccatcgccctggtgggctgcctgagcctggccgtggagctgcaggccggcgccggcggccccggcctggccgccctggtggccttcgtgagagacaagctgagcttcctggtgaccgccagacccaccgccgtgaacatggccagagccgccagagacctggccgacgtggccgccagagaggccgagagagagggcgccaccgaggaggccgtgagagagagaagagagaccgagctgtgcgagcactgggaggagcacaccagacagagagagctgcccctgagaggccccctgggcggcaccgtgctggagaccagaccctacaaccagggcgccagactgaccgccttcgagctggtgtacgagcagatccccgccaccctgatcaccgacagcatggtggccgccgccatggcccacagaggcgtgagcgccgtggtggtgggcgccgacagagtggtggccaacggcgacaccgccaacaaggtgggcacctaccagctggccatcgtggccaagcaccacggcatccccttctacgtggccgcccccagcagcagctgcgacctgagactggagaccggcaaggagatcatcatcgaggagagacccggccaggagctgaccgacgtgaacggcgtgagaatcgccgcccccggcatcggcgtgtggaaccccgccttcgacgtgaccccccacgacctgatcaccggcggcatcatcaccgagctgggcgtgttcgcccccgaggagctgagaaccgccctgaccaccaccatcagcagcagagacggcaccctggacggcccccagatgtag

SEQ ID NO: 223491 - protein, 239 aa, Artificial Sequence
  derived and/or modified sequence
MVQPQTSKAESPALAASPNAQMDDVIDTLTSLRLTNSALRREASTLRAEKANLTNMLESVMAELTLLRTRARIPGALQITPPISSITSNGTRPMTTPPTSLPEPFSGDPGRLAGFLMQMDRFMIFQASRFPGEAERVAFLVSRLTGEAEKWAIPHMQPDSPLRNNYQGFLAELRRTYKSPLRHARRAQIRKTSASNRAVRERQMLCRQLASAGTGPCPVHPASNGTSPAPALPARARNL

SEQ ID NO: 223492 - DNA, 720 bp, Artificial Sequence
  derived and/or modified sequence
atggtgcagccccagaccagcaaggccgagagccccgccctggccgccagccccaacgcccagatggacgacgtgatcgacaccctgaccagcctgagactgaccaacagcgccctgagaagagaggccagcaccctgagagccgagaaggccaacctgaccaacatgctggagagcgtgatggccgagctgaccctgctgagaaccagagccagaatccccggcgccctgcagatcaccccccccatcagcagcatcaccagcaacggcaccagacccatgaccaccccccccaccagcctgcccgagcccttcagcggcgaccccggcagactggccggcttcctgatgcagatggacagattcatgatcttccaggccagcagattccccggcgaggccgagagagtggccttcctggtgagcagactgaccggcgaggccgagaagtgggccatcccccacatgcagcccgacagccccctgagaaacaactaccagggcttcctggccgagctgagaagaacctacaagagccccctgagacacgccagaagagcccagatcagaaagaccagcgccagcaacagagccgtgagagagagacagatgctgtgcagacagctggccagcgccggcaccggcccctgccccgtgcaccccgccagcaacggcaccagccccgcccccgccctgcccgccagagccagaaacctgtag

SEQ ID NO: 223493 - DNA, 720 bp, Artificial Sequence
  derived and/or modified sequence
atggttcaaccccagacatccaaggcagagtcccctgcgttagctgcgagtccgaacgcccagatggacgatgtgatagacacattgacaagtttgcggttgaccaactctgccctgcgtcgggaagccagcaccctccgtgccgagaaggccaacttgaccaatatgctcgaaagcgtaatggctgaactgacactgcttcgcactagggcacgaatccccggagcactacagattaccccccccattagcagcatcacctccaatggcacacggcccatgacaactcctcctacctctctaccagaacccttctcgggcgatcctggccggctggctgggttcctgatgcagatggaccgtttcatgatattccaggcttccaggttccctggcgaggccgagagggtggcattcttagtcagccgtttgactggggaagcagagaagtgggctatcccccatatgcagcccgactctccccttagaaataattatcagggcttcctggccgaattgcggcgcacttataagagccctctgaggcacgcaagaagggcacagattcgcaagacatccgcatcaaatagagctgtccgcgagagacaaatgctttgtaggcagctcgcttcagcagggactggaccgtgccctgtccaccccgcctctaatggaaccagtcctgcccccgcccttcccgcccgcgcgaggaatctctag

SEQ ID NO: 223494 - DNA, 720 bp, Artificial Sequence
  derived and/or modified sequence
atggtgcagccccagaccagcaaggccgagagccctgccctggccgccagccccaatgcccagatggatgatgtgattgacaccctgaccagcctgcggctgaccaacagcgccctgcggcgggaggccagcaccctgcgggcagagaaggccaacctgaccaacatgctggagagcgtgatggccgagctgaccctgctgcggacccgggcccgcatccctggggccctgcagatcaccccacccatcagcagcatcaccagcaatggcacccggcccatgaccaccccacccaccagcctgcctgagcccttcagcggggaccccggccgcctggccggcttcctgatgcagatggaccgcttcatgatcttccaggccagccgcttccctggagaggccgagcgggtggccttcctggtgtcccggctgactggagaggccgagaagtgggccatcccccacatgcagcctgacagccccctgaggaacaactaccagggcttcctggccgagctgcggaggacctacaagagccccctgcggcatgcccggcgggcccagatcaggaagaccagcgccagcaacagagctgtgcgggagcggcagatgctgtgccggcagctggccagcgctggcaccggcccctgccctgtgcacccagccagcaatggcaccagccctgccccagccctgcctgcccgggccaggaacctgtag

SEQ ID NO: 223495 - DNA, 5495 bp, Artificial Sequence
  derived and/or modified sequence
acaaaggccgcgcggtgacccgccctctgccgcgaccccggccccgcccctgccccggccccggcctggcccggtccctgcacctgccggaggccgcccgccgccatcgccagcgccgtcgcttggctgcgctgaccgggaagcagttctcggcggtccgcgcggtgattcatcggcctggccgcgtcccccgcgcgggccatcttggtcacggccggcggcggacagagccgcggaggaaccgcgagaccccagggcccagagcaggtccagccacccgtctggctccgtagtccgcgaagtctgcagtaaaggagccgcgtgggaccggggccgaagtccctagggcctggcaccgcgtgcccctctctcgggccctcggcttgggggtctcgcagcgccctgccgtcgtgcaccccacactgcccccatttctacaggggcccacctggtcaccacaccctcttggtccacccgcggatctcagcgtgtggctgacctctggccagcatggtgcagccgcagacgtccaaagctgaaagcccagccttggcagcgtctccgaatgcccagatggatgacgttattgacaccctgacctccctgcgcctcaccaactcggcgctgaggcgggaggcttccaccctgcgggcggagaaggccaatctcaccaacatgctggagagcgtgatggcagagctgaccttgttacgcaccagggcgcggatcccgggggctctgcagatcaccccgcccatctcctcaattacttcaaacgggactcgacccatgaccacacctccaacctctctgcccgagcccttttccggggacccaggccggttggcggggttcctgatgcagatggacagattcatgatcttccaggcctcccgcttcccgggtgaggccgagcgtgtggccttccttgtgtctcgactgactggggaggcggagaagtgggctatcccccacatgcaacctgacagccccttgcgcaacaactatcaggggttcctggcagagttgcggagaacctacaagtctccgctccggcatgcgcggcgcgcccaaatcaggaagacttctgcctctaatagggctgtgcgagagaggcagatgctctgccgccagctggcctctgcgggcacggggccttgcccagtgcatccagcttccaacgggactagtccagcgccagccctgcctgcccgagcacggaatctttaagaatccgccagcacttggtagcgtctgcagccacccaggtagcatacgctctttgctgtgtagaagaaatgcccatacgacagctttgcccctgtttgaagacctcccttcttgcctctccagacgtgttccccgaggagatcttccttccgtccttcctggcgccctggttgcccaccttgccgtgcttcctcttacgtgctagctttgtacctatcgctcactgcatgctcgcctccctcttgctggcatcccggcctgtttcaatgactaccgctctgctacttaggcacagggactccgccgcacgctgacggaccacgagggctgaccccttccagcctgacttggttcatggaggctcctactctgccctctccaagctcccctggcggctccccacctggttgcccagttcctattgatgagctctggacagaaagatgcccgtttggccaggctggtggcttgatgggtgtacctggagagggggtctggcttcctgcccaagatgcctcccagccctgccagggcccggtgcagcgggcagggcctcatctgtgctgtagtggtcgagtggttgctgcaaggagcgtagttctgccatgtctgggggccaggttccactctgcacatgaatatgcagtctgggaggccccactgctctcactgggaaggaccaatgttgcacctctgttaatgcctgacttcagctgctggtgttctgatggagccagaggcttggggaatctggaacttgcctgctaaataaggtcgtggtggactctcagccattgggcaggtctatcaggctgcaggttcctacacacccacgcctgagggtcatagcaggctaagggtggataccagcgactccctttgctgcccaggatctccatgggcagtgccacagcggctgatgctcagtcactcctgcttctaccccctgtcactgatggcgagccttgcccagcttgagacctgttcccatctctattcaggtgccatgtggccttcactgcagccctgcagccacccacgcaccatctgtgggtctccaaaggcaccttgtagcatgtactccccgtgcctgggcaatcagatgggctgcctttgtccaagggaaaacagactcccttcgggaaacatccttaagcacttaaggccggggggggtgtctgcctctggcaacccagccagggtcttggtggcatttgtaaaagcaaagagctgtggactgccgtggtcctagtgtggtgacaatgcagcactggcatgcatgtcctccttctgaaggacctcatccttcctcacagggggatgaccaagaaatcattttgtggctgagtttggccacgccctttggactgtgctgttccgccatatttcaatgccaaatgaaccacattgacatgacctggaccatagggcttcctatcctgggctcagctgcccctgtctgaagggtcttggcttgattgcagaaggacaacctccgcacccacctaaagacatgtatatgtcttgggatcccagagattgggtccttgggcctggcttcttaagagttttgatgatgctgggaaaagtgactgcgattctgaagaaccgctgccttgcaaggtcaaggacattcagtggttgctggggtccgcagactactgccacccactcaccatcaactctgttagcccaattgccctgctgaacaactgcctgaatacaggctttaggttcccctggactccagccaaggctgttcaggtgggaccatggtgctctttaagcgtgatcggagggaagacacacagcagggccaccattccatgaatgggaggtgtacagatcactttctctttgtgctcagttctgttctgtctccagcagctatattggtaagactagtacctgccagggagaggtgcccccaagtgaaggggtacagtggcacctgggaaaaggcacctggaaggtttccatgtggcccagcccagcatggaagcagggtgggaactctgctgtgtcgccagcgctcactctactcgagtggctttttgaaagccctaccatgtctgtgtcaggcctgtgctgcttcacatcctacagctgcctaggaaaggccggccacgctccctgtccacacactccctgtccacacactccctgtccacacactccctgtccacaactgcagccgggccctctgcctatgggcacccaatccaagcagctgctccacctttgtttggcatggtgatttgtgttttttctcttggtgcttatgtgtgtgggcttgggacgagtgctggtatgcacttaggaccttcttgatagctccctgcactttggaacacggagcagatgagagagggtcggggcttgccctccaccttggacttggaagaagcccacattggagaggtgaggaccccatggtggctctagtggaagatacgttagtctccagctaaggaggatgaggcgcagccccagagggagacctcagtgataggggatcaggctaagaaagtgggggaagggagatgctttgtacatattttggggttataatttctctaaattttaggagaacgggtattgattgataaaagggacaggcagtagtgttcaacagtgcatgtgaaggaaagttctgttttccatggttttgacattctttggactgtattgtgactgctgtctggtccacatggtacccctttggtaagtaggcttcagtgcataccagggtatcactggagatgggagttagtgaaggggtgactccctggcctagtatagtgtgaccctgggactaacttaatgtcctaaagcattttggtgacttctagggaatagcaaagacctatttcattgtccccaggtaagtatgtgatgagcaatgaggaggagtggaaaacaaaacccagaaagtgcggcaggaccagcctgacgcacacgctcctgttgtcatggcagacagccgccttgggtgggcaccaccctggcagttccagcctgtaggggagtgaagggacatggctgagctgggcatgtgctgaggttgacttagggaacaagccctgggattggacaaaagggcccatgctgcagccactgactgggggcagagctctgggtggaagagggaagagatcctaatggaggcgcctccatctgcaaccacagttgtaaggctcatggcacctctgcttggaaagcactggtttagggacttagagaggtaggcacaaggtgggtctcctgggtaagggaagcaagagcagactgttgggccaacaggagaagctccccagagtaggggagaaggttggggtgtagggccttccacgtggaacagacagcccctgtgtctctgtctcttggggacctgagtttgggtggggtggcagttggcacagcgcagatgcggtagagatgggaggaaacccagctcctcacttccgtgtgcctcatgcctttgcatacacaagcaccaaacctactaggtcttctcattacccatgtaaaccacatgttagataaatttttgcaagtagaggaaagaaggaaataaaacatcacattttggtgtctctcaggctttcccccccaactatggtttctttgctttttgttttaacatagttttgttgctgtcttctgtaatgatacagttttgtgcagctgttttcacttagcatatcgtgggcatctccccttatgattactaaatattttattttggagtggctgtgtactctcccattgactagatggaccattgtgccagttgccaatcactaatgctgttactaacttttcagttataaattgatgaatatctttgtgcacaggctgtttcccaatgtcaagttattagggtagactccaggaggtgggattcttcaactaaagaatatgaaaacctttgaggcttttactacatattgacaaaatggtttccggaaatatttgtatccccttacactgccaccagcaaggataaacatgtccatcttgcccgtattgggaattatcatctggctaaatatttgctaatttgataatgaaaaaatagcatcgtgtttcagttggcatttcactgacttctagcacggttgaacatctttcatgtggagcgattgtatttcctcctttgtggattgtcagtgtcctttgctctatcttctggggtcagataaatttgtatgagctcggtatatattaaagatattaacctggtgtgtgtcatatttgctaca

SEQ ID NO: 223496 - DNA, 720 bp, Artificial Sequence
  derived and/or modified sequence
atggtgcagccccagaccagcaaggccgagagccccgccctggccgcctcccctaatgcccagatggatgatgtaatcgacactttgacctcactgaggcttacaaactcggctcttcggagggaggcttccactctgcgcgcagagaaggccaatcttacaaacatgctggaatcagtcatggcagaattgacgttgctgaggacgagggcgcgcattccaggggccctgcaaatcactcccccaattagcagtataacctccaacggcacacgacctatgaccacaccgccgacaagcctgcccgagcctttttctggcgatcccggcaggctggctggctttttaatgcagatggaccgatttatgatttttcaggcctcgcgctttcctggagaggctgagagagtggcttttcttgtttcgcgactgactggagaggcagagaagtgggccatcccacacatgcaaccagattcacctctgcggaataactaccaaggctttctcgctgagctacggaggacatacaaaagcccactgaggcatgcccgcagagcccaaatccgcaaaactagcgcctccaacagagctgtgagagagcgccagatgttatgcaggcagctggccagtgccggtaccggcccttgtcccgtgcacccagctagcaacgggacaagcccagcccccgccctcccagctcgcgctcggaacctgtag

SEQ ID NO: 223497 - DNA, 720 bp, Artificial Sequence
  derived and/or modified sequence
atggtccagccccagaccagcaaagcagagagtcctgcgctggcggcaagccccaatgcccagatggacgacgttatcgatacgctcacctcccttcggctgaccaacagcgcgctgcgcagagaggccagcacattgcgggctgaaaaggccaaccttaccaatatgctcgaaagtgtgatggcagagctcactctcctgcggacccgtgcgaggattccaggagccctgcagatcaccccacctatttcttctatcactagcaatggcactaggccaatgaccacacctccaacatcactccctgaacccttttccggcgatcccggacgtcttgcgggttttcttatgcagatggaccgttttatgatcttccaggcctctcggtttccaggggaggcggaacgcgttgctttcctggtctctaggctgactggggaggcggaaaaatgggccatcccccatatgcagcccgactctccactgcgtaacaactatcaggggtttcttgccgaactcagaaggacctataaaagccctctccgacacgctcgccgagctcagattcggaagacctccgctagcaaccgtgccgtacgcgagagacagatgctgtgccggcaactggcaagcgcagggacgggaccatgccccgtgcatccagccagtaatgggacctcgcccgctcccgctctgcctgcgagggctcggaatctatag

SEQ ID NO: 223498 - protein, 1529 aa, Artificial Sequence
  derived and/or modified sequence
MLPCKKRRTTVTESLQHKGNQEENNVDLESAVKPESDQVKDLSSVSLSWDPSHGRVAGFEVQSLQDAGNQLGMEDTSLSSGMLTQNTNVPILEGVDVAISQGITLPSLESFHPLNIHIGKGKLHATGSKRGKKMTLRPGPVTQEDRCDHLTLKEPFSGEPSEEVKEEGGKPQMNSEGEIPSLPSGSQSAKPVSQPRKSTQPDVCASPQEKPLRTLFHQPEEEIEDGGLFIPMEEQDNEESEKRRKKKKGTKRKRDGRGQEGTLAYDLKLDDMLDRTLEDGAKQHNLTAVNVRNILHEVITNEHVVAMMKAAISETEDMPMFEPKMTRSKLKEVVEKGVVIPTWNISPIKKANEIKPPQFVDIHLEEDDSSDEEYQPDDEEEDETAEESLLESDVESTASSPRGAKKSRLRQSSEMTETDEESGILSEAEKVTTPAIRHISAEVVPMGPPPPPKPKQTRDSTFMEKLHAVDEELASSPVCMDSFQPMDDSLIAFRTRSKMPLKDVPLGQLEAELQAPDITPDMYDPNTADDEDWKMWLGGLMNDDVGNEDEADDDDDPEYNFLEDLDEPDTEDFRTDRAVRITKKEVNELMEELFETFQDEMGFSNMEDDGPEEEECVAEPRPNFNTPQALRFEEPLANLLNEQHRTVKELFEQLKMKKSSAKQLQEVEKVKPQSEKVHQTLILDPAQRKRLQQQMQQHVQLLTQIHLLATCNPNLNPEATTTRIFLKELGTFAQSSIALHHQYNPKFQTLFQPCNLMGAMQLIEDFSTHVSIDCSPHKTVKKTANEFPCLPKQVAWILATSKVFMYPELLPVCSLKAKNPQDKIVFTKAEDNLLALGLKHFEGTEFPNPLISKYLLTCKTAHQLTVRIKNLNMNRAPDNIIKFYKKTKQLPVLGKCCEEIQPHQWKPPIEREEHRLPFWLKASLPSIQEELRHMADGAREVGNMTGTTEINSDRSLEKDNLELGSESRYPLLLPKGVVLKLKPVATRFPRKAWRQKRSSVLKPLLIQPSPSLQPSFNPGKTPARSTHSEAPPSKMVLRIPHPIQPATVLQTVPGVPPLGVSGGESFESPAALPAVPPEARTSFPLSESQTLLSSAPVPKVMLPSLAPSKFRKPYVRRRPSKRRGVKASPCMKPAPVIHHPASVIFTVPATTVKIVSLGGGCNMIQPVNAAVAQSPQTIPITTLLVNPTSFPCPLNQSLVASSVSPLIVSGNSVNLPIPSTPEDKAHVNVDIACAVADGENAFQGLEPKLEPQELSPLSATVFPKVEHSPGPPLADAECQEGLSENSACRWTVVKTEEGRQALEPLPQGIQESLNNPTPGDLEEIVKMEPEEAREEISGSPERDICDDIKVEHAVELDTGAPSEELSSAGEVTKQTVLQKEEERSQPTKTPSSSQEPPDEGTSGTDVNKGSSKNALSSMDPEVRLSSPPGKPEDSSSVDGQSVGTPVGPETGGEKNGPEEEEEEDFDDLTQDEEDEMSSASEESVLSVPELQVRAGEYSQVFRGLSNMYHLLICHLLACCTMDSPKIICI

SEQ ID NO: 223499 - DNA, 4590 bp, Artificial Sequence
  derived and/or modified sequence
atgctcccttgtaaaaagagacgtaccacggtgaccgagagcttgcagcacaaggggaaccaagaggagaataatgtggatttagaatctgcagtgaagccggaaagcgaccaggtgaaggacctctctagtgtaagcctttcatgggatccgtcccacgggcgggttgctggctttgaggtccagtcgctgcaggacgccggaaaccagcttggtatggaagacacatcgctgagctccggcatgctgactcagaataccaacgttcctatcctagagggcgtagacgtggcaatctctcaggggatcacattaccctcgctggaaagttttcatccccttaacatccacatcggtaaaggcaagttgcacgccaccggttcaaaacggggaaagaagatgacccttaggccaggccccgtgacacaagaagaccgatgcgatcatctcacactgaaagagcccttctcaggcgagcctagtgaagaagtaaaggaggaagggggaaagcctcagatgaactccgaaggggagattcccagcctgccttctgggagtcagagcgcaaaacctgttagccagcccaggaaaagcacacaaccagacgtctgtgcatctccgcaggaaaaacctctcagaacactattccatcaacctgaggaagaaattgaggatggagggctcttcatccccatggaggagcaggacaatgaagagtccgaaaaaaggcgcaagaaaaagaaagggactaaacgcaagagggacggcagagggcaggaaggcacccttgcctacgatctgaagctggacgacatgcttgatagaacgcttgaagacggcgccaaacagcataatttgactgccgtgaatgttagaaacatcttacacgaggtcatcactaatgagcacgtggttgcaatgatgaaagccgctatctccgaaacagaagatatgccaatgttcgaacctaaaatgacgcgttcaaagctaaaggaggttgtggagaagggggtggtcatcccaacatggaacatcagtcctatcaaaaaggctaatgagatcaaacccccccaatttgttgacatccacctggaggaagatgactctagcgatgaggagtaccaacccgatgatgaggaagaggatgagaccgcggaggaatcactgcttgagtccgacgtggagtccactgcgtcctcaccaaggggcgccaagaaatcccgtctgcgccagtcatctgagatgactgaaacggacgaggagtccgggattcttagtgaggccgaaaaggtcaccacacccgccattcggcacattagcgcagaggtcgttcctatggggcccccccccccgccaaaacccaaacagacaagagactccacttttatggaaaagttacacgccgtggatgaagagttggcatcctctccagtgtgcatggactcctttcagccaatggatgattccctcatcgccttccgcaccagatcaaagatgccactgaaagatgtccctctgggtcagctggaagctgaactgcaggcccccgatattacccctgatatgtatgatccaaacaccgctgacgacgaagattggaaaatgtggctggggggactcatgaacgatgatgtggggaatgaggatgaagctgacgacgacgatgatcctgaatataacttcctcgaagacttggacgagccagacactgaagacttccgcacggacagagctgtgaggatcacaaagaaggaggttaacgagttgatggaggagctgttcgagacatttcaagatgaaatgggctttagcaacatggaagacgacgggccagaggaagaagagtgtgtggctgaacccagaccgaactttaacaccccccaagccctgaggtttgaagaacccctagcaaatctcctgaacgaacaacaccgcacagtgaaagagctatttgagcaactcaagatgaagaaaagttcagcaaagcagctgcaggaagtagaaaaagtgaaaccccagtccgagaaagtgcatcagacactgattttagatcccgcgcagaggaagagactccagcagcaaatgcagcagcatgtgcaactgctgacacagattcacctgctcgctacctgtaaccccaatctgaacccagaggccaccaccacccgtatattcctgaaagagcttggaaccttcgcgcagtcttccattgccttgcaccatcagtacaaccctaagtttcagacattattccagccatgcaatctgatgggcgccatgcagctgatagaagactttagtacacatgtttctatcgactgctcgccgcataaaactgtgaagaagactgctaacgagtttccctgcttgcctaaacaggtcgcctggatcctggcgacctctaaagtgtttatgtacccggagctactgccagtctgttcactgaaagctaaaaatccgcaggataaaatcgtgtttacgaaagctgaagacaatctgctggccttgggactcaagcacttcgaaggaactgaatttcccaatcccctgatctctaagtatctgctaacatgcaagactgcccatcagctgaccgttagaattaagaatctgaacatgaatagggcccccgacaatatcattaagttttataagaaaactaaacaactccccgttttgggtaagtgttgtgaggagatacagccccatcagtggaagcctccaatcgaaagggaagaacatcgactgcctttctggcttaaggcgagcctgccctcaatccaggaagagctccggcatatggcagacggcgctagggaggtgggaaatatgactggcacgactgaaattaatagtgataggtctttggagaaggacaacctcgagctgggtagcgaaagtcgataccctttgcttctgcctaagggcgtggtcttgaagcttaagccagttgccacacgcttcccaagaaaagcatggcggcagaaacgaagttccgttcttaagcccttgcttatccagccatcacccagtctgcagccaagctttaaccctggcaaaacaccggccaggtccactcactccgaggcccccccatcaaagatggtcctgagaataccgcacccgatacaacccgccaccgtgctccagaccgtgccaggcgtccctccacttggggtttcagggggcgaaagcttcgagagccccgccgccctgcccgccgtccctccggaagcgaggacctcttttccactttccgaatcgcagacgttgttgagcagtgcgcccgtgcccaaggttatgttgccctctctggcaccgagcaagttccgcaagccctatgtgcggagacgaccaagcaagaggcgtggagtgaaggctagcccatgcatgaagcccgcgcccgttatacaccacccagcaagcgtgatcttcaccgtgcctgccacaaccgtgaaaatcgtctccttaggcggcggttgcaatatgattcagcccgtcaacgccgcggtggctcaaagtccacagaccataccaattaccactctcctggttaacccgacgtcattcccctgcccgctgaatcaatccttggttgcctcttccgtgagccctctgatcgtctccggaaattccgttaatcttcccatcccctcgacccccgaggacaaagcccatgtcaacgtcgacatcgcttgcgcggtggctgatggagaaaacgcatttcagggcctcgaacccaaacttgagcctcaagaactcagtcctctaagtgccacagtatttccaaaggttgagcattctcccgggccaccattagcggatgcagagtgtcaggagggtttatctgaaaattcagcctgtagatggaccgtggtgaagacagaagaaggcagacaggccctggagcctctcccccagggcatccaggagtcccttaataaccccacccctggcgatctggaggaaatcgttaaaatggagcctgaagaagccagggaggagatctcaggcagccccgaaagggatatctgcgacgatattaaagtggaacacgccgttgagttggataccggcgcccctagcgaagagctgtcatcagcgggagaggtcacgaagcaaaccgtcctccagaaagaagaagaaagatcccagcctaccaaaaccccgtcctcgtcacaagaaccccctgacgaggggacatcaggtacagacgttaataaggggagcagcaagaacgccctctcttctatggatccggaagtcagactgagctccccccctgggaagcccgaagattcttctagcgtcgacggacagagcgttggcacccctgtagggcctgagacaggcggcgaaaagaatgggccagaggaagaagaggaggaggacttcgatgaccttactcaggatgaggaggatgagatgtccagcgctagcgaggagtccgtgctcagtgtgccagagctgcaggtacgggctggcgaatactctcaggtgtttagggggctgagcaatatgtatcatctgctgatttgccacttgcttgcatgctgcacaatggactcacctaagataatttgcatctag

SEQ ID NO: 223500 - DNA, 4590 bp, Artificial Sequence
  derived and/or modified sequence
atgctgccctgcaagaagaggaggaccaccgtgacagagagcctgcagcacaagggcaaccaggaggagaacaacgtggacctggagagcgctgtgaagccagagagtgaccaggtgaaggacctgagctctgtgtccctgtcctgggaccccagccacggccgggtggccggctttgaggtgcagagcctgcaggatgctggcaaccagctgggcatggaggacaccagcctgagcagcggcatgctgacccagaacaccaacgtgcccatcctggagggcgtggatgtggccatcagccagggcatcaccctgcccagcctggagagcttccaccccctgaacatccacatcggcaagggcaagctgcacgccaccggcagcaagaggggcaagaagatgaccctgcggcccggccctgtgacccaggaggacagatgtgaccacctgaccctgaaggagcccttctctggagagcccagcgaggaggtgaaggaggagggcggcaagccccagatgaacagcgagggggagatccccagcctgcccagcggcagccagagcgccaagcctgtgtcccagcccaggaagagcacccagccagatgtgtgtgccagcccccaggagaagcccctgcggaccctcttccaccagcctgaggaggagattgaagatggcggcctcttcatccccatggaggagcaggacaatgaggagagcgagaagaggaggaagaagaagaagggcaccaagaggaagagagatggccggggccaggagggcaccctggcctatgacctgaagctggatgacatgctggacaggaccctggaggatggagccaagcagcacaacctgacagctgtgaatgtgaggaacatcctgcacgaggtgatcaccaatgaacatgtggtggccatgatgaaggccgccatcagcgagacagaggacatgcccatgtttgagcccaagatgaccaggagcaagctgaaggaggtggtggagaagggcgtggtgatccccacctggaacatcagccccatcaagaaggccaatgagatcaagccaccccagtttgtggacatccacctggaggaggatgacagcagtgatgaggagtaccagccagatgatgaggaggaggatgaaacagctgaggagagcctgctggagagtgatgtggagagcacagccagcagccccaggggggccaagaagagccggctgcggcagagcagcgagatgacagaaacagatgaggagagcggcatcctgtctgaggccgagaaggtgaccaccccagccatccgccacatctctgctgaggtggtgcccatgggccccccacctccacccaagcccaagcagacccgggacagcaccttcatggagaagctgcatgctgtggatgaggagctggccagcagccctgtgtgcatggacagcttccagcccatggatgacagcctgattgccttccgcaccaggagcaagatgcccctgaaggatgtgcccctgggccagctggaggccgagctgcaggccccagacatcaccccagacatgtatgaccccaacacagcagatgatgaggactggaagatgtggctgggcggcctgatgaatgatgatgtgggcaatgaagatgaagcagatgatgatgatgatcctgagtacaacttcctggaggacctggatgagccagacacagaggacttcagaacagacagagctgtgcgcatcaccaagaaggaggtgaatgagctgatggaggagctgtttgagaccttccaggatgagatgggcttcagcaacatggaggatgatggccctgaggaggaggagtgtgtggccgagccccggcccaacttcaacaccccccaggccctgcgctttgaggagcccctggccaacctgctgaatgagcagcacaggacagtgaaggagctgtttgagcagctgaagatgaagaagagcagcgccaagcagctgcaggaggtggagaaggtgaagccccagagcgagaaggtgcaccagaccctcatcctggaccctgcccagaggaagaggctgcagcagcagatgcagcagcacgtgcagctgctgacccagatccacctgctggccacctgcaaccccaacctgaaccctgaggccaccaccacccgcatcttcctgaaggagctgggcacctttgcccagagcagcatcgccctgcaccaccagtacaaccccaagttccagaccctcttccagccctgcaacctgatgggcgccatgcagctgattgaggacttcagcacccacgtgtccattgactgcagcccccacaagacagtgaagaagacagccaatgagttcccctgcctgcccaagcaggtggcctggatcctggccaccagcaaggtgttcatgtacccagagctgctgcctgtgtgcagcctgaaggccaagaacccccaggacaagatcgtgttcaccaaggccgaggacaacctgctggccctgggcctgaagcactttgagggcacagagttccccaaccccctcatcagcaagtacctgctgacctgcaagacagcccaccagctgactgtgcgcatcaagaacctgaacatgaacagagccccagacaacatcatcaagttctacaagaagaccaagcagctgcctgtgctgggcaagtgctgtgaggagatccagccccaccagtggaagccacccatcgagcgggaggagcaccggctgcccttctggctgaaggccagcctgcccagcatccaggaggagctgcggcacatggctgatggagcccgggaggtgggcaacatgacaggcaccacagagatcaacagcgacaggagcctggagaaggacaacctggagctgggcagcgagagccgctaccccctgctgctgcccaagggcgtggtgctgaagctgaagcctgtggccacccgcttccccaggaaggcctggaggcagaagaggagctctgtgctgaagcccctgctgatccagcccagccccagcctgcagcccagcttcaaccctgggaagaccccagcccggagcacccacagcgaggccccacccagcaagatggtgctgcgcatcccccaccccatccagcctgccaccgtgctgcagacagtgcctggggtgccccccctgggcgtgtctggaggagagagctttgagagccctgctgccctgcctgctgtgcccccagaggcccggaccagcttccccctgtctgagagccagaccctgctgagcagcgcccctgtgcccaaggtgatgctgcccagcctggcccccagcaagttcaggaagccctacgtgagaagaagacccagcaagaggcggggcgtgaaggccagcccctgcatgaagccagcccctgtgatccaccacccagccagcgtcatcttcaccgtgcctgccaccaccgtgaagatcgtgtccctgggcggcggctgcaacatgatccagcctgtgaatgctgctgtggcccagagcccccagaccatccccatcaccaccctgctggtgaaccccaccagcttcccctgccccctgaaccagagcctggtggccagctctgtgagccccctgattgtgtctggcaacagcgtgaacctgcccatccccagcaccccagaggacaaggcccacgtgaatgtggacatcgcctgtgctgtggctgatggagaaaatgccttccagggcctggagcccaagctggagccccaggagctgagccccctgagcgccaccgtcttccccaaggtggagcacagccctggcccccccctggctgatgctgagtgccaggagggcctgtctgagaacagcgcctgccgctggacagtggtgaagacagaggagggccggcaggccctggagcccctgccccagggcatccaggagagcctgaacaaccccacccctggggacctggaggagatcgtgaagatggagcctgaggaggcccgggaggagatcagcggcagccctgagcgggacatctgtgatgacatcaaggtggagcacgctgtggagctggacaccggggcccccagcgaggagctgagcagcgctggggaggtgaccaagcagacagtgctgcagaaggaggaggagaggagccagcccaccaagacccccagcagcagccaggagcccccagatgagggcaccagcggcacagatgtgaacaagggcagcagcaagaatgccctgagctccatggaccctgaggtgcggctgagcagccccccaggcaagccagaggacagcagctctgtggatggccagagcgtgggcacccctgtgggccctgagaccggcggggagaagaatggacctgaggaggaggaggaggaggactttgatgacctgacccaggatgaagaagatgagatgagcagcgccagcgaggagagcgtgctgtctgtgcctgagctgcaggtgcgggccggggagtacagccaggtgttccggggcctgagcaacatgtaccacctgctgatctgccacctgctggcctgctgcaccatggacagccccaagatcatctgcatctag

SEQ ID NO: 223501 - DNA, 4590 bp, Artificial Sequence
  derived and/or modified sequence
atgctgccctgcaagaagcggcggaccaccgtgaccgagagcctgcagcataagggaaatcaggaagaaaataatgtggatctggagtcagccgttaagcccgaatccgaccaggtaaaggacttatctagtgtatctctgtcctgggatccatcacacggccgggtggctggctttgaggtgcagtccttacaggacgccggaaatcaactgggaatggaggatacttccctgtcctctgggatgctcacccagaatactaacgtgcctattctagagggagtggatgtggccatctctcagggcattacgctgccttcattggaatctttccaccctctgaatatccatatcggaaagggtaaactccatgccacggggtcaaagcgcggcaaaaaaatgacattgcgccctggaccggtcacacaagaggaccggtgtgatcatcttacactcaaggagccattcagtggagaaccctccgaggaggtgaaagaagagggcggaaagccccaaatgaacagtgagggagaaatcccatcactgccctctgggagccaatccgctaaaccagtgagccaaccgcggaagagtactcagcctgatgtctgcgcgtcaccacaggagaagcccctgcggacactgttccaccaaccagaggaagagatcgaagacggtggcctgttcattccgatggaggagcaggacaatgaagagtcggagaagaggcgcaaaaagaaaaaggggaccaagaggaaacgggatggcaggggacaggagggaacacttgcttacgacctgaaacttgacgatatgctcgaccgcaccctggaggacggtgccaaacagcataatcttactgcagtcaacgttcggaatattctccatgaggtgatcaccaatgagcacgtggtggctatgatgaaagccgccatctctgagaccgaggacatgccaatgttcgaacccaaaatgaccagatctaagcttaaagaggttgtcgaaaagggagtcgtgattccaacttggaacatatctcctattaagaaggctaatgagatcaagcctccgcagtttgttgacattcacctggaggaagatgactcttccgatgaagagtatcagcctgacgacgaagaggaggacgagaccgccgaggaatcattattagaatcagacgtggagagcaccgcgagctctccacggggggctaagaagagtcgactgcgccaaagctctgaaatgaccgagactgacgaggagtccggaattctgtctgaggccgaaaaagttaccacacccgccattagacacatcagtgctgaagttgttcccatggggccacccccaccaccaaaacctaagcagactcgcgactctacattcatggaaaagctacacgcagtggatgaggagttggcaagttccccagtgtgtatggattctttccaaccaatggacgatagcctgatcgccttcagaacacgatcgaagatgcctctgaaagatgttcctctgggtcagctggaagccgaactgcaggccccagacattactccagacatgtacgatcccaacaccgccgacgacgaagattggaagatgtggctggggggactgatgaatgatgacgttggtaacgaagatgaagccgatgatgatgacgatcctgaatacaattttctggaggacctggatgaaccggacacggaagatttccggacagacagggctgtgagaattaccaagaaggaggtcaatgagcttatggaagaactgttcgagaccttccaggacgagatgggcttctccaatatggaggatgacggtccagaagaagaggagtgcgtcgccgagcctcgccctaatttcaataccccacaagctctgagattcgaagagcctctggctaatttactcaatgaacagcataggaccgtcaaggagcttttcgaacagctgaaaatgaagaaatcctccgcaaagcagctgcaggaggtcgaaaaggtgaagccccagagtgagaaggttcaccaaacgcttatcctcgatcccgcgcagaggaagagactgcagcagcaaatgcagcagcacgttcagctcctaacgcagattcacctgctggcaacatgcaacccaaacttgaaccccgaggccaccaccaccaggattttcctgaaggagcttggtacctttgctcagtcgtcaatcgccctccatcaccagtacaaccctaagtttcagacactgttccagccatgtaatctgatgggcgctatgcagctgattgaagatttctctactcatgtgagtatagattgcagcccacataagaccgtgaagaaaactgctaacgagtttccttgtctgccaaagcaagtggcctggatactcgccacttcgaaggtcttcatgtatcccgagctgttaccagtttgcagccttaaagctaaaaaccctcaggataaaattgtgttcacaaaagccgaggacaacctgttggccttggggttaaagcacttcgagggcacggaatttcctaaccctctgatttctaagtacctgctgacctgcaagactgctcatcagctcactgtgcggatcaagaatctgaatatgaacagggcccccgacaatattataaagttttacaaaaagactaagcagctgcccgtgttgggaaagtgctgcgaggagatccagccccaccaatggaagccaccaattgaacgagaggaacatcgcctgcccttctggctgaaggcgagcctgccctctatccaagaggagctgcgccacatggctgatggggcacgtgaggttggtaacatgacagggaccaccgagataaattctgatcgtagcctagagaaggacaacctggagttaggatctgagagccgttatccactgctgctgcccaaaggggtggtgttaaagttgaagcccgtggcaacacgctttccaagaaaagcatggcgccagaagcgaagctccgtcttgaagcccttgttaatccaaccctctccttcactccagccaagcttcaatcctggcaagaccccggccagatccacacacagtgaagcccctcctagtaaaatggttttgcggattccccaccccatccaacctgcaacggttctgcagacggtgcctggcgtaccacctctcggcgtgtccgggggcgaaagcttcgagtcaccggccgcccttccggcggttcccccggaggctcgcaccagtttcccgctctccgagtcccagacactcttaagttctgcgcccgtacctaaggtgatgctgccaagcctggccccatctaagttcagaaagccttacgtgagaaggaggccatcaaagagacggggtgtgaaagcctctccctgtatgaaacctgcaccggtaattcatcatccagctagtgttatctttactgtacccgccaccacggtgaaaatcgtttcacttggaggaggatgcaatatgatccagcctgtcaacgctgcagtggcgcaatctcctcagacgattccaattacaactctcctggtaaatcctacatcttttccatgtccgttaaaccagtctctggtggcaagctccgtcagcccgctgatagtgagtggcaatagtgtcaacctgcctatcccttctacaccagaggacaaggcccacgttaatgtcgacattgcatgcgccgttgccgacggcgagaatgccttccagggattggaacctaagcttgagccccaggaactgtctcccctttcagctactgtgtttcctaaggtggaacacagtccagggccacctctcgccgacgctgaatgccaggaagggctctccgaaaactctgcctgcaggtggactgtggtgaaaacagaagaggggaggcaagctttagaaccattacctcaaggtatccaggagtctctcaacaatcctaccccaggggatctggaggaaattgtaaagatggagcccgaggaggcccgtgaggagatttctggatctcctgaacgggacatctgtgacgacatcaaggtggagcacgcagtggagttagacactggtgctccttctgaagagttgagtagcgctggggaggtgaccaaacagacagtgctgcagaaagaggaggagcgtagccaacccactaaaaccccatcttctagccaagagccaccggatgagggtacaagtgggactgacgtcaacaaggggtcttcgaagaatgctctaagcagcatggatcccgaggtgcgactgtcctcaccgcctggaaaacccgaagattcatcatctgtcgatggacagtccgttggcacgccagtgggtcccgagaccggcggtgaaaaaaatgggcccgaagaggaagaagaggaggatttcgatgatctaacacaagacgaggaagacgagatgtcatctgctagcgaggagtcagttctttccgtgccagaactgcaggtgagggctggtgagtacagccaagtattcagaggcctgtcaaacatgtaccaccttctgatctgccatctgttggcgtgttgtacaatggactcacctaagatcatttgcatctag

SEQ ID NO: 223502 - DNA, 4590 bp, Artificial Sequence
  derived and/or modified sequence
atgctgccgtgtaagaagcgcagaactacagttacagagtctcttcagcacaaagggaaccaggaggaaaataatgtagaccttgagagcgccgtgaagccggaaagtgaccaggtaaaagacctgagctccgtatccctcagttgggatccatcgcacggccgagttgctgggttcgaagttcaatctcttcaagatgcgggaaatcagctgggaatggaggatacctcattaagcagcggaatgctgacccagaacaccaacgtgcccatcctggaaggcgttgatgttgccattagtcaggggattaccctcccgtctttagaaagcttccatccactaaatattcatataggtaaaggaaaattacacgcaaccggctccaaaagaggcaagaagatgaccctgcggccaggccctgtaacgcaggaagatagatgtgatcacctgaccctcaaggagccgttttcaggcgagcccagcgaggaggtgaaagaggaaggtgggaagcctcaaatgaactccgagggcgagatcccctccctacccagcggcagtcagtccgctaaaccagtctcacagccgagaaaatccacccagccagatgtttgcgccagccctcaggagaagccgttgcgaacccttttccatcagcctgaggaagagatcgaagacgggggactgtttattcccatggaggagcaggataacgaggagtcagaaaaacgtcgtaagaagaaaaaaggcactaagcggaaaagagacggtcgcggtcaggagggcacgttagcctacgatctgaaactggatgacatgctagatagaaccctggaggacggggctaaacaacataatcttactgcagttaacgtccgcaacattctgcatgaagtgatcacaaacgagcacgtggtggccatgatgaaggctgctatatccgaaaccgaggatatgcccatgtttgagcctaaaatgacgaggagtaagttaaaggaagtggtcgaaaaaggggtagtcatacctacatggaatatttctcctattaaaaaggctaacgaaattaaaccccctcagttcgtggatattcacctggaagaggatgatagcagcgatgaagagtatcagcctgacgacgaggaagaagatgaaactgccgaggagagtctgttggaatcagacgtggagtcgacagcttcaagccctcggggtgcgaaaaagtctcgcttaaggcagagctcggaaatgaccgaaaccgatgaagagagcggcatactttccgaagcggaaaaggtgactacccctgccatcagacatatttctgctgaagtggtccccatgggtccaccgccacctcccaaacctaaacaaacaagggatagcacattcatggaaaagttgcacgccgtcgacgaggaactcgcctcaagcccagtctgcatggactctttccagccgatggacgactccttgatcgcatttagaacccgctccaagatgccactgaaggacgttcctcttgggcagctcgaagccgagctgcaggcacccgatataacccccgatatgtacgatccaaatactgccgatgacgaagactggaagatgtggctcgggggacttatgaacgacgacgtagggaacgaggacgaggctgacgatgatgacgatcctgagtataacttcttggaggatctggacgagcctgatactgaggatttccgcactgacagggccgtccgaatcaccaagaaggaggtaaacgagttgatggaggaactttttgagaccttccaggacgaaatgggcttttccaacatggaagacgacggaccagaagaggaagaatgcgtggccgagccaaggcctaacttcaatacgcctcaggctcttcgatttgaggagccactcgccaatctcctgaacgaacaacatcgaacagtgaaggaactatttgagcagctgaagatgaaaaagtcaagcgctaaacaactacaggaggttgagaaggtgaagcctcagtcagaaaaagtgcatcagacgcttattctcgacccggcacagcgcaagaggttacagcagcagatgcagcagcatgtccagcttctgacgcagatacacctgctggccacctgcaacccgaatctcaacccggaggctacaaccacacgtatcttcctgaaagaactgggaactttcgcacagagtagcatcgccctgcatcaccagtacaaccctaagtttcaaaccctctttcagccgtgtaacttaatgggagcgatgcaactcatcgaagatttctcaactcatgtctctatcgactgttcaccacacaagacagtgaaaaaaaccgccaatgaatttccctgcttgccaaaacaggtcgcatggattcttgctaccagcaaggtgtttatgtatcccgagctgctgcctgtttgtagcctgaaggctaaaaatccacaagacaagattgtttttacgaaggctgaggataatctcctggccctgggcctgaaacattttgaaggcacagaatttcccaatcctttgatttctaaatatttgttaacgtgcaagaccgctcaccagctcacagtccgcattaaaaacctcaatatgaacagagccccagataacatcatcaagttttacaaaaagacaaagcagctgcctgtgctcggcaaatgttgcgaggagatacagcctcaccaatggaagccaccaatcgagagggaggaacatagactgccgttctggctgaaggcgagtctaccctcgatacaagaggagctgcgccatatggcagacggggctcgcgaagtcgggaacatgactggaacgacagaaattaatagtgataggtccctggaaaaagataatctggagttgggatctgagtcccggtacccgctgctgttgcccaaaggagtcgtgctgaagctgaagccggtcgccaccaggttcccaagaaaggcttggcgccaaaagcgttcaagcgttctgaagccgctgctgatccagccctcccccagtctgcagccaagtttcaaccccggaaaaacaccagccaggtccactcattctgaggctcccccatcgaagatggtgctgcgaattccacaccctatccaacccgcaaccgtgctccagactgtgcccggtgtcccccctctgggggtgtcagggggagaatctttcgagtcccctgcagccctgcccgctgtcccaccagaggccagaacctcgtttccactatcggagtcgcaaaccctcttgtcctcagcgccagtccctaaggtcatgttgccctccctcgccccaagcaagtttcgtaagccctacgttagacgcagaccctccaagcgcagaggtgtgaaggcttctccatgtatgaagccggctcccgtgatccatcatcctgcttccgtaattttcaccgtgcctgctactacagtgaagatcgtgagcctgggaggcggatgtaatatgatccagcccgtgaacgcggctgtggcacagtctccccaaacgattccaattacgactctcctcgtcaaccctacttcatttccctgtcccttgaaccaaagcttggtcgctagctctgtatcaccgcttatcgttagtggaaactcagtaaatttacctatcccctccactcctgaggataaggctcatgtgaatgtggacattgcgtgcgccgtggccgacggtgagaatgccttccagggcctcgagccgaagctggaacctcaggagctgtcccccttgtccgccactgtgtttccaaaggtagaacattcaccaggcccacctcttgccgatgctgagtgtcaggagggtctttccgagaattccgcgtgccgctggaccgttgtgaaaactgaagaaggaaggcaggcgctggagcccctccctcaaggtattcaggagtcgcttaacaatccgactccgggagatctggaggagatcgtgaagatggaacctgaggaagctagggaggagatttctggcagtccagaaagggacatctgtgacgatatcaaggtagaacacgcagtggagctcgacacaggagccccttcagaagagctatcttcagcaggcgaggttaccaagcagactgtcctccaaaaggaggaagaacggagccagcccaccaagactccaagttcatctcaggaacctcccgacgagggcacttcagggaccgacgttaataagggttcctccaaaaatgcattatccagtatggaccctgaagtgcgattatccagtccccctggaaagcccgaagactcatcttccgtggacggccagtccgtgggaactcccgtgggccctgagaccggaggggagaaaaatggaccagaggaagaggaggaagaagactttgatgacttaacccaggacgaggaagatgagatgtcctcggcctccgaagagagtgtactctcagtcccagagctgcaggtacgagctggcgaatactctcaggttttcaggggcttatccaatatgtaccatctactcatctgtcacctgctggcttgttgcactatggactctcccaagattatctgcatctag

SEQ ID NO: 223503 - DNA, 5118 bp, Artificial Sequence
  derived and/or modified sequence
gacttccggtggtgccaaagccgtttccgtggaatcaggccggctgaatggaacaaaagtgggacttttaaaatgttgccctgtaagaagagaagaactacagtgacagagtccctacagcataaaggcaatcaagaggaaaacaacgtagacctagaatcagccgttaaaccagaatctgaccaggttaaggacttgagttcggtgtcactatcctgggatccaagtcatggcagagtagctggcttcgaagtacagtctttgcaggatgcaggaaatcagcttggtatggaggatacatctctgagctctggaatgctcacccagaacacaaatgtaccaattctagaaggtgttgatgtggccatctctcagggaatcaccctaccttccttggagtcttttcacccccttaatatacacattggtaaaggaaaactccacgctactggctcaaagagagggaaaaaaatgacactcaggcctgggccagttacccaagaagacagatgtgatcatcttaccctaaaggagcctttttcaggagagcctagtgaagaagtcaaggaagaaggagggaaacctcaaatgaattctgaaggggagataccttccctgccatcaggcagccaatctgcaaaaccagtaagccagcccaggaaatcaacccagccagatgtttgtgcctctcctcaagaaaagccactcaggactctgtttcaccaacctgaggaagagatagaagatggtggactcttcattccaatggaagaacaagacaatgaagaaagtgagaaaaggagaaaaaagaaaaagggtaccaagaggaaacgagatggaaggggtcaagaagggaccttggcatatgacctgaaactggatgacatgcttgaccgtaccttggaggatggtgccaagcagcacaatctaacagcagtcaatgtccgaaacatccttcatgaagtaatcacaaatgaacacgtggtagctatgatgaaagcagccatcagtgagacggaagatatgccaatgtttgagcctaaaatgacacgctctaaactgaaggaagtagtggaaaaaggagtggtaattccaacatggaatatttcaccaattaagaaggccaatgaaattaagcctcctcagtttgtggatatccaccttgaagaagatgattcctcagatgaagaataccagccggatgatgaagaagaagatgaaactgctgaagagagcttattggaaagtgatgttgaaagcactgcttcatctccacgtggggcaaagaaatccagattgaggcagtcttctgagatgactgaaacagatgaggagagtggcatattatcagaggctgagaaagtcaccacaccagccatcaggcacatcagtgctgaggtagtgcccatggggcccccgccccctccaaagccgaaacagaccagagatagtactttcatggagaagttacatgcggtagatgaggagctggcttccagtccagtctgcatggattctttccagcccatggatgacagtctcattgcatttcgaacgcgttctaagatgcccctgaaagatgttcccctgggccaattagaggcagagctccaagctccagacatcactccagatatgtatgaccccaatacggcagatgatgaggactggaagatgtggctggggggacttatgaatgatgatgtggggaatgaagatgaagcagatgatgatgatgatccagaatataatttcctggaagacctcgatgaaccagacacagaggatttccggactgaccgggcagtgagaatcaccaaaaaggaagtaaatgagctgatggaagagctgtttgaaactttccaagatgagatgggattctccaacatggaagatgatggcccagaagaggaggagtgtgtagctgagcctcgtcctaactttaacacccctcaagctctacggtttgaggaaccactggccaacctgttaaatgaacaacatcggacagtgaaggagctatttgaacagctgaagatgaagaaatcttcagccaaacagctgcaggaagtagagaaggttaaaccccagagtgagaaagttcatcagactctgattctggacccagcacagaggaagagactccagcagcagatgcagcagcacgttcagctcttgacccaaatccaccttcttgccacctgcaaccccaacctcaatccggaggccactaccaccaggatatttcttaaagagctgggaacctttgctcaaagctccatcgcccttcaccatcagtacaaccccaagtttcagaccctgttccaaccctgtaacttgatgggagctatgcagctgattgaagacttcagcacacatgtcagcattgactgcagccctcataaaactgtcaagaagactgcgaatgaatttccctgtttgccaaagcaagtggcttggattctggccacaagcaaggttttcatgtatccagagttacttccagtgtgttccctgaaggcaaagaatccccaggataagatcgtcttcaccaaggctgaggacaatttgttagctttaggactgaagcattttgaaggaactgagtttcctaatcctctaatcagcaagtaccttctaacctgcaaaactgcccaccaactgacagtgagaatcaagaacctcaacatgaacagagctcctgacaacatcattaaattttataagaagaccaaacagctgccagtcctaggaaaatgctgtgaagagatccagccacatcagtggaagccacctatagagagagaagaacaccggctcccattctggttaaaggccagtctgccatccatccaggaagaactgcggcacatggctgatggtgctagagaggtaggaaatatgactggaaccactgagatcaactcagatcgaagcctagaaaaagacaatttggagttggggagtgaatctcggtacccactgctattgcctaagggtgtagtcctgaaactgaagccagttgccacccgtttccccaggaaggcttggagacagaagcgttcatcagtcctgaagcccctccttatccaacccagcccctctctccagcccagcttcaaccctgggaaaacaccagcccgatcaactcattcagaagcccctccgagcaaaatggtgctccggattcctcacccaatacagccagccactgttttacagacagttccaggtgtccctccactgggggtcagtggaggtgagagttttgagtctcctgcagcactgcctgctgtgccccctgaggccaggacaagcttccctctgtctgagtcccagactttgctctcttctgcccctgtgcccaaggtaatgctgccctcccttgccccttctaagtttcgaaagccatatgtgagacggagaccctcaaagagaagaggagtcaaggcctctccctgtatgaaacctgcccctgttatccaccaccctgcatctgttatcttcactgttcctgctaccactgtgaagattgtgagccttggcggtggctgtaacatgatccagcctgtcaatgcggctgtggcccagagtccccagactattcccatcactaccctcttggttaaccctacttccttcccctgtccattgaaccagtcccttgtggcctcctctgtctcacccttaattgtttctggcaattctgtgaatcttcctataccatccacccctgaagataaggcccacgtgaatgtggacattgcttgtgctgtggctgatggggaaaatgcctttcagggcctagaacccaaattagagccccaggaactatctcctctctctgctactgttttcccgaaagtggaacatagcccagggcctccactagcagatgcagagtgccaagaaggattgtcagagaatagtgcctgtcgctggaccgttgtgaaaacagaggaggggaggcaagctctggagccgctccctcagggcatccaggagtctctaaacaaccctacccctggggatttagaggaaattgtcaagatggaacctgaagaagctagagaggaaatcagtggatcccctgagcgtgatatttgtgatgacatcaaagtggaacatgctgtggaattggacactggtgccccaagcgaggagttgagcagtgctggagaagtaacgaaacagacagtcttacagaaggaagaggagaggagtcagccaactaaaaccccttcatcttctcaagagccccctgatgaaggaacctcagggacagatgtgaacaaaggatcatcaaagaatgctttgtcctcaatggatcctgaagtgaggcttagtagccccccagggaagccagaagattcatccagtgttgatggtcagtcagtggggactccagttgggccagaaactggaggagagaagaatgggccagaagaagaggaagaagaggactttgatgacctcacccaagatgaggaagatgaaatgtcatcagcttctgaggaatctgtgctttctgtcccagaactccaggtgagagctggagaatattctcaagtatttcgtggactcagtaatatgtatcacttattgatatgccacctgcttgcttgctgcactatggatagtcctaaaatcatttgtatttgatttgtgaatgcattatgggacatgattgtggagttgaggtgaaatgagatggaaaggatgaaattttacttattatattaaactcgtttacacattaaattgaatcacctgaccatactttaaatgccttaaaaaatagtaataggctgggcttggtggctcactcctgtagtcccagcactttgggaggctgaggtgggtggatcacaaggccaggagtttcagactggcctggccgacgtggtaaaaccccatctatattaaaaataacaaaaattagccaggcatggtggcggacacctgtaatccctgctgcttgggaggcagaggcaggagaattgcttgagcccgagagacagaggttgcagtgagccgagatcacgtcattgctctccagcctgggcaacagagcaaggctctgtctcaaaaaaaaaaaaaaaaaaaaaaaaaaaaaaa

SEQ ID NO: 223504 - DNA, 4590 bp, Artificial Sequence
  derived and/or modified sequence
atgctgccctgcaagaagagaagaaccaccgtgaccgagagcctgcagcacaagggcaaccaggaggagaacaacgtggacctggagagcgccgtgaagcccgagagcgaccaggtgaaggacctgagcagcgtgagcctgagctgggaccccagccacggcagagtggccggcttcgaggtgcagagcctgcaggacgccggcaaccagctgggcatggaggacaccagcctgagcagcggcatgctgacccagaacaccaacgtgcccatcctggagggcgtggacgtggccatcagccagggcatcaccctgcccagcctggagagcttccaccccctgaacatccacatcggcaagggcaagctgcacgccaccggcagcaagagaggcaagaagatgaccctgagacccggccccgtgacccaggaggacagatgcgaccacctgaccctgaaggagcccttcagcggcgagcccagcgaggaggtgaaggaggagggcggcaagccccagatgaacagcgagggcgagatccccagcctgcccagcggcagccagagcgccaagcccgtgagccagcccagaaagagcacccagcccgacgtgtgcgccagcccccaggagaagcccctgagaaccctgttccaccagcccgaggaggagatcgaggacggcggcctgttcatccccatggaggagcaggacaacgaggagagcgagaagagaagaaagaagaagaagggcaccaagagaaagagagacggcagaggccaggagggcaccctggcctacgacctgaagctggacgacatgctggacagaaccctggaggacggcgccaagcagcacaacctgaccgccgtgaacgtgagaaacatcctgcacgaggtgatcaccaacgagcacgtggtggccatgatgaaggccgccatcagcgagaccgaggacatgcccatgttcgagcccaagatgaccagaagcaagctgaaggaggtggtggagaagggcgtggtgatccccacctggaacatcagccccatcaagaaggccaacgagatcaagcccccccagttcgtggacatccacctggaggaggacgacagcagcgacgaggagtaccagcccgacgacgaggaggaggacgagaccgccgaggagagcctgctggagagcgacgtggagagcaccgccagcagccccagaggcgccaagaagagcagactgagacagagcagcgagatgaccgagaccgacgaggagagcggcatcctgagcgaggccgagaaggtgaccacccccgccatcagacacatcagcgccgaggtggtgcccatgggccccccccccccccccaagcccaagcagaccagagacagcaccttcatggagaagctgcacgccgtggacgaggagctggccagcagccccgtgtgcatggacagcttccagcccatggacgacagcctgatcgccttcagaaccagaagcaagatgcccctgaaggacgtgcccctgggccagctggaggccgagctgcaggcccccgacatcacccccgacatgtacgaccccaacaccgccgacgacgaggactggaagatgtggctgggcggcctgatgaacgacgacgtgggcaacgaggacgaggccgacgacgacgacgaccccgagtacaacttcctggaggacctggacgagcccgacaccgaggacttcagaaccgacagagccgtgagaatcaccaagaaggaggtgaacgagctgatggaggagctgttcgagaccttccaggacgagatgggcttcagcaacatggaggacgacggccccgaggaggaggagtgcgtggccgagcccagacccaacttcaacaccccccaggccctgagattcgaggagcccctggccaacctgctgaacgagcagcacagaaccgtgaaggagctgttcgagcagctgaagatgaagaagagcagcgccaagcagctgcaggaggtggagaaggtgaagccccagagcgagaaggtgcaccagaccctgatcctggaccccgcccagagaaagagactgcagcagcagatgcagcagcacgtgcagctgctgacccagatccacctgctggccacctgcaaccccaacctgaaccccgaggccaccaccaccagaatcttcctgaaggagctgggcaccttcgcccagagcagcatcgccctgcaccaccagtacaaccccaagttccagaccctgttccagccctgcaacctgatgggcgccatgcagctgatcgaggacttcagcacccacgtgagcatcgactgcagcccccacaagaccgtgaagaagaccgccaacgagttcccctgcctgcccaagcaggtggcctggatcctggccaccagcaaggtgttcatgtaccccgagctgctgcccgtgtgcagcctgaaggccaagaacccccaggacaagatcgtgttcaccaaggccgaggacaacctgctggccctgggcctgaagcacttcgagggcaccgagttccccaaccccctgatcagcaagtacctgctgacctgcaagaccgcccaccagctgaccgtgagaatcaagaacctgaacatgaacagagcccccgacaacatcatcaagttctacaagaagaccaagcagctgcccgtgctgggcaagtgctgcgaggagatccagccccaccagtggaagccccccatcgagagagaggagcacagactgcccttctggctgaaggccagcctgcccagcatccaggaggagctgagacacatggccgacggcgccagagaggtgggcaacatgaccggcaccaccgagatcaacagcgacagaagcctggagaaggacaacctggagctgggcagcgagagcagataccccctgctgctgcccaagggcgtggtgctgaagctgaagcccgtggccaccagattccccagaaaggcctggagacagaagagaagcagcgtgctgaagcccctgctgatccagcccagccccagcctgcagcccagcttcaaccccggcaagacccccgccagaagcacccacagcgaggccccccccagcaagatggtgctgagaatcccccaccccatccagcccgccaccgtgctgcagaccgtgcccggcgtgccccccctgggcgtgagcggcggcgagagcttcgagagccccgccgccctgcccgccgtgccccccgaggccagaaccagcttccccctgagcgagagccagaccctgctgagcagcgcccccgtgcccaaggtgatgctgcccagcctggcccccagcaagttcagaaagccctacgtgagaagaagacccagcaagagaagaggcgtgaaggccagcccctgcatgaagcccgcccccgtgatccaccaccccgccagcgtgatcttcaccgtgcccgccaccaccgtgaagatcgtgagcctgggcggcggctgcaacatgatccagcccgtgaacgccgccgtggcccagagcccccagaccatccccatcaccaccctgctggtgaaccccaccagcttcccctgccccctgaaccagagcctggtggccagcagcgtgagccccctgatcgtgagcggcaacagcgtgaacctgcccatccccagcacccccgaggacaaggcccacgtgaacgtggacatcgcctgcgccgtggccgacggcgagaacgccttccagggcctggagcccaagctggagccccaggagctgagccccctgagcgccaccgtgttccccaaggtggagcacagccccggcccccccctggccgacgccgagtgccaggagggcctgagcgagaacagcgcctgcagatggaccgtggtgaagaccgaggagggcagacaggccctggagcccctgccccagggcatccaggagagcctgaacaaccccacccccggcgacctggaggagatcgtgaagatggagcccgaggaggccagagaggagatcagcggcagccccgagagagacatctgcgacgacatcaaggtggagcacgccgtggagctggacaccggcgcccccagcgaggagctgagcagcgccggcgaggtgaccaagcagaccgtgctgcagaaggaggaggagagaagccagcccaccaagacccccagcagcagccaggagccccccgacgagggcaccagcggcaccgacgtgaacaagggcagcagcaagaacgccctgagcagcatggaccccgaggtgagactgagcagcccccccggcaagcccgaggacagcagcagcgtggacggccagagcgtgggcacccccgtgggccccgagaccggcggcgagaagaacggccccgaggaggaggaggaggaggacttcgacgacctgacccaggacgaggaggacgagatgagcagcgccagcgaggagagcgtgctgagcgtgcccgagctgcaggtgagagccggcgagtacagccaggtgttcagaggcctgagcaacatgtaccacctgctgatctgccacctgctggcctgctgcaccatggacagccccaagatcatctgcatctag

SEQ ID NO: 223505 - protein, 820 aa, Artificial Sequence
  derived and/or modified sequence
MVVDFCRRFVARSLCIILMKHFCSSSVSEDLGCRRGDFSRKHYGSVELLISSDADGAIQRAGRFRVENGSSDENATALPGTWRRTDVHLENPEYHTRWYFKYFLGQVHQNYIGNDAEKSPFFLSVTLSDQNNQRVPQYRAILWRKTGTQKICLPYSPTKTLSVKSILSAMNLDKFEKGPREIFHPEIQKDLLVLEEQEGSVNFKFGVLFAKDGQLTDDEMFSNEIGSEPFQKFLNLLGDTITLKGWTGYRGGLDTKNDTTGIHSVYTVYQGHEIMFHVSTMLPYSKENKQQVERKRHIGNDIVTIVFQEGEESSPAFKPSMIRSHFTHIFALVRYNQQNDNYRLKIFSEESVPLFGPPLPTPPVFTDHQEFRDFLLVKLINGEKATLETPTFAQKRRRTLDMLIRSLHQDLMPDLHKNMLNRRSFSDVLPESPKSARKKEEARQAEFVRIGQALKLKSIVRGDAPSSLAASGICKKEPWEPQCFCSNFPHEAVCADPWGQALLVSTDAGVLLVDDDLPSVPVFDRTLPVKQMHVLETLDLLVLRADKGKDARLFVFRLSALQKGLEGKQAGKSRSDCRENKLEKTKGCHLYAINTHHSRELRIVVAIRNKLLLITRKHNKPSGVTSTSLLSPLSESPVEEFQYIREICLSDSPMVMTLVDGPAEESDNLICVAYRHQFDVVNESTGEAFRLHHVEANRVNFVAAIDVYEDGEAGLLLCYNYSCIYKKVCPFNGGSFLVQPSASDFQFCWNQAPYAIVCAFPYLLAFTTDSMEIRLVVNGNLVHTAVVPQLQLVASRVKFNQKICTRFHLETSWAEASNDL

SEQ ID NO: 223506 - protein, 1013 aa, Artificial Sequence
  derived and/or modified sequence
MVVDFCRRFVARSLCIILMKHFCSSSVSEDLGCRRGDFSRKHYGSVELLISSDADGAIQRAGRFRVENGSSDENATALPGTWRRTDVHLENPEYHTRWYFKYFLGQVHQNYIGNDAEKSPFFLSVTLSDQNNQRVPQYRAILWRKTGTQKICLPYSPTKTLSVKSILSAMNLDKFEKGPREIFHPEIQKDLLVLEEQEGSVNFKFGVLFAKDGQLTDDEMFSNEIGSEPFQKFLNLLGDTITLKGWTGYRGGLDTKNDTTGIHSVYTVYQGHEIMFHVSTMLPYSKENKQQVERKRHIGNDIVTIVFQEGEESSPAFKPSMIRSHFTHIFALVRYNQQNDNYRLKIFSEESVPLFGPPLPTPPVFTDHQEFRDFLLVKLINGEKATLETPTFAQKRRRTLDMLIRSLHQDLMPDLHKNMLNRRSFSDVLPESPKSARKKEEARQAEFVRIGQALKLKSIVRGDAPSSLAASGICKKEPWEPQCFCSNFPHEAVCADPWGQALLVSTDAGVLLVDDDLPSVPVFDRTLPVKQMHVLETLDLLVLRADKGKDARLFVFRLSALQKGLEGKQAGKSRSDCRENKLEKTKGCHLYAINTHHSRELRIVVAIRNKLLLITRKHNKPSGVTSTSLLSPLSESPVEEFQYIREICLSDSPMVMTLVDGPAEESDNLICVAYRHQFDVVNESTGEAFRLHHVEANRVNFVAAIDVYEDGEAGLLLCYNYSCIYKKVCPFNGGSFLVQPSASDFQFCWNQAPYAIVCAFPYLLAFTTDSMEIRLVVNGNLVHTAVVPQLQLVASRSDIYFTATAAVNEVSSGGSSKGASARNSPQTPPGRDTPVFPSSLGEGEIQSKNLYKIPLRNLVGRSIERPLKSPLVSKVITPPTPISVGLAAIPVTHSLSLSRMEIKEIASRTRRELLGLSDEGGPKSEGAPKAKSKPRKRLEESQGGPKPGAVRSSSSDRIPSGSLESASTSEANPEGHSASSDQDPVADREGSPVSGSSPFQLTAFSDEDIIDLK

SEQ ID NO: 223507 - DNA, 2463 bp, Artificial Sequence
  derived and/or modified sequence
atggtggtggacttctgcagaagattcgtggccagaagcctgtgcatcatcctgatgaagcacttctgcagcagcagcgtgagcgaggacctgggctgcagaagaggcgacttcagcagaaagcactacggcagcgtggagctgctgatcagcagcgacgccgacggcgccatccagagagccggcagattcagagtggagaacggcagcagcgacgagaacgccaccgccctgcccggcacctggagaagaaccgacgtgcacctggagaaccccgagtaccacaccagatggtacttcaagtacttcctgggccaggtgcaccagaactacatcggcaacgacgccgagaagagccccttcttcctgagcgtgaccctgagcgaccagaacaaccagagagtgccccagtacagagccatcctgtggagaaagaccggcacccagaagatctgcctgccctacagccccaccaagaccctgagcgtgaagagcatcctgagcgccatgaacctggacaagttcgagaagggccccagagagatcttccaccccgagatccagaaggacctgctggtgctggaggagcaggagggcagcgtgaacttcaagttcggcgtgctgttcgccaaggacggccagctgaccgacgacgagatgttcagcaacgagatcggcagcgagcccttccagaagttcctgaacctgctgggcgacaccatcaccctgaagggctggaccggctacagaggcggcctggacaccaagaacgacaccaccggcatccacagcgtgtacaccgtgtaccagggccacgagatcatgttccacgtgagcaccatgctgccctacagcaaggagaacaagcagcaggtggagagaaagagacacatcggcaacgacatcgtgaccatcgtgttccaggagggcgaggagagcagccccgccttcaagcccagcatgatcagaagccacttcacccacatcttcgccctggtgagatacaaccagcagaacgacaactacagactgaagatcttcagcgaggagagcgtgcccctgttcggcccccccctgcccaccccccccgtgttcaccgaccaccaggagttcagagacttcctgctggtgaagctgatcaacggcgagaaggccaccctggagacccccaccttcgcccagaagagaagaagaaccctggacatgctgatcagaagcctgcaccaggacctgatgcccgacctgcacaagaacatgctgaacagaagaagcttcagcgacgtgctgcccgagagccccaagagcgccagaaagaaggaggaggccagacaggccgagttcgtgagaatcggccaggccctgaagctgaagagcatcgtgagaggcgacgcccccagcagcctggccgccagcggcatctgcaagaaggagccctgggagccccagtgcttctgcagcaacttcccccacgaggccgtgtgcgccgacccctggggccaggccctgctggtgagcaccgacgccggcgtgctgctggtggacgacgacctgcccagcgtgcccgtgttcgacagaaccctgcccgtgaagcagatgcacgtgctggagaccctggacctgctggtgctgagagccgacaagggcaaggacgccagactgttcgtgttcagactgagcgccctgcagaagggcctggagggcaagcaggccggcaagagcagaagcgactgcagagagaacaagctggagaagaccaagggctgccacctgtacgccatcaacacccaccacagcagagagctgagaatcgtggtggccatcagaaacaagctgctgctgatcaccagaaagcacaacaagcccagcggcgtgaccagcaccagcctgctgagccccctgagcgagagccccgtggaggagttccagtacatcagagagatctgcctgagcgacagccccatggtgatgaccctggtggacggccccgccgaggagagcgacaacctgatctgcgtggcctacagacaccagttcgacgtggtgaacgagagcaccggcgaggccttcagactgcaccacgtggaggccaacagagtgaacttcgtggccgccatcgacgtgtacgaggacggcgaggccggcctgctgctgtgctacaactacagctgcatctacaagaaggtgtgccccttcaacggcggcagcttcctggtgcagcccagcgccagcgacttccagttctgctggaaccaggccccctacgccatcgtgtgcgccttcccctacctgctggccttcaccaccgacagcatggagatcagactggtggtgaacggcaacctggtgcacaccgccgtggtgccccagctgcagctggtggccagcagagtgaagttcaaccagaagatctgcaccagattccacctggagaccagctgggccgaggccagcaacgacctgtag

SEQ ID NO: 223508 - DNA, 3042 bp, Artificial Sequence
  derived and/or modified sequence
atggtggtggacttctgcagaagattcgtggccagaagcctgtgcatcatcctgatgaagcacttctgcagcagcagcgtgagcgaggacctgggctgcagaagaggcgacttcagcagaaagcactacggcagcgtggagctgctgatcagcagcgacgccgacggcgccatccagagagccggcagattcagagtggagaacggcagcagcgacgagaacgccaccgccctgcccggcacctggagaagaaccgacgtgcacctggagaaccccgagtaccacaccagatggtacttcaagtacttcctgggccaggtgcaccagaactacatcggcaacgacgccgagaagagccccttcttcctgagcgtgaccctgagcgaccagaacaaccagagagtgccccagtacagagccatcctgtggagaaagaccggcacccagaagatctgcctgccctacagccccaccaagaccctgagcgtgaagagcatcctgagcgccatgaacctggacaagttcgagaagggccccagagagatcttccaccccgagatccagaaggacctgctggtgctggaggagcaggagggcagcgtgaacttcaagttcggcgtgctgttcgccaaggacggccagctgaccgacgacgagatgttcagcaacgagatcggcagcgagcccttccagaagttcctgaacctgctgggcgacaccatcaccctgaagggctggaccggctacagaggcggcctggacaccaagaacgacaccaccggcatccacagcgtgtacaccgtgtaccagggccacgagatcatgttccacgtgagcaccatgctgccctacagcaaggagaacaagcagcaggtggagagaaagagacacatcggcaacgacatcgtgaccatcgtgttccaggagggcgaggagagcagccccgccttcaagcccagcatgatcagaagccacttcacccacatcttcgccctggtgagatacaaccagcagaacgacaactacagactgaagatcttcagcgaggagagcgtgcccctgttcggcccccccctgcccaccccccccgtgttcaccgaccaccaggagttcagagacttcctgctggtgaagctgatcaacggcgagaaggccaccctggagacccccaccttcgcccagaagagaagaagaaccctggacatgctgatcagaagcctgcaccaggacctgatgcccgacctgcacaagaacatgctgaacagaagaagcttcagcgacgtgctgcccgagagccccaagagcgccagaaagaaggaggaggccagacaggccgagttcgtgagaatcggccaggccctgaagctgaagagcatcgtgagaggcgacgcccccagcagcctggccgccagcggcatctgcaagaaggagccctgggagccccagtgcttctgcagcaacttcccccacgaggccgtgtgcgccgacccctggggccaggccctgctggtgagcaccgacgccggcgtgctgctggtggacgacgacctgcccagcgtgcccgtgttcgacagaaccctgcccgtgaagcagatgcacgtgctggagaccctggacctgctggtgctgagagccgacaagggcaaggacgccagactgttcgtgttcagactgagcgccctgcagaagggcctggagggcaagcaggccggcaagagcagaagcgactgcagagagaacaagctggagaagaccaagggctgccacctgtacgccatcaacacccaccacagcagagagctgagaatcgtggtggccatcagaaacaagctgctgctgatcaccagaaagcacaacaagcccagcggcgtgaccagcaccagcctgctgagccccctgagcgagagccccgtggaggagttccagtacatcagagagatctgcctgagcgacagccccatggtgatgaccctggtggacggccccgccgaggagagcgacaacctgatctgcgtggcctacagacaccagttcgacgtggtgaacgagagcaccggcgaggccttcagactgcaccacgtggaggccaacagagtgaacttcgtggccgccatcgacgtgtacgaggacggcgaggccggcctgctgctgtgctacaactacagctgcatctacaagaaggtgtgccccttcaacggcggcagcttcctggtgcagcccagcgccagcgacttccagttctgctggaaccaggccccctacgccatcgtgtgcgccttcccctacctgctggccttcaccaccgacagcatggagatcagactggtggtgaacggcaacctggtgcacaccgccgtggtgccccagctgcagctggtggccagcagaagcgacatctacttcaccgccaccgccgccgtgaacgaggtgagcagcggcggcagcagcaagggcgccagcgccagaaacagcccccagaccccccccggcagagacacccccgtgttccccagcagcctgggcgagggcgagatccagagcaagaacctgtacaagatccccctgagaaacctggtgggcagaagcatcgagagacccctgaagagccccctggtgagcaaggtgatcaccccccccacccccatcagcgtgggcctggccgccatccccgtgacccacagcctgagcctgagcagaatggagatcaaggagatcgccagcagaaccagaagagagctgctgggcctgagcgacgagggcggccccaagagcgagggcgcccccaaggccaagagcaagcccagaaagagactggaggagagccagggcggccccaagcccggcgccgtgagaagcagcagcagcgacagaatccccagcggcagcctggagagcgccagcaccagcgaggccaaccccgagggccacagcgccagcagcgaccaggaccccgtggccgacagagagggcagccccgtgagcggcagcagccccttccagctgaccgccttcagcgacgaggacatcatcgacctgaagtag

SEQ ID NO: 223509 - DNA, 2463 bp, Artificial Sequence
  derived and/or modified sequence
atggtggtggatttctgccgcagattcgtggctcgatccctttgtatcatcctgatgaagcacttctgctccagctctgtttcagaagacctgggctgtcgcaggggcgatttttcgcgcaagcattacggcagtgtggaactgttaatttcatcagacgccgatggagcaattcaacgagcaggcaggtttcgggtagagaatgggagctccgacgaaaatgccactgccttgcccggcacgtggcggaggacagacgtgcatctcgaaaatccagagtaccataccagatggtacttcaagtattttctgggccaagtgcaccaaaactacatcgggaatgacgccgaaaagtcccctttctttctttctgtcacactgagcgatcaaaataaccagcgggttccccaataccgtgcaatcttgtggagaaagaccggaactcagaagatttgtcttccctatagccctactaaaacattgagcgtaaagtccatcctaagcgcaatgaacctggataaattcgagaagggtccgcgtgagatattccatcccgagatacagaaagacctgctagtcttagaagagcaggaaggaagcgtaaactttaagtttggagtcctgtttgccaaggacggtcaactgaccgatgacgaaatgtttagcaatgagataggcagtgagccattccagaaatttcttaacttacttggcgacacaattaccctgaaagggtggacgggctatcgaggtggcctggatacaaaaaatgatactaccggcattcacagcgtctacactgtgtaccaagggcatgaaattatgtttcacgtttccacgatgctgccttattccaaggagaataagcagcaagtggagcggaaaaggcacatcggtaacgacatcgtcactatcgttttccaggaaggtgaagaatcatcaccagcgttcaaaccttcgatgattcgatctcattttacccacatctttgcacttgtaagatacaatcaacagaatgacaattacaggctaaagatcttctccgaagagtctgtccctctcttcgggcctccactccctaccccgcctgtctttaccgatcatcaggagtttagggattttttgctcgtgaaactgataaacggggaaaaggctaccctggagacccccacatttgctcagaagcgccgtcgaaccctggacatgcttatccggtcgctgcaccaagacctgatgccggacctacacaagaacatgctcaataggcgatcatttagcgacgtgctgccagaatcccccaagtctgcacgtaaaaaagaagaggctcgacaggctgagttcgtgcggatagggcaggctttgaagttgaagtctatcgtgaggggtgacgcgccatccagtctggcagctagcggtatctgtaagaaggagccgtgggagccgcaatgtttttgctccaactttccacacgaggcagtttgcgccgatccatggggtcaggcactgctggtgtccaccgacgccggggtgcttttggtggacgacgatctgccctccgtccccgtattcgaccgaactctgcccgtgaaacaaatgcacgtactggagacactggatctcttggttctccgggccgataaaggaaaggatgctaggctgttcgtgttccgcttaagcgccttgcagaaaggcctggaaggcaaacaggccgggaagtctaggtcagattgccgagaaaacaagctggagaagaccaaagggtgtcatctatatgccatcaacacccaccactccagggagctgcggattgtcgtagccattagaaacaagcttctcctgataacgcgcaaacataacaagccctctggcgtgacgagtacctcactcttaagccccctctctgaaagcccggtggaggagttccaatatatcagggagatatgcctcagcgattcacctatggttatgacattggtagacgggcctgccgaggaaagcgataatctgatttgtgtagcctacagacatcagttcgatgtcgtcaacgaaagcaccggcgaagcatttcgcctgcaccacgtagaggccaaccgcgtaaattttgtggccgctatcgatgtgtacgaggacggcgaggccggcctcttgctgtgttacaactatagctgcatttataagaaagtgtgcccttttaacggtggcagtttcctggtgcaacctagtgcatctgacttccagttctgttggaatcaagctccatatgccattgtgtgtgcttttccttacctgttggcttttacgaccgattcaatggagattaggttagtggtgaatggcaacctcgtgcatactgcggtggtgccacaactccagctggtggcgtccagagtcaaattcaaccagaagatatgtacaagattccacctggagacctcctgggccgaagctagtaatgatctatag

SEQ ID NO: 223510 - DNA, 3042 bp, Artificial Sequence
  derived and/or modified sequence
atggtcgtcgacttttgccgaaggttcgtcgcccgctcgctgtgcatcatcctgatgaaacatttctgttcatccagtgtttccgaagacttggggtgtaggcggggggacttctctagaaagcattacggcagtgtcgagctgctgatatcctcagatgctgatggtgccattcagagagcaggtagatttagggtggaaaacggttctagcgacgaaaatgctaccgctctcccaggcacctggagacggactgatgtgcatctcgagaatccggagtatcatacaagatggtattttaaatacttcctcgggcaagttcaccagaactacattggaaacgacgcggaaaaatcgccgttcttcctgagtgtcactctttccgaccagaacaaccagcgcgtccctcaatatcgagcaatactgtggcgcaagacaggcactcagaaaatatgcctaccttactctccaacaaaaaccctcagcgttaagtccatattatctgccatgaatctcgacaaattcgaaaagggaccgagagagatttttcaccctgaaatccaaaaagacctgctggtgttggaagaacaggaaggttccgtaaacttcaagttcggggttctgttcgccaaggacggccagctcacagatgatgaaatgttcagtaatgagattggcagtgaaccttttcagaagttcttgaacttacttggcgatactataacacttaaggggtggacagggtatagaggaggtctcgataccaagaatgataccacaggaattcacagcgtctacaccgtgtatcagggtcatgaaattatgtttcacgtgtccaccatgttaccctactctaaagaaaacaagcaacaggtggaacggaaacgtcacattggcaacgatatcgtgaccattgtctttcaggagggggaggaatcgtccccagccttcaagccctccatgatcagatctcatttcacccacattttcgccctagtaagatataaccaacagaacgacaattaccgactcaaaatattctccgaggagagcgtcccactcttcgggcctcctttgccaaccccacctgtattcaccgatcatcaagagttcagagacttcctcctggtgaaactcattaatggcgaaaaggcaactctagagacacccacatttgcccagaagcgaagaaggaccctcgacatgctgattaggtcacttcatcaggatttaatgcccgacctccacaagaacatgctcaaccggagaagcttttccgacgtcttacccgagtctcccaagagcgcaagaaaaaaggaggaagctaggcaggctgaatttgttcgcattggacaggccttgaaactgaaatctatcgtgcgcggggatgctccaagttccctggcagcaagcggaatttgtaagaaggaaccatgggagccacagtgcttttgttctaactttcctcacgaagctgtttgcgcagacccatggggccaggccctcctggtatcgacagatgccggggtgctcctggtcgatgatgacctgccttcggtccccgtgttcgacagaaccctccccgtgaaacagatgcacgtgctggaaacgctggatctactggttctgagagcagataagggcaaggacgcaagactttttgtgttccggctgagcgccctccagaaaggactagaagggaagcaggccgggaagagccgctccgattgccgagaaaacaagctggaaaaaaccaagggctgtcacctgtacgcgatcaacacccaccacagtagggaattgcgtatcgtcgtcgctattcgaaacaagcttttgctgattacgcgaaagcataacaagcccagcggcgtgactagcacttccctgttatccccgcttagtgagagccccgtggaagaatttcagtacattagggaaatttgcctgtcggactctcctatggttatgacgctggtggatggacccgctgaagagagcgataaccttatttgtgtggcctatcggcaccagttcgacgtcgttaatgaatccactggagaggccttcaggctgcatcatgtagaagctaatagggttaatttcgtcgccgcaatagatgtgtatgaagatggggaagccggcctgttgctgtgctataactactcctgcatctataaaaaggtatgcccattcaatggcgggtccttcctggtgcagccctcagctagcgatttccagttctgttggaatcaggccccttacgcgatagtatgtgcatttccctacttattggcgtttacgaccgactctatggaaattcgattggtagtaaacgggaacttggtgcacactgctgtggttcctcaactgcaactcgtggcctcccgaagcgatatctacttcactgctactgctgccgtaaacgaggtatcgagcggcgggtcatctaagggtgctagcgcccgaaacagtccacaaacaccacctgggcgcgataccccagtgtttccttccagtctgggggagggagagattcagtcaaagaacctatataagatacccctgcgaaatctcgtgggacgctcgatcgaacgcccactgaaaagccctctagttagtaaagtgatcactccacccacaccgatcagcgtgggcttggccgctattccagtgacccacagtctgtccctgagcaggatggaaataaaagagatcgctagcagaactcgccgcgagttgctgggactctcggacgagggcggacctaaatccgaaggagcacctaaggctaaaagcaagccacgtaaacggctcgaagaatctcaggggggcccaaaaccgggggccgtgcgaagctcatcaagcgatagaatcccctcagggtcgctggagtccgccagtacatccgaggccaatcctgagggccactctgcgtcttctgatcaggacccagttgccgacagagaaggctcgcctgtcagtgggtcctccccattccagcttacagctttctcagatgaggacatcatcgacctgaaatag

SEQ ID NO: 223511 - DNA, 2463 bp, Artificial Sequence
  derived and/or modified sequence
atggtggtggacttctgcagaagatttgtggcccggagcctgtgcatcatcctgatgaagcacttctgcagcagctctgtgtctgaggacctgggctgccggcggggggacttcagcaggaagcactacggctctgtggagctgctgatcagcagtgatgctgatggagccatccagagagctggccgcttccgggtggagaatggcagcagtgatgaaaatgccacagccctgcccggcacctggaggagaacagatgtgcacctggagaaccctgagtaccacacccgctggtacttcaagtacttcctgggccaggtgcaccagaactacatcggaaatgatgctgagaagagccccttcttcctgtctgtgaccctgagtgaccagaacaaccagagggtgccccagtaccgggccatcctgtggaggaagacaggcacccagaagatctgcctgccctacagccccaccaagaccctgtctgtgaagagcatcctgagcgccatgaacctggacaagtttgagaagggcccccgggagatcttccaccctgagatccagaaggacctgctggtgctggaggagcaggagggctctgtgaacttcaagtttggagtgctgtttgccaaggatggccagctgacagatgatgagatgttcagcaatgaaattggcagcgagcccttccagaagttcctgaacctgctgggggacaccatcaccctgaagggctggacaggctacagaggaggcctggacaccaagaatgacaccaccggcatccacagcgtgtacacagtgtaccagggccacgagatcatgtttcatgtgtccaccatgctgccctacagcaaagaaaacaagcagcaggtggagaggaagaggcacatcggaaatgacatcgtgaccatcgtgttccaggagggggaggagagcagccctgccttcaagcccagcatgatccgcagccacttcacccacatctttgccctggtgcgctacaaccagcagaatgacaactaccgcctgaagatcttcagcgaggagagcgtgcccctgtttggaccacccctgcccaccccacctgtgttcacagaccaccaggagttccgggacttcctgctggtgaagctgatcaatggagagaaggccaccctggagacccccacctttgcccagaagagaagaaggaccctggacatgctgatccgcagcctgcaccaggacctgatgccagacctgcacaagaacatgctgaacagaagaagcttcagtgatgtgctgcctgagagccccaagagcgccaggaagaaggaggaggcccggcaggccgagtttgtgcgcatcggccaggccctgaagctgaagagcatcgtgagaggagatgcccccagcagcctggccgccagcggcatctgcaagaaggagccctgggagccccagtgcttctgcagcaacttcccccatgaggccgtgtgtgccgacccctggggccaggccctgctggtgtccacagatgctggggtgctgctggtggatgatgacctgcccagcgtgcctgtgtttgacaggaccctgcctgtgaagcagatgcacgtgctggagaccctggacctgctggtgctgcgggctgacaagggcaaggatgcccggctgtttgtgttccggctgagcgccctgcagaagggcctggagggcaagcaggccggcaagagcagaagtgactgccgggagaacaagctggagaagaccaagggctgccacctgtatgccatcaacacccaccacagccgggagctgagaattgtggtggccatccggaacaagctgctgctgatcaccaggaagcacaacaagcccagcggcgtgaccagcaccagcctgctgagccccctgtctgagagccctgtggaggagttccagtacatccgggagatctgcctgagtgacagccccatggtgatgaccctggtggatggccctgctgaggagagtgacaacctgatctgtgtggcctaccgccaccagtttgatgtggtgaatgaaagcactggagaggccttccggctgcaccacgtggaggccaacagagtgaactttgtggccgccattgatgtgtatgaagatggagaggccggcctgctgctgtgctacaactacagctgcatctacaagaaggtgtgccccttcaacggcggcagcttcctggtgcagcccagcgccagtgacttccagttctgctggaaccaggccccctatgccatcgtgtgtgccttcccctacctgctggccttcaccacagacagcatggagatccggctggtggtgaatggaaacctggtgcacacagctgtggtgccccagctgcagctggtggccagccgggtgaagttcaaccagaagatctgcacccgcttccacctggagacctcctgggccgaggccagcaatgacctgtag

SEQ ID NO: 223512 - DNA, 3042 bp, Artificial Sequence
  derived and/or modified sequence
atggtggtggacttctgcagaagatttgtggcccggagcctgtgcatcatcctgatgaagcacttctgcagcagctctgtgtctgaggacctgggctgccggcggggggacttcagcaggaagcactacggctctgtggagctgctgatcagcagtgatgctgatggagccatccagagagctggccgcttccgggtggagaatggcagcagtgatgaaaatgccacagccctgcccggcacctggaggagaacagatgtgcacctggagaaccctgagtaccacacccgctggtacttcaagtacttcctgggccaggtgcaccagaactacatcggaaatgatgctgagaagagccccttcttcctgtctgtgaccctgagtgaccagaacaaccagagggtgccccagtaccgggccatcctgtggaggaagacaggcacccagaagatctgcctgccctacagccccaccaagaccctgtctgtgaagagcatcctgagcgccatgaacctggacaagtttgagaagggcccccgggagatcttccaccctgagatccagaaggacctgctggtgctggaggagcaggagggctctgtgaacttcaagtttggagtgctgtttgccaaggatggccagctgacagatgatgagatgttcagcaatgaaattggcagcgagcccttccagaagttcctgaacctgctgggggacaccatcaccctgaagggctggacaggctacagaggaggcctggacaccaagaatgacaccaccggcatccacagcgtgtacacagtgtaccagggccacgagatcatgtttcatgtgtccaccatgctgccctacagcaaagaaaacaagcagcaggtggagaggaagaggcacatcggaaatgacatcgtgaccatcgtgttccaggagggggaggagagcagccctgccttcaagcccagcatgatccgcagccacttcacccacatctttgccctggtgcgctacaaccagcagaatgacaactaccgcctgaagatcttcagcgaggagagcgtgcccctgtttggaccacccctgcccaccccacctgtgttcacagaccaccaggagttccgggacttcctgctggtgaagctgatcaatggagagaaggccaccctggagacccccacctttgcccagaagagaagaaggaccctggacatgctgatccgcagcctgcaccaggacctgatgccagacctgcacaagaacatgctgaacagaagaagcttcagtgatgtgctgcctgagagccccaagagcgccaggaagaaggaggaggcccggcaggccgagtttgtgcgcatcggccaggccctgaagctgaagagcatcgtgagaggagatgcccccagcagcctggccgccagcggcatctgcaagaaggagccctgggagccccagtgcttctgcagcaacttcccccatgaggccgtgtgtgccgacccctggggccaggccctgctggtgtccacagatgctggggtgctgctggtggatgatgacctgcccagcgtgcctgtgtttgacaggaccctgcctgtgaagcagatgcacgtgctggagaccctggacctgctggtgctgcgggctgacaagggcaaggatgcccggctgtttgtgttccggctgagcgccctgcagaagggcctggagggcaagcaggccggcaagagcagaagtgactgccgggagaacaagctggagaagaccaagggctgccacctgtatgccatcaacacccaccacagccgggagctgagaattgtggtggccatccggaacaagctgctgctgatcaccaggaagcacaacaagcccagcggcgtgaccagcaccagcctgctgagccccctgtctgagagccctgtggaggagttccagtacatccgggagatctgcctgagtgacagccccatggtgatgaccctggtggatggccctgctgaggagagtgacaacctgatctgtgtggcctaccgccaccagtttgatgtggtgaatgaaagcactggagaggccttccggctgcaccacgtggaggccaacagagtgaactttgtggccgccattgatgtgtatgaagatggagaggccggcctgctgctgtgctacaactacagctgcatctacaagaaggtgtgccccttcaacggcggcagcttcctggtgcagcccagcgccagtgacttccagttctgctggaaccaggccccctatgccatcgtgtgtgccttcccctacctgctggccttcaccacagacagcatggagatccggctggtggtgaatggaaacctggtgcacacagctgtggtgccccagctgcagctggtggccagcagaagtgacatctacttcaccgccacagctgctgtgaatgaggtgagcagcggcggcagcagcaaaggagccagcgccaggaacagcccccagaccccacctggccgggacacccctgtgttccccagcagcctgggggagggggagatccagagcaagaacctgtacaagatccccctgaggaacctggtgggccgcagcattgagcggcccctgaagagccccctggtgtccaaggtgatcaccccacccacccccatctctgtgggcctggccgccatccctgtgacccacagcctgagcctgagcaggatggagatcaaggagatcgccagcaggacccggcgggagctgctgggcctgagtgatgagggcggccccaagtctgagggcgcccccaaggccaagagcaagcccaggaagaggctggaggagagccagggcggccccaagccaggagctgtgcgcagcagcagcagtgaccgcatccccagcggcagcctggagagcgccagcaccagcgaggccaaccctgagggccacagcgccagcagtgaccaggaccctgtggccgaccgggagggcagccctgtgtctggcagcagccccttccagctgacagccttcagtgatgaggacatcatcgacctgaagtag

SEQ ID NO: 223513 - DNA, 3597 bp, Artificial Sequence
  derived and/or modified sequence
ctcttacttaaaatatagcattaaataatgctggttatttttatgttgcatatttgggacaaagagctctcttaaatgaaagataattgcaagatccggttcagcagctttgtcccttgcctcaagtttactgcagggcttctctcctctctggttatacagaaatgaaattataaaccaccagtaaccttggaaatttcaatcgattccaaatgactaaatatttaattgaatcattgcctatacttccagggatgactctggcgtttgctttttattgagggctccatgaaagccaggctctgcaatggctgctggggactgtgtctgttgcaaggaggctcccctgcagtgaggagccggggcactgcaagtctgttccatagcagccctttttgcaaatggtagttgatttttgcagaaggtttgtggccagatcgctatgtataatactgatgaagcatttttgttccagctctgtctcggaagacctaggctgtagacgtggggatttcagtaggaaacattatggatctgtggagctgcttatttccagtgatgctgatggagccatccaaagggctggaagattcagagtggaaaatggctcttcagatgagaatgcaactgccctgcctggtacttggcgaagaacagacgtgcacttagagaacccagaataccacaccagatggtatttcaaatattttttaggacaagtccatcagaactacattggaaacgatgccgagaagagccctttcttcttgtccgtgaccctttctgaccaaaacaatcaacgtgtccctcaataccgtgcaattctttggagaaaaacaggtacccagaaaatatgccttccctacagtcccacaaaaactctttctgtgaagtccatcttaagtgccatgaatctggacaaatttgagaaaggccccagggaaatttttcatcctgaaatacaaaaggacttgctggttcttgaagaacaagagggctctgtgaatttcaagtttggggttctttttgccaaagatgggcagctcactgatgatgagatgttcagcaatgaaattggaagcgagccttttcaaaaatttttaaatcttctgggtgacacaatcactctaaagggctggacgggctaccgtggcggtctggataccaaaaatgataccacagggatacattcagtttatactgtgtaccaagggcatgagatcatgtttcatgtttccaccatgttgccatattccaaagagaacaaacagcaggtggaaaggaaacgccacattggaaacgatatcgtcaccattgtgttccaagaaggagaggaatcttctcctgcctttaagccttccatgatccgctcccactttacacatatttttgccttagtgagatacaatcaacaaaatgacaattacaggctgaaaatattttcagaagagagcgtaccactctttggccctcccttgccaactccaccagtgtttacagaccaccaggaattcagggactttttgctagtgaaattaattaatggtgaaaaagccactttggaaaccccaacatttgcccagaaacgtcggcgtaccctggatatgttgattagatctttacaccaggatttgatgccagatttgcataagaacatgcttaatagacgatcttttagtgatgtcttaccagagtcacccaagtcagcgcggaagaaagaggaggcccgccaggcggagtttgttagaatagggcaggcactaaaactgaaatccattgtgagaggggatgctccatcaagcttggcagcttcagggatctgtaaaaaagagccgtgggagccccagtgtttctgcagtaatttccctcatgaagccgtgtgtgcagatccctggggccaggccttgctggtttccactgatgctggcgtcttgctagtggatgatgaccttccatcagtgcccgtgtttgacagaactctgccagtgaagcaaatgcatgtgcttgagaccctggaccttctggttctcagagcagacaaaggaaaagatgctcgcctctttgtcttcaggctaagtgctctgcaaaagggccttgaggggaagcaggctgggaagagcaggtctgactgcagagaaaacaagttggagaaaacaaaaggctgccacctgtatgctattaacactcaccacagcagagagctgaggattgtggttgcaattcggaataaactgcttctgatcacaagaaaacacaacaagccaagcggggtcaccagcacctcattgttatctcccctgtctgagtcacctgttgaagaattccagtacatcagggagatctgtctgtctgactctcccatggtgatgaccttagtggatgggccagctgaagagagtgacaatctcatctgtgtggcttatcgacaccaatttgatgtggtgaatgagagcacaggagaagccttcaggctgcaccacgtggaggccaacagggttaattttgttgcagctattgatgtgtacgaagatggagaagctggtttgctgttgtgttacaactacagttgcatctataaaaaggtttgcccctttaatggtggctcttttttggttcaaccttctgcgtcagatttccagttctgttggaaccaggctccctatgcaattgtctgtgctttcccgtatctcctggccttcaccaccgactccatggagatccgcctggtggtgaacgggaacctggtccacactgcagtcgtgccgcagctgcagctggtggcctccagggtgaaattcaatcaaaaaatctgtacaagattccacttagaaacctcgtgggcagaagcatcgaacgacctctgaagtcacccttagtctccaaggtcatcaccccacccactcccatcagtgtgggccttgctgccattccagtcacgcactccttgtccctgtctcgcatggagatcaaagaaatagcaagcaggacccgcagggaactactgggcctctcggatgaaggtggacccaagtcagaaggagcgccaaaggccaaatcaaaaccccggaagcggttagaagaaagccaaggaggccccaagccaggggcagtgaggtcatctagcagtgacaggatcccatcaggctccttggaaagtgcttctacttccgaagccaaccctgaggggcactcagccagctctgaccaggaccctgtggcagacagagagggcagcccggtctccggcagcagccccttccagctcacggctttctccgatgaagacattatagacttgaagtaacagagttgaatctcatttgccatctttagttttcttatggaggtttatactctttaaacagttctgatgtaatttctcaacaaaatgtggcttttagcctgtcagtgatctattggaccaaaccttctgcacactcggccagttccctctccaatgtccggtgccatctttcctgacctttgtttctttctgttcaggaaccatcagtccccttgtaataaaggtggtagatttcattgaggttttagattgaaactttgaataaatcaaaaatactcattcttatttactgc

SEQ ID NO: 223514 - DNA, 3800 bp, Artificial Sequence
  derived and/or modified sequence
atatttgggacaaagagctctcttaaatgaaagataattgcaagatccggttcagcagctttgtcccttgcctcaagtttactgcagggcttctctcctctctggttatacagaaatgaaattataaaccaccagtaaccttggaaatttcaatcgattccaaatgactaaatatttaattgaatcattgcctatacttccagggatgactctggcgtttgctttttattgagggctccatgaaagccaggctctgcaatggctgctggggactgtgtctgttgcaaggaggctcccctgcagtgaggagccggggcactgcaagtctgttccatagcagccctttttgcaaatggtagttgatttttgcagaaggtttgtggccagatcgctatgtataatactgatgaagcatttttgttccagctctgtctcggaagacctaggctgtagacgtggggatttcagtaggaaacattatggatctgtggagctgcttatttccagtgatgctgatggagccatccaaagggctggaagattcagagtggaaaatggctcttcagatgagaatgcaactgccctgcctggtacttggcgaagaacagacgtgcacttagagaacccagaataccacaccagatggtatttcaaatattttttaggacaagtccatcagaactacattggaaacgatgccgagaagagccctttcttcttgtccgtgaccctttctgaccaaaacaatcaacgtgtccctcaataccgtgcaattctttggagaaaaacaggtacccagaaaatatgccttccctacagtcccacaaaaactctttctgtgaagtccatcttaagtgccatgaatctggacaaatttgagaaaggccccagggaaatttttcatcctgaaatacaaaaggacttgctggttcttgaagaacaagagggctctgtgaatttcaagtttggggttctttttgccaaagatgggcagctcactgatgatgagatgttcagcaatgaaattggaagcgagccttttcaaaaatttttaaatcttctgggtgacacaatcactctaaagggctggacgggctaccgtggcggtctggataccaaaaatgataccacagggatacattcagtttatactgtgtaccaagggcatgagatcatgtttcatgtttccaccatgttgccatattccaaagagaacaaacagcaggtggaaaggaaacgccacattggaaacgatatcgtcaccattgtgttccaagaaggagaggaatcttctcctgcctttaagccttccatgatccgctcccactttacacatatttttgccttagtgagatacaatcaacaaaatgacaattacaggctgaaaatattttcagaagagagcgtaccactctttggccctcccttgccaactccaccagtgtttacagaccaccaggaattcagggactttttgctagtgaaattaattaatggtgaaaaagccactttggaaaccccaacatttgcccagaaacgtcggcgtaccctggatatgttgattagatctttacaccaggatttgatgccagatttgcataagaacatgcttaatagacgatcttttagtgatgtcttaccagagtcacccaagtcagcgcggaagaaagaggaggcccgccaggcggagtttgttagaatagggcaggcactaaaactgaaatccattgtgagaggggatgctccatcaagcttggcagcttcagggatctgtaaaaaagagccgtgggagccccagtgtttctgcagtaatttccctcatgaagccgtgtgtgcagatccctggggccaggccttgctggtttccactgatgctggcgtcttgctagtggatgatgaccttccatcagtgcccgtgtttgacagaactctgccagtgaagcaaatgcatgtgcttgagaccctggaccttctggttctcagagcagacaaaggaaaagatgctcgcctctttgtcttcaggctaagtgctctgcaaaagggccttgaggggaagcaggctgggaagagcaggtctgactgcagagaaaacaagttggagaaaacaaaaggctgccacctgtatgctattaacactcaccacagcagagagctgaggattgtggttgcaattcggaataaactgcttctgatcacaagaaaacacaacaagccaagcggggtcaccagcacctcattgttatctcccctgtctgagtcacctgttgaagaattccagtacatcagggagatctgtctgtctgactctcccatggtgatgaccttagtggatgggccagctgaagagagtgacaatctcatctgtgtggcttatcgacaccaatttgatgtggtgaatgagagcacaggagaagccttcaggctgcaccacgtggaggccaacagggttaattttgttgcagctattgatgtgtacgaagatggagaagctggtttgctgttgtgttacaactacagttgcatctataaaaaggtttgcccctttaatggtggctcttttttggttcaaccttctgcgtcagatttccagttctgttggaaccaggctccctatgcaattgtctgtgctttcccgtatctcctggccttcaccaccgactccatggagatccgcctggtggtgaacgggaacctggtccacactgcagtcgtgccgcagctgcagctggtggcctccaggtcggatatatacttcacagcaactgcagctgtgaatgaggtctcatctggaggcagctccaagggggccagtgcccgaaattctcctcagacacccccgggccgagatactccagtatttccttcttccctgggggaaggtgaaattcaatcaaaaaatctgtacaagattccacttagaaacctcgtgggcagaagcatcgaacgacctctgaagtcacccttagtctccaaggtcatcaccccacccactcccatcagtgtgggccttgctgccattccagtcacgcactccttgtccctgtctcgcatggagatcaaagaaatagcaagcaggacccgcagggaactactgggcctctcggatgaaggtggacccaagtcagaaggagcgccaaaggccaaatcaaaaccccggaagcggttagaagaaagccaaggaggccccaagccaggggcagtgaggtcatctagcagtgacaggatcccatcaggctccttggaaagtgcttctacttccgaagccaaccctgaggggcactcagccagctctgaccaggaccctgtggcagacagagagggcagcccggtctccggcagcagccccttccagctcacggctttctccgatgaagacattatagacttgaagtaacagagttgaatctcatttgccatctttagttttcttatggaggtttatactctttaaacagttctgatgtaatttctcaacaaaatgtggcttttagcctgtcagtgatctattggaccaaaccttctgcacactcggccagttccctctccaatgtccggtgccatctttcctgacctttgtttctttctgttcaggaaccatcagtccccttgtaataaaggtggtagatttcattgaggttttagattgaaactttgaataaatcaaaaatactcattcttatttactgcaaccttctcatattttatatacttagatggaaaattattttttcattacagttttgatttatgtcacataatgtgtttcttttataaagaaaagtcgttgctttttaacttta

SEQ ID NO: 223515 - DNA, 2463 bp, Artificial Sequence
  derived and/or modified sequence
atggtggtggacttctgccggcggttcgtggcccggagcctgtgcatcatactgatgaagcacttttgcagtagcagtgtttctgaggacctgggctgcagaagaggtgattttagtaggaaacactacggctcagtggagctgctgatttcgtcggatgctgacggggccattcagcgtgcaggccgcttcagagttgaaaatgggagttcggacgaaaatgcaaccgccctccctggtacctggcggcggacagatgtgcatctggaaaaccctgagtaccacactcggtggtatttcaagtattttttgggtcaggtccatcaaaactatattggtaatgacgcagagaaatcaccattcttcctatcagtcactctgagtgatcagaacaaccaacgggttccacaataccgagccatcctgtggcgaaagacagggacccagaagatctgtctcccatactcgcccactaagactctgtctgttaaatccattctttccgcaatgaatctcgacaagttcgagaagggaccgcgggagatattccatcccgagatccaaaaggatctgttggtcctggaggaacaggagggctctgtgaacttcaaattcggcgtgctgttcgctaaagacgggcagctgactgatgacgaaatgttcagcaacgaaattggttcagaaccattccagaagttcctgaacctcctaggcgacactataaccttaaagggttggaccggctatcggggcggtctagatacaaagaacgatactactgggattcattctgtctataccgtgtaccagggacatgagatcatgttccacgtttcaacaatgctaccttactcaaaggagaataagcagcaggtcgaacgcaagcgtcatattggaaacgacatcgtaacgatcgtctttcaggagggagaggaatccagtcctgctttcaagccctcgatgattcggagccattttacacacatttttgcactcgtccgatacaaccagcagaatgacaattatcgcctcaagatcttctccgaggagagcgtgccgttatttggaccacctctaccaacccctcccgtgttcacagaccatcaagagtttcgggatttcttgctggtgaagctgatcaatggagaaaaggccacgctggagacacccacatttgctcagaagcgccgccgcacgctggacatgcttatcaggtcactacaccaggacctcatgcccgacctccataagaatatgctgaaccgtcggagcttttctgacgtgttgccagagagccccaaatccgcacgcaaaaaagaagaggcccgccaggccgagttcgtcaggattggccaggcattgaaattgaaaagtatagtgcgaggggacgccccctctagtctagctgcatcagggatatgtaagaaagagccttgggaacctcagtgtttctgctcgaatttccctcatgaggccgtgtgcgcagacccctggggccaggctttactggttagtacggatgccggggtactgctggttgatgatgacctgcccagtgtgcccgtcttcgataggactcttccagtgaaacagatgcatgttctggaaacccttgatcttctcgtgctgcgggccgacaagggcaaggacgcccgcttgttcgttttccgcctgtcagcgctgcagaaggggctggagggtaagcaagccggtaaatccaggtctgactgtagagagaataagttagagaagaccaagggctgtcacctgtatgcaatcaatacacaccacagtcgggagttgcggatcgtggttgcaatccggaataaactcctcttaataactcgtaagcacaataagccttccggagtgacatcaacaagtctgctgtcacctctgagcgagtcccctgtcgaagaattccaatatattcgcgagatttgcttgagtgacagcccaatggtgatgactttggttgacggtccagctgaggaatccgacaacctgatctgcgtcgcgtataggcatcagtttgacgtagttaatgagagtaccggcgaggcgtttcgactacaccatgtggaggccaacagagtgaacttcgtggctgctattgatgtctacgaagatggagaggctggtcttctgctgtgctataactacagttgcatctacaagaaagtctgtccttttaatggaggtagttttctcgtacagccctctgccagtgactttcagttttgttggaaccaggccccatatgcaattgtttgtgcattcccctatctgctcgcttttaccactgattcgatggagatcagactggtggtaaatggcaatttagttcacaccgcagtcgtgcctcaattgcaactggtggcgtctagagttaagttcaaccagaagatatgtacgagattccatctggagacatcatgggccgaagctagcaatgacctgtag

SEQ ID NO: 223516 - DNA, 3042 bp, Artificial Sequence
  derived and/or modified sequence
atggtggtggacttctgccggcggttcgtggcccggagcctgtgcatcatcctcatgaagcatttttgctccagttcagtgtcagaagacctgggctgcagacgaggggattttagtcgtaaacactacggatccgtggagctcctgatttcctcagacgctgacggggccattcagcgggccgggcgctttcgggtcgaaaacggcagttcagacgaaaatgctacggcgctgcccggaacatggaggaggacagatgttcacctcgagaacccagaatatcatacccgctggtactttaaatattttttaggccaggtgcatcagaactacatcgggaacgatgccgagaaatcacctttcttcttatccgtaacattgagcgaccagaataatcagagggttccacaatatcgtgccattttgtggagaaaaaccggcactcagaagatatgtttaccatactcccccaccaaaacacttagtgtcaagtctatcctgtccgctatgaatctggacaaatttgagaaaggtcctagggagatcttccatcctgaaatccagaaagacctcctggtgttagaggaacaggagggaagtgtgaatttcaaatttggggtgttgtttgccaaggacgggcagttaaccgatgatgaaatgtttagtaacgaaatcgggtcagagccctttcaaaagtttctgaacctcctcggggacacgattacacttaaaggttggacaggatatcgcggcggactcgatacgaaaaatgacacaactggaattcacagtgtatacactgtttaccagggccacgagatcatgttccacgtcagcacaatgctcccatatagcaaagaaaacaaacagcaggtggaaaggaaaagacacatcgggaatgacatcgtcaccatcgtcttccaggagggcgaagaaagctcccccgccttcaagccttctatgatccgtagccacttcactcacatttttgccctagtccggtataaccagcagaatgacaactaccggctgaagatcttctctgaagaaagcgtgccactcttcgggccccccctcccgactcctccagttttcacggatcatcaggagtttcgagactttctgctggtaaagttgattaatggggaaaaagcgacattggaaacccctacctttgctcagaagaggaggaggaccctggacatgctcattagatccctgcaccaggatctgatgcctgatctgcataaaaacatgctcaaccggagatccttttccgacgtgctgccagagtctccaaaaagcgcgcggaagaaggaagaagctcgacaggctgagttcgtccgcattgggcaggcactgaaactgaagtccatcgtgcggggcgacgcaccttcgtctctggcagcctcaggcatctgcaagaaagaaccatgggagcctcagtgcttctgctctaacttccctcatgaagctgtctgcgccgatccctggggacaggctttactagtctctaccgatgcaggagtcttgctggtcgacgatgacctaccctccgtacccgtgttcgaccgcactctccccgttaaacagatgcacgttctggagaccctggatctcctcgtgctgagagccgataaaggtaaggatgctaggctttttgtgttcaggctgagcgctctgcagaagggcctggagggaaaacaagcagggaaaagtagatcagattgtagggaaaataaattagaaaagacaaaggggtgccatttatacgccataaacacccaccactcccgagagctcagaatcgtggttgcgattcggaacaaactgctcctgatcacaaggaagcacaacaaaccatctggggtaaccagcacaagcttgctgagcccactttccgaatcaccggtggaggagttccagtatatccgcgagatctgtcttagcgacagtcccatggtgatgaccttggtggatgggccagccgaggagagcgacaatttgatttgtgtagcctatcgacaccaattcgatgtggttaatgaatctactggagaagcgttccggctccatcacgtggaggccaatagagtgaacttcgtggctgcaattgacgtgtacgaagatggcgaagcaggattgcttctctgctacaactactcttgcatttataagaaagtctgtccattcaatggtgggagcttcctcgttcagccttccgcttccgacttccagttttgctggaatcaggccccctatgcaatcgtatgtgctttcccctacctgctggccttcactaccgacagcatggagatacgactggtggtcaacggcaacttagtgcacacagcagtggtgccccaactccagctggtggctagcagatctgatatctatttcacagctaccgctgccgtgaatgaagtctcgtcaggaggcagtagcaagggtgcaagcgcgagaaactccccccagacgccaccggggcgggacaccccagtcttcccgtcatcattgggagagggcgaaatacagtctaagaatctgtacaaaatccccctccggaacttggtgggccggagtatcgagagaccgctgaaatccccactggtctcaaaagtcatcacgccgccgacaccaatcagtgtcgggctcgcagccatccccgtaactcattcccttagcctgagcagaatggagatcaaggaaattgcctcaagaacaaggagggaactactcgggctctccgatgagggaggccctaaatctgagggtgctcccaaagcaaaatccaagcctagaaaacggctcgaggaatcccaggggggacccaagcccggcgcagtgagaagttctagctcagaccgaattccatctggttcattggaaagtgctagcacctcagaagcaaacccagaaggacattctgcaagctccgatcaggacccagttgcagacagagagggttcccccgtgtcgggctcctctccattccaacttacggcattttctgatgaggatatcatagatctaaaatag

SEQ ID NO: 223517 - DNA, 2463 bp, Artificial Sequence
  derived and/or modified sequence
atggtggttgacttctgtaggcgattcgtggcacgcagtctatgcattatcttaatgaaacatttctgcagttcttctgtgagcgaagaccttggatgtagacgtggcgatttctcaaggaaacactatggttccgtggagctgttgatctcctcagacgcagacggagccatccagcgggctggtagattccgcgtcgagaacggctccagtgacgaaaatgctactgctttgcccggaacgtggagacgtacagacgtgcacctggaaaaccctgagtaccataccagatggtatttcaagtacttcctgggacaggtgcaccaaaactacatagggaacgatgccgagaaatcacccttcttcctgtccgtaacgctctccgaccaaaataatcagcgcgtgccccaatacagagctatcctgtggaggaagaccggcacacaaaagatatgcctgccttactcaccaactaagactctgtccgtaaagtccattctgtccgccatgaatcttgataaatttgaaaagggcccaagggaaatattccaccccgagatacagaaagacctactcgtacttgaggaacaggagggttccgtcaattttaagtttggtgtgttatttgccaaagacggccagctcaccgacgatgaaatgttttctaacgaaatcggaagcgaaccgtttcagaagtttcttaatttgctcggagacacgatcaccttgaaaggctggactggctatcggggaggactggacaccaaaaatgacacgacaggtatccattcagtctacacggtttatcaagggcacgaaatcatgtttcacgttagcacgatgcttccttatagcaaggaaaacaagcagcaggtggagagaaaaaggcacataggaaacgatattgtgaccattgtgtttcaggagggtgaggagagcagtccagcattcaagccctcgatgatcaggagtcacttcacacacatattcgcactggttagatataatcaacagaacgacaactacaggcttaagattttctcagaggaaagtgttcctctgttcggaccgccactgccgacccctccagtctttaccgaccaccaggagtttagggactttcttctggtgaagctgataaacggggaaaaggccactttagagactcctaccttcgcgcagaagagaaggaggaccctggatatgctcatccggtcgctgcaccaggacctcatgccggacctgcataagaatatgctgaacaggcgttcattcagcgacgtcttgcccgagagccccaagagcgccaggaaaaaggaagaagctcgtcaggcagaatttgttagaatcggccaggccctcaaactaaaatctattgtgcgtggggacgccccttctagcctcgcagccagcgggatatgtaaaaaggagccatgggagccccagtgtttttgcagtaactttcctcacgaagccgtttgcgccgatccatggggccaggctctcctagtgagcactgacgctggagtcctcctggtcgatgacgacttgcctagcgtgcctgttttcgacaggaccctacctgtgaaacaaatgcacgtacttgaaaccctcgacctgcttgtgttgcgcgctgataagggaaaagatgcccgtctttttgtctttcggctgtccgcgctgcaaaaagggctggaaggaaagcaggcaggaaagtcaaggagcgactgtcgtgaaaacaagctggagaagaccaaagggtgtcatttatacgccatcaatacccatcattcaagggaactcaggatcgtggtcgccatccgaaataaactgctcctgataacacggaagcataataagccctctggggtgacatccacctctctgctatccccgctctccgaatccccagtggaagaatttcagtacatcagggagatctgcttaagtgactcaccaatggtaatgaccttagtggatggccctgctgaggagtccgacaacctgatttgtgttgcctatagacaccagtttgacgttgttaacgaatcgacaggtgaggcatttagactacaccatgtcgaggccaaccgagtgaatttcgtagccgctatcgacgtctacgaagacggggaggccggactgctgttatgctacaattattcctgtatttacaagaaagtttgtccgttcaatgggggatcctttctggttcagccgtccgcttcagactttcagttctgctggaatcaggctccctatgccatcgtttgtgcatttccgtatttgctagctttcaccacggattccatggagatacgattagtggttaacggaaacctggtgcacacagctgtggtccctcaactgcagttggtggcctccagagtcaagttcaaccagaagatatgcacaagatttcacctggagaccagctgggctgaggcttcaaacgacctttag

SEQ ID NO: 223518 - DNA, 3042 bp, Artificial Sequence
  derived and/or modified sequence
atggttgtcgacttctgtcgacgtttcgtggctagaagcttgtgtatcattctcatgaagcatttctgcagttcgtcggtgtctgaagatctgggctgtagaagaggagacttcagtaggaaacactacgggtccgttgaattgctaatctcatccgatgcagacggagcaatccagagggcagggcgttttagagttgagaacggctccagcgatgagaatgccactgccctgcctggcacttggcggaggacagacgtgcacctggagaatcctgaataccacaccagatggtacttcaagtactttctgggccaagtgcaccagaattacattgggaatgacgctgagaagagtcccttctttttgtctgtgacactgagcgatcaaaataatcagagggttccccagtaccgtgcaattctctggcgtaaaacaggaacccagaaaatatgcctaccgtacagccctactaaaaccctgagcgtgaagtccatccttagcgcaatgaatctggacaagtttgagaaagggcctcgagagattttccatcctgagatccagaaggacctcctggtattggaggaacaggagggctccgttaattttaagtttggcgtgctatttgccaaagatgggcaattaacagatgacgagatgtttagcaacgagatcggatctgaaccttttcagaagtttttgaacctgctgggcgacaccattacattgaagggttggaccggataccgcggtggtcttgacacaaagaacgacactactggcattcattcagtgtacacagtttaccagggtcacgaaatcatgtttcacgttagcaccatgcttccttatagtaaagaaaacaagcaacaagtggagagaaagaggcacatcggtaatgacatagtgactatcgtattccaggagggcgaagagtcctctccagcctttaaaccttctatgatcagaagccatttcactcacatcttcgcactcgtcaggtacaaccagcagaatgacaactatcggctcaagattttctctgaggaaagcgtccccctcttcggcccacctttacctacaccccctgtgtttactgatcatcaggagttccgcgatttcctcttggtgaagttgattaatggtgagaaggccactttagagacaccaaccttcgcccagaagcgccgaaggaccctggatatgctcatcagaagtctacatcaagaccttatgcctgacctccataaaaatatgttgaaccgacgcagcttctcagacgtcctgcctgaaagcccaaagagcgctaggaaaaaggaagaagcccgacaagcagagttcgtccgtataggccaggccttgaagcttaagtctatcgtgaggggcgatgctccatcctcactagcggcttcagggatctgtaaaaaggagccctgggagccccagtgcttctgcagcaatttcccgcatgaagcggtctgcgctgatccctggggccaggcgctcctggtatcaaccgacgctggcgtgctcctcgtggacgacgatctgccgagcgtgcctgttttcgatcgcacattacccgttaagcaaatgcacgtactggaaactttggaccttttagtgctgagagccgacaaagggaaagacgccaggctgttcgtgttccgcctgtctgccctgcagaaaggcctcgagggcaaacaggccggtaagagcaggtctgactgtagagagaacaaactggaaaagactaaaggctgccatctgtatgctatcaacacccaccattccagggaactacgaatcgtcgtggcgatccggaacaagctgctgttgattacgagaaaacacaataagcctagtggcgtaacctccacgtcacttctgtcacccctgtcagaatcccccgtggaagaatttcagtacatccgggaaatttgtctgtccgacagcccaatggtcatgactctggttgatggacccgctgaagagagcgacaatctgatctgtgtggcttatagacatcagttcgacgttgtgaacgagagcaccggcgaggcgtttcgcttgcaccacgtcgaggctaatagggtgaactttgtggccgctatcgatgtgtatgaagatggggaagccggtttgcttctgtgctacaactattcctgtatttataagaaggtgtgccccttcaatggcggttcctttctggttcagccttcggcttctgacttccagttttgctggaatcaagccccttacgccatcgtttgtgctttcccctaccttcttgcattcaccactgacagtatggagattcggctggtggttaacggcaacctggtgcacacagcagtggtgccccaactgcagctagtggctagtcggtccgacatctacttcactgccacggccgctgtcaatgaagtgtcatcggggggaagctctaaaggggcatcggccaggaattcacctcagaccccccctggacgggacacaccagtgtttcccagctctctgggagaaggcgaaatccagagcaaaaatctgtacaagattcccttgcgaaacttagtaggcaggtcaatcgaacggccactgaaatccccccttgtgagtaaagtgatcactccacccaccccaatttcggtgggcctggctgccattcccgtgacacattcgttgtcactgtcaaggatggagattaaagaaatcgctagcagaaccagacgcgaactcctcggcttatctgacgagggcggacccaagtctgaaggtgcgcctaaggccaaatctaagccgcgaaaaagactcgaggaatcccagggcggtccgaaacctggcgctgtccgcagcagttcctccgacagaatccccagcggctccctcgaatcagcctctacatccgaagctaatcctgaggggcactctgcctcatctgaccaggaccccgtggctgaccgagagggcagccctgtgagcggatcttccccgtttcaactgaccgccttcagcgacgaggatatcatcgacttgaaatag

SEQ ID NO: 223519 - protein, 298 aa, Artificial Sequence
  derived and/or modified sequence
MMNVNTRGTYLASKACIPYLKKSKVAHILNISPPLNLNPVWFKQHCAYTIAKYGMSMYVLGMAEEFKGEIAVNALWPKTAIHTAAMDMLGGPGIESQCRKVDIIADAAYSIFQKPKSFTGNFVIDENILKEEGIENFDVYAIKPGHPLQPDFFLDEYPEAVSKKVESTGAVPEFKEEKLQLQPKPRSGAVEETFRIVKDSLSDDVVKATQAIYLFELSGEDGGTWFLDLKSKGGNVGYGEPSDQADVVMSMTTDDFVKMFSGKLKPTMAFMSGKLKIKGNMALAIKLEKLMNQMNARL

SEQ ID NO: 223520 - protein, 418 aa, Artificial Sequence
  derived and/or modified sequence
MLPNTGRLAGCTVFITGASRGIGKAIALKAAKDGANIVIAAKTAQPHPKLLGTIYTAAEEIEAVGGKALPCIVDVRDEQQISAAVEKAIKKFGGIDILVNNASAISLTNTLDTPTKRLDLMMNVNTRGTYLASKACIPYLKKSKVAHILNISPPLNLNPVWFKQHCAYTIAKYGMSMYVLGMAEEFKGEIAVNALWPKTAIHTAAMDMLGGPGIESQCRKVDIIADAAYSIFQKPKSFTGNFVIDENILKEEGIENFDVYAIKPGHPLQPDFFLDEYPEAVSKKVESTGAVPEFKEEKLQLQPKPRSGAVEETFRIVKDSLSDDVVKATQAIYLFELSGEDGGTWFLDLKSKGGNVGYGEPSDQADVVMSMTTDDFVKMFSGKLKPTMAFMSGKLKIKGNMALAIKLEKLMNQMNARL

SEQ ID NO: 223521 - protein, 213 aa, Artificial Sequence
  derived and/or modified sequence
MDMLGGPGIESQCRKVDIIADAAYSIFQKPKSFTGNFVIDENILKEEGIENFDVYAIKPGHPLQPDFFLDEYPEAVSKKVESTGAVPEFKEEKLQLQPKPRSGAVEETFRIVKDSLSDDVVKATQAIYLFELSGEDGGTWFLDLKSKGGNVGYGEPSDQADVVMSMTTDDFVKMFSGKLKPTMAFMSGKLKIKGNMALAIKLEKLMNQMNARL

SEQ ID NO: 223522 - DNA, 1257 bp, Artificial Sequence
  derived and/or modified sequence
atgctgcccaacaccggcagactggccggctgcaccgtgttcatcaccggcgccagcagaggcatcggcaaggccatcgccctgaaggccgccaaggacggcgccaacatcgtgatcgccgccaagaccgcccagccccaccccaagctgctgggcaccatctacaccgccgccgaggagatcgaggccgtgggcggcaaggccctgccctgcatcgtggacgtgagagacgagcagcagatcagcgccgccgtggagaaggccatcaagaagttcggcggcatcgacatcctggtgaacaacgccagcgccatcagcctgaccaacaccctggacacccccaccaagagactggacctgatgatgaacgtgaacaccagaggcacctacctggccagcaaggcctgcatcccctacctgaagaagagcaaggtggcccacatcctgaacatcagcccccccctgaacctgaaccccgtgtggttcaagcagcactgcgcctacaccatcgccaagtacggcatgagcatgtacgtgctgggcatggccgaggagttcaagggcgagatcgccgtgaacgccctgtggcccaagaccgccatccacaccgccgccatggacatgctgggcggccccggcatcgagagccagtgcagaaaggtggacatcatcgccgacgccgcctacagcatcttccagaagcccaagagcttcaccggcaacttcgtgatcgacgagaacatcctgaaggaggagggcatcgagaacttcgacgtgtacgccatcaagcccggccaccccctgcagcccgacttcttcctggacgagtaccccgaggccgtgagcaagaaggtggagagcaccggcgccgtgcccgagttcaaggaggagaagctgcagctgcagcccaagcccagaagcggcgccgtggaggagaccttcagaatcgtgaaggacagcctgagcgacgacgtggtgaaggccacccaggccatctacctgttcgagctgagcggcgaggacggcggcacctggttcctggacctgaagagcaagggcggcaacgtgggctacggcgagcccagcgaccaggccgacgtggtgatgagcatgaccaccgacgacttcgtgaagatgttcagcggcaagctgaagcccaccatggccttcatgagcggcaagctgaagatcaagggcaacatggccctggccatcaagctggagaagctgatgaaccagatgaacgccagactgtag

SEQ ID NO: 223523 - DNA, 897 bp, Artificial Sequence
  derived and/or modified sequence
atgatgaatgtgaatacaagggggacctatcttgctagtaaggcctgcatcccatatctcaaaaagagtaaagttgcccacattctgaacatttcccctccacttaaccttaaccctgtatggttcaaacagcactgtgcctataccattgctaaatacggtatgagcatgtacgtgctaggcatggcggaagagttcaagggagaaatcgctgtaaacgcgctgtggcctaaaactgccattcatacggcggctatggatatgctaggcggcccaggcattgagagccaatgtaggaaagtcgacatcatcgcagatgccgcttattctatatttcaaaaacctaagtcctttacgggcaacttcgtgattgacgagaacattcttaaggaggagggaatcgagaacttcgacgtctatgcaatcaaaccgggacatcccctccaaccagatttcttccttgacgaatatccagaggccgtgagcaagaaagtcgaatccactggagctgtccctgagttcaaggaagagaaactccagttgcagcccaagccgcgctcaggtgcggtggaggaaacttttaggatagtgaaggactcactgagtgatgatgtggtcaaggccacccaagctatttacctctttgagctttcaggcgaagatggggggacatggtttttggaccttaagtctaagggagggaacgtgggctacggcgagccaagcgatcaggcagacgtggttatgtctatgaccaccgatgattttgttaaaatgtttagcggtaagctgaagcctaccatggctttcatgagcggcaagctgaaaattaaaggaaatatggctttggcaattaagcttgaaaagctgatgaatcaaatgaatgcaaggctttag

SEQ ID NO: 223524 - DNA, 1257 bp, Artificial Sequence
  derived and/or modified sequence
atgttacccaatactggtaggcttgcaggatgtacagtattcatcacgggggcatccaggggaatcggcaaagcaattgcattgaaggctgcgaaagacggtgcgaacatcgttatcgctgccaaaacagctcaacctcacccaaaactcctgggcactatttataccgctgctgaagagatagaggctgtcggtggtaaagccctcccatgtattgtggatgtaagagacgagcagcaaatctcagccgctgtggagaaggccatcaagaaatttggcgggattgatatcctggtgaataatgcgtccgcaatcagtctcaccaacactctcgacacaccaactaagcgcttagacctgatgatgaacgtgaacacacggggtacttacctcgcctcaaaggcatgcatcccttatctcaagaaaagcaaagttgcccatatactgaatatcagcccaccactcaacttgaatcccgtctggttcaaacagcattgcgcttacaccatagcgaagtatggcatgtcaatgtatgtgctgggcatggccgaagaatttaaaggagagattgccgtgaatgctctgtggcccaagaccgccattcacactgcagctatggacatgctcggcggacctggcattgagtcacagtgtcgtaaggtcgatatcatcgcagatgcagcctactccatattccagaaacccaagagtttcacaggtaactttgtcatcgacgagaacattctgaaagaagaaggtatcgagaacttcgatgtatacgccattaagcccgggcaccctctgcagcccgatttttttctggatgagtaccccgaggccgtgtcaaaaaaagtcgagagcaccggagcagtcccagaatttaaagaggagaaactgcaattgcagcccaaacctcgcagtggagccgtcgaagaaacatttaggatcgtgaaggactctttgtcagatgatgtcgtaaaagctactcaggctatatacctgtttgagctgagtggggaggatggaggcacgtggttcctggacctgaagtctaagggagggaacgtgggctatggagagccatcagaccaggccgacgttgtcatgagcatgactacagatgacttcgttaagatgtttagcggaaagttaaagccaacaatggctttcatgtctggaaaattgaagatcaaaggcaatatggcactggcaataaagctggagaaattgatgaatcagatgaacgccagactttag

SEQ ID NO: 223525 - DNA, 897 bp, Artificial Sequence
  derived and/or modified sequence
atgatgaatgtgaacacccggggcacctacctggccagcaaggcctgcatcccctacctgaagaagagcaaggtggcccacatcctgaacatcagcccccccctgaacctgaaccctgtgtggttcaagcagcactgtgcctacaccatcgccaagtatggcatgtccatgtatgtgctgggcatggccgaggagttcaagggggagattgctgtgaatgccctgtggcccaagacagccatccacacagctgccatggacatgctgggcggccctggcatcgagagccagtgcaggaaggtggacatcatcgcagatgctgcctacagcatcttccagaagcccaagagcttcaccggcaactttgtgattgatgagaacatcctgaaggaggagggcattgaaaattttgatgtgtatgccatcaagccaggccaccccctgcagcctgacttcttcctggatgagtacccagaggccgtgtccaagaaggtggagagcactggagctgtgcctgagttcaaggaggagaagctgcagctgcagcccaagcccaggtctggagctgtggaggagaccttccgcatcgtgaaggacagcctgagtgatgatgtggtgaaggccacccaggccatctacctgtttgagctgagcggggaggatggcggcacctggttcctggacctgaagagcaagggcggcaatgtgggctacggggagcccagcgaccaggctgatgtggtgatgtccatgaccacagatgactttgtgaagatgttttctgggaagctgaagcccaccatggccttcatgtctgggaagctgaagatcaagggcaacatggccctggccatcaagctggagaagctgatgaaccagatgaatgcccggctgtag

SEQ ID NO: 223526 - DNA, 1257 bp, Artificial Sequence
  derived and/or modified sequence
atgctgcccaacacaggccgcctggccggctgcaccgtcttcatcaccggggccagccggggcatcggcaaggccatcgccctgaaggccgccaaggatggagccaacatcgtgattgctgccaagacagcccagccccaccccaagctgctgggcaccatctacacagctgctgaggagattgaagctgtgggcggcaaggccctgccctgcatcgtggatgtgagagatgagcagcagatctctgctgctgtggagaaggccatcaagaagtttggaggcatcgacatcctggtgaacaatgccagcgccatcagcctgaccaacaccctggacacccccaccaagaggctggacctgatgatgaatgtgaacacccggggcacctacctggccagcaaggcctgcatcccctacctgaagaagagcaaggtggcccacatcctgaacatcagcccccccctgaacctgaaccctgtgtggttcaagcagcactgtgcctacaccatcgccaagtatggcatgtccatgtatgtgctgggcatggccgaggagttcaagggggagattgctgtgaatgccctgtggcccaagacagccatccacacagctgccatggacatgctgggcggccctggcatcgagagccagtgcaggaaggtggacatcatcgcagatgctgcctacagcatcttccagaagcccaagagcttcaccggcaactttgtgattgatgagaacatcctgaaggaggagggcattgaaaattttgatgtgtatgccatcaagccaggccaccccctgcagcctgacttcttcctggatgagtacccagaggccgtgtccaagaaggtggagagcactggagctgtgcctgagttcaaggaggagaagctgcagctgcagcccaagcccaggtctggagctgtggaggagaccttccgcatcgtgaaggacagcctgagtgatgatgtggtgaaggccacccaggccatctacctgtttgagctgagcggggaggatggcggcacctggttcctggacctgaagagcaagggcggcaatgtgggctacggggagcccagcgaccaggctgatgtggtgatgtccatgaccacagatgactttgtgaagatgttttctgggaagctgaagcccaccatggccttcatgtctgggaagctgaagatcaagggcaacatggccctggccatcaagctggagaagctgatgaaccagatgaatgcccggctgtag

SEQ ID NO: 223527 - DNA, 897 bp, Artificial Sequence
  derived and/or modified sequence
atgatgaacgtgaacacccggggcacctacctggccagcaaggcctgcatcccgtacttgaagaagagcaaggtggcacacatactgaacatctccccccccctaaatttgaatccagtgtggttcaagcagcactgtgcttacacaatcgcaaaatacggaatgtcaatgtatgtactggggatggcagaagaattcaaaggcgagatcgccgtgaatgccttgtggcccaagaccgccattcacaccgccgccatggacatgctcggaggacctggcattgaatctcagtgcagaaaagtcgacattatcgccgacgccgcctactctattttccagaaaccaaagagcttcaccgggaactttgtaattgatgagaatatccttaaggaagaaggcattgagaacttcgacgtttatgccatcaaacctggtcacccgctgcagcctgacttcttcctggacgagtatcccgaggccgtgagtaaaaaagttgagtctacaggcgcagttcccgagtttaaggaggagaagctccaactacagccaaagcctcggtcaggagccgtggaggaaacgttccgtatagtcaaagactcgctttctgacgatgtagtcaaagccacccaggccatttacctgttcgaattgtcaggcgaagacgggggaacttggttcctagacctcaagtcaaaaggtggcaatgtaggctacggggagcccagcgatcaagcagatgtagttatgtcgatgaccaccgatgattttgtgaagatgttctctggtaagttgaaaccgacgatggcgttcatgagtggaaagcttaaaattaaggggaatatggctctggccattaagctggagaagttaatgaaccagatgaacgccaggttatag

SEQ ID NO: 223528 - DNA, 1257 bp, Artificial Sequence
  derived and/or modified sequence
atgctgcccaacaccggccggctggccggctgcaccgtgttcatcacaggcgcgtctcggggcattggtaaggccatcgcactgaaggccgcgaaagatggagccaatattgtaatcgctgctaaaacggcccaaccccacccaaaattgcttggaacaatttatacggccgctgaagaaatagaggccgtaggcggaaaagccctgccctgcattgtggacgtgcgggacgagcagcagatctctgcagcagtggagaaagctatcaagaaattcggagggattgatatcctcgttaacaatgcatccgccatctccctgactaacaccctggatacacctactaagcgtctggacctcatgatgaacgtcaacaccaggggcacttacttggcaagcaaagcctgtataccttatctaaagaagagcaaagtggcacacatactgaatatttctcctcccctcaatctgaacccagtctggttcaagcagcactgcgcttatactattgcaaaatatggaatgagcatgtatgtgttggggatggctgaggaattcaagggggaaatagcagtgaatgcgctgtggccaaagaccgctatccatacagccgctatggacatgctgggcggccccggtatagagtctcagtgcaggaaagtggacattatcgccgacgcggcttactctattttccagaagcccaaaagcttcaccgggaatttcgttattgacgagaacatcttgaaagaagagggaattgaaaattttgatgtttacgctatcaaacctgggcatcccctccaacccgacttctttttggatgagtatccggaagcggtgtccaaaaaggttgagtccaccggagcggtcccagagtttaaggaggagaaattgcagctgcaaccaaaacctcgctctggggccgtcgaggagacctttcgcattgttaaagattcactgagtgatgacgtcgtgaaggcaacccaggctatttatttattcgaactatcgggggaggatggcggcacctggttcctcgatcttaaatctaaaggcggtaacgtgggatacggcgagccatcagatcaagcagacgttgtaatgagtatgaccaccgacgatttcgtgaagatgttttcaggcaaattgaaacctaccatggcctttatgagcggcaaattaaagataaaaggtaatatggctctggctataaagttggaaaagttgatgaaccaaatgaacgcgcggttatag

SEQ ID NO: 223529 - DNA, 3350 bp, Artificial Sequence
  derived and/or modified sequence
agggaccaggcttgggaggcgacgaagaggaacgctgggcgcaggaggcccactgcatacgcaggcgcactcggcgatcccggcttttccgcgcgcagttcccgcacaggcatcggggggggcaggggcggggcaggggcggggataaatgcggagggacggtccagctttagctctctgctcgccgccgccgctgtcgccgccacctcctctgatctacgaaagtcatgttacccaacaccgggaggctggcaggatgtacagtttttatcacaggtgcaagccgtggcattggcaaagctattgcattgaaagcagcaaaggatggagcaaatattgttattgctgcaaagaccgcccagccacatccaaaacttctaggcacaatctatactgctgctgaagaaattgaagcagttggaggaaaggccttgccatgtattgttgatgtgagagatgaacagcagatcagtgctgcagtggagaaagccatcaagaaatttggaggaattgatattctggtaaataatgccagtgccattagtttgaccaatacattggacacacctaccaagagattggatctgatgatgaacgtgaacaccagaggcacctaccttgcatctaaagcatgtattccttatttgaaaaagagcaaagttgctcatatcctcaatatcagtccaccactgaacctaaatccagtttggttcaaacagcactgtgcttataccattgctaagtatggtatgtctatgtatgtgcttggaatggcagaagaatttaaaggtgaaattgcagtcaatgcattatggcctaaaacagccatacacactgctgctatggatatgctgggaggacctggtatcgaaagccagtgtagaaaagttgatatcattgcagatgcagcatattccattttccaaaagccaaaaagttttactggcaactttgtcattgatgaaaatatcttaaaagaagaaggaatagaaaattttgacgtttatgcaattaaaccaggtcatcctttgcaaccagatttcttcttagatgaatacccagaagcagttagcaagaaagtggaatcaactggtgctgttccagaattcaaagaagagaaactgcagctgcaaccaaaaccacgttctggagctgtggaagaaacatttagaattgttaaggactctctcagtgatgatgttgttaaagccactcaagcaatctatctgtttgaactctccggtgaagatggtggcacgtggtttcttgatctgaaaagcaagggtgggaatgtcggatatggagagccttctgatcaggcagatgtggtgatgagtatgactactgatgactttgtaaaaatgttttcagggaaactaaaaccaacaatggcattcatgtcagggaaattgaagattaaaggtaacatggccctagcaatcaaattggagaagctaatgaatcagatgaatgccagactgtgaaggaaaatataaaaaaaaagtcgactgctatgctcaaaaagtaaaaaaagctcaacagttaaaatctaatgtttgttttctttcctgttatattataaggatatgcacgtttgttctggaaaagatagaatttgtctctaaaagacttgaaattgtaattaaaatggcaagctaatcaaacataagcttcattaagtgggattctaagacagtctgtgtttttatatttcaagggtttaaccctttgagccttacatctcattcactgtctttctccaagaaaagtattttgggcggacagtcagatcaagcagtaaaattagctctttcaaatcttcttgtcatgtaaaatgaagctagtctgttttaaaatttttagttttggattgtatactaatgaaaatcttaatgatgtttttgatttttatatacttattttaaagaaaatcttatatagtacattttacaaaaattataaaaaatgaattagtactggcgaggactaaatgaaacaataatttttcattttgataactagctttccaggtggacttagccataggaaaatattactaatgtaatttaacaaattgctgcatgtattccatttaaaaatatgtttaaattgtcctaaaacaaaataattttctccctaggagtatgcatttggctacagtgttttgaaacagaaaccttagaataggtcattggtatgggctgaactgtgtatcccccaattcatttgttgaggtcctaactcccatttcttttgaatgtgactgttcggagatgaggcctttaaagaggtgacttaagttcaaaggaggctgttagtctaatccaacatggtgtcctttggacataagagataccagcaatgtgtgcacagaacaaagaccaggagaggacacagtgagaaggcagttatctgcaagcaaagagagaggcttcagaagaaacaaaatcaccagcaccttgatctttgacttctaatctccagaatagtgagaaataaatttctgttgttaagccgtccactgtgggaggccgacgcaggaggattgcttgaggccaggagttcaaggccagcctggacaacatagtaagaccctatctctacccccctaataaattaatttaaaaagccccccaatctgtggtattttattatggcagccctagcaagctaatacagtggtttgagaggctgggagggttgaggggaagataaacttttaaaaagctcttatctttcatttcaatcagttaaaaatacttgctcagtgtaacaattttgcttctcagcttccactctaatattgttgtgccattaagcaatttagctaatcctgacatttcttagattcataatgttaggagcatttaatctgtattttacaagttaggaagcagaggatcagagatgggaaaggactagcccaaggccaacattaacaagccctctaacaaaaactttacaatacatttatgttgaatggaactccaagatctcacctctccatccaggaatggagtccatgtaatcaaagtgaacttaaaaataggacagtttcaacaagtcaggagattcacagcaactgatcaaagggagtccagtcaacgtgagcaagcgtgattatgatgaggaagccccctctgctttaatccacacaaggaacgtaacctgaagtaacctgatgttaaccaatctgctgtgtctactatgctgtttccttgttcctgctagtgctgctttacaaatgcagaccattctatcatacctggcggggcttctgttttattttgtaggctggatgctacccagttcatgaatcgctaataaaagccaattagatctttacataa

SEQ ID NO: 223530 - DNA, 897 bp, Artificial Sequence
  derived and/or modified sequence
atgatgaatgtgaacacaaggggtacttatctagcaagcaaggcctgcattccatacctgaagaagagcaaagtggctcatattcttaatatcagccctcctctgaacttaaacccagtgtggtttaagcaacactgcgcttataccattgctaagtatggtatgtctatgtacgtgctcgggatggcagaggaattcaaaggggaaatcgctgtgaacgcgctatggccaaaaacggccatacacacagccgcaatggacatgctgggcggacccggaatcgaatctcaatgcagaaaggtcgatattatcgcggacgctgcttatagcatctttcaaaagccaaaatcgttcactgggaactttgtgatcgatgagaatatactgaaagaggagggcattgaaaattttgatgtctatgccattaagcctgggcatccgctgcagcctgatttcttcttggacgaataccctgaagcggtttccaaaaaggtggagtctacaggcgcagtgcccgagttcaaggaggagaagttgcagttgcaaccaaagcctcggagtggcgcagttgaagagacatttcggatcgtgaaagatagtctgagcgatgacgtggttaaagcaacccaggccatttacttatttgaactgtccggagaagatggtgggacctggtttcttgacctcaagagcaaggggggaaatgtcggctacggagagccaagtgaccaggccgatgtggttatgtcaatgacaaccgacgatttcgtcaagatgtttagcggcaaactcaagcctaccatggccttcatgagcgggaagctgaaaatcaagggtaacatggcattagctattaaattagagaagctcatgaatcagatgaacgcgagactgtag

SEQ ID NO: 223531 - DNA, 1257 bp, Artificial Sequence
  derived and/or modified sequence
atgctgcctaatacaggtagactggccggatgcactgtctttatcacgggtgcttcccgaggcatcggaaaagctattgctctgaaggcagccaaagatggtgcgaacatcgtgatcgctgccaagactgctcagccacaccccaagctgctgggcactatctatacagccgcagaggaaattgaggctgtcgggggaaaggcactgccatgtatcgtcgatgtaagagacgaacagcaaatctccgcggctgttgagaaagccattaagaaatttggcggaattgacatcctcgtgaataatgcttccgcgatcagcctcaccaatacactggatactccgaccaaacgtctggacctaatgatgaatgtcaatacccggggtacttacctggcctccaaggcctgcatcccatacctgaagaagtcaaaggtcgcgcacattttgaatatcagtccaccactgaatctcaatcccgtgtggtttaagcagcactgtgcttatacaatcgctaagtacggaatgagcatgtatgtcctcgggatggccgaagaattcaagggcgagattgctgtgaacgctctgtggccgaagacagctattcataccgccgctatggacatgctgggcggaccgggtatagaatcacaatgtcgcaaggtcgatatcatagcagacgctgcctactctatctttcagaaaccaaaatccttcaccgggaactttgtaattgatgaaaatatcctcaaggaagaagggatcgaaaactttgatgtctatgccataaaacctggacatcccttgcagcccgacttttttttagacgaatacccagaagccgtgagcaagaaggtggaaagtacaggagcggtaccagaattcaaggaagaaaaactccagctgcagcccaaaccccgtagcggggctgtcgaggaaactttcagaattgtgaaagacagcctgtcagatgacgtggttaaggcaacccaggcaatctatcttttcgagctgagcggcgaagacggagggacctggttcctggacctcaaaagtaaggggggtaacgttggatacggagagccttccgaccaagccgacgtggtgatgagtatgaccaccgatgattttgtgaagatgttcagtggaaagctgaaacctacaatggctttcatgtctggcaaactgaagattaagggaaatatggccctggcaattaaattggagaaattaatgaatcagatgaatgccaggttgtag

SEQ ID NO: 223532 - DNA, 1260 bp, Artificial Sequence
  derived and/or modified sequence
agctctctgctcgccgccgccgctgtcgccgccacctcctctgatctacgaaagtcatgttacccaacaccggttgaagcagttggaggaaaggccttgccatgtattgttgatgtgagagatgaacagcagatcagtgctgcagtggagaaagccatcaagaaatttggaggaattgatattctggtaaataatgccagtgccattagtttgaccaatacattggacacacctaccaagagattggatctgatgatgaacgtgaacaccagaggcacctaccttgcatctaaagcatgtattccttatttgaaaaagagcaaagttgctcatatcctcaatatcagtccaccactgaacctaaatccagtttggttcaaacagcactgtgcttataccattgctaagtatggtatgtctatgtatgtgcttggaatggcagaagaatttaaaggtgaaattgcagtcaatgcattatggcctaaaacagccatacacactgctgctatggatatgctgggaggacctggtatcgaaagccagtgtagaaaagttgatatcattgcagatgcagcatattccattttccaaaagccaaaaagttttactggcaactttgtcattgatgaaaatatcttaaaagaagaaggaatagaaaattttgacgtttatgcaattaaaccaggtcatcctttgcaaccagatttcttcttagatgaatacccagaagcagttagcaagaaagtggaatcaactggtgctgttccagaattcaaagaagagaaactgcagctgcaaccaaaaccacgttctggagctgtggaagaaacatttagaattgttaaggactctctcagtgatgatgttgttaaagccactcaagcaatctatctgtttgaactctccggtgaagatggtggcacgtggtttcttgatctgaaaagcaagggtgggaatgtcggatatggagagccttctgatcaggcagatgtggtgatgagtatgactactgatgactttgtaaaaatgttttcagggaaactaaaaccaacaatggcattcatgtcagggaaattgaagattaaaggtaacatggccctagcaatcaaattggagaagctaatgaatcagatgaatgccagactgtgaaggaaaatataaaaaaaaagtcgactgctatgctcaaaaagtaaaaaaagctcaacagttaaaatctaatgtttgttttctttcctgttatattataaggatatgcacgtt

SEQ ID NO: 223533 - DNA, 897 bp, Artificial Sequence
  derived and/or modified sequence
atgatgaacgtgaacaccagaggcacctacctggccagcaaggcctgcatcccctacctgaagaagagcaaggtggcccacatcctgaacatcagcccccccctgaacctgaaccccgtgtggttcaagcagcactgcgcctacaccatcgccaagtacggcatgagcatgtacgtgctgggcatggccgaggagttcaagggcgagatcgccgtgaacgccctgtggcccaagaccgccatccacaccgccgccatggacatgctgggcggccccggcatcgagagccagtgcagaaaggtggacatcatcgccgacgccgcctacagcatcttccagaagcccaagagcttcaccggcaacttcgtgatcgacgagaacatcctgaaggaggagggcatcgagaacttcgacgtgtacgccatcaagcccggccaccccctgcagcccgacttcttcctggacgagtaccccgaggccgtgagcaagaaggtggagagcaccggcgccgtgcccgagttcaaggaggagaagctgcagctgcagcccaagcccagaagcggcgccgtggaggagaccttcagaatcgtgaaggacagcctgagcgacgacgtggtgaaggccacccaggccatctacctgttcgagctgagcggcgaggacggcggcacctggttcctggacctgaagagcaagggcggcaacgtgggctacggcgagcccagcgaccaggccgacgtggtgatgagcatgaccaccgacgacttcgtgaagatgttcagcggcaagctgaagcccaccatggccttcatgagcggcaagctgaagatcaagggcaacatggccctggccatcaagctggagaagctgatgaaccagatgaacgccagactgtag

SEQ ID NO: 223534 - protein, 221 aa, Artificial Sequence
  derived and/or modified sequence
MAGTGLLALRTLPGPSWVRGSGPSVLSRLQDAAVVRPGFLSTAEEETLSRELEPELRRRRYEYDHWDAAIHGFRETEKSRWSEASRAILQRVQAAAFGPGQTLLSSVHVLDLEARGYIKPHVDSIKFCGATIAGLSLLSPSVMRLVHTQEPGEWLELLLEPGSLYILRGSARYDFSHEILRDEESFFGERRIPRGRRISVICRSLPEGMGPGESGQPPPAC

SEQ ID NO: 223535 - DNA, 666 bp, Artificial Sequence
  derived and/or modified sequence
atggcggggacggggctccttgctctccgtacgctgcccggacctagttgggtcaggggcagcgggccttcagtattgtcaagactgcaggatgccgcggtcgtccgtcctggcttcctgtcaaccgccgaggaagaaaccctttctagagagttggaacccgagctgcgacgcagaaggtatgaatacgaccattgggatgctgctattcacggtttccgggagaccgagaagagtaggtggtcagaagcatctagggccattctgcagagagtgcaggcggctgcttttggccccggtcaaacgctgctttcatctgtccatgtactggaccttgaggccagaggctatatcaaaccccatgtcgatagtatcaaattttgtggcgccaccattgccgggttgagcctgctaagtccttcggtgatgaggctggtccacacacaggagccgggagagtggctcgagctgttgcttgagcccgggtctttgtatattttgagaggcagcgctcgctatgattttagccacgaaatcctccgagatgaggaatcattttttggcgagcggcgaattccccggggccggaggatatctgtcatttgcagaagcctccctgagggaatgggccccggtgagagcgggcaacctccccctgcctgctag

SEQ ID NO: 223536 - DNA, 666 bp, Artificial Sequence
  derived and/or modified sequence
atggccggcaccggcctgctggccctgcggaccctgcccggccccagctgggtgcggggcagcggccccagcgtgctgagccggctgcaggatgctgctgtggtgcggcccggcttcctgagcacagctgaggaggagaccctgagccgggagctggagcctgagctgcggaggagaagatatgaatatgaccactgggatgctgccatccacggcttccgggagacagagaagagccgctggagcgaggccagccgggccatcctgcagagggtgcaggccgccgcctttggacctggccagaccctgctgagctctgtgcacgtgctggacctggaggcccggggctacatcaagccccacgtggacagcatcaagttctgtggggccaccatcgccggcctgagcctgctgagccccagcgtgatgaggctggtgcacacccaggagcctggagagtggctggagctgctgctggagcccggcagcctgtacatcctgcggggcagcgcccgctatgacttcagccatgagatcctgagagatgaggagagcttctttggagagcggcgcatcccccggggccgccgcatcagcgtcatctgccgcagcctgcctgagggcatgggccctggagagagcggccagcccccaccagcctgctag

SEQ ID NO: 223537 - DNA, 1331 bp, Artificial Sequence
  derived and/or modified sequence
gactccataaccgtggccttggccccagtccccctgacttccggacttcagaccagatactgcccatatccccttatgaagtcttggccaggcaacccctagggtgtacgttttctaatgattaaagaggcggtgctaagctgcagacggacttgcgactcagccactggtgtaagtcaggcgggaggtggcgcccaataagctcaagagaggaggcgggttctggaaaaaggccaatagcctgtgaaggcgagtctagcagcaaccaatagctatgagcgagaggcgggactctgagggaagtcaatcgctgccgcaggtaccgccaatggcttttggcgggggcgttccccaaccctgccctctctcatgaccccgctccgggattatggccgggactgggctgctggcgctgcggacgctgccagggcccagctgggtgcgaggctcgggcccttccgtgctgagccgcctgcaggacgcggccgtggtgcggcctggcttcctgagcacggcagaggaggagacgctgagccgagaactggagcccgagctgcgccgccgccgctacgaatacgatcactgggacgcggccatccacggcttccgagagacagagaagtcgcgctggtcagaagccagccgggccatcctgcagcgcgtgcaggcggccgcctttggccccggccagaccctgctctcctccgtgcacgtgctggacctggaagcccgcggctacatcaagccccacgtggacagcatcaagttctgcggggccaccatcgccggcctgtctctcctgtctcccagcgttatgcggctggtgcacacccaggagccgggggagtggctggaactcttgctggagccgggctccctctacatccttaggggctcagcccgttatgacttctcccatgagatccttcgggatgaagagtccttctttggggaacgccggattccccggggccggcgcatctccgtgatctgccgctccctccctgagggcatggggccaggggagtctggacagccgcccccagcctgctgacccccagctttctacagacaccagatttgtgaataaagttggggaatggacagcctaactgggacattgcagtggctgcttgctggggccgggatttgcaggggaacccaggatggcactggcccatagggagctccaggtgtggctggctggacacatggtcaaagtcacaaggccgggagagtggtgtcctttattgcactcactgctggtcgccccagcccactcccctcctcgttgtctctgcatccaggtctccaataaataagtcagccga

SEQ ID NO: 223538 - DNA, 666 bp, Artificial Sequence
  derived and/or modified sequence
atggccggcaccggcctgctggccctgcggaccctgcccggcccctcctgggtgcgcgggagtggaccatctgttctgtccaggctccaggatgcagcggtggtccggccagggttcctgtctaccgctgaggaagaaaccctgtcccgggagcttgaaccggagctgcgccgtagaagatatgaatacgatcattgggatgcagcgattcatggcttccgcgaaaccgagaagtcccgctggagcgaggctagcagggcaattctccagagggttcaggcagcggcattcgggcccggtcaaacactcctgtcgtccgtccacgtccttgatctggaagcgcgcggctatattaagcctcacgtggactctatcaagttttgtggtgctaccattgccgggctctccttgctcagtccgtcagtaatgcggctcgttcatacccaggagcccggagaatggctggagctgctgctggaacccggaagtctctatattctgcgtgggtcggcccgctatgatttctcccacgagatcttacgagatgaagagtcctttttcggcgagcggcgcatccccaggggccgcaggattagtgtcatatgcaggagtttacccgaaggcatgggcccaggggaatcaggccagcctccacccgcctgctag

SEQ ID NO: 223539 - DNA, 666 bp, Artificial Sequence
  derived and/or modified sequence
atggctggcactggattgctcgcactgcgcactctgccaggtccatcttgggtgagagggagcggaccgtctgtattgtctcgtcttcaggacgctgccgtggttcgcccaggcttcctgtcgaccgccgaagaggaaaccttatcgcgcgaacttgaacctgagctccgcagacgaagatatgaatatgaccattgggacgccgcaatacatggctttagggaaacggaaaagtcccggtggagtgaggcctccagggctatactccagagagtgcaggctgccgctttcggccctggacagaccttgctctctagcgtgcatgtcctggatctagaggcaaggggatacataaaaccccacgtggatagtatcaaattctgcggagctaccatagcaggactgagtctgctctcacccagtgtgatgcgccttgtgcatacgcaggaacccggagagtggctggaattgctgttagaacctggctctttatatattctacgaggtagcgccaggtacgacttctcccacgaaatcctcagagacgaggagtccttctttggggagcgcaggattcccaggggccgtcgtatctcggtgatctgtaggagtctccctgaaggcatgggaccaggggaaagcggccagccgcctcctgcatgctag

SEQ ID NO: 223540 - DNA, 666 bp, Artificial Sequence
  derived and/or modified sequence
atggccggcaccggcctgctggccctgagaaccctgcccggccccagctgggtgagaggcagcggccccagcgtgctgagcagactgcaggacgccgccgtggtgagacccggcttcctgagcaccgccgaggaggagaccctgagcagagagctggagcccgagctgagaagaagaagatacgagtacgaccactgggacgccgccatccacggcttcagagagaccgagaagagcagatggagcgaggccagcagagccatcctgcagagagtgcaggccgccgccttcggccccggccagaccctgctgagcagcgtgcacgtgctggacctggaggccagaggctacatcaagccccacgtggacagcatcaagttctgcggcgccaccatcgccggcctgagcctgctgagccccagcgtgatgagactggtgcacacccaggagcccggcgagtggctggagctgctgctggagcccggcagcctgtacatcctgagaggcagcgccagatacgacttcagccacgagatcctgagagacgaggagagcttcttcggcgagagaagaatccccagaggcagaagaatcagcgtgatctgcagaagcctgcccgagggcatgggccccggcgagagcggccagcccccccccgcctgctag

SEQ ID NO: 223541 - protein, 110 aa, Artificial Sequence
  derived and/or modified sequence
MQAALEVTARYCGRELEQYGQCVAAKPESWQRDCHYLKMSIAQCTSSHPIIRQIRQACAQPFEAFEECLRQNEAAVGNCAEHMRRFLQCAEQVQPPRSPATVEAQPLPAS

SEQ ID NO: 223542 - DNA, 333 bp, Artificial Sequence
  derived and/or modified sequence
atgcaggccgccctggaggtgaccgccagatactgcggcagagagctggagcagtacggccagtgcgtggccgccaagcccgagagctggcagagagactgccactacctgaagatgagcatcgcccagtgcaccagcagccaccccatcatcagacagatcagacaggcctgcgcccagcccttcgaggccttcgaggagtgcctgagacagaacgaggccgccgtgggcaactgcgccgagcacatgagaagattcctgcagtgcgccgagcaggtgcagccccccagaagccccgccaccgtggaggcccagcccctgcccgccagctag

SEQ ID NO: 223543 - DNA, 691 bp, Artificial Sequence
  derived and/or modified sequence
gtggctactcagggcgccgccatgacgagccgggccggaagaagaggtagggcgccgccgtgacagattagtcctaaagggaacggggttgttagttcaattggctaccggaaaaaaccaggctgggctgggcgccgccatgacaaccgataccggaaaaggcgggtcgttccccccggacagccctacgccggcaaaggtctcgagatgcaggcggccctagaggtcaccgctcgctactgtggccgggagctggagcagtatggccagtgtgtggcggccaagccggaatcctggcagcgggactgtcactaccttaagatgagcattgcccagtgcacatcctcccacccaatcatccgccagatccgccaggcctgtgctcagccttttgaggccttcgaggagtgtcttcgacagaacgaggcagctgtgggcaactgtgcagagcatatgcgccgcttcctgcagtgcgctgagcaggtgcagccgccacgctcacctgcaactgtggaggcacagccacttcctgcctcctgaggactcctctgacggcaggaaaactggacatgaatgactgcccccacgcccctcccctgcagagtggccagatggagtcctgagccctggacatgggcccggctttcctggatatcaggacttccaataaataaagactctgtatactggg

SEQ ID NO: 223544 - DNA, 333 bp, Artificial Sequence
  derived and/or modified sequence
atgcaggctgctctggaagttacggcccggtactgcggacgcgagctcgaacaatacggccagtgcgtggctgccaagccggagagctggcagcgcgactgtcactatctcaagatgtctattgcccaatgtacaagttcccaccctatcatccggcagatcaggcaggcctgcgctcagcctttcgaggcattcgaggagtgtttaaggcagaacgaggccgcggtgggaaactgcgccgagcacatgcgacgatttttacaatgtgcagagcaggttcagccacctcggagcccagccacagtggaagctcagccactgcctgcctcctag

SEQ ID NO: 223545 - DNA, 333 bp, Artificial Sequence
  derived and/or modified sequence
atgcaggccgccctggaggtgacagcccgctactgcggccgggagctggagcagtatggccagtgtgtggccgccaagccagagagctggcagagggactgccactacctgaagatgagcatcgcccagtgcaccagcagccaccccatcatccggcagatccggcaggcctgtgcccagccctttgaggcctttgaagaatgtctgcggcagaatgaggccgctgtgggcaactgtgccgagcacatgaggcgcttcctgcagtgtgccgagcaggtgcagcccccaagaagccctgccaccgtggaggcccagcccctgcctgccagctag

SEQ ID NO: 223546 - DNA, 333 bp, Artificial Sequence
  derived and/or modified sequence
atgcaggccgccctggaggtgaccgcccggtactgcggccgggagctcgagcaatacgggcagtgtgttgctgccaagcctgagtcttggcagagagattgccattatctaaagatgtcaatcgctcagtgcacaagttcccaccccattatacggcaaatccggcaagcatgtgcccaaccctttgaggcctttgaggagtgtctgcggcagaacgaagcagcagtaggtaactgtgcagaacacatgcgaagattcctgcagtgcgcggagcaagtccagccccctagaagcccagctaccgtggaggctcaacccctgccagccagttag

SEQ ID NO: 223547 - DNA, 333 bp, Artificial Sequence
  derived and/or modified sequence
atgcaggccgctctggaggtgacagcaaggtactgtggccgtgaactcgagcagtacggtcaatgtgtggctgccaagccagaatcctggcagagagattgtcattatctcaaaatgagcattgcccaatgcactagctcccatccaattattcggcagatacgtcaagcatgcgcacagccttttgaggcttttgaagaatgtctgcgtcagaatgaagccgctgtggggaactgtgccgaacatatgcgccgatttctgcagtgcgccgagcaggtccagcctccgagatccccggctaccgtggaggcacagccactccctgcctcctag

SEQ ID NO: 223548 - protein, 421 aa, Artificial Sequence
  derived and/or modified sequence
MADISLDELIRKRGAAAKGRLNARPGVGGVRSRVGIQQGLLSQSTRTATFQQRFDARQKIGLSDARLKLGVKDAREKLLQKDARFRIKGKVQDAREMLNSRKQQTTVPQKPRQVADAREKISLKRSSPAAFINPPIGTVTPALKLTKTIQVPQQKAMAPLHPHPAGMRINVVNNHQAKQNLYDLDEDDDGIASVPTKQMKFAASGGFLHHMAGLSSSKLSMSKALPLTKVVQNDAYTAPALPSSIRTKALTNMSRTLVNKEEPPKELPAAEPVLSPLEGTKMTVNNLHPRVTEEDIVELFCVCGALKRARLVHPGVAEVVFVKKDDAITAYKKYNNRCLDGQPMKCNLHMNGNVITSDQPILLRLSDSPSMKKESELPRRVNSASSSNPPAEVDPDTILKALFKSSGASVTTQPTEFKIKL

SEQ ID NO: 223549 - protein, 185 aa, Artificial Sequence
  derived and/or modified sequence
MADISLDELIRKRGAAAKGRLNARPGVGGVRSRVGIQQGLLSQSTRTATFQQRFDARQKIGLSDARLKLGVKDAREKLLQKDARFRIKGKVQDAREMLNSRKQQTTVPQKPRQVADAREKISLKRSSPAAFINPPIGTVTPALKLTKTIQVGLRAVPLLCLVSGGAWVGSRSQASCPLPSGSRPH

SEQ ID NO: 223550 - protein, 184 aa, Artificial Sequence
  derived and/or modified sequence
MADISLDELIRKRGAAAKGRLNARPGVGGVRSRVGIQQGLLSQSTRTATFQQRFDARQKIGLSDARLKLGVKDAREKLLQKDARFRIKGKVQDAREMLNSRKQQTTVPQKPRQVADAREKISLKRSSPAAFINPPIGTVTPALKLTKTIQVPSFPCPRPSLSPKWFRMMHTQLLLSLPLFEQKP

SEQ ID NO: 223551 - DNA, 1266 bp, Artificial Sequence
  derived and/or modified sequence
atggcggacatctctctcgacgaactcatccgcaagcgaggcgcggccgcaaaggggcgtctgaacgcccgcccaggcgttggaggggtgaggtctcgtgtgggcattcaacaaggtcttctgtctcagtctacacgcaccgcaacctttcagcagagattcgacgcgaggcagaagatcgggctgtccgacgcccgcttaaaactgggagtgaaagacgcaagggaaaaactcctgcagaaggacgctaggtttcgtatcaaaggcaaagtgcaggacgcccgcgagatgctgaactcaaggaaacagcagacaaccgtcccacagaaaccacgccaggttgccgatgctagagagaaaatctcactgaaacgctcatcacctgcggctttcatcaatccacctattggaacggtgacccctgctctgaagctgaccaagaccatccaggtgccccaacaaaaagccatggcaccccttcaccctcaccccgctgggatgcggataaacgtggtaaataaccaccaggcgaaacagaacctctatgacctcgacgaagacgatgacggaatcgcctcagtgcctaccaaacagatgaagttcgcagcttctggaggattcctacaccatatggctggcctctcctcctcaaagctctctatgtcaaaagctctcccactaacgaaggtggtgcaaaatgatgcctacaccgcccctgcactgccctcgagcattcgcaccaaggctttaaccaatatgtctagaaccctcgtgaacaaagaggaacctcctaaggaattgcccgcagccgaaccagtactctcacctctagagggaacgaagatgacagtcaacaatctgcatccccgagttactgaagaggatattgtggagctgttttgtgtgtgcggtgcactgaagagggctcgactggtgcacccgggggtggctgaggtggtatttgtgaagaaagacgacgcaattacggcctacaagaaatacaataaccgttgcctggacggccaaccaatgaaatgcaacttacatatgaacggtaatgtgatcaccagcgaccagccaatcctcctgcgcctgagtgattccccttcaatgaagaaggagtcagagcttcctaggagggtgaacagtgcctcttcaagtaaccccccagcagaagtggatcccgacaccatattgaaggcgctattcaaaagcagcggagcctctgtcacaacgcagcctacagagttcaagataaaattgtag

SEQ ID NO: 223552 - DNA, 1266 bp, Artificial Sequence
  derived and/or modified sequence
atggctgacatcagcctggatgagctgatcaggaagagaggagctgctgccaagggccgcctgaatgcccggcctggggtgggcggcgtgcgcagccgggtgggcatccagcagggcctgctgagccagagcaccaggacagccaccttccagcagagatttgatgcccggcagaagattggcctgagtgatgcccggctgaagctgggcgtgaaggatgcccgggagaagctgctgcagaaggatgcccgcttccgcatcaagggcaaggtgcaggatgcccgggagatgctgaacagcaggaagcagcagaccaccgtgccccagaagccccggcaggtggctgatgcccgggagaagatcagcctgaagaggagcagccctgctgccttcatcaacccccccatcggcaccgtgaccccagccctgaagctgaccaagaccatccaggtgccccagcagaaggccatggcccccctgcacccccaccctgctggcatgaggatcaacgtggtgaacaaccaccaggccaagcagaacctgtatgacctggatgaagatgatgatggcatcgcctctgtgcccaccaagcagatgaagtttgctgccagcggcggcttcctgcaccacatggccggcctgagcagcagcaagctgtccatgagcaaggccctgcccctgaccaaggtggtgcagaatgatgcctacacagccccagccctgcccagcagcatccgcaccaaggccctgaccaacatgagcaggaccctggtgaacaaggaggagccccccaaggagctgcctgctgctgagcctgtgctgagccccctggagggcaccaagatgacagtgaacaacctgcacccccgggtgacagaggaggacatcgtggagctgttctgtgtgtgtggggccctgaagagggcccggctggtgcaccctggggtggccgaggtggtgtttgtgaagaaggatgatgccatcacagcctacaagaagtacaacaaccgctgcctggatggccagcccatgaagtgcaacctgcacatgaatggaaatgtcatcaccagtgaccagcccatcctgctgcggctgagtgacagccccagcatgaagaaggagagcgagctgcccaggagagtgaacagcgccagcagcagcaaccccccagctgaggtggaccctgacaccatcctgaaggccctcttcaagagcagcggggcctctgtgaccacccagcccacagagttcaagatcaagctgtag

SEQ ID NO: 223553 - DNA, 1266 bp, Artificial Sequence
  derived and/or modified sequence
atggccgacatcagcctggacgagctgatccggaagcggggcgccgccgccaagggcagactgaacgccagacccggagtgggtggagtgagatctagagtcgggatccagcaaggactgcttagccagtctacacgcactgcaacgttccagcagcgcttcgatgctaggcaaaagatcgggctttctgacgccagactcaagttgggggttaaagacgccagggagaagttactacagaaagatgcccgttttcggatcaagggcaaagttcaggacgccagggaaatgttaaatagcagaaaacagcaaacgaccgtgccccaaaaaccccgccaagtggccgacgcgcgcgaaaaaattagcctgaagagaagctcgcccgcggcttttataaacccccctatagggaccgtgactccagctctgaaacttacaaaaactattcaggtgcctcagcagaaggccatggcgcccctgcacccccaccctgcgggaatgagaattaacgtagtgaataatcatcaggctaagcagaacctctacgatctggacgaagacgatgacggaatagccagcgtccccactaagcagatgaagttcgccgcatctggcggctttctacatcatatggctggacttagtagctctaagctgagtatgtccaaggctctgccactgaccaaagtcgtgcagaacgatgcttataccgctccggcacttccaagcagtatcaggacgaaagcacttacaaacatgagcaggaccctggtgaacaaagaggagcccccaaaagaactgcccgccgcagaacccgtgctctcccctctagaggggactaagatgacggtcaacaaccttcacccccgggtaacagaggaggacatcgtcgagctgttctgtgtgtgcggagccctcaagagggcaagactggtgcatcccggcgtggccgaagtggtgttcgttaagaaggatgacgcaattaccgcgtacaaaaagtataacaatcgctgcttagacgggcagcccatgaagtgtaacttacatatgaacggcaacgtgatcaccagcgaccaacccatcttactccggttgagcgacagtccatcaatgaagaaggagtcagagctgccaaggcgtgttaactctgcttcctcctctaaccccccagcagaggtggaccccgacactatacttaaagcccttttcaagagctctggtgctagcgtgacaactcagcccaccgagtttaaaattaaactctag

SEQ ID NO: 223554 - DNA, 3441 bp, Artificial Sequence
  derived and/or modified sequence
gcgagagttggtccgcggacgccggaagtagttcgtcgctccctagcggccgaaggggcgggctcgcggggtctcgactgctttcggcttgctcggcggagcaagatggcggacatctccctggacgaactcatcaggaagcgcggggcggcggcgaaaggacggcttaatgccagaccgggagttggaggtgtccgatctcgagttgggatccagcaaggccttctcagccagtcaacacgcacagccaccttccagcagagatttgatgcccggcagaagattggcctctcagatgcccggctcaaactgggagtcaaggatgcccgggagaagcttttgcagaaagatgcccgatttcgaatcaaagggaaagtgcaggatgccagagagatgttgaactctcgcaagcagcagaccacggtgccccagaagccccgccaggttgctgatgcccgggagaagatcagcttgaagaggagttcccctgctgccttcataaacccacccattgggacagtgacccctgctctgaagctcaccaaaaccatccaggttccacagcagaaagccatggcaccacttcatccccatcctgccggaatgagaatcaatgttgtcaataaccaccaggccaaacagaatttatatgacctggatgaagatgatgatggtatagcttccgttcctactaaacagatgaagtttgcagcctcaggcggctttctccaccacatggctgggctaagcagttccaagctttccatgtccaaggccctccctctcaccaaagtggttcagaatgatgcatacacagctcctgctctcccttcctctattcgaacaaaagccttgaccaacatgtcccggacactggtgaacaaggaagaaccccccaaagagctgccagctgctgagcctgttctcagcccattggaaggcaccaagatgactgtgaataatctgcaccctcgagtcactgaggaggacattgttgagcttttctgtgtgtgtggggccctcaagcgagctcgactggtccatcctggggtagcggaggtggtgtttgtgaaaaaggacgatgccatcaccgcatataagaagtacaacaaccggtgtctggacgggcagccgatgaagtgcaaccttcacatgaatgggaatgttatcacctcagaccagcccatcctgctgcggctgagtgacagcccatcaatgaaaaaggagagcgagctgcctcgcagggtgaactctgcctcctcctccaacccccctgccgaagtggaccctgacaccatcctgaaggcactcttcaagtcctcaggggcctctgtgaccacgcagcccacagaattcaaaatcaagctttgagcaggggagtgaggcagccagaagtgggggcagaggagggtggctctgtttccccaaggcaaagcttatgaccaatgggccatcggactggagacccctgattgtgggaagggttgccagggataaagagcttcctcactggatgggacccgcctttctgtgttgtgttctgccctgtgctcttctctctacgttaacgtttcctgtagtatgtttcttcatctcatcgccaaggtaggcttgtgtttttcagtgtgtgcctccccgagcctcagccccaagctgatttcttatctggaaatggtacactgaattctctgggtggctttcttgtggccccatgggatgcagcgtgggggctgtctgaaggaccctgctttttccaggggccgaggggctgcctttcctttgtgtgtattaagcttttcaaacaatggaggggatggagagccctggtgtcctgacgggagccaggtcggcctgagagctgtgccgctcctctgtcttgtcagtggaggtgcctgggtggggagcaggtctcaggcctcttgtcctctccccagtggctccaggcctcactagtggcaagggcaggatgaggctgcaccgctgggaagagtctatctaagctcttggcttggagtcccgtgtcgtctccacccagaggaagttctccagagttcacctttcccttttccttgagttgtgctgaatgccccaccccagctctctttcccttctgggtgtctttgctgggagggggctgtgttgtgagccctcccggttctcacctcgcctggcacttaaccacaccctggttttgtgtagccgccagctctcttctggttgggcctttgaaaggctcagcctcccattgtgcagtgcttgggtttggagcttatttgaatggaagaggtcagtttgttcctggctctccatttctggcctcagttgtctacaggacagtggtcagggatgcctggaggcatatatccagctgccaccaaggggcactgtttgttcccacttatgtgagtgaccccatccatccatgaccagaggattattttcctgccttggcagaggaggaggagtcaagggagcagggcagctctaccaggcaaggtgtttccccagcataggcgcagacagttgggacgaaacttcagagcccaggcagtccctgaatgaccaggccagtgttgtcactgagtggtcccctgctggttgggagtgaagagaatccaggctggcagagctggagccagttggggagcacggttctgggagctctgcaaaatcagtagcaagtgctggaaaaggcacatgccgaagatactcaagagctcccaagatttgcttgaggctagcccagtgaaaaaaaccagagactcatgtttccaggggtcagtctgtcaggcaggaaggacccaggatttgaacccagcttcagtgtgcaggctctgaggctgcccaggacgggaaagtccaaggaaggggcctggtggtgctccacttgcagttctttaaagaatgctgctttttattctcctaaccctttcaagtgggtgcagacttctcgttagcagctggaagacattcctcccacacttttcccttcctggcccaagagagcatccagaaggcagtaggacctggtttttcaggtactgggagccgggggctcactgcttgcactgtgcttagggtagggatggtaaatatcctccctgcatggctttatcctccctctcatcccaaagcaggtatcttctggttgtcacagagtttcattgagtccagctgcagccacgtggccatctggagctggtgctataggtgaccatctggtacattgaggggacctgtttgcctcctccactctataagcagtcatcttgggagaccgggaggagaaggtggtgggctagtcctgtgtcctcctccacttcccatgcctctatgttacccatctgtgtctcctgtgcagaaggagaggaaggggcattaagagatgaagggtgattatgtattacttatccatttctgaataaacatttgttattccta

SEQ ID NO: 223555 - DNA, 1266 bp, Artificial Sequence
  derived and/or modified sequence
atggcggatatctctttggatgaacttattcggaaaagaggagcagcagcaaagggacgcttaaacgctaggccaggtgtggggggagtacgttctagggtggggattcagcagggtctcctgtcccagtctacccggacggccacattccagcagcggtttgacgccagacaaaaaatcggcctctccgatgctcgactgaagctcggagtcaaggacgcccgtgaaaagctcctgcagaaggacgcgaggttcagaatcaaggggaaagtgcaggacgctagagagatgttgaattcacgaaagcagcagacaacagtgccccaaaagcccagacaggtggctgacgcccgagagaaaatatctcttaagcgctcaagccctgcagcattcatcaatcctccaatcggcacagtgaccccggcactcaaactcacgaaaacaatccaggttccacagcagaaggccatggccccactgcacccacacccagccggaatgcgcattaacgtggtgaataatcaccaggcaaaacagaacttgtatgatctcgatgaggatgacgatggaatcgcatctgtgcccactaaacagatgaagttcgcagctagcggcggttttctacaccacatggctgggttgtcttcctctaaactttcaatgagcaaagcactgcccctgactaaggtggtgcagaacgatgcatatacagcccctgcactgccatccagcattagaacaaaagctcttaccaatatgtcccggactctcgtcaataaagaggaacccccaaaggaactgcccgcagctgagcccgtgctatcccctctagagggcactaagatgactgtcaataacttgcaccctcgcgtcactgaagaggatatcgtcgaactgttttgcgtgtgcggtgcactgaagcgggctagactggtgcaccccggagtggcagaggtggtgttcgtgaagaaagacgacgcaatcaccgcttataagaagtataacaacagatgtctggacggtcagcctatgaagtgcaacttacacatgaacggtaatgttatcacttctgatcagcccattctgcttcgcctgagcgactccccttccatgaagaaggagtctgaactgcccaggcgcgttaattccgccagcagcagcaaccccccagccgaggtggatccagataccatcttgaaagcactgtttaaatcaagcggcgcttccgtgacaacccagcctactgaattcaaaattaagctttag

SEQ ID NO: 223556 - DNA, 1266 bp, Artificial Sequence
  derived and/or modified sequence
atggccgacatcagcctggacgagctgatcagaaagagaggcgccgccgccaagggcagactgaacgccagacccggcgtgggcggcgtgagaagcagagtgggcatccagcagggcctgctgagccagagcaccagaaccgccaccttccagcagagattcgacgccagacagaagatcggcctgagcgacgccagactgaagctgggcgtgaaggacgccagagagaagctgctgcagaaggacgccagattcagaatcaagggcaaggtgcaggacgccagagagatgctgaacagcagaaagcagcagaccaccgtgccccagaagcccagacaggtggccgacgccagagagaagatcagcctgaagagaagcagccccgccgccttcatcaacccccccatcggcaccgtgacccccgccctgaagctgaccaagaccatccaggtgccccagcagaaggccatggcccccctgcacccccaccccgccggcatgagaatcaacgtggtgaacaaccaccaggccaagcagaacctgtacgacctggacgaggacgacgacggcatcgccagcgtgcccaccaagcagatgaagttcgccgccagcggcggcttcctgcaccacatggccggcctgagcagcagcaagctgagcatgagcaaggccctgcccctgaccaaggtggtgcagaacgacgcctacaccgcccccgccctgcccagcagcatcagaaccaaggccctgaccaacatgagcagaaccctggtgaacaaggaggagccccccaaggagctgcccgccgccgagcccgtgctgagccccctggagggcaccaagatgaccgtgaacaacctgcaccccagagtgaccgaggaggacatcgtggagctgttctgcgtgtgcggcgccctgaagagagccagactggtgcaccccggcgtggccgaggtggtgttcgtgaagaaggacgacgccatcaccgcctacaagaagtacaacaacagatgcctggacggccagcccatgaagtgcaacctgcacatgaacggcaacgtgatcaccagcgaccagcccatcctgctgagactgagcgacagccccagcatgaagaaggagagcgagctgcccagaagagtgaacagcgccagcagcagcaacccccccgccgaggtggaccccgacaccatcctgaaggccctgttcaagagcagcggcgccagcgtgaccacccagcccaccgagttcaagatcaagctgtag

SEQ ID NO: 223557 - protein, 698 aa, Artificial Sequence
  derived and/or modified sequence
MLPARLPFRLLSLFLRGSAPTAARHGLREPLLERRCAAASSFQHSSSLGRELPYDPVDTEGFGEGGDMQERFLFPEYILDPEPQPTREKQLQELQQQQEEEERQRQQRREERRQQNLRARSREHPVVGHPDPALPPSGVNCSGCGAELHCQDAGVPGYLPREKFLRTAEADGGLARTVCQRCWLLSHHRRALRLQVSREQYLELVSAALRRPGPSLVLYMVDLLDLPDALLPDLPALVGPKQLIVLGNKVDLLPQDAPGYRQRLRERLWEDCARAGLLLAPGHQGPQRPVKDEPQDGENPNPPNWSRTVVRDVRLISAKTGYGVEELISALQRSWRYRGDVYLVGATNAGKSTLFNTLLESDYCTAKGSEAIDRATISPWPGTTLNLLKFPICNPTPYRMFKRHQRLKKDSTQAEEDLSEQEQNQLNVLKKHGYVVGRVGRTFLYSEEQKDNIPFEFDADSLAFDMENDPVMGTHKSTKQVELTAQDVKDAHWFYDTPGITKENCILNLLTEKEVNIVLPTQSIVPRTFVLKPGMVLFLGAIGRIDFLQGNQSAWFTVVASNILPVHITSLDRADALYQKHAGHTLLQIPMGGKERMAGFPPLVAEDIMLKEGLGASEAVADIKFSSAGWVSVTPNFKDRLHLRGYTPEGTVLTVRPPLLPYIVNIKGQRIKKSVAYKTKKPPSLMYNVRKKKGKINV

SEQ ID NO: 223558 - DNA, 2097 bp, Artificial Sequence
  derived and/or modified sequence
atgctgcccgccagactgcccttcagactgctgagcctgttcctgagaggcagcgcccccaccgccgccagacacggcctgagagagcccctgctggagagaagatgcgccgccgccagcagcttccagcacagcagcagcctgggcagagagctgccctacgaccccgtggacaccgagggcttcggcgagggcggcgacatgcaggagagattcctgttccccgagtacatcctggaccccgagccccagcccaccagagagaagcagctgcaggagctgcagcagcagcaggaggaggaggagagacagagacagcagagaagagaggagagaagacagcagaacctgagagccagaagcagagagcaccccgtggtgggccaccccgaccccgccctgccccccagcggcgtgaactgcagcggctgcggcgccgagctgcactgccaggacgccggcgtgcccggctacctgcccagagagaagttcctgagaaccgccgaggccgacggcggcctggccagaaccgtgtgccagagatgctggctgctgagccaccacagaagagccctgagactgcaggtgagcagagagcagtacctggagctggtgagcgccgccctgagaagacccggccccagcctggtgctgtacatggtggacctgctggacctgcccgacgccctgctgcccgacctgcccgccctggtgggccccaagcagctgatcgtgctgggcaacaaggtggacctgctgccccaggacgcccccggctacagacagagactgagagagagactgtgggaggactgcgccagagccggcctgctgctggcccccggccaccagggcccccagagacccgtgaaggacgagccccaggacggcgagaaccccaacccccccaactggagcagaaccgtggtgagagacgtgagactgatcagcgccaagaccggctacggcgtggaggagctgatcagcgccctgcagagaagctggagatacagaggcgacgtgtacctggtgggcgccaccaacgccggcaagagcaccctgttcaacaccctgctggagagcgactactgcaccgccaagggcagcgaggccatcgacagagccaccatcagcccctggcccggcaccaccctgaacctgctgaagttccccatctgcaaccccaccccctacagaatgttcaagagacaccagagactgaagaaggacagcacccaggccgaggaggacctgagcgagcaggagcagaaccagctgaacgtgctgaagaagcacggctacgtggtgggcagagtgggcagaaccttcctgtacagcgaggagcagaaggacaacatccccttcgagttcgacgccgacagcctggccttcgacatggagaacgaccccgtgatgggcacccacaagagcaccaagcaggtggagctgaccgcccaggacgtgaaggacgcccactggttctacgacacccccggcatcaccaaggagaactgcatcctgaacctgctgaccgagaaggaggtgaacatcgtgctgcccacccagagcatcgtgcccagaaccttcgtgctgaagcccggcatggtgctgttcctgggcgccatcggcagaatcgacttcctgcagggcaaccagagcgcctggttcaccgtggtggccagcaacatcctgcccgtgcacatcaccagcctggacagagccgacgccctgtaccagaagcacgccggccacaccctgctgcagatccccatgggcggcaaggagagaatggccggcttcccccccctggtggccgaggacatcatgctgaaggagggcctgggcgccagcgaggccgtggccgacatcaagttcagcagcgccggctgggtgagcgtgacccccaacttcaaggacagactgcacctgagaggctacacccccgagggcaccgtgctgaccgtgagaccccccctgctgccctacatcgtgaacatcaagggccagagaatcaagaagagcgtggcctacaagaccaagaagccccccagcctgatgtacaacgtgagaaagaagaagggcaagatcaacgtgtag

SEQ ID NO: 223559 - DNA, 2097 bp, Artificial Sequence
  derived and/or modified sequence
atgctccccgcaagactgcccttccgactcctgtctctattcctgaggggcagtgcccccactgccgcacgacatggtctcagggaacccttactggagcggaggtgtgctgcagccagtagctttcaacattcttcctccctgggcagggaactaccctatgacccagttgacacggagggattcggggaagggggggatatgcaggagcggtttctcttcccagagtacatacttgaccccgagccacagcctacaagggaaaagcagctgcaagagctgcagcaacaacaggaggaagaggaacgacaacgccagcaacgccgtgaggagcggcgccagcagaacctgcgggcccggtctagagagcacccggttgtagggcacccggatcccgctctcccaccgtctggggttaactgtagtggttgtggtgccgagctccattgccaggacgcaggcgttcctggctacctgccccgagagaagtttctccggactgcggaagccgacggtgggctcgctcggaccgtgtgccagcgatgttggctattgtcacatcacagacgggccttgagactgcaagttagtcgggagcaatatttggagctcgtgtcagctgccctgaggagaccagggccctccctggtgctttacatggttgatctgcttgacttaccagacgcgctgttacctgatttgccagcgcttgtgggtcctaagcaactgatcgtccttggaaataaggtggatctgctgccgcaggatgcccctgggtacaggcagagactgcgcgagcgactctgggaagattgtgccagggctggcttattacttgcccctggacaccagggtccccaacgaccagtgaaggacgaacctcaggacggcgagaaccctaatccacctaactggtctcgaaccgtagtccgcgacgtgcggctgatcagtgccaaaacggggtatggtgttgaagaactgatcagcgcattacagcgatcatggcgctatcggggggatgtttacctggtcggcgctactaatgccggaaagagtactctgttcaacaccttgctcgagagtgattactgcacagccaagggttccgaagctatcgatcgggcaacaatatccccctggccaggtacaacgcttaatctcctaaagtttcccatctgtaatcccacaccttacagaatgtttaaacgccaccaacggctaaaaaaggattcaacccaggcagaggaggacctgagcgagcaggaacagaatcagctcaacgtgcttaaaaagcacggctacgtcgttggaagggtcggccggacattcctttacagcgaagagcaaaaagataacataccgttcgaatttgacgcggactcgttagcattcgatatggagaacgatcccgtgatgggcacccataaatctacaaagcaggtcgagctcacagcacaggatgtgaaagacgcacactggttctacgacactcccggaatcacaaaagagaattgtatcttgaatctgctgaccgagaaggaggtgaacatagtactccctacacagtctatagttcctcgcaccttcgtgttgaaaccgggtatggtgctgttcctaggcgccatcggtaggattgactttctacaaggcaaccagtctgcatggtttaccgtagttgcctctaatatcctgcccgtgcatataacgagcctggacagagcagatgctctgtaccagaagcatgcaggccatacgctgctgcagattcctatgggggggaaggaacggatggcaggctttcctcctttggtcgccgaggacattatgctgaaagagggactgggagccagtgaagcggtggccgatataaagttcagttccgccgggtgggtaagtgtcactccaaatttcaaagacagattacacctgcgcggctataccccagaaggaaccgttctcaccgtgagaccaccacttcttccttatattgtgaacatcaagggtcagcgaataaagaagtctgtggcttataaaacaaaaaagccccccagcttgatgtataacgtgagaaaaaaaaagggcaagatcaacgtgtag

SEQ ID NO: 223560 - DNA, 2097 bp, Artificial Sequence
  derived and/or modified sequence
atgctgcctgcccggctgcccttccggctgctgagcctcttcctgcggggcagcgcccccacagctgcccggcacggcctgcgggagcccctgctggagcggcgctgtgccgccgccagcagcttccagcacagcagcagcctgggccgggagctgccctatgaccctgtggacacagagggctttggagagggcggggacatgcaggagcgcttcctgtttcctgagtacatcctggaccctgagccccagcccacccgggagaagcagctgcaggagctgcagcagcagcaggaggaggaggagcggcagaggcagcagaggcgggaggagcggcggcagcagaacctgcgggcccggagccgggagcaccctgtggtgggccacccagaccctgccctgcccccatctggagtgaactgcagcggctgtggggctgagctgcactgccaggatgctggggtgcccggctacctgccccgggagaagttcctgaggacagctgaggctgatggcggcctggccaggacagtgtgccagcgctgctggctgctgagccaccacagaagagccctgcggctgcaggtgtcccgggagcagtacctggagctggtgtctgctgccctgcggcggcccggccccagcctggtgctgtacatggtggacctgctggacctgcctgatgccctgctgcctgacctgcctgccctggtgggccccaagcagctgattgtgctgggcaacaaggtggacctgctgccccaggatgcccctggctaccggcagaggctgcgggagcggctgtgggaggactgtgcccgggccggcctgctgctggcccctggccaccagggcccccagaggcctgtgaaggatgagccccaggatggagagaaccccaacccccccaactggagcaggacagtggtgagagatgtgcggctcatcagcgccaagacaggctacggcgtggaggagctgatcagcgccctgcagaggtcctggagatacagaggagatgtgtacctggtgggcgccaccaatgccggcaagagcaccctcttcaacaccctgctggagagtgactactgcacagccaagggcagcgaggccatcgaccgggccaccatcagcccctggccaggcaccaccctgaacctgctgaagttccccatctgcaaccccaccccctacaggatgttcaagaggcaccagaggctgaagaaggacagcacccaggccgaggaggacctgtctgagcaggagcagaaccagctgaatgtgctgaagaagcacggctacgtggtgggccgggtgggccgcaccttcctgtacagcgaggagcagaaggacaacatcccctttgaatttgatgctgacagcctggcctttgacatggagaatgaccctgtgatgggcacccacaagagcaccaagcaggtggagctgacagcccaggatgtgaaggatgcccactggttctatgacaccccaggcatcaccaaggagaactgcatcctgaacctgctgacagagaaggaggtgaacatcgtgctgcccacccagagcatcgtgcccaggacctttgtgctgaagccaggcatggtgctcttcctgggcgccatcggcagaattgacttcctgcagggcaaccagagcgcctggttcaccgtggtggccagcaacatcctgcctgtgcacatcaccagcctggacagagcagatgccctgtaccagaagcacgccggccacaccctgctgcagatccccatgggcggcaaggagaggatggccggcttcccccccctggtggccgaggacatcatgctgaaggagggcctgggcgccagcgaggccgtggccgacatcaagttcagcagcgctggctgggtgtctgtgacccccaacttcaaggaccggctgcacctgcggggctacaccccagagggcaccgtgctgactgtgcggccccccctgctgccctacatcgtgaacatcaagggccagaggatcaagaagtctgtggcctacaagaccaagaagccacccagcctgatgtacaacgtgaggaagaagaagggcaagatcaacgtgtag

SEQ ID NO: 223561 - DNA, 3415 bp, Artificial Sequence
  derived and/or modified sequence
aggatctgcgcctgcgcaaattgtaggtcaagcttgggccggggttagggttgcacacgcgtaaattgtgggccgccgctgccgggctgattgagaggacagctcccgcaatctgcggtcgtatccgttccgtcaatgttttatttctgcttgtttttcaatgttgttgcacaaataacgacacctgaaaacaaaaccaggtatacttattattaaaaagtgttcgtcctgtgaatccgcaacattgggatgctcaatttatttgcctttataaggaccaaaacacgaagctattttttatttttatttatttattattttttgaaatggagtctcgctctgtcgcccaggctggagtgcagtggagcgatctcggctcactgcaacctccgtctcccgggttcaagcgattctcctgcctcggcctcccaaatagctgggattacaggcaagggtcaccacgcccgggtaatttttgtatttttagtagagacggggtttcaccacgttggccaggctggtctcgaactgctgacctcaggtgatccacccgcctcggcctcccaaagtgctgggattacaggcgtgagccacgcgcccggccggaagctcctttctgtttttgttttgttttgtttttttgagacaggctcgctctgtcgcccaggctggagtgcagtggcgcgatctcggctcactgcaacctccgcctcccgcgttcaagccattctcctgcctcagcctcccgagtagctgggactacaggcgcccgccaccacgcctggctaattttttgtatttttagcagagatgggggtttcaccgtgtaagccaggatggtctcgatctcctgacctcatgatccgcccgcctcggcctcccaaattgctgggattacaggcgtgagccaccgcgcccgaccccggaagctcctttttaagtgtgatttattaagggcggcttgtgctagcagtgaggcgttaagcctgaaagtgaaaaaacccaaaacactcactgctcttttctgcccacctagctcaatcctccagtgcctttgccatagctttaagtaggttctcagtctcagagcttaaatcgcgagaactgacgggattagacgcaaaaccaaccaggacagctcccaagtacccacgcgctttcgtctcgggtcaaatgcgcgcctcggaccctagtgcgcgtgcgcgctggtggctccgcccctttggagctacttcctcatgctgcccgctcgcctaccgttcaggctgctgagccttttccttcgtggatccgctcccacggcagcgcgccatggcctccgggagccgctcctggagaggaggtgcgctgccgcctcctccttccagcactcatcgagtctgggacgcgagcttccttatgaccccgtggacacggagggctttggagaaggtggtgacatgcaggagcgttttctgttcccggagtacatcctggatccggagccgcaacccacccgcgaaaagcagctgcaggagctccagcaacagcaggaggaggaggagcgacagaggcagcagcggcgggaggagcggcgacagcaaaacctacgggccaggtcccgggagcacccggtcgtggggcacccggacccggcattgccgcccagcggcgtgaactgctcgggctgtggggcagagctgcactgccaggacgccggagtgcccggctacctgccccgagagaagttcctccgcacggcggaggcagacggcgggctggcacggaccgtgtgccagcgctgctggctgctgtcgcaccaccggcgcgctctacgcctgcaggtgagccgcgagcagtacctggagctggtgagcgccgcgttgcggcggcccggcccctccctggtgctctacatggtggacctgctggacctgcccgacgccctgctgcccgacttgcccgcgctggtgggccccaagcagctgatcgtgctgggaaacaaagtggacctcctgccccaggatgctcctggctaccggcagaggctgcgggagcgactgtgggaggactgtgcccgcgccgggctcctgctggcccctggccaccaagggccacagcgccccgtcaaggacgagccacaggacggggagaatccgaatccgccgaactggtcccgcacagtggtcagggacgtgcggctgatcagcgccaagaccggctatggagtggaagagttgatctctgcccttcagcgctcctggcgctaccgtggggacgtctacttagtgggcgccaccaacgccggcaaatccactctctttaacacgctcctggagtccgattactgcactgccaagggctccgaggccatcgacagagccaccatctccccttggccaggtactacattaaaccttctgaagtttcctatttgcaacccaactccttacagaatgtttaaaaggcatcaaagacttaaaaaagattcaactcaagctgaagaagatcttagtgagcaagaacaaaatcagcttaatgtcctcaaaaagcatggttatgtcgtaggaagagttggaaggacattcttgtattcagaagaacagaaggataacattccctttgagtttgatgctgattcacttgcctttgacatggaaaatgaccctgttatgggtacacacaaatccaccaaacaagtagaattgactgcacaagatgtgaaagatgcccactggttttatgacacccctggaattacaaaagaaaattgtattttaaatcttctaacagaaaaagaagtaaatattgttttgccaacacagtccattgttccaagaacttttgtgcttaaaccaggaatggttctgtttttgggtgctataggccgcatagatttcctgcagggaaatcagtcagcttggtttacagtcgtggcttccaacatcctccctgtgcatatcacctccttggacagggcagacgctctgtatcagaagcatgcaggtcatacgttactccagattccaatgggtggaaaagaacgaatggcaggatttcctcctcttgttgctgaagacattatgttaaaagaaggactgggggcatctgaagcagtggccgacatcaagttttcctctgcaggttgggtttcagtaacacctaattttaaggacagactgcatctccgaggctatacacctgaaggaacagttttgaccgtccggccccctctcttgccatatattgttaacatcaaaggacagcgcatcaagaaaagtgtggcctataaaaccaagaagcctccttcccttatgtacaacgtgaggaagaagaaaggaaagataaatgtatgagaccgaccttgttcactccagatattaactgtattgaacacaacaaaatacattgaatttgtattaaacatataacgcat

SEQ ID NO: 223562 - DNA, 2097 bp, Artificial Sequence
  derived and/or modified sequence
atgctgcccgcccggctgcccttccggctgctgagcctgttcctgcgcggctccgcccccaccgccgcccgccacggcctgcgggagcccctgctagagcgaagatgtgctgctgcctctagcttccagcattcgtccagcctcggacgagagctgccttacgatcctgtagacaccgagggcttcggtgaaggcggagacatgcaggaacgttttctatttcccgagtacatcctcgaccctgaacctcagcccactcgtgagaaacaactgcaagaacttcagcaacagcaggaggaggaggaacggcagcgacaacaaagaagggaagaaagaaggcagcagaatctccgtgctaggtcacgggagcaccccgtagtaggccatcctgaccccgcactgcctcccagcggcgtcaactgttctggctgtggggcggaactccactgccaggatgccggagtcccgggttatctgccaagagaaaagttcttaagaacagctgaggcggatggcggtctggccaggaccgtctgtcagcgctgttggttgctgtctcaccaccgtagagctctgcgcttacaggtctcacgggagcagtatttggaattagtgtctgccgcactgcggcggccagggcctagtctcgtgttgtacatggtggaccttctggatctgcccgacgccttgctcccagatctgccggctctggttggccccaaacaactgattgtgctgggcaataaggtagatctgctcccccaggatgcccctggctaccggcagcggctcagggagagactgtgggaagattgcgcgcgagccggcctgctactggcccctgggcaccaaggcccccagcggcctgtcaaagatgagccccaggacggggagaacccaaatcctccaaactggtcacgcacggtggtgcgcgacgttaggcttatttccgccaagactggatatggagtggaagaacttatctccgcattgcagcggagctggcggtataggggcgacgtctatttggtgggagctaccaacgccggcaagtctactctctttaatacattactcgaaagcgactattgcaccgctaaagggtccgaggccatcgatcgggctaccatcagtccatggcccggaacgaccctgaacctcctcaaattcccaatctgcaaccccactccctaccggatgttcaaaaggcaccaaagattaaaaaaggattcgacccaggctgaggaggacttgtccgagcaggaacaaaatcaactgaacgtgttaaagaagcatggctacgtggttggccgcgtgggaaggactttcctctatagtgaagagcagaaggacaacattccattcgaatttgatgcagacagcctggcctttgacatggaaaacgaccctgtgatgggaacccataagtccacgaaacaggtagagcttaccgctcaggatgtgaaggatgcacactggttttatgacacacccggcattaccaaagagaattgcatcttgaacctgctgaccgagaaggaagtgaacatcgtcctgcctacccagtcgatagtgccaaggaccttcgtgctcaaacctgggatggtgctcttccttggcgccataggacgcatcgattttctccagggaaatcaaagcgcttggttcaccgtggtagcctcaaacatactgcccgtccacatcacatcactggatagggctgatgccctgtaccagaagcatgccggccatactttacttcagatacccatggggggcaaagaacgaatggcaggttttcccccgctggtggcagaggatatcatgctcaaggaagggctgggggcatcagaggccgtggctgatatcaagttttcgtctgccggatgggtatctgtgactcctaactttaaagatagattgcacttgcgcgggtataccccagaaggtaccgtgcttacggtcaggccgccgctgctcccctacattgtgaatattaagggacagcggatcaagaaaagcgtcgcatacaaaacgaaaaagccgccttccctgatgtacaacgtcagaaagaagaaagggaaaataaacgtatag

SEQ ID NO: 223563 - DNA, 2097 bp, Artificial Sequence
  derived and/or modified sequence
atgctgccggcacgtctgccattccggctgttgtccctgttcctccgtggtagcgctccgaccgccgctagacacggcttacgggagcccctgctggagcggagatgcgcagccgcaagctcattccagcattccagttcgttgggccgagaactgccctacgacccagtcgacacagaggggttcggggagggcggtgatatgcaagagagattccttttccccgagtatattcttgaccctgaacctcaacctacccgcgaaaagcagctccaagagctgcagcagcaacaagaggaggaggaacggcaacgtcagcagcgtcgagaagaaaggagacaacagaatttacgggcaagatcacgggaacaccccgtcgtgggacaccccgacccagccttaccaccttccggcgtgaactgctcaggctgcggcgctgaactgcactgccaagatgcaggagtccccggatacctgccaagagaaaagtttcttcggacagcagaggcagatgggggactcgcacgcacagtctgtcagcgatgttggctactgtcccaccatagacgcgcactacgccttcaagtgagtagggagcagtacctcgaactggtgagcgccgcactgagaagacctgggcctagtctggtcttgtatatggtagatctactggacctcccagatgccctccttccagacttgcctgcactggtgggaccaaagcaactgatcgtattggggaataaggttgacctcctgcctcaggatgcccctggatatcgtcagcgcctacgcgagagactgtgggaggattgcgccagagccggactcttgctcgctcccggtcaccaggggcctcagcgtcctgttaaggatgagccccaggatggcgagaatccaaacccccctaattggtctagaacagtcgtgcgggatgtcagattaatttccgccaaaacggggtacggtgtagaggagcttatttccgctctgcagcgctcctggcgctataggggggacgtgtacctggttggggcaaccaatgctggcaaaagcactctcttcaacacccttctggagtccgattattgcaccgctaaaggctctgaagccatcgaccgggctacaatctctccctggcctggtactaccctgaacttactaaaatttcctatttgcaacccgacaccctaccggatgttcaagcggcatcaaaggcttaaaaaagactctactcaggccgaagaggacctctctgagcaggagcagaaccagcttaatgtattgaagaaacacggatacgtcgtcggacgggtaggacgcacattcttgtacagcgaggaacagaaggataacatcccttttgaatttgacgcagacagcctcgccttcgatatggagaatgatcctgtaatgggtacccacaagagcacaaagcaggtggaacttaccgcccaggacgtgaaggacgcccattggttctacgatactcctggtataacgaaggagaactgcatcctgaatttgctcacagaaaaggaggtaaatattgtccttccgacccagagcatagttccccgtacatttgtcctcaaacccggaatggtgctgtttctcggcgctatcggcagaatcgacttcctgcaggggaatcaatctgcgtggtttaccgtcgtggcaagtaatatcttgcctgttcacattacaagcttggatcgagccgacgcgctgtatcagaaacatgcagggcacaccctccttcagatccccatgggtggcaaggagcgaatggctgggtttcctccactagttgcagaggacatcatgctcaaggagggtctgggtgccagcgaggccgtcgcagatattaagttctcatccgctgggtgggtgtctgttacacccaactttaaggatagattgcatctccgcggttatacacccgaagggaccgtgctgaccgtacgtccacccctgttgccatacattgtcaacatcaaaggacagcgcatcaagaaatcagttgcctacaaaacgaagaaacccccatctctgatgtacaacgttaggaagaaaaaaggtaaaatcaacgtgtag

SEQ ID NO: 223564 - protein, 327 aa, Artificial Sequence
  derived and/or modified sequence
MAAPGSCALWSYCGRGWSRAMRGCQLLGLRSSWPGDLLSARLLSQEKRAAETHFGFETVSEEEKGGKVYQVFESVAKKYDVMNDMMSLGIHRVWKDLLLWKMHPLPGTQLLDVAGGTGDIAFRFLNYVQSQHQRKQKRQLRAQQNLSWEEIAKEYQNEEDSLGGSRVVVCDINKEMLKVGKQKALAQGYRAGLAWVLGDAEELPFDDDKFDIYTIAFGIRNVTHIDQALQEAHRVLKPGGRFLCLEFSQVNNPLISRLYDLYSFQVIPVLGEVIAGDWKSYQYLVESIRRFPSQEEFKDMIEDAGFHKVTYESLTSGIVAIHSGFKL

SEQ ID NO: 223565 - protein, 246 aa, Artificial Sequence
  derived and/or modified sequence
MAAPGSCALWSYCGRGWSRAMRGCQLLGLRSSWPGDLLSARLLSQEKRAAETHFGFETVSEEEKGGKVYQVFESVAKKYDVMNDMMSLGIHRVWKDLLLWKMHPLPGTQLLDVAGGTGDINKEMLKVGKQKALAQGHDRRCRLSQGDLRKSNIRHCGHSFWLQTLIPFLSWSMNQSYPVESLELKDNLANETAAEHLLLRIRALDSCLNRTVSKWKNKFLSLFYSFLWSCFSPSPRGIWSVSLLNC

SEQ ID NO: 223566 - DNA, 1535 bp, Artificial Sequence
  derived and/or modified sequence
aacaaggcgtactctctggccgttgtcactcgactaccaagatggcggcccccgggagctgtgctctatggagctattgcggccgtgggtggtcgcgggcgatgcggggctgccagctcctcgggcttcgtagctcttggcccggggacctactaagtgctcggctcttgtcccaagagaagcgggcagcggaaacgcactttgggtttgagactgtgtcggaagaggagaaggggggcaaagtctatcaggtgtttgaaagtgtggctaagaagtatgatgtgatgaatgatatgatgagtcttggtatccatcgtgtttggaaggatttgctgctctggaagatgcacccgcttcctgggacccagctgcttgatgttgctggaggcacaggtgacattgcattccggttccttaattatgttcagtcccagcatcagagaaaacagaagaggcagttaagggcccaacaaaatttatcctgggaagaaattgccaaagagtaccagaatgaagaagattccttgggcgggtctcgtgtcgtggtgtgtgacatcaacaaggagatgctaaaggttggaaagcagaaagccttggctcaaggatacagagctggacttgcatgggtattaggagatgctgaagaactgccctttgatgatgacaagtttgatatttacaccattgcctttgggatccggaatgtcacacacattgatcaggcactccaggaagctcatcgggtgctgaaaccaggaggacggtttctctgtctggaatttagccaagtgaacaatcccctcatatccaggctttatgatctatatagcttccaggtcatccctgtcctgggagaggtcatcgctggagactggaagtcctatcagtaccttgtagagagtatccgaaggtttccgtctcaggaagagttcaaggacatgatagaagatgcaggctttcacaaggtgacttacgaaagtctaacatcaggcattgtggccattcattctggcttcaaactttaattcctttcctatcatggagcatgaaccagtcatatcctgttgaaagcctggaactgaaggataatctggcaaatgagacagcagcagagcatctcctcttaaggatacgtgccttggactcatgtttgaatcgaacagtctcaaagtggaagaacaaattcttgtcacttttttacagctttctttggagctgcttcagtccatctcccagaggcatttggtctgtatctttgctcaactgctaatttctcttggctgtagggtgtgtggttaaggtacaaccacccctaaagctcagttttgaagtgagtgtatttatagcttctctgctggtgctgccttctagagggatgatagatcatttgaacccaatgacaatttttaaccagaaaatttaattgtacctgaatcaacctttcagcctaggacgaagtctaggcccaagtcagagtattaatgatcatgagaattgtgtgctgaaccagtaaacgagtttaccttttgatggta

SEQ ID NO: 223567 - DNA, 750 bp, Artificial Sequence
  derived and/or modified sequence
actaccaagatggcggcccccgggagctgtgctctatggagctattgcggccgtgggtggtcgcgggcgatgcggggctgccagctcctcgggcttcgtagctcttggcccggggacctactaagtgctcggctcttgtcccaagagaagcgggcagcggaaacgcactttgggtttgagactgtgtcggaagaggagaaggggggcaaagtctatcaggtgtttgaaagtgtggctaagaagtatgatgtgatgaatgatatgatgagtcttggtatccatcgtgtttggaaggatttgctgctctggaagatgcacccgcttcctgggacccagctgcttgatgttgctggaggcacaggtgacatcaacaaggagatgctaaaggttggaaagcagaaagccttggctcaaggacatgatagaagatgcaggctttcacaaggtgacttacgaaagtctaacatcaggcattgtggccattcattctggcttcaaactttaattcctttcctatcatggagcatgaaccagtcatatcctgttgaaagcctggaactgaaggataatctggcaaatgagacagcagcagagcatctcctcttaaggatacgtgccttggactcatgtttgaatcgaacagtctcaaagtggaagaacaaattcttgtcacttttttacagctttctttggagctgcttcagtccatctcccagaggcatttggtctgtatctttgctcaactgctaa

SEQ ID NO: 223568 - DNA, 984 bp, Artificial Sequence
  derived and/or modified sequence
atggccgcccccggcagctgcgccctgtggagctactgcggcagaggctggagcagagccatgagaggctgccagctgctgggcctgagaagcagctggcccggcgacctgctgagcgccagactgctgagccaggagaagagagccgccgagacccacttcggcttcgagaccgtgagcgaggaggagaagggcggcaaggtgtaccaggtgttcgagagcgtggccaagaagtacgacgtgatgaacgacatgatgagcctgggcatccacagagtgtggaaggacctgctgctgtggaagatgcaccccctgcccggcacccagctgctggacgtggccggcggcaccggcgacatcgccttcagattcctgaactacgtgcagagccagcaccagagaaagcagaagagacagctgagagcccagcagaacctgagctgggaggagatcgccaaggagtaccagaacgaggaggacagcctgggcggcagcagagtggtggtgtgcgacatcaacaaggagatgctgaaggtgggcaagcagaaggccctggcccagggctacagagccggcctggcctgggtgctgggcgacgccgaggagctgcccttcgacgacgacaagttcgacatctacaccatcgccttcggcatcagaaacgtgacccacatcgaccaggccctgcaggaggcccacagagtgctgaagcccggcggcagattcctgtgcctggagttcagccaggtgaacaaccccctgatcagcagactgtacgacctgtacagcttccaggtgatccccgtgctgggcgaggtgatcgccggcgactggaagagctaccagtacctggtggagagcatcagaagattccccagccaggaggagttcaaggacatgatcgaggacgccggcttccacaaggtgacctacgagagcctgaccagcggcatcgtggccatccacagcggcttcaagctgtag

SEQ ID NO: 223569 - DNA, 741 bp, Artificial Sequence
  derived and/or modified sequence
atggccgcccccggcagctgcgccctgtggagctactgcggcagaggctggagcagagccatgagaggctgccagctgctgggcctgagaagcagctggcccggcgacctgctgagcgccagactgctgagccaggagaagagagccgccgagacccacttcggcttcgagaccgtgagcgaggaggagaagggcggcaaggtgtaccaggtgttcgagagcgtggccaagaagtacgacgtgatgaacgacatgatgagcctgggcatccacagagtgtggaaggacctgctgctgtggaagatgcaccccctgcccggcacccagctgctggacgtggccggcggcaccggcgacatcaacaaggagatgctgaaggtgggcaagcagaaggccctggcccagggccacgacagaagatgcagactgagccagggcgacctgagaaagagcaacatcagacactgcggccacagcttctggctgcagaccctgatccccttcctgagctggagcatgaaccagagctaccccgtggagagcctggagctgaaggacaacctggccaacgagaccgccgccgagcacctgctgctgagaatcagagccctggacagctgcctgaacagaaccgtgagcaagtggaagaacaagttcctgagcctgttctacagcttcctgtggagctgcttcagccccagccccagaggcatctggagcgtgagcctgctgaactgctag

SEQ ID NO: 223570 - DNA, 984 bp, Artificial Sequence
  derived and/or modified sequence
atggccgcacccggttcatgtgcactgtggtcctactgcggtaggggatggtccagagcaatgcgtggatgccaactcctggggctgagaagctcatggcctggtgaccttctctcagcccggctgttgagccaggagaagcgcgcggctgaaacacatttcggctttgaaacagtgtccgaagaggaaaaaggcggaaaggtttatcaggttttcgaaagtgttgccaaaaagtacgatgtcatgaacgacatgatgtctttgggaatccatcgcgtttggaaagatcttcttctttggaagatgcatccactccctggcactcagctgctggatgtagctggcggcaccggcgacattgcatttcgctttctgaactacgtgcagtctcagcaccagcggaagcaaaagaggcagctccgtgctcagcagaacctgtcatgggaggagatagctaaggagtaccaaaatgaggaggattctttgggcggttctcgcgttgtggtatgtgacattaacaaggagatgctaaaagtgggtaaacagaaagcgctggcccagggttatcgcgctggcttggcctgggtgctgggggacgccgaggagctgcccttcgacgatgacaagttcgacatctatacaatcgcctttggtatccgcaacgtgacgcacattgatcaggctctgcaagaagctcaccgggtgctgaagccagggggtcggttcttatgcctcgaattttctcaggtgaataaccctctgatcagtcgtctgtacgacctttatagctttcaggttatcccagtgctgggcgaagttatagctggagactggaagagctatcagtacctcgtggagtccatccggagatttcccagccaggaggaattcaaagatatgatcgaagatgcgggtttccataaagttacatacgaatccctgaccagtggtattgtggctatccattctggtttcaaattgtag

SEQ ID NO: 223571 - DNA, 741 bp, Artificial Sequence
  derived and/or modified sequence
atggccgcccccggctcgtgtgcactttggtcctactgcgggagaggctggagccgagcaatgagaggttgccagctactgggcttgcggagttcgtggcctggagacctgttaagtgcacggctgctgtcacaagagaagagggcagccgaaacccacttcgggttcgaaaccgtttcagaagaggagaaagggggaaaagtgtatcaggtctttgaatcagtcgccaaaaagtacgatgtgatgaacgacatgatgtccttgggcattcacagagtgtggaaggacctgctgctctggaaaatgcacccacttcctggtacacagctgctggacgtggctggaggtacaggggacatcaataaagaaatgctgaaagtgggcaaacaaaaggccttagctcaaggccatgatcgaaggtgccggttatcacagggcgacctgcgcaagtctaacattagacattgcggccacagtttttggttgcaaaccctgatccctttcctgtcctggtctatgaatcaaagttatccagttgagagcctggaacttaaggataacttggccaacgagacggctgccgaacacctgctgctgcgcattcgcgcgctggactcttgcctgaaccgtactgtcagcaagtggaaaaacaagtttcttagcttattttactcattcttatggagttgttttagtccctcacctcggggcatttggtctgtcagcctgcttaactgttag

SEQ ID NO: 223572 - DNA, 984 bp, Artificial Sequence
  derived and/or modified sequence
atggccgcccctggcagctgtgccctgtggagctactgcggccggggctggagccgggccatgaggggctgccagctgctgggcctgcggagctcctggccaggggacctgctgagcgcccggctgctgagccaggagaagagagctgctgagacccacttcggctttgagaccgtgtctgaggaggagaagggcggcaaggtgtaccaggtgtttgagagcgtggccaagaagtatgatgtgatgaatgacatgatgagcctgggcatccaccgggtgtggaaggacctgctgctgtggaagatgcaccccctgcccggcacccagctgctggatgtggccggcggcactggagacatcgccttccgcttcctgaactacgtgcagagccagcaccagaggaagcagaagaggcagctgcgggcccagcagaacctgtcctgggaggagatcgccaaggagtaccagaatgaggaggacagcctgggcggcagccgggtggtggtgtgtgacatcaacaaggagatgctgaaggtgggcaagcagaaggccctggcccagggctacagagctggcctggcctgggtgctgggagatgctgaggagctgccctttgatgatgacaagtttgacatctacaccatcgccttcggcatcagaaatgtgacccacatcgaccaggccctgcaggaggcccaccgggtgctgaagccaggcggccgcttcctgtgcctggagttcagccaggtgaacaaccccctcatcagccggctgtatgacctgtacagcttccaggtgattcctgtgctgggggaggtgattgctggggactggaagagctaccagtacctggtggagagcatccgccgcttccccagccaggaggagttcaaggacatgattgaagatgctggcttccacaaggtgacctatgagagcctgaccagcggcatcgtggccatccacagcggcttcaagctgtag

SEQ ID NO: 223573 - DNA, 741 bp, Artificial Sequence
  derived and/or modified sequence
atggccgcccctggcagctgtgccctgtggagctactgcggccggggctggagccgggccatgaggggctgccagctgctgggcctgcggagctcctggccaggggacctgctgagcgcccggctgctgagccaggagaagagagctgctgagacccacttcggctttgagaccgtgtctgaggaggagaagggcggcaaggtgtaccaggtgtttgagagcgtggccaagaagtatgatgtgatgaatgacatgatgagcctgggcatccaccgggtgtggaaggacctgctgctgtggaagatgcaccccctgcccggcacccagctgctggatgtggccggcggcactggagacatcaacaaggagatgctgaaggtgggcaagcagaaggccctggcccagggccatgaccggcgctgccgcctgagccagggcgacctgaggaagagcaacatccgccactgcggccacagcttctggctgcagaccctcatccccttcctgtcctggagcatgaaccagagctaccctgtggagagcctggagctgaaggacaacctggccaatgaaacagctgctgagcacctgctgctgcgcatccgggccctggacagctgcctgaacagaacagtgtccaagtggaagaacaagttcctgagcctcttctacagcttcctgtggagctgcttcagccccagcccccggggcatctggagcgtgtccctgctgaactgctag

SEQ ID NO: 223574 - DNA, 984 bp, Artificial Sequence
  derived and/or modified sequence
atggccgcccccggcagctgcgccctgtggagctactgcggccggggatggtccagggccatgaggggctgtcagctgctcggactgcgctcatcttggcctggagacttgctgagcgccagactactatcacaggaaaagagagccgcggagacccatttcggctttgaaaccgtaagcgaagaagagaagggcggtaaggtttaccaggtcttcgaatccgtggccaagaaatacgacgtgatgaatgacatgatgtccctggggatccaccgggtatggaaggatttgctcctttggaagatgcatccactcccgggcacacagctcctggacgttgctggcggaaccggggatattgccttcaggtttcttaattacgtccagtcacagcaccagcggaaacagaaacgtcagctgagagctcaacagaacctcagctgggaggaaatcgctaaagaataccagaacgaggaggactccctgggtggaagtcgagtggtcgtttgcgatattaacaaggaaatgctgaaggttggaaaacagaaggctctcgcccagggttatcgcgcgggactggcgtgggtgctgggcgacgcggaggagctgcccttcgatgacgacaagttcgatatttatacaatagcattcggcatcaggaatgtgactcacattgatcaggcgttgcaggaggcccacagagttctaaaacccgggggtcgctttttgtgtctcgagttttcccaggttaataatcccctaataagtaggttgtacgatctgtattccttccaggtgatcccagtgctgggggaagtgattgctggggattggaagagctaccagtaccttgtggagtcaattcggcgctttccttcacaggaggagtttaaagatatgattgaggatgccggcttccacaaggtcacatatgagtcactaactagcggaatagtggccattcacagcgggttcaaactgtag

SEQ ID NO: 223575 - DNA, 741 bp, Artificial Sequence
  derived and/or modified sequence
atggccgcccccggcagctgcgccctgtggagctactgcggccggggatggagccgggcaatgcgagggtgccagctgttgggtctccggtcatcgtggccaggtgacttgctgagcgcacgtctccttagtcaggagaaaagggctgcggaaacacattttggatttgagaccgtatcggaagaagaaaagggaggcaaagtgtatcaggtgttcgaatcggttgccaagaagtacgacgtaatgaatgatatgatgagtctcggcatccaccgggtgtggaaagacttactgctgtggaaaatgcatccgctcccaggcacccagcttctggatgtagccggcggcactggtgatatcaataaggagatgctcaaggtgggcaagcagaaggcgctcgctcagggtcacgaccgccggtgccggcttagccaaggcgacctgaggaaatctaacattcgccattgcggacatagtttctggctccagaccttgatccctttcctcagctggagcatgaaccagtcataccccgtggaatccctggaactgaaggataacctggctaatgagactgccgccgagcacttgctgctgaggatcagagctctggatagctgtcttaatagaacggtatccaagtggaagaacaaatttctctcactgttctacagttttctatggtcatgttttagtccatcgccaaggggtatttggagcgtgtctctcctgaattgctag

SEQ ID NO: 223576 - DNA, 984 bp, Artificial Sequence
  derived and/or modified sequence
atggctgcgcctgggtcatgtgctctgtggtcgtattgcgggagaggttggtctcgcgcaatgagagggtgtcagcttctaggacttaggtcctcttggccgggagacctcctgtcagcacgactcctctcgcaagagaagcgcgctgcggagactcattttggatttgaaactgtctctgaggaagagaaaggaggcaaagtgtaccaggtctttgaaagcgtggccaagaaatacgacgtaatgaacgatatgatgtctctgggcattcatcgagtctggaaggacctcctgttatggaagatgcacccgctgcctggaactcagctcctggatgtggccggtggcactggcgatatcgcattcagatttctgaactacgtccagagccagcatcagcggaaacagaaaagacagctcagggcccagcagaacctcagttgggaagaaattgctaaagagtatcaaaatgaggaagatagtttaggtgggtcacgtgttgtcgtttgtgatataaataaggaaatgctgaaggtgggaaagcaaaaagcattagcccagggctatagggccggacttgcttgggtgttgggagatgcggaagagttgccattcgacgacgacaaatttgatatatacaccatcgccttcggcattcgcaacgtcacccacatagatcaggcattgcaagaagcccaccgcgtgcttaaaccgggaggaaggtttctgtgcctggagttctcacaggtgaataatcctctgatcagtcggctgtacgatctgtactccttccaagttatccctgtgcttggcgaagtgatcgcaggcgattggaaaagctaccagtacctcgtggaaagcattcgtaggttcccctcacaggaagagtttaaggacatgattgaagatgctggtttccacaaggtgacttacgagagtctgacatccggcatcgtggctattcacagcggattcaagctgtag

SEQ ID NO: 223577 - DNA, 741 bp, Artificial Sequence
  derived and/or modified sequence
atggcagccccagggagttgcgcactttggagctattgcgggaggggatggtccagagccatgcgcggatgccagctgctgggcctcagaagctcctggcccggagacttattgtcagctcgacttctatcccaggaaaaaagggctgctgaaacacactttggcttcgagacagtttcagaagaggagaagggcggaaaggtctaccaggtattcgaatccgtcgctaagaagtatgacgtgatgaatgacatgatgagcctgggaattcaccgtgtgtggaaggacctgttactgtggaaaatgcatcctctgcccggtacccagcttctggatgttgcaggaggaactggcgacattaacaaggaaatgctgaaggttggaaaacagaaggcactcgcgcaggggcacgaccggagatgcagactttctcagggcgacctgcgcaagagcaacatccgacactgtgggcatagcttctggctgcagacactgatccccttcctaagctggtccatgaaccagagctaccccgtggaaagcctggaactcaaagataacctagccaacgagaccgccgctgaacatctgcttctgaggattagagcactggacagttgcctgaaccggacagtgtctaagtggaaaaacaagttcctcagtctcttttatagtttcctgtggagttgcttctccccctctccacgaggaatctggagcgtgagcctcctcaattgctag

SEQ ID NO: 223578 - protein, 213 aa, Artificial Sequence
  derived and/or modified sequence
MSRVLVPCHVKGSVALQVGDVRTSQGRPGVLVIDVTFPSVAPFELQEITFKNYYTAFLSIRVRQYTSAHTPAKWVTCLRDYCLMPDPHSEEGAQEYVSLFKHQMLCDMARISELRLILRQPSPLWLSFTVEELQIYQQGPKSPSVTFPKWLSHPVPCEQPALLREGLPDPSRVSSEVQQMWALTEMIRASHTSARIGRFDVDGCYDLNLLSYT

SEQ ID NO: 223579 - protein, 175 aa, Artificial Sequence
  derived and/or modified sequence
MSRVLVPCHVKGSVALQVGDVRTSQGRPGVLVIDVTFPSVAPFELQEITFKNYYTAFLSIRVRQYTSAHTPAKWVTCLRDYCLMPDPHSEEGAQEYVSLFKHQSPSVTFPKWLSHPVPCEQPALLREGLPDPSRVSSEVQQMWALTEMIRASHTSARIGRFDVDGCYDLNLLSYT

SEQ ID NO: 223580 - DNA, 642 bp, Artificial Sequence
  derived and/or modified sequence
atgtctcgcgttctggtgccctgccacgtcaaggggtccgtggccctgcaggtgggcgacgttcgtacatctcaaggcagaccgggcgtgctagtgattgacgtgacgtttccttccgtggccccttttgagttgcaagagatcaccttcaaaaactactacaccgctttcttaagtattcgggtgcgacaatatactagcgctcatactcccgccaagtgggtgacatgtctgagggattattgcctgatgcccgacccccattcagaggagggtgcccaggaatatgtaagccttttcaagcaccaaatgctttgcgatatggccagaatctccgagctgaggctcattcttaggcagccaagcccactgtggctctccttcactgtggaggaactgcaaatatatcagcagggtcccaaatcgcctagcgtcacctttcctaaatggttgagccaccccgtcccttgcgaacagcctgccctgcttcgggaaggactgccggatcccagccgggtgagcagcgaagtgcagcaaatgtgggcactgaccgagatgattagagcctctcacacctcagcgcgcattggccgattcgatgtggatgggtgttacgatttgaacctcctttcctacacatag

SEQ ID NO: 223581 - DNA, 642 bp, Artificial Sequence
  derived and/or modified sequence
atgtcccgagtacttgttccgtgccacgtgaaggggagcgtggcgttacaggttggcgatgtgagaacgagtcagggacggcctggagttttggtaatcgacgtgacctttccttccgtggccccttttgagcttcaggaaatcacgttcaaaaactattacactgcatttctctctataagagtgagacaatacacctcagcacacaccccagcaaagtgggttacatgcctcagagattactgcctgatgccggatccccacagcgaggaaggggctcaggaatatgtaagcctgttcaagcaccagatgctgtgtgacatggcccggatcagtgagctgcggcttatcttgcgtcagccgagtcctttgtggttgtctttcacggtggaagaactgcagatatatcagcagggtccaaaatctcccagcgtgacattcccaaagtggctcagccatcccgttccttgcgaacaaccggccctgctgcgcgagggattacccgatccttctcgcgtcagtagtgaagtccagcaaatgtgggctctcactgagatgatacgtgcttcacacacaagcgcccgtattggtcgatttgacgtggacgggtgttacgacctcaacctgctctcctatacttag

SEQ ID NO: 223582 - DNA, 528 bp, Artificial Sequence
  derived and/or modified sequence
atgagtcgagtcctggttccatgccatgtgaagggctccgttgcactgcaggtcggagacgtacgaacctcccagggacggccgggggttctcgtgatcgacgtgactttcccctcagttgccccgtttgagctgcaagaaattacttttaagaattattacactgcatttctgtcaataagagtgaggcaatacacaagcgcccacacccctgccaagtgggtcacctgcctacgagactactgtctaatgccggacccccattctgaagaaggcgcgcaggaatacgtgagtttgttcaagcatcaatcaccttcagtgacttttcccaaatggctctctcatcccgtaccatgcgaacagccagctctgttgcgagaggggctgccggatcctagccgcgtgtcttcggaggttcaacagatgtgggcactgaccgagatgatcagggcctcacacacatccgcaagaatcggacgattcgacgtggacggatgttatgacttgaatctcttatcgtacacatag

SEQ ID NO: 223583 - DNA, 642 bp, Artificial Sequence
  derived and/or modified sequence
atgagccgggtgctggtgccctgccacgtgaagggctctgtggccctgcaggtgggagatgtgaggaccagccagggccggcctggggtgctggtgattgatgtgaccttccccagcgtggccccctttgagctgcaggagatcaccttcaagaactactacacagccttcctgagcatccgggtgcggcagtacaccagcgcccacaccccagccaagtgggtgacctgcctgcgggactactgcctgatgccagacccccacagcgaggagggcgcccaggagtatgtgtccctcttcaagcaccagatgctgtgtgacatggcccgcatcagcgagctgcggctcatcctgcggcagcccagccccctgtggctgtccttcaccgtggaggagctgcagatctaccagcagggccccaagagccccagcgtgaccttccccaagtggctgagccaccctgtgccctgtgagcagcctgccctgctgcgggagggcctgcctgaccccagccgggtgtcctctgaggtgcagcagatgtgggccctgacagagatgatccgggccagccacaccagcgcccgcatcggccgctttgatgtggatggctgctatgacctgaacctgctgagctacacctag

SEQ ID NO: 223584 - DNA, 528 bp, Artificial Sequence
  derived and/or modified sequence
atgagccgggtgctggtgccctgccacgtgaagggctctgtggccctgcaggtgggagatgtgaggaccagccagggccggcctggggtgctggtgattgatgtgaccttccccagcgtggccccctttgagctgcaggagatcaccttcaagaactactacacagccttcctgagcatccgggtgcggcagtacaccagcgcccacaccccagccaagtgggtgacctgcctgcgggactactgcctgatgccagacccccacagcgaggagggcgcccaggagtatgtgtccctcttcaagcaccagagccccagcgtgaccttccccaagtggctgagccaccctgtgccctgtgagcagcctgccctgctgcgggagggcctgcctgaccccagccgggtgtcctctgaggtgcagcagatgtgggccctgacagagatgatccgggccagccacaccagcgcccgcatcggccgctttgatgtggatggctgctatgacctgaacctgctgagctacacctag

SEQ ID NO: 223585 - DNA, 642 bp, Artificial Sequence
  derived and/or modified sequence
atgagccgggtgctggtgccctgccacgtgaagggcagcgtggccttacaagtcggggacgtgagaactagccagggccggccaggcgttctagtaattgatgtgacatttcccagtgtggcgcccttcgagctgcaggagatcacatttaaaaactactatacagcattcctatcaatcagagtcagacagtacacttccgctcacaccccagccaaatgggtcacatgcttaagagattattgtttgatgccagacccacacagtgaagaaggcgcacaggagtatgtgtctctgttcaagcatcagatgctctgtgatatggcacggatctccgagcttcgcctgattttacggcaaccaagcccactgtggttgagctttaccgttgaggagttacagatttaccaacagggtcccaaatctccctcagtgacttttcctaaatggctgagtcaccccgtgccatgtgaacaacctgccctcctaagggagggcctgccagacccctcacgcgtctcttcagaggttcagcagatgtgggcacttaccgagatgatacgggctagtcatacctcagcccggattggtcgcttcgatgtggatggctgttatgacctgaaccttctgagttacacctag

SEQ ID NO: 223586 - DNA, 642 bp, Artificial Sequence
  derived and/or modified sequence
atgagccgggtgctggtgccctgccacgtgaagggcagcgtggccttgcaggtaggcgacgtgcgcacgtcacaggggagacccggggttctggttatcgatgtcacctttcctagcgtggcgccgtttgagctgcaagagatcacattcaagaattactataccgctttcctcagcatccgggtgagacagtatacatctgcccacacacctgccaagtgggtcacctgtctgcgggattattgcttgatgccagaccctcacagcgaggagggcgcccaggagtatgtctcactatttaagcaccagatgttgtgtgacatggcccggatctccgagctaaggctgatcctgagacagcctagccccctgtggttatcatttactgtggaggaactccagatctatcaacagggacccaaatctccctcagtgacattccccaaatggctttcacatcctgttccatgtgagcaaccagcgcttctcagggagggcctgcccgatccgagccgggtgtcatctgaagtccagcagatgtgggctctgacagagatgatcagagcctctcacacaagcgcccgcatagggaggttcgatgtcgacgggtgctatgatcttaacctgctaagctacacatag

SEQ ID NO: 223587 - DNA, 528 bp, Artificial Sequence
  derived and/or modified sequence
atgagccgggtgctggtgccctgccacgtgaagggcagcgtggccctgcaggtgggcgacgtgagaacatcccagggacgccccggggtgctggtcattgatgtgacgttcccgagcgtggctcctttcgaactgcaggagatcacctttaaaaactattacactgctttcctctctattcgggtcagacagtatacttctgcccatactccagccaagtgggtcacttgcctgcgggattactgtctaatgccagacccccacagcgaggaaggcgcccaggaatacgttagtctgttcaagcaccaaagcccaagcgttaccttccccaagtggctttcacaccctgtgccttgcgagcagcccgcacttttgcgagagggattgccagatcccagcagggtttccagcgaagtgcagcaaatgtgggcactgaccgagatgatccgtgcatcccacacctctgctcggattggccgattcgatgtcgatggatgttacgacctgaatctgctcagttacacttag

SEQ ID NO: 223588 - DNA, 2616 bp, Artificial Sequence
  derived and/or modified sequence
ttcttgaggctcggctgaggatgccgggaagggctggtggtcgggggcctagagcggcggttgcacttagttgcggctgctgtcaccatgtcccgcgttttggtgccttgccatgtgaaaggctccgtagccctccaggtgggcgacgtgcggacctcccaaggccggcctggcgtgctggtcatcgatgtcaccttccccagcgtcgctcccttcgagttgcaggaaatcacgtttaagaattactacacagcttttttgagcatccgtgtccgtcagtacacctcagcacacacacctgccaagtgggtgacctgcctgcgggactactgcctaatgcctgacccacacagtgaggagggagcccaggagtatgtatcgctgttcaagcatcagatgctgtgtgacatggctagaatatcggagctacgcctgattctgcggcagccatcaccactgtggctgtctttcacagtggaggagctgcagatctatcagcagggaccaaagagcccctccgtgacctttcccaagtggctctcccacccagtgccctgtgagcaacctgcactcctccgtgagggtctcccagaccccagcagggtatcctccgaggtgcagcagatgtgggcactgacagagatgatccgggccagtcacacctccgcaaggatcggccgctttgatgtggatggctgttatgacctgaacttgctctcctacacttgaatggttgctcctagccaagatgttggcctttctgtgcccacccagacttggtttgggccaccagaggctgaagtgtatttcctgtgcattccaagtgttgcctgcatgcctgttctgtctgggccacattcacagattcaggattctcaggggcttaccgtgttacttcagcatgagctcctggcatgggggtgctctgtcttcgcctggctgcaactcaattcttccttctacccaaaaacactccagtcagttgtacttactgagaatccctgagtgccctctgccccttctggcaacatgcacattcctgtcttctgcctgctccctcatgtcagtgcagttgggctgggctgacctactaaaacctgctccatgtatggacctggaaggccattgctgccatggcacttgggacacttgaggaagaaacagaaaccttatttcttcctgtgtgtcccctagtggttttctttccatttgtgttatgccacagagagaaatttcctgtctgaactcttctgctgcctgcctaggaaggaaacctgaagatttgggcagcctgagtctcttggtttctgagctggctcctgaatatatgttcaagtgggtgtgcccatagggcctgggcacgtgtctctagcaaaaccagggcctgagcataagaactgggacccttctaggcagggtgcagtggctcacgcctgtaatcccagcactttgggaggcccaggcaggcggatcacctgaggtcaggagttcaagaccagcctgaccaacctggagaaaccccgtctctactaaaaatacaaaaaattagctgggcgtggtggtaggcacctgtaatcccagctacttgggaggctgaggcaggagaatctcttgaacccgggaagtggaggttgcggacctgagatcatgccattgcactccagcctgggcaagaagagcgaaactccatcttaaacaaacaaacaaaaaaaaaagaactgggacccttctgccatctgacatagcccaaagcacatctctatcctttctcccagttgcccctctccttttttgttgttttttttgaggttgagttttgctcttgttgcccaggctggagtgcaatagtgcaatcttggctaactgcaacctccgcctcccaggttcaagcaattctcctgcctcagtctcccgagtagctgggattacagtcatgcatcaccatgcctggctaattttgtatttgtagtagagatggggtttctccatgttggtcaggctggtctcaaacacctgacctcaggtgatctgcctgccttggccttccaaagtgctgggattacaggcatgagccaccgcgcccgccctgcccctttccaagagatatgctcagcataatgagagatcaaccgtggtggggagtgggtccaagtaagggttctcattgttgccttttaagaggcctaagtcctgcattaactcagtccaaccattaagtgatgcaggctgctcttccctcatgtgagaaaaacctgtttccctctggttcttcctggctttgcacctggtggctattacaaagcagtactgcagtatgtcttggacctggaaagttggacatgtgtgtggctcaacagttttctcgggggagttcagtgaccttttggtggccaccctctgttctcacctgtgagttcttgcaggtggcgacttcatctgcaaggtcacttacatagccccactcagctgcttcggaaagcgtgacgaagcagtagtcctcagtgtgtgtgtaagtgaagaggaccttgtggtagcagggaccatgcttcattcgtggctgtgtccccatctgagggcctggtatgcagtaagatcaataaatacttgtggaatgca

SEQ ID NO: 223589 - DNA, 2040 bp, Artificial Sequence
  derived and/or modified sequence
ggatgccgggaagggctggtggtcgggggcctagagcggcggttgcacttagttgcggctgctgtcaccatgtcccgcgttttggtgccttgccatgtgaaaggctccgtagccctccaggtgggcgacgtgcggacctcccaaggccggcctggcgtgctggtcatcgatgtcaccttccccagcgtcgctcccttcgagttgcaggaaatcacgtttaagaattactacacagcttttttgagcatccgtgtccgtcagtacacctcagcacacacacctgccaagtgggtgacctgcctgcgggactactgcctaatgcctgacccacacagtgaggagggagcccaggagtatgtatcgctgttcaagcatcagatgctgtgtgacatggctagaatatcggagctacgcctgattctgcggcagccatcaccactgtggctgtctttcacagtggaggagctgcagatctatcagcagggaccaaagagcccctccgtgacctttcccaagtggctctcccacccagtgccctgtgagcaacctgcactcctccgtgagggtctcccagaccccagcagggtatcctccgaggtgcagcagatgtgggcactgacagagatgatccgggccagtcacacctccgcaaggatcggccgctttgatgtggatggctgttatgacctgaacttgctctcctacacttgaatggttgctcctagccaagatgttggcctttctgtgcccacccagacttggtttgggccaccagaggctgaagtgtatttcctgtgcattccaagtgttgcctgcatgcctgttctgtctgggccacattcacagattcaggattctcaggggcttaccgtgttacttcagcatgagctcctggcatgggggtgctctgtcttcgcctggctgcaactcaattcttccttctacccaaaaacactccagtcagttgtacttactgagaatccctgagtgccctctgccccttctggcaacatgcacattcctgtcttctgcctgctccctcatgtcagtgcagttgggctgggctgacctactaaaacctgctccatgtatggacctggaaggccattgctgccatggcacttgggacacttgaggaagaaacagaaaccttatttcttcctgtgtgtcccctagtggttttctttccatttgtgttatgccacagagagaaatttcctgtctgaactcttctgctgcctgcctaggaaggaaacctgaagatttgggcagcctgagtctcttggtttctgagctggctcctgaatatatgttcaagtgggtgtgcccatagggcctgggcacgtgtctctagcaaaaccagggcctgagcataagaactgggacccttctaggcagggtgcagtggctcacgcctgtaatcccagcactttgggaggcccaggcaggcggatcacctgaggtcaggagctggtctcaaacacctgacctcaggtgatctgcctgccttggccttccaaagtgctgggattacaggcatgagccaccgcgcccgccctgcccctttccaagagatatgctcagcataatgagagatcaaccgtggtggggagtgggtccaagtaagggttctcattgttgccttttaagaggcctaagtcctgcattaactcagtccaaccattaagtgatgcaggctgctcttccctcatgtgagaaaaacctgtttccctctggttcttcctggctttgcacctggtggctattacaaagcagtactgcagtatgtcttggacctggaaagttggacatgtgtgtggctcaacagttttctcgggggagttcagtgaccttttggtggccaccctctgttctcacctgtgagttcttgcaggtggcgacttcatctgcaaggtcacttacatagccccactcagctgcttcggaaagcgtgacgaagcagtagtcctcagtgtgtgtgtaagtgaagaggaccttgtggtagcagggaccatgcttcattcgtggctgtgtccccat

SEQ ID NO: 223590 - DNA, 1625 bp, Artificial Sequence
  derived and/or modified sequence
ttcttgaggctcggctgaggatgccgggaagggctggtggtcgggggcctagagcggcggttgcacttagttgcggctgctgtcaccatgtcccgcgttttggtgccttgccatgtgaaaggctccgtagccctccaggtgggcgacgtgcggacctcccaaggccggcctggcgtgctggtcatcgatgtcaccttccccagcgtcgctcccttcgagttgcaggaaatcacgtttaagaattactacacagcttttttgagcatccgtgtccgtcagtacacctcagcacacacacctgccaagtgggtgacctgcctgcgggactactgcctaatgcctgacccacacagtgaggagggagcccaggagtatgtatcgctgttcaagcatcagagcccctccgtgacctttcccaagtggctctcccacccagtgccctgtgagcaacctgcactcctccgtgagggtctcccagaccccagcagggtatcctccgaggtgcagcagatgtgggcactgacagagatgatccgggccagtcacacctccgcaaggatcggccgctttgatgtggatggctgttatgacctgaacttgctctcctacacttgaatggttgctcctagccaagatgttggcctttctgtgcccacccagacttggtttgggccaccagaggctgaagtgtatttcctgtgcattccaagtgttgcctgcatgcctgttctgtctgggccacattcacagattcaggattctcaggggcttaccgtgttacttcagcatgagctcctggcatgggggtgctctgtcttcgcctggctgcaactcaattcttccttctacccaaaaacactccagtcagttgtacttactgagaatccctgagtgccctctgccccttctggcaacatgcacattcctgtcttctgcctgctccctcatgtcagtgcagttgggctgggctgacctactaaaacctgctccatgtatggacctggaaggccattgctgccatggcacttgggacacttgaggaagaaacagaaaccttatttcttcctgtgtgtcccctagtggttttctttccatttgtgttatgccacagagagaaatttcctgtctgaactcttctgctgcctgcctaggaaggaaacctgaagatttgggcagcctgagtctcttggtttctgagctggctcctgaatatatgttcaagtgggtgtgcccatagggcctgggcacgtgtctctagcaaaaccagggcctgagccaccgcgcccgccctgcccctttccaagagatatgctcagcataatgagagatcaaccgtggtggggagtgggtccaagtaagggttctcattgttgccttttaagaggcctaagtcctgcattaactcagtccaaccattaagtgatgcaggctgctcttccctcatgtgagaaaaacctgtttccctctggttcttcctggctttgcacctggtggctattacaaagcagtactgcagtatgtcttggacctggaaagttggacatgtgtgtggctcaacagttttctcgggggagttcagtgaccttttggtggccaccctctgttctcacctgtgagttcttgca

SEQ ID NO: 223591 - DNA, 642 bp, Artificial Sequence
  derived and/or modified sequence
atgtctcgggtcctcgtaccgtgtcacgttaagggttctgttgctctgcaggtgggtgacgtgcggacctcacaagggcgtcctggtgtcctggtaatagacgtcacattcccatctgtggccccattcgagctgcaggaaatcacattcaaaaactactatacagctttcctgtcgattcgggttaggcagtataccagcgcgcacactcccgcaaaatgggtcacatgcttaagggattattgccttatgcccgacccacatagcgaggaaggcgctcaggagtacgtgtctctgttcaagcatcagatgctgtgcgatatggccagaatatctgaacttcgcctgatactgcgacagccttcccctctttggctgtcattcactgtggaggagcttcagatttaccaacaggggcctaaatcaccttccgtaacatttcctaagtggctctctcatcccgtgccctgtgagcagcctgccctgctccgcgagggattgccggacccaagcagggtcagttccgaagtccagcaaatgtgggcactgactgagatgatacgtgcctcacacacctccgctaggataggccgttttgatgtggacggttgttacgacctgaatctcctgtcctatacgtag

SEQ ID NO: 223592 - DNA, 642 bp, Artificial Sequence
  derived and/or modified sequence
atgagtcgtgtgctggtgccatgccacgttaagggtagcgtggccttgcaggttggagacgtgagaaccagccagggtaggcccggagtgttagtgatcgatgtaacatttcctagtgttgctccgtttgagctgcaagagatcacattcaagaattactacacagccttcctgtccattcgcgtgagacagtatacctcagctcacacaccggcaaaatgggtcacatgcctcagagattactgcctgatgcccgacccccacagtgaggagggagcccaggagtacgtttcattattcaaacatcagatgctgtgcgatatggcacggatcagcgaacttaggctgattctcaggcaacctagccctctctggttgtctttcacagtggaagagttgcagatataccagcagggccctaaaagtccgtcggttacatttcccaaatggctcagccatcccgtgccatgcgaacagcccgctctgctgcgggagggactacccgacccgtctcgggtaagcagcgaagtacagcagatgtgggccctaacagagatgattagagcctctcacacatcagctagaattggccgatttgatgtggacgggtgttatgacctcaatcttctgagttatacgtag

SEQ ID NO: 223593 - DNA, 528 bp, Artificial Sequence
  derived and/or modified sequence
atgagcagggtgcttgtgccttgtcatgtgaagggcagtgtggcactgcaggtgggcgacgtccgcacttcacaaggccgacccggagtgctcgttatcgacgttacgtttccctccgtagctcctttcgagctgcaggaaatcaccttcaagaactattacacagcgttcctgagcatccgcgtgcgacagtatacatccgctcataccccggctaaatgggttacctgcctgagagattactgcctcatgcctgacccccatagcgaggaaggcgcacaggaatatgtcagcctgtttaagcatcagtcaccctccgttaccttccccaagtggctgtcccatcccgtgccatgtgaacagcctgcccttttgcgcgaggggctgccagacccctccagggtaagctccgaagtgcagcaaatgtgggccctgacagagatgatacgcgcatcacacacctctgctcgaattggaagatttgatgtggacggttgttatgacctgaacttactcagttacacctag

SEQ ID NO: 223594 - DNA, 642 bp, Artificial Sequence
  derived and/or modified sequence
atgagcagagtgctggtgccctgccacgtgaagggcagcgtggccctgcaggtgggcgacgtgagaaccagccagggcagacccggcgtgctggtgatcgacgtgaccttccccagcgtggcccccttcgagctgcaggagatcaccttcaagaactactacaccgccttcctgagcatcagagtgagacagtacaccagcgcccacacccccgccaagtgggtgacctgcctgagagactactgcctgatgcccgacccccacagcgaggagggcgcccaggagtacgtgagcctgttcaagcaccagatgctgtgcgacatggccagaatcagcgagctgagactgatcctgagacagcccagccccctgtggctgagcttcaccgtggaggagctgcagatctaccagcagggccccaagagccccagcgtgaccttccccaagtggctgagccaccccgtgccctgcgagcagcccgccctgctgagagagggcctgcccgaccccagcagagtgagcagcgaggtgcagcagatgtgggccctgaccgagatgatcagagccagccacaccagcgccagaatcggcagattcgacgtggacggctgctacgacctgaacctgctgagctacacctag

SEQ ID NO: 223595 - DNA, 528 bp, Artificial Sequence
  derived and/or modified sequence
atgagcagagtgctggtgccctgccacgtgaagggcagcgtggccctgcaggtgggcgacgtgagaaccagccagggcagacccggcgtgctggtgatcgacgtgaccttccccagcgtggcccccttcgagctgcaggagatcaccttcaagaactactacaccgccttcctgagcatcagagtgagacagtacaccagcgcccacacccccgccaagtgggtgacctgcctgagagactactgcctgatgcccgacccccacagcgaggagggcgcccaggagtacgtgagcctgttcaagcaccagagccccagcgtgaccttccccaagtggctgagccaccccgtgccctgcgagcagcccgccctgctgagagagggcctgcccgaccccagcagagtgagcagcgaggtgcagcagatgtgggccctgaccgagatgatcagagccagccacaccagcgccagaatcggcagattcgacgtggacggctgctacgacctgaacctgctgagctacacctag

SEQ ID NO: 223596 - protein, 188 aa, Artificial Sequence
  derived and/or modified sequence
MVPGAAGWCCLVLWLPACVAAHGFRIHDYLYFQVLSPGDIRYIFTATPAKDFGGIFHTRYEQIHLVPAEPPEACGELSNGFFIQDQIALVERGGCSFLSKTRVVQEHGGRAVIISDNAVDNDSFYVEMIQDSTQRTADIPALFLLGRDGYMIRRSLEQHGLPWAIISIPVNVTSIPTFELLQPPWTFW

SEQ ID NO: 223597 - DNA, 567 bp, Artificial Sequence
  derived and/or modified sequence
atggtacctggcgctgccggatggtgttgtctcgtgctgtggttgccagcctgtgtagcagcccatggctttcggatccatgattacctgtattttcaagtcctatccccaggcgacatacggtacatcttcacagcaacgcctgccaaggatttcggcggtatttttcatacccggtacgagcaaatccatctggttcctgctgagcctcccgaagcctgcggagagctgagcaacggattcttcatccaggaccagattgcactggtagagcggggtggctgtagctttctatcaaaaaccagggttgtccaggagcacggaggcagagcagtgatcatttctgacaacgctgtagacaatgattccttctatgtggaaatgattcaggacagcacacagcgaacggctgatattccagccttgtttctcctcgggagagacggatatatgattcggagatcccttgagcaacatggcttgccatgggcaattatctcaattccagtcaatgtgaccagtatacccacttttgaacttcttcagcccccttggacattctggtag

SEQ ID NO: 223598 - DNA, 567 bp, Artificial Sequence
  derived and/or modified sequence
atggtgcctggcgcagccggttggtgttgtcttgtgctctggctgcccgcctgcgtcgccgcccacggctttcgaatacacgattacttgtattttcaggtgctgtcccctggggacattcgctatatctttactgctactccggccaaagacttcggtggaatattccacactcgctatgaacagattcacttagttccagccgaacctccagaggcttgtggggagctgagcaacggattctttattcaagaccagatagctcttgtcgaaagggggggttgtagctttctttccaaaactagggtggtgcaggaacatggaggacgcgcagtcatcatctcagacaatgcagtcgacaatgacagtttctacgtggagatgatacaagacagcacacagcggaccgctgatattcctgctctgtttctcctggggcgcgacggatacatgataagaaggtcactcgagcagcacggcctcccctgggcaattatttcgatccctgtgaatgtaacctcaattccaaccttcgaattgctgcaaccaccctggacattctggtag

SEQ ID NO: 223599 - DNA, 567 bp, Artificial Sequence
  derived and/or modified sequence
atggttccaggagccgcaggctggtgctgtctggttctctggttgcccgcctgtgtcgctgcccacggattcagaattcatgattatctctatttccaagtattaagcccaggagatatccgctacatcttcacagcgactcccgccaaagactttggaggtatcttccacacacggtatgaacagattcacctagtgcccgctgaacctcccgaagcttgtggcgaactgtctaatgggttctttattcaagatcaaatcgcattagtggaaagaggtgggtgctcatttctgtctaagactcgcgtcgttcaagagcacggaggcagagctgtgataatctcagataacgccgtggacaatgatagtttctacgtggagatgattcaagattctacccaaaggaccgcagatataccggcattattcctgctcggtcgagatggttatatgattcgcaggagtctggagcagcatggtctcccctgggccatcatttctattcctgttaacgtcacttcgattcccacttttgaacttctccagcccccgtggaccttctggtag

SEQ ID NO: 223600 - DNA, 1083 bp, Artificial Sequence
  derived and/or modified sequence
gtcctgcgagcgacgcgcggcggggcggcgagaggaaacgcggcgccgggccgggcccggccctggagatggtccccggcgccgcgggctggtgttgtctcgtgctctggctccccgcgtgcgtcgcggcccacggcttccgtatccatgattatttgtactttcaagtgctgagtcctggggacattcgatacatcttcacagccacacctgccaaggactttggtggtatctttcacacaaggtatgagcagattcaccttgtccccgctgaacctccagaggcctgcggggaactcagcaacggtttcttcatccaggaccagattgctctggtggagagggggggctgctccttcctctccaagactcgggtggtccaggagcacggcgggcgggcggtgatcatctctgacaacgcagttgacaatgacagcttctacgtggagatgatccaggacagtacccagcgcacagctgacatccccgccctcttcctgctcggccgagacggctacatgatccgccgctctctggaacagcatgggctgccatgggccatcatttccatcccagtcaatgtcaccagcatccccacctttgagctgctgcaaccgccctggaccttctggtagaagagtttgtcccacattccagccataagtgactctgagctgggaaggggaaacccaggaattttgctacttggaatttggagatagcatctggggacaagtggagccaggtagaggaaaagggtttgggcgttgctaggctgaaagggaagccacaccactggccttcccttccccagggcccccaagggtgtctcatgctacaagaagaggcaagagacaggccccagggcttctggctagaacccgaaacaaaaggagctgaaggcaggtggcctgagagccatctgtgacctgtcacactcacctggctccagcctcccctacccagggtctctgcacagtgaccttcacagcagttgttggagtggtttaaagagctggtgtttggggactcaataaaccctcactgactttttagcaataaagcttctcatcagggttgcaa

SEQ ID NO: 223601 - DNA, 567 bp, Artificial Sequence
  derived and/or modified sequence
atggtgcccggcgccgccggctggtgctgcctggtgctgtggctgcccgcctgcgtggccgcccacggcttcagaatccacgactacctgtacttccaggtgctgagccccggcgacatcagatacatcttcaccgccacccccgccaaggacttcggcggcatcttccacaccagatacgagcagatccacctggtgcccgccgagccccccgaggcctgcggcgagctgagcaacggcttcttcatccaggaccagatcgccctggtggagagaggcggctgcagcttcctgagcaagaccagagtggtgcaggagcacggcggcagagccgtgatcatcagcgacaacgccgtggacaacgacagcttctacgtggagatgatccaggacagcacccagagaaccgccgacatccccgccctgttcctgctgggcagagacggctacatgatcagaagaagcctggagcagcacggcctgccctgggccatcatcagcatccccgtgaacgtgaccagcatccccaccttcgagctgctgcagcccccctggaccttctggtag

SEQ ID NO: 223602 - DNA, 567 bp, Artificial Sequence
  derived and/or modified sequence
atggtccccggcgctgccgggtggtgttgtttagttctttggctgcctgcctgtgttgccgcacacggtttccggattcacgactacctttattttcaggtcctgtcccctggcgatatccggtacatctttacagcaaccccagccaaagacttcggcggaatcttccacactaggtacgagcagatccatcttgtaccggcggaaccacccgaggcctgcggtgagctgagcaacggatttttcatccaggaccagatcgctttggtcgagaggggcggctgcagctttctgagcaagactcgggtggtgcaggaacacggggggcgcgccgtgataatctcggacaacgctgtggataacgacagcttttacgtagagatgatacaggacagcactcaacgcaccgctgatatccctgcactgttcttattgggcagagacggttatatgattcgacggagcctcgagcagcacggccttccctgggccattatttccattcctgtgaacgtaactagcattccaactttcgaactgctccagccgccatggacattttggtag

SEQ ID NO: 223603 - DNA, 567 bp, Artificial Sequence
  derived and/or modified sequence
atggtgcctggagctgctggctggtgctgcctggtgctgtggctgcctgcctgtgtggccgcccacggcttccgcatccatgactacctgtacttccaggtgctgagccctggggacatccgctacatcttcaccgccaccccagccaaggactttggaggcatcttccacaccaggtatgagcagatccacctggtgcctgctgagcccccagaggcctgtggggagctgagcaatggcttcttcatccaggaccagatcgccctggtggagcggggcggctgcagcttcctgagcaagaccagggtggtgcaggagcacggcggccgggctgtgatcatcagtgacaatgctgtggacaatgacagcttctacgtggagatgatccaggacagcacccagaggacagctgacatcccagccctcttcctgctgggcagagatggctacatgatcagaagaagcctggagcagcacggcctgccctgggccatcatcagcatccctgtgaatgtgaccagcatccccacctttgagctgctgcagcccccctggaccttctggtag

SEQ ID NO: 223604 - DNA, 567 bp, Artificial Sequence
  derived and/or modified sequence
atggtgcccggcgccgccggctggtgctgcctggtgctgtggctgcctgcctgcgtcgccgcccatgggtttcggatccatgactacctgtatttccaggtccttagtcctggcgatatacggtatatcttcactgccacacccgctaaggatttcggagggattttccacactcggtacgaacagatccacctggtgcccgccgagccgcctgaggcgtgtggggaactgtctaacggtttttttattcaagatcaaattgcactggtggaacgggggggttgcagcttcctatcaaaaactcgagtagtgcaagaacacggtgggcgtgcggtaattatcagtgataatgccgtggataatgattccttttatgtagagatgatccaggacagcacccaacggacagccgacattcccgctctttttcttctcgggagagacggatacatgattcgacggagcctcgaacagcatggtctcccttgggctatcatttctattcctgtcaacgtgacaagcatccctaccttcgaattgctacagcctccatggaccttttggtag

SEQ ID NO: 223605 - RNA, 567 nt, Artificial Sequence
  derived and/or modified sequence
auggugccuggcgcagccgguugguguugucuugugcucuggcugcccgccugcgucgccgcccacggcuuucgaauacacgauuacuuguauuuucaggugcuguccccuggggacauucgcuauaucuuuacugcuacuccggccaaagacuucgguggaauauuccacacucgcuaugaacagauucacuuaguuccagccgaaccuccagaggcuuguggggagcugagcaacggauucuuuauucaagaccagauagcucuugucgaaaggggggguuguagcuuucuuuccaaaacuaggguggugcaggaacauggaggacgcgcagucaucaucucagacaaugcagucgacaaugacaguuucuacguggagaugauacaagacagcacacagcggaccgcugauauuccugcucuguuucuccuggggcgcgacggauacaugauaagaaggucacucgagcagcacggccuccccugggcaauuauuucgaucccugugaauguaaccucaauuccaaccuucgaauugcugcaaccacccuggacauucugguag

SEQ ID NO: 223606 - RNA, 567 nt, Artificial Sequence
  derived and/or modified sequence
augguuccaggagccgcaggcuggugcugucugguucucugguugcccgccugugucgcugcccacggauucagaauucaugauuaucucuauuuccaaguauuaagcccaggagauauccgcuacaucuucacagcgacucccgccaaagacuuuggagguaucuuccacacacgguaugaacagauucaccuagugcccgcugaaccucccgaagcuuguggcgaacugucuaauggguucuuuauucaagaucaaaucgcauuaguggaaagaggugggugcucauuucugucuaagacucgcgucguucaagagcacggaggcagagcugugauaaucucagauaacgccguggacaaugauaguuucuacguggagaugauucaagauucuacccaaaggaccgcagauauaccggcauuauuccugcucggucgagaugguuauaugauucgcaggagucuggagcagcauggucuccccugggccaucauuucuauuccuguuaacgucacuucgauucccacuuuugaacuucuccagcccccguggaccuucugguag

SEQ ID NO: 223607 - protein, 432 aa, Artificial Sequence
  derived and/or modified sequence
MAGLGLGSAVPVWLAEDDLGCIICQGLLDWPATLPCGHSFCRHCLEALWGARDARRWACPTCRQGAAQQPHLRKNTLLQDLADKYRRAAREIQAGSDPAHCPCPGSSSLSSAAARPRRRPELQRVAVEKSITEVAQELTELVEHLVDIVRSLQNQRPLSESGPDNELSILGKAFSSGVDLSMASPKLVTSDTAAGKIRDILHDLEEIQEKLQESVTWKEAPEAQMQGELLEAPSSSSCPLPDQSHPALRRASRFAQWAIHPTFNLKSLSCSLEVSKDSRTVTVSHRPQPYRWSCERFSTSQVLCSQALSSGKHYWEVDTRNCSHWAVGVASWEMSRDQVLGRTMDSCCVEWKGTSQLSAWHMVKETVLGSDRPGVVGIWLNLEEGKLAFYSVDNQEKLLYECTISASSPLYPAFWLYGLHPGNYLIIKQVKV

SEQ ID NO: 223608 - DNA, 2195 bp, Artificial Sequence
  derived and/or modified sequence
gggtggcgccaaggaaggaggagaaaaggcggccgagaaaaggaggagggcaaggggaagaggaagggcgagggaggagcctgaggagactcgcccggctcaaccccgacgtccgcgccccggccgcctgttggccatggcgggcctgggcctgggctccgccgttcccgtgtggctggccgaggacgacctcggctgcatcatctgccaggggctgctggactggcccgccacgctgccctgcggccacagcttctgccgccactgcctggaggccctgtggggcgcccgcgacgcccgccgctgggcctgccccacttgccgccagggcgccgcgcagcagccgcacctgcggaagaacacgctactgcaggacctggccgacaagtaccgccgcgccgcacgcgagatacaggcgggctccgaccctgcccactgcccctgcccgggctccagttccctctccagcgcggccgcgaggccccggcgccgcccggaactgcagcgggtggcagtagagaagagcatcacagaagttgctcaggagctgacagagctggtggaacatcttgtagacattgtcagaagcctgcagaatcagaggcccctatcagaatctggaccagacaacgaactgagcatcctgggcaaggctttttcttctggggtggatctttccatggcttctccaaagctggtgacttccgacacagctgcagggaaaatcagagatattctccatgacctagaagaaattcaggaaaaattacaagaaagcgtcacctggaaagaggctcctgaagcacaaatgcagggagaactcctggaagccccgtcttcctcctcatgcccattgcctgaccagagccaccctgcactcaggagagcttctcggtttgctcagtgggccatccatccaacctttaacttgaagagcctttcctgcagcctggaggtgtccaaggattcccgtacagtgactgtgtctcaccgcccacaaccctatcgctggagctgtgagaggttttctaccagccaggtcttatgttcccaggccctgtcttctggaaagcattactgggaagtggacactaggaattgcagccactgggcagttggggtggcttcctgggagatgagccgcgaccaggtcctgggaaggactatggactcttgttgtgtggaatggaaggggactagccagctctctgcatggcacatggtcaaggaaactgtccttggctcagacagacctggggtggtgggcatctggctgaaccttgaggagggaaagcttgccttctattcagtggacaatcaggagaagcttctgtatgagtgtaccatctctgcctcctctcctttgtaccctgccttctggctgtatggcttacatcctggaaattacctgataataaagcaagtaaaggtgtaaggtttcctaagggattacaacacagtggtttcctggtctctctccctgtcatcaatcagggtagtaacttgacttaagaataccactttttagaaaaattacgatagagatgggatctcactaggttgcccaggctggtgtcgaattcctggtctcaagcagtcctcccacctcagcctcccaaggtgctgggattacaggtgtgagccaccacacctggccaagaataccacttttgaagttaatccttttgtgtgatacaggatgaacttgggatgtttgaaccctggacattccaaataaagaataggcccctgcctggctcctgggagataacctctaagccattagaatatcttgcctgataagagtgtttttgtttacctgtgggccttgggccatgcagtatcagcttgaccttgcaaggtcaagctgaggagactaagttagccatgtgggcagtgaagcatgccaatgtgatcaatccctagtaaaagccctggacacctaggcatgggtgagctactctggttggtaatactctgtgcacacatcattgtagccacacatcattgctgggagaattaagcattatcctgaagactctgccaggagaggataattggaagttctcttggaccttaccttatgtgcctttcttcattgctgattttaatctgtatcctttcactgtaataaactgtaactatgagtgcaaaaaaaaaaaaaaaaaaaaaaaaaaaaaaaaaaaaaaaaaaaa

SEQ ID NO: 223609 - DNA, 1299 bp, Artificial Sequence
  derived and/or modified sequence
atggccggcctgggcttgggatcagccgtacctgtctggcttgccgaagacgatcttggatgtattatctgtcaaggactgctggattggccagcgacgctgccatgcggtcattctttttgcagacactgccttgaggctctctggggggcgagagatgcacggcggtgggcctgccctacctgccggcagggcgcagctcaacaaccgcatcttaggaaaaacacactgctacaggacttggcagacaagtacagaagggcagctcgggagattcaggcagggtcagatcctgcgcattgcccatgccccgggtcctcctctctctcgtctgcggccgctcgccctcgaaggcgccccgaactgcaaagagtcgcagttgagaagtccattacggaagtggctcaggagctgacagagctggtggagcacttggtcgatattgttaggtccctgcagaaccaacggcccctttctgagtccggccctgacaatgagctgtccatcttgggtaaagcattctccagtggtgtggatttgagcatggccagtccgaagctcgtgacctccgatactgccgcaggcaaaatacgtgacattctgcacgacttagaagagattcaagaaaagcttcaagagagtgtgacctggaaagaagctcccgaggcacagatgcagggtgaactactggaggctccttcctcgagctcctgcccactgcccgatcagagccaccccgctttgaggagagcaagccgctttgctcagtgggcaattcaccccaccttcaacctcaagtccttgtcatgctctttggaagtgtccaaagattccagaacagtcactgtctcacaccggcctcagccctaccgctggtcatgcgagaggttctcgacctcacaggtgctatgctctcaggctttgagcagcggaaagcattattgggaagtcgacacaagaaattgctcccactgggccgtgggtgttgcctcttgggagatgtccagagatcaggtgcttggccgcaccatggatagctgttgcgttgagtggaaaggtacctctcagctatcagcatggcatatggtcaaggagaccgtactcggctctgatcggcctggggtcgtgggcatttggcttaacctggaggaaggcaagttggcattctacagcgtcgacaaccaggagaaactcctctacgagtgcactataagcgcctcttccccgctgtatcctgcattttggctctatgggctgcaccccgggaattacctgataataaagcaagtgaaggtgtag

SEQ ID NO: 223610 - DNA, 1299 bp, Artificial Sequence
  derived and/or modified sequence
atggccggcctgggcctgggcagcgctgtgcctgtgtggctggccgaggatgacctgggctgcatcatctgccagggcctgctggactggccagccaccctgccctgtggccacagcttctgccgccactgcctggaggccctgtggggcgccagagatgcccggcgctgggcctgccccacctgccggcagggcgccgcccagcagccccacctgaggaagaacaccctgctgcaggacctggccgacaagtaccgccgggccgcccgggagatccaggccggcagtgaccctgcccactgcccctgccccggcagcagcagcctgagcagcgctgctgcccggccccggcggcggcctgagctgcagagggtggccgtggagaagagcatcacagaggtggcccaggagctgacagagctggtggagcacctggtggacatcgtgcgcagcctgcagaaccagaggcccctgtctgagagcggccctgacaatgagctgagcatcctgggcaaggccttcagcagcggcgtggacctgtccatggccagccccaagctggtgaccagtgacacagctgctgggaagatccgggacatcctgcatgacctggaggagatccaggagaagctgcaggagagcgtgacctggaaggaggcccctgaggcccagatgcagggcgagctgctggaggcccccagcagcagcagctgccccctgcctgaccagagccacccagccctgcggcgggccagcagatttgcccagtgggccatccaccccaccttcaacctgaagagcctgagctgcagcctggaggtgtccaaggacagcaggacagtgacagtgagccaccggccccagccctaccgctggagctgtgagcgcttcagcaccagccaggtgctgtgcagccaggccctgagcagcggcaagcactactgggaggtggacaccaggaactgcagccactgggccgtgggcgtggcctcctgggagatgagccgggaccaggtgctgggccgcaccatggacagctgctgcgtggagtggaagggcaccagccagctgagcgcctggcacatggtgaaggagaccgtgctgggcagtgacaggcctggggtggtgggcatctggctgaacctggaggagggcaagctggccttctacagcgtggacaaccaggagaagctgctgtatgaatgtaccatcagcgccagcagccccctgtacccagccttctggctgtatggcctgcaccctggcaactacctgatcatcaagcaggtgaaggtgtag

SEQ ID NO: 223611 - DNA, 1299 bp, Artificial Sequence
  derived and/or modified sequence
atggccggcctgggcctgggcagcgccgtgcccgtgtggctggccgaggatgacctgggatgtatcatctgccagggactcctggattggcccgccaccttgccgtgtggccattctttctgccgtcactgcctggaagcactgtggggagcaagagacgcaagacgatgggcatgtcccacttgcagacagggtgccgctcagcaaccacatctccgaaaaaatacattattgcaggacctagcggataaataccggagagctgccagagagatccaggccggctcagatcccgcacactgtccctgccctggctcctccagtctctcctcagccgctgctaggccccgccgtcgccctgaacttcaaagagttgccgtggaaaagtccatcacagaagttgcgcaggagcttacggagcttgtcgaacatctggtagatattgtcagaagcctccagaaccagaggccgttgagcgaaagcgggccggacaacgaactttcaattctcggcaaggccttcagcagcggcgttgacttatctatggcttcaccgaaactggtgacttccgacacagctgctggtaaaatcagagatatcctgcatgacctggaagagatccaggaaaagcttcaggaaagcgtgacctggaaggaagccccggaagctcaaatgcagggagagcttctcgaggccccgtcctcttcctcttgccctctcccagatcagtctcatcctgccctgaggagggcttcccgtttcgcgcagtgggccatccacccgacttttaatcttaagtctctgtcttgctcccttgaggtgagtaaggactcacgtaccgtgactgtatcccaccgcccccagccttatcgttggagctgtgaacggttctctacctcccaggtcttgtgctcacaggcactgtcaagcggcaaacattattgggaggtagacacaaggaactgctcccattgggcagttggtgtggccagttgggagatgtctcgagatcaggtcttgggaagaaccatggactcctgttgcgtggagtggaagggaacaagtcaactcagcgcctggcacatggttaaagagactgtcttagggtccgacagacctggagtcgtcggcatctggctgaatctggaagagggcaagttggccttctacagcgtggacaatcaggagaagctgctgtatgaatgcacaattagcgcatcatcacccttataccctgccttctggttatacggacttcatccaggtaattatctcataatcaaacaggtgaaggtctag

SEQ ID NO: 223612 - DNA, 1299 bp, Artificial Sequence
  derived and/or modified sequence
atggccggactaggattaggcagcgctgtaccggtttggctcgctgaggacgatctgggctgcatcatttgccagggtttactggactggccagctacactgccgtgcggacactcattctgcaggcattgcctggaggcactgtggggcgcaagagacgcccgaaggtgggcatgtcctacatgtcgtcagggggctgcccagcagccgcatctgagaaaaaatacactgttgcaggacctggcagacaagtatagacgcgctgccagggagattcaagctggctccgacccggcacactgcccttgccctggctcctccagccttagttctgccgctgcgcgtcccaggaggcgccctgaactacagcgagtggctgttgagaagtcaatcacagaggtcgcccaggaattgacagagctggtagagcacctggtggacatagttagatccctccagaatcagcgtcctctgagtgaaagtggacctgacaacgaattatcgatactgggtaaagcctttagttctggagtggacctctccatggcaagccccaaacttgtaacctccgataccgcagccggaaaaatccgggacatccttcatgacctcgaagagatccaggagaaattacaggaatcagtaacgtggaaagaagctccggaggctcagatgcagggcgagctgcttgaggccccttcctcttccagctgcccgctgcccgatcaatcacatccagccctacggagagcatctaggttcgctcaatgggcaatacatcccaccttcaatctgaaaagtctgtcatgtagcctggaagtgtcaaaagactcacgaacggtcacagtatcacaccggcctcagccttacagatggtcttgtgagcgattcagcacatcacaggttctttgctctcaggccctgtcttctggaaaacattattgggaggtggatacacgtaactgctctcattgggctgttggcgtcgcctcctgggaaatgtctagagatcaggtcctcggacggaccatggactcatgttgtgtagagtggaagggcacgagccagttgagcgcatggcacatggtcaaagagaccgttcttgggtctgacaggccgggagtcgtgggcatctggctgaatctggaggaagggaagctagccttctactctgtggataatcaggaaaaactgctgtacgagtgcacgatatccgcttcctcccccttatacccggctttttggctttacggcctgcaccctgggaactacctgattatcaagcaagtcaaagtgtag

SEQ ID NO: 223613 - DNA, 2070 bp, Artificial Sequence
  derived and/or modified sequence
gagactcgcccggctcaaccccgacgtccgcgccccggccgcctgttggccatggcgggcctgggcctgggctccgccgttcccgtgtggctggccgaggacgacctcggctgcatcatctgccaggggctgctggactggcccgccacgctgccctgcggccacagcttctgccgccactgcctggaggccctgtggggcgcccgcgacgcccgccgctgggcctgccccacttgccgccagggcgccgcgcagcagccgcacctgcggaagaacacgctactgcaggacctggccgacaagtaccgccgcgccgcacgcgagatacaggcgggctccgaccctgcccactgcccctgcccgggctccagttccctctccagcgcggccgcgaggccccggcgccgcccggaactgcagcgggtggcagtagagaagagcatcacagaagttgctcaggagctgacagagctggtggaacatcttgtagacattgtcagaagcctgcagaatcagaggcccctatcagaatctggaccagacaacgaactgagcatcctgggcaaggctttttcttctggggtggatctttccatggcttctccaaagctggtgacttccgacacagctgcagggaaaatcagagatattctccatgacctagaagaaattcaggaaaaattacaagaaagcgtcacctggaaagaggctcctgaagcacaaatgcagggagaactcctggaagccccgtcttcctcctcatgcccattgcctgaccagagccaccctgcactcaggagagcttctcggtttgctcagtgggccatccatccaacctttaacttgaagagcctttcctgcagcctggaggtgtccaaggattcccgtacagtgactgtgtctcaccgcccacaaccctatcgctggagctgtgagaggttttctaccagccaggtcttatgttcccaggccctgtcttctggaaagcattactgggaagtggacactaggaattgcagccactgggcagttggggtggcttcctgggagatgagccgcgaccaggtcctgggaaggactatggactcttgttgtgtggaatggaaggggactagccagctctctgcatggcacatggtcaaggaaactgtccttggctcagacagacctggggtggtgggcatctggctgaaccttgaggagggaaagcttgccttctattcagtggacaatcaggagaagcttctgtatgagtgtaccatctctgcctcctctcctttgtaccctgccttctggctgtatggcttacatcctggaaattacctgataataaagcaagtaaaggtgtaaggtttcctaagggattacaacacagtggtttcctggtctctctccctgtcatcaatcagggtagtaacttgacttaagaataccactttttagaaaaattacgatagagatgggatctcactaggttgcccaggctggtgtcgaattcctggtctcaagcagtcctcccacctcagcctcccaaggtgctgggattacaggtgtgagccaccacacctggccaagaataccacttttgaagttaatccttttgtgtgatacaggatgaacttgggatgtttgaaccctggacattccaaataaagaataggcccctgcctggctcctgggagataacctctaagccattagaatatcttgcctgataagagtgtttttgtttacctgtgggccttgggccatgcagtatcagcttgaccttgcaaggtcaagctgaggagactaagttagccatgtgggcagtgaagcatgccaatgtgatcaatccctagtaaaagccctggacacctaggcatgggtgagctactctggttggtaatactctgtgcacacatcattgtagccacacatcattgctgggagaattaagcattatcctgaagactctgccaggagaggataattggaagttctcttggaccttaccttatgtgcctttcttcattgctgattttaatctgtatcctttcactgtaataaactgtaactatgagtgcaaca

SEQ ID NO: 223614 - DNA, 2094 bp, Artificial Sequence
  derived and/or modified sequence
gccgcctgttggccatggcgggcctgggcctgggctccgccgttcccgtgtggctggccgaggacgacctcggctgcatcatctgccaggggctgctggactggcccgccacgctgccctgcggccacagcttctgccgccactgcctggaggccctgtggggcgcccgcgacgcccgccgctgggcctgccccacttgccgccagggcgccgcgcagcagccgcacctgcggaagaacacgctactgcaggacctggccgacaagtaccgccgcgccgcacgcgagatacaggcgggctccgaccctgcccactgcccctgcccgggctccagttccctctccagcgcggccgcgaggccccggcgccgcccggaactgcagcgggtggcagtagagaagagcatcacagaagttgctcaggagctgacagagctggtggaacatcttgtagacattgtcagaagcctgcagaatcagaggcccctatcagaatctggaccagacaacgaactgagcatcctgggcaaggctttttcttctggggtggatctttccatggcttctccaaagctggtgacttccgacacagctgcagggaaaatcagagatattctccatgacctagaagaaattcaggaaaaattacaagaaagcgtcacctggaaagaggctcctgaagcacaaatgcagggttctctgttgcccaggctggagtgcagtggcacaatcactgcagcctcgatctctcaggctcaggagaactcctggaagccccgtcttcctcctcatgcccattgcctgaccagagccaccctgcactcaggagagcttctcggtttgctcagtgggccatccatccaacctttaacttgaagagcctttcctgcagcctggaggtgtccaaggattcccgtacagtgactgtgtctcaccgcccacaaccctatcgctggagctgtgagaggttttctaccagccaggtcttatgttcccaggccctgtcttctggaaagcattactgggaagtggacactaggaattgcagccactgggcagttggggtggcttcctgggagatgagccgcgaccaggtcctgggaaggactatggactcttgttgtgtggaatggaaggggactagccagctctctgcatggcacatggtcaaggaaactgtccttggctcagacagacctggggtggtgggcatctggctgaaccttgaggagggaaagcttgccttctattcagtggacaatcaggagaagcttctgtatgagtgtaccatctctgcctcctctcctttgtaccctgccttctggctgtatggcttacatcctggaaattacctgataataaagcaagtaaaggtgtaaggtttcctaagggattacaacacagtggtttcctggtctctctccctgtcatcaatcagggtagtaacttgacttaagaataccactttttagaaaaattacgatagagatgggatctcactaggttgcccaggctggtgtcgaattcctggtctcaagcagtcctcccacctcagcctcccaaggtgctgggattacaggtgtgagccaccacacctggccaagaataccacttttgaagttaatccttttgtgtgatacaggatgaacttgggatgtttgaaccctggacattccaaataaagaataggcccctgcctggctcctgggagataacctctaagccattagaatatcttgcctgataagagtgtttttgtttacctgtgggccttgggccatgcagtatcagcttgaccttgcaaggtcaagctgaggagactaagttagccatgtgggcagtgaagcatgccaatgtgatcaatccctagtaaaagccctggacacctaggcatgggtgagctactctggttggtaatactctgtgcacacatcattgtagccacacatcattgctgggagaattaagcattatcctgaagactctgccaggagaggataattggaagttctcttggaccttaccttatgtgcctttcttcattgctgattttaatctgtatcctttcactgtaataaactgtaactatgagtgc

SEQ ID NO: 223615 - DNA, 1946 bp, Artificial Sequence
  derived and/or modified sequence
gttggccatggcgggcctgggcctgggctccgccgttcccgtgtggctggccgaggacgacctcggctgcatcatctgccaggggctgctggactggcccgccacgctgccctgcggccacagcttctgccgccactgccgcacctgcggaagaacacgctactgcaggacctggccgacaagtaccgccgcgccgcacgcgagatacaggcgggctccgaccctgcccactgcccctgcccgggctccagttccctctccagcgcggccgcgaggccccggcgccgcccggaactgcagcgggtggcagtagagaagagcatcacagaagttgctcaggagctgacagagctggtggaacatcttgtagacattgtcagaagcctgcagaatcagaggcccctatcagaatctggaccagacaacgaactgagcatcctgggcaaggctttttcttctggggtggatctttccatggcttctccaaagctggtgacttccgacacagctgcagggaaaatcagagatattctccatgacctagaagaaattcaggaaaaattacaagaaagcgtcacctggaaagaggctcctgaagcacaaatgcagggagaactcctggaagccccgtcttcctcctcatgcccattgcctgaccagagccaccctgcactcaggagagcttctcggtttgctcagtgggccatccatccaacctttaacttgaagagcctttcctgcagcctggaggtgtccaaggattcccgtacagtgactgtgtctcaccgcccacaaccctatcgctggagctgtgagaggttttctaccagccaggtcttatgttcccaggccctgtcttctggaaagcattactgggaagtggacactaggaattgcagccactgggcagttggggtggcttcctgggagatgagccgcgaccaggtcctgggaaggactatggactcttgttgtgtggaatggaaggggactagccagctctctgcatggcacatggtcaaggaaactgtccttggctcagacagacctggggtggtgggcatctggctgaaccttgaggagggaaagcttgccttctattcagtggacaatcaggagaagcttctgtatgagtgtaccatctctgcctcctctcctttgtaccctgccttctggctgtatggcttacatcctggaaattacctgataataaagcaagtaaaggtgtaaggtttcctaagggattacaacacagtggtttcctggtctctctccctgtcatcaatcagggtagtaacttgacttaagaataccactttttagaaaaattacgatagagatgggatctcactaggttgcccaggctggtgtcgaattcctggtctcaagcagtcctcccacctcagcctcccaaggtgctgggattacaggtgtgagccaccacacctggccaagaataccacttttgaagttaatccttttgtgtgatacaggatgaacttgggatgtttgaaccctggacattccaaataaagaataggcccctgcctggctcctgggagataacctctaagccattagaatatcttgcctgataagagtgtttttgtttacctgtgggccttgggccatgcagtatcagcttgaccttgcaaggtcaagctgaggagactaagttagccatgtgggcagtgaagcatgccaatgtgatcaatccctagtaaaagccctggacacctaggcatgggtgagctactctggttggtaatactctgtgcacacatcattgtagccacacatcattgctgggagaattaagcattatcctgaagactctgccaggagaggataattggaagttctcttggaccttaccttatgtgcctttcttcattgctgattttaatctgtatcctttcactgtaataaactgtaactatgagtgc

SEQ ID NO: 223616 - DNA, 1299 bp, Artificial Sequence
  derived and/or modified sequence
atggccggcctgggcctgggcagcgccgtgcccgtgtggctggccgaggacgacctgggctgcatcatctgccagggcctgctggactggcccgccaccctgccctgcggccacagcttctgcagacactgcctggaggccctgtggggcgccagagacgccagaagatgggcctgccccacctgcagacagggcgccgcccagcagccccacctgagaaagaacaccctgctgcaggacctggccgacaagtacagaagagccgccagagagatccaggccggcagcgaccccgcccactgcccctgccccggcagcagcagcctgagcagcgccgccgccagacccagaagaagacccgagctgcagagagtggccgtggagaagagcatcaccgaggtggcccaggagctgaccgagctggtggagcacctggtggacatcgtgagaagcctgcagaaccagagacccctgagcgagagcggccccgacaacgagctgagcatcctgggcaaggccttcagcagcggcgtggacctgagcatggccagccccaagctggtgaccagcgacaccgccgccggcaagatcagagacatcctgcacgacctggaggagatccaggagaagctgcaggagagcgtgacctggaaggaggcccccgaggcccagatgcagggcgagctgctggaggcccccagcagcagcagctgccccctgcccgaccagagccaccccgccctgagaagagccagcagattcgcccagtgggccatccaccccaccttcaacctgaagagcctgagctgcagcctggaggtgagcaaggacagcagaaccgtgaccgtgagccacagaccccagccctacagatggagctgcgagagattcagcaccagccaggtgctgtgcagccaggccctgagcagcggcaagcactactgggaggtggacaccagaaactgcagccactgggccgtgggcgtggccagctgggagatgagcagagaccaggtgctgggcagaaccatggacagctgctgcgtggagtggaagggcaccagccagctgagcgcctggcacatggtgaaggagaccgtgctgggcagcgacagacccggcgtggtgggcatctggctgaacctggaggagggcaagctggccttctacagcgtggacaaccaggagaagctgctgtacgagtgcaccatcagcgccagcagccccctgtaccccgccttctggctgtacggcctgcaccccggcaactacctgatcatcaagcaggtgaaggtgtag

SEQ ID NO: 223617 - protein, 394 aa, Artificial Sequence
  derived and/or modified sequence
MTEQETLALLEVKRSDSPEKSSPQALVPNGRQPEGEGGAESPGAESLRVGSSAGSPTAIEGAEDGLDSTVSEAATLPWGTGPQPSAPFPDPPGWRDIEPEPPESEPLTKLEELPEDDANLLPEKAARAFVPIDLQCIERQPQEDLIVRCEAGEGECRTFMPPRVTHPDPTERKWAEAVVRPPGCSCGGCGSCGDREWLRAVASVGAALILFPCLLYGAYAFLPFDVPRLPTMSSRLIYTLRCGVFATFPIVLGILVYGLSLLCFSALRPFGEPRREVEIHRRYVAQSVQLFILYFFNLAVLSTYLPQDTLKLLPLLTGLFAVSRLIYWLTFAVGRSFRGFGYGLTFLPLLSMLMWNLYYMFVVEPERMLTATESRLDYPDHARSASDYRPRPWG

SEQ ID NO: 223618 - protein, 132 aa, Artificial Sequence
  derived and/or modified sequence
MTEQETLALLEVKRDPGVRAEPVMLFCPSALWGATAGGGDPPAICGPVGPALYSLLLQPGRAFHLPAPGYPQTAPSAHWSLCRLPADLLADLCRGPLLPRLRLRPDVSATAVDADVEPLLHVRGGAGAHAHC

SEQ ID NO: 223619 - DNA, 1185 bp, Artificial Sequence
  derived and/or modified sequence
atgaccgagcaggagaccctggccctgctggaggtgaagagaagcgacagccccgagaagagcagcccccaggccctggtgcccaacggcagacagcccgagggcgagggcggcgccgagagccccggcgccgagagcctgagagtgggcagcagcgccggcagccccaccgccatcgagggcgccgaggacggcctggacagcaccgtgagcgaggccgccaccctgccctggggcaccggcccccagcccagcgcccccttccccgacccccccggctggagagacatcgagcccgagccccccgagagcgagcccctgaccaagctggaggagctgcccgaggacgacgccaacctgctgcccgagaaggccgccagagccttcgtgcccatcgacctgcagtgcatcgagagacagccccaggaggacctgatcgtgagatgcgaggccggcgagggcgagtgcagaaccttcatgccccccagagtgacccaccccgaccccaccgagagaaagtgggccgaggccgtggtgagaccccccggctgcagctgcggcggctgcggcagctgcggcgacagagagtggctgagagccgtggccagcgtgggcgccgccctgatcctgttcccctgcctgctgtacggcgcctacgccttcctgcccttcgacgtgcccagactgcccaccatgagcagcagactgatctacaccctgagatgcggcgtgttcgccaccttccccatcgtgctgggcatcctggtgtacggcctgagcctgctgtgcttcagcgccctgagacccttcggcgagcccagaagagaggtggagatccacagaagatacgtggcccagagcgtgcagctgttcatcctgtacttcttcaacctggccgtgctgagcacctacctgccccaggacaccctgaagctgctgcccctgctgaccggcctgttcgccgtgagcagactgatctactggctgaccttcgccgtgggcagaagcttcagaggcttcggctacggcctgaccttcctgcccctgctgagcatgctgatgtggaacctgtactacatgttcgtggtggagcccgagagaatgctgaccgccaccgagagcagactggactaccccgaccacgccagaagcgccagcgactacagacccagaccctggggctag

SEQ ID NO: 223620 - DNA, 1185 bp, Artificial Sequence
  derived and/or modified sequence
atgaccgagcaggagactctcgcgttgctggaagtgaaacggtcggattcacccgaaaagtcatcaccgcaggcccttgttcctaacggccgccagcctgaaggggaggggggggccgaaagcccaggggctgagtctcttagggttggcagcagcgctggaagtcctactgctatcgagggcgctgaggacggtcttgactccacagtgtccgaagcagcgacacttccttggggcacaggacctcagcccagcgccccgtttcctgaccctcctggatggagggatatagagcctgagccgccggaatccgaacccttaaccaaactagaggagctgcctgaggacgacgcgaacctcctccccgagaaggccgccagagcctttgtccctatcgacctccagtgtatcgagcggcagcctcaagaggatttgattgtgcgctgcgaggccggagagggcgaatgtaggacctttatgcctcctagagttacccatccggatccgaccgaaaggaaatgggccgaggcagtggtgagaccaccaggctgtagttgcggaggatgcggctcctgtggtgatcgagaatggctaagggcggtggcgagcgttggagccgcgctgattctgtttccatgtttattgtatggcgcctacgctttcctgccctttgacgttccccgactgccaacaatgtcctccagattgatctacacccttcggtgtggcgttttcgccactttcccaattgtcctggggattctggtgtacggactctcactgctctgttttagcgctctccgaccatttggtgagccgaggcgcgaggtagagattcacagaaggtacgtggcccagtcggtgcagttattcattctctactttttcaacctggccgtgttgagcacgtacctcccacaagacactctgaaacttctgcctctgctgacaggactcttcgccgtaagcagactgatttattggctgactttcgccgtggggcggtcttttcgtggattcggatacggcctgactttcctgccactgctatcgatgcttatgtggaacctatactatatgttcgtggtggagcccgagcgcatgctcaccgccaccgagagtagactggattatccagatcatgctcggagcgctagtgactaccgccccaggccatggggatag

SEQ ID NO: 223621 - DNA, 1185 bp, Artificial Sequence
  derived and/or modified sequence
atgacagagcaagagacattggccttactggaggtgaagagaagcgattcacctgagaagagctcccctcaggctctcgtgcctaatggccggcagccggagggcgagggtggagctgaatcgccgggcgctgaatctctgcgggtgggaagctcagcaggttcccctaccgccatcgagggggccgaagacggtctcgatagtactgtgagtgaagctgcgactctgccctggggaacaggcccccagccatccgccccgttcccagaccctccagggtggcgggacatagaacccgagcctcccgaatccgagcctctcacaaagctggaagaactgccagaagatgatgcaaatttgctaccagaaaaagccgcacgggcattcgtgcccattgatctgcagtgtatagagcggcagcctcaggaagatctgatcgttagatgtgaggccggcgaaggagaatgccgcacctttatgcccccccgtgtgactcaccccgatcctacggagcgaaagtgggcggaggccgtcgtacggcctccaggatgcagctgcggagggtgtggatcgtgtggagaccgcgaatggctgcgtgcagtggctagcgtgggcgcagcattaatcctttttccctgcttgctgtacggggcctacgcgttcttgccatttgatgtgcctcggctgccgacaatgagttccagactcatctatacactgaggtgcggagtcttcgctacattccccatcgtgctgggcatcctggtgtatggtcttagcctactgtgttttagcgccctgagacctttcggtgaacccaggagagaagttgagattcacagacgctatgttgcccagagcgtgcagcttttcatcctgtatttcttcaacctggccgtgctctccacataccttccacaggacactcttaaattactgccactgttgaccggactcttcgctgtgagccgccttatttactggcttacattcgcagtaggcaggtcgttccgcggttttggctacggcctgaccttccttcctcttcttagcatgctgatgtggaacctatattatatgtttgttgtagagcctgagcgcatgctaacagccactgagtcacgactggactatccagaccacgcccggagtgcatctgattaccgccctagaccttggggctag

SEQ ID NO: 223622 - DNA, 1185 bp, Artificial Sequence
  derived and/or modified sequence
atgacagagcaggagaccctggccctgctggaggtgaagagaagtgacagccctgagaagagcagcccccaggccctggtgcccaacggccggcagcctgagggggagggcggcgctgagagccctggagctgagagcctgcgggtgggcagcagcgctggcagccccacagccattgaaggagcagaagatggcctggacagcacagtgtctgaggccgccaccctgccctggggcaccggcccccagcccagcgcccccttcccagaccccccaggctggagggacatcgagcctgagcccccagagagcgagcccctgaccaagctggaggagctgcctgaagatgatgccaacctgctgcctgagaaggccgcccgggcctttgtgcccatcgacctgcagtgcatcgagcggcagccccaggaggacctgattgtgcgctgtgaggccggggagggagaatgtaggaccttcatgccaccccgggtgacccacccagaccccacagagaggaagtgggccgaggccgtggtgcggcccccaggctgcagctgtggcggctgcggcagctgtggggaccgggagtggctgcgggctgtggcctctgtgggcgccgccctgatcctcttcccctgcctgctgtatggagcctatgccttcctgccctttgatgtgccccggctgcccaccatgagcagccgcctcatctacaccctgcgctgtggggtgtttgccaccttccccatcgtgctgggcatcctggtgtatggcctgagcctgctgtgcttcagcgccctgcggccctttggagagccccggcgggaggtggagatccacagaagatatgtggcccagagcgtgcagctgttcatcctgtacttcttcaacctggccgtgctgagcacctacctgccccaggacaccctgaagctgctgcccctgctgaccggcctgtttgctgtgagccgcctcatctactggctgacctttgctgtgggccgctccttccggggcttcggctacggcctgaccttcctgcccctgctgtccatgctgatgtggaacctgtactacatgtttgtggtggagcctgagaggatgctgacagccacagagagccggctggactacccagaccacgcccggagcgccagtgactaccggccccggccctggggctag

SEQ ID NO: 223623 - DNA, 1185 bp, Artificial Sequence
  derived and/or modified sequence
atgaccgagcaggagaccctggccctgctggaggtgaagcggagcgacagtcctgagaagtcttctccacaggcactggttcccaacggacgacagccagagggggaaggaggcgctgagtcccccggggccgagagccttagggtgggatcctcagccggatcacccacagctatagagggggccgaagatggtctagattctaccgtgtcggaggccgccactcttccttggggcacaggacctcagccttccgctccctttccagatcccccaggctggcgggatatcgagcccgaaccaccggaatcagaacccctgactaagctggaggagttgccagaggatgatgccaatttacttcctgagaaggcggccagggcatttgttcccattgacctccaatgtatcgagcgacagccccaagaagatttgatcgtgcggtgtgaagctggggaaggcgagtgcagaaccttcatgccaccacgagtcacgcacccagatcctacagagagaaaatgggccgaagcagtggtccgccccccaggttgcagttgtggtggctgtggatcttgcggggatcgcgaatggctgcgcgccgttgccagtgtcggcgctgcacttatactctttccatgcctgctttacggcgcgtatgccttcttgccgttcgacgttcctcgcctgcctacaatgtcctcgaggctgatatatactctccggtgcggcgtttttgccacttttccgatcgtcttggggatcctggtgtacggactaagtctactgtgtttcagcgctctacgtccctttggagagcccaggagagaggttgagatacatcggcgatacgtggcccaaagcgtacagctttttatactctactttttcaatctcgccgttctttctacatacctgcctcaagataccctgaagctgctacctctgttaaccggactctttgccgtgagccgattgatctactggctgaccttcgcggtcggccgctcgttcagagggttcgggtatggtctgacttttctgcctctgctgagtatgcttatgtggaatctgtactacatgtttgttgttgagcctgaacgcatgctgacagccacggagagcaggctggattatcccgaccatgcaaggtccgctagcgactataggcctaggccctggggctag

SEQ ID NO: 223624 - DNA, 1185 bp, Artificial Sequence
  derived and/or modified sequence
atgaccgagcaggagaccctggccctgctggaggtgaagcggagcgatagtcctgaaaagagctcaccccaagcgctggtgcccaacggacgccaacctgaaggtgagggcggcgcagaatcccctggagctgagagtctccgggtgggcagctctgccgggagcccaacagctatagagggcgccgaagacggcttggattccactgtcagtgaagccgccactctgccatggggtaccggccctcaaccctccgcaccattccccgatcccccaggttggcgggatatcgaacctgaaccccccgaaagcgagccactcacgaagttagaggaacttcccgaggatgatgctaacctgctgccagagaaagccgctcgcgccttcgtgcccattgatctgcagtgtattgaacgacagcctcaggaggacctcattgtgaggtgtgaggctggtgaaggggaatgtaggacatttatgcctcctcgggtcacccacccagaccccacggagcggaagtgggcagaagcagtggtgcgccctcctggctgttcatgtggtgggtgtggctcctgcggtgatcgtgagtggctgcgcgcggttgcatcggtgggagcagcactgatcttgtttccatgcttgctctacggcgcttatgcctttttacccttcgacgtgcctcgcctgccaactatgtcctccagattgatttacacgctgcgatgcggggtgtttgctaccttccccatcgtgctaggcattctggtgtacgggctgtccctcctctgttttagcgcactgagacccttcggcgagcctcggcgagaagtggaaatacaccggcggtacgtcgcccagtccgtgcagctgttcatcctatatttcttcaatcttgctgtgctgtctacatacctgcctcaagataccctgaaattgttgccactgcttactggactgtttgccgtgtcgcgactgatctattggttgacatttgccgtggggaggagcttcagagggttcggttacggtctgacctttctacctctgctgtctatgctcatgtggaatctgtattatatgtttgtagtcgaacctgaaagaatgctgaccgctacagagtcccgtctggattatccggaccatgccaggtcggcttcggactacagaccccgcccatggggatag

SEQ ID NO: 223625 - DNA, 1185 bp, Artificial Sequence
  derived and/or modified sequence
atgactgaacaggaaacactagccttgctggaggtgaaacgctcagattcacctgagaagtcaagcccacaagccctggttcccaacggtcgacagcccgaaggcgagggcggtgctgagtccccgggagccgaatccctgcgggtgggtagtagcgctggctcccctacggcaatcgagggcgctgaggacggattggatagcacagtgtctgaggccgcaacacttccgtgggggactggcccacagccctcagctcccttccccgacccaccgggttggcgtgatatagagccagaaccccctgaatcagagcctcttacaaagttggaagagctccctgaagacgatgccaatctcttgcccgagaaagctgccagggctttcgtgccaatcgatctccagtgtattgagcgacagcctcaggaggatctgatcgtgcggtgtgaagctggggagggcgagtgccgcactttcatgcctccgagagtgactcatccagatcctacggagcggaaatgggctgaggctgttgtgaggcccccagggtgctcgtgcgggggatgtggcagttgcggcgaccgggaatggctaagggccgtggcgtcagtgggtgcagcattgatccttttcccctgcctcctgtacggcgcatatgcattcttgcctttcgatgttcccaggctgccgactatgtcttccagactcatttacactttgcgatgtggcgtattcgccacgttccccattgtcctcggcatactggtctatggcctatccctattatgtttttcagcactccggccttttggggaacccagacgggaggttgagatacaccgcagatacgtggcacaaagcgtccaattgttcatactctacttctttaacttagccgtgctcagcacctatctccctcaggacacactgaaactgcttcctctcctgacgggactcttcgcagtctcacgattgatttactggttaacctttgccgtcggacggtctttccgaggtttcggctacggactgacatttcttcctttattgagtatgctgatgtggaacttgtactacatgttcgtcgtggagcctgagcgcatgctgaccgctactgagtcacggctggattacccagatcacgcccgatccgccagcgactaccgacctcgtccctggggatag

SEQ ID NO: 223626 - DNA, 528 bp, Artificial Sequence
  derived and/or modified sequence
atgacagaacaggagaccttggcactgttagaggttaaaagggatccaggcgtaagagcggagcctgttatgttgttctgcccctccgccttatggggagcaactgcaggcggtggagatccacccgcaatatgtggccctgtgggccctgccctttattctctccttctgcaacccggaagggcattccacttgccagctcctgggtatcctcagaccgccccaagtgcgcactggagtctctgccgtctgccagctgatctactggccgacctgtgccgcggacctctcctcccacggttgcgcttgaggcccgacgtgtcagcaaccgctgtggacgcagacgtagaacccctcctgcacgtccgcggaggggctggagcacacgctcactgccatagagagcctcccggacttccgggaccccgacccctggggttgcgcttgcaggcacctccactaggcttaagcctctcagcgttagcccttggcgtcgggggttccggcctcggcctcacccatctctag

SEQ ID NO: 223627 - DNA, 1185 bp, Artificial Sequence
  derived and/or modified sequence
atgaccgagcaagaaaccctggctctgttggaggtgaagcgcagcgatagtcctgagaaaagcagccctcaggccttagttcctaatgggaggcagcccgaaggcgaggggggagcggagagtcctggcgctgagagcctgcgagtgggtagtagcgcgggttcacccaccgctatcgagggggcagaagatggtttggattccacagtgtctgaggctgccaccttgccatggggcacaggtcctcagcccagcgccccatttccagacccccctggatggcgcgatattgaacccgaaccacccgaaagcgagcctctgaccaaactggaggagctgccggaggatgatgccaacctgctgcccgaaaaagcggctagagccttcgtgcccatcgacttgcaatgtatcgaacgacagccacaagaagaccttatcgttagatgtgaagccggagaaggggagtgccggacatttatgcctccaagggtaactcatcccgacccaaccgaacggaagtgggctgaggccgtcgtaaggcccccaggttgctcgtgtgggggttgtggctcgtgcggagatcgcgaatggctccgagctgtcgcctctgtaggggcagccctcatcctctttccctgccttttgtacggagcctatgccttccttccgttcgatgtgccaaggctgcctacaatgtctagccggttaatctacactctacgatgtggcgtcttcgcaacctttccaatcgtactgggtattctcgtctacggcttgtcactgctttgtttctctgcactccgccctttcggggagcctcgaagagaagtggaaattcataggcgctacgtcgcccaatctgtgcagcttttcattttgtatttttttaatttggcggtcttatcgacatacctgccccaggatacacttaagctgttgccattgctgactggactcttcgccgtgagcaggctgatctattggctgactttcgctgtgggcaggtcctttagaggcttcggctacggactcacattcctccctctgttgtccatgctgatgtggaacctgtattacatgttcgttgtggaaccagagcggatgcttacagccaccgagtctcgcctcgattatccagatcatgcaagatccgccagtgactataggccgcgtccatggggttag

SEQ ID NO: 223628 - DNA, 2191 bp, Artificial Sequence
  derived and/or modified sequence
ggcagcatggcgtctttccggcttctccaaacccttgcgaaaaactttattggcaaagctatcagagaacggacagtgtacccactgaggcggccaaagcttaactggatcagggcaggatgacatgaccttgtggtagatcccagaactgaggccccaggatgacagaacaggagaccctggccctactggaagtgaagaggtctgattccccagagaagagctcaccccaggccttggttcccaatggccggcagccagaaggggaaggtggggccgaatccccgggagctgagtccctcagagtggggtcttcagctggatctcccacagccatagagggggctgaggatggtctagacagcacagtaagtgaggctgccaccttgccctgggggactggccctcagcccagtgctccgttcccggatccccctggctggcgggacattgaaccagagccccctgagtcagaaccacttaccaagctagaggagctgcccgaagacgatgccaacctgctgcctgagaaagcggcccgtgccttcgtgcctattgacctacagtgcattgagcggcagccccaagaagaccttatcgtgcgctgtgaggcaggcgagggcgagtgccgaaccttcatgcccccccgggtcacccaccccgaccccactgagcgcaagtgggctgaggcagtggtgaggccgcctggctgttcctgtgggggctgcgggagctgtggagaccgtgagtggctaagggctgtggcctccgtgggagccgcactcattctcttcccttgcctactatacggggcatatgccttcctgccgtttgatgtcccacggctgcccaccatgagttcccgcctgatctacacactgcgctgcggggtctttgccaccttccccattgtgctggggatcctggtgtacgggctgagcctgttatgcttttctgcccttcggccctttggggagccacggcgggaggtggagatccaccggcgatatgtggcccagtcggtccagctctttattctctacttcttcaacctggccgtgctttccacttacctgccccaggataccctcaaactgctccctctgctcactggtctctttgccgtctcccggctgatctactggctgacctttgccgtgggccgctccttccgaggcttcggctacggcctgacgtttctgccactgctgtcgatgctgatgtggaacctctactacatgttcgtggtggagccggagcgcatgctcactgccaccgagagccgcctggactacccggaccacgcccgctcggcctccgactacaggccccgcccctggggctgagcctctccgccctcgccctcggagtagggggtagcggcttgggtctgacacatctttgaaccttgtggccaggcctggacttcgcccccaggcctaggaccgcggtgggtggaaccctgctactgccccaacagggactccaatcaatcggagttctccccttgccggagctgcccttcacctttggggcccgagacagtcataagggatggacttagttttcttgcagggaaaaaggtggacagccgtgtttcttaaggatgctgagggcatggggccaggaccaggggagaggcacagctccttcctgagcagcctctcaccactgccacaaggctccctaatgctggtctctgctccactccccggcttcccgtgaggcaggaggcagagccacagccaaggccctgaccacttctgtgccagttgtctaagcagagcgcctcagggacgctggaaatgccttaaggatagaggctgggcatcacatcaaatgggactgtggtgtttggtgaaaaccttcctgaggatctggattcaggaccctccatgactggcctatttactgtttacagctggccagtgcagagctgctgctcttttacctttttaggcccctgtaacttcccacctttaaactgcccagaaggcatgcctctcccacaggaagaggggagcagacagggaaatctgcctaccaagaggggtgtgtgtgtctttgtgcccacacgtggtggctggggagtgcctggatggtgcggtggttgatgttaacctagtgtgtgtgtgtgtgtgtgtgtgtgtgtgtgtgtgtgtgtgtgtgtaacaataaattactaccagtc

SEQ ID NO: 223629 - DNA, 975 bp, Artificial Sequence
  derived and/or modified sequence
catggcgtctttccggcttctccaaacccttgcgaaaaactttattggcaaagctatcagagaacggacagtgtacccactgaggcggccaaagcttaactggatcagggcaggatgacatgaccttgtggtagatcccagaactgaggccccaggatgacagaacaggagaccctggccctactggaagtgaagagggatcctggtgtacgggctgagcctgttatgcttttctgcccttcggccctttggggagccacggcgggaggtggagatccaccggcgatatgtggcccagtcggtccagctctttattctctacttcttcaacctggccgtgctttccacttacctgccccaggataccctcaaactgctccctctgctcactggtctctttgccgtctcccggctgatctactggctgacctttgccgtgggccgctccttccgaggcttcggctacggcctgacgtttctgccactgctgtcgatgctgatgtggaacctctactacatgttcgtggtggagccggagcgcatgctcactgccaccgagagccgcctggactacccggaccacgcccgctcggcctccgactacaggccccgcccctggggctgagcctctccgccctcgccctcggagtagggggtagcggcttgggtctgacacatctttgaaccttgtggccaggcctggacttcgcccccaggcctaggaccgcggtgggtggaaccctgctactgccccaacagggactccaatcaatcggagttctccccttgccggagctgcccttcacctttggggcccgagacagtcataagggatggacttagttttcttgcagggaaaaaggtggacagccgtgtttcttaaggatgctgagggcatggggccaggaccaggggagaggcacagctccttcctgagcagcctctcaccactgccacaaggctccctaatgctgg

SEQ ID NO: 223630 - DNA, 2201 bp, Artificial Sequence
  derived and/or modified sequence
aggttttgagacacaggtaaagggagggagacagagagaaatacttgcagagccagcaggtagctgggcagctccttcccggacggacggatggacagacgctggggaccctccactccatatggaaagatgacatgaccttgtggtagatcccagaactgaggccccaggatgacagaacaggagaccctggccctactggaagtgaagaggtctgattccccagagaagagctcaccccaggccttggttcccaatggccggcagccagaaggggaaggtggggccgaatccccgggagctgagtccctcagagtggggtcttcagctggatctcccacagccatagagggggctgaggatggtctagacagcacagtaagtgaggctgccaccttgccctgggggactggccctcagcccagtgctccgttcccggatccccctggctggcgggacattgaaccagagccccctgagtcagaaccacttaccaagctagaggagctgcccgaagacgatgccaacctgctgcctgagaaagcggcccgtgccttcgtgcctattgacctacagtgcattgagcggcagccccaagaagaccttatcgtgcgctgtgaggcaggcgagggcgagtgccgaaccttcatgcccccccgggtcacccaccccgaccccactgagcgcaagtgggctgaggcagtggtgaggccgcctggctgttcctgtgggggctgcgggagctgtggagaccgtgagtggctaagggctgtggcctccgtgggagccgcactcattctcttcccttgcctactatacggggcatatgccttcctgccgtttgatgtcccacggctgcccaccatgagttcccgcctgatctacacactgcgctgcggggtctttgccaccttccccattgtgctggggatcctggtgtacgggctgagcctgttatgcttttctgcccttcggccctttggggagccacggcgggaggtggagatccaccggcgatatgtggcccagtcggtccagctctttattctctacttcttcaacctggccgtgctttccacttacctgccccaggataccctcaaactgctccctctgctcactggtctctttgccgtctcccggctgatctactggctgacctttgccgtgggccgctccttccgaggcttcggctacggcctgacgtttctgccactgctgtcgatgctgatgtggaacctctactacatgttcgtggtggagccggagcgcatgctcactgccaccgagagccgcctggactacccggaccacgcccgctcggcctccgactacaggccccgcccctggggctgagcctctccgccctcgccctcggagtagggggtagcggcttgggtctgacacatctttgaaccttgtggccaggcctggacttcgcccccaggcctaggaccgcggtgggtggaaccctgctactgccccaacagggactccaatcaatcggagttctccccttgccggagctgcccttcacctttggggcccgagacagtcataagggatggacttagttttcttgcagggaaaaaggtggacagccgtgtttcttaaggatgctgagggcatggggccaggaccaggggagaggcacagctccttcctgagcagcctctcaccactgccacaaggctccctaatgctggtctctgctccactccccggcttcccgtgaggcaggaggcagagccacagccaaggccctgaccacttctgtgccagttgtctaagcagagcgcctcagggacgctggaaatgccttaaggatagaggctgggcatcacatcaaatgggactgtggtgtttggtgaaaaccttcctgaggatctggattcaggaccctccatgactggcctatttactgtttacagctggccagtgcagagctgctgctcttttacctttttaggcccctgtaacttcccacctttaaactgcccagaaggcatgcctctcccacaggaagaggggagcagacagggaaatctgcctaccaagaggggtgtgtgtgtctttgtgcccacacgtggtggctggggagtgcctggatggtgcggtggttgatgttaacctagtgtgtgtgtgtgtgtgtgtgtgtgtgtgtgtgtgtgtgtgtgtgtaacaataaattactaccagtc

SEQ ID NO: 223631 - DNA, 524 bp, Artificial Sequence
  derived and/or modified sequence
cttgcagagccagcaggtagctgggcagctccttcccggacggacggatggacagacgctggggaccctccactccatatggaaagatgacatgaccttgtggtagatcccagaactgaggccccaggatgacagaacaggagaccctggccctactggaagtgaagagggatcctggtgtacgggctgagcctgttatgcttttctgcccttcggccctttggggagccacggcgggaggtggagatccaccggcgatatgtggcccagtcggtccagctctttattctctacttcttcaacctggccgtgctttccacttacctgccccaggataccctcaaactgctccctctgctcactggtctctttgccgtctcccggctgatctactggctgacctttgccgtgggccgctccttccgaggcttcggctacggcctgacgtttctgccactgctgtcgatgctgatgtggaacctctactacatgttcgtggtggagccggagcgcatgctcactgc

SEQ ID NO: 223632 - protein, 228 aa, Artificial Sequence
  derived and/or modified sequence
MARHVFLTGPPGVGKTTLIHKASEVLKSSGVPVDGFYTEEVRQGGRRIGFDVVTLSGTRGPLSRVGLEPPPGKRECRVGQYVVDLTSFEQLALPVLRNADCSSGPGQRVCVIDEIGKMELFSQLFIQAVRQTLSTPGTIILGTIPVPKGKPLALVEEIRNRKDVKVFNSPYCVIEDQSKFSSCVSQSTLTEPGWRQKLLQSLLNSEWKKRAPVVPTSVSPPFYLRWIP

SEQ ID NO: 223633 - protein, 190 aa, Artificial Sequence
  derived and/or modified sequence
MARHVFLTGPPGVGKTTLIHKASEVLKSSGVPVDGFYTEEVRQGGRRIGFDVVTLSGTRGPLSRVGLEPPPGKRECRVGQYVVDLTSFEQLALPVLRNADCSSGPGQRVCVIDEIGKMELFSQLFIQAVRQTLSTPGTIILGTIPVPKGKPLALVEEIRNRKDVKVFNVTKENRNHLLPDIVTCVQSSRK

SEQ ID NO: 223634 - DNA, 687 bp, Artificial Sequence
  derived and/or modified sequence
atggccagacacgtgttcctgaccggcccccccggcgtgggcaagaccaccctgatccacaaggccagcgaggtgctgaagagcagcggcgtgcccgtggacggcttctacaccgaggaggtgagacagggcggcagaagaatcggcttcgacgtggtgaccctgagcggcaccagaggccccctgagcagagtgggcctggagcccccccccggcaagagagagtgcagagtgggccagtacgtggtggacctgaccagcttcgagcagctggccctgcccgtgctgagaaacgccgactgcagcagcggccccggccagagagtgtgcgtgatcgacgagatcggcaagatggagctgttcagccagctgttcatccaggccgtgagacagaccctgagcacccccggcaccatcatcctgggcaccatccccgtgcccaagggcaagcccctggccctggtggaggagatcagaaacagaaaggacgtgaaggtgttcaacagcccctactgcgtgatcgaggaccagagcaagttcagcagctgcgtgagccagagcaccctgaccgagcccggctggagacagaagctgctgcagagcctgctgaacagcgagtggaagaagagagcccccgtggtgcccaccagcgtgagcccccccttctacctgagatggatcccctag

SEQ ID NO: 223635 - DNA, 573 bp, Artificial Sequence
  derived and/or modified sequence
atggccagacacgtgttcctgaccggcccccccggcgtgggcaagaccaccctgatccacaaggccagcgaggtgctgaagagcagcggcgtgcccgtggacggcttctacaccgaggaggtgagacagggcggcagaagaatcggcttcgacgtggtgaccctgagcggcaccagaggccccctgagcagagtgggcctggagcccccccccggcaagagagagtgcagagtgggccagtacgtggtggacctgaccagcttcgagcagctggccctgcccgtgctgagaaacgccgactgcagcagcggccccggccagagagtgtgcgtgatcgacgagatcggcaagatggagctgttcagccagctgttcatccaggccgtgagacagaccctgagcacccccggcaccatcatcctgggcaccatccccgtgcccaagggcaagcccctggccctggtggaggagatcagaaacagaaaggacgtgaaggtgttcaacgtgaccaaggagaacagaaaccacctgctgcccgacatcgtgacctgcgtgcagagcagcagaaagtag

SEQ ID NO: 223636 - DNA, 687 bp, Artificial Sequence
  derived and/or modified sequence
atggccaggcacgtcttcctgaccggacctcccggcgtggggaaaaccacactgatccataaagcatccgaggtattgaagtcctccggcgtgccagtagacggtttctacactgaagaagtgagacaggggggtcgtaggattggttttgacgtggttacccttagcggcacaaggggcccactgtcccgcgtcggactcgaacccccccctggaaagagagagtgtcgggtgggccagtatgtggtagacctgacctcattcgagcagcttgcgttacctgtactgcgcaatgccgattgcagttcaggacccgggcaaagagtgtgcgtcatagatgaaattggtaaaatggaactgtttagtcagctattcattcaagcggtacgccagacactgtctaccccaggcacaattattttaggcacaattcccgttccaaagggcaaaccacttgcactagtggaggagattaggaatcggaaggacgtgaaagtgtttaacagtccatactgcgtcattgaggaccagtctaaattctcctcttgtgtatcacaatctaccttgaccgagcctggttggcgccaaaagctgcttcaatctctcctaaactctgagtggaaaaagcgggcacccgtagtgccaaccagtgtgagcccacctttctacctccggtggatcccatag

SEQ ID NO: 223637 - DNA, 573 bp, Artificial Sequence
  derived and/or modified sequence
atggctcggcatgtctttctgactgggccacctggagtgggaaagacaactctcatccataaggcaagcgaggtcctgaaatcaagcggggtgcctgtggatggattctacacagaagaagtgcgtcagggcgggagacgtataggcttcgatgtggtcaccctgtctggcactagaggtcctttgagtcgggtgggcttggaacctcccccgggaaagcgcgagtgccgtgtgggtcaatacgtggtcgatctcacctccttcgagcagttagccttgcccgtgcttagaaacgctgactgtagtagtggcccagggcagcgcgtttgcgtaatcgacgaaattggaaaaatggaactgttcagtcagctgtttattcaggccgtcaggcaaacattgtctactccagggacaattatcctggggactatcccggttcccaaaggtaagcctctagctttggtggaggaaatacggaacagaaaagacgttaaagtcttcaatgttactaaggagaatcgaaaccacttactaccagacattgttacttgcgtccaatcctcccgcaaatag

SEQ ID NO: 223638 - DNA, 687 bp, Artificial Sequence
  derived and/or modified sequence
atggcccggcacgtgttcctgaccggccccccaggagtgggcaagaccaccctcatccacaaggccagcgaggtgctgaagagcagtggagtgcctgtggatggcttctacacagaggaggtgcggcagggcggccgccgcatcggctttgatgtggtgaccctgagcggcacccggggccccctgagccgggtgggcctggagcccccacctgggaagagagaatgtcgggtgggccagtatgtggtggacctgaccagctttgagcagctggccctgcctgtgctgagaaatgctgactgcagcagcggccctggccagagggtgtgtgtgattgatgaaattggcaagatggagctgttcagccagctgttcatccaggccgtgcggcagaccctgagcaccccaggcaccatcatcctgggcaccatccctgtgcccaagggcaagcccctggccctggtggaggagatccggaacaggaaggatgtgaaggtgttcaacagcccctactgtgtgattgaggaccagagcaagttcagcagctgtgtgtcccagagcaccctgacagagcccggctggaggcagaagctgctgcagagcctgctgaacagcgagtggaagaagagggcccctgtggtgcccacctctgtgagcccccccttctacctgcgctggatcccctag

SEQ ID NO: 223639 - DNA, 573 bp, Artificial Sequence
  derived and/or modified sequence
atggcccggcacgtgttcctgaccggccccccaggagtgggcaagaccaccctcatccacaaggccagcgaggtgctgaagagcagtggagtgcctgtggatggcttctacacagaggaggtgcggcagggcggccgccgcatcggctttgatgtggtgaccctgagcggcacccggggccccctgagccgggtgggcctggagcccccacctgggaagagagaatgtcgggtgggccagtatgtggtggacctgaccagctttgagcagctggccctgcctgtgctgagaaatgctgactgcagcagcggccctggccagagggtgtgtgtgattgatgaaattggcaagatggagctgttcagccagctgttcatccaggccgtgcggcagaccctgagcaccccaggcaccatcatcctgggcaccatccctgtgcccaagggcaagcccctggccctggtggaggagatccggaacaggaaggatgtgaaggtgttcaacgtgaccaaggagaacagaaaccacctgctgcctgacatcgtgacctgtgtgcagagcagcaggaagtag

SEQ ID NO: 223640 - DNA, 687 bp, Artificial Sequence
  derived and/or modified sequence
atggcccggcacgtgttcctgaccggcccccccggcgtgggcaagacgacactgatccacaaagcgtccgaggtgctcaaatcttccggcgtgcccgtggatggcttttacaccgaagaggtccggcagggaggcaggcggattggctttgacgtggtgacactcagcggaactcgcgggccgttgtcaagagtgggcctagagccacctcccggaaaacgcgagtgtagggtgggccagtatgtcgtggacctgacatccttcgaacagctggctctacccgtcttgcggaatgcagattgctcttccggccccgggcaaagggtgtgcgtcattgacgagatcggtaaaatggagctgttctcacagttgttcatccaagccgtaagacaaacactgtcaactccgggaacaattatcctgggcactatccctgtaccaaaggggaaaccactcgcccttgtggaggagatccgcaacaggaaagacgtgaaagtattcaatagcccctactgcgtgattgaagaccaaagtaaattttcaagttgcgtgtcccagtctactttgactgagccgggttggaggcagaagctcttgcaatcattactgaactcagaatggaagaagagggcccctgtggtacccacttcagtgtccccgcctttctacctgcgttggatcccatag

SEQ ID NO: 223641 - DNA, 573 bp, Artificial Sequence
  derived and/or modified sequence
atggcccggcacgtgttcctgaccggcccccccggcgtgggcaagacaaccctcatccataaggccagtgaagtgctgaagtcgtccggcgtgcccgtggacggcttttataccgaggaggtccggcaaggaggtcggagaattggcttcgatgtcgtcactctgtctggaacccggggacccctgagccgtgtgggcttggagcccccgccagggaaacgcgaatgcagggtcgggcaatacgtggtggatctaacatccttcgaacagctcgcccttcccgtcctgcgtaacgctgactgctcttctggccccggccagagggtttgcgttattgatgagattgggaagatggaactttttagtcagctattcatccaggctgtgaggcaaaccctttccacaccaggaactattatactgggtacgatccccgtgcctaaaggaaaaccacttgccctggttgaagaaattaggaaccgcaaggacgttaaagtgttcaatgtgactaaggagaatcggaaccacttgcttcctgacattgttacgtgcgtccagagctctaggaaatag

SEQ ID NO: 223642 - DNA, 1762 bp, Artificial Sequence
  derived and/or modified sequence
ggacctgacctgaattgcgaccccaacctggactgctcccctgaccgcaacccctacccccgcccaccagtatggcccggcacgtgttcctaacggggcccccaggagttggaaaaacaacattgatccataaagccagtgaggttttaaaatcctctggtgtgcctgttgatggattttataccgaagaagtcagacagggagggagaagaataggattcgatgtcgtcacgttgtccggcacccgggggcctttatcgagagttgggttagagcctccacctggaaaacgtgaatgccgagttgggcagtatgtggtcgacctgacttcttttgagcagttggcactacccgtcttgaggaatgccgactgcagcagtggcccagggcaaagagtgtgcgtcatcgatgagattgggaagatggagctcttcagtcagcttttcattcaagctgttcgtcagacgctgtctaccccagggactataatccttggcacaatcccagttcctaaaggaaagccactggctcttgtagaagaaatcagaaacagaaaggatgtgaaggtgtttaattcaccgtactgtgtcatagaagaccagagcaaattctccagctgtgtatcacagtccactctcacagagcctggctggaggcagaagctactgcaatcactgctgaactcagagtggaagaaaagggcccctgtggtgcccacctctgtgtcgcctcctttctacctcaggtggattccttgaatgcaaacaacaggaatggactttggctaacttaagtgaaaacagcatcaaaaagccttataggctttggagctgtcccatgaagccaaaggaaaagctgactgtcctcatttcaagtggagccacagccgcccaggattgacgcagccaggaccagtagaaatgggatcacaggattgacgcagccaggaccggtagaaatgggatcacgggactgacgcagccaggaccagtagaaatgggatcacgggattgacgcagccaggaccagtagaaatgggatcagcttctggcacttgctgcgtgagctcactcctcttggggtgcagatctcagtcactcctcttggggtacagatctcagagaagttgccagggcctggcttgcccacttgttggctgggggcaagtttcctagaccgtacagtctcctaaagacaaccagagcactcttccaagaagggtgagcaggtgccaggaaccagaattgacgaggtccgctctgcatctcctcttcagacatgtattggcacctattgtatgccaggccccctcttcagatacaaccaccctgaacctcagaaggcttccacatgcactccctgctcttaccgggaaccttggctcagccccttttccatggttcacctgtcgaaattacatccaggcttaagcacccctggaagcctttcctgcccctgaccccacacatgcccctgttcctgcctgccccccagactccttcattgtccttgttcatgcctgtcctgtcctggtctgcgagctccatgaggtcagggtccttacctgtggtgcttctctatgcgcatctctgtgcctggctcctgtttgcccttccaccccatcagcgtgtgttgagtggatggatattatatgggccaagtaggaaggcactgtgatgggagcagagatggcccttcctttaccctggggcactcgggatggtgtggtagtgaaagaaaaataaacagatcatcgggtaaa

SEQ ID NO: 223643 - DNA, 1231 bp, Artificial Sequence
  derived and/or modified sequence
gtcgcgaccctggtccggacctgacctgaattgcgaccccaacctggactgctcccctgaccgcaacccctacccccgcccaccagtatggcccggcacgtgttcctaacggggcccccaggagttggaaaaacaacattgatccataaagccagtgaggttttaaaatcctctggtgtgcctgttgatggattttataccgaagaagtcagacagggagggagaagaataggattcgatgtcgtcacgttgtccggcacccgggggcctttatcgagagttgggttagagcctccacctggaaaacgtgaatgccgagttgggcagtatgtggtcgacctgacttcttttgagcagttggcactacccgtcttgaggaatgccgactgcagcagtggcccagggcaaagagtgtgcgtcatcgatgagattgggaagatggagctcttcagtcagcttttcattcaagctgttcgtcagacgctgtctaccccagggactataatccttggcacaatcccagttcctaaaggaaagccactggctcttgtagaagaaatcagaaacagaaaggatgtgaaggtgtttaatgtcaccaaggaaaacagaaaccaccttctgccagatatcgtgacgtgcgtgcagagcagcaggaagtgaagacacgtgcattcctgccttccgtgaaggagtgcccagttcaagaggagcctgatggagccctgcctgtcgaggctgtatgcctatggggttatggaaccttgtgggcttttctagagaaaactcaacagctgtttcccataaaatgtttaaaagatcaaattagccttaatgctggattgtctgtacaagattaactatccattgtggcttatctatgcttaaagatttcttgtttatttcctcttgcagtcatgcacatgatttgggtaaactgtgagatgagaaatggttttcagagtattagatggaattcacccccgttgaagtttataaatgtgttcaggggaagcgggaggaaagagttcactgcctaatcagttttgcatgtcatgaaaattaaattcctctccaggtgcagcttcagcctcatgcaacttaaagtgataacagttatttgattttttaaaaaatattattccaaaagaaaaccattttaggtcatctcccccaactctgtttgcttactgcttaataaatataaaaataaatctgatggttacagacagga

SEQ ID NO: 223644 - DNA, 687 bp, Artificial Sequence
  derived and/or modified sequence
atggcccgacacgtgttcctgacagggccacctggagtgggtaagacaaccctgattcacaaggctagcgaagtattgaaatcctccggggtgcctgtggatggcttttatacagaggaagtccggcaagggggaagacgcattggctttgatgtcgtgacgctcagcggcacccggggacccctgtcgcgggtggggctggagcctccccctggcaagcgcgagtgcagagtgggccagtacgttgtcgacctcacctcgttcgaacaactggccctgccggtgcttaggaacgccgattgcagctccgggcctgggcagagagtgtgtgtgatcgacgagattgggaagatggagctcttctcgcagctgttcatccaggcagtccggcaaaccctgagtactccaggaacaattattttgggcaccattccggtgcccaagggcaagcctttggcgctggtggaggagatccggaacaggaaagatgttaaagtgtttaattcaccatactgcgttatagaggatcagagcaagttctcatcgtgtgtgtctcagtccaccctgaccgagccgggatggcgacaaaagctcctacaatccctactgaatagcgaatggaaaaaacgtgcccctgtggtgccaacaagcgtctcacccccattttacttaaggtggataccgtag

SEQ ID NO: 223645 - DNA, 573 bp, Artificial Sequence
  derived and/or modified sequence
atggcgaggcacgtgtttcttacaggtcctccaggggtgggtaagaccaccttgatccataaggcctcagaggtgctcaagtcgtctggcgtccccgtcgacggtttctacacggaggaggtcagacagggcggtagacgcattgggttcgacgtggtgacattatcaggtacgcggggtcccctatcccgcgtcgggttggaaccccctcctggtaagagggagtgtcgcgtgggacaatacgttgtggacctcacctcgtttgaacaactagcattacctgtcctgcggaatgctgactgcagctcagggcctggccaacgagtctgtgtaatcgatgaaattgggaaaatggagttattctcacagttgttcattcaggcagtgcggcagacactctctactcccggaacaatcatactgggcacgatacccgtgcccaaagggaaaccgttagcactggtagaagagatccgaaatcgcaaagacgtgaaagtcttcaacgtgacaaaagagaatcgtaatcacttactacccgacattgtcacctgtgtccagagtagccggaagtag

SEQ ID NO: 223646 - protein, 504 aa, Artificial Sequence
  derived and/or modified sequence
MSQPRTPEQALDTPGDCPPGRRDEDAGEGIQCSQRMLSFSDALLSIIATVMILPVTHTEISPEQQFDRSVQRLLATRIAVYLMTFLIVTVAWAAHTRLFQVVGKTDDTLALLNLACMMTITFLPYTFSLMVTFPDVPLGIFLFCVCVIAIGVVQALIVGYAFHFPHLLSPQIQRSAHRALYRRHVLGIVLQGPALCFAAAIFSLFFVPLSYLLMVTVILLPYVSKVTGWCRDRLLGHREPSAHPVEVFSFDLHEPLSKERVEAFSDGVYAIVATLLILDICEDNVPDPKDVKERFSGSLVAALSATGPRFLAYFGSFATVGLLWFAHHSLFLHVRKATRAMGLLNTLSLAFVGGLPLAYQQTSAFARQPRDELERVRVSCTIIFLASIFQLAMWTTALLHQAETLQPSVWFGGREHVLMFAKLALYPCASLLAFASTCLLSRFSVGIFHLMQIAVPCAFLLLRLLVGLALATLRVLRGLARPEHPPPAPTGQDDPQSQLLPAPC

SEQ ID NO: 223647 - DNA, 1515 bp, Artificial Sequence
  derived and/or modified sequence
atgagccagcccagaacccccgagcaggccctggacacccccggcgactgcccccccggcagaagagacgaggacgccggcgagggcatccagtgcagccagagaatgctgagcttcagcgacgccctgctgagcatcatcgccaccgtgatgatcctgcccgtgacccacaccgagatcagccccgagcagcagttcgacagaagcgtgcagagactgctggccaccagaatcgccgtgtacctgatgaccttcctgatcgtgaccgtggcctgggccgcccacaccagactgttccaggtggtgggcaagaccgacgacaccctggccctgctgaacctggcctgcatgatgaccatcaccttcctgccctacaccttcagcctgatggtgaccttccccgacgtgcccctgggcatcttcctgttctgcgtgtgcgtgatcgccatcggcgtggtgcaggccctgatcgtgggctacgccttccacttcccccacctgctgagcccccagatccagagaagcgcccacagagccctgtacagaagacacgtgctgggcatcgtgctgcagggccccgccctgtgcttcgccgccgccatcttcagcctgttcttcgtgcccctgagctacctgctgatggtgaccgtgatcctgctgccctacgtgagcaaggtgaccggctggtgcagagacagactgctgggccacagagagcccagcgcccaccccgtggaggtgttcagcttcgacctgcacgagcccctgagcaaggagagagtggaggccttcagcgacggcgtgtacgccatcgtggccaccctgctgatcctggacatctgcgaggacaacgtgcccgaccccaaggacgtgaaggagagattcagcggcagcctggtggccgccctgagcgccaccggccccagattcctggcctacttcggcagcttcgccaccgtgggcctgctgtggttcgcccaccacagcctgttcctgcacgtgagaaaggccaccagagccatgggcctgctgaacaccctgagcctggccttcgtgggcggcctgcccctggcctaccagcagaccagcgccttcgccagacagcccagagacgagctggagagagtgagagtgagctgcaccatcatcttcctggccagcatcttccagctggccatgtggaccaccgccctgctgcaccaggccgagaccctgcagcccagcgtgtggttcggcggcagagagcacgtgctgatgttcgccaagctggccctgtacccctgcgccagcctgctggccttcgccagcacctgcctgctgagcagattcagcgtgggcatcttccacctgatgcagatcgccgtgccctgcgccttcctgctgctgagactgctggtgggcctggccctggccaccctgagagtgctgagaggcctggccagacccgagcaccccccccccgcccccaccggccaggacgacccccagagccagctgctgcccgccccctgctag

SEQ ID NO: 223648 - DNA, 1515 bp, Artificial Sequence
  derived and/or modified sequence
atgtcccaaccgagaacccccgaacaagcccttgacactcctggcgactgcccacccggtcgccgcgatgaagacgccggcgaaggcatacaatgctcacagcggatgctctctttctccgatgcactcctctctatcatcgcaactgttatgatcttaccagttactcacacagagatctctccagagcaacagttcgatcggtctgtgcagcgcctccttgctacaagaatcgcagtttacctgatgacatttctgattgtgacagtggcctgggcagctcacacgaggctctttcaagtggttgggaagacggatgacacgctggctcttctgaatttggcttgtatgatgaccataacattcttgccctatactttcagtcttatggtgacctttcccgacgtccctctgggcatttttctcttttgcgtttgtgtgattgccatcggcgtcgtccaggcgctcattgtgggatatgcgttccatttccctcatctcctgtctccccagatccagcggagcgcgcacagggccttataccgtcgacacgtgttagggattgtcctgcagggacccgccctgtgtttcgctgcagccatcttttcattattctttgtgcctctgtcttatctgttaatggtgactgtgatccttttaccttacgtctctaaagttaccggatggtgtcgcgatcgtctcctcgggcatcgggagccatctgcacatccggtggaagtgttttccttcgatctgcacgaacctctctcaaaggaaagggtcgaggcgtttagtgacggtgtttacgcaattgtggcaaccctacttatcctggacatttgcgaagacaatgtccctgacccgaaagacgtgaaggagcgcttttctgggagcttagttgcagctttgtccgctactgggccacgtttcctcgcttactttggtagcttcgccacggtgggactcttgtggttcgcccaccactctctgtttctccacgtccgcaaagccactagagcgatgggacttctgaatacactatccctggcctttgtgggggggctgcctcttgcctaccaacagacaagcgccttcgcaagacaacctagggacgaactagaaagagttagggtgtcgtgtaccattatctttcttgcgtccatcttccagctggctatgtggacaaccgccctcctgcatcaagctgagaccctgcagccgtccgtctggtttggaggccgggaacacgtgctaatgtttgccaagttggcactatatccgtgcgcctctctgctggccttcgcttcaacctgcctgctctcccgcttcagcgtgggcatttttcacctcatgcagatagctgttccttgtgcctttctgctgctgaggctcctggtggggctggcactggctactcttagagtcctgcgtggactggcccggcccgaacacccccctcctgccccaactggtcaagatgatcctcaatcacaactcctgccagccccttgctag

SEQ ID NO: 223649 - DNA, 1515 bp, Artificial Sequence
  derived and/or modified sequence
atgagccagcccaggaccccagagcaggccctggacacccctggggactgccccccaggaagaagagatgaagatgctggggagggcatccagtgcagccagaggatgctgtccttcagtgatgccctgctgagcatcatcgccaccgtgatgatcctgcctgtgacccacacagagatcagccctgagcagcagtttgacagatctgtgcagaggctgctggccaccagaattgctgtgtacctgatgaccttcctgattgtgacagtggcctgggccgcccacaccaggctcttccaggtggtgggcaagacagatgacaccctggccctgctgaacctggcctgcatgatgaccatcaccttcctgccctacaccttcagcctgatggtgaccttcccagatgtgcccctgggcatcttcctgttctgtgtgtgtgtgattgccatcggcgtggtgcaggccctgattgtgggctacgccttccacttcccccacctgctgagcccccagatccagaggtctgcccaccgggccctgtaccgccgccacgtgctgggcatcgtgctgcagggccctgccctgtgctttgctgctgccatcttcagcctcttctttgtgcccctgagctacctgctgatggtgaccgtcatcctgctgccctacgtgtccaaggtgacaggctggtgccgggaccggctgctgggccaccgggagcccagcgcccaccctgtggaggtgttctcctttgacctgcacgagcccctgagcaaggagcgggtggaggccttcagtgatggagtgtatgccatcgtggccaccctgctgatcctggacatctgtgaggacaacgtgcctgaccccaaggatgtgaaggagcgcttcagcggcagcctggtggccgccctgagcgccaccggcccccgcttcctggcctacttcggcagctttgccaccgtgggcctgctgtggtttgcccaccacagcctcttcctgcacgtgaggaaggccacccgggccatgggcctgctgaacaccctgagcctggcctttgtgggcggcctgcccctggcctaccagcagaccagcgcctttgcccggcagcccagagatgagctggagcgggtgcgggtgtcctgcaccatcatcttcctggccagcatcttccagctggccatgtggaccacagccctgctgcaccaggccgagaccctgcagcccagcgtgtggtttggaggccgggagcacgtgctgatgtttgccaagctggccctgtacccctgtgccagcctgctggcctttgccagcacctgcctgctgagccgcttctctgtgggcatcttccacctgatgcagattgctgtgccctgtgccttcctgctgctgcggctgctggtgggcctggccctggccaccctgcgggtgctgcggggcctggcccggcctgagcaccccccaccagcccccaccggccaggatgacccccagagccagctgctgcctgccccctgctag

SEQ ID NO: 223650 - DNA, 1515 bp, Artificial Sequence
  derived and/or modified sequence
atgagccagccccggacccccgagcaggccctggacacccccggcgattgtccccccggaagacgcgacgaagatgcaggagagggaatccaatgcagtcagcggatgctgtccttttcagacgctctactttctattatcgccacagtgatgatccttcccgtgactcatacggaaatttctcccgaacagcagtttgaccgatctgtgcaaagattacttgcaacgcgcatcgcggtgtacctgatgacatttctcatagttactgttgcctgggccgcacacaccagactgttccaggtggtgggaaaaaccgacgacacactggctctcctgaatctggcctgcatgatgacaataacctttctcccatatactttttccctgatggtgaccttcccagatgtacccctggggatctttttattttgcgtgtgcgtgatcgcgatcggcgtggtgcaagccctcattgtcggttacgcctttcactttccacatctcctcagcccacaaattcagcgcagcgcgcatagggcactgtatcgccggcacgtgcttggaatagtgctccagggcccagccttatgctttgccgcagcaatctttagtctgtttttcgttccactctcctatctactaatggttaccgtgatccttctgccctatgtcagcaaggtgaccggctggtgcagggaccgactcctcggccaccgggagccctctgcccaccctgttgaggtcttttcatttgatctgcacgaaccccttagcaaggagcgagtggaagccttcagtgatggagtgtatgccatcgtcgctacactgctcattctagacatttgtgaggacaatgttcctgaccccaaagacgtgaaagaaagattctccggtagcctggttgccgcgctgagcgctactggtcccagattcttggcctacttcggctctttcgcaactgtggggttactttggtttgcacatcacagtttgttcctgcatgtgcgtaaagccacccgggccatgggattgttgaatacactgtcgcttgcgttcgtagggggcctgcctctcgcatatcagcagacaagtgcattcgcacgtcagccaagggacgagctggagagggtgagggtgtcttgcaccatcatttttctggcatccatctttcagttagctatgtggaccacagccctcctacaccaagctgaaaccctgcagccttccgtgtggtttggaggaagggaacacgtgctcatgttcgcaaagttggctttgtatccttgtgccagcttgctcgcgttcgcgtccacttgcctgctctcacgcttcagtgtcggcatcttccacctgatgcaaatcgctgtgccatgcgcattcttgctcttgcggcttctcgtaggccttgcactcgcaacacttagagtcctcaggggtctagcacgcccggaacatccaccgcctgcccctaccggccaggacgacccacagagccaactcctcccagccccttgttag

SEQ ID NO: 223651 - DNA, 1515 bp, Artificial Sequence
  derived and/or modified sequence
atgagccagccgcgtacacccgagcaggctcttgatacaccgggagattgcccgcctggcaggcgggacgaagacgccggagagggaatacagtgtagtcagcgaatgctctcattctccgatgctctattgtcgatcatcgccactgttatgatacttcccgtgacgcacaccgagatctccccagaacagcagttcgaccggtccgtgcagcgcctgctggcaacacgcatcgctgtgtacctgatgactttccttatagtaaccgttgcttgggctgctcacacacggttgttccaggtggtcggtaaaacagatgataccctcgcactcctcaacttagcgtgcatgatgaccataacttttttaccttatacattcagcctgatggttacgttcccagatgtccctcttggtattttccttttttgtgtgtgcgtgattgctattggcgttgtgcaggcactgatcgtcggctatgcgtttcacttcccgcaccttctaagtccccaaattcagcgctcagcacatagagctctgtaccgtcggcacgtgctcgggattgtgctgcaaggtccagcattgtgtttcgcagccgctatattttccctttttttcgtccctcttagctatctgctgatggtgaccgtgatcttgctgccatatgtctctaaggtaacaggatggtgtcgtgataggttgctgggccatcgcgaaccaagcgctcaccctgtcgaggtgttttcattcgatttgcacgagccactgtcaaaagagcgagtggaggctttcagcgacggcgtgtacgccatagtggccactctcctcatccttgatatctgtgaggacaacgtgcctgaccccaaggatgtcaaggaaagattctccggttctctggtggcagccctttcggctaccggcccacggtttctcgcatacttcggtagctttgcaacagtgggcctactatggttcgcacatcactcactgtttctccacgtgaggaaggctactcgtgcaatggggctcctaaacaccttatctctggctttcgtcgggggtttgccactcgcctaccagcagacaagcgcatttgctcgacagccccgagacgaactggagagggtgcgagtgagttgcacaattatttttctggcaagcatctttcagctggctatgtggacgactgcgttattgcatcaggctgagaccctacaaccctcagtatggttcggtggcagagaacacgtgctgatgtttgccaagctggcactgtacccttgcgcttcactccttgcttttgcttccacctgcctcttaagtcggttttctgtggggatcttccacctgatgcaaattgcagtcccttgtgcatttctgctgttaaggttattggtcggactggcgctggctacccttcgcgttctgcggggtctggcacgtccagagcaccctcctcccgcacccactggtcaggatgacccccagtcccagctccttccagctccttgttag

SEQ ID NO: 223652 - DNA, 1860 bp, Artificial Sequence
  derived and/or modified sequence
acttcctggctgcgcgcgcaggcgcggaggtctgacggagacagcgcgtgcgcggcgtcgccgggcttgcgatgaacttccggctgtcaagctcccggccgggctgactcaagcggaggcgcgcggaacagtcgccgaggcgattcccgcccaggctcctgtaaccgccaggcagcggccccgccatgtcccagccccggaccccagagcaggcactggatacaccgggggactgccccccaggcaggagagacgaggacgctggggaggggatccagtgctcccaacgcatgctcagcttcagtgacgccctgctgtccatcatcgccaccgtcatgatcctgcctgtgacccacacggagatctccccagaacagcagttcgacagaagtgtacagaggcttctggcaacacggattgccgtctacctgatgacctttctcatcgtgacagtggcctgggcagcacacacaaggttgttccaagttgttgggaaaacagacgacacacttgccctgctcaacctggcctgcatgatgaccatcaccttcctgccttacacgttttcgttaatggtgaccttccctgatgtgcctctgggcatcttcttgttctgtgtgtgtgtgatcgccattggggtcgtgcaggcactgattgtggggtacgcattccacttcccgcacctgctgagcccgcagatccagcgctctgcccacagggctctgtaccgacgacacgtcctgggcatcgtcctccaaggcccggccctgtgctttgcagcggccatcttctctctcttctttgtccccttgtcttacctgctgatggtgactgtcatcctcctcccctatgtcagcaaggtcaccggctggtgcagagacaggctcctgggccacagggagccctcggctcacccagtggaagtcttctcgtttgacctccacgagccactcagcaaggagcgcgtggaagccttcagcgacggagtctacgccatcgtggccacgcttctcatcctggacatctgcgaagacaacgtcccggaccccaaggatgtgaaggagaggttcagcggcagcctcgtggccgccctgagtgcgaccgggccgcgcttcctggcgtacttcggctccttcgccacagtgggactgctgtggttcgcccaccactcactcttcctgcatgtgcgcaaggccacgcgggccatggggctgctgaacacgctctcgctggccttcgtgggtggcctcccactagcctaccagcagacctcggccttcgcccggcagccccgcgatgagctggagcgcgtgcgtgtcagctgcaccatcatcttcctggccagcatcttccagctggccatgtggaccacggcgctgctgcaccaggcggagacgctgcagccctcggtgtggtttggcggccgggagcatgtgctcatgttcgccaagctggcgctgtacccctgtgccagcctgctggccttcgcctccacctgcctgctgagcaggttcagtgtgggcatcttccacctcatgcagatcgccgtgccctgcgccttcctgttgctgcgcctgctcgtgggcctggccctggccaccctgcgggtcctgcggggcctcgcccggcccgaacaccccccgccagcccccacgggccaggacgacccacagtcccagctcctccctgccccctgctagcagccacagagcccactcccagccgtcctcaccagagatggaccagggaggacaggatgctgggcaggggaagccaagtcacgggcaggccgcagtggttcttgcgtggcctggttttattttcattgtgaaatatcatgctcttatttcagtcctcaaa

SEQ ID NO: 223653 - DNA, 1514 bp, Artificial Sequence
  derived and/or modified sequence
tccggctgtcaagctcccggccgggctgactcaagcggaggcgcgcggaacagtcgccgaggcgattcccgcccagcagttcgacagaagtgtacagaggcttctggcaacacggattgccgtctacctgatgacctttctcatcgtgacagtggcctgggcagcacacacaaggttgttccaagttgttgggaaaacagacgacacacttgccctgctcaacctggccgcatcatggctgtgatgccctccctccctccaggcctgcatgatgaccatcaccttcctgccttacacgttttcgttaatggtgaccttccctgatgtgcctctgggcatcttcttgttctgtgtgtgtgtgatcgccattggggtcgtgcaggcactgattgtggggtacgcattccacttcccgcacctgctgagcccgcagatccagcgctctgcccacagggctctgtaccgacgacacgtcctgggcatcgtcctccaaggcccggccctgtgctttgcagcggccatcttctctctcttctttgtccccttgtcttacctgctgatggtgactgtcatcctcctcccctatgtcagcaaggtcaccggctggtgcagagacaggctcctgggccacagggagccctcggctcacccagtggaagtcttctcgtttgacctccacgagccactcagcaaggagcgcgtggaagccttcagcgacggagtctacgccatcgtggccacgcttctcatcctggacatctgcgaagacaacgtcccggaccccaaggatgtgaaggagaggttcagcggcagcctcgtggccgccctgagtgcgaccgggccgcgcttcctggcgtacttcggctccttcgccacagtgggactgctgtggttcgcccaccactcactcttcctgcatgtgcgcaaggccacgcgggccatggggctgctgaacacgctctcgctggccttcgtgggtggcctcccactagcctaccagcagacctcggccttcgcccggcagccccgcgatgagctggagcgcgtgcgtgtcagctgcaccatcatcttcctggccagcatcttccagctggccatgtggaccacggcgctgctgcaccaggcggagacgctgcagccctcggtgtggtttggcggccgggagcatgtgctcatgttcgccaagctggcgctgtacccctgtgccagcctgctggccttcgcctccacctgcctgctgagcaggttcagtgtgggcatcttccacctcatgcagatcgccgtgccctgcgccttcctgttgctgcgcctgctcgtgggcctggccctggccaccctgcgggtcctgcggggcctcgcccggcccgaacaccccccgccagcccccacgggccaggacgacccacagtcccagctcctccctgccccctgctagcagccacagagcccactcccagccgtcctcaccagagatggaccagggaggacaggatgctgggcaggggaagccaagt

SEQ ID NO: 223654 - protein, 240 aa, Artificial Sequence
  derived and/or modified sequence
MATAMYLEHYLDSIENLPCELQRNFQLMRELDQRTEDKKAEIDILAAEYISTVKTLSPDQRVERLQKIQNAYSKCKEYSDDKVQLAMQTYEMVDKHIRRLDADLARFEADLKDKMEGSDFESSGGRGLKKGRGQKEKRGSRGRGRRTSEEDTPKKKKHKGGSEFTDTILSVHPSDVLDMPVDPNEPTYCLCHQVSYGEMIGCDNPDCPIEWFHFACVDLTTKPKGKWFCPRCVQEKRKKK

SEQ ID NO: 223655 - DNA, 723 bp, Artificial Sequence
  derived and/or modified sequence
atggccaccgctatgtatctggagcattacctggatagcattgaaaacctgccctgcgagctgcaacggaatttccagctgatgagggagctcgatcagaggacagaagacaagaaggcagagatagacatcctcgctgctgagtacatctcgactgtgaaaaccctgtcgccggatcagcgagtggaacgactgcagaagatccagaatgcatattctaagtgtaaagagtacagtgatgataaggtccagttggccatgcagacatatgaaatggtggataaacacatacggcgtctcgacgcagatttggcccggttcgaagccgacctcaaagacaaaatggagggatctgatttcgagtcttccggaggccgcggcttgaagaaggggaggggacaaaaagagaagagaggaagccgtgggcgaggaaggcggacttctgaggaggacacacctaagaaaaaaaagcataaggggggcagcgaatttactgatacgattctttcggttcacccgtctgatgttctggacatgcccgtcgatcctaacgagcccacctattgcctgtgtcatcaagtgagctatggagaaatgattggatgcgataacccggactgtcctatcgaatggtttcatttcgcttgcgtggacttgacgacaaagccgaaggggaaatggttctgtcctcggtgcgtgcaggagaaacgcaaaaaaaaatag

SEQ ID NO: 223656 - DNA, 5196 bp, Artificial Sequence
  derived and/or modified sequence
gaccccgagcgcggccgcggacgaagatggcgaccgccatgtacttggagcactatctggacagtatcgagaaccttccctgcgaacttcagaggaacttccagctgatgcgagagctggaccagaggacggaagataagaaagcagagattgacatcctggctgcagagtacatctccacggtgaagacgctgtctccagaccagcgcgtggagcgcctgcagaagatccagaacgcctacagcaagtgcaaggaatacagtgacgacaaagtgcagctggccatgcagacctacgagatggtggataaacacattcgaaggcttgatgcagacctggcgcgctttgaagcagatctgaaggacaagatggagggcagtgattttgaaagctccggagggcgagggttaaaaaaaggccggggtcagaaagaaaaaagagggtcccggggccgaggcaggaggacatcagaggaagacacaccaaagaaaaagaagcacaaaggagggtctgagttcactgacaccatcctgtccgtgcacccctctgatgtgctggacatgcccgtggacccaaacgaacccacgtactgcctgtgccaccaggtctcctatggggagatgattggctgtgacaatccagactgtccaattgagtggtttcactttgcctgcgtggaccttaccacgaaacccaaaggaaaatggttctgtccacggtgtgtccaggaaaagaggaagaagaagtaggaggagctgtgtgcccggatccgaggagcaagttaatctgtcccttcattcgtgtcgcaatatttcccttccttttaaaactaccttgttcggttgatacttagtaactccgtggccagttgaagcgctggatgtttcctagaacaagaaccaccaaagcctgttcgcacagaagggcgaccttgcagggactcgccgccgcgacctcagtgtggcttttacaggactccccccgagcatcagcagggaccccggcggacgtgggcgggcgcgcgtgagctcgggctgcccggccgggcgtgcgggcggggacatggtaacctggtccacggagggcggccgccaccctcgcgtagctttcctgtggttttccaggactgtccggtacagcccgggctccgcgtgccccgcccgctggagcacctgccaccgaggcgcgcgtggggccactgccgtggcggcggctgccctcctcacactcggctccgcgccgcctccggccaccgtgcgctcccgcgtggggcgcctcggatgggcccgggagggctgggggctcttccctggaggaagcggcctccgcttcgctggcgccgcctttttagcttggacttcagtcctccctcggggactcacctccggagtaaacggctcttcattagcttggagtggccgcaggtcccgtgaccagcacccgcgagaccctgtgcgacagctgggctgatgctccgtttctctgggaattggtgattttttactgtgaagatgaaattaccctaatagcatgaagatcgtgggtctgtgtgtccgtgaagtgagtcccgtctgccaggagctgacgaaccacgaatgcttctgcctgtgctgtgcattcccaggcccgcagctcccggtcgaggggactccgatgtgaatttgttgtgaatttgttgtgccacaatagcagttctggaatgaagctaggaaactcgagtgtgctttttgtttaatgagcgttcaccaagctgagccggagccatcctttcggtggtagttggggaaggctatgcagatttgctctgttgtgacgcgttggtgacggtgcccagcctgcggttccccacagcatcgcaggcgctcggaaatcctctcccgtgcctttagaggaaggagaggattgctgaggaatgcagggacgcctgtttctgtcctcacaccacagaaagaaacctgagggaaaactgagacgtgaggttcctgatttaagaagcctgggtttcttcatggtggggggccatttggaatgacagcctcacttccttctgatggctacatctgtatcttttcctcctgtgtttaatgtttcactagggagaggaaataaagcagaaggaacgtgtgaagctctgtgtctcagacggggccctcccgtcgagaagctggtagtcagtgagtgagaacaagagaacaagaacaccctgaacagtcctggttgggatggtgtccacattcatgttctgcggttcttgaacacacggatgcctctgggccacctgtccttttccgagggtgtgggtgggagtggatcctccgggcgcaggtgccaggcaggtgcaggcgggcggtcggccactgctgctgctcgtccctgccagtgtctgggcctgaaggggctccctccaagcggtgccttcctgcggcttagaagggaaagcgccagagagggcaggctacagtgcttcacacccttcgccacggctgtgaaactggagatgggtgggttttgtatgttaatttttttttttgagacggagtcttgctctgtcacccaggctggagagcagtggcgtgatctcggctcactgcaagctccgcctcccgggttcacgccattctcctgcctcagcccccccgagtagctgggactacaggcgcccgccaccacgcctggctaattttttatatttttagtagagacagggtttcaccatgttaaccaggatggtctcgatctcctgacctcacgatttgcccgcctcggcttcccagagtgctgggattacaggcgtgagccaccgcgcctggccacccagctaagtttgtatttttgttggagacggggtttcaccatattggccagactggtctcaaactcctggggtcaaatgatccgcctgcgtcggcttcccagagtgctgggattacaggtgtcagccactgcgctcagctgggagatgaattttcatttaatgacttaactttttgttagcacaggttttgtgtgtgtgtgtgtgtgtgtgttttgttttttgttttgtgtttttgaaacggagttttgctctgtcacccaggctggaatgcaatggcaccatcttggctcactgcaacctctgcttcctgggttcaagtgattctcttgccttagcctcccgagcagctgggattataggcgtccaccaccacgcccagctaatttttgtatttttagtagaaatggggtttcaccatgtgtggccaggctggtctcgaactcctgacctgaagtgatccacccgcctcgacctcccaaagtgctgggatgacaggcatgagccaccgcacccggccaacacagatgtttattgatcgtggaggatacattgtggaaaatgtttttctctcttttaccatttttgggaagagggataggtaagtgcagggagtttgtgctgaaacagcgcctggcaatttttcagaaatgaatttgatattgcgctccacctttgagctgttcacacctgtggctacccctggaaagcgctggggttgttgatgcttttggctgcccggcttcctgaggtctcgctgctttttggggaaagatgactggcttccctgtgggacgcttttgtctgacacgtgatgatgtggtcctgcctgccactgtgcaccatcccaggtattgaattttgaccttttcttttcaagtttctgtgcttagtgtttttaatgtttacttttgccacttacaataatatcaccaaaataatatgcatagagttttggaagaaacatagaaaacatgagcagaatgagacaattccttgggctgtagtttggacccaactgaatcctgagtgctctgtggctgacgctgtctacccgtgggagagacacactcaggagtggccgtttggccagaaaagaaggtcatggcccctggcctggcccccgccctgcagggacacagaagccacaccatttgcaccatccacgccttgctccagaaggcctggccgccttctccctgggggtgattcaaggatttggtctcggaccagacccccctccacagctgcccggccccagacccatctcttggattgagggtgtgtgggctggaaccagtgggtcactgtggcagcttcatctgagccgaaggtgtgggtcctctgtggctgtgcgattgacctcgatgggaaggagcgttctacccattttccttgttttcagtgctgcggtatcagtcagtgatctgaggaaatcctgtaggggaaggcaggctgcagtgaaaacaggagctggtgaaaccgagccctctgcatctgcgaatgtgccctaggtgctgctgctggggacatggatgccaagcggaggcctgcgtggcctcctgagcagcagctgaccgcccgtctcatgctggacgggacccctgggcgggtggacatgagaccactgttggccagggacgccgtgcggaggcctacgtggctgcctgagcagcagctgaccgcccgtctcactgttggccagggctttgtggcgtgggtgttttccagtctgcctggagcagcgagaagcagctgtgcagactggtggcggtgggagggtttgctgggactgatggggacaccggccagcttgtctggtgtccagcagccctgccggacttggcctcctgtcctgtcgttgggagccctggctggggctgctttgagcaatgacgctggcccagagcagcttcccacatgaccccagagccgagggtctgccctgtcctaggttaggtcttcatggtttagagtaaaaccgtgagggatgttaattatgggcattgaagacttaaggttttcttaaatttttagtgagcagtgattggccttcaatacttgtgctgagaggaattttaagccaggggaagtgtaagaaaatgttcccattcaggagagattgtgttggagtttctttcttcctctgtatgtattttgtggtgtccacctttaaccacgtttcatccaaaacgatgatgcagctttaacatgaatgttacatttttattttcaaggaattattatctatgttccctttgtaaaggaaagataatgttgtaaatctttttattagataatgtaaagatgtatatcagtatttttggatcatgttatagattatggatatattgtttaataaataaagtattttttggaacaaa

SEQ ID NO: 223657 - DNA, 946 bp, Artificial Sequence
  derived and/or modified sequence
gagcgcggccgcggacgaagatggcgaccgccatgtacttggagcactatctggacagtatcgagaaccttccctgcgaacttcagaggaacttccagctgatgcgagagctggaccagaggacggaagataagaaagcagagattgacatcctggctgcagagtacatctccacggtgaagacgctgtctccagaccagcgcgtggagcgcctgcagaagatccagaacgcctacagcaagtgcaaggaatacagtgacgacaaagtgcagctggccatgcagacctacgagatggtggataaacacattcgaaggcttgatgcagacctggcgcgctttgaagcagatctgaaggacaagatggagggcagtgattttgaaagctccggagggcgagggttaaaaaaaggccggggtcagaaagaaaaaagagggtcccggggccgaggcaggaggacatcagaggaagacacaccaaagaaaaagaagcacaaaggagggtctgagttcactgacaccatcctgtccgtgcacccctctgatgtgctggacatgcccgtggacccaaacgaacccacgtactgcctgtgccaccaggtctcctatggggagatgattggctgtgacaatccagactgtccaattgagtggtttcactttgcctgcgtggaccttaccacgaaacccaaaggaaaatgatttcatttaaataaaaacctgtagtctgggcaacatcgggagaccccaactctacaaaaaatacaaaaattagctgggcgtggtggtgcgtgcctgtggtcccaactacctgggaggcggaggcgggaggatggcttgagcctggaagtccgaggcttcagtgagctgagatcgcgccactgcactccagcctgggcgagagagcaagaccctgtctcaaataaataaataaaaagataaaaacc

SEQ ID NO: 223658 - DNA, 723 bp, Artificial Sequence
  derived and/or modified sequence
atggccacagccatgtacctggagcactacctggacagcattgagaacctgccctgtgagctgcagaggaacttccagctgatgagggagctggaccagaggacagaggacaagaaggccgagattgacatcctggccgctgagtacatcagcacagtgaagaccctgagcccagaccagagggtggagcggctgcagaagatccagaatgcctacagcaagtgcaaggagtacagtgatgacaaggtgcagctggccatgcagacctatgagatggtggacaagcacatccggcggctggatgctgacctggccaggtttgaagctgacctgaaggacaagatggagggcagtgactttgagagcagcggcggccggggcctgaagaagggccggggccagaaggagaagaggggcagccggggccggggccgccgcaccagcgaggaggacacccccaagaagaagaagcacaagggcggcagcgagttcacagacaccatcctgtctgtgcaccccagtgatgtgctggacatgcctgtggaccccaatgagcccacctactgcctgtgccaccaggtgtcctatggagagatgattggctgtgacaacccagactgccccatcgagtggttccactttgcctgtgtggacctgaccaccaagcccaagggcaagtggttctgcccccgctgtgtgcaggagaagaggaagaagaagtag

SEQ ID NO: 223659 - DNA, 723 bp, Artificial Sequence
  derived and/or modified sequence
atggccaccgccatgtacctggagcactacctggacagcatcgagaacctgccctgcgaactacaacgcaacttccaactgatgcgagaattggaccagcgtaccgaggataagaaggcggaaatcgacattctcgccgcagagtacatctcaacagtgaagactctgagtccagatcagcgggtggaacggttgcaaaagatccaaaatgcttattctaagtgtaaagaatactcagacgacaaggtgcaactcgctatgcagacgtatgaaatggtagataagcacattagacggctcgacgctgacctcgcccggttcgaagccgacttgaaagacaagatggagggaagcgacttcgagtccagcggagggagggggctcaaaaaaggaagaggtcaaaaggaaaaacgagggtcaagaggtaggggacggagaacttccgaggaagacacaccaaaaaagaaaaaacacaaggggggttcagagtttacagataccatcttgagcgtgcacccttcagatgtactggacatgcctgtggatcccaacgagccaacatactgcctgtgccaccaagtgtcgtacggcgaaatgatagggtgtgacaacccggattgtcccattgagtggtttcactttgcgtgcgtcgacctgaccacgaagccaaagggaaagtggttttgccctagatgcgtgcaggagaaacgcaagaaaaaatag

SEQ ID NO: 223660 - DNA, 723 bp, Artificial Sequence
  derived and/or modified sequence
atggccaccgccatgtaccttgagcattaccttgattccattgagaatctgccatgtgaattgcagagaaattttcagctcatgcgggaactggatcagcgaacggaggataagaaagccgagattgacattctggctgcagagtatattagtacagtaaagacgctgtctccggaccaacgggtggaaagactccagaaaatccagaatgcctatagcaagtgcaaagagtacagcgatgacaaggtgcagttagctatgcagacctatgagatggttgacaaacatattaggcgattagacgctgacctcgccaggttcgaagccgatctgaaagacaagatggaaggcagtgacttcgagagttcagggggaaggggcctgaaaaagggaagggggcagaaagaaaagcgaggcagtcggggaagaggacgcaggacttctgaggaggacacacctaagaagaaaaagcacaagggaggaagcgagtttaccgataccattctgagcgtccacccttcagacgtgctggacatgcccgtggatccaaatgagcccacctattgcctatgccatcaagtgtcctatggggaaatgattgggtgcgacaatcccgattgtcctatcgaatggttccacttcgcttgtgtcgacctcaccactaagcctaaaggcaaatggttctgccccagatgtgtgcaagaaaaaaggaagaagaaatag

SEQ ID NO: 223661 - DNA, 723 bp, Artificial Sequence
  derived and/or modified sequence
atggccaccgccatgtacctggagcactacctggacagcatcgagaacctgccctgcgagctgcagagaaacttccagctgatgagagagctggaccagagaaccgaggacaagaaggccgagatcgacatcctggccgccgagtacatcagcaccgtgaagaccctgagccccgaccagagagtggagagactgcagaagatccagaacgcctacagcaagtgcaaggagtacagcgacgacaaggtgcagctggccatgcagacctacgagatggtggacaagcacatcagaagactggacgccgacctggccagattcgaggccgacctgaaggacaagatggagggcagcgacttcgagagcagcggcggcagaggcctgaagaagggcagaggccagaaggagaagagaggcagcagaggcagaggcagaagaaccagcgaggaggacacccccaagaagaagaagcacaagggcggcagcgagttcaccgacaccatcctgagcgtgcaccccagcgacgtgctggacatgcccgtggaccccaacgagcccacctactgcctgtgccaccaggtgagctacggcgagatgatcggctgcgacaaccccgactgccccatcgagtggttccacttcgcctgcgtggacctgaccaccaagcccaagggcaagtggttctgccccagatgcgtgcaggagaagagaaagaagaagtag

SEQ ID NO: 223662 - protein, 255 aa, Artificial Sequence
  derived and/or modified sequence
MASPGAGRAPPELPERNCGYREVEYWDQRYQGAADSAPYDWFGDFSSFRALLEPELRPEDRILVLGCGNSALSYELFLGGFPNVTSVDYSSVVVAAMQARHAHVPQLRWETMDVRKLDFPSASFDVVLEKGTLDALLAGERDPWTVSSEGVHTVDQVLSEVSRVLVPGGRFISMTSAAPHFRTRHYAQAYYGWSLRHATYGSGFHFHLYLMHKGGKLSVAQLALGAQILSPPRPPTSPCFLQDSDHEDFLSAIQL

SEQ ID NO: 223663 - DNA, 768 bp, Artificial Sequence
  derived and/or modified sequence
atggccagccccggcgccggcagagccccccccgagctgcccgagagaaactgcggctacagagaggtggagtactgggaccagagataccagggcgccgccgacagcgccccctacgactggttcggcgacttcagcagcttcagagccctgctggagcccgagctgagacccgaggacagaatcctggtgctgggctgcggcaacagcgccctgagctacgagctgttcctgggcggcttccccaacgtgaccagcgtggactacagcagcgtggtggtggccgccatgcaggccagacacgcccacgtgccccagctgagatgggagaccatggacgtgagaaagctggacttccccagcgccagcttcgacgtggtgctggagaagggcaccctggacgccctgctggccggcgagagagacccctggaccgtgagcagcgagggcgtgcacaccgtggaccaggtgctgagcgaggtgagcagagtgctggtgcccggcggcagattcatcagcatgaccagcgccgccccccacttcagaaccagacactacgcccaggcctactacggctggagcctgagacacgccacctacggcagcggcttccacttccacctgtacctgatgcacaagggcggcaagctgagcgtggcccagctggccctgggcgcccagatcctgagcccccccagaccccccaccagcccctgcttcctgcaggacagcgaccacgaggacttcctgagcgccatccagctgtag

SEQ ID NO: 223664 - DNA, 1823 bp, Artificial Sequence
  derived and/or modified sequence
attggctgaagggccggcggctctggctgcccggcggttgagagcatggcctctccaggggcaggtagggcgcctccggagttaccggagcggaactgcgggtaccgcgaagtcgagtactgggatcagcgctaccaaggcgcagccgattctgccccctacgattggttcggggacttctcctccttccgtgccctcctagagccggagctgcggcccgaggaccgtatccttgtgctaggttgcgggaacagtgccctgagctacgagctgttcctcggaggcttccctaatgtgaccagtgtggactactcatcagtcgtggtggctgccatgcaggctcgccatgcccatgtgccgcagctgcgctgggagaccatggatgtgcggaagctggacttccccagtgcttcttttgatgtggtgctcgagaagggcacgctggatgccctgctggctggggaacgagatccctggaccgtgtcctctgaaggtgtccacactgtggaccaggtgttgagtgaggtgagccgcgtgcttgtccctggaggccggtttatctcaatgacttctgctgccccccactttcggaccagacactatgcccaagcctattatggctggtccctgaggcatgctacctatggcagcggtttccacttccatctctacctcatgcacaagggcgggaagctcagtgtggcccagctggctctgggggcccaaatcctctcaccccccagacctcccacctcaccttgcttccttcaggactcagatcatgaggacttccttagtgccattcagctctgaggccagagcatggtcctccacccttcctgccattctgccctgggctcctcaggtagttggaattcctgacttaggacttggggttgggtccaaggtgcttacatcccaggggcctcatgcctaagatagagggtgggagcgaacccacatgaaccaatacagcccagctccaactagatccagattccaggtttcttgcttctttcttgggttcctcagttctctcctgggttccccaacctcctctgccaccacaccaaaccaccagtgatgcatcccctggggcaaagctcatcataacccctctgcacaccagccagcctggagaccgttgttcctggggcctgttactgatcctcatctagccttgatttatccacaggagactgcaggctttgaacctagattgctttatgtttctcaccctagctccatccccaacactggtgaccagtcacgcctgggttgtatctctacccaaggaggccacatcataatgaggttcccaggccagcctggcctgtctgtcttacttggcaaccgtccctcaccagcaacatgcacctgagattcccaagtacctgccccccctcccattttggcctggctcctgagacctaagcagcggccacacacacacagagggggtctgtgtttattcacacactcctggtacagtgaggatggaggaacatttacgaagggcacccctgggttgagaacatctccggggccacagatgtcatccaaaggttcagagcagtccccatttgggttcccaggggcaagacgcaggggtccaaggtaaaatcggatctgggcccttggaaggtgatgataccttggggagaaggggtctgccagaaagcctcctggggtcaggcctgggcagactggccatgtggttggtaaccgtgtcgggggcttgtctcatcccagcctcaacacccatcctatctgccaggcgcagaagagcgtggccgagactgaggggagggcaggaaccatga

SEQ ID NO: 223665 - DNA, 768 bp, Artificial Sequence
  derived and/or modified sequence
atggctagccctggtgctggacgggcaccccccgagttacccgaacgaaactgtggctacagggaagtcgagtactgggaccagcggtaccaaggggctgcggattcggctccctacgactggttcggcgatttctcaagtttcagagcactgctggagccagagctgaggcccgaagatcggatcctggtcctgggatgcggcaatagcgccttgtcatatgaactttttctcggggggtttcccaacgtcacttccgtggactattcttccgtagtcgtggcagcaatgcaggcccggcacgcgcacgtcccacagctcagatgggagaccatggatgttcgcaagctcgatttccctagcgcttcatttgacgttgtgctcgaaaaggggaccctggatgctttactggcaggtgagagggatccctggaccgtgagcagcgagggcgtccataccgtcgaccaagtgcttagcgaagtctcaagggtgctcgtccccggtggccgattcattagtatgacgtcagcagctccacatttcaggacccgtcattatgcgcaagcctattatggctggtctcttagacatgctacctacggttctgggttccactttcatttgtacctaatgcacaaaggcggcaagctctccgtagcacagcttgcactgggagcacagattctgtcaccaccacggccgccaacttccccttgtttcctccaagacagcgaccatgaggacttcttatccgctattcagctgtag

SEQ ID NO: 223666 - DNA, 768 bp, Artificial Sequence
  derived and/or modified sequence
atggccagccctggggccggccgggcccctcctgagctgcctgagaggaactgtggctaccgggaggtggagtactgggaccagcgctaccagggcgctgctgacagcgccccctatgactggtttggagacttcagcagcttccgggccctgctggagcctgagctgcggccagaagatcgcatcctggtgctgggctgcggcaacagcgccctgtcctatgagctgttcctgggcggcttccccaacgtgacctctgtggactacagctctgtggtggtggccgccatgcaggcccggcatgcccacgtgccccagctgcgctgggagaccatggatgtgaggaagctggacttccccagcgccagctttgatgtggtgctggagaagggcaccctggatgccctgctggccggggagcgggacccctggacagtgagcagcgagggcgtgcacacagtggaccaggtgctgtctgaggtgtcccgggtgctggtgcctgggggccgcttcatctccatgaccagcgctgccccccacttccgcaccaggcactacgcccaggcctactacggctggagcctgcggcatgccacctacggcagcggcttccacttccacctgtacctgatgcacaagggcggcaagctgtctgtggcccagctggccctgggcgcccagatcctgagccccccccggccccccaccagcccctgcttcctgcaggacagcgaccacgaggacttcctgagcgccatccagctgtag

SEQ ID NO: 223667 - DNA, 768 bp, Artificial Sequence
  derived and/or modified sequence
atggccagccccggcgccggccgggccccccccgagctgcccgagcggaactgtggctacagggaggtcgagtattgggatcagagataccagggagccgccgactcagctccatatgattggtttggcgacttcagttcatttcgtgcactgctcgagccggaactacggcctgaggacagaattcttgtgctggggtgcggaaatagcgctctgtcttacgagctgtttttgggtggattcccgaatgtaaccagcgtcgattatagctcggtcgttgtggctgcaatgcaggcacgccacgcccacgttcctcagcttaggtgggagaccatggatgtgcgaaaactggattttcccagcgcctcatttgatgtagtgctggagaagggtacgttggatgcattgcttgccggggaacgcgacccttggacagtctccagcgagggggtgcatacagtggatcaggttctgtctgaggtgagtagggtgttagttccgggaggccgctttatcagtatgacaagtgctgccccgcactttagaacgaggcattacgcgcaggcttactacggatggagtctgagacatgccacttatggcagtggattccatttccacttgtatctcatgcataagggcgggaaactgagcgtcgcccagttggcacttggagcgcagattctgagcccgccaagaccaccaacctctccttgttttctgcaggattccgatcatgaggattttctttcagccattcagctgtag

SEQ ID NO: 223668 - DNA, 768 bp, Artificial Sequence
  derived and/or modified sequence
atggctagccccggtgcaggcagagcgccacccgagttacccgagagaaactgcgggtacagagaagtcgagtattgggatcagcgttaccagggcgctgctgactctgccccatacgattggttcggcgacttctccagcttcagagccctcttagaaccagagctgcgaccagaggaccgcatcctggtgctgggctgcgggaatagcgcactgtcatatgaactttttcttggcggtttcccaaatgtgacatctgtggattatagctccgtcgtggtggcggcaatgcaagccaggcacgctcatgtgccccagctcagatgggagactatggatgtcaggaaactggattttccttccgcgagcttcgacgtcgtactggagaaaggaactttagatgcactactcgctggggagcgtgatccctggacggtctccagcgagggtgttcacacagtcgaccaagtgctgtcagaggtatcccgagtgctggttcctggcggtcgcttcatttcgatgacatctgcagcccctcattttcggacaaggcattatgctcaggcttattacgggtggtctttgaggcacgcaacttacggcagcggcttccattttcacctgtacctgatgcacaaaggcggaaagctttctgtagcccagttagcgctaggcgcacagatcctatcaccacctagacctcctacgagtccatgtttcctccaggacagcgatcacgaagacttcctgtctgctattcagctctag

SEQ ID NO: 223669 - protein, 315 aa, Artificial Sequence
  derived and/or modified sequence
MAFPEPKPRPPELPQKRLKTLDCGQGAVRAVRFNVDGNYCLTCGSDKTLKLWNPLRGTLLRTYSGHGYEVLDAAGSFDNSSLCSGGGDKAVVLWDVASGQVVRKFRGHAGKVNTVQFNEEATVILSGSIDSSIRCWDCRSRRPEPVQTLDEARDGVSSVKVSDHEILAGSVDGRVRRYDLRMGQLFSDYVGSPITCTCFSRDGQCTLVSSLDSTLRLLDKDTGELLGEYKGHKNQEYKLDCCLSERDTHVVSCSEDGKVFFWDLVEGALALALPVGSGVVQSLAYHPTEPCLLTAMGGSVQCWREEAYEAEDGAG

SEQ ID NO: 223670 - DNA, 948 bp, Artificial Sequence
  derived and/or modified sequence
atggcgttccctgagccaaagcctcggcctcctgaactgccccaaaagagactgaagaccctggactgtgggcaaggagcagtcagggcagttcggtttaatgtcgacggaaattactgcctgacatgcgggtctgacaagactctgaagctgtggaatcctttaagaggaacccttctgcggacctacagtggccatgggtatgaggtgctagatgctgcagggtcgttcgataacagctctctgtgcagtggtgggggcgacaaggcggtagtcctttgggacgtagcatctggacaggttgtgcggaagtttcgggggcacgcgggaaaggtgaataccgttcaattcaatgaggaagccaccgtaatcctctcgggtagcatagactccagtattcggtgctgggactgcagaagccggcgccctgaacccgtgcagaccctcgatgaggcgcgcgacggcgtctcctccgtgaaagtcagcgatcatgaaatacttgctggatcggtggatgggagagtgcgccgctacgacctgaggatgggacagctgttttctgattacgtcgggtctcccataacttgcacgtgcttcagtcgtgacggtcagtgcactctggtatcatccctagattctacgctgaggctcctggataaggatacaggagaactgcttggggagtataaggggcataagaatcaggaatacaaactggactgttgtctgtcagaaagagacacccacgtagtatcatgcagtgaggatgggaaggtcttcttctgggacctggttgaaggagccctggccctcgccttgcctgtgggctctggtgtagttcagtctcttgcctatcatcccaccgaaccgtgcctccttactgctatgggcggctccgtgcagtgctggcgcgaggaagcgtacgaggccgaggatggggctggctag

SEQ ID NO: 223671 - DNA, 948 bp, Artificial Sequence
  derived and/or modified sequence
atggccttccctgaacccaaaccaagacccccggagctcccccagaaaagacttaagactttagattgcggtcaaggcgctgtgagggcggttcgttttaatgttgatgggaactattgtctgacatgcggttcggataagacgctgaagctgtggaaccccctacgtggtaccctgcttcggacgtatagcggtcatgggtacgaagtgctcgacgccgcagggagcttcgataattcatcactgtgttctggtggcggtgataaggcagttgtcctatgggatgtcgcaagcggccaggttgtgagaaagttcaggggccacgcagggaaggtgaatacagtgcagttcaatgaagaggctactgtcatcctgtccggatcgatcgacagcagtattagatgctgggattgtcgaagccggaggccagagcccgttcagacgcttgatgaggctagggatggagtgagctcagtcaaggtgtcagatcacgagattcttgcagggagcgtagacggtagagtgcggagatatgacttgcgaatgggtcagctgttctctgactacgtgggcagcccgataacctgtacatgctttagtagagatggacagtgtacactcgtgtcgtctttggactccacactgcggttactggacaaagacacaggtgagctgctgggagagtataagggacacaagaatcaggaatacaaactggactgctgcctgtccgagagggatactcacgttgtgtcctgcagtgaggacggaaaggttttcttctgggatctggtggaaggcgcactagcattggcacttcccgtgggatcgggagttgtacagtctctggcatatcaccccaccgagccctgtcttcttacagccatgggaggcagtgtgcagtgttggagggaggaagcctacgaggctgaggatggtgcaggttag

SEQ ID NO: 223672 - DNA, 948 bp, Artificial Sequence
  derived and/or modified sequence
atggccttccctgagcccaagccccggcccccagagctgccccagaagaggctgaagaccctggactgtggccagggcgctgtgcgggctgtgcgcttcaacgtggatggcaactactgcctgacctgtggcagtgacaagaccctgaagctgtggaaccccctgcggggcaccctgctgcggacctacagcggccacggctatgaggtgctggatgctgctggcagctttgacaacagcagcctgtgcagcggcggcggggacaaggctgtggtgctgtgggatgtggccagcggccaggtggtgaggaagttccggggccatgctgggaaggtgaacacagtgcagttcaatgaggaggccaccgtcatcctgagcggcagcattgacagcagcatccgctgctgggactgccgcagcagaagacctgagcctgtgcagaccctggatgaggccagagatggagtgtcctctgtgaaggtgtctgaccacgagatcctggccggctctgtggatggccgggtgcggcgctatgacctgaggatgggccagctgttcagtgactatgtgggcagccccatcacctgcacctgcttcagcagagatggccagtgcaccctggtgagcagcctggacagcaccctgcggctgctggacaaggacaccggggagctgctgggggagtacaagggccacaagaaccaggagtacaagctggactgctgcctgtctgagcgggacacccacgtggtgtcctgcagtgaagatggcaaggtgttcttctgggacctggtggagggcgccctggccctggccctgcctgtgggcagcggcgtggtgcagagcctggcctaccaccccacagagccctgcctgctgacagccatgggcggctctgtgcagtgctggagggaggaggcctatgaagcagaagatggagctggatag

SEQ ID NO: 223673 - DNA, 948 bp, Artificial Sequence
  derived and/or modified sequence
atggccttccccgagcccaagccccggccccccgagctgccccagaagagacttaagaccctggattgcggccagggcgccgttagagcagtacgcttcaacgtggacgggaattattgcctcacatgcggaagcgacaaaacactgaagttgtggaaccccctccgaggaaccttgctgcggacctatagcgggcatggttacgaagtactcgacgccgccggaagcttcgacaacagctccctgtgttcagggggaggcgacaaggccgtggtgttgtgggacgttgctagcgggcaggtagtccgaaaattcaggggtcacgcgggtaaggttaatacagttcagttcaacgaagaggctaccgtcatcctcagtgggtcgatcgactcttctatcagatgctgggactgcaggagtcggagacccgagcctgtacaaactctggacgaggcccgagatggtgtatcgtccgtgaaagttagtgatcacgagatccttgcaggtagcgttgatggccgtgtccggaggtacgatctgcgaatgggacagctcttttcggactacgtggggtctcccatcacctgcacatgtttttcgcgcgatggacagtgtacccttgtgagcagcttggactctaccctccggttgctggataaggatacgggagagttgctgggggaatacaagggccacaagaaccaggagtacaagctggactgctgtctttctgagagagatacccacgtcgtctcttgttccgaggacgggaaagtgtttttctgggatctcgttgaaggggcactggcactcgctctcccagtaggctccggtgtcgtacagagcctggcatatcatcccaccgagccttgtttgctgaccgctatgggcggctccgttcagtgttggagagaggaggcatacgaggcagaagatggcgccgggtag

SEQ ID NO: 223674 - DNA, 948 bp, Artificial Sequence
  derived and/or modified sequence
atggccttccccgagcccaagccccggccccccgagctgccccagaaaaggctgaagacactagattgtggacagggcgccgtgcgcgcagttcggtttaacgtcgatggaaactactgcctgacctgcggatcagacaaaacactgaagctgtggaatccactgcggggaacactattaagaacctattctggacacggatacgaggtgctggacgccgcaggctccttcgacaacagctccttgtgcagcggcgggggggataaggctgtggtcttgtgggatgtggcctccgggcaggtcgtcaggaagttcagaggccacgcgggtaaagtcaacacggtgcagtttaacgaagaagcgacggtcatcctatccggaagcattgactcgtcgatcagatgctgggactgcaggtcccgaagacccgagcccgtgcagacgctggatgaagcccgcgatggggtctcctcagttaaagttagcgatcatgaaatcctggcgggaagcgttgacgggcgtgttaggcgatacgaccttaggatgggccagctgttcagtgattacgtgggctctcccataacatgcacatgtttcagcagagacggacagtgcacactagtgtcttccctggactcgacactccgtcttctggacaaggatacaggcgagctgctgggagagtacaaagggcataagaaccaggagtacaagttggactgctgcctcagcgagagagatacgcacgttgtgagttgttccgaagatggcaaagtgttcttctgggatctggttgagggcgccctggccctggctctccccgtaggctcaggcgtagttcagtctttggcatatcaccccaccgaaccatgcctgctcactgccatgggcggctctgtgcaatgctggcgcgaagaggcctatgaagctgaggacggagccggatag

SEQ ID NO: 223675 - DNA, 1195 bp, Artificial Sequence
  derived and/or modified sequence
aataaggttacacccaagcgtgggtttctaaggcgcggaattttccgtacagaccgatttaaggctgcaaggaaggagtcctgggagcatggctttccctgagccaaagccgcggcctccagagctgccgcagaaacggttgaagacgctggactgcgggcagggggcagtgcgagccgtacgatttaatgtggatggcaattactgcctgacgtgcggcagtgacaagacgctgaagctgtggaacccgcttcgggggacgctgctgcggacgtacagcggccacggctacgaggtgctggatgcggccggctcctttgacaacagtagtctctgctccggcggcggggacaaggcggtggttctgtgggatgtggcatcagggcaggtcgtgcgcaaattccggggccacgcagggaaggtgaacacggtgcagtttaatgaagaggccacagttatcctgtccggctctattgattccagtatccgctgttgggattgccgctcacggaggcctgagccagtgcagacgctggatgaggccagagatggcgtgtccagtgtgaaggtgtcagaccacgagatcctggcaggctccgtggatggccgcgtgagacgctatgacctaaggatggggcagctcttctcagactacgtgggcagccccatcacctgcacctgcttcagccgggatgggcagtgcaccctggtgtccagcctggactccacattgcggctcctggacaaagacacaggggagctgctgggcgagtacaagggccataagaaccaggaatacaagctggactgctgcctgagcgagcgtgacacacatgtggtcagctgttctgaggacgggaaggtgttcttctgggacctggtggagggtgcgctggctctggccctgcctgtgggttccggtgtggtgcagtcgctggcctaccacccaacagagccctgcctgctgaccgccatgggaggcagcgtccagtgctggcgagaggaggcctatgaggcagaggatggagcaggctgaagccaggggacccaccaacaggaccaaggaccgagacacagacatggaaggacttcagataccatcttattctagagacgtagctgaccaaaaagtaggggaggggctgggtctgcaaattaataaatagaagagggggtaagaccttcctgggaccgc

SEQ ID NO: 223676 - DNA, 948 bp, Artificial Sequence
  derived and/or modified sequence
atggctttcccagagccaaagcctagaccaccggagctcccacagaaaagacttaaaaccctggattgtggacaaggagcagtgcgggctgtcagattcaatgtggacggcaattactgccttacatgcggctctgacaagactttgaaactgtggaatcctctgcgcggtactctgctgcgcacctactccggacacggatatgaggtattggacgcagccggaagctttgacaattctagcctgtgtagcggtggaggtgataaggctgtggttctctgggatgtagcatcaggtcaggtggttaggaaatttagaggacatgccggtaaggtgaatacagttcagttcaacgaggaagctaccgtaatattgagtggtagtatcgatagcagcatccgctgctgggactgtcgatcaaggagacccgaaccagtgcagacattagatgaggccagggacggagtgagctcggtgaaagtgagtgaccacgagattcttgcaggatccgtggatgggcgagtcaggagatacgatttgcgcatgggtcagctgttctcagactatgtgggaagcccaatcacatgtacgtgtttctcaagggatggtcagtgcacactggtctcatcgctcgacagtaccctgcgacttctggataaggataccggcgagcttctcggcgagtataagggccataaaaaccaggagtataagctcgactgctgcctttccgaacgcgacacccatgtggtctcttgctccgaagacggtaaagtgttcttttgggacctggtggaaggagctctcgctcttgcactccctgtcggttctggtgtggtgcagtccctagcctatcaccctacggagccctgcctgctgaccgccatgggcggaagtgtccaatgttggcgggaggaggcttacgaagccgaagatggcgcaggatag

SEQ ID NO: 223677 - DNA, 1457 bp, Artificial Sequence
  derived and/or modified sequence
ccagggcgcggtctggaggctcacgggagagaggctgtagccctgggcaatcccgggggtcgttacaggaaggtaggaaaatgccaccctcagggcactggttgggctaaaggtgacactggcgtctcacgggctatgaagacggaatgcctcttaatgccggaattccaagacggaatgcctcttaatgccgggcaagtctcacatgaagctactcatcatttgcttcgtgtcctccgagctccgagagttggcaaagctgatgaaggagcagtagacagcgacccaagcacaccacttcagctagggaaagaccgatttaaggctgcaaggaaggagtcctgggagcatggctttccctgagccaaagccgcggcctccagagctgccgcagaaacggttgaagacgctggactgcgggcagggggcagtgcgagccgtacgatttaatgtggatggcaattactgcctgacgtgcggcagtgacaagacgctgaagctgtggaacccgcttcgggggacgctgctgcggacgtacagcggccacggctacgaggtgctggatgcggccggctcctttgacaacagtagtctctgctccggcggcggggacaaggcggtggttctgtgggatgtggcatcagggcaggtcgtgcgcaaattccggggccacgcagggaaggtgaacacggtgcagtttaatgaagaggccacagttatcctgtccggctctattgattccagtatccgctgttgggattgccgctcacggaggcctgagccagtgcagacgctggatgaggccagagatggcgtgtccagtgtgaaggtgtcagaccacgagatcctggcaggctccgtggatggccgcgtgagacgctatgacctaaggatggggcagctcttctcagactacgtgggcagccccatcacctgcacctgcttcagccgggatgggcagtgcaccctggtgtccagcctggactccacattgcggctcctggacaaagacacaggggagctgctgggcgagtacaagggccataagaaccaggaatacaagctggactgctgcctgagcgagcgtgacacacatgtggtcagctgttctgaggacgggaaggtgttcttctgggacctggtggagggtgcgctggctctggccctgcctgtgggttccggtgtggtgcagtcgctggcctaccacccaacagagccctgcctgctgaccgccatgggaggcagcgtccagtgctggcgagaggaggcctatgaggcagaggatggagcaggctgaagccaggggacccaccaacaggaccaaggaccgagacacagacatggaaggacttcagataccatcttattctagagacgtagctgaccaaaaagtaggggaggggctgggtctgcaaattaataaatagaagagggggtaagaccttcctgggaccgca

SEQ ID NO: 223678 - DNA, 948 bp, Artificial Sequence
  derived and/or modified sequence
atggcttttcctgagccaaagcctcgcccacctgaactgccccagaagagactcaagacgttggattgtggccagggagcagtccgcgcagtgcggttcaatgtcgacggtaactattgccttacctgcggatcggacaaaactctgaagctgtggaatccactgcggggtacgctactgcgcacttattcaggccacgggtacgaagtgctcgacgccgcaggatccttcgacaacagctccctctgctccggcggaggagataaggcggtggttctatgggatgtggcatccggccaagtggtgcgcaagtttcgaggccacgccggaaaagtgaacactgtccaatttaatgaggaggccaccgtaatccttagcgggagcattgactcctctatacgatgttgggactgcagatctcgtagacctgaacccgtgcaaacccttgacgaagccagagatggggtttctagtgtcaaagtttccgaccacgaaatcctcgcaggctccgtcgatggacgagtgagacgatatgacttgcgtatgggccagcttttctctgactacgtcggctcccccatcacgtgtacatgcttttcccgggatggccagtgcaccctggtgtcttctctggactcaaccctgcgtttgctcgacaaagatactggcgagctcctcggcgaatacaagggacacaaaaaccaggaatacaagcttgattgttgtctctctgagagagacacgcacgtggtttcttgcagcgaagacggcaaggtcttcttttgggacctcgtggagggtgccctggccctggccttgccagtgggtagtggggtagtgcagagtctagcataccatcctaccgagccatgcttgttgacagccatgggaggctcagtacagtgctggagagaggaggcctatgaggcggaggatggagccggttag

SEQ ID NO: 223679 - DNA, 948 bp, Artificial Sequence
  derived and/or modified sequence
atggccttccccgagcccaagcccagaccccccgagctgccccagaagagactgaagaccctggactgcggccagggcgccgtgagagccgtgagattcaacgtggacggcaactactgcctgacctgcggcagcgacaagaccctgaagctgtggaaccccctgagaggcaccctgctgagaacctacagcggccacggctacgaggtgctggacgccgccggcagcttcgacaacagcagcctgtgcagcggcggcggcgacaaggccgtggtgctgtgggacgtggccagcggccaggtggtgagaaagttcagaggccacgccggcaaggtgaacaccgtgcagttcaacgaggaggccaccgtgatcctgagcggcagcatcgacagcagcatcagatgctgggactgcagaagcagaagacccgagcccgtgcagaccctggacgaggccagagacggcgtgagcagcgtgaaggtgagcgaccacgagatcctggccggcagcgtggacggcagagtgagaagatacgacctgagaatgggccagctgttcagcgactacgtgggcagccccatcacctgcacctgcttcagcagagacggccagtgcaccctggtgagcagcctggacagcaccctgagactgctggacaaggacaccggcgagctgctgggcgagtacaagggccacaagaaccaggagtacaagctggactgctgcctgagcgagagagacacccacgtggtgagctgcagcgaggacggcaaggtgttcttctgggacctggtggagggcgccctggccctggccctgcccgtgggcagcggcgtggtgcagagcctggcctaccaccccaccgagccctgcctgctgaccgccatgggcggcagcgtgcagtgctggagagaggaggcctacgaggccgaggacggcgccggctag

SEQ ID NO: 223680 - protein, 312 aa, Artificial Sequence
  derived and/or modified sequence
MSSSVEQKKGPTRQRKCGFCKSNRDKECGQLLISENQKVAAHHKCMLFSSALVSSHSDNESLGGFSIEDVQKEIKRGTKLMCSLCHCPGATIGCDVKTCHRTYHYHCALHDKAQIREKPSQGIYMVYCRKHKKTAHNSEAADLEESFNEHELEPSSPKSKKKSRKGRPRKTNFKGLSEDTRSTSSHGTDEMESSSYRDRSPHRSSPSDTRPKCGFCHVGEEENEARGKLHIFNAKKAAAHYKCMLFSSGTVQLTTTSRAEFGDFDIKTVLQEIKRGKRMVCSFYICYATLHLICCFKFRVHPKFIQSSENLK

SEQ ID NO: 223681 - DNA, 939 bp, Artificial Sequence
  derived and/or modified sequence
atgtcttctagcgtggagcaaaagaaaggacctaccagacagaggaagtgcggattctgcaagtccaaccgcgacaaagagtgtggacagcttctgatatccgaaaaccagaaagttgccgcccaccacaagtgcatgctgtttagttccgccctagtttctagccacagcgacaatgaatctctgggtgggttttctatagaggatgtgcagaaggagattaagcgcggcactaagctgatgtgtagtttatgtcattgtccaggcgctacaatcggttgtgatgtgaagacctgtcataggacgtatcactaccactgtgcactgcatgacaaagctcagatacgggagaaacccagccagggcatctatatggtttattgtcgtaaacacaagaaaaccgctcacaactcagaagcagcagaccttgaggagagcttcaacgagcatgaactcgaaccctcatcacccaagtctaagaagaagtcccggaaaggacgccccagaaaaaccaacttcaagggcctgagtgaggatactcggagcactagcagccatggaacagatgagatggaatcaagtagctatcgcgatcggagcccccacagaagttccccttccgacactcgtccgaaatgtggcttctgccatgtcggggaggaagaaaacgaagcgcgaggaaaactgcatatctttaatgccaaaaaggctgcagcacattataagtgtatgctgttcagctccggcactgtgcaattgaccaccacctcacgcgctgagttcggggattttgatattaagaccgttttacaggagataaaaagagggaagagaatggtctgtagtttctacatctgttacgcaaccctgcacctgatttgctgctttaaatttcgcgttcacccaaagttcatccagtcttcggaaaacctcaagtag

SEQ ID NO: 223682 - DNA, 939 bp, Artificial Sequence
  derived and/or modified sequence
atgagcagctctgtggagcagaagaagggccccacccggcagaggaaatgtggcttctgcaagagcaacagagacaaggaatgtggccagctgctgatcagcgagaaccagaaggtggccgcccaccacaagtgcatgctgttcagcagcgccctggtgagcagccacagcgacaatgaaagcctgggcggcttcagcattgaagatgtgcagaaggagatcaagaggggcaccaagctgatgtgcagcctgtgccactgccctggggccaccatcggctgtgatgtgaagacctgccacaggacctaccactaccactgtgccctgcatgacaaggcccagatccgggagaagcccagccagggcatctacatggtgtactgcaggaagcacaagaagacagcccacaacagcgaggccgctgacctggaggagagcttcaatgagcacgagctggagcccagcagccccaagagcaagaagaagagcaggaagggccggcccaggaagaccaacttcaagggcctgtctgaggacaccaggagcaccagcagccacggcacagatgagatggagagcagcagctacagagacaggagcccccacaggagcagccccagcgacacccggcccaagtgtggcttctgccacgtgggggaggaggagaatgaggcccggggcaagctgcacatcttcaatgccaagaaggccgccgcccactacaagtgcatgctgttcagcagcggcaccgtgcagctgaccaccaccagcagagctgagtttggagactttgacatcaagacagtgctgcaggagatcaagaggggcaagaggatggtgtgcagcttctacatctgctacgccaccctgcacctgatctgctgcttcaagttccgggtgcaccccaagttcatccagagcagcgagaacctgaagtag

SEQ ID NO: 223683 - DNA, 939 bp, Artificial Sequence
  derived and/or modified sequence
atgagcagcagcgtggagcagaagaagggccccacccggcagcggaagtgtggcttttgtaagagcaatagggacaaggagtgcggccagctgctgattagcgaaaatcagaaagtagctgcacatcataaatgcatgctgttctcgtcggccctggtatcttcgcacagcgacaatgaatctctgggcggcttctcaatcgaagacgtgcagaaggagattaagaggggtacgaagctaatgtgctcattgtgccactgtccgggggccaccatcggctgtgatgtgaaaacctgtcatcgaacctatcattaccattgcgctctccatgataaggcccaaatccgtgaaaagccgtcgcagggaatctacatggtatactgtcggaaacacaagaagactgctcacaattccgaagccgccgacttagaagaatcgttcaatgagcacgagctggaaccctcctcgccaaaatccaagaaaaaatcccgaaaaggtcggccacgaaaaactaattttaagggccttagtgaggatactagaagcacatcatcacacggcaccgacgagatggagtcctcctcctaccgggaccgttcaccgcacagaagtagcccatccgacaccaggcccaagtgcggcttttgtcacgtcggcgaagaagagaacgaggcaaggggtaagttacacattttcaatgcgaaaaaggcggctgctcactataagtgcatgctgttttcatcgggcactgtacagttgaccacgactagtcgtgccgaatttggagacttcgacataaaaacagtgctgcaggagatcaaaagaggcaaaaggatggtttgctcattctacatctgttatgccacgctgcaccttatctgctgttttaagttccgtgtacacccaaagttcattcaaagctctgagaacctgaagtag

SEQ ID NO: 223684 - DNA, 1150 bp, Artificial Sequence
  derived and/or modified sequence
cccgctctcaggcactgctggagaaccgagaccgacttctttctctttaccctcattggcgcttctctcctgcagtccgcctctgggccctgccgcatttcttgagacttaaagtggcattctaaaggcaatttaaaaatcatgtcaagctcagttgaacagaaaaaagggcctacaagacagcgcaaatgtggcttttgtaagtcaaatagagacaaggaatgtggacagttactaatatctgaaaaccagaaggtggcagcgcaccataagtgcatgctcttttcatctgctttggtatcatcacactctgataatgaaagtcttggtggattttctattgaagatgtccaaaaggaaattaaaagaggcacgaagctgatgtgttctttgtgccattgtcctggagcaacaattggttgtgatgtgaaaacatgtcacaggacataccactaccactgtgcattgcatgataaagctcaaatacgagagaaaccttcacaaggaatttacatggtctattgccgaaaacacaagaaaactgcacataactccgaagcagctgatttagaagaaagttttaatgaacatgaactggagccctcatcacctaaaagtaaaaagaaaagtcgcaaaggaaggccaagaaaaactaattttaaagggctgtcagaagataccaggtccacatcctcccatggaacagatgaaatggaaagtagttcctatagagataggtctccacacagaagcagccctagtgacaccaggcctaaatgtggattttgccatgtaggggaggaagaaaatgaagcacgaggaaaactgcatatatttaatgccaagaaggcagctgcccattataagtgcatgttgttttcttctggcacagtccagctcacaacaacatcaagagcagaatttggagactttgatattaaaactgtacttcaggagattaaacgaggaaaaagaatggtctgtagtttttatatttgttatgcaacattacacttgatttgctgctttaaatttagagtacatcccaaatttatccagtcatcagaaaatttaaagtagttcgtatgttaaagcaaagtatatatttgacttatttgtaatataataaaggatgctgatgttactgaaa

SEQ ID NO: 223685 - DNA, 939 bp, Artificial Sequence
  derived and/or modified sequence
atgagctcttcagtggaacagaagaagggcccaaccaggcagaggaagtgtggcttttgcaaaagtaacagagataaggagtgcgggcagcttctcatctctgagaatcagaaggttgctgcacatcacaaatgcatgctgtttagcagcgcgctcgtctccagtcacagtgacaacgagtccctcggagggtttagcattgaagatgtgcagaaagaaattaagcgtggtacaaagttgatgtgcagtttatgccattgccctggcgcaaccatcggctgtgatgtcaagacctgccatcgcacctaccattaccattgtgccctgcacgacaaagctcagattagagaaaaacccagtcagggaatctatatggtgtactgtcggaagcacaagaaaaccgcccataactctgaagccgcagatctggaggagtcttttaacgaacacgaactcgaaccttcatcacccaagagcaagaagaagtcgcgcaagggcagacctcgtaaaaccaactttaaaggattgtctgaagacactcgcagcacttcgtctcacggtacagacgagatggaatccagcagttacagagaccgttccccgcaccgttcgtccccgtcagacactaggccaaagtgtggcttctgccacgtgggtgaggaggaaaatgaagcccgaggtaaactccatatattcaatgctaaaaaagccgcagcacactacaaatgtatgttatttagttcgggcacagtacagctgactaccacatcgagagcggagtttggagattttgatatcaaaacagtgctccaggaaatcaaaagaggtaagagaatggtttgctctttctacatttgctacgctacgctgcaccttatttgctgcttcaagttccgtgtacacccaaaatttatacaatcgagcgagaatcttaagtag

SEQ ID NO: 223686 - DNA, 939 bp, Artificial Sequence
  derived and/or modified sequence
atgagcagcagcgtggagcagaagaagggccccaccagacagagaaagtgcggcttctgcaagagcaacagagacaaggagtgcggccagctgctgatcagcgagaaccagaaggtggccgcccaccacaagtgcatgctgttcagcagcgccctggtgagcagccacagcgacaacgagagcctgggcggcttcagcatcgaggacgtgcagaaggagatcaagagaggcaccaagctgatgtgcagcctgtgccactgccccggcgccaccatcggctgcgacgtgaagacctgccacagaacctaccactaccactgcgccctgcacgacaaggcccagatcagagagaagcccagccagggcatctacatggtgtactgcagaaagcacaagaagaccgcccacaacagcgaggccgccgacctggaggagagcttcaacgagcacgagctggagcccagcagccccaagagcaagaagaagagcagaaagggcagacccagaaagaccaacttcaagggcctgagcgaggacaccagaagcaccagcagccacggcaccgacgagatggagagcagcagctacagagacagaagcccccacagaagcagccccagcgacaccagacccaagtgcggcttctgccacgtgggcgaggaggagaacgaggccagaggcaagctgcacatcttcaacgccaagaaggccgccgcccactacaagtgcatgctgttcagcagcggcaccgtgcagctgaccaccaccagcagagccgagttcggcgacttcgacatcaagaccgtgctgcaggagatcaagagaggcaagagaatggtgtgcagcttctacatctgctacgccaccctgcacctgatctgctgcttcaagttcagagtgcaccccaagttcatccagagcagcgagaacctgaagtag

SEQ ID NO: 223687 - protein, 115 aa, Artificial Sequence
  derived and/or modified sequence
MSGEPGQTSVAPPPEEVEPGSGVRIVVEYCEPCGFEATYLELASAVKEQYPGIEIESRLGGTGAFEIEINGQLVFSKLENGGFPYEKDLIEAIRRASNGETLEKITNSRPPCVIL

SEQ ID NO: 223688 - DNA, 348 bp, Artificial Sequence
  derived and/or modified sequence
atgagcggcgagcccggccagaccagcgtggcccccccccccgaggaggtggagcccggcagcggcgtgagaatcgtggtggagtactgcgagccctgcggcttcgaggccacctacctggagctggccagcgccgtgaaggagcagtaccccggcatcgagatcgagagcagactgggcggcaccggcgccttcgagatcgagatcaacggccagctggtgttcagcaagctggagaacggcggcttcccctacgagaaggacctgatcgaggccatcagaagagccagcaacggcgagaccctggagaagatcaccaacagcagacccccctgcgtgatcctgtag

SEQ ID NO: 223689 - DNA, 348 bp, Artificial Sequence
  derived and/or modified sequence
atgagcggagagcccggtcagaccagcgtggccccaccaccagaggaagtcgagcctggctccggggtcaggatagttgtcgagtattgtgagccatgtggcttcgaggccacctatctggaattagctagtgccgtgaaagagcagtaccctggcatagaaattgagtctagactaggcggcactggtgcttttgagatcgaaattaacgggcagctggtcttctctaaactggaaaatggcggattcccctatgaaaaagacctcattgaggccattcggcgcgcgagcaacggcgagacgctagagaagatcactaacagcagacccccatgtgtgattctgtag

SEQ ID NO: 223690 - DNA, 348 bp, Artificial Sequence
  derived and/or modified sequence
atgtctggagagcccggccagacctctgtggcccctcctcctgaggaggtggagcccggcagcggcgtgagaattgtggtggagtactgtgagccctgtggctttgaggccacctacctggagctggccagcgctgtgaaggagcagtacccaggcattgaaattgagagccggctgggcggcaccggggcctttgaaattgagatcaatggccagctggtgttcagcaagctggagaatggaggcttcccctatgagaaggacctgattgaggccatccggcgggccagcaatggagagaccctggagaagatcaccaacagccggcccccctgcgtcatcctgtag

SEQ ID NO: 223691 - DNA, 1006 bp, Artificial Sequence
  derived and/or modified sequence
cattagagtaaatgaagccatgaagtccagcggacaccgggagtggggagtggggaagcccggcactccgggagaccgggccagggaaggagggtctggaccggacccagcccctgcccggggagcgagctccggagctgccctacgaggtcaaaacgtagcagtggcggagacccgcagggggcgcccgaacgccaccctcggcccctccccgctccagaggccccgccccgtcacgtgcccgcggttcgcgtcacacccggaagcaggggcccgagcggagccggccgcgatgagcggggagccggggcagacgtccgtagcgccccctcccgaggaggtcgagccgggcagtggggtccgcatcgtggtggagtactgtgaaccctgcggcttcgaggcgacctacctggagctggccagtgctgtgaaggagcagtatccgggcatcgagatcgagtcgcgcctcgggggcacaggtgcctttgagatagagataaatggacagctggtgttctccaagctggagaatgggggctttccctatgagaaagatctcattgaggccatccgaagagccagtaatggagaaaccctagaaaagatcaccaacagccgtcctccctgcgtcatcctgtgactgcacaggactctgggttcctgctctgttctggggtccaaaccttggtctccctttggtcctgctgggagctccccctgcctctttcccctacttagctccttagcaaagagaccctggcctccactttgccctttgggtacaaagaaggaatagaagattccgtggccttgggggcaggagagagacactctccatgaacacttctccagccacctcatacccccttcccagggtaagtgcccacgaaagcccagtccactcttcgcctcggtaatacctgtctgatgccacagattttatttattctcccctaacccagggcaatgtcagctattggcagtaaagtggcgctacaaacactaa

SEQ ID NO: 223692 - DNA, 348 bp, Artificial Sequence
  derived and/or modified sequence
atgagcggcgagcccggccagaccagcgtggcccccccccccgaggaggttgagcccggctctggcgtccgaattgtggtcgagtactgcgaaccctgtggattcgaagcaacctaccttgagctggcatctgccgttaaagaacaatatcctggaatcgaaattgaatccagactgggcgggacaggcgctttcgagatcgagattaacggccagttggtgttttcaaagttggaaaacggcggctttccttatgaaaaggaccttattgaggctatccgaagagccagtaacggcgagacccttgaaaagattacgaatagccgccccccatgcgttatcctctag

SEQ ID NO: 223693 - DNA, 348 bp, Artificial Sequence
  derived and/or modified sequence
atgtctggtgagcctgggcaaactagcgtcgctcccccaccggaagaagttgagcctggctcaggagttaggatcgtagtcgaatactgtgagccgtgtgggttcgaggctacttatctcgagctggcctcagcagtgaaagagcagtaccccggaatcgagattgaatcaaggctgggcggtaccggagccttcgagatcgaaataaacggacagctggtattcagcaagttagagaacggcggattcccatacgagaaagacttaattgaagccattaggagggcctctaacggcgagactctagaaaaaattacaaattcaaggccaccatgcgtgatcctgtag

SEQ ID NO: 223694 - protein, 101 aa, Artificial Sequence
  derived and/or modified sequence
MAASRYRRFLKLCEEWPVDETKRGRDLGAYLRQRVAQAFREGENTQYPRPRDTSFSGLSLEEYKLILSTDTLEELKEIDKGMWKKLQEKFAPKGPEEDHKA

SEQ ID NO: 223695 - protein, 126 aa, Artificial Sequence
  derived and/or modified sequence
MAASRYRRFLKLCEEWPVDETKRGRDLGAYLRQRVAQAFREGENTQVAEPEACDQMYESLARLHSNYYKHKYPRPRDTSFSGLSLEEYKLILSTDTLEELKEIDKGMWKKLQEKFAPKGPEEDHKA

SEQ ID NO: 223696 - DNA, 432 bp, Artificial Sequence
  derived and/or modified sequence
gccgactcctcccgctaaggcgggaacacgcggggcccaagatggcggccagccggtaccggcgttttcttaagctctgtgaggaatggccagtggacgagaccaaacggggccgggacttgggcgcttacctgcgacagcgggtagcacaggcctttcgggagggagagaatacccagtaccctcgccccagagacaccagcttcagtggcctgtcgttggaagagtacaagctgatcctgtccacagacaccttggaagagcttaaggaaatagataaaggcatgtggaagaaactgcaggagaagtttgcccccaagggtcctgaggaggatcataaggcctgagctcaggccttacctcgtgcacatacctaggtgtggagtcttgtacattgccatcgtcaataaaactgccccagtttccccttga

SEQ ID NO: 223697 - DNA, 507 bp, Artificial Sequence
  derived and/or modified sequence
gccgactcctcccgctaaggcgggaacacgcggggcccaagatggcggccagccggtaccggcgttttcttaagctctgtgaggaatggccagtggacgagaccaaacggggccgggacttgggcgcttacctgcgacagcgggtagcacaggcctttcgggagggagagaatacccaggttgcagagcctgaggcctgtgatcagatgtacgagagcttagcgcgactccattcaaactactacaaacacaagtaccctcgccccagagacaccagcttcagtggcctgtcgttggaagagtacaagctgatcctgtccacagacaccttggaagagcttaaggaaatagataaaggcatgtggaagaaactgcaggagaagtttgcccccaagggtcctgaggaggatcataaggcctgagctcaggccttacctcgtgcacatacctaggtgtggagtcttgtacattgccatcgtcaataaaactgccccagtttccccttga

SEQ ID NO: 223698 - DNA, 306 bp, Artificial Sequence
  derived and/or modified sequence
atggccgccagcagatacagaagattcctgaagctgtgcgaggagtggcccgtggacgagaccaagagaggcagagacctgggcgcctacctgagacagagagtggcccaggccttcagagagggcgagaacacccagtaccccagacccagagacaccagcttcagcggcctgagcctggaggagtacaagctgatcctgagcaccgacaccctggaggagctgaaggagatcgacaagggcatgtggaagaagctgcaggagaagttcgcccccaagggccccgaggaggaccacaaggcctag

SEQ ID NO: 223699 - DNA, 381 bp, Artificial Sequence
  derived and/or modified sequence
atggccgccagcagatacagaagattcctgaagctgtgcgaggagtggcccgtggacgagaccaagagaggcagagacctgggcgcctacctgagacagagagtggcccaggccttcagagagggcgagaacacccaggtggccgagcccgaggcctgcgaccagatgtacgagagcctggccagactgcacagcaactactacaagcacaagtaccccagacccagagacaccagcttcagcggcctgagcctggaggagtacaagctgatcctgagcaccgacaccctggaggagctgaaggagatcgacaagggcatgtggaagaagctgcaggagaagttcgcccccaagggccccgaggaggaccacaaggcctag

SEQ ID NO: 223700 - DNA, 306 bp, Artificial Sequence
  derived and/or modified sequence
atggccgcctctcggtatagacgatttcttaaactgtgtgaggaatggcccgttgatgagactaagcggggccgggacctcggcgcatacctgaggcagagggttgctcaagcgtttcgggaaggcgagaacacccaatatcccagacccagggacacctcattttcgggtctgagcctcgaagaatacaaactgatattatcaacagacacccttgaggagctgaaagaaatagacaagggcatgtggaagaagctccaggagaaatttgctcctaaaggtcccgaagaggatcataaggcctag

SEQ ID NO: 223701 - DNA, 381 bp, Artificial Sequence
  derived and/or modified sequence
atggccgctagccgttacaggaggttcctgaagctttgcgaggaatggcccgtcgacgagaccaagaggggacgggacctgggcgcatatctccgtcagcgggtggcacaggcctttcgcgagggggagaacacacaggtggccgagcccgaggcatgtgaccagatgtacgagagcctggctcgactgcattccaattattataaacataaatatccccgtcccagagacacaagttttagcggtttgagcttagaagagtacaagctgatcttaagtacagacacacttgaagagctgaaggaaattgacaaaggcatgtggaaaaagctccaagagaagttcgctccaaagggacctgaagaagaccacaaggcttag

SEQ ID NO: 223702 - DNA, 306 bp, Artificial Sequence
  derived and/or modified sequence
atggccgccagccgctaccgccgcttcctgaagctgtgtgaggagtggcctgtggatgagaccaagaggggccgggacctgggcgcctacctgcggcagagggtggcccaggccttccgggagggggagaacacccagtacccccggccccgggacaccagcttcagcggcctgagcctggaggagtacaagctgatcctgagcacagacaccctggaggagctgaaggagattgacaagggcatgtggaagaagctgcaggagaagtttgcccccaagggccctgaggaggaccacaaggcctag

SEQ ID NO: 223703 - DNA, 381 bp, Artificial Sequence
  derived and/or modified sequence
atggccgccagccgctaccgccgcttcctgaagctgtgtgaggagtggcctgtggatgagaccaagaggggccgggacctgggcgcctacctgcggcagagggtggcccaggccttccgggagggggagaacacccaggtggccgagcctgaggcctgtgaccagatgtatgagagcctggcccggctgcacagcaactactacaagcacaagtacccccggccccgggacaccagcttcagcggcctgagcctggaggagtacaagctgatcctgagcacagacaccctggaggagctgaaggagattgacaagggcatgtggaagaagctgcaggagaagtttgcccccaagggccctgaggaggaccacaaggcctag

SEQ ID NO: 223704 - DNA, 306 bp, Artificial Sequence
  derived and/or modified sequence
atggccgccagccggtaccggcggttcctgaagctgtgcgaggagtggcctgtagatgaaacaaagagagggcgcgatctgggagcctatctccgtcagagggtagcacaggcttttagagaaggcgaaaatactcagtatccaaggcccagagatacttcattttctgggctatccttagaagagtataaactaatcctctctacagatacacttgaagaacttaaagaaatcgataagggtatgtggaagaagctgcaggagaaattcgctcccaagggaccggaagaagatcataaggcttag

SEQ ID NO: 223705 - DNA, 381 bp, Artificial Sequence
  derived and/or modified sequence
atggccgccagccggtaccggcggttcctgaagctgtgcgaggagtggcctgtcgacgaaaccaagcgggggcgggatctcggggcctacctaagacagcgggttgcccaggccttccgggaaggagaaaacacgcaggtggccgaaccagaggcctgcgatcagatgtacgaatctctcgcacgactgcactccaactactacaaacataagtaccccaggccccgagatacttctttctccggcctgagtcttgaggaatacaagttgattctctccactgatacactggaggagctcaaagagattgacaagggtatgtggaaaaagttacaggagaagttcgcccctaaaggcccagaggaggaccacaaggcctag

SEQ ID NO: 223706 - DNA, 306 bp, Artificial Sequence
  derived and/or modified sequence
atggccgctagcaggtacaggcgcttcctcaagctatgcgaagaatggcccgtagacgaaacaaagcggggtcgcgacctcggcgcatacctccgccagcgggtggcccaggccttccgagagggcgaaaacacacagtatccaaggccacgggacacctcattctcagggctatcactggaggagtacaaacttatcttgagtacagacaccctggaagagctaaaggaaatcgataaaggcatgtggaagaagttacaggaaaagttcgcccctaaggggcctgaggaggaccataaggcctag

SEQ ID NO: 223707 - DNA, 381 bp, Artificial Sequence
  derived and/or modified sequence
atggcagcttcccggtatcggcgttttttaaagctgtgcgaggagtggcctgttgatgaaaccaagagaggaagagatcttggggcttatcttagacaacgggttgctcaggcttttagggaaggagaaaatacccaagtggcggagcctgaggcgtgtgatcagatgtatgaatcattggcccgtcttcattctaactattataagcataagtatccccgtcccagagatacctcgttttccgggctatcactggaggagtataaattgattctgagtactgatacacttgaagaacttaaagagattgataagggcatgtggaagaaactccaggaaaagtttgcccctaaggggcctgaagaggatcacaaagcttag

SEQ ID NO: 223708 - protein, 235 aa, Artificial Sequence
  derived and/or modified sequence
MGSTESSEGRRVSFGVDEEERVRVLQGVRLSENVVNRMKEPSSPPPAPTSSTFGLQDGNLRAPHKESTLPRSGSSGGQQPSGMKEGVKRYEQEHAAIQDKLFQVAKREREAATKHSKASLPTGEGSISHEEQKSVRLARELESREAELRRRDTFYKEQLERIERKNAEMYKLSSEQFHEAASKMESTIKPRRVEPVCSGLQAQILHCYRDRPHEVLLCSDLVKAYQRCVSAAHKG

SEQ ID NO: 223709 - protein, 166 aa, Artificial Sequence
  derived and/or modified sequence
  misc_feature (1)..(1): Xaa can be any naturally occurring amino acid
XTLPRSGSSGGQQPSGMKEGVKRYEQEHAAIQDKLFQVAKREREAATKHSKASLPTGEGSISHEEQKSVRLARELESREAELRRRDTFYKEQLERIERKNAEMYKLSSEQFHEAASKMESTIKVEPVCSGLQAQILHCYRDRPHEVLLCSDLVKAYQRCVSAAHKG

SEQ ID NO: 223710 - DNA, 708 bp, Artificial Sequence
  derived and/or modified sequence
atgggcagcaccgagagcagcgagggcagaagagtgagcttcggcgtggacgaggaggagagagtgagagtgctgcagggcgtgagactgagcgagaacgtggtgaacagaatgaaggagcccagcagccccccccccgcccccaccagcagcaccttcggcctgcaggacggcaacctgagagccccccacaaggagagcaccctgcccagaagcggcagcagcggcggccagcagcccagcggcatgaaggagggcgtgaagagatacgagcaggagcacgccgccatccaggacaagctgttccaggtggccaagagagagagagaggccgccaccaagcacagcaaggccagcctgcccaccggcgagggcagcatcagccacgaggagcagaagagcgtgagactggccagagagctggagagcagagaggccgagctgagaagaagagacaccttctacaaggagcagctggagagaatcgagagaaagaacgccgagatgtacaagctgagcagcgagcagttccacgaggccgccagcaagatggagagcaccatcaagcccagaagagtggagcccgtgtgcagcggcctgcaggcccagatcctgcactgctacagagacagaccccacgaggtgctgctgtgcagcgacctggtgaaggcctaccagagatgcgtgagcgccgcccacaagggctag

SEQ ID NO: 223711 - DNA, 501 bp, Artificial Sequence
  derived and/or modified sequence
tgaaccctgcccagaagcggcagcagcggcggccagcagcccagcggcatgaaggagggcgtgaagagatacgagcaggagcacgccgccatccaggacaagctgttccaggtggccaagagagagagagaggccgccaccaagcacagcaaggccagcctgcccaccggcgagggcagcatcagccacgaggagcagaagagcgtgagactggccagagagctggagagcagagaggccgagctgagaagaagagacaccttctacaaggagcagctggagagaatcgagagaaagaacgccgagatgtacaagctgagcagcgagcagttccacgaggccgccagcaagatggagagcaccatcaaggtggagcccgtgtgcagcggcctgcaggcccagatcctgcactgctacagagacagaccccacgaggtgctgctgtgcagcgacctggtgaaggcctaccagagatgcgtgagcgccgcccacaagggctag

SEQ ID NO: 223712 - DNA, 1006 bp, Artificial Sequence
  derived and/or modified sequence
cgcggccgcgcgagtcctggaaagcgttgttggcccggttgctctggagccgggtctcgggtctggtggctgccggccctgcggcatctcgccatggggagcacggagagcagcgagggccgcagggtgtccttcggagtggacgaggaggagcgggtccgggtgctgcagggtgtccggctgtctgaaaacgtggtgaaccgcatgaaggagcccagctctccaccccctgctcccacatcttctacctttggccttcaagatggcaacttgagagcccctcacaaagaatccacactgcccaggtcggggagcagtggtggccagcagccctcagggatgaaggagggtgtcaagaggtatgaacaggagcatgctgctatccaggataagctcttccaggtggcaaagagggaaagagaggctgccaccaagcactccaaggcatccctgcccacgggcgaaggcagcatcagccatgaggagcagaagtcagtccggctggccagggagctggagagcagagaggcagagctaagacgccgtgacaccttctacaaggagcagctggagcgtattgagaggaagaatgctgagatgtataaactgtcttcagagcaattccatgaggcagcctcaaagatggagagcacaataaagccccgcagggtggagcccgtctgctcagggttgcaggcccagattctccactgctaccgagatcgcccgcatgaggtgctgctgtgctcggacctggtcaaggcataccagcgctgcgtgagcgccgcccacaagggctgaggagcagacatcattccctgccctggcagtgacttggagccctgaagaagggaccaatcatgggaccacagccactgtgccctgccgtttcctgctgggcccctgcatatgcccctgagcctggggctgccacgtgtttaggaaacaaagtatgcgctactgtctgaaaacaaataaagcagatgcctttgttttcagtcgttga

SEQ ID NO: 223713 - DNA, 690 bp, Artificial Sequence
  derived and/or modified sequence
ccacactgcccaggtcggggagcagtggtggccagcagccctcagggatgaaggagggtgtcaagaggtatgaacaggagcatgctgctatccaggataagctcttccaggtggcaaagagggaaagagaggctgccaccaagcactccaaggcatccctgcccacgggcgaaggcagcatcagccatgaggagcagaagtcagtccggctggccagggagctggagagcagagaggcagagctaagacgccgtgacaccttctacaaggagcagctggagcgtattgagaggaagaatgctgagatgtataaactgtcttcagagcaattccatgaggcagcctcaaagatggagagcacaataaaggtggagcccgtctgctcagggttgcaggcccagattctccactgctaccgagatcgcccgcatgaggtgctgctgtgctcggacctggtcaaggcataccagcgctgcgtgagcgccgcccacaagggctgaggagcagacatcattccctgccctggcagtgacttggagccctgaagaagggaccaatcatgggaccacagccactgtgccctgccgtttcctgctgggcccctgcatatgcccctgagcctggggctgccacgtgtttaggaaacaaagtatgcgctactgtctgaaaacaaataaagcagatgccttt

SEQ ID NO: 223714 - DNA, 708 bp, Artificial Sequence
  derived and/or modified sequence
atgggtagcacagagagcagtgaggggagaagagtcagtttcggggtcgacgaggaagaaagagtgcgggtgctccagggtgtgaggctgtccgagaatgtggtgaaccgcatgaaagaaccgtcttcccctccaccagcaccaacatcctcaacgtttggcctgcaagatgggaacctgcgagcgccccacaaagaaagcactttacctcgctctgggagcagcggaggacaacagccttccgggatgaaagagggagtgaaaaggtatgaacaggaacacgcagctattcaggacaagctcttccaggtggccaaaagggagcgggaggccgctaccaagcactccaaagccagtctgcctacaggtgaagggtccatttcacacgaagagcagaaaagcgtgaggcttgcacgggaacttgagtcaagagaggcagagctgaggcggcgcgacacattctataaggaacagttggaacgtatcgaaaggaagaatgccgagatgtataaactatcatcagagcagttccacgaggccgcctcaaagatggagtccacgatcaagccgcgtagagttgagcctgtctgttcaggcctgcaggctcaaattctgcattgctatagggaccgccctcacgaagtcctcctttgttcagatctcgtcaaagcctaccagcggtgcgtttccgccgcccacaagggctag

SEQ ID NO: 223715 - DNA, 501 bp, Artificial Sequence
  derived and/or modified sequence
taaacactgcctagatctggcagctccgggggacagcagcccagtggtatgaaggaaggcgtcaaacgctacgaacaggagcacgccgctatccaagacaaactgttccaagtcgctaaaagagagagggaggccgctactaagcattctaaggctagcctccccaccggtgaaggaagcatttcgcacgaggaacagaaatccgtgcgcctcgcccgggagctggagagcagagaagctgagctccggaggagagacacattttacaaggagcagctggagcggatcgagcgcaaaaacgctgaaatgtacaaattatccagtgagcagtttcacgaggccgccagcaagatggagtctacgatcaaagttgagccagtttgttcagggctgcaagcacaaattctgcactgctaccgtgataggccacacgaggtactgctgtgttccgaccttgtcaaggcgtaccagcggtgcgtgagcgctgcacacaaagggtag

SEQ ID NO: 223716 - DNA, 708 bp, Artificial Sequence
  derived and/or modified sequence
atgggcagcacagagagcagcgagggccggcgggtgtcctttggagtggatgaggaggagcgggtgcgggtgctgcagggcgtgcggctgtctgaaaatgtggtgaacaggatgaaggagcccagcagccccccaccagcccccaccagcagcaccttcggcctgcaggacggcaacctgcgggccccccacaaggagagcaccctgcccaggagcggcagcagcggcggccagcagcccagcggcatgaaggagggcgtgaagagatatgagcaggagcacgccgccatccaggacaagctgttccaggtggccaagcgggagcgggaggccgccaccaagcacagcaaggccagcctgcccaccggggagggcagcatcagccatgaggagcagaagtctgtgcggctggcccgggagctggagagccgggaggccgagctgcggcggcgggacaccttctacaaggagcagctggagcgcatcgagaggaagaatgctgagatgtacaagctgagcagcgagcagttccacgaggccgccagcaagatggagagcaccatcaagcccaggagagtggagcctgtgtgcagcggcctgcaggcccagatcctgcactgctacagagaccggccccatgaggtgctgctgtgcagcgacctggtgaaggcctaccagagatgtgtgtctgctgcccacaagggctag

SEQ ID NO: 223717 - DNA, 501 bp, Artificial Sequence
  derived and/or modified sequence
tgaaccctgcccaggagcggcagcagcggcggccagcagcccagcggcatgaaggagggcgtgaagagatatgagcaggagcacgccgccatccaggacaagctgttccaggtggccaagcgggagcgggaggccgccaccaagcacagcaaggccagcctgcccaccggggagggcagcatcagccatgaggagcagaagtctgtgcggctggcccgggagctggagagccgggaggccgagctgcggcggcgggacaccttctacaaggagcagctggagcgcatcgagaggaagaatgctgagatgtacaagctgagcagcgagcagttccacgaggccgccagcaagatggagagcaccatcaaggtggagcctgtgtgcagcggcctgcaggcccagatcctgcactgctacagagaccggccccatgaggtgctgctgtgcagcgacctggtgaaggcctaccagagatgtgtgtctgctgcccacaagggctag

SEQ ID NO: 223718 - DNA, 708 bp, Artificial Sequence
  derived and/or modified sequence
atgggcagcaccgagagcagcgagggccggcgggtgagcttcggcgttgatgaagaagagagggttagggtgctgcaaggtgtgaggctgtccgaaaacgttgttaataggatgaaggagccctccagccccccacctgcaccaacctcctccaccttcgggcttcaggatggaaaccttagagctccgcataaagaaagtacgctcccacgatcaggcagctctggcggacagcagccgagcggcatgaaggagggcgtgaagcggtatgagcaggagcatgctgctatccaggacaagttgttccaggtggccaaaagagaacgggaagccgcaaccaagcactccaaagcatcgcttcccacaggggaaggaagcattagtcacgaggaacagaagtcagtcagactagcccgggagctggaatctcgtgaggcagaactgagaaggcgggacacgttttacaaggaacaattggaaagaatcgagcggaagaatgcggaaatgtacaaactcagttctgaacagtttcatgaagctgcttccaagatggagtctacaataaaacctaggcgggtggagccagtctgtagtggtcttcaggctcagatcttacactgctaccgcgatcggccccacgaggttttgttatgctctgacctcgttaaggcttatcagcgttgcgtatccgccgcgcataaggggtag

SEQ ID NO: 223719 - DNA, 501 bp, Artificial Sequence
  derived and/or modified sequence
tgaaccctgccccggagcggcagcagcggcggccagcagcccagcgggatgaaggagggtgtgaagagatacgagcaggagcacgctgccatccaggacaagctattccaagtcgccaagcgggagagggaggcggctacaaagcattccaaggcatctttacccaccggtgagggttctatctctcatgaagagcagaagagtgtgcgcttggccagagaattggagtccagggaagctgaactgcggaggcgcgatacattctataaagagcagttagagcgtattgagcggaagaacgcagagatgtataaactgagtagtgaacaatttcatgaggcagcttctaagatggagagcaccattaaagtagagccggtgtgctctggccttcaggctcagatcttgcattgctatcgggacagaccccacgaggtactgctctgttcagatctagtgaaggcgtatcaacgctgcgtgtctgccgcccacaagggatag

SEQ ID NO: 223720 - DNA, 708 bp, Artificial Sequence
  derived and/or modified sequence
atggggtcaactgagtcaagcgagggcagaagggtcagcttcggggtcgatgaggaggagcgagtgcgcgttctccagggcgtacggctgtctgaaaatgtggtcaacaggatgaaagaaccatcatcccccccaccggcacccacttctagcactttcgggctgcaggacgggaatctgcgcgctccccataaagaaagtaccctgcccagatccggctcgtccggtgggcagcagccatcaggcatgaaggagggcgtcaagagatacgagcaagaacacgcagctatccaagacaaactcttccaggtggctaagcgcgaaagggaagcggcaactaagcacagcaaggcatccctcccaacaggggaggggagcatcagtcatgaagagcagaaaagcgtgaggttggctcgcgagctggaatccagggaggccgagctccgaaggcgcgacacattttacaaggaacagctcgagcgcatagagcgaaaaaacgctgagatgtacaagctgtcctctgagcaatttcatgaggcggcatctaagatggagtcaactatcaaacctagaagagttgagcccgtttgttcaggcctccaggcacagattcttcactgctatcgcgataggcctcacgaggtgcttctgtgctctgacttggtgaaagcctatcagcggtgcgtgtccgctgctcataaggggtag

SEQ ID NO: 223721 - DNA, 501 bp, Artificial Sequence
  derived and/or modified sequence
tgaacgctgccgagatccggctcaagcgggggtcagcagccaagcggcatgaaggagggggtaaaaaggtacgagcaggagcacgcggctatacaagataaattgttccaagtggcgaagagagagcgagaggctgccactaagcattccaaagcatccctacctaccggtgagggttctatctcgcatgaggaacagaaatccgtccggctggccagagaattggagtctagggaagccgaactcaggagaagggacacattctataaggaacaactggagagaatagagaggaagaatgctgaaatgtataagttgtcctcagagcagttccatgaggctgcaagtaaaatggagtctacaataaaagtcgaacctgtgtgctcaggattgcaggcacagatcttgcactgttatagagatcggccacacgaagtgctcctgtgcagcgaccttgtgaaggcttatcaaaggtgtgtctccgcggcacacaagggatag

SEQ ID NO: 223722 - protein, 323 aa, Artificial Sequence
  derived and/or modified sequence
MPVHSRGDKKETNHHDEMEVDYAENEGSSSEDEDTESSSVSEDGDSSEMDDEDCERRRMECLDEMSNLEKQFTDLKDQLYKERLSQVDAKLQEVIAGKAPEYLEPLATLQENMQIRTKVAGIYRELCLESVKNKYECEIQASRQHCESEKLLLYDTVQSELEEKIRRLEEDRHSIDITSELWNDELQSRKKRKDPFSPDKKKPVVVSGPYIVYMLQDLDILEDWTTIRKAMATLGPHRVKTEPPVKLEKHLHSARSEEGRLYYDGEWYIRGQTICIDKKDECPTSAVITTINHDEVWFKRPDGSKSKLYISQLQKGKYSIKHS

SEQ ID NO: 223723 - protein, 275 aa, Artificial Sequence
  derived and/or modified sequence
MDDEDCERRRMECLDEMSNLEKQFTDLKDQLYKERLSQVDAKLQEVIAGKAPEYLEPLATLQENMQIRTKVAGIYRELCLESVKNKYECEIQASRQHCESEKLLLYDTVQSELEEKIRRLEEDRHSIDITSELWNDELQSRKKRKDPFSPDKKKPVVVSGPYIVYMLQDLDILEDWTTIRKAMATLGPHRVKTEPPVKLEKHLHSARSEEGRLYYDGEWYIRGQTICIDKKDECPTSAVITTINHDEVWFKRPDGSKSKLYISQLQKGKYSIKHS

SEQ ID NO: 223724 - DNA, 972 bp, Artificial Sequence
  derived and/or modified sequence
atgcccgtgcacagcagaggcgacaagaaggagaccaaccaccacgacgagatggaggtggactacgccgagaacgagggcagcagcagcgaggacgaggacaccgagagcagcagcgtgagcgaggacggcgacagcagcgagatggacgacgaggactgcgagagaagaagaatggagtgcctggacgagatgagcaacctggagaagcagttcaccgacctgaaggaccagctgtacaaggagagactgagccaggtggacgccaagctgcaggaggtgatcgccggcaaggcccccgagtacctggagcccctggccaccctgcaggagaacatgcagatcagaaccaaggtggccggcatctacagagagctgtgcctggagagcgtgaagaacaagtacgagtgcgagatccaggccagcagacagcactgcgagagcgagaagctgctgctgtacgacaccgtgcagagcgagctggaggagaagatcagaagactggaggaggacagacacagcatcgacatcaccagcgagctgtggaacgacgagctgcagagcagaaagaagagaaaggaccccttcagccccgacaagaagaagcccgtggtggtgagcggcccctacatcgtgtacatgctgcaggacctggacatcctggaggactggaccaccatcagaaaggccatggccaccctgggcccccacagagtgaagaccgagccccccgtgaagctggagaagcacctgcacagcgccagaagcgaggagggcagactgtactacgacggcgagtggtacatcagaggccagaccatctgcatcgacaagaaggacgagtgccccaccagcgccgtgatcaccaccatcaaccacgacgaggtgtggttcaagagacccgacggcagcaagagcaagctgtacatcagccagctgcagaagggcaagtacagcatcaagcacagctag

SEQ ID NO: 223725 - DNA, 972 bp, Artificial Sequence
  derived and/or modified sequence
atgcccgttcattcccgcggggataagaaggagactaatcaccacgacgaaatggaggtggactacgccgagaatgaaggttcttcatccgaggacgaggatactgaatcctcctcggtctccgaggatggggattctagtgagatggatgacgaggactgtgaaagacggaggatggagtgcctagatgaaatgagcaatctcgagaaacagttcactgatcttaaggaccagttgtacaaggaaagactgagccaggtggacgcaaaactgcaggaagtaatagccggcaaggccccagagtatctggaaccgttagccactttacaggagaacatgcagatcaggacaaaggtagccggtatctatagggagttgtgcctcgagagtgtgaagaacaagtatgaatgcgagattcaagctagtagacagcactgcgaatccgaaaaactcctgctgtatgatactgtccagtctgaactcgaagagaagataagacgcctagaggaagacaggcatagtatagacatcactagtgaactgtggaacgatgagctacagagtcgtaaaaagcggaaagacccatttagtcctgataaaaagaagccagtagtggtgtctggaccatacatcgtgtacatgctccaagacctcgacatccttgaggactggacaactatacgaaaagcaatggccactctgggacctcaccgggtgaaaaccgaaccaccggtgaagcttgagaaacatttgcatagtgcaagaagtgaggagggccgtctgtactacgatggtgaatggtatatcagaggccagacaatttgcatcgataagaaggatgagtgtccgacgtccgccgtcattactacaattaatcatgatgaagtgtggtttaaacggccagacggttctaagtcaaagctctacatctcccagctgcagaaggggaagtattcaatcaagcactcgtag

SEQ ID NO: 223726 - DNA, 972 bp, Artificial Sequence
  derived and/or modified sequence
atgcctgtgcacagcagaggagacaagaaggagaccaaccaccatgatgagatggaggtggactatgcagaaaatgaaggcagcagcagtgaagatgaggacacagagagcagctctgtgtctgaagatggagacagcagcgagatggatgatgaggactgtgagaggaggaggatggagtgcctggatgagatgagcaacctggagaagcagttcacagacctgaaggaccagctgtacaaggagcggctgagccaggtggatgccaagctgcaggaggtgattgctgggaaggcccctgagtacctggagcccctggccaccctgcaggagaacatgcagatccgcaccaaggtggccggcatctaccgggagctgtgcctggagagcgtgaagaacaagtatgaatgtgagatccaggccagccggcagcactgtgagagcgagaagctgctgctgtatgacacagtgcagagcgagctggaggagaagatccggcggctggaggaggacagacacagcattgacatcaccagcgagctgtggaatgatgagctgcagagcaggaagaagaggaaggaccccttctccccagacaagaagaagcctgtggtggtgtctggcccctacatcgtgtacatgctgcaggacctggacatcctggaggactggaccaccatcaggaaggccatggccaccctgggcccccaccgggtgaagacagagccccctgtgaagctggagaagcacctgcacagcgcccggtctgaggagggccgcctgtactatgatggagagtggtacatccggggccagaccatctgcatcgacaagaaggatgaatgtcccaccagcgctgtgatcaccaccatcaaccatgatgaggtgtggttcaagaggccagatggcagcaagagcaagctgtacatcagccagctgcagaagggcaagtacagcatcaagcacagctag

SEQ ID NO: 223727 - DNA, 972 bp, Artificial Sequence
  derived and/or modified sequence
atgcccgtgcacagccggggcgacaagaaggagaccaaccaccacgacgagatggaagtggattacgctgaaaatgaagggagctctagtgaggacgaggacacagagtctagctcagtttccgaggacggggactcaagtgaaatggatgatgaagattgcgagaggagaagaatggagtgtctcgacgagatgtccaatctggaaaagcaattcacagatcttaaagatcagttgtacaaagaaaggcttagtcaggtggatgcaaagcttcaagaggtcattgccgggaaagcccctgagtatttagaacccctggccaccctccaggagaatatgcagatacgcaccaaggtggctgggatctatcgggaactctgccttgagtcagtgaagaacaaatacgaatgcgaaatccaggcctcgcgccagcactgcgagagcgagaagttattgttatatgacaccgtgcagtcagaactggaggagaagattagacggttagaggaggatcgccatagcattgatatcacatctgagctgtggaatgatgaattgcagagcaggaaaaaacgtaaagatccgtttagtcccgataaaaagaaaccagtagtcgtttcgggaccctacatcgtttatatgctgcaggaccttgacatactggaggactggacaaccattaggaaagccatggccacgctggggccccatcgggtcaaaaccgagccgccagtgaagctggaaaaacatctccattcagcacggtccgaagaggggcgactttactatgacggagaatggtacatcagaggacagacaatctgcatcgacaagaaagacgagtgtccaaccagtgccgtgattactacaattaaccacgatgaagtttggtttaaaagacctgatggcagcaaaagcaagctctacatctcccagctgcagaaagggaagtattcaataaaacactcttag

SEQ ID NO: 223728 - DNA, 972 bp, Artificial Sequence
  derived and/or modified sequence
atgccagtacatagtcgcggagacaagaaagagaccaatcaccatgatgagatggaggtggactacgctgagaatgagggttcctctagtgaagacgaggacacagaatcctcctctgtgtcagaggacggggattccagtgaaatggatgatgaggattgtgagcgtcgaagaatggagtgtctggatgagatgagtaatctggagaaacaattcacggacttgaaggaccagctgtataaagagaggctgtctcaagtcgacgccaagctccaggaagtcattgccggtaaggctccagaatatttggagcccctggctacattgcaggagaatatgcagatacggactaaggtggcagggatttacagagagctgtgtctggaatccgtgaagaacaaatacgagtgcgaaattcaagccagccggcagcattgtgagtccgagaagctcctgctatacgatacagtacaaagtgaattggaagaaaagatccgcaggctggaggaggatcggcattccatagatattaccagcgaactgtggaacgatgagctacagagcagaaagaagcgaaaagacccattctcccctgacaagaagaaacccgtcgtggtttccggcccatatatcgtttatatgctgcaagatctggatattttagaagactggaccacaatacgaaaagcaatggcgaccctcgggccacaccgcgtaaagaccgagcccccagtcaagttggagaagcatttacactctgctcgatccgaagaggggaggctgtactatgacggcgagtggtatatacggggacagacaatttgcatcgacaaaaaggacgaatgtccaacctccgctgttattaccactattaaccatgacgaagtgtggttcaagcgcccagacggctcaaaatccaagctctacattagtcaactgcagaagggtaagtattccattaaacattcgtag

SEQ ID NO: 223729 - DNA, 2628 bp, Artificial Sequence
  derived and/or modified sequence
ggaaggcctccgccaatggcagagctcccatcgcagagcctgcgggttaggttgtgaggcccgggccgggggcggggaggagccaagggggcgagcaagctcggtggctgggtgggttggggcgttccgcgcgcccttcattgaagcggcggtggccgggctgggcgccggtagtggaaagcgacggcgcggctggaaaatgccagtccattcccgaggggataagaaggagaccaaccatcacgatgagatggaggtggactacgccgaaaatgaggggagcagctccgaggacgaggacactgagagctcgtcggtctccgaggatggagatagctcagaaatggatgatgaagactgtgaaagaagaagaatggaatgtttggatgaaatgtccaatcttgaaaaacagtttaccgatctcaaagatcaactttataaagaacgattaagtcaggtggatgcaaaactacaagaagtcatagctggaaaagcaccagaatacttggaaccgctggcaactttacaggaaaatatgcaaattcgtacaaaggtagcaggaatctatagagagctctgcttagaatctgtaaagaacaaatatgaatgtgaaattcaagcttctcgccagcattgtgagagcgaaaagctgttgctatatgatacagtccagagtgaactagaggagaagataagaaggcttgaagaggataggcacagcattgatattacctcagagctgtggaatgatgagcttcagtcaagaaaaaagaggaaggatcctttcagtcctgacaaaaagaagccagttgttgtttcaggtccatatatagtttatatgctacaagatcttgatattcttgaagactggacaacaattaggaaggcaatggctacattggggccacacagagtgaaaacggaaccacctgtgaaactggaaaaacatctgcacagtgctagatctgaagagggaagactatattatgatggtgaatggtatatacgtggacaaacaatatgtattgataaaaaagatgaatgtcctacaagtgctgtaattacaacaattaaccatgatgaagtttggtttaagaggcctgatggaagcaaatctaagctttacatttcacagctacagaaaggaaaatattcaattaaacattcataatcatgatttaagtgttatctaaatttaccttattagtgttaccaaatgtaagtgccatgagagtaaaaaaatgtattcaataacttaatattctcactgaatcatgagagaatgtgtatttgtaggtagtactctaaatagatctcattgatatgttattaaaagaaacagtaataaaaattttatcacgatccttacgttgatttgcctcttaggtccgatgaccaataggtattctgtatatggtaggggtttctttctaaacatttttctttggttttaaaaaaagttatgcaaatttgtcttatctttagtaaactatgactacatttatctgcaatttttaaaattttccatatctttgtcattcattgtgtgtttgtaaataaggccgatagaatgtttcctataaatggtttgtactagtacattagtgttaaaccagaactgaaatttaaacatatatatatatgaggatgtatatatggcatcatcagcttatttagaactgatggccataccttacaatcttgttttacccaaaattaagctattggggttgaaagctaaaaggagcacttttgtagaatagcaacttttcttttcctctttcttgattgtatggtggggtggtgacctatttttacaaattatacctaatgagtaaaattagtgtaaagtgataacatgcttctacctgtatttctagtgaccctttagcggcaggtatttatacctggtatttatgatgcagtatataagtggtgaacaataactgacagtattgtgcttgctgtacatgtctggtcttttgaaacagattttagtaagcattttccagaggtaaaactgtgtccttattctaattttattcctagggcaaagtagacagggattatttccttgaatctatttccaaattaatatttttttctttggtatttctacactttaaggccatttggtgcaatttagaaagtgttggcctcccttccgctagccacattcaaaattaacttccaaaacctcaggaacagtacaaagaattgaaaccctcaatatggcagcacagccggctgtagtgtatatttagggtacaccaaatcaggtattcctggtggtcttgtgcactttaatttctgttacaatgagttaagaggatgaggaagaaatctacttattaacacttactgcagaaatgtctgcattattccgtttgttttcttattattttacctctccaaacatcttcctgtgcagatcactacttcatagttgccaaattttaaaacacttaactgctgaaattcagtgtcagcaaagtgatattacgttgttctgtttctaattaaccttagcaaatgtacataatgtcaaaacccaatagtatttgacagtacttatgtatacaatgtttgataagcatttttaataagatttgtatttttaaatttagt

SEQ ID NO: 223730 - DNA, 1544 bp, Artificial Sequence
  derived and/or modified sequence
gttccgcgcgcccttcattgaagcggcggtggccgggctgggcgccggtagtggaaagcgacggcgcggctggaaaatgccagtccattcccgaggggataagaaggagaccaaccatcacgatgagatggaggtggactacgccgaaaatgaggggagcagctccgaggacgaggacactgagagctcgtcggtctccgaggatggagatagctcagtttgacttttatttgatgaagatcaagatgcagatcattttgtgcttcagttattttgatgaatgaatatatgtgatatgaacatagaaaatgtggactataggacagacctgaaatggatgatgaagactgtgaaagaagaagaatggaatgtttggatgaaatgtccaatcttgaaaaacagtttaccgatctcaaagatcaactttataaagaacgattaagtcaggtggatgcaaaactacaagaagtcatagctggaaaagcaccagaatacttggaaccgctggcaactttacaggaaaatatgcaaattcgtacaaaggtagcaggaatctatagagagctctgcttagaatctgtaaagaacaaatatgaatgtgaaattcaagcttctcgccagcattgtgagagcgaaaagctgttgctatatgatacagtccagagtgaactagaggagaagataagaaggcttgaagaggataggcacagcattgatattacctcagagctgtggaatgatgagcttcagtcaagaaaaaagaggaaggatcctttcagtcctgacaaaaagaagccagttgttgtttcaggtccatatatagtttatatgctacaagatcttgatattcttgaagactggacaacaattaggaaggcaatggctacattggggccacacagagtgaaaacggaaccacctgtgaaactggaaaaacatctgcacagtgctagatctgaagagggaagactatattatgatggtgaatggtatatacgtggacaaacaatatgtattgataaaaaagatgaatgtcctacaagtgctgtaattacaacaattaaccatgatgaagtttggtttaagaggcctgatggaagcaaatctaagctttacatttcacagctacagaaaggaaaatattcaattaaacattcataatcatgatttaagtgttatctaaatttaccttattagtgttaccaaatgtaagtgccatgagagtaaaaaaatgtattcaataacttaatattctcactgaatcatgagagaatgtgtatttgtaggtagtactctaaatagatctcattgatatgttattaaaagaaacagtaataaaaattttatcacgatccttacgttgatttgcctcttaggtccgatgaccaataggtattctgtatatggtaggggtttctttctaaacatttttctttggttttaaaaaaagttatgcaaatttgtcttatctttagtaaactatgactacatttatctgcaatttttaaaattttccatatctttgtcattcattgtgtgtttgt

SEQ ID NO: 223731 - protein, 652 aa, Artificial Sequence
  derived and/or modified sequence
MHPGGGPSRAERLELGLGRERPAKAIFLHRRPGEGGGRERCLRCGHVCVRRGPGPREAVPSGRPRPDTLTPPWVRQRAVTGTFCASWTPLRNRRAQRMATDMQRKRSSECLDGTLTPSDGQSMERAESPTPGMAQGMEPGAGQEGAMFVHARSYEDLTESEDGAASGDSHKEGTRGPPPLPTDMRQISQDFSELSTQLTGVARDLQEEMLPGSSEDWLEPPGAVGRPATEPPREGTTEGDEEDATEAWRLHQKHVFVLSEAGKPVYSRYGSEEALSSTMGVMVALVSFLEADKNAIRSIHADGYKVVFVRRSPLVLVAVARTRQSAQELAQELLYIYYQILSLLTGAQLSHIFQQKQNYDLRRLLSGSERITDNLLQLMARDPSFLMGAARCLPLAAAVRDTVSASLQQARARSLVFSILLARNQLVALVRRKDQFLHPIDLHLLFNLISSSSSFREGEAWTPVCLPKFNAAGFFHAHISYLEPDTDLCLLLVSTDREDFFAVSDCRRRFQERLRKRGAHLALREALRTPYYSVAQVGIPDLRHFLYKSKSSGLFTSPEIEAPYTSEEEQERLLGLYQYLHSRAHNASRPLKTIYYTGPNENLLAWVTGAFELYMCYSPLGTKASAVSAIHKLMRWIRKEEDRLFILTPLTY

SEQ ID NO: 223732 - DNA, 1959 bp, Artificial Sequence
  derived and/or modified sequence
atgcaccccggcggcggccccagcagagccgagagactggagctgggcctgggcagagagagacccgccaaggccatcttcctgcacagaagacccggcgagggcggcggcagagagagatgcctgagatgcggccacgtgtgcgtgagaagaggccccggccccagagaggccgtgcccagcggcagacccagacccgacaccctgacccccccctgggtgagacagagagccgtgaccggcaccttctgcgccagctggacccccctgagaaacagaagagcccagagaatggccaccgacatgcagagaaagagaagcagcgagtgcctggacggcaccctgacccccagcgacggccagagcatggagagagccgagagccccacccccggcatggcccagggcatggagcccggcgccggccaggagggcgccatgttcgtgcacgccagaagctacgaggacctgaccgagagcgaggacggcgccgccagcggcgacagccacaaggagggcaccagaggccccccccccctgcccaccgacatgagacagatcagccaggacttcagcgagctgagcacccagctgaccggcgtggccagagacctgcaggaggagatgctgcccggcagcagcgaggactggctggagccccccggcgccgtgggcagacccgccaccgagccccccagagagggcaccaccgagggcgacgaggaggacgccaccgaggcctggagactgcaccagaagcacgtgttcgtgctgagcgaggccggcaagcccgtgtacagcagatacggcagcgaggaggccctgagcagcaccatgggcgtgatggtggccctggtgagcttcctggaggccgacaagaacgccatcagaagcatccacgccgacggctacaaggtggtgttcgtgagaagaagccccctggtgctggtggccgtggccagaaccagacagagcgcccaggagctggcccaggagctgctgtacatctactaccagatcctgagcctgctgaccggcgcccagctgagccacatcttccagcagaagcagaactacgacctgagaagactgctgagcggcagcgagagaatcaccgacaacctgctgcagctgatggccagagaccccagcttcctgatgggcgccgccagatgcctgcccctggccgccgccgtgagagacaccgtgagcgccagcctgcagcaggccagagccagaagcctggtgttcagcatcctgctggccagaaaccagctggtggccctggtgagaagaaaggaccagttcctgcaccccatcgacctgcacctgctgttcaacctgatcagcagcagcagcagcttcagagagggcgaggcctggacccccgtgtgcctgcccaagttcaacgccgccggcttcttccacgcccacatcagctacctggagcccgacaccgacctgtgcctgctgctggtgagcaccgacagagaggacttcttcgccgtgagcgactgcagaagaagattccaggagagactgagaaagagaggcgcccacctggccctgagagaggccctgagaaccccctactacagcgtggcccaggtgggcatccccgacctgagacacttcctgtacaagagcaagagcagcggcctgttcaccagccccgagatcgaggccccctacaccagcgaggaggagcaggagagactgctgggcctgtaccagtacctgcacagcagagcccacaacgccagcagacccctgaagaccatctactacaccggccccaacgagaacctgctggcctgggtgaccggcgccttcgagctgtacatgtgctacagccccctgggcaccaaggccagcgccgtgagcgccatccacaagctgatgagatggatcagaaaggaggaggacagactgttcatcctgacccccctgacctactag

SEQ ID NO: 223733 - DNA, 1959 bp, Artificial Sequence
  derived and/or modified sequence
atgcatcccgggggaggtccaagtagagcagagaggttagagctaggcctaggacgggagaggcctgccaaggcaatttttctgcacaggcggcctggcgaaggaggtggtcgtgaacggtgtctgcgctgtggccatgtgtgtgttcgcaggggaccaggccctcgggaggccgtgccatctggccgtcccaggccagacaccctcacacccccctgggtccgacagcgtgcagtgaccggaacattttgtgcaagttggacacccctgcgaaatcggagagcccagcggatggccaccgatatgcagagaaagcgctcttcggaatgcctggatggtactcttacgccaagcgacggccagtcaatggaaagggctgagtcgcccactccaggtatggcacagggcatggaaccaggagcagggcaggaaggcgccatgtttgtccatgctcgaagctacgaagatctcactgagagtgaggacggcgccgcttccggcgacagtcataaagaagggaccagagggcctcctccactcccaacagacatgaggcagattagccaggatttcagcgaattatctacacaactgactggtgtcgccagagacctgcaagaggagatgctgccagggtcgtcagaggattggctagaaccgccaggcgcagtcgggcggcctgccaccgagcccccgcgcgagggcactacagagggagacgaagaggatgctactgaggcttggcgtctgcaccaaaaacacgtgtttgttcttagcgaagccgggaaaccagtatattctaggtatggttcggaggaggccttgtctagcactatgggtgtgatggttgctctggtcagctttttggaggctgataagaatgctatcagaagcatccacgctgacggatataaagtagtgttcgttagacggtctccgctggtcctggtagcagtcgctcggactcgacaaagtgctcaggaactggcacaggaactgttgtacatctactatcaaatattatcactgctgaccggcgcgcagctttcccatatcttccagcagaaacagaattacgatcttcggaggctgttaagtgggtctgaaagaattactgacaatttgttgcagttaatggcccgggacccttcctttctgatgggcgccgcccgttgtctgccactggccgccgcagtgcgagatactgtctctgcaagcctgcaacaagcacgggcccgctcgctggtgttctcaatattgctcgcaaggaaccagctagtggccctggtgcgcaggaaagaccagtttctgcatcccattgatctgcacctgctgttcaacctaatctcttccagcagctccttcagggagggggaggcttggacacctgtgtgcctccctaagttcaacgccgctggattcttccacgctcatatcagctacctggaaccagacaccgatctgtgtctcctgttagtgtctactgacagagaggatttttttgccgtgtctgattgccgaagacgcttccaggagcgccttcgcaagcgcggggctcatttggccctgagagaggcgctacggacaccctactacagcgttgctcaggtgggcatccctgaccttcggcattttctctacaaatccaagtcaagcgggcttttcacgtctccagagatagaagccccttatacctcagaagaggaacaggagagattattaggtctgtatcagtatctgcactcccgagcacacaatgctagcagacctctgaagaccatttactacaccggaccaaacgagaacttgctggcctgggtgactggagcatttgagctctacatgtgctactctcctcttggaaccaaggcgtctgcggtgtctgctatccataagctgatgaggtggatacgcaaggaagaggaccggttattcatccttacaccactcacgtactag

SEQ ID NO: 223734 - DNA, 1959 bp, Artificial Sequence
  derived and/or modified sequence
atgcaccctgggggcggccccagcagagctgagcggctggagctgggcctgggccgggagaggcctgccaaggccatcttcctgcaccggcggcctggagagggcggcggccgggagcgctgcctgcgctgtggccacgtgtgtgtgcggcggggccctggcccccgggaggccgtgcccagcggccggcccaggccagacaccctgaccccaccctgggtgcggcagagagctgtgacaggcaccttctgtgcctcctggacccccctgaggaacagaagagcccagaggatggccacagacatgcagaggaagaggagcagtgaatgtctggatggcaccctgacccccagtgatggccagagcatggagcgggcagagagccccaccccaggcatggcccagggcatggagcctggagctggccaggagggcgccatgtttgtgcacgcccggagctatgaggacctgacagaaagtgaagatggagctgccagcggggacagccacaaggagggcacccggggccccccacccctgcccacagacatgaggcagatcagccaggacttcagcgagctgagcacccagctgactggagtggcccgggacctgcaggaggagatgctgcccggcagcagcgaggactggctggagcccccaggagctgtgggccgcccagccacagagcccccccgggagggcaccacagaaggagatgaggaggatgccacagaggcctggaggctgcaccagaagcacgtgtttgtgctgtctgaggccggcaagcctgtgtacagccgctatggcagcgaggaggccctgagcagcaccatgggcgtgatggtggccctggtgtccttcctggaggccgacaagaatgccatccgcagcatccatgctgatggctacaaggtggtgtttgtgcggcgcagccccctggtgctggtggccgtggcccggacccggcagagcgcccaggagctggcccaggagctgctgtacatctactaccagatcctgagcctgctgactggagcccagctgagccacatcttccagcagaagcagaactatgacctgcggcggctgctgagcggcagcgagcgcatcacagacaacctgctgcagctgatggcccgggaccccagcttcctgatgggcgccgcccgctgcctgcccctggccgctgctgtgcgggacacagtgtctgccagcctgcagcaggcccgggcccggagcctggtgttcagcatcctgctggccaggaaccagctggtggccctggtgcggaggaaggaccagttcctgcaccccatcgacctgcacctgctcttcaacctgatcagcagcagcagcagcttccgggagggggaggcctggacccctgtgtgcctgcccaagttcaatgctgctggcttcttccacgcccacatctcctacctggagccagacacagacctgtgcctgctgctggtgtccacagaccgggaggacttctttgctgtgtctgactgcagaagacgcttccaggagcggctgaggaagagaggagcccacctggccctgcgggaggccctgcggaccccctactacagcgtggcccaggtgggcatcccagacctgcggcacttcctgtacaagagcaagagcagcggcctcttcaccagccctgagattgaggccccctacaccagcgaggaggagcaggagcggctgctgggcctgtaccagtacctgcacagccgggcccacaatgccagccggcccctgaagaccatctactacacaggccccaatgaaaacctgctggcctgggtgactggagcctttgagctgtacatgtgctacagccccctgggcaccaaggccagcgctgtgtctgccatccacaagctgatgcgctggatcaggaaggaggaggacaggctcttcatcctgacccccctgacctactag

SEQ ID NO: 223735 - DNA, 1959 bp, Artificial Sequence
  derived and/or modified sequence
atgcaccccggcggcggccccagccgggccgagcggctggagctgggccttggacgcgagcgtcctgccaaggctatctttttgcatcggcggccaggggaggggggagggcgagagcgctgtctgcgatgcggacatgtgtgtgtgaggagaggacctgggccacgggaggctgtgccaagcggcaggcctcgccccgacacattgacccctccatgggtgcgccagcgggctgtaaccggaaccttctgcgccagctggactccattgcggaatcgacgcgcccagaggatggccacggacatgcaacggaagcgatctagcgaatgcctggacggcacgcttacacccagcgatggccaaagcatggaaagagccgagagccctacaccagggatggctcagggcatggagcctggggccggtcaagagggggctatgtttgtacacgctcgcagctatgaagacttaactgagagtgaggatggagccgcttctggcgatagccacaaagagggaaccagagggccaccccccttaccaaccgacatgcggcagatctcccaggatttctctgaacttagcacccagctgaccggagtagcgagagatctgcaggaggaaatgctgccaggctcatctgaggactggttggaacctcctggggctgtagggaggccggctactgagccccccagagaaggaactactgagggcgacgaagaagacgcgactgaggcttggaggctgcaccagaaacacgtgttcgttctgtcagaggcaggcaagccagtatattctcggtatggctccgaggaggctctttcctcaaccatgggtgtcatggtggccctcgtttcatttcttgaggccgataagaacgcaattcggtcgattcacgccgacggatataaggtggtgtttgtgaggcggtctccgctggtgctggtggccgttgctagaactcgccagtccgcacaggagctggcgcaagaactcctctacatttactaccagatcttgtctcttcttactggggcccagctgagccatattttccagcagaagcagaattacgatttgaggaggttactctccggctccgagagaattacagacaacctgctgcagctgatggcacgagatccttcattcctgatgggtgcggcacgctgtctcccgctggccgcagccgtcagggacaccgtgagcgcgtccctgcagcaggcacgtgcgcgctcactggtgttttctatactgctcgcaaggaaccagctggtggctctcgtgcgccgcaaagaccagttcttgcacccgatcgatctgcatttactttttaacctcatctcttctagctcctccttccgggagggtgaggcatggacccccgtgtgtctgcctaaatttaatgccgctgggtttttccacgctcatatttcatacctggaacccgacacagatctctgtttactcctggtctctacagaccgagaggactttttcgccgtatccgattgtcggcggaggttccaggaacgcctgagaaaacggggagcccatttagcacttagagaggcactacggacgccatactactctgtggcacaggtgggaattccagacctccgacacttcctgtataagtccaagagctcaggactctttactagtccggaaattgaagccccctatactagcgaggaagagcaggagcgcttactcggtctctaccagtatctccatagccgggctcataacgcaagccgacctctgaaaaccatttactacaccgggccaaacgagaacctactcgcttgggtgacaggagcattcgaactgtatatgtgctactccccactgggcacaaaagcgagtgcagtgtctgcaattcacaagctgatgaggtggattcgcaaagaggaggacaggcttttcattctgacaccactgacgtactag

SEQ ID NO: 223736 - DNA, 2363 bp, Artificial Sequence
  derived and/or modified sequence
gggagaaacaatcctaacgtccctttctctcacttgaaatgaactgctagctggctcggacggagaggcccagagtccagggctgttctgtgtgggactctagactcggaggaggcgcccaggcccctagaaggcggcgccggatgaggcaatcgcggacccgggtcaggacctgcccacggctctgctgggactaggagcccagaaccagtccctcggcgccgcaggcggccaaacgctaaggactacatttcccacaatgcaccccgggggcgggccgagtcgggctgagcggctggagctgggccttggccgcgagaggccggcgaaagctatcttcctgcaccggcggccgggtgagggcggtgggagggagcggtgcctgcgctgtggccatgtctgtgtacgcagggggccggggccccgcgaagctgtgccctcaggccggccccggccggacacccttacccctccatgggtccggcagagggcagtgaccggcaccttctgtgcgtcctggactcctctgagaaacaggagagctcaaaggatggctactgacatgcagaggaagagaagcagcgaatgccttgatggcacattgactccttctgatggacagagtatggagagagctgagagccccacaccaggaatggcccagggaatggagccaggtgcgggccaggagggtgccatgttcgtccatgcccgttcctacgaggacctgactgagtcagaggatggggcagcttctggggacagccacaaggagggtaccaggggtcccccgccgctgcctacagacatgcgccagatcagccaggactttagcgagctaagcacccagctgacgggtgtggcccgggacctgcaggaggagatgctgccaggaagctctgaggattggctggaacccccaggggcagttgggcgaccagccacagagccccccagggagggcacaaccgagggggatgaggaggatgccacggaggcatggcgcctgcaccagaagcatgtctttgtgctgagtgaggcagggaagcctgtgtactcccgctatgggtctgaggaggcactttccagcactatgggtgttatggtggccctggtgtccttcctggaggcagacaagaacgccatccgctccatccatgcagatggctacaaggtagtattcgtgcgccggagcccgctggtgctagtggcggtggctcgtacgcggcagtcggcacaagagctggcgcaggagctgctctacatctactaccagatcctaagccttcttaccggtgcgcagctgagccacatcttccagcagaagcagaactatgatttgcggcgcctactctcgggctcagagcgcatcaccgacaacctgctgcagctcatggcacgagaccccagcttcctgatgggggcggcacggtgcctgcccctggcggcggccgtgcgcgacactgtgagcgccagcctgcagcaggcgcgtgcgcgcagcctggtcttctccatcctgctggcccgcaaccagctcgtggcactcgtgcgccgaaaggaccaatttctgcaccccatcgacctgcacctgctcttcaacctcattagttcctcctcgtcctttcgcgagggcgaggcctggacgcccgtgtgcctgcccaaattcaacgcagccggcttcttccacgcacacatctcttacctagagcctgacactgacctctgcctgctgcttgtctccactgaccgtgaggacttctttgcagtctctgactgccgccgccgcttccaggagcgccttcgcaagcgcggagcccacctggccctgcgagaggcactgcgcacaccctactacagcgttgcccaagtgggcatccctgacctgcgtcacttcctctataagtcaaagagctcgggactcttcaccagccctgagattgaggccccatacaccagtgaagaggagcaggagcggctgctgggcctctaccagtacttgcacagtcgtgcccacaatgcctctcgcccactcaagaccatttactacacgggccccaacgagaacctcctggcctgggtgacaggcgcctttgagctctacatgtgttacagccccctggggaccaaggcgtcagccgtcagtgccatccataagctgatgcgctggatccgcaaagaggaagaccgcctcttcattctcacgcccctcacctattgatgggaatgtgtgcgggctcagccttcctggacacactaggtgtgggaagccataggagcctccagatgggggctggcctctcttgcccagccagcgggcagggactgtgggttggtgaatgcattaaagtgctttggggaagaca

SEQ ID NO: 223737 - DNA, 1959 bp, Artificial Sequence
  derived and/or modified sequence
atgcacccaggaggcggaccttccagagcagaacgtttggagctgggcctgggtcgcgaacgccctgccaaggcgattttcctgcacagacggccaggcgaaggtggcggaagagaacgttgtctccgatgtgggcacgtatgtgtgagacgcggacctggaccgagagaggccgtaccttcagggaggcctcggccagacacactgacccccccttgggtccgccaaagggccgtcaccggaacattttgtgcatcatggactccgctaagaaataggagggctcaacgcatggcgacagacatgcaacggaaaaggagtagcgagtgccttgatggcactctgaccccatcagatgggcagagcatggagagggccgaatcccccaccccaggaatggcacaagggatggaacctggcgcaggccaagagggcgctatgttcgtgcatgcaaggagctacgaagacctgaccgaatcagaggatggagctgcaagtggagattcgcacaaggaaggaacccgtggacctcctcccttgccaacagatatgaggcagatcagccaagacttttccgagttgagcacccagctcactggcgtcgcaagagatctacaggaggaaatgctcccagggagttctgaagactggctcgaaccccctggtgctgttggacgtccagccactgaaccaccgcgagaaggcactacagaaggggacgaagaggacgcaaccgaggcgtggaggctgcatcaaaaacatgttttcgttctttctgaagctgggaaaccagtttactcccggtacgggtctgaagaggctttgagctcaacaatgggagtcatggtggcccttgtcagctttctggaagccgataaaaacgccatccgtagcatacacgctgacggctataaggtggtcttcgtgaggaggtcaccactcgtgctggtcgccgtagcacggactaggcagagcgcacaggagctagcgcaagaactcctgtatatatattatcagatcttgtcgctcctgaccggcgcacaacttagccacatcttccagcaaaaacagaactatgatctgagaagactgctgagcggcagcgaacggattaccgacaacctgctgcagctcatggcaagagacccctcctttctaatgggcgcagcaagatgtctaccactagcggctgccgtaagggataccgtctccgcttctctgcagcaggctagagcgaggagcttggtattcagtatcctattggcgcgaaatcagttagtggccctcgtgcggaggaaagatcagttcttgcaccctatcgacctccacctgcttttcaacttgatctcctcttctagctccttccgcgaaggggaagcttggacacccgtttgcttacccaaatttaatgccgcaggtttcttccatgctcacataagctatctcgagccagacacagacctgtgtcttcttctcgtgagtaccgatagagaggatttctttgccgttagtgattgcagacgtcgattccaagaaaggctgaggaagcggggagcacacctggccctccgagaagccttgcggacaccttactacagcgtggcccaggtcggcatccccgacctgaggcactttttgtataaaagcaagtcatccggtctttttactagtccagagatcgaagccccatacacttctgaggaggagcaggagaggctcctcgggttataccagtacctgcatagtagagcacacaacgcgtctcgacccttaaagacaatttattacacagggccaaatgagaacttgctggcatgggtgactggggcattcgagctgtacatgtgctactccccccttggcacaaaagcgagtgccgtgtccgctattcataagctcatgcgctggattcgaaaagaagaggatcgattgtttatcctgactcccctgacttactag

SEQ ID NO: 223738 - protein, 180 aa, Artificial Sequence
  derived and/or modified sequence
MAALDLRAELDSLVLQLLGDLEELEGKRTVLNARVEEGWLSLAKARYAMGAKSVGPLQYASHMEPQVCLHASEAQEGLQKFKVVRAGVHAPEEVGPREAGLRRRKGPTKTPEPESSEAPQDPLNWFGILVPHSLRQAQASFRDGLQLAADIASLQNRIDWGRSQLRGLQEKLKQLEPGAA

SEQ ID NO: 223739 - DNA, 543 bp, Artificial Sequence
  derived and/or modified sequence
atggcagccttggatttacgcgcagagttggattctcttgttttacagcttctaggagatctggaggagctggaaggcaaaagaacggtcttaaatgccagggttgaagaggggtggctgtctcttgctaaagcaagatacgctatgggggctaagagtgtcggacctctgcagtatgcctctcatatggaaccccaggtgtgtctccacgcatccgaagcccaggagggactacaaaagttcaaggtggtgagggcaggcgtacatgcccctgaggaagtgggacctcgggaggctgggttgcggcggagaaagggccccactaaaacaccagagccagagagttctgaagctccacaagaccctttaaattggttcggtatcctcgtccctcacagcttaaggcaggcccaagccagctttcgcgatggattgcagctcgccgctgatattgccagcctgcagaatcggatcgactggggtcgtagtcaactcaggggactgcaggaaaaactcaagcagttggaaccgggagctgcatag

SEQ ID NO: 223740 - DNA, 543 bp, Artificial Sequence
  derived and/or modified sequence
atggccgccctggacctgcgggcagagctggacagcctggtgctgcagctgctgggggacctggaggagctggagggcaagaggacagtgctgaatgcccgggtggaggagggctggctgagcctggccaaggcccgctatgccatgggcgccaagtctgtgggccccctgcagtatgccagccacatggagccccaggtgtgcctgcacgccagcgaggcccaggagggcctgcagaagttcaaggtggtgcgggccggcgtgcacgcccctgaggaggtgggcccccgggaggccggcctgcggcggaggaagggccccaccaagaccccagagcctgagagcagcgaggccccccaggaccccctgaactggtttggcatcctggtgccccacagcctgcggcaggcccaggccagcttcagagatggcctgcagctggccgctgacatcgccagcctgcagaacagaattgactggggccgcagccagctgcggggcctgcaggagaagctgaagcagctggagcctggagctgcctag

SEQ ID NO: 223741 - DNA, 543 bp, Artificial Sequence
  derived and/or modified sequence
atggccgccctggacctgcgggccgagctggacagcctggtgctgcaactgctgggtgacctggaagagctggaaggaaaaaggacagtgctgaatgcccgcgtggaggaaggctggctgtccttagcaaaggctcggtatgccatgggagcaaagtctgttggaccacttcagtatgcctcacatatggaaccacaggtttgtttacatgcgagcgaagcccaggaaggactccagaagttcaaagtagtacgcgccggcgtacacgcgcccgaagaggtaggaccccgggaagcgggactgaggcgcagaaaagggcctactaaaactcccgagccagaatcgtccgaggcacctcaggaccccctgaattggttcggcatactcgtaccacacagcctgcgtcaggcccaggcatcctttagagacggcttgcagctggcggctgacattgccagtcttcagaacaggatagactggggcaggagccagctgagaggtctccaggagaaactcaagcagttagagccaggggcagcatag

SEQ ID NO: 223742 - DNA, 543 bp, Artificial Sequence
  derived and/or modified sequence
atggccgcactcgacctaagagcagaattggatagcctcgtgctccaattactgggggatttggaagagttagaaggcaaaaggaccgtgctcaacgccagagttgaggaagggtggctgtctctagcaaaggctagatacgccatgggcgctaagtctgtggggcctcttcagtatgctagtcacatggaacctcaggtgtgcctgcacgcctccgaggcccaggaaggtcttcagaaatttaaggtggtaagagccggagtacatgctcctgaagaggtgggcccacgcgaggccggactccggaggcgaaagggccctaccaaaacccctgaaccagagagctctgaagcccctcaggatcccctgaactggttcggcattttggtaccccattcattgcgtcaggcacaggcttcattcagagatgggctgcaactggcagctgacatcgctagcctccaaaataggatagactgggggaggtctcagctgcgcggtctgcaggagaagctgaagcagttggagcccggtgccgcttag

SEQ ID NO: 223743 - DNA, 1646 bp, Artificial Sequence
  derived and/or modified sequence
acttgggggctaattggagaaaccagttgattggttgcttccgtgctgcttctctaagggcgcttgcccttaaagaagctgacccagaggccttggtgctgccggcgtggggatccccagatgggaacgccccttgatggaggatctcgtgtgcctattggctgtcctgccaaactgcggagggtgacaaggaagaaggtggctccagatctggaggtgtgtccatggcggcgcttgacctgcgagcggagctggattcgctggtcctgcagctgcttggggacctggaggagctggaggggaaacgaacggtgttgaacgcccgggtggaggagggctggctctcgctcgccaaggctcgctacgcgatgggcgccaagtcggtagggcccctgcagtatgcttcccacatggagccccaggtctgcctccacgccagcgaggcccaggagggactccagaagttcaaggtggtgagagctggtgtccacgccccagaggaggtggggcctcgcgaagcaggtctgcggaggcgcaagggccccactaagaccccagaaccggagtcctctgaggcccctcaggaccccctgaactggtttggaatcctagttcctcacagtctacgtcaggctcaagcaagcttccgggatggcctgcagctggccgcagacatagccagcctccagaaccgcattgactggggtcgaagccagctccggggactccaagagaaactcaagcagctggagcctggggctgcctgacatgcgcgcaaagaggcagggcagcgagcacagctgttctccgacatggctacgtgatctcaggccttcttccttcacaattagctcttgcccctaccccacgccagctaatgccccttctgtgtccctgctctgcatgtttccattttccttaggtgtgaagtttgaagaggcaaacagtaattttgaaagccactactttgaaaccattctaaggcctgagttcccataggacacactcacataggcaggtacacgttagtcaacaattggaactgcctcttggatcactcagctgtgctttcatggctggatgatggaacactgtgcgaagagagatgggggccaggaagtagcgcttcatgcttagtacatcctccaaattgtctttgctggaggagaaaaccgtactcagccaaaagatcaggacaatatgacttgagtccacaaggacacaaacacctgagtagctgggcagcccttggcagggtctaagccaggaagtaaaaatgatctggcctagatatttaagggaactctaggaagaggcctaggtttttaaaatcctgtctctttgtcttaccataagaggctgagcctctcttcatttttttgaagggccacttgtgttttctgttctgggaacttcattcatttttctactgggttgttgatctttgcagtaatttctaggagctgtttatgtttggaggtaattggtcctttgtccatatatatgagatgtaagtcttattttccagtttatctttttgcttattttttttgactttttattgtaaaataaaacatcaaactgcacagaacagttgaatagcttaatgaataactacagtaaaagctatggtaaccactacccaa

SEQ ID NO: 223744 - DNA, 543 bp, Artificial Sequence
  derived and/or modified sequence
atggccgccctggacctgagagccgagctggacagcctggtgctgcagctgctgggcgacctggaggagctggagggcaagagaaccgtgctgaacgccagagtggaggagggctggctgagcctggccaaggccagatacgccatgggcgccaagagcgtgggccccctgcagtacgccagccacatggagccccaggtgtgcctgcacgccagcgaggcccaggagggcctgcagaagttcaaggtggtgagagccggcgtgcacgcccccgaggaggtgggccccagagaggccggcctgagaagaagaaagggccccaccaagacccccgagcccgagagcagcgaggccccccaggaccccctgaactggttcggcatcctggtgccccacagcctgagacaggcccaggccagcttcagagacggcctgcagctggccgccgacatcgccagcctgcagaacagaatcgactggggcagaagccagctgagaggcctgcaggagaagctgaagcagctggagcccggcgccgcctag

SEQ ID NO: 223745 - protein, 279 aa, Artificial Sequence
  derived and/or modified sequence
MADDLGDEWWENQPTGAGSSPEASDGEGEGDTEVMQQETVPVPVPSEKTKQPKECFLIQPKERKENTTKTRKRRKKKITDVLAKSEPKPGLPEDLQKLMKDYYSSRRLVIELEELNLPDSCFLKANDLTHSLSSYLKEICPKWVKLRKNHSEKKSVLMLIICSSAVRALELIRSMTAFRGDGKVIKLFAKHIKVQAQVKLLEKRVVHLGVGTPGRIKELVKQGGLNLSPLKFLVFDWNWRDQKLRRMMDIPEIRKEVFELLEMGVLSLCKSESLKLGLF

SEQ ID NO: 223746 - DNA, 1201 bp, Artificial Sequence
  derived and/or modified sequence
gacgtcatcgccgcggggcggaggcgacagtgtctagcgggagctccgcgtgtagctacgccggccgcctggctttgagacaacgtgattctccgcagctggtcgcctacccgtgatgttctgcccacgtcgagacctgagctgaaatggcagacgatctcggagacgagtggtgggagaaccagccgactggagcaggcagcagcccagaagcatcagatggtgaaggagaaggagacacagaagtgatgcagcaggagacagttccagttcctgtaccttcagagaaaaccaaacagcctaaagaatgttttttgatacaaccaaaggaaagaaaagagaataccaccaagaccaggaaaagaagaaagaagaaaattactgatgttcttgcaaaatcagaaccaaaaccagggttacctgaagacctacagaagctgatgaaggactattatagcagcagacgcttggtgattgaattagaagaactgaacctgccagactcctgtttcctcaaggccaatgatttgactcacagtctttcctcatacctaaaagaaatttgtcctaagtgggtaaaacttaggaagaaccacagtgagaagaaatcggtcctgatgctgatcatctgcagctcggccgtccgagccctggagctcattaggtcgatgacagcattcagaggagacggcaaagttataaaattatttgcaaagcacataaaggtccaggcgcaggtaaagttgctggagaagcgtgtggtgcacctgggtgtaggaactccggggagaattaaagaacttgttaaacaaggtggccttaatttgagccccttaaaatttctggtttttgactggaactggagagatcagaagttgaggagaatgatggacattcccgagataagaaaggaggtattcgaacttctggaaatgggagtgctcagtctgtgcaagtcagaatccttgaaactgggccttttctaagtctgtgtcctaatgaagattccagttttcacagtagaagttgcatcttatttaatgactctgatacattgcaagcactcagtaaatatcagcaaatagtttatgttaattgtgtcaacagatggatcactggaatgtggggattctgaaacagaaatgaaactgtccttttgacaactctcttatataataaagtatcaccggcttgtgtatga

SEQ ID NO: 223747 - DNA, 840 bp, Artificial Sequence
  derived and/or modified sequence
atggccgacgacctgggcgacgagtggtgggagaaccagcccaccggcgccggcagcagccccgaggccagcgacggcgagggcgagggcgacaccgaggtgatgcagcaggagaccgtgcccgtgcccgtgcccagcgagaagaccaagcagcccaaggagtgcttcctgatccagcccaaggagagaaaggagaacaccaccaagaccagaaagagaagaaagaagaagatcaccgacgtgctggccaagagcgagcccaagcccggcctgcccgaggacctgcagaagctgatgaaggactactacagcagcagaagactggtgatcgagctggaggagctgaacctgcccgacagctgcttcctgaaggccaacgacctgacccacagcctgagcagctacctgaaggagatctgccccaagtgggtgaagctgagaaagaaccacagcgagaagaagagcgtgctgatgctgatcatctgcagcagcgccgtgagagccctggagctgatcagaagcatgaccgccttcagaggcgacggcaaggtgatcaagctgttcgccaagcacatcaaggtgcaggcccaggtgaagctgctggagaagagagtggtgcacctgggcgtgggcacccccggcagaatcaaggagctggtgaagcagggcggcctgaacctgagccccctgaagttcctggtgttcgactggaactggagagaccagaagctgagaagaatgatggacatccccgagatcagaaaggaggtgttcgagctgctggagatgggcgtgctgagcctgtgcaagagcgagagcctgaagctgggcctgttctag

SEQ ID NO: 223748 - DNA, 840 bp, Artificial Sequence
  derived and/or modified sequence
atggccgacgacctcggtgatgagtggtgggagaaccaacctaccggggctggtagctctccagaggccagcgacggagaaggtgagggcgatacagaggtgatgcagcaggaaacggtgcctgtacccgtacccagcgaaaagaccaagcagccaaaagaatgcttcctgatacagcctaaggagcggaaggaaaataccactaagactcggaaacgccgtaaaaaaaagattacagatgtgctggctaagtccgagcctaaacctggcctgcccgaagacctgcaaaaactaatgaaagactactatagctcccgtcgtctggttatcgagctggaagagctgaatttgcccgatagctgctttcttaaggctaacgatctaactcactccctttcctcttatctcaaagagatatgtccaaaatgggtcaagttacggaaaaaccactctgaaaagaaaagcgtgctaatgctcattatatgtagttcggcagttagggcactggaactgatccgcagtatgaccgcctttagaggtgatgggaaagtgattaagttgtttgctaaacatattaaggtccaggcgcaggtaaagctactggagaagcgcgtggttcatcttggcgttggaacccccggccgcattaaagagctcgtgaaacagggggggcttaacctctctcccctgaaattcttagtcttcgactggaactggcgggatcagaaactgcgccgcatgatggacattcccgagatcaggaaagaagtgttcgaacttttggagatgggggtcttgtccctgtgcaagtcagagtctcttaaactgggactgttctag

SEQ ID NO: 223749 - DNA, 840 bp, Artificial Sequence
  derived and/or modified sequence
atggctgatgacctgggagatgagtggtgggagaaccagcccactggagctggcagcagccctgaggccagtgatggagagggggagggggacacagaggtgatgcagcaggagaccgtgcctgtgcctgtgcccagcgagaagaccaagcagcccaaggagtgcttcctgatccagcccaaggagaggaaagaaaacaccaccaagaccaggaagaggaggaagaagaagatcacagatgtgctggccaagtctgagcccaagccaggcctgcctgaggacctgcagaagctgatgaaggactactacagcagccggcggctggtgattgagctggaggagctgaacctgcctgacagctgcttcctgaaggccaatgacctgacccacagcctgagcagctacctgaaggagatctgccccaagtgggtgaagctgaggaagaaccacagcgagaagaagtctgtgctgatgctgatcatctgcagcagcgctgtgcgggccctggagctgatccgctccatgacagccttcagaggagatggcaaggtgatcaagctgtttgccaagcacatcaaggtgcaggcccaggtgaagctgctggagaagagggtggtgcacctgggcgtgggcaccccaggccgcatcaaggagctggtgaagcagggcggcctgaacctgagccccctgaagttcctggtgtttgactggaactggagggaccagaagctgcggaggatgatggacatccctgagatcaggaaggaggtgtttgagctgctggagatgggcgtgctgagcctgtgcaagtctgagagcctgaagctgggcctcttctag

SEQ ID NO: 223750 - DNA, 840 bp, Artificial Sequence
  derived and/or modified sequence
atggccgacgacctgggcgacgagtggtgggagaaccagcccaccggcgcggggagctcaccagaggcttcggacggcgaaggggagggagatacagaagtcatgcagcaggagaccgtccctgtgccagtaccaagcgaaaaaaccaagcagcccaaagagtgctttcttattcagccaaaggaacgaaaagaaaacactactaagactagaaaaaggcggaagaaaaaaataactgacgtgctggccaagtccgagcctaagccaggtctgcctgaggacttgcaaaaacttatgaaagactactactcttcccgccgcctggtgattgagctcgaagagttaaatctgccagactcctgctttctgaaggctaatgatctcacccattcactgagttcttacctcaaggaaatatgtcctaagtgggtcaagttacggaagaatcactcagagaagaagtctgtcctcatgctgattatttgtagcagcgcagtgcgcgccctggagttgattcgctcgatgaccgccttcagaggcgacggaaaagtgattaagttatttgcgaaacacatcaaagtacaagcgcaggttaagctgttagagaagcgggtggtccatcttggtgtggggactccaggaagaataaaagaactcgtgaaacaggggggactgaatctgagcccattgaagttcctagtcttcgactggaactggcgcgaccaaaagctccgaaggatgatggacatccctgagattcggaaggaggtgttcgagctcctggaaatgggagtcctgtccctttgcaaaagcgagtctctgaagctgggactgttttag

SEQ ID NO: 223751 - DNA, 840 bp, Artificial Sequence
  derived and/or modified sequence
atggccgatgacctcggcgatgagtggtgggaaaaccagccaactggagcaggcagctctccagaagcaagcgacggcgagggagagggtgataccgaggttatgcagcaggagacagttccggtccccgttccctcagagaagacaaagcagcccaaagagtgctttctgattcaaccaaaggagcgtaaggaaaacaccacaaaaacccgcaagcggaggaaaaagaagatcacggacgttttggccaagagcgagcctaagccaggcttacccgaggaccttcagaagctgatgaaggactattatagttctcgccgactggtgatcgagctcgaggaacttaacctaccagacagttgcttcctgaaggcaaatgatctaacccactccttgagcagctacctgaaggagatttgcccgaaatgggtgaaactgagaaaaaaccactcagagaagaagtctgttctgatgcttattatttgtagttccgcagtgcgggctttggaattgataagatctatgacggcattccgaggcgacggaaaggtgattaagctgttcgccaaacacatcaaggtgcaggcacaggtgaaactactggaaaaaagggtggtgcacctaggagttggtactcccggacgaataaaagagctggtcaaacagggaggtctaaaccttagcccgctcaagttcttagtgttcgactggaattggcgtgaccagaaactgcgccgaatgatggatataccagaaatcaggaaggaagtctttgagctgctagagatgggcgttctcagcctgtgcaaaagcgagtccttaaagctgggtctgttttag

SEQ ID NO: 223752 - protein, 282 aa, Artificial Sequence
  derived and/or modified sequence
MASSFLPAGAITGDSGGELSSGDDSGEVEFPHSPEIEETSCLAELFEKAAAHLQGLIQVASREQLLYLYARYKQVKVGNCNTPKPSFFDFEGKQKWEAWKALGDSSPSQAMQEYIAVVKKLDPGWNPQIPEKKGKEANTGFGGPVISSLYHEETIREEDKNIFDYCRENNIDHITKAIKSKNVDVNVKDEEGRALLHWACDRGHKELVTVLLQHRADINCQDNEGQTALHYASACEFLDIVELLLQSGADPTLRDQDGCLPEEVTGCKTVSLVLQRHTTGKA

SEQ ID NO: 223753 - DNA, 849 bp, Artificial Sequence
  derived and/or modified sequence
atggccagcagcttcctgcccgccggcgccatcaccggcgacagcggcggcgagctgagcagcggcgacgacagcggcgaggtggagttcccccacagccccgagatcgaggagaccagctgcctggccgagctgttcgagaaggccgccgcccacctgcagggcctgatccaggtggccagcagagagcagctgctgtacctgtacgccagatacaagcaggtgaaggtgggcaactgcaacacccccaagcccagcttcttcgacttcgagggcaagcagaagtgggaggcctggaaggccctgggcgacagcagccccagccaggccatgcaggagtacatcgccgtggtgaagaagctggaccccggctggaacccccagatccccgagaagaagggcaaggaggccaacaccggcttcggcggccccgtgatcagcagcctgtaccacgaggagaccatcagagaggaggacaagaacatcttcgactactgcagagagaacaacatcgaccacatcaccaaggccatcaagagcaagaacgtggacgtgaacgtgaaggacgaggagggcagagccctgctgcactgggcctgcgacagaggccacaaggagctggtgaccgtgctgctgcagcacagagccgacatcaactgccaggacaacgagggccagaccgccctgcactacgccagcgcctgcgagttcctggacatcgtggagctgctgctgcagagcggcgccgaccccaccctgagagaccaggacggctgcctgcccgaggaggtgaccggctgcaagaccgtgagcctggtgctgcagagacacaccaccggcaaggcctag

SEQ ID NO: 223754 - DNA, 849 bp, Artificial Sequence
  derived and/or modified sequence
atggccagttctttcttaccggctggcgccatcacaggagatagcggcggagagttgtcatctggagacgacagcggggaggtggagttcccacattctcccgaaatagaagaaacctcgtgcctagctgaactgttcgaaaaagccgcggctcacctccagggcctgatacaagtggcatcaagagaacagctcctgtatttgtacgcaagatacaaacaggtgaaagttgggaattgtaatacccccaaaccttccttcttcgactttgagggaaaacaaaagtgggaagcctggaaggctctcggagactcttcacctagtcaggccatgcaagaatacatcgctgtggttaagaagctggacccgggttggaatccccaaatccctgaaaaaaaaggcaaggaagcaaatactggttttggcggacccgttatctcaagtctctaccatgaggagactattcgtgaggaggataaaaatatctttgattactgccgagaaaataatattgaccatatcacgaaggctattaaatccaaaaacgtggatgtgaatgtcaaggatgaggaaggaagagccttactacactgggcatgtgaccgcggccataaagaattggtgacagttctactgcagcatcgcgccgatattaactgccaagacaatgagggccagaccgccctccattatgcctctgcatgtgaatttctggacatcgttgaactactcctgcaaagtggcgccgaccccacactccgagaccaggatggatgtttgcccgaggaagtgacaggctgtaaaacagtcagccttgtcctgcagcgtcacaccaccggtaaagcatag

SEQ ID NO: 223755 - DNA, 1670 bp, Artificial Sequence
  derived and/or modified sequence
gggctgtttggaggcgcttggggcgcacaatctggggcaggcggaaccttagtcctcagcctcgcgtttcccgcgactccgctctcaccgctacactaccacacaaacggcctccttcccccacccccgggggcccatcccggtggcgggctccggagctcgggactgctaatttcagcgaaacgattaaaagacgcccctacagctgacggcactttctctcctccggcagggaaggacgtccagcgtagcgtcgcccgcgcttccccgccggcgcagagcaggcctcacagaatcgcacgccgctggcacgcacgccgccccgcccccacggcccagcgccagccgcgccccgcgctcgcacgcatcccggcctcactgcccctcgactcctgttccgttggaggggcctgaggcgagcctgagcgcgctgttggccggagggaagccggaggagaccgggtcgactgggcagagcggcagagggtcgaggagcctgctctgcacgcccagggagtagaagtgggcagggagcagggtcacgtgagggagcgcgccgcgactgagcttgggtccgactggagctcaggctcgcgacccagactggtgggccaggcctccaagccggccttacacccaatccaaggaggacagaccggacacagagggacggagcgagcaaggagacatggcttcatcattcctgcccgcgggggccatcaccggcgacagcggtggagagctgagctcaggggacgactccggggaggtggagttcccccatagccctgagatcgaggagaccagttgcctggccgagctgtttgagaaggctgccgcgcacctgcaaggcctgattcaggtggccagcagggagcagctcttgtacctgtatgccaggtacaaacaggtcaaagttggaaattgtaatactcctaaaccaagcttctttgattttgaaggaaagcaaaaatgggaagcttggaaagcacttggtgattcaagccccagccaagcaatgcaggaatatatcgcagtagttaaaaaactagatccaggttggaatcctcagataccagagaagaaaggaaaagaagcaaatacaggttttggtgggccagttattagttctctatatcatgaagaaaccatcagggaagaagacaaaaatatatttgattactgcagggaaaacaacattgaccatataaccaaagccatcaaatcgaaaaatgtggatgtgaatgtgaaagatgaagagggtagggctctacttcactgggcctgtgatcgaggacataaggaactagtcacagtgttgctgcaacatagagctgacattaactgtcaggacaatgaaggccaaacagctctacattatgcctctgcctgtgagtttctggatattgtagagctgctgctccagtctggtgctgaccccactctccgagaccaggatggctgcctgccagaggaggtgacaggctgcaaaacagtttctttggtgctgcagcggcacacaactggcaaggcttaatcaaaagactggaaaactgcagtctgtaatagcataaggcttccattatgaaagaaaactacaaaaataatacttcttttccacccgtctttggtatgtattggctaataaaatcagttctgtggaactggga

SEQ ID NO: 223756 - DNA, 849 bp, Artificial Sequence
  derived and/or modified sequence
atggccagcagcttcctgcctgctggggccatcaccggggacagcggcggggagctgagcagtggagatgattctggagaggtggagttcccccacagccctgagattgaggagaccagctgcctggccgagctgtttgagaaggccgccgcccacctgcagggcctcatccaggtggccagccgggagcagctgctgtacctgtatgcccgctacaagcaggtgaaggtgggcaactgcaacacccccaagcccagcttctttgattttgagggcaagcagaagtgggaggcctggaaggccctgggggacagcagccccagccaggccatgcaggagtacatcgctgtggtgaagaagctggaccccggctggaacccccagatccctgagaagaagggcaaggaggccaacacaggctttggaggccctgtgatcagcagcctgtaccacgaggagaccatccgggaggaggacaagaacatctttgactactgccgggagaacaacatcgaccacatcaccaaggccatcaagagcaagaatgtggatgtgaatgtgaaggatgaggagggccgggccctgctgcactgggcctgtgaccggggccacaaggagctggtgacagtgctgctgcagcacagagctgacatcaactgccaggacaatgaaggccagacagccctgcactacgccagcgcctgtgagttcctggacatcgtggagctgctgctgcagagcggggctgaccccaccctgcgggaccaggacggctgcctgcctgaggaggtgacaggctgcaagacagtgtccctggtgctgcagaggcacaccaccgggaaggcctag

SEQ ID NO: 223757 - DNA, 849 bp, Artificial Sequence
  derived and/or modified sequence
atggccagcagcttcctgcccgccggcgccatcaccggcgacagcggaggcgaactctcatctggagacgattccggggaagtcgagttcccacactctccagaaatcgaagaaacatcatgtctggctgagctgttcgagaaggccgccgcgcacctacagggcttaattcaggtcgctagcagggagcagctgttgtacctgtacgcaaggtacaagcaggtgaaagtcggtaactgtaacacccccaagccatccttcttcgattttgaaggcaaacagaagtgggaagcctggaaagctttaggtgactctagccctagccaggccatgcaagagtatattgccgtggttaaaaagctggacccgggctggaacccccagataccagaaaaaaaaggtaaggaagccaatacaggattcggtggaccggtcattagttccttgtaccatgaagaaaccattcgtgaagaagataagaacatcttcgactactgtagagagaacaacatagaccacatcactaaagctatcaagagtaagaatgtggacgtgaatgtcaaggatgaggaaggaagagcccttctgcactgggcgtgtgatcggggacacaaggagctggtgactgtactgttgcagcatcgcgccgatattaattgccaggataatgagggccagaccgctctgcactatgcctcagcctgcgagtttttggacatcgtggaactgctcctgcagagcggggctgaccccactctccgggaccaggacggctgcctccctgaggaagtcactggttgcaagacggtctctttggttctgcaaagacataccacagggaaggcctag

SEQ ID NO: 223758 - DNA, 849 bp, Artificial Sequence
  derived and/or modified sequence
atggccagttcctttcttcctgctggagcaattactggagactcaggaggggaactgtcctccggggacgactcaggtgaggtggaattcccgcactcccctgaaatcgaagaaacgtcctgcttggcagagctgttcgaaaaggccgctgctcatttacaggggttaatccaggtcgcttctcgtgaacagctgttgtacttgtacgcacgctacaaacaggtgaaggtcggcaactgtaatacgccaaagccttccttttttgatttcgaggggaagcaaaaatgggaggcatggaaggcccttggggacagctcccctagccaagccatgcaagaatacattgctgttgtgaagaagctggatccaggatggaatccgcagatacccgagaagaagggtaaagaggctaacacagggttcggaggaccagtaatcagttctctgtaccatgaggagacgatacgcgaggaggataaaaacatattcgattattgtagggagaataacatagaccatatcaccaaggccatcaagagtaaaaatgttgacgtaaacgttaaggacgaagagggccgagcacttttgcactgggcctgcgaccggggtcacaaggaactagtgacggtcctgctgcaacaccgggcagatattaactgccaggataacgagggacagacagctctgcactacgcctcagcatgtgagttcttggacatagtcgagttgcttcttcagagcggagcagatcccaccctgcgtgaccaggatggctgccttcccgaagaggtcacaggatgtaagactgtgtcccttgtacttcagaggcatacgaccggaaaggcctag

SEQ ID NO: 223759 - protein, 702 aa, Artificial Sequence
  derived and/or modified sequence
MAQKHPGERGLYGAHHSGGASLRTLGPSVDPEIPSFSGLRDSAGTAPNGTRCLTEHSGPKHTQHPNPAHWLDPSHGPPGGPGPPRDAEDPDQSETSSEEESGVDQELSKENETGNQKDGNSFLSIPSACNCQGTPGIPEGPYSEGGNGSSSNFCHHCTSPALGEDELEEEYDDEESLKFPSDFSRVSSGKKPPSRRQRHRFPTKEDTREGGRRDPRSPGRHRLGRKRSQADKRKGLGLWGAEELCQLGQAGFWWLIELLVLVGEYVETCGHLIYACRQLKSSDLDLFRVWMGVWTGRLGGWAQVMFQFLSQGFYCGVGLFTRFLKLLGALLLLALALFLGFLQLGWRFLVGLGDRLGWRDKATWLFSWLDSPALQRCLTLLRDSRPWQRLVRIVQWGWLELPWVKQNINRQGNAPVASGRYCQPEEEVARLLTMAGVPEDELNPFHVLGVEATASDVELKKAYRQLAVMVHPDKNHHPRAEEAFKVLRAAWDIVSNAEKRKEYEMKRMAENELSRSVNEFLSKLQDDLKEAMNTMMCSRCQGKHRRFEMDREPKSARYCAECNRLHPAEEGDFWAESSMLGLKITYFALMDGKVYDITEWAGCQRVGISPDTHRVPYHISFGSRIPGTRGRQRATPDAPPADLQDFLSRIFQVPPGQMPNGNFFAAPQPAPGAAAASKPNSTVPKGEAKPKRRKKVRRPFQR

SEQ ID NO: 223760 - protein, 412 aa, Artificial Sequence
  derived and/or modified sequence
MGVWTGRLGGWAQVMFQFLSQGFYCGVGLFTRFLKLLGALLLLALALFLGFLQLGWRFLVGLGDRLGWRDKATWLFSWLDSPALQRCLTLLRDSRPWQRLVRIVQWGWLELPWVKQNINRQGNAPVASGRYCQPEEEVARLLTMAGVPEDELNPFHVLGVEATASDVELKKAYRQLAVMVHPDKNHHPRAEEAFKVLRAAWDIVSNAEKRKEYEMKRMAENELSRSVNEFLSKLQDDLKEAMNTMMCSRCQGKHRRFEMDREPKSARYCAECNRLHPAEEGDFWAESSMLGLKITYFALMDGKVYDITEWAGCQRVGISPDTHRVPYHISFGSRIPGTRGRQRATPDAPPADLQDFLSRIFQVPPGQMPNGNFFAAPQPAPGAAAASKPNSTVPKGEAKPKRRKKVRRPFQR

SEQ ID NO: 223761 - protein, 191 aa, Artificial Sequence
  derived and/or modified sequence
RKRMAENELSRSVNEFLSKLQDDLKEAMNTMMCSRCQGKHRRFEMDREPKSARYCAECNRLHPAEEGDFWAESSMLGLKITYFALMDGKVYDITEWAGCQRVGISPDTHRVPYHISFGSRIPGTRGRQRATPDAPPADLQDFLSRIFQVPPGQMPMGTSLQLLSLPLEPLQPLSPTAQYPREKPNLSGGRK

SEQ ID NO: 223762 - protein, 79 aa, Artificial Sequence
  derived and/or modified sequence
MAQKHPGERGLYGAHHSGGASLRTLGPSVDPEIPSFSGLRDSAGTAPNGTRCLTEHSGPKHTQHPNPAHWLDPSHGPPG

SEQ ID NO: 223763 - protein, 151 aa, Artificial Sequence
  derived and/or modified sequence
MAQKHPGERGLYGAHHSGGASLRTLGPSVDPEIPSFSGLRDSAGTAPNGTRCLTEHSGPKHTQHPNPAHWLDPSHGPPGGPGPPRDAEDPDQSETSSEEESGVDQELSKENETGNQKDGNSFLSIPSACNCQGTPGIPEGPYSEGGNGSSS

SEQ ID NO: 223764 - DNA, 2109 bp, Artificial Sequence
  derived and/or modified sequence
atggcccagaagcaccccggcgagagaggcctgtacggcgcccaccacagcggcggcgccagcctgagaaccctgggccccagcgtggaccccgagatccccagcttcagcggcctgagagacagcgccggcaccgcccccaacggcaccagatgcctgaccgagcacagcggccccaagcacacccagcaccccaaccccgcccactggctggaccccagccacggcccccccggcggccccggcccccccagagacgccgaggaccccgaccagagcgagaccagcagcgaggaggagagcggcgtggaccaggagctgagcaaggagaacgagaccggcaaccagaaggacggcaacagcttcctgagcatccccagcgcctgcaactgccagggcacccccggcatccccgagggcccctacagcgagggcggcaacggcagcagcagcaacttctgccaccactgcaccagccccgccctgggcgaggacgagctggaggaggagtacgacgacgaggagagcctgaagttccccagcgacttcagcagagtgagcagcggcaagaagccccccagcagaagacagagacacagattccccaccaaggaggacaccagagagggcggcagaagagaccccagaagccccggcagacacagactgggcagaaagagaagccaggccgacaagagaaagggcctgggcctgtggggcgccgaggagctgtgccagctgggccaggccggcttctggtggctgatcgagctgctggtgctggtgggcgagtacgtggagacctgcggccacctgatctacgcctgcagacagctgaagagcagcgacctggacctgttcagagtgtggatgggcgtgtggaccggcagactgggcggctgggcccaggtgatgttccagttcctgagccagggcttctactgcggcgtgggcctgttcaccagattcctgaagctgctgggcgccctgctgctgctggccctggccctgttcctgggcttcctgcagctgggctggagattcctggtgggcctgggcgacagactgggctggagagacaaggccacctggctgttcagctggctggacagccccgccctgcagagatgcctgaccctgctgagagacagcagaccctggcagagactggtgagaatcgtgcagtggggctggctggagctgccctgggtgaagcagaacatcaacagacagggcaacgcccccgtggccagcggcagatactgccagcccgaggaggaggtggccagactgctgaccatggccggcgtgcccgaggacgagctgaaccccttccacgtgctgggcgtggaggccaccgccagcgacgtggagctgaagaaggcctacagacagctggccgtgatggtgcaccccgacaagaaccaccaccccagagccgaggaggccttcaaggtgctgagagccgcctgggacatcgtgagcaacgccgagaagagaaaggagtacgagatgaagagaatggccgagaacgagctgagcagaagcgtgaacgagttcctgagcaagctgcaggacgacctgaaggaggccatgaacaccatgatgtgcagcagatgccagggcaagcacagaagattcgagatggacagagagcccaagagcgccagatactgcgccgagtgcaacagactgcaccccgccgaggagggcgacttctgggccgagagcagcatgctgggcctgaagatcacctacttcgccctgatggacggcaaggtgtacgacatcaccgagtgggccggctgccagagagtgggcatcagccccgacacccacagagtgccctaccacatcagcttcggcagcagaatccccggcaccagaggcagacagagagccacccccgacgccccccccgccgacctgcaggacttcctgagcagaatcttccaggtgccccccggccagatgcccaacggcaacttcttcgccgccccccagcccgcccccggcgccgccgccgccagcaagcccaacagcaccgtgcccaagggcgaggccaagcccaagagaagaaagaaggtgagaagacccttccagagatag

SEQ ID NO: 223765 - DNA, 1239 bp, Artificial Sequence
  derived and/or modified sequence
atgggcgtgtggaccggcagactgggcggctgggcccaggtgatgttccagttcctgagccagggcttctactgcggcgtgggcctgttcaccagattcctgaagctgctgggcgccctgctgctgctggccctggccctgttcctgggcttcctgcagctgggctggagattcctggtgggcctgggcgacagactgggctggagagacaaggccacctggctgttcagctggctggacagccccgccctgcagagatgcctgaccctgctgagagacagcagaccctggcagagactggtgagaatcgtgcagtggggctggctggagctgccctgggtgaagcagaacatcaacagacagggcaacgcccccgtggccagcggcagatactgccagcccgaggaggaggtggccagactgctgaccatggccggcgtgcccgaggacgagctgaaccccttccacgtgctgggcgtggaggccaccgccagcgacgtggagctgaagaaggcctacagacagctggccgtgatggtgcaccccgacaagaaccaccaccccagagccgaggaggccttcaaggtgctgagagccgcctgggacatcgtgagcaacgccgagaagagaaaggagtacgagatgaagagaatggccgagaacgagctgagcagaagcgtgaacgagttcctgagcaagctgcaggacgacctgaaggaggccatgaacaccatgatgtgcagcagatgccagggcaagcacagaagattcgagatggacagagagcccaagagcgccagatactgcgccgagtgcaacagactgcaccccgccgaggagggcgacttctgggccgagagcagcatgctgggcctgaagatcacctacttcgccctgatggacggcaaggtgtacgacatcaccgagtgggccggctgccagagagtgggcatcagccccgacacccacagagtgccctaccacatcagcttcggcagcagaatccccggcaccagaggcagacagagagccacccccgacgccccccccgccgacctgcaggacttcctgagcagaatcttccaggtgccccccggccagatgcccaacggcaacttcttcgccgccccccagcccgcccccggcgccgccgccgccagcaagcccaacagcaccgtgcccaagggcgaggccaagcccaagagaagaaagaaggtgagaagacccttccagagatag

SEQ ID NO: 223766 - DNA, 576 bp, Artificial Sequence
  derived and/or modified sequence
agaaagagaatggccgagaacgagctgagcagaagcgtgaacgagttcctgagcaagctgcaggacgacctgaaggaggccatgaacaccatgatgtgcagcagatgccagggcaagcacagaagattcgagatggacagagagcccaagagcgccagatactgcgccgagtgcaacagactgcaccccgccgaggagggcgacttctgggccgagagcagcatgctgggcctgaagatcacctacttcgccctgatggacggcaaggtgtacgacatcaccgagtgggccggctgccagagagtgggcatcagccccgacacccacagagtgccctaccacatcagcttcggcagcagaatccccggcaccagaggcagacagagagccacccccgacgccccccccgccgacctgcaggacttcctgagcagaatcttccaggtgccccccggccagatgcccatgggcaccagcctgcagctgctgagcctgcccctggagcccctgcagcccctgagccccaccgcccagtaccccagagagaagcccaacctgagcggcggcagaaagtag

SEQ ID NO: 223767 - DNA, 240 bp, Artificial Sequence
  derived and/or modified sequence
atggcccagaagcaccccggcgagagaggcctgtacggcgcccaccacagcggcggcgccagcctgagaaccctgggccccagcgtggaccccgagatccccagcttcagcggcctgagagacagcgccggcaccgcccccaacggcaccagatgcctgaccgagcacagcggccccaagcacacccagcaccccaaccccgcccactggctggaccccagccacggcccccccggctag

SEQ ID NO: 223768 - DNA, 456 bp, Artificial Sequence
  derived and/or modified sequence
atggcccagaagcaccccggcgagagaggcctgtacggcgcccaccacagcggcggcgccagcctgagaaccctgggccccagcgtggaccccgagatccccagcttcagcggcctgagagacagcgccggcaccgcccccaacggcaccagatgcctgaccgagcacagcggccccaagcacacccagcaccccaaccccgcccactggctggaccccagccacggcccccccggcggccccggcccccccagagacgccgaggaccccgaccagagcgagaccagcagcgaggaggagagcggcgtggaccaggagctgagcaaggagaacgagaccggcaaccagaaggacggcaacagcttcctgagcatccccagcgcctgcaactgccagggcacccccggcatccccgagggcccctacagcgagggcggcaacggcagcagcagctag

SEQ ID NO: 223769 - DNA, 3330 bp, Artificial Sequence
  derived and/or modified sequence
tggaagtaggcccaggtcgccggcggccgcggggacggaaggcggaagcagagcgtgagcgggaggcggagccgggagagcggctctcgtagctcaccctggccccaggccgggcggctcgagggggaggagttaccgccgttcttcggcatcagaacacaccatgatggctgtgacctaagaccctcaggaagccccggggtcatggcccagaagcaccccggagaaagagggttgtatggagcccaccacagtggtggtgcctccctcaggactttaggaccctccgtggaccctgaaataccttcattctcaggactcagggactcagcagggactgctcctaatggtacccgctgcctcacagagcactctggtcctaagcacacacagcacccaaacccagcccattggttggacccaagccatggccccccagggggtccaggaccacctagagatgcagaggaccctgatcagagtgagacgtcttcagaagaagaatcaggagtggaccaggaactctcaaaagaaaacgagactgggaaccagaaggatgggaactcttttctttccattccatctgcttgcaactgccagggaacacctggaattccagaagggccttactctgagggaggaaatggttcttctagcaacttttgccaccactgtacctctccagctttgggggaagatgagttggaagaggaatatgatgatgaagaatctctcaagttccccagtgatttttcacgtgtgtccagcggaaagaaacccccatcccggagacagcggcaccgctttccaacgaaggaggatactcgggagggtggacgtagggatcccaggtcccctggtcgacatcggctgggtcggaaacgaagtcaggcagataagcgcaaaggcctgggattgtggggagccgaggaactatgtcaacttggacaggcaggcttttggtggctgattgaactgctggtattggtgggagagtacgtagaaacttgtggccatctcatctatgcctgcaggcaactgaaaagcagtgatttggacctttttcgagtttggatgggagtgtggacagggcggttagggggctgggcccaggtcatgtttcagtttctaagccaggggttttactgtggagtaggactgtttactcgttttcttaagctgctgggtgctttgctgctcctggctctggccctctttttgggctttctacagttgggatggcggtttctggtgggactaggtgaccggttaggctggagggataaggctacctggctcttctcttggctggattctccagccttgcagcgttgcttgactctgctgagagatagcaggccatggcagcggctggtaagaatagttcagtggggctggctggagttgccttgggtcaagcagaatattaataggcaggggaatgcacctgtagctagtgggcgctactgccagcctgaagaggaagtggctcgactcttgaccatggctggggttcctgaggatgagctaaaccctttccatgtactgggggttgaggccacagcatcagatgttgaactgaagaaggcctatagacagctggcagtgatggttcatcctgacaaaaatcatcatccccgggctgaggaggccttcaaggttttgcgagcagcttgggacattgtcagcaatgctgaaaagcgaaaggagtatgagatgaaacgaatggcagagaatgagctgagccggtcagtaaatgagtttctgtccaagctgcaagatgacctcaaggaggcaatgaatactatgatgtgtagccgatgccaaggaaagcataggaggtttgaaatggaccgggaacctaagagtgccagatactgtgctgagtgtaataggctgcatcctgctgaggaaggagacttttgggcagagtcaagcatgttgggcctcaagatcacctactttgcactgatggatggaaaggtgtatgacatcacagagtgggctggatgccagcgtgtaggtatctccccagatacccacagagtcccctatcacatctcatttggttctcggattccaggcaccagagggcggcagagagccaccccagatgcccctcctgctgatcttcaggatttcttgagtcggatctttcaagtacccccagggcagatgcccaatgggaacttctttgcagctcctcagcctgcccctggagccgctgcagcctctaagcccaacagcacagtacccaagggagaagccaaacctaagcggcggaagaaagtgaggaggcccttccaacgttgatgccccttctctttcctcaaatcaatgtcagggagtcaaaagggctgtagcacaggatggagtttgatttatccctcctcccccaacacctaggaactgaatctttttctttttattttttgagatggagtcttgctctgttgcccagctggagtgcagtggtgtgatctcagcttactgcaacctctgtctcccgggttcaagcaattctcccatctcagcctcctgagtagctgggattacaggcacacaccaccacacctggcccagctaattcttttttgtatttttagtagagacggggtttcaccatgttgcccaggctggtctcgaactcctgagctcaggtgatccacccgtcttggcctcccaaagtgctggattacaggcataagccactgtgcccggcctgaatcttgtcttttgacaataccaaagaaatagggggtagctagagtaaagaacctagggcctggacctgggctggacagtgtatccctttaggtgtgggaactgggtatttccctggggtctgtatgcctttgtcttgtcatttgcttttagggcagatgacactttttcccacccttttaaagctacaagtctatcttctttcttgacccatttcaggagggagccctctcctttatcctgatataatatttaaaagagaacaagaaagcatgtagccctaatgataggagattatcgcatagagttcagagactggaaactgaattttccctcgactttcactttgtgggtaaatcacccaattttaggctcttttctgcaaggatggccaaaattaatcatttttaaaaagtagattcatgcccactgcccttgggtgagggggaagaatacgggggttcccagaagcccccatgtgatccaagggtttgtattttttttttaagtttgttcatatttgtatgtacatgactatttaaagccaggggattatctttctataaatgtataactggcaacctgtatcttccctctttgttgccc

SEQ ID NO: 223770 - DNA, 2774 bp, Artificial Sequence
  derived and/or modified sequence
agagaattggagtattgtctcctggagaaccgggtggtcgggatcgtggaccagggaaggggcttttgctggtcggggagcgccaactgggggttcatgggtggaaaaactttcggatcaagacggggtataaggctagaggcgtgtgcagaggaggggaccgacggaacggggacccaactgggtctacgtgggggcgggggcgcttgtggacgtccaccaaatagcttggtatgcagatgagatgtcaagcagcaggtagatgagttcagtgttctttggctcacgggcaaagttctgagccgagccaagttacgctcccagttcctaggcaccgctcggtgatcgggcctggggagctgcgacccgaggggcggatccaggcatcagaacacaccatgatggctgtgacctaagaccctcaggaagccccggggtcatggcccagaagcaccccggagaaagagggttgtatggagcccaccacagtggtggtgcctccctcaggactttaggaccctccgtggaccctgaaataccttcattctcaggactcagggactcagcagggactgctcctaatggtacccgctgcctcacagagcactctggtcctaagcacacacagcacccaaacccagcccattggttggacccaagccatggccccccagggggtccaggaccacctagagatgcagaggaccctgatcagagtgagacgtcttcagaagaagaatcaggagtggaccaggaactctcaaaagaaaacgagactgggaaccagaaggatgggaactcttttctttccattccatctgcttgcaactgccagggaacacctggaattccagaagggccttactctgagggaggaaatggttcttctagcaacttttgccaccactgtacctctccagctttgggggaagatgagttggaagaggaatatgatgatgaagaatctctcaagttccccagtgatttttcacgtgtgtccagcggaaagaaacccccatcccggagacagcggcaccgctttccaacgaaggaggatactcgggagggtggacgtagggatcccaggtcccctggtcgacatcggctgggtcggaaacgaagtcaggcagataagcgcaaaggcctgggattgtggggagccgaggaactatgtcaacttggacaggcaggcttttggtggctgattgaactgctggtattggtgggagagtacgtagaaacttgtggccatctcatctatgcctgcaggcaactgaaaagcagtgatttggacctttttcgagtttggatgggagtgtggacagggcggttagggggctgggcccaggtcatgtttcagtttctaagccaggggttttactgtggagtaggactgtttactcgttttcttaagctgctgggtgctttgctgctcctggctctggccctctttttgggctttctacagttgggatggcggtttctggtgggactaggtgaccggttaggctggagggataaggctacctggctcttctcttggctggattctccagccttgcagcgttgcttgactctgctgagagatagcaggccatggcagcggctggtaagaatagttcagtggggctggctggagttgccttgggtcaagcagaatattaataggcaggggaatgcacctgtagctagtgggcgctactgccagcctgaagaggaagtggctcgactcttgaccatggctggggttcctgaggatgagctaaaccctttccatgtactgggggttgaggccacagcatcagatgttgaactgaagaaggcctatagacagctggcagtgatggttcatcctgacaaaaatcatcatccccgggctgaggaggccttcaaggttttgcgagcagcttgggacattgtcagcaatgctgaaaagcgaaaggagtatgagatgaaacgaatggcagagaatgagctgagccggtcagtaaatgagtttctgtccaagctgcaagatgacctcaaggaggcaatgaatactatgatgtgtagccgatgccaaggaaagcataggaggtttgaaatggaccgggaacctaagagtgccagatactgtgctgagtgtaataggctgcatcctgctgaggaaggagacttttgggcagagtcaagcatgttgggcctcaagatcacctactttgcactgatggatggaaaggtgtatgacatcacagagtgggctggatgccagcgtgtaggtatctccccagatacccacagagtcccctatcacatctcatttggttctcggattccaggcaccagagggcggcagagagccaccccagatgcccctcctgctgatcttcaggatttcttgagtcggatctttcaagtacccccagggcagatgcccaatgggaacttctttgcagctcctcagcctgcccctggagccgctgcagcctctaagcccaacagcacagtacccaagggagaagccaaacctaagcggcggaagaaagtgaggaggcccttccaacgttgatgccccttctctttcctcaaatcaatgtcagggagtcaaaagggctgtagcacaggatggagtttgatttatccctcctcccccaacacctaggaactgaatctttttctttttattttttgagatggagtcttgctctgttgcccagctggagtgcagtggtgtgatctcagcttactgcaacctctgtctcccgggttcaagcaattctcccatctcagcctcc

SEQ ID NO: 223771 - DNA, 3416 bp, Artificial Sequence
  derived and/or modified sequence
ccctccaattctttcccgtgtgtgtggggggacccaggttgcctactgctctagtccaggaccagagacccccaactatatagcagtggaagtaggcccaggtcgccggcggccgcggggacggaaggcggaagcagagcgtgagcgggaggcggagccgggagagcggctctcgtagctcaccctggccccaggccgggcggctcgagggggaggagttaccgccgttcttcggcatcagaacacaccatgatggctgtgacctaagaccctcaggaagccccggggtcatggcccagaagcaccccggagaaagagggttgtatggagcccaccacagtggtggtgcctccctcaggactttaggaccctccgtggaccctgaaataccttcattctcaggactcagggactcagcagggactgctcctaatggtacccgctgcctcacagagcactctggtcctaagcacacacagcacccaaacccagcccattggttggacccaagccatggccccccagggggtccaggaccacctagagatgcagaggaccctgatcagagtgagacgtcttcagaagaagaatcaggagtggaccaggaactctcaaaagaaaacgagactgggaaccagaaggatgggaactcttttctttccattccatctgcttgcaactgccagggaacacctggaattccagaagggccttactctgagggaggaaatggttcttctagcaacttttgccaccactgtacctctccagctttgggggaagatgagttggaagaggaatatgatgatgaagaatctctcaagttccccagtgatttttcacgtgtgtccagcggaaagaaacccccatcccggagacagcggcaccgctttccaacgaaggaggatactcgggagggtggacgtagggatcccaggtcccctggtcgacatcggctgggtcggaaacgaagtcaggcagataagcgcaaaggcctgggattgtggggagccgaggaactatgtcaacttggacaggcaggcttttggtggctgattgaactgctggtattggtgggagagtacgtagaaacttgtggccatctcatctatgcctgcaggcaactgaaaagcagtgatttggacctttttcgagtttggatgggagtgtggacagggcggttagggggctgggcccaggtcatgtttcagtttctaagccaggggttttactgtggagtaggactgtttactcgttttcttaagctgctgggtgctttgctgctcctggctctggccctctttttgggctttctacagttgggatggcggtttctggtgggactaggtgaccggttaggctggagggataaggctacctggctcttctcttggctggattctccagccttgcagcgttgcttgactctgctgagagatagcaggccatggcagcggctggtaagaatagttcagtggggctggctggagttgccttgggtcaagcagaatattaataggcaggggaatgcacctgtagctagtgggcgctactgccagcctgaagaggaagtggctcgactcttgaccatggctggggttcctgaggatgagctaaaccctttccatgtactgggggttgaggccacagcatcagatgttgaactgaagaaggcctatagacagctggcagtgatggttcatcctgacaaaaatcatcatccccgggctgaggaggccttcaaggttttgcgagcagcttgggacattgtcagcaatgctgaaaagcgaaaggagtatgagatgaaacgaatggcagagaatgagctgagccggtcagtaaatgagtttctgtccaagctgcaagatgacctcaaggaggcaatgaatactatgatgtgtagccgatgccaaggaaagcataggaggtttgaaatggaccgggaacctaagagtgccagatactgtgctgagtgtaataggctgcatcctgctgaggaaggagacttttgggcagagtcaagcatgttgggcctcaagatcacctactttgcactgatggatggaaaggtgtatgacatcacagagtgggctggatgccagcgtgtaggtatctccccagatacccacagagtcccctatcacatctcatttggttctcggattccaggcaccagagggcggcagagagccaccccagatgcccctcctgctgatcttcaggatttcttgagtcggatctttcaagtacccccagggcagatgcccaatgggaacttctttgcagctcctcagcctgcccctggagccgctgcagcctctaagcccaacagcacagtacccaagggagaagccaaacctaagcggcggaagaaagtgaggaggcccttccaacgttgatgccccttctctttcctcaaatcaatgtcagggagtcaaaagggctgtagcacaggatggagtttgatttatccctcctcccccaacacctaggaactgaatctttttctttttattttttgagatggagtcttgctctgttgcccagctggagtgcagtggtgtgatctcagcttactgcaacctctgtctcccgggttcaagcaattctcccatctcagcctcctgagtagctgggattacaggcacacaccaccacacctggcccagctaattcttttttgtatttttagtagagacggggtttcaccatgttgcccaggctggtctcgaactcctgagctcaggtgatccacccgtcttggcctcccaaagtgctggattacaggcataagccactgtgcccggcctgaatcttgtcttttgacaataccaaagaaatagggggtagctagagtaaagaacctagggcctggacctgggctggacagtgtatccctttaggtgtgggaactgggtatttccctggggtctgtatgcctttgtcttgtcatttgcttttagggcagatgacactttttcccacccttttaaagctacaagtctatcttctttcttgacccatttcaggagggagccctctcctttatcctgatataatatttaaaagagaacaagaaagcatgtagccctaatgataggagattatcgcatagagttcagagactggaaactgaattttccctcgactttcactttgtgggtaaatcacccaattttaggctcttttctgcaaggatggccaaaattaatcatttttaaaaagtagattcatgcccactgcccttgggtgagggggaagaatacgggggttcccagaagcccccatgtgatccaagggtttgtattttttttttaagtttgttcatatttgtatgtacatgactatttaaagccaggggattatctttctataaatgtataactggcaacctgtatcttccctctttgttgccc

SEQ ID NO: 223772 - DNA, 2853 bp, Artificial Sequence
  derived and/or modified sequence
ccaagccatggccccccagggggtccaggaccacctagagatgcagaggaccctgatcagagtgagacgtcttcagaagaagaatcaggagtggaccaggaactctcaaaagaaaacgagactgggaaccagaaggatgggaactcttttctttccattccatctgcttgcaactgccagggaacacctggaattccagaagggccttactctgagggaggaaatggttcttctagcaacttttgccaccactgtacctctccagctttgggggaagatgagttggaagaggaatatgatgatgaagaatctctcaagttccccagtgatttttcacgtgtgtccagcggaaagaaacccccatcccggagacagcggcaccgctttccaacgaaggaggatactcgggagggtggacgtagggatcccaggtcccctggtcgacatcggctgggtcggaaacgaagtcaggcagataagcgcaaaggcctgggattgtggggagccgaggaactatgtcaacttggacaggcaggcttttggtggctgattgaactgctggtattggtgggagagtacgtagaaacttgtggccatctcatctatgcctgcaggcaactgaaaagcagtgatttggacctttttcgagtttggatgggagtgtggacagggcggttagggggctgggcccaggtcatgtttcagtttctaagccaggggttttactgtggagtaggactgtttactcgttttcttaagctgctgggtgctttgctgctcctggctctggccctctttttgggctttctacagttgggatggcggtttctggtgggactaggtgaccggttaggctggagggataaggctacctggctcttctcttggctggattctccagccttgcagcgttgcttgactctgctgagagatagcaggccatggcagcggctggtaagaatagttcagtggggctggctggagttgccttgggtcaagcagaatattaataggcaggggaatgcacctgtagctagtgggcgctactgccagcctgaagaggaagtggctcgactcttgaccatggctggggttcctgaggatgagctaaaccctttccatgtactgggggttgaggccacagcatcagatgttgaactgaagaaggcctatagacagctggcagtgatggttcatcctgacaaaaatcatcatccccgggctgaggaggccttcaaggttttgcgagcagcttgggacattgtcagcaatgctgaaaagcgaaaggagtatgagatgaaacgaatggcagagaatgagctgagccggtcagtaaatgagtttctgtccaagctgcaagatgacctcaaggaggcaatgaatactatgatgtgtagccgatgccaaggaaagcataggaggtttgaaatggaccgggaacctaagagtgccagatactgtgctgagtgtaataggctgcatcctgctgaggaaggagacttttgggcagagtcaagcatgttgggcctcaagatcacctactttgcactgatggatggaaaggtgtatgacatcacagagtgggctggatgccagcgtgtaggtatctccccagatacccacagagtcccctatcacatctcatttggttctcggattccaggcaccagagggcggcagagagccaccccagatgcccctcctgctgatcttcaggatttcttgagtcggatctttcaagtacccccagggcagatgcccaatgggaacttctttgcagctcctcagcctgcccctggagccgctgcagcctctaagcccaacagcacagtacccaagggagaagccaaacctaagcggcggaagaaagtgaggaggcccttccaacgttgatgccccttctctttcctcaaatcaatgtcagggagtcaaaagggctgtagcacaggatggagtttgatttatccctcctcccccaacacctaggaactgaatctttttctttttattttttgagatggagtcttgctctgttgcccagctggagtgcagtggtgtgatctcagcttactgcaacctctgtctcccgggttcaagcaattctcccatctcagcctcctgagtagctgggattacaggcacacaccaccacacctggcccagctaattcttttttgtatttttagtagagacggggtttcaccatgttgcccaggctggtctcgaactcctgagctcaggtgatccacccgtcttggcctcccaaagtgctggattacaggcataagccactgtgcccggcctgaatcttgtcttttgacaataccaaagaaatagggggtagctagagtaaagaacctagggcctggacctgggctggacagtgtatccctttaggtgtgggaactgggtatttccctggggtctgtatgcctttgtcttgtcatttgcttttagggcagatgacactttttcccacccttttaaagctacaagtctatcttctttcttgacccatttcaggagggagccctctcctttatcctgatataatatttaaaagagaacaagaaagcatgtagccctaatgataggagattatcgcatagagttcagagactggaaactgaattttccctcgactttcacttttctgcaaggatggccaaaattaatcatttttaaaaagtagattcatgcccactgcccttgggtgagggggaagaatacgggggttcccagaagcccccatgtgatccaagggtttgtattttttttttaagtttgttcatatttgtatgtacatgactatttaaagccaggggattatctttctataaatgtataactggc

SEQ ID NO: 223773 - DNA, 744 bp, Artificial Sequence
  derived and/or modified sequence
aggaaacgaatggcagagaatgagctgagccggtcagtaaatgagtttctgtccaagctgcaagatgacctcaaggaggcaatgaatactatgatgtgtagccgatgccaaggaaagcataggaggtttgaaatggaccgggaacctaagagtgccagatactgtgctgagtgtaataggctgcatcctgctgaggaaggagacttttgggcagagtcaagcatgttgggcctcaagatcacctactttgcactgatggatggaaaggtgtatgacatcacagagtgggctggatgccagcgtgtaggtatctccccagatacccacagagtcccctatcacatctcatttggttctcggattccaggcaccagagggcggcagagagccaccccagatgcccctcctgctgatcttcaggatttcttgagtcggatctttcaagtacccccagggcagatgccaatgggaacttctttgcagctcctcagcctgcccctggagccgctgcagcctctaagcccaacagcacagtacccaagggagaagccaaacctaagcggcggaagaaagtgaggaggcccttccaacgttgatgccccttctctttcctcaaatcaatgtcagggagtcaaaagggctgtagcacaggatggagtttgatttatccctcctcccccaacacctaggaactgaatctttttctttttattttttgagatggagtcttgctctgttgcccag

SEQ ID NO: 223774 - DNA, 756 bp, Artificial Sequence
  derived and/or modified sequence
gacggaaggcggaagcagagcgtgagcgggaggcggagccgggagagcggctctcgtagctcaccctggccccaggccgggcggctcgagggggaggagttaccgccgttcttcggtacgtccgtcttttttttttttttcgtttttttttgtttttttgagatggagtctcgctctgtcacccagactggagtacagtggcacgatctcggttcactgcaacctccacctcccgggttcaagcgattcttctgcctcagcctcccgagtagctgggactacaggtgcgcgccaccacgcctggcgaatttctgtatttttagtagagacggagtttcaccatgttggccaggctggtctcgaactcctgacctcgtgatccgccggcctcggcctcccaaagtgctgggattacaggcgtgagccacggtgcccggccaccttcgtcccttctacacagccggcatcagaacacaccatgatggctgtgacctaagaccctcaggaagccccggggtcatggcccagaagcaccccggagaaagagggttgtatggagcccaccacagtggtggtgcctccctcaggactttaggaccctccgtggaccctgaaataccttcattctcaggactcagggactcagcagggactgctcctaatggtacccgctgcctcacagagcactctggtcctaagcacacacagcacccaaacccagcccattggttggacccaagccatggccccccaggg

SEQ ID NO: 223775 - DNA, 638 bp, Artificial Sequence
  derived and/or modified sequence
gtgcgcgcggtggggggaggaggggtgacatcacaaggcaggcccctccaattctttcccgtgtgtgtggggggacccaggttgcctactgctctagtccaggaccagagacccccaactatatagcaggcatcagaacacaccatgatggctgtgacctaagaccctcaggaagccccggggtcatggcccagaagcaccccggagaaagagggttgtatggagcccaccacagtggtggtgcctccctcaggactttaggaccctccgtggaccctgaaataccttcattctcaggactcagggactcagcagggactgctcctaatggtacccgctgcctcacagagcactctggtcctaagcacacacagcacccaaacccagcccattggttggacccaagccatggccccccagggggtccaggaccacctagagatgcagaggaccctgatcagagtgagacgtcttcagaagaagaatcaggagtggaccaggaactctcaaaagaaaacgagactgggaaccagaaggatgggaactcttttctttccattccatctgcttgcaactgccagggaacacctggaattccagaagggccttactctgagggaggaaatggttcttctagc

SEQ ID NO: 223776 - DNA, 2109 bp, Artificial Sequence
  derived and/or modified sequence
atggctcagaaacatcccggagagcgtggattatacggtgctcaccattcgggtggagcctcactgcgcaccttgggcccttcagtcgaccccgagatcccctctttctcgggcctgagagacagcgccggcacggccccaaacggcactaggtgcctaactgagcactccggtccgaagcatacacagcatcccaacccagcccattggctggacccttcccacgggccccctggcggcccagggccacctcgtgatgccgaggacccagatcaatctgagacgagcagtgaggaggaaagcggagtagaccaagaattatcaaaagagaatgagacaggtaatcaaaaggatggaaattcttttctgtccattccctctgcttgcaactgccaggggacccccggaattccagaaggcccttacagtgagggcggcaatggcagctcttcgaacttttgccaccattgtacatctcctgccctcggtgaagacgagcttgaagaggagtacgatgacgaggagagcctgaagtttccgagcgatttttctcgcgtcagtagcggaaagaagccaccttcccgccgtcagaggcaccggttcccgactaaagaggatacgagggagggcggcaggcgcgatccaagaagtcccggacgtcataggctcggtcgcaaaagaagtcaggctgataaaaggaaagggctgggcttatggggcgcggaggagctctgccagctaggacaggctggcttttggtggttgatcgaattgctcgtgctcgtgggagaatatgtggagacgtgcggacaccttatctacgcctgccgtcaacttaaatctagcgaccttgatttgtttcgtgtttggatgggagtctggactggccgccttggcggctgggctcaggtcatgtttcaattcctaagtcagggcttctactgtggcgtggggttatttacacggttcttaaagctactgggcgctctgctgctgctggcgctcgccctctttcttggttttctgcaattgggctggcgcttcctggtgggtctgggggatcggcttggctggagagacaaggccacttggctttttagctggttggatagtcctgcccttcagcgctgtctgacactactgagggacagccgcccttggcagaggctcgtgcggatcgtccaatggggctggctcgagttgccatgggtcaaacagaacattaacaggcaagggaatgctcctgtggcatccggacgatactgccagcctgaggaagaggtggcgcggctgctgacaatggctggagtgccagaggacgaactcaacccatttcacgttttgggggttgaagcaactgcttcagacgttgagttgaaaaaagcctaccgtcagctggctgttatggtgcacccagataaaaaccaccacccacgcgctgaggaagcttttaaagttttacgcgctgcatgggatatagtgagtaatgccgagaaacgcaaagagtacgagatgaaaagaatggctgagaacgagctctccagatctgtgaatgaattcctgtccaagctccaggacgatctgaaagaagccatgaatacaatgatgtgttctcgctgccagggcaagcatagacggttcgagatggacagggaacctaaatccgccagatattgcgctgaatgcaataggttacacccagctgaggagggggacttttgggcagaaagttccatgctgggcctgaagataacctacttcgcccttatggacggaaaggtatatgatatcacagaatgggccggttgtcaaagagttggaatcagtccagatacccaccgggtgccttaccacatttcatttggcagtagaattcctggcactagagggaggcagcgggccactcccgatgccccacctgcggatcttcaggactttctgtcccgtattttccaggttccacctggtcagatgcctaacggcaatttcttcgcagccccacaaccagctccaggggccgccgctgccagtaaaccaaactctactgtgccaaaaggcgaagctaagcccaaaagaaggaaaaaggtgaggaggccattccaacgttag

SEQ ID NO: 223777 - DNA, 2109 bp, Artificial Sequence
  derived and/or modified sequence
atggcgcaaaagcatccaggcgagcgcggattgtacggcgctcaccattccggtggtgcttcactgaggactctgggcccctcagtggatccagagatcccctcgtttagcgggctgagagattccgcaggaactgcaccaaacggcacaaggtgcctcaccgagcattccgggcccaagcatacccagcatcctaatcccgcacattggctggatcccagtcacggaccccccggaggccccggaccaccgagagatgccgaggaccccgaccaatcagaaacatcatcggaggaggagagtggagtggaccaggagttatctaaggaaaatgaaacgggtaatcagaaggacggtaactcttttttgagtatcccatccgcttgtaattgtcagggaaccccaggcattccggaaggcccctactctgagggtggtaacggatcttcatcgaacttctgtcaccattgtacgtcacctgcactgggcgaggacgaactcgaagaggaatatgacgatgaagaatcattgaagttccctagtgattttagccgggttagtagcgggaaaaagcctccgagcagacgtcagcgacatcgcttcccaactaaggaggatacaagagaggggggcaggagggatccacgcagccctggacgccaccggctcgggaggaagcgctctcaggccgacaagagaaaaggtctggggttgtggggggcagaagagttgtgtcagcttggtcaggctgggttttggtggctgattgaacttctggtccttgtcggagaatatgtggaaacctgtggccacctgatttacgcttgccggcagcttaaatcttcagacctggatctgttcagagtctggatgggagtgtggaccggacgcctcggtggttgggcccaggtgatgtttcagttcctgagtcaggggttttattgcggtgtggggctgttcactcgtttcttaaaactgttaggcgcccttctcctgctggctctggccctgttcttgggattcctgcagcttggatggcgcttcctcgtgggcctcggtgatcggctgggatggagggataaggccacttggttattcagctggctggacagccctgccctgcagagatgtttaacacttctgcgggactctcggccctggcagagactggttagaatcgttcagtggggctggctggaactgccatgggtaaagcagaatattaatagacagggcaacgcacccgtagcaagtggtaggtactgtcaacccgaagaggaagtagcccgcttgttaaccatggccggcgtgcccgaagacgaactgaatccatttcatgttcttggggtggaggctacagcatctgacgtggagttgaagaaagcgtatcggcaactggcagtgatggtacaccctgacaagaatcaccacccgagagcagaagaagcctttaaagtgctgcgcgccgcttgggacatcgtaagcaatgctgagaagagaaaagagtatgaaatgaagaggatggccgaaaacgagctctcacggtccgttaacgagtttctgtctaagctgcaggacgatttgaaagaggctatgaacacgatgatgtgtagtaggtgtcagggcaaacataggcgcttcgaaatggatagggagccaaagtcggccagatactgtgcagagtgcaatcggcttcacccggcagaggagggcgacttctgggccgagtcctctatgttgggtttgaagataacatattttgcattgatggatggcaaggtctatgatattactgagtgggcaggttgccagcgggtaggcatcagccccgatacccaccgtgtcccgtatcacattagttttggatctaggatccctggaacacggggtagacagagggcaacccctgatgccccgcctgccgatctgcaggacttcctcagccgcatattccaagtgccacctggccagatgcctaatggcaatttttttgccgctccacagcctgcacccggcgccgccgccgcgtccaaacctaacagcacggttccaaaaggtgaggccaaacccaagaggagaaagaaggttcgccgccccttccagcggtag

SEQ ID NO: 223778 - DNA, 2109 bp, Artificial Sequence
  derived and/or modified sequence
atggctcagaagcatccaggagagcgcggtctgtacggcgcacatcacagcggtggcgcaagccttaggaccttggggcccagcgtggatcctgagataccgtcattttctggtcttcgagattccgcagggacggcgccaaatggcacaaggtgtctcacagagcactcggggcctaagcatacccagcaccctaaccccgcccactggctagacccttcacatggtccacccgggggaccagggccgccgagggatgcagaggatcctgatcagtccgaaacatccagcgaggaagagagtggcgttgaccaggaactgtccaaggaaaatgaaactggtaatcaaaaagacggcaactccttcctgtcaataccgagcgcctgtaattgccagggaactccaggcatcccagaaggtccgtacagtgagggcggaaatgggagctcctccaacttttgtcatcattgcactagtccagcactcggtgaggatgaactggaggaagagtacgatgatgaggaatcactgaagttcccctcagatttttcccgggtttcctccggcaaaaagcccccatctcgtcgtcagcgtcaccggttcccgacgaaagaggatactagggagggagggaggcgagaccctcgtagtccagggagacaccgactgggcagaaagcggtctcaggcagacaagaggaagggcttgggtctgtggggagcggaggagttgtgtcaattgggtcaagctggattctggtggctgatcgagctgctggtgttggtcggagaatatgtggaaacttgtggacaccttatttatgcctgcaggcagctaaaatcctccgatctggacttgttcagagtctggatgggcgtatggactgggagactgggcgggtgggctcaggtcatgttccagttcttgtcgcaagggttctactgtggcgtaggactgtttacccgcttcctcaaactcctgggggccctgctgctgctggctctcgccctatttctggggtttctacaattgggctggcgcttcctggtgggactgggagacagattaggttggagggacaaggccacttggctctttagctggttagactctccagcactgcagaggtgtctgaccctgctaagagacagccgaccctggcaacggctggtgaggatcgtacagtgggggtggctcgagctaccttgggtgaaacagaatatcaataggcaaggtaacgcccctgtggcctctgggcggtattgtcaaccggaagaggaggttgcgcgccttctaaccatggcgggggtccccgaggatgaattgaatccgtttcacgtgctgggcgtggaagctacggcgtccgacgtagagctgaagaaggcataccgacaactggctgtgatggtgcaccccgataagaaccatcatcccagagcggaggaagccttcaaggtgctgagagcggcatgggatattgtctccaatgccgaaaagcgcaaggaatacgagatgaagaggatggccgagaatgagttaagcaggtctgtgaacgaattcctgtccaagcttcaggacgatttaaaggaagccatgaacactatgatgtgtagcaggtgccaaggcaaacacagacgatttgagatggacagggaaccaaaaagtgcccgctactgtgcagagtgtaaccgcctgcaccccgcagaagagggggatttctgggctgagagctccatgctggggctgaaaatcacttactttgcattgatggatggtaaggtttacgacattacagagtgggcagggtgccagcgagtcggaatatccccagacacccaccgcgttccgtaccacatctctttcgggtctaggatcccgggcacccgtggccgccagagagctaccccagatgctccacctgccgatctccaggactttctctctcgcatttttcaggtcccaccgggacagatgcctaatgggaacttcttcgcagcaccccagccagcccctggggccgcggccgctagcaagccaaactctacggtgccgaagggtgaggcaaagccaaaacgtaggaagaaggtacgaagaccattccaacggtag

SEQ ID NO: 223779 - DNA, 1239 bp, Artificial Sequence
  derived and/or modified sequence
atgggggtttggacaggacggttgggcggatgggctcaggtgatgtttcagttcctgagccaaggattctactgtggggttggcctgttcacaagatttcttaagcttctaggagctctcttgttactggccctggcattatttctgggctttctacagctggggtggcgctttctggttggtctgggcgatcgcctcggctggagggacaaagcaacttggcttttcagctggctcgacagccccgccctgcagagatgcctgaccttgcttagggactcaaggccctggcagcggttggtgcgcattgtacagtggggatggctcgagctgccgtgggttaagcagaatattaaccggcaggggaatgcccctgtggctagcggcaggtactgccagccagaggaggaagtcgcgagacttctcacaatggccggggttcccgaggacgaattaaaccctttccacgtcttgggggtggaggcaaccgctagcgatgtggagctaaagaaagcctacagacaactggccgtcatggtgcatccagataaaaaccaccacccaagggccgaggaagccttcaaggtattacgagctgcctgggacattgtatctaatgctgaaaagaggaaagagtacgagatgaagagaatggcagaaaacgagctgtctaggtccgttaatgagttcttgagcaaactgcaggacgatctcaaggaggcgatgaatactatgatgtgtagtagatgccagggaaaacatcgccggttcgagatggatagggaaccaaagtccgcacggtattgcgccgaatgtaaccgattacatcccgcggaggaaggggacttttgggccgagtctagtatgctgggactaaagatcacatatttcgcgctgatggatggtaaagtgtatgacatcacggaatgggcaggctgccagcgcgtcggcatctcaccagatactcatagggtgccttatcacatttcatttggtagtcggattcccggcacccgcggcagacagcgggccactcctgacgcgcctccagctgacctgcaggattttctctctagaatctttcaagttccccccggccagatgcccaatggcaattttttcgctgctccccagcctgcaccgggggccgctgctgcctcgaaacctaactcaacagtccccaagggggaggccaagccaaaaagaagaaagaaggttaggcgaccatttcagcgctag

SEQ ID NO: 223780 - DNA, 576 bp, Artificial Sequence
  derived and/or modified sequence
cggaaacggatggcagagaatgaactgtcacggagcgtgaacgagttcctgagcaagctgcaggatgacctgaaggaggctatgaatacgatgatgtgctcccgatgccagggtaagcaccggaggtttgagatggatcgggagcccaaatctgctcgatactgcgcggagtgcaacaggttgcacccggccgaggagggggacttctgggcggagagctctatgttaggcttgaagatcacctacttcgccttgatggatggcaaggtctatgacattacagagtgggccggatgccagcgcgtagggatctctcccgacacccatcgcgtgccctaccatatctcttttggatcccggatcccaggaactcggggtaggcaacgagccactccggatgccccaccggcagacctccaggactttttaagtagaatttttcaagtgcccccaggacagatgccaatgggtacatctctgcagctactcagcctaccccttgaacctctccagcctttatcacccacagcgcagtaccctagggagaagcctaatctgtcaggagggcggaaatag

SEQ ID NO: 223781 - DNA, 240 bp, Artificial Sequence
  derived and/or modified sequence
atggcccagaagcatcctggcgaacggggcctctatggagctcatcattcagggggggcttccttacgcacactcggacctagcgtggacccggagatcccgtctttttctggcctgcgggacagtgctggtactgcccccaatgggacaaggtgtctgacagagcactccgggccaaagcacacgcagcaccccaatccggcgcactggctcgacccaagtcatgggccccctgggtag

SEQ ID NO: 223782 - DNA, 456 bp, Artificial Sequence
  derived and/or modified sequence
atggcacagaagcatcccggcgaaaggggattgtatggagcacatcacagcggaggcgcatcactgcggacccttgggccctccgtggaccctgaaattcccagttttagtggcctccgcgatagcgccggaaccgcacctaacggcacaaggtgtctgacagaacattccggtccaaagcatacacagcatccaaaccccgctcactggttggatccgtcgcacgggccacctggggggcctggacctccccgagacgcagaggacccggatcagagcgagacttcttccgaggaagaatcgggagtggatcaggagctaagtaaggagaatgaaacaggaaatcagaaagacggcaattcttttctgtcgattccctctgcctgcaattgtcagggcacacccggtattcctgaaggaccatattctgagggtgggaatggtagcagctcttag

SEQ ID NO: 223783 - DNA, 2109 bp, Artificial Sequence
  derived and/or modified sequence
atggcccagaagcaccctggagagcggggcctgtatggagcccaccacagcggcggggccagcctgcggaccctgggccccagcgtggaccctgagatccccagcttcagcggcctgcgggacagcgctggaacagcccccaacggcacccgctgcctgacagagcacagcggccccaagcacacccagcaccccaacccagcccactggctggaccccagccacggccccccaggcggccctggccccccaagagatgctgaggaccctgaccagagcgagaccagcagcgaggaggagagcggcgtggaccaggagctgagcaaagaaaatgaaacaggcaaccagaaggatggcaacagcttcctgagcatccccagcgcctgcaactgccagggcaccccaggcatccctgagggcccctacagcgagggcggcaatggcagcagcagcaacttctgccaccactgcaccagccctgccctgggggaggatgagctggaggaggagtatgatgatgaggagagcctgaagttccccagcgacttcagccgggtgagcagcggcaagaagccacccagccggcggcagaggcaccgcttccccaccaaggaggacacccgggagggcggccggcgggaccccaggagccctggccgccaccggctgggcaggaagaggagccaggccgacaagaggaagggcctgggcctgtggggcgctgaggagctgtgccagctgggccaggccggcttctggtggctgattgagctgctggtgctggtgggggagtatgtggagacctgtggccacctgatctatgcctgccggcagctgaagagcagtgacctggacctcttccgggtgtggatgggcgtgtggacaggccgcctgggcggctgggcccaggtgatgttccagttcctgagccagggcttctactgcggcgtgggcctcttcacccgcttcctgaagctgctgggcgccctgctgctgctggccctggccctcttcctgggcttcctgcagctgggctggaggttcctggtgggcctgggggaccggctgggctggagggacaaggccacctggctgttctcctggctggacagccctgccctgcagcgctgcctgaccctgctgcgggacagccggccctggcagaggctggtgagaattgtgcagtggggctggctggagctgccctgggtgaagcagaacatcaaccggcagggcaatgcccctgtggccagcggccgctactgccagcctgaggaggaggtggcccggctgctgaccatggccggcgtgcctgaagatgagctgaaccccttccacgtgctgggcgtggaggccacagccagtgatgtggagctgaagaaggcctaccggcagctggccgtgatggtgcacccagacaagaaccaccaccccagggctgaggaggccttcaaggtgctgcgggccgcctgggacatcgtgtccaatgctgagaagaggaaggagtatgagatgaagaggatggccgagaatgagctgagccgctctgtgaatgagttcctgagcaagctgcaggatgacctgaaggaggccatgaacaccatgatgtgcagccgctgccagggcaagcacagaagatttgagatggaccgggagcccaagagcgcccgctactgtgccgagtgcaaccggctgcaccctgctgaggagggggacttctgggccgagagctccatgctgggcctgaagatcacctactttgccctgatggatggcaaggtgtatgacatcacagagtgggccggctgccagagggtgggcatcagcccagacacccaccgggtgccctaccacatcagctttggcagccgcatccctggcacccggggccggcagagggccaccccagatgcccctcctgctgacctgcaggacttcctgagccgcatcttccaggtgcccccaggccagatgcccaacggcaacttctttgctgccccccagcctgcccctggagctgctgctgccagcaagcccaacagcacagtgcccaagggggaggccaagcccaagaggaggaagaaggtgagaagacccttccagaggtag

SEQ ID NO: 223784 - DNA, 1239 bp, Artificial Sequence
  derived and/or modified sequence
atgggcgtgtggacaggccgcctgggcggctgggcccaggtgatgttccagttcctgagccagggcttctactgcggcgtgggcctcttcacccgcttcctgaagctgctgggcgccctgctgctgctggccctggccctcttcctgggcttcctgcagctgggctggaggttcctggtgggcctgggggaccggctgggctggagggacaaggccacctggctgttctcctggctggacagccctgccctgcagcgctgcctgaccctgctgcgggacagccggccctggcagaggctggtgagaattgtgcagtggggctggctggagctgccctgggtgaagcagaacatcaaccggcagggcaatgcccctgtggccagcggccgctactgccagcctgaggaggaggtggcccggctgctgaccatggccggcgtgcctgaagatgagctgaaccccttccacgtgctgggcgtggaggccacagccagtgatgtggagctgaagaaggcctaccggcagctggccgtgatggtgcacccagacaagaaccaccaccccagggctgaggaggccttcaaggtgctgcgggccgcctgggacatcgtgtccaatgctgagaagaggaaggagtatgagatgaagaggatggccgagaatgagctgagccgctctgtgaatgagttcctgagcaagctgcaggatgacctgaaggaggccatgaacaccatgatgtgcagccgctgccagggcaagcacagaagatttgagatggaccgggagcccaagagcgcccgctactgtgccgagtgcaaccggctgcaccctgctgaggagggggacttctgggccgagagctccatgctgggcctgaagatcacctactttgccctgatggatggcaaggtgtatgacatcacagagtgggccggctgccagagggtgggcatcagcccagacacccaccgggtgccctaccacatcagctttggcagccgcatccctggcacccggggccggcagagggccaccccagatgcccctcctgctgacctgcaggacttcctgagccgcatcttccaggtgcccccaggccagatgcccaacggcaacttctttgctgccccccagcctgcccctggagctgctgctgccagcaagcccaacagcacagtgcccaagggggaggccaagcccaagaggaggaagaaggtgagaagacccttccagaggtag

SEQ ID NO: 223785 - DNA, 576 bp, Artificial Sequence
  derived and/or modified sequence
aggaagaggatggccgagaatgagctgagccgctctgtgaatgagttcctgagcaagctgcaggatgacctgaaggaggccatgaacaccatgatgtgcagccgctgccagggcaagcacagaagatttgagatggaccgggagcccaagagcgcccgctactgtgccgagtgcaaccggctgcaccctgctgaggagggggacttctgggccgagagctccatgctgggcctgaagatcacctactttgccctgatggatggcaaggtgtatgacatcacagagtgggccggctgccagagggtgggcatcagcccagacacccaccgggtgccctaccacatcagctttggcagccgcatccctggcacccggggccggcagagggccaccccagatgcccctcctgctgacctgcaggacttcctgagccgcatcttccaggtgcccccaggccagatgcccatgggcaccagcctgcagctgctgagcctgcccctggagcccctgcagcccctgagccccacagcccagtacccccgggagaagcccaacctgagcggcggcaggaagtag

SEQ ID NO: 223786 - DNA, 240 bp, Artificial Sequence
  derived and/or modified sequence
atggcccagaagcaccctggagagcggggcctgtatggagcccaccacagcggcggggccagcctgcggaccctgggccccagcgtggaccctgagatccccagcttcagcggcctgcgggacagcgctggaacagcccccaacggcacccgctgcctgacagagcacagcggccccaagcacacccagcaccccaacccagcccactggctggaccccagccacggccccccaggatag

SEQ ID NO: 223787 - DNA, 456 bp, Artificial Sequence
  derived and/or modified sequence
atggcccagaagcaccctggagagcggggcctgtatggagcccaccacagcggcggggccagcctgcggaccctgggccccagcgtggaccctgagatccccagcttcagcggcctgcgggacagcgctggaacagcccccaacggcacccgctgcctgacagagcacagcggccccaagcacacccagcaccccaacccagcccactggctggaccccagccacggccccccaggcggccctggccccccaagagatgctgaggaccctgaccagagcgagaccagcagcgaggaggagagcggcgtggaccaggagctgagcaaagaaaatgaaacaggcaaccagaaggatggcaacagcttcctgagcatccccagcgcctgcaactgccagggcaccccaggcatccctgagggcccctacagcgagggcggcaatggcagcagcagctag

SEQ ID NO: 223788 - DNA, 2109 bp, Artificial Sequence
  derived and/or modified sequence
atggcccagaagcaccccggcgagcggggcctgtacggcgcccaccattcagggggcgcatctctccgaacactgggcccgagcgtcgaccccgagattccctctttttctggattgagggattccgcaggaaccgcaccaaatggaacacgttgcttgaccgagcattctggacctaagcatacccaacatcctaatcctgcacactggctggacccctcccacggcccccctggggggcccggacctccccgcgatgctgaagatccagatcagtctgagacttcttccgaagaggagagcggggtagatcaggaattgtcaaaggagaatgagacagggaaccaaaaggacgggaactcttttctgagcattcctagcgcttgcaactgccaaggaacacctggcatccccgagggcccgtactcagagggaggcaatggctctagtagtaacttttgtcatcattgcacctccccggccctgggcgaggacgaactcgaggaggaatacgacgatgaggaaagcctgaagttcccaagcgacttttctagagtctcctccggcaagaagccgccttctaggcggcagcgccacaggttcccaacaaaagaggacaccagggagggaggtagaagagacccgagatcccccgggcgccatagactcggcaggaagaggtctcaggcggataagcgtaaaggtttgggcctatggggcgctgaagagctctgtcaattgggacaggccgggttttggtggttaatcgagcttcttgtgctagtcggagagtacgtcgagacctgcggacatttgatctacgcctgccggcaattgaagtcatcagacctagacctgttccgtgtgtggatgggcgtgtggaccggccggctaggtggttgggctcaggtaatgtttcaattccttagtcagggcttttactgcggcgtggggctattcacgcggtttctcaagctgcttggagccttgttgctcctcgctcttgccctctttctaggttttctccagctcggatggcgcttccttgttggacttggcgaccggttaggctggcgggacaaagctacctggcttttctcctggctcgactcacccgcactgcaacgatgcctcacgttgttgcgtgactcaaggccatggcagagactggttcggatcgtgcagtggggatggttggagctgccttgggtaaaacagaacatcaaccgccaagggaatgcacctgttgcctcagggaggtattgccagcccgaggaggaggtagcacgcctcctgaccatggccggagttccagaggatgagctcaatccgttccatgttctgggggtggaagccaccgcctcggatgtcgaactaaagaaagcctaccggcaactggcagtgatggttcacccggacaagaaccaccaccccagggctgaagaagctttcaaagttctcagggccgcgtgggatatcgtgagcaacgcagaaaagcgtaaagaatacgaaatgaagcggatggccgagaatgagctaagcagaagtgtcaatgagttcctgagcaagctgcaggatgacctcaaggaggctatgaacaccatgatgtgctccagatgtcagggcaagcatcgccgattcgaaatggacagggagccaaaatccgctcgttattgtgctgaatgcaatagactccatccagctgaagagggtgatttctgggccgaaagcagcatgctgggactaaagattacctacttcgctctcatggacggcaaggtctacgacataaccgaatgggccggatgccaacgagtgggtatctccccggacacgcatcgagtgccttaccatatctcttttggctcgcgaattcccggcacgagggggcggcaaagggctacgccagacgctccccccgcagacctccaggactttttgagccgaatcttccaggtgcctccgggccaaatgcctaacggcaacttttttgctgctccacaacctgcccccggggctgccgccgccagcaagcctaatagcaccgtgcctaagggtgaggccaaaccaaagaggaggaaaaaggtccgcaggccatttcaacgctag

SEQ ID NO: 223789 - DNA, 2109 bp, Artificial Sequence
  derived and/or modified sequence
atggcccagaagcaccccggcgagcggggcctgtacggcgcccaccacagcggaggcgcgtccttgcggaccctaggccctagtgtggatcccgagattccttccttttccgggctgcgggatagcgctggaaccgcgcccaatgggacacggtgcctcacagagcactccgggcccaagcatacacagcacccgaatccagctcactggctggacccctcacatggccccccaggtgggccaggtccacctagggatgccgaagaccccgaccagtccgaaaccagctccgaagaagagtctggcgtggaccaagaattgagtaaagaaaacgagacaggaaatcaaaaggatggcaatagctttctgtcaatccccagcgcctgtaattgccaaggcactcctggaatacctgagggaccttatagtgaagggggcaatggcagttcgagcaatttctgtcaccactgtacctctccggcccttggggaagacgagcttgaggaggagtacgacgacgaagagtctctaaaatttccctctgacttttccagagtgtcctcaggcaagaagccaccctcacgcagacaaaggcacaggtttcctacaaaagaagatacacgtgagggggggcggcgggatccccgctctccgggcagacaccgtctggggcgcaagcgctcgcaggcggacaaaaggaaaggattaggattatggggagctgaggagctttgccaacttggacaggccgggttttggtggctcatcgagttgctggtgctagtgggcgagtacgtggaaacctgcggacaccttatctatgcttgtagacaacttaaaagttccgatctggatctgtttagagtgtggatgggggtctggacagggagacttggaggttgggcccaggtaatgttccagtttctgtctcaaggcttttactgtggtgtgggactgtttacgcggtttcttaagttattaggcgccctcctgctgctagccctcgccctattcctcggctttttacagctgggttggcgcttcctagtgggtttgggggaccgattgggttggcgcgacaaggctacatggctcttctcctggcttgactcaccagcactccagcgctgtcttaccctgctaagagatagcaggccttggcagcgactggtgcggattgtccagtggggatggttggagctgccctgggtgaagcagaacatcaatcggcagggaaatgctcctgtagcatccggcagatactgccaacctgaggaagaagtggccaggcttttgactatggcaggtgttcccgaagatgaactaaaccctttccacgtactgggcgtcgaggcaacggccagcgacgtcgagctgaaaaaggcctacaggcagcttgctgtgatggtccatcccgacaaaaatcaccatccaagggcagaagaggcatttaaggtgctgagggccgcatgggatatcgtttccaacgcagaaaagcggaaggagtatgagatgaaacgaatggctgaaaatgagctgtccaggtcagtcaatgaattcttgtcaaagttgcaggatgatctaaaagaagccatgaatacaatgatgtgtagccgctgccaggggaagcataggcgcttcgaaatggatcgcgaacctaagagcgcaagatactgtgcagagtgcaatagattacacccggcggaagagggcgatttctgggcagaatcgagtatgctgggcctcaagattacttacttcgcactgatggatggtaaggtctatgacatcactgagtgggcaggatgtcaacgagtgggcatctctccagatacgcatcgagtgccatatcacatatcctttgggtcgagaatccccgggacccgtggtcgtcagcgcgcaactcctgacgctccccccgcagatctccaggatttcctgtcacgcatttttcaggtcccaccggggcagatgcctaatggcaactttttcgcagctccccagcctgcgcctggggcggcagcagctagtaagccgaattcaaccgtgccaaaaggcgaggccaagcccaagaggcggaaaaaagtgagaagaccctttcaaagatag

SEQ ID NO: 223790 - DNA, 2109 bp, Artificial Sequence
  derived and/or modified sequence
atggcccagaagcaccccggcgagcggggcctgtacggcgcccaccactccgggggcgcttctctcagaaccctcggtccttccgtggaccctgagattccatccttctccggtctgagggactccgcagggactgcgcctaatggaacccgctgcctaaccgaacattctggtcctaaacacacacagcatcccaaccccgctcattggctggaccccagtcatgggcctccgggaggaccaggcccacccagagacgcagaagacccggaccagagtgaaacctcatcggaagaggagtccggagtcgaccaagagctaagcaaagagaatgagacgggcaatcaaaaggacgggaatagtttcctctctatcccctcagcctgtaattgtcagggcactccaggcatacccgagggtccatactctgagggaggtaatggctcttcatcaaacttttgccatcattgtacctcacccgccctgggtgaggatgagctggaggaggaatatgacgacgaggagagccttaaattcccctctgacttttctcgtgtttcgagcggaaaaaaaccaccctcccgtcggcagcggcatcgcttcccaactaaagaagacaccagagaagggggaagacgggaccctaggagcccgggaagacaccgcttaggtcggaagcgcagccaggccgataaacggaagggcttgggactctggggtgcagaggaattatgccagctcggacaggccgggttttggtggctgatagagttgttggtgctggtcggagagtacgtggagacgtgtggacatcttatatatgcatgtcgacagctcaagagcagcgacctggacttgtttcgagtgtggatgggggtgtggaccggacgcttaggtggctgggcacaggtgatgtttcaatttctgtcccagggattctactgtggggtgggcctgttcaccaggtttctcaagctgcttggggcgctgcttttactggctttggccttattcctcggcttcctacagcttggctggcgtttcttggtcggtcttggggaccggctcggctggagagataaggccacctggctgttcagctggctcgactcgcccgccttacaacggtgtctgacccttttgagagatagtaggccttggcaaaggctcgtgcgtatagtgcagtgggggtggctggagttaccgtgggtgaagcaaaatataaatagacaagggaatgcccccgtagcctctgggaggtactgtcaacctgaggaagaggtcgccaggctgctgacgatggccggggttccagaagacgaactgaacccattccacgtgcttggggtagaggctaccgcctccgatgtggaactaaaaaaggcctaccggcagctggcagttatggtccaccctgataagaatcaccaccccagagcagaggaggcatttaaggtgctgagggcagcctgggacatcgtcagcaacgctgagaaacggaaggagtacgagatgaagagaatggctgaaaacgagcttagtagatcagtgaacgagttcctgtccaaactgcaggatgatttaaaggaggcaatgaacacgatgatgtgctcgaggtgccagggcaaacacagaaggtttgagatggatagggaacctaagtccgcaagatactgcgctgagtgcaatagactgcatcctgcggaagagggcgatttttgggctgagagcagcatgctgggtcttaagataacttattttgctttgatggacgggaaggtgtatgatatcactgaatgggctgggtgtcagagggttggcattagcccggacactcaccgggtgccctatcacatcagtttcggtagtcggatcccgggaacacgtggtagacagagagctacccccgatgctccacctgccgacctgcaggactttctatccaggatctttcaagtgcctccagggcaaatgccgaatggcaacttcttcgcagccccacagcccgccccaggcgctgcagcagcaagtaaaccaaacagcactgtacctaaaggggaggctaagccaaaaagaagaaagaaggttagacgcccctttcaacggtag

SEQ ID NO: 223791 - DNA, 1239 bp, Artificial Sequence
  derived and/or modified sequence
atgggcgtgtggaccggccggctgggcggctgggcccaggtgatgttccagttcttgtcacagggcttctactgtggagttggactgttcacccgtttcttaaagttactgggggccctcctgctcctagcgctggccctgttcctaggctttctccagctcggctggaggttcctcgtgggactcggagataggctggggtggcgagacaaggcaacatggctgttctcatggctggactcgccggccctccaacggtgtctgacgctgctgagggattcacgaccttggcagagattagtgagaattgttcagtggggctggttggagttgccctgggttaagcagaatattaacaggcaggggaacgcgccggtggcttcgggtcggtactgtcagcctgaggaggaagtggcacggctgctaactatggccggcgtacctgaagatgagctcaacccatttcacgttctcggggtggaggctacagcttccgacgtggagctcaaaaaggcctatcgccagttggctgttatggtgcatccagacaaaaaccatcatcctcgcgccgaggaggccttcaaggtacttcgagctgcatgggatatcgtgagcaacgccgaaaagaggaaagagtacgagatgaaacgtatggcggagaatgaattgtcgcgctccgtgaatgagtttctttctaagctgcaggatgatctcaaagaggctatgaatacaatgatgtgctccagatgtcaaggtaagcacagaaggttcgagatggaccgcgagccgaaatccgccaggtactgcgccgagtgtaatcgattgcaccccgccgaagagggggacttctgggccgagtccagtatgctcggcttaaagattacatactttgcacttatggacggcaaagtctatgatattaccgagtgggcggggtgccagcgcgtgggcatctcaccggacacccacagggtcccataccacatctctttcggatctaggattcctggaaccaggggacgccaacgcgcaacaccagacgccccaccagctgatctccaagacttcctgtctaggatcttccaggtgcctccaggccagatgcccaatgggaacttctttgctgccccccaacctgcgcccggggcagccgccgcttccaagcctaactccacagttcctaagggcgaggccaagccgaaaaggcgaaagaaggtgcgccgtccattccaacggtag

SEQ ID NO: 223792 - DNA, 576 bp, Artificial Sequence
  derived and/or modified sequence
cggaagcggatggccgagaacgagctgagccggagcgtgaacgagtttctgtccaagctgcaagacgaccttaaggaggccatgaacacaatgatgtgctctaggtgccagggcaaacacagaaggtttgaaatggacagggagcctaagagtgccaggtattgtgccgagtgcaaccgtcttcatcccgccgaagagggcgacttttgggccgaatctagcatgctcggtctaaagattacctacttcgcactcatggacgggaaagtatatgatattacggagtgggcgggctgccaacgcgtggggatatccccagatacccatcgcgttccatatcacatctccttcggcagcaggataccaggtacccggggacgccaacgcgctacacccgacgctccacccgcagacctgcaggactttttatcccggatatttcaggttccccccggccaaatgcctatggggaccagtcttcagctgctgagtctccctctggaaccattgcagccactgagtcctaccgcccagtaccctcgtgaaaagcctaacctgagtggcggaaggaagtag

SEQ ID NO: 223793 - DNA, 240 bp, Artificial Sequence
  derived and/or modified sequence
atggcccagaagcaccccggcgagcggggcctgtacggcgcccaccactcaggcggggcctccctgagaactctggggccatctgtcgatccggagatccctagtttttccggtctgcgggactcagcaggtacggcaccgaacggcactaggtgcttgacagaacacagtggccctaagcatacccaacatccgaacccggctcattggcttgacccgtcccacggtccccctggctag

SEQ ID NO: 223794 - DNA, 456 bp, Artificial Sequence
  derived and/or modified sequence
atggcccagaagcaccccggcgagcggggcctgtacggcgcccaccattcaggcggcgctagcctacggaccttaggcccaagcgtggatcccgaaatcccctccttctccggcctccgagacagcgctggtacggcacccaatggaacaagatgtctcacagaacatagcggcccgaagcacacgcagcaccccaaccccgcccattggttagatccctctcatggacctccggggggacccggaccgccacgagatgccgaggaccctgaccagagcgagaccagttcggaagaagagtcgggcgtggatcaggagctttccaaagagaacgagacaggcaaccagaaagacggcaactctttcttgtcgatcccttctgcatgtaattgccagggtacaccagggatacctgagggtccctatagcgagggggggaatggatcgagttcgtag

SEQ ID NO: 223795 - DNA, 2109 bp, Artificial Sequence
  derived and/or modified sequence
atggcccagaagcacccaggggagagaggcttgtacggcgcacatcactccgggggagcttctctgcggaccctgggtccatctgtcgaccccgagattcccagcttctcgggcctcagagatagcgccggaaccgcacccaacggcacgcgttgcctgacggagcattctggccctaagcatacacaacaccccaatcctgctcactggctggaccctagtcatgggcctcctgggggaccaggaccccctcgggacgcggaagatccagatcaatctgaaacttcaagcgaagaggaaagcggcgtggaccaggaactcagcaaagaaaatgagactgggaatcagaaggacggcaattctttcctgagtattcccagcgcatgtaattgtcagggtacgcctggaatccccgaggggccttatagtgagggagggaatggtagctccagcaacttctgtcaccactgcacaagtcccgctctgggagaggatgaactggaagaggaatatgacgacgaggagtcgctgaaattcccttcggacttctcgagagtgagttcagggaagaagccccctagccgcagacagcgtcacaggttcccaaccaaagaagacaccagagaggggggtagaagggatcccaggagtcctggtagacacagactaggtcgcaagagatcccaggcggacaaaaggaagggactcggcctctggggggctgaggaactgtgtcagctcgggcaagcgggtttttggtggcttattgagctgctggttctcgtcggggaatatgtcgaaacgtgcggtcaccttatctacgcctgtcgccagttaaaaagcagcgacctcgacctgttcagggtgtggatgggcgtttggactggtcggctaggaggatgggcacaggttatgtttcaattcttatcacagggtttctattgcggtgtggggttgttcactcggtttctgaagctgcttggagcattgctgctgctggcccttgccttgttcctcgggttcctacagctgggttggcggttcctggtgggcctgggcgatcgcctggggtggagagacaaagctacctggcttttcagttggctggactccccagccctgcagagatgcctcacgctgctgagagatagcaggccctggcagcgcctcgtgcgcatcgtgcagtgggggtggctggaattaccttgggttaaacaaaacataaaccgccaggggaacgcgcctgttgcatctggcaggtattgccaacccgaggaagaagtggcaagactcttgactatggctggggtgcccgaggacgagctaaacccatttcatgtcttgggagtggaggccaccgcgagcgacgtggaacttaaaaaagcttatcggcagctcgccgtaatggtgcatccagataaaaatcaccatcctagagccgaggaggcctttaaggtgttgagggccgcttgggacatcgtctccaacgctgagaagcgcaaggaatatgaaatgaagcggatggcagaaaatgagttgagtagatcggtcaacgaattcctaagcaaactccaggacgaccttaaagaggccatgaataccatgatgtgttcaaggtgtcaaggcaaacataggagatttgaaatggacagggagcctaagagcgcgaggtattgtgccgaatgtaaccgcttgcacccggctgaggagggcgacttttgggcagagtcatccatgctcggactcaagattacatacttcgccctcatggacggaaaggtgtatgatataactgagtgggcaggctgtcagcgggttgggatctctccggacacacatagggtgccctatcacatttctttcggatctcggattccagggactcgcggacggcaacgggcaacacccgacgctcctcccgcagacttgcaggacttcctgagccgaatctttcaggtgccgccaggccaaatgcctaacgggaatttctttgcggcaccgcagccggctccgggtgccgctgccgcaagcaagcccaactcaactgtgcccaaaggcgaggccaaacctaaacgacgtaagaaggtgcggagacccttccagagatag

SEQ ID NO: 223796 - DNA, 2109 bp, Artificial Sequence
  derived and/or modified sequence
atggcccaaaagcaccccggagagcgcggtttatatggcgctcatcactctggcggtgcttccctgcgcacattgggaccaagcgtggacccagaaatcccgagtttttctggtctgcgcgactctgcaggaaccgcccctaacggaacacgctgtctcactgagcattccggacctaagcacacacagcaccccaaccctgctcactggctagaccccagtcacggtcctcctgggggacctgggcctcctagggacgccgaggatccagatcagagcgagactagttctgaagaggagtcaggggtggaccaggagttaagcaaagaaaacgagacaggcaaccagaaggacgggaattcctttctcagcatccccagcgcttgcaactgtcaggggacaccaggtatcccggaggggccttatagcgagggagggaatgggtctagttcaaacttctgccaccactgcacatcccctgctttgggggaggacgagctggaggaggagtatgacgacgaagagtctctgaagttcccatcagacttctcccgggtgtccagcggaaaaaagccccctagtcgcaggcagcgccatagatttcccaccaaagaggacaccagggaagggggacgaagggaccccaggtcccccggtaggcaccgcctgggacgaaaaagatcccaggcggacaagaggaaggggctgggactgtggggcgctgaggagctctgccaactcggtcaagctggattctggtggctgatagagctgctcgtcctggtgggcgaatacgtagagacttgcgggcacctgatctacgcttgtcgtcaactgaagtcctccgacctcgatctatttagggtgtggatgggggtgtggactggcagactgggaggctgggcacaagttatgttccagtttctttctcagggattctattgcggagttgggttattcactcggtttctcaagctgctcggcgctctgctactgctggctcttgctctgtttttgggattcctacagctggggtggagattcctggtcggtctgggggataggctcggttggagggacaaagcaacatggttatttagctggctggacagccccgcactgcagcgttgcttaacactgctgcgcgatagccgtccctggcagcgtttggtgcggattgtccagtggggctggctggaactcccgtgggtcaaacagaacattaaccggcaggggaatgcaccggtggccagcggacggtactgccagccggaggaagaggttgctcgactcctgaccatggccggagtgccagaggacgagctcaacccatttcacgtactgggagttgaagcaacagcgtccgatgtcgagcttaagaaggcgtatagacagctggccgtgatggtgcatccagataaaaatcatcatccacgggcagaggaggcgtttaaggtgcttagggccgcatgggatattgtgtccaacgcagagaaacggaaagagtacgaaatgaagagaatggccgaaaatgagctctcccggtccgtgaacgagttcctcagcaagcttcaggacgacctgaaagaggcaatgaataccatgatgtgttctcggtgtcaaggtaagcacaggcggtttgagatggatagggagccgaaaagcgcccgatactgtgctgagtgcaatcggctgcatcccgctgaggagggggatttctgggcggaaagctcaatgttaggtttaaagattacgtatttcgcactcatggatggaaaggtctacgacataaccgagtgggctgggtgtcaacgggtgggaatctcgccggacacgcatcgggtgccatatcacatctcctttgggtctagaattccaggaacacgtggtaggcagcgcgctactccggacgcccctcccgctgacctgcaagacttcctgtctagaatattccaagtgccacccggacagatgcccaatggtaatttcttcgctgcccctcagcccgcaccaggggcagccgctgccagcaaaccgaacagcactgtccctaaaggggaggctaaaccaaagcggaggaaaaaagtcagacgaccgttccagagatag

SEQ ID NO: 223797 - DNA, 2109 bp, Artificial Sequence
  derived and/or modified sequence
atggcccagaagcaccccggtgaacgtggcttatatggcgctcatcatagtggcggagcttcattgcgaaccctcggcccatcagtggatccggaaattccatcattttctggcctgcgagattccgctggaaccgcaccaaacgggacacgatgcctgacagagcattcaggacctaagcacacacagcaccctaaccccgcacactggctggacccctcgcatgggcctcctggcggacccggacctcccagagacgccgaggatcccgatcagagtgaaacctcaagcgaagaagaatctggggtggaccaggaactaagtaaggagaacgaaactggtaaccagaaagacggaaactcttttctttcaattccgtcggcatgtaattgccagggaactccgggaatcccagaagggccttacagcgaggggggaaacgggagttccagtaacttttgtcaccactgcacctctccagctcttggtgaggacgaactggaagaggagtacgatgatgaggagagtctgaagtttccttctgacttcagtcgtgtcagcagtggcaagaagccaccttctcgcaggcagagacataggttccccacgaaggaagacacaagggaggggggacgaagggatccacggtctcccggaaggcacaggttggggagaaagcgctcacaagcagataagagaaaaggcctgggtttgtggggggctgaagaactctgtcagctgggacaggccggtttttggtggcttattgagctgcttgtgctcgtgggggaatacgtcgagacctgcggacatttgatatacgcctgcagacagctgaaatcctcagacctcgacctgttcagggtgtggatgggagtctggaccgggaggcttgggggatgggcccaggtaatgttccagttcctatctcaggggttctactgcggggtgggcctctttacccgcttcttgaagctgttgggtgcgctcctcctgcttgccctggccctctttctgggattcctgcagttggggtggcgcttcctggtgggtctgggcgataggctgggttggcgcgacaaagccacctggttattttcctggctagattcccctgccttgcagcgttgcctgaccctcctgagagacagtcgcccatggcaacgactggtgagaattgtccagtggggctggctggagctcccgtgggttaaacagaacataaatcgacagggtaatgctcccgttgcatctggtaggtattgtcagccggaggaggaagtcgctcgcctgctcactatggcgggtgtccctgaggacgagctcaatccattccacgttcttggagtagaagcaacagcctccgacgtggaacttaagaaggcctataggcagctagccgtcatggtgcatcctgacaagaaccatcacccccgtgctgaagaggcattcaaagtgctccgagccgcatgggatatcgtttcaaatgctgaaaagcggaaggaatacgagatgaagaggatggctgagaacgaactctcaaggtccgttaacgagtttctcagcaaattgcaggacgacctgaaggaagcaatgaacactatgatgtgctcaaggtgtcaaggcaagcacagacgctttgagatggatagagagcccaagtcagcgcgttactgcgctgaatgcaatcgtttacaccccgcagaggaaggcgacttttgggccgagtcaagcatgctcggtctgaagatcacctactttgcactcatggatggcaaggtatacgatatcacagagtgggcagggtgtcagcgagtgggcatctcacctgatacccatagggtgccgtaccatatcagctttgggagtaggattcccggaacgaggggacggcagcgcgctacacctgatgccccaccagctgatctgcaggatttcctgtcacgcatttttcaggtgccaccaggtcagatgcccaacggaaacttttttgctgccccacaacccgctcccggagcagccgcagcaagtaagccaaactctaccgtgcccaagggtgaggcgaagccaaagcggaggaaaaaagtgcggaggcccttccagcgatag

SEQ ID NO: 223798 - DNA, 1239 bp, Artificial Sequence
  derived and/or modified sequence
atgggggtgtggaccggcagattaggtggctgggcacaggtcatgtttcaattcctgtcccaagggttctactgtggggttgggctctttactagattcctcaaattgctgggagcactccttctcctcgccttagccctctttttggggtttttgcagctcgggtggcgctttctggtgggcttgggtgatagactggggtggagagacaaggctacatggctgttttcttggctagattcaccagcacttcagcgctgtttaactttactgcgagattcacgcccatggcagcgactggttagaatcgtccaatggggatggctagagctcccatgggtaaaacagaacattaatcggcagggcaatgctcccgtggctagcggccgatactgccaacctgaagaagaagtggccaggctgctcaccatggctggagtgcctgaggacgagcttaatccttttcatgtcttgggagtggaagccaccgcctcagatgtggagctgaagaaggcctaccgtcagctcgcggttatggtgcatccggataagaaccaccaccccagggctgaggaggcattcaaggtgcttcgagccgcatgggatatagtgagtaacgccgaaaagaggaaagagtatgagatgaaaaggatggccgagaatgagctttccagaagcgtcaatgaatttctgagcaagttgcaggacgatctgaaagaggctatgaataccatgatgtgctcccgctgccagggcaaacaccgacgttttgagatggaccgagagcccaaatccgcccgatactgcgctgagtgcaatcgtttgcacccagccgaagagggcgacttctgggccgagtcctcgatgctgggattgaaaattacttactttgctcttatggatggtaaggtttatgacattacagagtgggctggttgtcagagggttgggatcagccctgatacacatcgggtaccttaccatatctccttcggatcccgaatcccaggcaccagaggacgccaaagagctactccagatgcccctcccgcagatctacaagacttcttatctaggattttccaggtgcctcctggccaaatgcccaatggaaatttcttcgccgctccccagccggcacctggcgcagccgcagcatctaaacccaactcaactgtgcctaaaggggaggctaaaccaaagcgacggaagaaggtgcggaggcccttccagaggtag

SEQ ID NO: 223799 - DNA, 576 bp, Artificial Sequence
  derived and/or modified sequence
agaaagcggatggccgagaatgagctctcccgctcggtcaacgagtttctttccaaactgcaggacgacctgaaagaggcaatgaacacaatgatgtgttcccggtgtcagggcaaacaccgcagattcgaaatggacagggaacctaagtccgctagatactgtgccgagtgcaatcggctgcatcccgcagaggagggggacttctgggctgagagttctatgctgggcctgaagattacatacttcgccctgatggatggcaaggtctacgatattactgagtgggctgggtgtcagcgggttggaatttccccagatacgcacagggtcccttaccatatatcattcggtagtaggatacccggtacgcggggaaggcagcgcgctacaccagacgcccctccggcagatctgcaggacttcctgagcagaatttttcaagtccctccagggcagatgccaatgggtacttccctgcagcttttgagcctgccactcgagcctcttcagccgctcagccctactgctcagtatcccagagagaagccaaacctgtctgggggaagaaagtag

SEQ ID NO: 223800 - DNA, 240 bp, Artificial Sequence
  derived and/or modified sequence
atggcacaaaagcaccccggagagcggggactctatggggctcatcacagtggtggcgcatcgctgaggacactggggccttcagttgatccagagataccctcattcagcggcttgcgcgacagcgctggcacagccccaaatgggacccgctgtctgacagaacattctgggccaaagcatacccagcaccctaaccctgctcattggctggatcccagtcatggaccccctggctag

SEQ ID NO: 223801 - DNA, 456 bp, Artificial Sequence
  derived and/or modified sequence
atggctcagaaacacccaggtgagagaggcctttacggtgcccaccattccggtggcgcatctcttagaacattgggcccttccgttgacccagagatcccatcattctcagggttgcgcgattccgcgggaaccgctccaaacggaacacgatgtctcacagagcactccggcccaaagcacacccaacaccccaatccggctcactggctggacccgtctcatggcccacctggcggaccaggacccccacgagacgcagaggacccggaccagtcggaaacaagctcagaggaggagtccggcgtcgatcaagagctcagtaaggagaatgaaaccggcaatcagaaagacggcaactcctttctatctattccctccgcttgcaattgccaggggacccctgggattcccgagggcccatattcagaaggaggcaacggctctagtagttag

SEQ ID NO: 223802 - protein, 206 aa, Artificial Sequence
  derived and/or modified sequence
MLPCAAGARGRGAMVVLRAGKKTFLPPLCRAFACRGCQLAPERGAERRDTAPSGVSRFCPPRKSCHDWIGPPDKYSNLRPVHFYIPENESPLEQKLRKLRQETQEWNQQFWANQNLTFSKEKEEFIHSRLKTKGLGLRTESGQKATLNAEEMADFYKEFLSKNFQKHMYYNRDWYKRNFAITFFMGKVALERIWNKLKQKQKKRSN

SEQ ID NO: 223803 - protein, 193 aa, Artificial Sequence
  derived and/or modified sequence
MVVLRAGKKTFLPPLCRAFACRGCQLAPERGAERRDTAPSGVSRFCPPRKSCHDWIGPPDKYSNLRPVHFYIPENESPLEQKLRKLRQETQEWNQQFWANQNLTFSKEKEEFIHSRLKTKGLGLRTESGQKATLNAEEMADFYKEFLSKNFQKHMYYNRDWYKRNFAITFFMGKVALERIWNKLKQKQKKRSN

SEQ ID NO: 223804 - DNA, 621 bp, Artificial Sequence
  derived and/or modified sequence
atgctgccctgcgccgccggcgccagaggcagaggcgccatggtggtgctgagagccggcaagaagaccttcctgccccccctgtgcagagccttcgcctgcagaggctgccagctggcccccgagagaggcgccgagagaagagacaccgcccccagcggcgtgagcagattctgcccccccagaaagagctgccacgactggatcggcccccccgacaagtacagcaacctgagacccgtgcacttctacatccccgagaacgagagccccctggagcagaagctgagaaagctgagacaggagacccaggagtggaaccagcagttctgggccaaccagaacctgaccttcagcaaggagaaggaggagttcatccacagcagactgaagaccaagggcctgggcctgagaaccgagagcggccagaaggccaccctgaacgccgaggagatggccgacttctacaaggagttcctgagcaagaacttccagaagcacatgtactacaacagagactggtacaagagaaacttcgccatcaccttcttcatgggcaaggtggccctggagagaatctggaacaagctgaagcagaagcagaagaagagaagcaactag

SEQ ID NO: 223805 - DNA, 621 bp, Artificial Sequence
  derived and/or modified sequence
atgctgccgtgtgctgcaggcgctcgcgggcgtggagccatggtcgtgctgagggctggcaaaaaaactttcttacctcccttgtgcagggcctttgcctgccgcgggtgccagctggcccctgagcgtggggccgagaggcgcgacacggcgccgagtggcgtcagcagattttgtcctcctcgcaaaagctgtcacgattggatcggccccccggacaagtattcgaaccttagacctgtccacttctacatacccgaaaatgagtcccccctcgaacagaagctgcgaaagctccgacaagaaactcaggagtggaatcagcagttctgggctaaccagaacctgaccttctctaaggagaaggaggagttcatccattcccggttaaaaactaaagggctgggactgagaaccgagtcaggccagaaagctactctgaacgcggaggaaatggccgatttttataaagaatttctctctaagaatttccaaaagcacatgtactacaaccgggattggtataagcggaatttcgccataaccttcttcatgggaaaagtagccttggagcggatctggaacaagctgaagcagaaacagaagaagcgatccaactag

SEQ ID NO: 223806 - DNA, 621 bp, Artificial Sequence
  derived and/or modified sequence
atgctgccctgtgccgccggggcccggggccgcggggccatggtggtgctgcgggccggcaagaagaccttcctgccccccctgtgccgggcctttgcctgccggggctgccagctggcccctgagagaggagctgagcggcgggacacagcccccagcggcgtgagccgcttctgcccccccaggaagagctgccacgactggattggccccccagacaagtacagcaacctgcggcctgtgcacttctacatcccagaaaatgaaagccccctggagcagaagctgaggaagctgcggcaggagacccaggagtggaaccagcagttctgggccaaccagaacctgaccttcagcaaggagaaggaggagttcatccacagccggctgaagaccaagggcctgggcctgaggacagaaagtggccagaaggccaccctgaatgctgaggagatggctgacttctacaaggagttcctgagcaagaacttccagaagcacatgtactacaacagagactggtacaagaggaactttgccatcaccttcttcatgggcaaggtggccctggagcgcatctggaacaagctgaagcagaagcagaagaagaggagcaactag

SEQ ID NO: 223807 - DNA, 621 bp, Artificial Sequence
  derived and/or modified sequence
atgctgccctgcgccgccggcgcccggggccggggcgccatggtggtattgcgcgccggcaagaaaaccttcctcccacccttatgccgtgcctttgcttgtcgtggttgtcagcttgcccccgagcgaggcgccgagcgccgggataccgcccctagcggtgtgtcgcgcttttgtcctccgagaaagtcatgccacgattggatcggtccccctgacaagtacagtaacttacgccccgtccatttctacataccagagaacgaaagtcccctcgaacagaagctccgcaagctccgtcaggaaactcaagaatggaatcaacagttctgggccaaccagaacctgacatttagtaaggagaaggaggagttcattcacagccggcttaagaccaagggcctgggtcttcgtacagagtccggacagaaggcaacacttaatgcagaggaaatggccgacttttataaggagttcctctccaaaaactttcaaaagcacatgtactataatagggactggtataaacggaacttcgccatcacattcttcatgggtaaggtggcattggaacggatctggaataagctcaaacaaaagcaaaaaaaaagatcaaactag

SEQ ID NO: 223808 - DNA, 2523 bp, Artificial Sequence
  derived and/or modified sequence
aatgctgccgtgcgccgcgggagccagggggcgtggggccatggtggtcttgcgggcggggaagaagacctttctcccccctctctgccgcgccttcgcctgccgcggctgtcaactcgctccggagcgcggcgccgagcgcagggatacggcgcccagcggggtctcaagattctgccctccaagaaagtcttgccatgattggataggacccccagataaatattcaaaccttcgacctgttcacttttacatacctgaaaatgaatctccattggaacaaaagcttagaaaattaagacaagaaacacaagaatggaatcaacagttctgggcaaaccagaatttgacttttagtaaggaaaaagaagaatttattcactcaagactaaaaactaaaggcctgggcctgagaactgaatcaggtcagaaagcaacattgaatgcagaagaaatggcggacttctacaaggaatttttaagtaaaaattttcagaagcacatgtattataacagagattggtacaagcgcaattttgccatcaccttcttcatgggaaaagtggccctggaaaggatttggaacaagcttaaacagaaacaaaagaagaggagcaactaggagtccactctgacccagccagagtccaggtttccacaggaagcagatggagctcctttcacaggggctctgagaaaaactggagctgatctcaagaagccccacatcttcctaaggggccccatggcctgtttgggggcagggtaggtcctggggcactgtgggccgcctgcctgctgatgtgggctctaggccagcttgttgtcacgtacgtggtgtgaaataaagcccaagcactgggtgcccgtttcctgtgtttcgaattataccaattcaaaacagaactatttaaaaatattggccaggcacggtggctcacacctgtaatcccagcactttgggaggccgaggcgggtggatcacttgagatcaggagttcaagatcagtctggacaacatggcaaaaccctgtctctacaaaaaattagctgggtgtggtggcacgcacctgtaatcccagctgctctggaggctgaggcatgcgacgcttgaacccaggaggcggaggttgcagtgatccaagatcgcaccactgcactccagcctggaagaccaaacgagactctgtatcaaaaaataataataattaataaagttttactggaaaaaagaagtctgctgacgggaatgatgtggaagctgactgccaagcgatcggtgtgctggccgtggagtcagcaccaccctcactgtgagtcgtcagctggtgggtcctcacaggctgcgtcctgaatgcagtgcggtgtgaggacatgaaagcaaatgcaattttattgcatgccaaaaagtttaacttgattcttggtgttaactatgttagtagattcttcaatgctataagcaaattaacaagaaacagcagcactattttcctcttttcttaaacacgaaggttaaatggccaggcatggtgactcatacctgtaatcccaacaatttgggaggccaaggcaagcaaatcacttgagctcaggagttcgaaccagtttgggcaacatggcgaaaccctgcctctacaaaacatgcaaaaattagctgggcatggtagcatgcgcctgtagtcccagctactcgggaggctgagcttcgaggattgattgagccagtgaggtccaggctgcactaagccaagatcctaccactaggcaacagagccagaccctgtctcaaataaaaatttaaaaaaataataaaaaaggccgggcgcactggctcacgcctgtaatctcagcactttgggtggccaaggtgggcggatcacctgaggtcagttcaagaccagcctggccaaacatggtgaaaccctgtctacaaaaattagccaggcatgatggagggtgcctttagtcccagctctttgggaagctgaggcgggagaatagcatgaaccagggaggtggagggtgcctgtaatcccagctccttgggaggctaaggcaggagaatagcatgaacccggtaggtggaggttgcagtgagccgagatcgcgccactgcactccagcctgggcgacagagcaatactcccgtctcaaaaaaaaaaaaattaaatgattgtgatatgtgttacttttggtcacaaataaattgtaattaagattattctggccaggtgcggtggctcacgcctataatcccagcactttgggaggccgaggtgggcagatcatgaggtcaggagatcgagaccatcctgcccaacatggtgaaaccccgtttctactaaaaatgcaaaaattagctgggtgtggtggcgtgtgcctgtaatgccagctactcgggaggctgaggcacgagaatcacttgaacccagcaggcagaggttgcagtgagccaagattgcgccactgcactccagcctgacgacaaagcgagactccgtctcaaaaaaaaaaaaaaaa

SEQ ID NO: 223809 - DNA, 621 bp, Artificial Sequence
  derived and/or modified sequence
atgttgccctgcgctgccggagcgagaggacgcggagctatggtggtcttaagagccggaaaaaagacatttctgcctcctctgtgtagagctttcgcatgccgcggttgccagctcgccccagaaagaggcgcagagcgacgagatactgctccgagcggagtgtctaggttctgccctcccaggaaatcctgtcacgattggatcggccctccagataaatattcgaatctccggcctgtgcacttttacattccagagaacgagtctccccttgagcaaaagctgaggaagcttcgccaggagacgcaggagtggaaccagcaattctgggctaatcagaacctcacattcagcaaggagaaagaggaattcatacactcccgactgaaaaccaaaggcctgggcctgcgaacagagtctggccagaaggccacacttaatgccgaagaaatggctgatttttacaaggaattcctcagcaagaatttccagaaacacatgtactataatcgggactggtataaacggaacttcgcaattactttttttatgggcaaggtcgccctggagcgaatctggaacaaactgaagcagaaacagaagaagaggtctaattag

SEQ ID NO: 223810 - DNA, 582 bp, Artificial Sequence
  derived and/or modified sequence
atggtcgttctgcgagctggcaaaaaaacattcttgccaccgctgtgtcgtgcttttgcctgcagagggtgtcagctggcacccgaaagaggggccgagcgtcgcgataccgcaccatcaggcgtcagcaggttttgtccaccaagaaagagctgccacgattggattgggccacctgataaatacagtaacctgcgtccggtacacttttacataccagaaaatgagagccccctcgagcagaagcttaggaagttacgtcaggagactcaggagtggaaccagcagttttgggcaaaccaaaacttgacattctccaaagaaaaggaagagttcatccactccaggttgaagacgaaaggcttgggtctccgcacagaatctggccagaaggctacattgaatgccgaagagatggctgacttttataaggagttcctgtcaaaaaacttccaaaagcacatgtattataacagggactggtataagcgcaattttgccattacttttttcatgggaaaggtggctcttgagcggatctggaacaagctcaaacaaaagcagaaaaagaggagcaattag

SEQ ID NO: 223811 - DNA, 582 bp, Artificial Sequence
  derived and/or modified sequence
atggtggtgctgcgggccggcaagaagaccttcctgccccccctgtgccgggcctttgcctgccggggctgccagctggcccctgagagaggagctgagcggcgggacacagcccccagcggcgtgagccgcttctgcccccccaggaagagctgccacgactggattggccccccagacaagtacagcaacctgcggcctgtgcacttctacatcccagaaaatgaaagccccctggagcagaagctgaggaagctgcggcaggagacccaggagtggaaccagcagttctgggccaaccagaacctgaccttcagcaaggagaaggaggagttcatccacagccggctgaagaccaagggcctgggcctgaggacagagagcggccagaaggccaccctgaatgctgaggagatggctgacttctacaaggagttcctgagcaagaacttccagaagcacatgtactacaacagagactggtacaagaggaactttgccatcaccttcttcatgggcaaggtggccctggagcgcatctggaacaagctgaagcagaagcagaagaagaggagcaactag

SEQ ID NO: 223812 - DNA, 582 bp, Artificial Sequence
  derived and/or modified sequence
atggtggtgctgcgggccggcaagaagaccttcctgccccccctgtgtcgtgccttcgcctgccgcgggtgtcagttggcacccgaacgaggcgccgagcgccgagatacagcaccatccggcgtcagccggttctgccccccccggaagtcctgccacgactggatcggaccgcccgataagtacagcaatctacgacctgtgcatttctatatccccgagaatgaaagccccctggaacagaagttaaggaagttgcggcaggagactcaggaatggaaccagcagttctgggccaaccaaaatctcaccttcagcaaagaaaaggaggaatttatccattcccggctcaagacgaagggcctcggactgcggaccgaaagcgggcagaaagccaccctgaacgccgaagagatggctgacttctataaggagttcttgagcaagaattttcagaagcacatgtattataaccgagattggtacaagaggaactttgccataaccttttttatgggaaaggtcgctctggaaagaatatggaataaactaaaacaaaaacagaaaaaacgttctaactag

SEQ ID NO: 223813 - DNA, 582 bp, Artificial Sequence
  derived and/or modified sequence
atggtggtcctgcgcgcaggcaaaaagacgttccttccccctctatgccgagcttttgcatgtcgcggttgccagcttgcccctgagaggggcgcagagcgtagagatactgcccctagtggcgtctcccgcttctgtccccctcgcaagtcctgtcatgattggattggaccccctgacaagtatagcaacctacgacctgtccacttctacattccagaaaatgagtcccctctggaacaaaagctgcgtaagctacgacaggaaacccaggagtggaatcagcaattttgggcaaatcagaatcttacattctccaaggaaaaggaggagtttatccatagtcgactcaagaccaaggggctaggactcagaactgaaagcggacagaaagccacactgaacgcagaggaaatggcagatttctataaagagttcttgagcaagaactttcagaagcacatgtattacaaccgtgattggtataagcgcaactttgccataaccttctttatgggcaaagtagcccttgagcgaatctggaataaacttaagcaaaaacaaaaaaaacggtctaactag

SEQ ID NO: 223814 - DNA, 2475 bp, Artificial Sequence
  derived and/or modified sequence
gtggggccatggtggtcttgcgggcggggaagaagacctttctcccccctctctgccgcgccttcgcctgccgcggctgtcaactcgctccggagcgcggcgccgagcgcagggatacggcgcccagcggggtctcaagattctgccctccaagaaagtcttgccatgattggataggacccccagataaatattcaaaccttcgacctgttcacttttacatacctgaaaatgaatctccattggaacaaaagcttagaaaattaagacaagaaacacaagaatggaatcaacagttctgggcaaaccagaatttgacttttagtaaggaaaaagaagaatttattcactcaagactaaaaactaaaggcctgggcctgagaactgaatcaggtcagaaagcaacattgaatgcagaagaaatggcggacttctacaaggaatttttaagtaaaaattttcagaagcacatgtattataacagagattggtacaagcgcaattttgccatcaccttcttcatgggaaaagtggccctggaaaggatttggaacaagcttaaacagaaacaaaagaagaggagcaactaggagtccactctgacccagccagagtccaggtttccacaggaagcagatggagctcctttcacaggggctctgagaaaaactggagctgatctcaagaagccccacatcttcctaaggggccccatggcctgtttgggggcagggtaggtcctggggcactgtgggccgcctgcctgctgatgtgggctctaggccagcttgttgtcacgtacgtggtgtgaaataaagcccaagcactgggtgcccgtttcctgtgtttcgaattataccaattcaaaacagaactatttaaaaatattggccaggcacggtggctcacacctgtaatcccagcactttgggaggccgaggcgggtggatcacttgagatcaggagttcaagatcagtctggacaacatggcaaaaccctgtctctacaaaaaattagctgggtgtggtggcacgcacctgtaatcccagctgctctggaggctgaggcatgcgacgcttgaacccaggaggcggaggttgcagtgatccaagatcgcaccactgcactccagcctggaagaccaaacgagactctgtatcaaaaaataataataattaataaagttttactggaaaaaagaagtctgctgacgggaatgatgtggaagctgactgccaagcgatcggtgtgctggccgtggagtcagcaccaccctcactgtgagtcgtcagctggtgggtcctcacaggctgcgtcctgaatgcagtgcggtgtgaggacatgaaagcaaatgcaattttattgcatgccaaaaagtttaacttgattcttggtgttaactatgttagtagattcttcaatgctataagcaaattaacaagaaacagcagcactattttcctcttttcttaaacacgaaggttaaatggccaggcatggtgactcatacctgtaatcccaacaatttgggaggccaaggcaagcaaatcacttgagctcaggagttcgaaccagtttgggcaacatggcgaaaccctgcctctacaaaacatgcaaaaattagctgggcatggtagcatgcgcctgtagtcccagctactcgggaggctgagcttcgaggattgattgagccagtgaggtccaggctgcactaagccaagatcctaccactaggcaacagagccagaccctgtctcaaataaaaatttaaaaaaataataaaaaaggccgggcgcactggctcacgcctgtaatctcagcactttgggtggccaaggtgggcggatcacctgaggtcagttcaagaccagcctggccaaacatggtgaaaccctgtctacaaaaattagccaggcatgatggagggtgcctttagtcccagctctttgggaagctgaggcgggagaatagcatgaaccagggaggtggagggtgcctgtaatcccagctccttgggaggctaaggcaggagaatagcatgaacccggtaggtggaggttgcagtgagccgagatcgcgccactgcactccagcctgggcgacagagcaatactcccgtctcaaaaaaaaaaaaattaaatgattgtgatatgtgttacttttggtcacaaataaattgtaattaagattattctggccaggtgcggtggctcacgcctataatcccagcactttgggaggccgaggtgggcagatcatgaggtcaggagatcgagaccatcctgcccaacatggtgaaaccccgtttctactaaaaatgcaaaaattagctgggtgtggtggcgtgtgcctgtaatgccagctactcgggaggctgaggcacgagaatcacttgaacccagcaggcagaggttgcagtgagccaagattgcgccactgcactccagcctgacgacaaagcgagactccgtctc

SEQ ID NO: 223815 - DNA, 582 bp, Artificial Sequence
  derived and/or modified sequence
atggtggtgctgagagccggcaagaagaccttcctgccccccctgtgcagagccttcgcctgcagaggctgccagctggcccccgagagaggcgccgagagaagagacaccgcccccagcggcgtgagcagattctgcccccccagaaagagctgccacgactggatcggcccccccgacaagtacagcaacctgagacccgtgcacttctacatccccgagaacgagagccccctggagcagaagctgagaaagctgagacaggagacccaggagtggaaccagcagttctgggccaaccagaacctgaccttcagcaaggagaaggaggagttcatccacagcagactgaagaccaagggcctgggcctgagaaccgagagcggccagaaggccaccctgaacgccgaggagatggccgacttctacaaggagttcctgagcaagaacttccagaagcacatgtactacaacagagactggtacaagagaaacttcgccatcaccttcttcatgggcaaggtggccctggagagaatctggaacaagctgaagcagaagcagaagaagagaagcaactag

SEQ ID NO: 223816 - protein, 256 aa, Artificial Sequence
  derived and/or modified sequence
MASGRPEELWEAVVGAAERFRARTGTELVLLTAAPPPPPRPGPCAYAAHGRGALAEAARRCLHDIALAHRAATAARPPAPPPAPQPPSPTPSPPRPTLAREDNEEDEDEPTETETSGEQLGISDNGGLFVMDEDATLQDLPPFCESDPESTDDGSLSEETPAGPPTCSVPPASALPTQQYAKSLPVSVPVWGFKEKRTEARSSDEENGPPSSPDLDRIAASMRALVLREAEDTQVFGDLPRPRLNTSDFQKLKRKY

SEQ ID NO: 223817 - protein, 108 aa, Artificial Sequence
  derived and/or modified sequence
MASGRPEELWEAVVGAAERFRARTGTELVLLTAAPPPPPRPGPCAYAAHGRGALAEAARRCLHDIALAHRAATAARPPAPPPAPQPPSPTPSPPRPTLAREDNEEDED

SEQ ID NO: 223818 - protein, 276 aa, Artificial Sequence
  derived and/or modified sequence
MSFEGGDGAGPAMLATGTARMASGRPEELWEAVVGAAERFRARTGTELVLLTAAPPPPPRPGPCAYAAHGRGALAEAARRCLHDIALAHRAATAARPPAPPPAPQPPSPTPSPPRPTLAREDNEEDEDEPTETETSGEQLGISDNGGLFVMDEDATLQDLPPFCESDPESTDDGSLSEETPAGPPTCSVPPASALPTQQYAKSLPVSVPVWGFKEKRTEARSSDEENGPPSSPDLDRIAASMRALVLREAEDTQVFGDLPRPRLNTSDFQKLKRKY

SEQ ID NO: 223819 - DNA, 831 bp, Artificial Sequence
  derived and/or modified sequence
atgagcttcgagggcggcgacggcgccggccccgccatgctggccaccggcaccgccagaatggccagcggcagacccgaggagctgtgggaggccgtggtgggcgccgccgagagattcagagccagaaccggcaccgagctggtgctgctgaccgccgcccccccccccccccccagacccggcccctgcgcctacgccgcccacggcagaggcgccctggccgaggccgccagaagatgcctgcacgacatcgccctggcccacagagccgccaccgccgccagaccccccgcccccccccccgccccccagccccccagccccacccccagcccccccagacccaccctggccagagaggacaacgaggaggacgaggacgagcccaccgagaccgagaccagcggcgagcagctgggcatcagcgacaacggcggcctgttcgtgatggacgaggacgccaccctgcaggacctgccccccttctgcgagagcgaccccgagagcaccgacgacggcagcctgagcgaggagacccccgccggcccccccacctgcagcgtgccccccgccagcgccctgcccacccagcagtacgccaagagcctgcccgtgagcgtgcccgtgtggggcttcaaggagaagagaaccgaggccagaagcagcgacgaggagaacggcccccccagcagccccgacctggacagaatcgccgccagcatgagagccctggtgctgagagaggccgaggacacccaggtgttcggcgacctgcccagacccagactgaacaccagcgacttccagaagctgaagagaaagtactag

SEQ ID NO: 223820 - DNA, 1760 bp, Artificial Sequence
  derived and/or modified sequence
ggcatggcctaagccggtcagctaaggccatgttaatacggggctgtcccatctctctgcggggcgcgacagctggaagagccgaacggataagagaagaggagggcgcggatggcgtcggggcgccccgaggagctgtgggaggccgtggtgggggccgctgagcgcttccgggcccggactggcacggagctggtgctgctgaccgcggccccgccgccaccaccccgcccgggcccctgtgcctatgctgcccatggtcgaggagccctggcggaggcagcgcgccgttgcctccacgacatcgcactggcccacagggctgccactgctgctcggcctcctgcgcccccaccagcaccacagccacccagtcccacacccagcccaccccggcctaccctggccagagaggacaacgaggaggacgaggatgagcccacagagacagagacctccggggagcagctgggcattagtgataatggagggctctttgtgatggatgaggacgccaccctccaggaccttccccccttctgtgagtcagaccccgagagtacagatgatggcagcctgagcgaggagacccccgccggcccccccacctgctcagtgcccccagcctcagccctacccacacagcagtacgccaagtccctgcctgtgtctgtgcccgtctggggcttcaaggagaagaggacagaggcgcggtcatcagatgaggagaatgggccgccctcttcgcccgacctggaccgcatcgcggcgagcatgcgcgcgctggtgctgcgagaggccgaggacacccaggtcttcggggacctgccacggccgcggcttaacaccagcgacttccagaagctgaagcggaaatattgaagtccagggagggagcgccccgggccgcgtccgccccgtcccacactacgcccccgccccactcccggggcctgctaatctgaggccgatccgggaccggcctccttgcgtctcccattcccaagattgtcccgcctctgccaatccccgccgtccttccagcccacgacctgccgcgccgaggagcggcatctgtcccgtttcccgattgggtctgtcgtctctctccgcctagcgacagattccttctattaagggattggctcgctgagttctaagctctaaatgggtcaactcctttgttttccgcctagcgacaagggatttgctcgcacggcattggctccatcccctagtcgctggacagctctttttttgattggctcaaatcctgtaaagggcttgaccagtctctacatagtcaccgtccgcttttcctgagttctccctcccaattggctccagcttcctgggggcgtggccaagccctcctcttcccagaattggcccggggccttcaatttacgttctttacactacggggactggggtcgtctttgcccacgtcccgacaacttgttccctgaccccctcagggatggccccaaactgtccctgcctctggcaccccctttcattggttccatccatccccacaacagcctgccaatcgaagcccgtccctgcatccaggatggtaccagctcccgcccctcgccccccacctccacaggtgccttaaagggccctcgtccacccaaggtggggggcaggggccctcactctccggccctggtgtgggggagagagtgaggggttgggggatcggcagttgggaggggcgctctgagattaaagagttttacctctgagataaa

SEQ ID NO: 223821 - DNA, 831 bp, Artificial Sequence
  derived and/or modified sequence
atgagtttcgaaggaggtgacggggctgggcccgccatgcttgcgacaggcacagcccgcatggcttctgggcgccccgaggagttgtgggaagccgttgttggagcggccgagaggtttagggccagaactggaactgaattggtcctactcactgcggcgcccccaccgccaccccggccgggaccttgtgcatatgccgcccacggccgcggtgcgctggctgaggctgccagaaggtgtttgcacgatattgccctcgcccacagggctgctacagccgctcggccgcctgctccccctcctgcacctcaaccccccagcccaacaccaagtcctcctcgccccactctcgcccgagaggataacgaggaggacgaggacgagcccaccgaaactgagacgtcgggtgaacagctcggcataagtgacaacggaggtctgttcgtcatggatgaagacgctacccttcaggaccttcctcccttttgcgaaagcgaccctgaaagtacagatgacggctctctttcagaagagacccccgcgggccctccaacgtgctctgtgccgcctgccagtgccttgcctactcagcagtatgccaagtcccttcccgtgtcagttccagtctgggggtttaaagaaaagcggaccgaggcgaggtccagcgatgaagaaaacgggccgccgtcctcccctgatttagatcgcatcgcagcctctatgcgagctttagttctcagggaagccgaagacacacaggtgttcggggacctgcctagaccccggttgaacacctctgactttcagaagctgaagcggaagtattag

SEQ ID NO: 223822 - DNA, 831 bp, Artificial Sequence
  derived and/or modified sequence
atgagctttgaaggaggagatggagctggccctgccatgctggccaccggcacagccaggatggccagcggccggcctgaggagctgtgggaggccgtggtgggcgctgctgagcgcttccgggccaggactggaacagagctggtgctgctgacagctgcccctcctcctccacccaggcctggcccctgtgcctatgctgcccacggccgcggggccctggccgaggccgcccggcgctgcctgcatgacatcgccctggcccacagagctgccacagctgcccggcccccagcccctcctccagccccccagccccccagccccacccccagccccccccggcccaccctggccagagaagataatgaagaagatgaagatgagcccacagaaacagagaccagcggggagcagctgggcatcagtgacaatggaggcctgtttgtgatggatgaagatgccaccctgcaggacctgccccccttctgtgagagtgaccctgagagcacagatgatggcagcctgtctgaggagaccccagctggcccccccacctgcagcgtgcccccagccagcgccctgcccacccagcagtatgccaagagcctgcctgtgtctgtgcctgtgtggggcttcaaggagaagaggacagaggcccggagcagtgatgaggagaatggaccacccagcagcccagacctggacagaattgctgcctccatgagggccctggtgctgcgggaggccgaggacacccaggtgtttggagacctgccccggccccggctgaacaccagtgacttccagaagctgaagaggaagtactag

SEQ ID NO: 223823 - DNA, 623 bp, Artificial Sequence
  derived and/or modified sequence
aaaccacattcccaaaactttccgttgcaaatttccaaactttcccagtttctaccctcagcctttcaaagtcccgcccctcattccagttcccacacccagccttcttcaggtcccactgctgaccgccagaccaaactcctacagctgccgcctgcatcccagaccgcctgcatcccgctcggagcgggtccgagccctgctccctcccagcgcaccttttccacgacacggatgacaccagcgatgagagagtctcggtcctgatacttcttagcgctggtgtgcagggcgcggatggcgtcggggcgccccgaggagctgtgggaggccgtggtgggggccgctgagcgcttccgggcccggactggcacggagctggtgctgctgaccgcggccccgccgccaccaccccgcccgggcccctgtgcctatgctgcccatggtcgaggagccctggcggaggcagcgcgccgttgcctccacgacatcgcactggcccacagggctgccactgctgctcggcctcctgcgcccccaccagcaccacagccacccagtcccacacccagcccaccccggcctaccctggccagagaggacaacgaggaggacgaggatga

SEQ ID NO: 223824 - DNA, 2025 bp, Artificial Sequence
  derived and/or modified sequence
atttcctgttttcttcctagaccagtgggtcctccctggaccccgggcgaggttgggaggtctcggggcagctgagcgtggccccaggcgctcaccccatggctaccgcgttcatgctcaggttcctcacatcttggggtgtggggtactaaaatttcgacaggaggggtggttccacccctctcctccttagctcttttccctcctccctgcatccaaagaggacagccacatcgtgctccccctcctgtggggaacacgtctcactttcctctaatctctccctgatcttacacgaaactcgtctatcggggcgggttcttcctccatctctcagctccttggaggaaacaggacctcctctagaagctgaaggggcgcggatggcgtcggggcgccccgaggagctgtgggaggccgtggtgggggccgctgagcgcttccgggcccggactggcacggagctggtgctgctgaccgcggccccgccgccaccaccccgcccgggcccctgtgcctatgctgcccatggtcgaggagccctggcggaggcagcgcgccgttgcctccacgacatcgcactggcccacagggctgccactgctgctcggcctcctgcgcccccaccagcaccacagccacccagtcccacacccagcccaccccggcctaccctggccagagaggacaacgaggaggacgaggatgagcccacagagacagagacctccggggagcagctgggcattagtgataatggagggctctttgtgatggatgaggacgccaccctccaggaccttccccccttctgtgagtcagaccccgagagtacagatgatggcagcctgagcgaggagacccccgccggcccccccacctgctcagtgcccccagcctcagccctacccacacagcagtacgccaagtccctgcctgtgtctgtgcccgtctggggcttcaaggagaagaggacagaggcgcggtcatcagatgaggagaatgggccgccctcttcgcccgacctggaccgcatcgcggcgagcatgcgcgcgctggtgctgcgagaggccgaggacacccaggtcttcggggacctgccacggccgcggcttaacaccagcgacttccagaagctgaagcggaaatattgaagtccagggagggagcgccccgggccgcgtccgccccgtcccacactacgcccccgccccactcccggggcctgctaatctgaggccgatccgggaccggcctccttgcgtctcccattcccaagattgtcccgcctctgccaatccccgccgtccttccagcccacgacctgccgcgccgaggagcggcatctgtcccgtttcccgattgggtctgtcgtctctctccgcctagcgacagattccttctattaagggattggctcgctgagttctaagctctaaatgggtcaactcctttgttttccgcctagcgacaagggatttgctcgcacggcattggctccatcccctagtcgctggacagctctttttttgattggctcaaatcctgtaaagggcttgaccagtctctacatagtcaccgtccgcttttcctgagttctccctcccaattggctccagcttcctgggggcgtggccaagccctcctcttcccagaattggcccggggccttcaatttacgttctttacactacggggactggggtcgtctttgcccacgtcccgacaacttgttccctgaccccctcagggatggccccaaactgtccctgcctctggcaccccctttcattggttccatccatccccacaacagcctgccaatcgaagcccgtccctgcatccaggatggtaccagctcccgcccctcgccccccacctccacaggtgccttaaagggccctcgtccacccaaggtggggggcaggggccctcactctccggccctggtgtgggggagagagtgaggggttgggggatcggcagttgggaggggcgctctgagattaaagagttttacctctg

SEQ ID NO: 223825 - DNA, 1911 bp, Artificial Sequence
  derived and/or modified sequence
gggcgcgacagctggaagagccgaacggataagagaagaggaggtgagaggagctgtacaccacaagaggcactgagggactcaggataacgggatgaagccgtcagtgcccccagaaacgaagcggccccggacgaatttctgagtcaccgtcgcgagaaagcgggctgagccgccattttgaagcctggcaaaccgaagcaagaaatgctgccgtgttggatctttgccagccttcgtgccgaatgggagcagggcgcggatggcgtcggggcgccccgaggagctgtgggaggccgtggtgggggccgctgagcgcttccgggcccggactggcacggagctggtgctgctgaccgcggccccgccgccaccaccccgcccgggcccctgtgcctatgctgcccatggtcgaggagccctggcggaggcagcgcgccgttgcctccacgacatcgcactggcccacagggctgccactgctgctcggcctcctgcgcccccaccagcaccacagccacccagtcccacacccagcccaccccggcctaccctggccagagaggacaacgaggaggacgaggatgagcccacagagacagagacctccggggagcagctgggcattagtgataatggagggctctttgtgatggatgaggacgccaccctccaggaccttccccccttctgtgagtcagaccccgagagtacagatgatggcagcctgagcgaggagacccccgccggcccccccacctgctcagtgcccccagcctcagccctacccacacagcagtacgccaagtccctgcctgtgtctgtgcccgtctggggcttcaaggagaagaggacagaggcgcggtcatcagatgaggagaatgggccgccctcttcgcccgacctggaccgcatcgcggcgagcatgcgcgcgctggtgctgcgagaggccgaggacacccaggtcttcggggacctgccacggccgcggcttaacaccagcgacttccagaagctgaagcggaaatattgaagtccagggagggagcgccccgggccgcgtccgccccgtcccacactacgcccccgccccactcccggggcctgctaatctgaggccgatccgggaccggcctccttgcgtctcccattcccaagattgtcccgcctctgccaatccccgccgtccttccagcccacgacctgccgcgccgaggagcggcatctgtcccgtttcccgattgggtctgtcgtctctctccgcctagcgacagattccttctattaagggattggctcgctgagttctaagctctaaatgggtcaactcctttgttttccgcctagcgacaagggatttgctcgcacggcattggctccatcccctagtcgctggacagctctttttttgattggctcaaatcctgtaaagggcttgaccagtctctacatagtcaccgtccgcttttcctgagttctccctcccaattggctccagcttcctgggggcgtggccaagccctcctcttcccagaattggcccggggccttcaatttacgttctttacactacggggactggggtcgtctttgcccacgtcccgacaacttgttccctgaccccctcagggatggccccaaactgtccctgcctctggcaccccctttcattggttccatccatccccacaacagcctgccaatcgaagcccgtccctgcatccaggatggtaccagctcccgcccctcgccccccacctccacaggtgccttaaagggccctcgtccacccaaggtggggggcaggggccctcactctccggccctggtgtgggggagagagtgaggggttgggggatcggcagttgggaggggcgctctgagattaaagagttttacctctgagataaa

SEQ ID NO: 223826 - DNA, 3640 bp, Artificial Sequence
  derived and/or modified sequence
ctggattagaatatctgccctcctaaaggcaggcaggatggcggtcaggatttagaacaggccccggatctagactttctgagtccaggtcccagccctgcctcttccagttgtggcccttcaagatgctgactgcccctgggcctgagtttgcaactgtaaaatggggtgaactgtaactaaagctcctgtctcatagtgtaggtgaaagggtgggatgagaaggttgatcccatcttgggtccttgcgtggcttctgggaggtggtggataaacctcttccttcccttggggctttgaactccctgagtgagtcagataggtgagatgccaggtgtggaatcccagcactgaataggtgctcagcaaacaccaacatcaatgatcgtgagtcataaaaggcctgcaaatttcattcagactccagactccctgctcccttcaccctggtgggctggaccacagctgtgcctgaatccgtgcagtggcggtgtgcttactgcctcccggaagagcgtcttccgcagcccagcagctctggctcaaccacgctggttaatggggaagaaaatgaggcacagagagggccagtgagccatctaaggtcacacagcaggtttgagacagagtcagggcaaggacccagcccccctgccctcgctcttctcacccagtaaggagacgcaccctgcattgtctgcttagggccgacctgtcctgcaaacacaaatccctgaccttgggggaattcacagtctgatgcaggaggcagccaggttacagctgtcacaagctcaggtgacatgaatgctcatggaggaagcccagggcatcggatgggctcctgaagtcatctgatgcaccctgggggatcagggacaacagaggacctgccagaacagtcttgtaggaaaagccgtgtggatttcccagcacagagagcagcgccagcaccatttcagccccgactctctgaggcctcagtcatagaaccagccagttccctctggaaggaagtgtgctgggaaggtggccactcagacagtgtgggaccccctatggagcagactggctggatctatgggcgagggaaagtttcttccaccctaggatgagtgaaaggttggtggggaatggagcacaagtcatcaaggtcagggaccacgttttctgaaggcctcgggcctcagaggctctggaaggccgtggaggcaggatggcccaggagctggggatggccagaacacctagagcctccagggcctgccctgaggactatggcgaggagtagcatcagctccgggtgctgaaggaaccccctgggccttgtgcaggacactcttgacgggatggctgggcgacggagcagggtggcatcatccatcaaattcaacacaagccccacgtggaattctaaattttctagacaccatgttaaaagagtaaaaaaagcagatgaaattcctttttttttttttttttgcccaggctggcttcgaactcttgggctcggtgatccgcctgcctcggcctcccaaagtgctggggttgcaggcctgagccaccacgcccggctcgttcggctttattgtactcagtcttcagaacccagtgcaggttttattgttagaggcctctctgctaggactctctgctaggactccctgcctttccagtactccctgttcacatgtggctggcggctcccacagaggccagggcagggccaaaggggaaggagtacagtgacttggggcaggaggaatgggttggggcagaggacgtcgccagggtctgggcctgcgaggactggatggtgagaatcctggggagtagcaggtttggggaggacacacagcaccgctgggacaaggtgggtggagggtggtgagtgccatccaggggacgggcgggcactctgagtgggtggcgatgatgtaggccgccaagcctcagccccctctgtcctgctctggcccgcagggcgcggatggcgtcggggcgccccgaggagctgtgggaggccgtggtgggggccgctgagcgcttccgggcccggactggcacggagctggtgctgctgaccgcggccccgccgccaccaccccgcccgggcccctgtgcctatgctgcccatggtcgaggagccctggcggaggcagcgcgccgttgcctccacgacatcgcactggcccacagggctgccactgctgctcggcctcctgcgcccccaccagcaccacagccacccagtcccacacccagcccaccccggcctaccctggccagagaggacaacgaggaggacgaggatgagcccacagagacagagacctccggggagcagctgggcattagtgataatggagggctctttgtgatggatgaggacgccaccctccaggaccttccccccttctgtgagtcagaccccgagagtacagatgatggcagcctgagcgaggagacccccgccggcccccccacctgctcagtgcccccagcctcagccctacccacacagcagtacgccaagtccctgcctgtgtctgtgcccgtctggggcttcaaggagaagaggacagaggcgcggtcatcagatgaggagaatgggccgccctcttcgcccgacctggaccgcatcgcggcgagcatgcgcgcgctggtgctgcgagaggccgaggacacccaggtcttcggggacctgccacggccgcggcttaacaccagcgacttccagaagctgaagcggaaatattgaagtccagggagggagcgccccgggccgcgtccgccccgtcccacactacgcccccgccccactcccggggcctgctaatctgaggccgatccgggaccggcctccttgcgtctcccattcccaagattgtcccgcctctgccaatccccgccgtccttccagcccacgacctgccgcgccgaggagcggcatctgtcccgtttcccgattgggtctgtcgtctctctccgcctagcgacagattccttctattaagggattggctcgctgagttctaagctctaaatgggtcaactcctttgttttccgcctagcgacaagggatttgctcgcacggcattggctccatcccctagtcgctggacagctctttttttgattggctcaaatcctgtaaagggcttgaccagtctctacatagtcaccgtccgcttttcctgagttctccctcccaattggctccagcttcctgggggcgtggccaagccctcctcttcccagaattggcccggggccttcaatttacgttctttacactacggggactggggtcgtctttgcccacgtcccgacaacttgttccctgaccccctcagggatggccccaaactgtccctgcctctggcaccccctttcattggttccatccatccccacaacagcctgccaatcgaagcccgtccctgcatccaggatggtaccagctcccgcccctcgccccccacctccacaggtgccttaaagggccctcgtccacccaaggtggggggcaggggccctcactctccggccctggtgtgggggagagagtgaggggttgggggatcggcagttgggaggggcgctctgagattaaagagttttacctctgagataaat

SEQ ID NO: 223827 - DNA, 2370 bp, Artificial Sequence
  derived and/or modified sequence
agctaaggccatgttaatacggggctgtcccatctctctgcggggcgcgacagctggaagagccgaacggataagagaagaggaggtgagaggagctgtacaccacaagaggcactgagggactcaggataacgggatgaagccgtcagtgcccccagaaacgaagcggccccggacgaatttctgagtcaccgtcgcgagaaagcgggctgagccgccattttgaagcctggcaaaccgaagcaagaaatgctgccgtgttggatctttgccagccttcgtgccgaatgggagcaggttggagggagggagagccaatatacactatgggctgattaagcccggttggctgccatgttgttaacgagcaccgatttcctctacttttgtcgaagaagtttattgtgggtcagggacgtcaggtcgcttgccttcgtttactgtggtcatgattgagcatatgaggacggccattattgttgggggcaaatggaaatgctctaggcggggccatttttcttaggggcaagctgtcgtcacccttgtcaactggttcggatgaagcccctgtggccgccatcttgatctcgggcggccccgataagggaggcggagtgtgcggagaggaggcggggcaactgcgcggacgtgacgcaaggcgccgccatgtcttttgagggcggtgacggcgccgggccggccatgctggctacgggcacggcgcggatggcgtcggggcgccccgaggagctgtgggaggccgtggtgggggccgctgagcgcttccgggcccggactggcacggagctggtgctgctgaccgcggccccgccgccaccaccccgcccgggcccctgtgcctatgctgcccatggtcgaggagccctggcggaggcagcgcgccgttgcctccacgacatcgcactggcccacagggctgccactgctgctcggcctcctgcgcccccaccagcaccacagccacccagtcccacacccagcccaccccggcctaccctggccagagaggacaacgaggaggacgaggatgagcccacagagacagagacctccggggagcagctgggcattagtgataatggagggctctttgtgatggatgaggacgccaccctccaggaccttccccccttctgtgagtcagaccccgagagtacagatgatggcagcctgagcgaggagacccccgccggcccccccacctgctcagtgcccccagcctcagccctacccacacagcagtacgccaagtccctgcctgtgtctgtgcccgtctggggcttcaaggagaagaggacagaggcgcggtcatcagatgaggagaatgggccgccctcttcgcccgacctggaccgcatcgcggcgagcatgcgcgcgctggtgctgcgagaggccgaggacacccaggtcttcggggacctgccacggccgcggcttaacaccagcgacttccagaagctgaagcggaaatattgaagtccagggagggagcgccccgggccgcgtccgccccgtcccacactacgcccccgccccactcccggggcctgctaatctgaggccgatccgggaccggcctccttgcgtctcccattcccaagattgtcccgcctctgccaatccccgccgtccttccagcccacgacctgccgcgccgaggagcggcatctgtcccgtttcccgattgggtctgtcgtctctctccgcctagcgacagattccttctattaagggattggctcgctgagttctaagctctaaatgggtcaactcctttgttttccgcctagcgacaagggatttgctcgcacggcattggctccatcccctagtcgctggacagctctttttttgattggctcaaatcctgtaaagggcttgaccagtctctacatagtcaccgtccgcttttcctgagttctccctcccaattggctccagcttcctgggggcgtggccaagccctcctcttcccagaattggcccggggccttcaatttacgttctttacactacggggactggggtcgtctttgcccacgtcccgacaacttgttccctgaccccctcagggatggccccaaactgtccctgcctctggcaccccctttcattggttccatccatccccacaacagcctgccaatcgaagcccgtccctgcatccaggatggtaccagctcccgcccctcgccccccacctccacaggtgccttaaagggccctcgtccacccaaggtggggggcaggggccctcactctccggccctggtgtgggggagagagtgaggggttgggggatcggcagttgggaggggcgctctgagattaaagagttttacctctgag

SEQ ID NO: 223828 - DNA, 3075 bp, Artificial Sequence
  derived and/or modified sequence
attgccccgggaccaaggcggggagaatggtccagcccgcgttcggatgctgacgtgcgttccacagggggcagggctcaaggagtcgcctgagccgggggggcggggccatgggaggttcttccctggggcggtggacgggagggtgacggcgcgtttataagagatcggtgtttgccaaggccgtgccggattctcgagagccaaggcctgagagaagagctgatcactagacggggcgtttcgcatacactgaagcgagggaatgcgtcctcagtgcttaccctgtagccggctccttccatagtcgccgccgaaggccccactgccccgcctcctccttttcctagtcagcgtgttgtcacttccggagaaaacagttcccctccgggccggacagtggtagcggcccgacccgttctagagaaggagcgggtgaaaccatttttcagaagggggttattccactggaacctcgagggtggatcggagtcacgtggcgcagacgctgaaggtggatccggctacggagagtgcgcaggcgcagtgttcgccctctcgccacgaagtaaacaagtgggagggtctgagagctgcaccacctggggcaagcacgccttgaaacgcccacttccttctccatattgtatactggaattgaagccaaggaggtaccattttgctcgagggcatggcctaagccggtcagctaaggccatgttaatacggggctgtcccatctctctgcggggcgcgacagctggaagagccgaacggataagagaagaggaggtgagaggagctgtacaccacaagaggcactgagggactcaggataacgggatgaagccgtcagtgcccccagaaacgaagcggccccggacgaatttctgagtcaccgtcgcgagaaagcgggctgagccgccattttgaagcctggcaaaccgaagcaagaaatgctgccgtgttggatctttgccagccttcgtgccgaatgggagcaggttggagggagggagagccaatatacactatgggctgattaagcccggttggctgccatgttgttaacgagcaccgatttcctctacttttgtcgaagaagtttattgtgggtcagggacgtcaggtcgcttgccttcgtttactgtggtcatgattgagcatatgaggacggccattattgttgggggcaaatggaaatgctctaggcggggccatttttcttaggggcaagctgtcgtcacccttgtcaactggttcggatgaagcccctgtggccgccatcttgatctcgggcggccccgataagggaggcggagtgtgcggagaggaggcggggcaactgcgcggacgtgacgcaaggcgccgccatgtcttttgagggcggtgacggcgccgggccggccatgctggctacgggcacggcgcggatggcgtcggggcgccccgaggagctgtgggaggccgtggtgggggccgctgagcgcttccgggcccggactggcacggagctggtgctgctgaccgcggccccgccgccaccaccccgcccgggcccctgtgcctatgctgcccatggtcgaggagccctggcggaggcagcgcgccgttgcctccacgacatcgcactggcccacagggctgccactgctgctcggcctcctgcgcccccaccagcaccacagccacccagtcccacacccagcccaccccggcctaccctggccagagaggacaacgaggaggacgaggatgagcccacagagacagagacctccggggagcagctgggcattagtgataatggagggctctttgtgatggatgaggacgccaccctccaggaccttccccccttctgtgagtcagaccccgagagtacagatgatggcagcctgagcgaggagacccccgccggcccccccacctgctcagtgcccccagcctcagccctacccacacagcagtacgccaagtccctgcctgtgtctgtgcccgtctggggcttcaaggagaagaggacagaggcgcggtcatcagatgaggagaatgggccgccctcttcgcccgacctggaccgcatcgcggcgagcatgcgcgcgctggtgctgcgagaggccgaggacacccaggtcttcggggacctgccacggccgcggcttaacaccagcgacttccagaagctgaagcggaaatattgaagtccagggagggagcgccccgggccgcgtccgccccgtcccacactacgcccccgccccactcccggggcctgctaatctgaggccgatccgggaccggcctccttgcgtctcccattcccaagattgtcccgcctctgccaatccccgccgtccttccagcccacgacctgccgcgccgaggagcggcatctgtcccgtttcccgattgggtctgtcgtctctctccgcctagcgacagattccttctattaagggattggctcgctgagttctaagctctaaatgggtcaactcctttgttttccgcctagcgacaagggatttgctcgcacggcattggctccatcccctagtcgctggacagctctttttttgattggctcaaatcctgtaaagggcttgaccagtctctacatagtcaccgtccgcttttcctgagttctccctcccaattggctccagcttcctgggggcgtggccaagccctcctcttcccagaattggcccggggccttcaatttacgttctttacactacggggactggggtcgtctttgcccacgtcccgacaacttgttccctgaccccctcagggatggccccaaactgtccctgcctctggcaccccctttcattggttccatccatccccacaacagcctgccaatcgaagcccgtccctgcatccaggatggtaccagctcccgcccctcgccccccacctccacaggtgccttaaagggccctcgtccacccaaggtggggggcaggggccctcactctccggccctggtgtgggggagagagtgaggggttgggggatcggcagttgggaggggcgctctgagattaaagagttttacctctg

SEQ ID NO: 223829 - DNA, 831 bp, Artificial Sequence
  derived and/or modified sequence
atgagcttcgagggcggcgacggcgccggccccgccatgctggccactggcactgctcgaatggcaagcggtcggcctgaggagctttgggaagccgtcgtgggagctgccgagaggttccgagcaaggactggcaccgaactggtactgctcacggctgcaccgcctccccctccccgtccagggccttgcgcctatgcagcccatgggcggggggctctggccgaagcagctagaaggtgtttacacgatatagcattggcacatcgagctgctacagctgcccgcccccccgccccccccccagcaccgcaaccgccctctccaacgccctcaccaccccgcccaacactggcccgggaagacaacgaggaagacgaagatgaacctaccgagacagaaactagcggcgagcaactcggaatcagcgataatggtgggctgtttgtcatggacgaggatgcaaccctgcaggatcttccacccttttgcgagagcgacccggagagtaccgatgacggttctctgtcagaggagacgccagccggtcccccaacttgcagcgtacctcctgcttcagccctgcccactcaacagtatgccaagtctctgccagtctccgtgcctgtctggggattcaaagagaagcggacagaagctcgctcttccgatgaggagaatggccctccctccagtcctgacctcgataggatcgctgcatctatgcgggccctggtcctccgcgaggcggaggacacccaggtcttcggtgatctgcctagaccccggctgaacacgagtgattttcagaagctcaagagaaagtattag

SEQ ID NO: 223830 - DNA, 831 bp, Artificial Sequence
  derived and/or modified sequence
atgtccttcgaaggcggtgatggggcaggaccggcaatgctggcaaccggcaccgctaggatggcctccggaaggcctgaggaactgtgggaggcagtcgtgggggctgcagaaagatttcgtgccaggactggcacagagttagtgctacttaccgccgcaccccctcctcctcccagaccaggcccttgtgcttatgctgcacatggcaggggagcccttgccgaagccgctcggaggtgcctacatgatatcgctctcgcacacagagccgcaacagccgctcggcctccagcaccgccacccgctccccagcccccaagtcctactccctctcctccgagacccaccttggctcgagaagacaacgaagaagacgaagacgagcccaccgaaacagaaactagcggcgaacagctcggcataagcgataacggaggcctctttgtcatggacgaggatgccactctgcaggacctccctccgttctgtgagtcagatcctgagtctactgatgatggaagtctatcagaagaaacacccgcaggcccaccaacgtgctccgtgccgcctgcgtccgctctccccacgcagcagtacgctaagtccctccctgtaagtgttcccgtgtggggattcaaggagaaaagaaccgaggctcggtccagtgacgaggagaatggcccaccctccagtcccgatctggaccgaattgctgccagcatgcgcgctctggttttgagggaggcggaagacacccaagtgttcggtgacctccctaggccacggttgaacacctctgacttccagaaactcaagagaaaatactag

SEQ ID NO: 223831 - protein, 83 aa, Artificial Sequence
  derived and/or modified sequence
MGRRKSKRKPPPKKKMTGTLETQFTCPFCNHEKSCDVKMDRARNTGVISCTVCLEEFQTPITYLSEPVDVYSDWIDACEAANQ

SEQ ID NO: 223832 - DNA, 252 bp, Artificial Sequence
  derived and/or modified sequence
atggggagacgtaagtcaaagcgcaaacctccgccaaagaaaaagatgacaggcaccttggaaactcagtttacttgccctttttgtaaccatgaaaaatcatgtgatgtcaagatggaccgagcccggaatacaggcgtgatcagttgtaccgtttgcctggaagagtttcagactcctatcacatacctgagcgagccagtggatgtgtattccgactggatagacgcgtgtgaggcggcaaatcagtag

SEQ ID NO: 223833 - DNA, 252 bp, Artificial Sequence
  derived and/or modified sequence
atgggccgcaggaagagcaagaggaagcccccacccaagaagaagatgacaggcaccctggagacccagttcacctgccccttctgcaaccacgagaagagctgtgatgtgaagatggaccgggccagaaatactggagtcatcagctgcaccgtgtgcctggaggagttccagacccccatcacctacctgtctgagcctgtggatgtgtacagcgactggattgatgcctgtgaggccgccaaccagtag

SEQ ID NO: 223834 - DNA, 252 bp, Artificial Sequence
  derived and/or modified sequence
atgggccggcggaagagcaagcggaagcccccccccaagaagaagatgaccggaaccctcgagactcagttcacgtgccctttttgcaaccacgagaagagttgcgacgtgaaaatggaccgtgctagaaatacaggggttatttcttgcactgtctgcttagaagagttccagactcctattacatatttatccgaacccgtggacgtgtacagcgactggattgatgcgtgtgaagctgcaaaccagtag

SEQ ID NO: 223835 - DNA, 252 bp, Artificial Sequence
  derived and/or modified sequence
atgggacggagaaagtccaaacgaaagcctccacctaagaaaaaaatgaccgggacgctggaaacacagttcacttgccccttctgcaaccacgagaagagctgcgacgtgaaaatggacagggccaggaacacaggcgtgatctcctgcacagtttgccttgaggagttccaaacccccataacctacctgagcgagcctgtggatgtctattccgactggatcgacgcctgtgaagctgccaatcagtag

SEQ ID NO: 223836 - DNA, 1019 bp, Artificial Sequence
  derived and/or modified sequence
gaagtcactatctcccgggtgaacggagctttcgcagctggagaaggctcatccacctgcagacatggggcgcagaaagtcaaaacgaaagccgcctcccaagaagaagatgacaggcaccctcgagacccagttcacctgccccttctgcaaccacgagaaatcctgtgatgtgaaaatggaccgtgcccgcaacaccggagtcatctcttgtaccgtgtgcctagaggaattccagacgcccataacgtatctgtcagaacccgtggatgtgtacagtgattggatagacgcctgcgaggcggccaatcagtagcgacacagaggacccgccccctgagcagccccgcgtactgtggatccagctgttcggttctggtccagagacattccaggggtccagggtgtgggtcctgggctgtcacagccgtgtgtgtgtgtgtgtgtgtgtgtgtgtgtgtgtgtgtgtgtgtgtgtgtagtgggtgtgcgtgtgggtgtgggtgtgagtgagtgtgggtgtgtgtggctgcacgtgtcactggggtggccgtgagtgtgtgctcacaggtacgcggtggtgtcgggttcctgggcctgaggggcctgaactgatctcacttggctccgaaagcctttgctgtgttccctgcagcccctggccccccagccttggggctctggctccccccggcggaattgggggactgtttcctgacatcctggacaagggaagcccactagaggctggaacaggacctctccagcctcctcaccagcaccgtgcccatctcaactggacttcccgctctccttctccaccttctagtgcccgtggccggggattcaaagccgccgttccccaggtccctgggctgggccctgacagggagccgcccccctccccatggtaaccaggaagcccgtttcatgttcagttgcttttgtagaggaagcaagggctgggatggggacagctgtcaatcacaagcccttaaataaagcagccagcgcacatcc

SEQ ID NO: 223837 - DNA, 252 bp, Artificial Sequence
  derived and/or modified sequence
atgggcagaagaaagagcaagagaaagcccccccccaagaagaagatgaccggcaccctggagacccagttcacctgccccttctgcaaccacgagaagagctgcgacgtgaagatggacagagccagaaacaccggcgtgatcagctgcaccgtgtgcctggaggagttccagacccccatcacctacctgagcgagcccgtggacgtgtacagcgactggatcgacgcctgcgaggccgccaaccagtag

SEQ ID NO: 223838 - protein, 612 aa, Artificial Sequence
  derived and/or modified sequence
MATAATIPSVATATAAALGEVEDEGLLASLFRDRFPEAQWRERPDVGRYLRELSGSGLERLRREPERLAEERAQLLQQTRDLAFANYKTFIRGAECTERIHRLFGDVEASLGRLLDRLPSFQQSCRNFVKEAEEISSNRRMNSLTLNRHTEILEILEIPQLMDTCVRNSYYEEALELAAYVRRLERKYSSIPVIQGIVNEVRQSMQLMLSQLIQQLRTNIQLPACLRVIGYLRRMDVFTEAELRVKFLQARDAWLRSILTAIPNDDPYFHITKTIEASRVHLFDIITQYRAIFSDEDPLLPPAMGEHTVNESAIFHGWVLQKVSQFLQVLETDLYRGIGGHLDSLLGQCMYFGLSFSRVGADFRGQLAPVFQRVAISTFQKAIQETVEKFQEEMNSYMLISAPAILGTSNMPAAVPATQPGTLQPPMVLLDFPPLACFLNNILVAFNDLRLCCPVALAQDVTGALEDALAKVTKIILAFHRAEEAAFSSGEQELFVQFCTVFLEDLVPYLNRCLQVLFPPAQIAQTLGIPPTQLSKYGNLGHVNIGAIQEPLAFILPKRETLFTLDDQALGPELTAPAPEPPAEEPRLEPAGPACPEGGRAETQAEPPSVGP

SEQ ID NO: 223839 - DNA, 1839 bp, Artificial Sequence
  derived and/or modified sequence
atggcaactgctgctacgattcctagcgtggctactgccaccgctgcggcactgggggaggtcgaggacgaggggctcttagctagtctgttcagggataggtttcccgaggcacaatggcgagaacgacccgatgtgggccggtacttacgcgagctttctggcagcgggctcgaaaggcttagacgtgaaccggaacggctggcggaggagagggcccaactgcttcagcaaacccgggatctggctttcgcaaattataaaacatttattaggggtgccgaatgcaccgaacggattcataggctgtttggcgatgtggaagccagtctggggaggctgctcgacagactgccttcttttcagcagtcctgcagaaatttcgtcaaggaggctgaggagatttcatccaatcgccgcatgaacagcctgacactgaatcgtcatacagaaatcctcgagatcctggaaattccccagctgatggatacctgtgtgcgcaatagctattacgaagaggccctcgaactagcagcctatgttcgaaggcttgaacggaaatattcttccattcctgtaattcagggaattgtaaatgaagtgaggcaatctatgcagcttatgttgtcacagctcatacaacaactacgaacgaatatccagctacccgcttgcctgcgggtgattggctatctgcggcgtatggatgtgttcactgaggccgagctgcgggtgaagtttctgcaggcaagagatgcatggctgcggagcatcctcacagccattccgaatgacgacccatattttcatattaccaagactatagaggcctctagagtgcacctcttcgatattattacgcagtatagggccattttctcagatgaggaccccctgcttccacctgcgatgggagagcacactgtgaatgagtctgccatttttcacggatgggtcctacagaaagtatcccagtttcttcaggtgctggaaaccgatctctatcgcggaattgggggccacctggacagcttattagggcaatgcatgtactttggactgtccttctcacgagtcggggctgacttccgtgggcagctggctccagtctttcaaagagtggccatttcaacattccagaaagccatacaagagaccgtggagaagtttcaagaagagatgaactcttatatgctgatctctgcacctgccattcttggcacttctaacatgccggcagccgtgccagccactcaaccaggtaccctacagcctccgatggtgctcctggattttccgcccctggcttgcttcctgaataatattctggtggccttcaatgatcttcggctatgttgtccagtggccctggcccaagacgtgactggtgctctggaggacgccctcgctaaagtgacaaagatcatattggctttccaccgcgctgaggaggccgccttctcttctggtgagcaggaattgtttgttcagttttgtactgtgttcctggaagatctggttccctatcttaacagatgcctgcaagtcctgtttcctccagcccagatcgcacagactctgggcatcccccctacgcagctcagcaagtatgggaacctaggccacgtaaacatcggagcgatccaagagcctctcgcattcattctgcccaaaagggagaccctcttcaccttggatgaccaggctttgggtcctgaattaactgctcctgccccagaaccacccgccgaggaacctcggcttgaaccagcaggacctgcctgccccgagggcggtcgtgccgagactcaggctgaacctcccagtgtaggcccctag

SEQ ID NO: 223840 - DNA, 1839 bp, Artificial Sequence
  derived and/or modified sequence
atggccacagctgccaccatccccagcgtggccacagccacagctgctgccctgggggaggtggaggatgagggcctgctggccagcctcttccgggaccgcttccctgaggcccagtggagggagaggccagatgtgggccgctacctgcgggagctgagcggcagcggcctggagcggctgcggcgggagcctgagcggctggccgaggagcgggcccagctgctgcagcagacccgggacctggcctttgccaactacaagaccttcatcagaggagcagaatgtacagagcgcatccaccggctgtttggagatgtggaggccagcctgggccgcctgctggaccggctgcccagcttccagcagagctgcaggaactttgtgaaggaggccgaggagatcagcagcaacagaaggatgaacagcctgaccctgaacagacacacagagatcctggagatcctggagatcccccagctgatggacacctgtgtgagaaattcctactatgaggaggccctggagctggccgcctacgtgcggcggctggagaggaagtacagcagcatccctgtgatccagggcatcgtgaatgaggtgcggcagagcatgcagctgatgctgagccagctgatccagcagctgcggaccaacatccagctgcctgcctgcctgcgggtgattggctacctgcggaggatggatgtgttcacagaagctgagctgcgggtgaagttcctgcaggccagagatgcctggctgcggagcatcctgacagccatccccaatgatgacccctacttccacatcaccaagaccatcgaggccagccgggtgcacctgtttgacatcatcacccagtaccgggccatcttcagtgatgaggaccccctgctgcccccagccatgggagagcacacagtgaatgaaagtgccatcttccacggctgggtgctgcagaaggtgtcccagttcctgcaggtgctggagacagacctgtaccggggcatcggcggccacctggacagcctgctgggccagtgcatgtacttcggcctgtccttcagccgggtgggcgctgacttccggggccagctggcccctgtgttccagagggtggccatcagcaccttccagaaggccatccaggagaccgtggagaagttccaggaggagatgaacagctacatgctgatcagcgccccagccatcctgggcaccagcaacatgcctgctgctgtgcctgccacccagcccggcaccctgcagccccccatggtgctgctggacttcccccccctggcctgcttcctgaacaacatcctggtggccttcaatgacctgcggctgtgctgccctgtggccctggcccaggatgtgactggagccctggaggatgccctggccaaggtgaccaagatcatcctggccttccacagagctgaggaggccgccttcagcagtggagagcaggagctgtttgtgcagttctgcaccgtcttcctggaggacctggtgccctacctgaaccgctgcctgcaggtgctcttccccccagcccagatcgcccagaccctgggcatcccccccacccagctgagcaaatatggcaacctgggccacgtgaacattggagccatccaggagcccctggccttcatcctgcccaagcgggagaccctcttcaccctggatgaccaggccctgggccctgagctgacagccccagcccctgagcccccagctgaggagccccggctggagcctgctggccctgcctgcccagagggcggccgggcagagacccaggccgagcccccatctgtgggcccctag

SEQ ID NO: 223841 - DNA, 1839 bp, Artificial Sequence
  derived and/or modified sequence
atggccaccgccgccaccatccccagcgtggccaccgccaccgccgccgccctaggggaggtggaggacgaaggactcctggcgagcctttttcgggaccggttcccagaggcccagtggcgggaaagacctgacgtgggccggtatcttagggagctcagtgggagtggcctagagagactgaggagggagccagagcgcctggccgaagagcgcgctcagctgctgcagcagaccagggacctcgcctttgccaactacaagacgttcatcagaggggccgagtgcacagaaaggatccaccgcctctttggcgatgtcgaggcgagcctgggcaggttactcgataggctgccctcctttcaacagagctgcaggaattttgtaaaagaagccgaggaaatatctagtaatcggcgcatgaactcactcaccctcaaccggcatactgaaatcctggaaatcttggagatacctcagctgatggacacctgtgtgaggaactcctattacgaggaagctctggaactggctgcttacgtcaggcgcctcgaacggaaatacagctctatcccagtgattcagggcatcgtgaatgaagtgcgccagtccatgcagctgatgctctcccagctcattcagcagcttaggaccaacattcagctcccagcctgccttagggtaatcggttacctcaggcgcatggacgtatttacggaagccgagttgagagtgaaatttttgcaggcgcgcgatgcatggcttcgatctatactgaccgctatacctaacgatgacccatactttcatattacaaagaccattgaagcttccagggtccacctgtttgatatcataacccagtaccgtgccattttttccgacgaggatcccctattgccacccgctatgggtgagcacaccgttaacgagagtgccatattccatggctgggtcctgcagaaagtgtctcaattcctccaggtgctggaaacagacctctacaggggtattggtggccaccttgacagcctgcttggtcagtgcatgtactttggactaagcttcagtcgcgtaggcgctgactttaggggacagcttgcccccgtctttcaacgagttgctatctccactttccagaaagcaatccaggagaccgttgagaagttccaggaagagatgaatagctacatgttaatctccgctccagccatcctgggtaccagcaacatgcctgctgcggtacccgctacccagcctggcaccttgcaacccccgatggtgttgctagactttccccccttggcctgcttcttgaacaacatactggttgcattcaatgatttgcgtctctgttgccctgtggcactggcccaagacgttactggcgccctggaagacgccctggctaaggtgacaaaaatcattctggcttttcaccgggcggaagaggccgcttttagttccggcgaacaggagttgttcgtgcaattttgcacagttttcctggaggatctcgtgccgtacctgaatcggtgccttcaggtgctgtttccccccgctcagatcgcccaaactcttgggatccctcctacgcagctgtcaaagtacggtaacctgggccacgtgaatatcggggccattcaggagcctctcgccttcattctgcccaaaagggaaactctatttaccctggatgatcaagcccttggcccagagctcactgccccagcccccgaaccccctgccgaggaacctagacttgaacctgccggacccgcatgccccgaagggggtcgggccgaaacccaggccgaacctccatccgtcggaccttag

SEQ ID NO: 223842 - DNA, 1839 bp, Artificial Sequence
  derived and/or modified sequence
atggctaccgccgcaaccatcccttcggtggctaccgccacggcagcggctttaggcgaagtcgaggacgaaggtctcctggcctcattatttcgtgacagattccccgaggcccagtggcgcgagcgtcccgatgtgggccgatacctgcgtgaactgagcggctccgggctggagagactgcggcgagaaccagaacggttagccgaggaacgcgcacagctgctgcagcagactcgcgatctggcattcgccaattacaagacttttatccggggagccgagtgtaccgagaggattcaccggctgtttggtgacgtcgaagcctcactaggacgcctccttgaccgcctcccatcatttcagcagagctgccggaactttgtgaaggaagccgaggagattagctccaaccggcgaatgaacagtctgaccttaaaccggcacactgagatccttgagatactggagatcccgcagcttatggacacttgtgtgaggaacagctactatgaagaggctctggaattagccgcttatgtccggcgacttgaacgcaaatactcttcaatccccgtaattcaggggatcgtaaatgaagtccgccagagcatgcagctaatgctttcccaattgatccagcaacttcgtaccaatatccagcttcccgcatgcttgcgggtgattggttacctcaggagaatggacgtgttcaccgaggctgaactcagggtgaaatttctgcaggcgcgagacgcatggcttaggagtatattgaccgccatccccaacgacgacccttacttccatatcacaaaaacaatcgaagccagtcgggtgcatctctttgacatcattacccagtacagagccattttctccgacgaagaccctctgcttccccctgcgatgggggaacacaccgtcaacgagagcgcaatcttccacgggtgggttctacagaaagtatctcagttcctccaggtgctggagacagatttgtatcgaggcatcggaggacatttagattcgctgctaggccagtgtatgtactttggattgtcattctccagagtaggggcagatttccgcggacaactcgcccctgtgtttcagcgcgttgctattagcacctttcagaaagccatacaggagacggtggagaaatttcaggaagaaatgaattcatatatgctcatcagtgctcctgcaattttaggaacctcaaatatgccagcagcagtgcccgcaactcagccgggtacgcttcagcctcccatggtgctgttagactttccacctctcgcatgcttcctcaacaatatcctggtggctttcaacgacctgcggctgtgctgccccgtggcactggcacaggacgtgaccggagccctggaggacgcacttgcaaaggttactaagataatactggcttttcatcgcgctgaagaagccgcattctctagtggcgagcaggagctttttgtacaattttgcaccgtgtttcttgaggaccttgtgccatatctgaatcggtgtcttcaagtgctgttcccacccgctcagatcgcccagacattgggcatcccaccgacacagctgtccaaatatggcaacctgggccacgtcaatatcggcgctatccaagagcctctggctttcatactcccgaaacgtgagactctgtttacgttggatgaccaggcattgggaccagagttgacagctcccgctcccgagccgccagccgaagagccacgccttgagcccgctggacctgcatgccctgaaggcggacgggcagaaacccaagcagagccgccatcagtgggaccatag

SEQ ID NO: 223843 - DNA, 4190 bp, Artificial Sequence
  derived and/or modified sequence
aagttcggagtcagcgccccttgtggtccggaagggaagtgacgttgttgctgggaagatggcgaccgcggcgactatcccatcggtagccacggccacagcagcggctctcggcgaggtggaggatgaagggctcctggcgtcgctgttccgggaccgcttccccgaggcccagtggcgcgagcggcccgatgtgggccgctacctccgggagttgagcggctcggggctggagcggctgcggcgcgagcccgagcgcctggcggaggagcgggcgcagctgctgcagcagacgcgcgacttggccttcgctaactacaagaccttcatccgcggcgccgagtgcaccgagcgcatccaccgcctgtttggcgacgtggaggcgtcgctcggccgcctgctcgaccgtttgcccagcttccagcagagctgcaggaactttgtgaaggaagccgaggagatcagctccaaccgccggatgaatagcctgaccctaaaccggcacacagaaattttggaaatactggagattcctcagctcatggacacctgtgtccggaacagttattatgaagaggccctggagcttgcagcctacgtacgccgactggagaggaaatactcttccatccctgtcatccagggcatcgtgaacgaagtgcgccagtccatgcagctgatgctgagccagctgatccagcaactgaggaccaacatccagcttcctgcctgcctccgtgtcattggctacctgcggcgcatggacgtcttcactgaggctgagttgagggtgaagtttcttcaggcccgagatgcttggctccggtccatcctgactgccattcctaatgatgatccctatttccatattacaaaaaccatcgaggcctcccgtgtccatctctttgatatcatcacccagtaccgtgccatcttctcagacgaggacccactgctgccccctgccatgggtgagcacactgtgaatgagagtgccatcttccatggctgggtgctacagaaggtctcacaattcctgcaggtgctggagaccgacctttaccggggcataggcggccacctggactctctgctgggccagtgcatgtactttgggctgtccttcagccgggtgggagctgatttccggggtcagttggctcctgttttccagcgggtggccatcagcactttccagaaagcaattcaggaaacagtggagaaattccaggaagaaatgaactcctacatgctcatctcggctccagccatcctgggcaccagtaacatgcctgctgctgtgccagccacccagccggggacgctgcagccacccatggtgctcctagatttcccacccctcgcctgctttctcaacaatattctggttgccttcaatgatctgcgcctctgctgccctgtggccctggcgcaggatgtgactggggccttggaagatgcccttgccaaggtaactaaaataatcctggccttccatcgcgctgaagaggctgccttcagcagcggggagcaagagctctttgtccagttctgcactgtcttcctggaagaccttgttccgtatttaaatcgctgtctccaagtcctttttccaccagctcagatagcacagactttaggcattcctcccactcagctctccaagtacggtaacctagggcatgtgaacatcggcgccattcaggagcccctcgcctttatcctgccaaagagagagacgcttttcaccctggatgaccaggcgctggggcccgagctcacagctccagcaccagagcctcccgccgaggagccacgcctggagcccgcgggcccagcctgcccggagggagggcgagcggagacgcaggccgaaccgcccagcgtggggccctagccggcgtcccctgcctccagaacgcgggctggaccccaatggagaacaggtggtgtggcaggcgagcgggtgggcagcccgcatcatccagcacgagatggaccacctgcagggctgcctgtttattgacaaaatggacagcaggacgttcacaaacgtctattggatgaaggtgaatgactaaagctttgctactggggctgaggattccggataccaagacgcaaacactttcactttgagctgggcaaatcttacttggcatcaacttggatggctcgcatatgacaggaaactggattgccaaggcatggcagactgagctggaggaagatgtcagaaatgtttgccctgaaatcagttacggacaaaatgttggctacaacttgaggagaaaaatcacccccaaaggagtggacatttcctaacaattctgtatggaggaaggtggggtaattgcattcgtctgcagtagacacgagttcctcggacctgtataatctcccaaagccaaggtttggtaataatgtagtccccaaatacctgaaagctgtctttaaaaatgcaggtaagcatgtgactggccatttgtgccgagttcttatttttacggagggcttgtggccttagacgccagtttgcttatggaaatgaaagagaatagtccctgttcaaggatgtgtttcatgacagcacgagtgtaaatgagtgcccacacattttaacagccttgggcaggattttgctgctgagatccctagagcagctggttcttggctcattcttggggtagaggccgtggatcagggctgggggcaggggtgacaattgagaagtgcactgagccctttcctgttaacaattgggcatagaaagcaggattagtacttcctggttatacacttattttgtaaaaatagaattaatatcacagcaaccaatgtgtaggtttaagaaagtggccaggtgcagtggttcacgcctgtaatcccagcactttgggagggcggggcgggtggatcacgaggtcaggagctcaagaccagcctggccaagatggtgaaaccctgtctctactaaagatacaaaaattagccgggcgtggtggcgagcacctgtaatcccagctactcgtgaagccaaggcagagaattacttgaacccaggaggcggaggttacagtgagctgagatcacgccactgcactccatccagcctgggcgacagagcgagactcaaaagtatgattctggctgtagagttttctttttttctctgtctcaaaaaaaaaaagtgtcagctttgtcttgtcaagaggtgaaggaacttgttttattcttttattttttttttaagatagagacgggggtcttactatgttgcccaggctggcctcaaattcctggtctcaggcaatcctcctgcctcggcctcccaaagtgctgggatcagttgtgagccacactacccagccaaactccagttttagttaaactgtttcacctcatttttatgctgagttttgtaaagtaggtattcttgctgaacagagtcctgaaaatcaaactatacaagtagtaggaagtccattaagctgtttagaggaaaaagtgttataaatggcagttaaatgaacccaggaaagacccatcctcctttgtggctttctctgaggccccatgaggccaagcagaagcaaactggctctaggtgcagccagactttgaaaaggaatcccggccaggcttggtggctcatgcctgtaatcccagcactttgggaggtcaaggcaggcagatcacctgaggtcaggagttcaagaccagcctggccaacatggcgaaacactgtttctactaaaaatatgaaaattagctgggtgtgctggtaggcgcctgtaatcacagctacttgggaggctgaggcgggagaatcgctcaaacctgggaggcagaggttgcagtgggctgagatctcgccactgtactccagcctgggcgacagaccaaggctctgtctcaaaaaaaaaaaaaaaaaaaaaaaaagggaatcccaaccagatactggtgcaaggtcagagatgcagccaatggggagatttgtagaaagctcatagatgctaaaaacatgggtctttaggaaaattagaattcagctgagcctcctttcatttggacaatgttcagaagctcttacagggggctatggcaatcttttgatgcttcttatagctttctgaggttaacgcttttgtggtgggcatcggtagcaataaaatgcaaactttattgca

SEQ ID NO: 223844 - DNA, 1839 bp, Artificial Sequence
  derived and/or modified sequence
atggccaccgccgccaccatccccagcgtggccaccgccaccgccgccgccctgggcgaggtggaggacgagggcctgctggccagcctgttcagagacagattccccgaggcccagtggagagagagacccgacgtgggcagatacctgagagagctgagcggcagcggcctggagagactgagaagagagcccgagagactggccgaggagagagcccagctgctgcagcagaccagagacctggccttcgccaactacaagaccttcatcagaggcgccgagtgcaccgagagaatccacagactgttcggcgacgtggaggccagcctgggcagactgctggacagactgcccagcttccagcagagctgcagaaacttcgtgaaggaggccgaggagatcagcagcaacagaagaatgaacagcctgaccctgaacagacacaccgagatcctggagatcctggagatcccccagctgatggacacctgcgtgagaaacagctactacgaggaggccctggagctggccgcctacgtgagaagactggagagaaagtacagcagcatccccgtgatccagggcatcgtgaacgaggtgagacagagcatgcagctgatgctgagccagctgatccagcagctgagaaccaacatccagctgcccgcctgcctgagagtgatcggctacctgagaagaatggacgtgttcaccgaggccgagctgagagtgaagttcctgcaggccagagacgcctggctgagaagcatcctgaccgccatccccaacgacgacccctacttccacatcaccaagaccatcgaggccagcagagtgcacctgttcgacatcatcacccagtacagagccatcttcagcgacgaggaccccctgctgccccccgccatgggcgagcacaccgtgaacgagagcgccatcttccacggctgggtgctgcagaaggtgagccagttcctgcaggtgctggagaccgacctgtacagaggcatcggcggccacctggacagcctgctgggccagtgcatgtacttcggcctgagcttcagcagagtgggcgccgacttcagaggccagctggcccccgtgttccagagagtggccatcagcaccttccagaaggccatccaggagaccgtggagaagttccaggaggagatgaacagctacatgctgatcagcgcccccgccatcctgggcaccagcaacatgcccgccgccgtgcccgccacccagcccggcaccctgcagccccccatggtgctgctggacttcccccccctggcctgcttcctgaacaacatcctggtggccttcaacgacctgagactgtgctgccccgtggccctggcccaggacgtgaccggcgccctggaggacgccctggccaaggtgaccaagatcatcctggccttccacagagccgaggaggccgccttcagcagcggcgagcaggagctgttcgtgcagttctgcaccgtgttcctggaggacctggtgccctacctgaacagatgcctgcaggtgctgttcccccccgcccagatcgcccagaccctgggcatcccccccacccagctgagcaagtacggcaacctgggccacgtgaacatcggcgccatccaggagcccctggccttcatcctgcccaagagagagaccctgttcaccctggacgaccaggccctgggccccgagctgaccgcccccgcccccgagccccccgccgaggagcccagactggagcccgccggccccgcctgccccgagggcggcagagccgagacccaggccgagccccccagcgtgggcccctag

SEQ ID NO: 223845 - protein, 1004 aa, Artificial Sequence
  derived and/or modified sequence
MVQLYNLHPFGSQQVVPCKLEPDRFCGGGRDALFVAAGCKVEAFAVAGQELCQPRCAFSTLGRVLRLAYSEAGDYLVAIEEKNKATFLRAYVNWRNKRTENSRVCIRMIGHNVEGPFSKAFRDQMYIIEMPLSEAPLCISCCPVKGDLLVGCTNKLVLFSLKYQIINEEFSLLDFERSLIIHIDNITPVEVSFCVGYVAVMSDLEVLIVKLESGPKNGERVHHHPHKTNNRIRRTEEGISNEISQLESDDFVICQKPLELLGEKSEQSGLSVTLESTGLADEKRKYSHFQHLLYRRFAPDISSYVLSDDIKLHSLQLLPIYQTGSLTSDGKNLSQEKELLSLFCFFSLPHVGYLYMVVKSVELMSVYQYPEKSQQAVLTPQFLHVITSNNLQCFTVRCSAAAAREEDPYMDTTLKACPPVSMDVCALRIQLFIGLKAICHFKNHIILLTKAEPEAIPERRQSPKRLLSRKDTSVKIKIPPVAEAGWNLYIVNTISPVQLYKEMVDYSNTYKTVKTQSCIHLLSEAHLLVRAALMDASQLEPGEKAELLEAFKESCGHLGDCYSRLDSQHSHLTLPYYKMSGLSMAEVLARTDWTVEDGLQKYERGLIFYINHSLYENLDEELNEELAAKVVQMFYVAEPKQVPHILCSPSMKNINPLTAMSYLRKLDTSGFSSILVTLTKAAVALKMGDLDMHRNEMKSHSEMKLVCGFILEPRLLIQQRKGQIVPTELALHLKETQPGLLVASVLGLQKNNKIGIEEADSFFKVLCAKDEDTIPQLLVDFWEAQLVACLPDVVLQELFFKLTSQYIWRLSKRQPPDTTPLRTSEDLINACSHYGLIYPWVHVVISSDSLADKNYTEDLSKLQSLICGPSFDIASIIPFLEPLSEDTIAGLSVHVLCRTRLKEYEQCIDILLERCPEAVIPYANHELKEENRTLWWKKLLPELCQRIKCGGEKYQLYLSSLKETLSIVAVELELKDFMNVLPEDGTATFFLPYLLYCSRKKPLT

SEQ ID NO: 223846 - DNA, 3015 bp, Artificial Sequence
  derived and/or modified sequence
atggtgcaactgtataacctgcatcccttcggtagtcaacaggttgttccgtgcaaactggagccggacaggttctgcggcggaggcagagatgctctgtttgtcgctgccggttgcaaggtagaggcgttcgccgtggccggccaggagttgtgccagcccaggtgtgcgtttagcactttggggagagtgctccggttggcatactctgaagccggcgattatctggtagcgattgaggagaagaacaaggctaccttcctgcgggcttatgtcaattggagaaataaaagaaccgagaactccagagtatgtattcgaatgattggccataatgtggagggccccttttccaaagcgttccgggaccagatgtacatcattgagatgcctttgtccgaggcgcccctttgcattagttgttgtcctgtgaaaggcgacctgttggttggctgcacaaacaaactggtgctgttctccctgaagtatcagatcatcaacgaggagttttcactcctggacttcgagcgttcactcatcatacatatcgataacataaccccagtcgaggtttccttttgcgtggggtacgtggcagttatgtccgatctcgaggtgctcatagttaagttggagtcaggaccaaaaaatggcgagagagttcaccaccatccccacaagaccaacaatcgtattcgaaggacagaggaaggcatctccaatgagattagccagctcgagtccgacgatttcgtgatttgccagaaaccgttggagttactgggcgagaaatctgaacagtccggactgtcagtcactcttgagtctaccggactcgctgacgagaagaggaaatattctcacttccaacaccttctctatagaaggttcgccccagacatctccagctacgtactttcagacgacattaagttgcattccctgcaacttctaccaatttaccagacaggcagcctgacgagtgacggtaagaacttaagtcaagaaaaagagctcttgagcctgttctgctttttctccctgccccatgtcggttacctgtatatggttgtcaagtccgttgagttaatgtctgtgtatcagtacccggagaagtcgcaacaggccgtcctgacaccccaattccttcatgttattacttccaacaatctccaatgctttacagtgcggtgcagcgcggctgcagccagagaagaggacccatatatggacacaacgctaaaagcttgtcctcctgtctccatggatgtgtgtgcattgcggatccagctattcatagggctgaaagccatttgccattttaagaatcacattatccttcttactaaggccgaacctgaggctattccagagcggaggcagtctcccaagcgcctgctgagcagaaaggacacttcggttaagattaaaatcccacctgtcgcagaggctggctggaatctgtatatagtgaataccatttcacccgtgcagctctacaaggaaatggtagactactcaaatacgtacaagaccgttaagacccagtcttgtattcaccttctgagtgaggcccatctactcgttagagctgctctgatggacgccagtcaactcgagcccggagagaaagctgaactactagaagcttttaaggagtcctgtgggcacttgggcgactgctactctagactggacagccagcacagccatttaacattgccctattataaaatgagcggtctctctatggcagaggtccttgcccgcaccgactggaccgtggaggacgggctgcagaaatatgaaaggggactaattttttatatcaatcattccttgtatgaaaacttggatgaagagctgaacgaggaactcgccgccaaggtcgtacagatgttctatgtagccgagccgaagcaagtgccacacatactgtgcagtccttccatgaagaacataaaccctctcacagctatgtcgtacctccggaagttggataccagtggttttagcagtatccttgtgaccctcactaaagctgccgtggcccttaagatgggtgacctggatatgcacagaaatgaaatgaagtcccattccgagatgaaactggtgtgtgggttcatccttgaaccccgcttactgatccagcagaggaagggccaaatcgtgcccaccgagctcgcactgcacctgaaggaaacacagcccgggctcttagtggcgtcagtcctaggcttgcaaaagaataacaagatcggtattgaggaggccgacagcttttttaaagtactgtgtgcaaaggacgaggataccatccctcagcttctagtggatttctgggaggcacaactggttgcctgtctacccgatgttgtcctccaagagctattcttcaagttaacatctcaatatatatggagactaagtaaacggcagccgccggatactactcctctcaggaccagcgaggacttgatcaacgcttgttctcactacggcctcatctatccatgggttcatgtagtgatcagcagtgatagtctcgccgataagaattacaccgaagatctctcaaaacttcagagcctaatatgtggacctagcttcgatatcgcatcgattataccttttttggaaccgcttagtgaagatacaatagctggattatctgtgcatgtcctgtgccgcacccgcctgaaggagtacgaacaatgtattgatatcctgcttgagaggtgtcccgaggccgtaatcccttacgccaaccatgagctgaaagaggaaaataggaccttatggtggaaaaagctgttgccggaattgtgtcagcgaatcaagtgtggcggcgaaaaatatcagctttacctaagctcacttaaagaaacgctcagcattgtcgccgtggaactcgaactgaaggactttatgaatgtgctgcccgaggacggtaccgctacattcttcctcccatatctgctctattgtagccgcaaaaagccactgacctag

SEQ ID NO: 223847 - DNA, 4665 bp, Artificial Sequence
  derived and/or modified sequence
ccgcgggcggggccggctggcgttcacgtgacccggcgtcattggctcgctcgcggaagtagtcctacattcgcggtcagcgcggggtctccgggcgccctgcagggcgggcaggctgtgccatcccgccggacgtcgggatggtgcagctgtacaacctgcacccgttcgggtcgcagcaggtggtgccctgcaagctggagccggaccggttctgtggcggggggcgtgacgcgcttttcgtggcggcgggctgcaaggtggaggcgttcgcggtggccggccaggagctgtgccagccgcggtgcgccttctccacgctgggccgggtgttgcgcctggcctacagcgaggctggagattatttggtagcaattgaagagaaaaacaaagctacatttctacgtgcttatgtgaactggagaaataaaaggactgaaaactctcgtgtgtgtatccgaatgattgggcataatgtggagggaccattcagcaaagccttcagagaccagatgtacattattgaaatgccgctttcggaggcccccttgtgcatttcctgttgccctgtgaaaggagaccttctcgttggctgcacaaataaattagtcttatttagtttgaagtaccagatcattaatgaggaattctcactattggactttgaacgttctttaattatacacatagataatatcactcctgttgaggtttctttttgtgttggatatgttgctgtcatgtcagacttagaagtcttaatcgtaaaactggagtcaggccctaaaaatggagagagagttcaccaccatccacataagaccaacaatcgaataagacggacagaagaaggcatcagtaatgaaatttcacagcttgagtcagatgattttgtcatctgccagaagcccctggaacttcttggtgaaaaaagtgaacagtctggattatctgttacactggagtctacgggattagctgatgaaaaaagaaaatattcccactttcagcacctgctctatagacgttttgctcctgatatttcgtcctatgtcttgtctgatgacatcaagctacattccctccagctgctacccatttaccagaccggttctcttacatctgatggaaaaaatttgtctcaggaaaaagaattgctgagtctcttttgctttttctccttacctcatgtgggctatctctacatggttgtcaaatctgttgaattgatgtcagtctaccagtatcctgaaaagtctcagcaggcagtactcacgccacaatttttgcacgtcattacaagtaacaacctgcagtgtttcactgtgcggtgcagtgcggcggcagctcgtgaggaggacccgtacatggacaccaccctgaaggcttgcccacctgtcagtatggatgtctgtgctttaagaatacagcttttcataggcttgaaagccatctgtcactttaaaaaccacatcatacttttgactaaagcagaacctgaagccattccagagagaagacagtcacccaagaggcttctttcgagaaaagataccagtgttaaaatcaaaatacctcctgtagctgaggctgggtggaatttgtatattgtgaatacgatctcaccagtgcagctgtacaaagagatggtagactatagcaatacctataagactgtcaaaacccagagctgcattcaccttctcagtgaggctcatctgttagtgcgagctgccctgatggatgccagtcagctggaacctggagagaaggcagagcttttggaagcatttaaggaaagctgtgggcaccttggggactgttacagcaggcttgactcccagcattctcatctcaccttgccatactataagatgtctggtttgtctatggctgaagttctggcccgcacggactggacagtagaggatggattacagaaatacgagagaggattaatcttttacattaatcattcactttatgaaaacctggatgaagaattaaatgaagaattagcagcaaaagtggttcagatgttttatgtggctgagccaaagcaagtgccccatattctctgtagtccttctatgaagaatattaatcctttaactgccatgagctatctaaggaagctggatacttctgggttttcatcgatcttagtgacattgaccaaggcagcagtggctctgaaaatgggagatcttgacatgcacagaaatgaaatgaaaagccattcagagatgaagttggtatgtggcttcattctggaacctcggctgttgattcaacagagaaagggacagattgttccaaccgagcttgcacttcacttgaaggaaactcagcctggattgcttgtggcttcagttctgggcttgcagaagaacaacaaaattggaattgaagaagcagattccttttttaaggtgctttgtgctaaggatgaagatacaattcctcagctcttggtagacttttgggaagctcagctagtggcatgtctcccagatgtggtacttcaggaactctttttcaaactcacatcacagtacatctggagattgtctaagaggcagcctcctgacaccacaccattgcgaacatcggaggatctgataaatgcctgtagtcattatggcttaatttatccatgggttcacgtcgtaatatcatctgattctttagctgataaaaattatacagaagatctttcaaaattacagtctcttatatgtggtccttcatttgacatagcttccattattccgttcttggagccactttcagaagacactattgccggcctcagtgtccatgttctgtgtcgtacacgcttgaaagagtatgaacagtgcatagacatactgttagagagatgcccggaggcagtcattccatatgctaatcatgaactgaaagaagagaaccggactctgtggtggaaaaaactgttgcctgaactttgtcagagaataaaatgtggtggagagaagtatcaactctacctgtcatcattaaaagaaacattgtcaattgttgctgtggaactagaactgaaggatttcatgaatgttctcccagaagatggtactgcaacatttttcttgccatatcttctctattgcagtcgaaagaaaccattgacttaaaggtatcatttgaaaaataccataatggcatttgagactgaatttctaaaaattgaatgccaaagtacaagtagaggagttttttattttatatatcacacacacacacacacacacacacacacacacacacatatatgatacaaatgctttcaggctgcttaccttaccgtgtagtggtaactattcacttcttaatttatgacctcaatcaatttaattgtctagaatgtaaaaagtctttaagacataagaattcctcaaagaagccatacattttttaaggtggggattgacttttattccaaggaacaacatcagttcactgttgttggagacatgacaatcattttcatcccaagaacactttaaggaaacattttacaagtatgcttgaaagaatgtcactaactggtccagaattttatcttcttgatttttccagatttctctatgtttttgagaaagatgttaatgttttgccatggtaaaagatttcaaacctcattttttttgttccttttcttgttacttttaagaaaactcatgctctgtttctctgaatcaaatgaagtagaagtttacaaagctaactttcttcttgtctagctattaacatgatttgtcaaatgcatgtttttttcagccaaagccttgtttccatttttgttgatgtgtactcttgctcttttagctagagtgtatgtgaaaataaagaaatacatcattgtattcacaaccatgtgtcttcatttataactttttgtttaaaaaatttttagttcaagtttagttcattgatattatcctctgaatgcagttaaggctgggcagaaattctactcatgtgacatctgccacaggtctattttgaagcttttcttctaatggcaatgtttgtccttaccaggatttaatctatagaattgtctctcaactctgcttttctccagttccagataacgtccttaagaccatctgttcaggggttcacaaaactcaaatttgtgtcattctattttatttattttattttttatttccttccctcataccttgcccattccctctgaatattaggtgtgatgtcaacagcatgttagaaggatcaatgggaaggcaatgattgaaaacatttcaatgaaccttaatagtgttcctttgaggagcacccaggagaatatctggtcatagatctttttttaaatgcagttttataaaaccctaacagcggtgatatcattagactgtatgaatcagttttattacctagtgtacaagtgtcagtcatgtatcattatatagtctgttgatctttccatttgcaaaaaattaatagttttcccccacaaatgtacaaagttgtatgcttccagtcttcttttaatgtttatagtcattccaaagtaacattctattttacactttcacatacattgttatgaatcattggtttttctcttttttccacttatcaccaatttatttcattcagccagatttggtgtct

SEQ ID NO: 223848 - DNA, 3015 bp, Artificial Sequence
  derived and/or modified sequence
atggtgcagctgtacaacctgcaccccttcggcagccagcaggtggtgccctgcaagctggagccagaccgcttctgtggcggcggcagagatgccctgtttgtggccgccggctgcaaggtggaggcctttgctgtggccggccaggagctgtgccagccccgctgtgccttcagcaccctgggccgggtgctgcggctggcctacagcgaggccggggactacctggtggccatcgaggagaagaacaaggccaccttcctgcgggcctacgtgaactggaggaacaagaggacagagaacagccgggtgtgcatccgcatgattggccacaacgtggagggccccttcagcaaggccttccgggaccagatgtacatcatcgagatgcccctgtctgaggcccccctgtgcatcagctgctgccctgtgaagggggacctgctggtgggctgcaccaacaagctggtgctcttcagcctgaagtaccagatcatcaatgaggagttcagcctgctggactttgagaggagcctcatcatccacatcgacaacatcacccctgtggaggtgtccttctgtgtgggctacgtggccgtgatgtctgacctggaggtgctgattgtgaagctggagagcggccccaagaatggagagcgggtgcaccaccacccccacaagaccaacaaccgcatcagaagaacagaggagggcatcagcaatgagatcagccagctggagagtgatgactttgtgatctgccagaagcccctggagctgctgggggagaagtctgagcagagcggcctgtctgtgaccctggagagcacaggcctggctgatgagaagaggaagtacagccacttccagcacctgctgtacagaagatttgccccagacatcagcagctatgtgctgagtgatgacatcaagctgcacagcctgcagctgctgcccatctaccagacaggcagcctgaccagtgatggcaagaacctgagccaggagaaggagctgctgagcctcttctgcttcttcagcctgccccacgtgggctacctgtacatggtggtgaagtctgtggagctgatgtctgtgtaccagtacccagagaagagccagcaggccgtgctgaccccccagttcctgcacgtgatcaccagcaacaacctgcagtgcttcaccgtgcgctgcagcgctgctgctgcccgggaggaggacccctacatggacaccaccctgaaggcctgcccccctgtgtccatggatgtgtgtgccctgcgcatccagctgttcatcggcctgaaggccatctgccacttcaagaaccacatcatcctgctgaccaaggccgagcctgaggccatccctgagcggcggcagagccccaagaggctgctgagcaggaaggacacctctgtgaagatcaagatcccccctgtggccgaggccggctggaacctgtacatcgtgaacaccatcagccctgtgcagctgtacaaggagatggtggactacagcaacacctacaagacagtgaagacccagagctgcatccacctgctgtctgaggcccacctgctggtgcgggccgccctgatggatgccagccagctggagcctggagagaaggccgagctgctggaggccttcaaggagagctgtggccacctgggggactgctacagccggctggacagccagcacagccacctgaccctgccctactacaagatgagcggcctgtccatggccgaggtgctggccaggacagactggacagtggaggatggcctgcagaagtatgaaagaggcctcatcttctacatcaaccacagcctgtatgagaacctggatgaggagctgaatgaggagctggccgccaaggtggtgcagatgttttatgtggccgagcccaagcaggtgccccacatcctgtgcagccccagcatgaagaacatcaaccccctgacagccatgagctacctgaggaagctggacaccagcggcttcagcagcatcctggtgaccctgaccaaggctgctgtggccctgaagatgggagacctggacatgcacagaaatgagatgaagagccacagcgagatgaagctggtgtgtggcttcatcctggagccccggctgctgatccagcagaggaagggccagatcgtgcccacagagctggccctgcacctgaaggagacccagcccggcctgctggtggcctctgtgctgggcctgcagaagaacaacaagattggcatcgaggaggccgacagcttcttcaaggtgctgtgtgccaaggatgaggacaccatcccccagctgctggtggacttctgggaggcccagctggtggcctgcctgcctgatgtggtgctgcaggagctgttcttcaagctgaccagccagtacatctggaggctgagcaagaggcagcccccagacaccacccccctgcggaccagtgaagatctcatcaatgcctgcagccactacggcctcatctacccctgggtgcacgtggtgatcagcagtgacagcctggccgacaagaactacacagaggacctgagcaagctgcagagcctcatctgtggccccagctttgatattgccagcatcatccccttcctggagcccctgtctgaggacaccatcgccggcctgtctgtgcacgtgctgtgcaggacccggctgaaggagtatgagcagtgcatcgacatcctgctggagcgctgcccagaggccgtcatcccctatgccaaccacgagctgaaggaggagaacagaaccctgtggtggaagaagctgctgcctgagctgtgccagaggatcaagtgtggcggggagaagtaccagctgtacctgagcagcctgaaggagaccctgagcatcgtggccgtggagctggagctgaaggacttcatgaatgtgctgcctgaagatggaacagccaccttcttcctgccctacctgctgtactgcagcaggaagaagcccctgacctag

SEQ ID NO: 223849 - DNA, 3015 bp, Artificial Sequence
  derived and/or modified sequence
atggtgcagctgtacaacctgcaccccttcggcagccagcaggtggttccatgcaaactggaacccgatagattctgcggcgggggacgggacgccctgttcgtcgctgcaggctgcaaggttgaagccttcgccgtcgcgggccaagagctgtgtcagcctaggtgcgcattctctacattaggaagggtcttgcggctggcctacagtgaggccggagactacctggtggctattgaggagaagaataaagcgacctttctgcgagcgtatgtgaattggcgaaataaaagaaccgaaaacagccgggtgtgcattagaatgataggtcataatgtggagggcccatttagtaaggccttccgggaccagatgtacattatcgaaatgccattaagcgaggcccctttgtgtatctcttgctgtccggtaaaaggcgacttgctggtagggtgcacgaacaaattggtcttattctctcttaaatatcagatcatcaacgaggagttctctctgttggattttgagcggagcctaatcatacatattgacaacattaccccagtcgaggtctcgttttgtgtaggttacgtcgctgtgatgtctgatctggaagtgctgatcgtaaaactggaatccggtccaaaaaacggcgagagagtccaccatcacccccacaaaaccaacaatcgaattagacggactgaagaaggcatcagcaacgaaatcagtcagctggaatctgacgactttgttatatgtcagaaaccactggaattgctgggagaaaaaagcgagcagtctgggctgtcagttaccctcgaatccactggcctcgccgacgagaaacgaaagtattcgcacttccaacatctgctttaccggcggttcgccccagatatctcctcttacgtactctctgatgacattaagctgcattcattgcaactcctccccatctaccagacgggtagcttaacaagtgacggtaagaatctcagtcaagagaaggagctgctctctttattttgtttcttcagcctgcctcatgtggggtatttgtacatggtcgtcaagtcagtggaactgatgtctgtctatcagtaccctgaaaagtcgcagcaggccgtcctcacccctcaatttttacacgtaataacaagtaacaatctgcagtgttttacggtgcggtgtagcgccgccgcagcccgggaggaagatccttacatggacactacgctcaaagcatgccctccggtgagcatggacgtctgcgcactgcggattcagttgttcatcgggctcaaggccatctgtcatttcaagaatcacatcattctactgacaaaagctgaacccgaggctattcccgagagaaggcaatctcctaaacgcttgctgtcccggaaggatacgtctgtgaaaatcaagatccccccagtggccgaggccggctggaacctgtacatagttaacacaattagtccggtgcagctttacaaggaaatggtggattatagtaatacatacaagactgtgaagacacagtcatgcattcacctactcagtgaggcgcacctgcttgtgagagctgcactgatggacgcctctcagcttgaaccaggggagaaagcagaactgctagaggccttcaaggaatcttgcggacatctgggcgattgttattcacgcctcgattcacagcactcccacctcacattaccctactataagatgagtggactatccatggccgaggtgctggctaggactgactggaccgtggaagatggcctgcagaaatatgagcgcggattgattttctacatcaaccattctctgtacgagaatctggacgaggagctgaatgaagagctggctgcaaaggtggtgcagatgttctatgttgctgagcctaaacaggttccccacatactgtgttcccctagcatgaagaatataaatccacttactgccatgagctaccttcgaaaactcgacacttcaggcttcagtagtatattggtgacccttacaaaggctgccgtggccctgaagatgggcgacttagatatgcatcgtaacgagatgaagtcccactctgagatgaaactggtttgcggctttatcctcgagcctaggctcctgatccagcagcggaaagggcagatcgttcccactgaactcgccctacatctaaaggagacacagcctggcttgttagtagctagtgtactggggcttcaaaagaacaacaaaattgggatagaagaggccgatagcttctttaaggtcctgtgcgcgaaagatgaagacactattccccaactgctggtggatttttgggaggcacagctggtggcctgccttccagacgtagttttacaagagcttttcttcaagttgacttcccagtatatctggcggctgagcaagcgccagccgccggacactaccccacttagaacttctgaggatctgattaatgcctgttcccactacggtttaatttacccctgggtgcacgtggtgatttccagcgactcattggccgataagaattacacggaagatctgagcaaattgcagtcactcatctgcggaccgtccttcgatatcgcttccattatccctttcctcgaacccctgagtgaagataccattgccgggttaagcgttcacgtgctgtgtaggacgcgccttaaagagtacgagcaatgtatcgatatccttctagagcggtgccccgaagctgttattccatacgcaaaccacgagctcaaggaggagaatcgcaccttatggtggaagaaactgctgcccgaactgtgccagcggatcaaatgcggcggcgagaagtaccagctataccttagtagcctgaaagagaccctgtctattgtggccgttgagttggaattgaaagacttcatgaatgttctacccgaggacggaacggctacatttttcctgccctacctcctgtactgtagtagaaagaaaccactgacatag

SEQ ID NO: 223850 - DNA, 3015 bp, Artificial Sequence
  derived and/or modified sequence
atggtgcagctttataatctgcacccatttggcagccagcaggtggtaccctgtaagctcgagccggatcgattctgtggcggagggagagatgctctgttcgtcgcagcaggttgtaaggtcgaggcctttgcggtagctggacaggagctgtgccaacccaggtgcgcattctctacactgggccgtgtcctgagactggcctactcggaggctggggactacttggtcgcgattgaagaaaagaacaaggcgacatttttgcgcgcttatgttaactggagaaataaacgaacagagaacagccgggtctgcattcgaatgattgggcacaacgttgaagggcctttctcaaaggccttcagagaccagatgtacatcatagagatgccgctatctgaggcaccgctttgcattagctgctgtccagtgaaaggagacctcctggtgggttgcaccaataaactcgtcctctttagcctcaagtaccagatcattaatgaagaatttagcctgctggactttgagagatcactgattatccacatcgacaacattacccccgtggaagtcagtttctgcgtcgggtacgtggctgttatgtctgacctggaggtcctcatcgtcaagctcgaaagcgggcctaagaacggggagcgggtgcaccaccatccgcacaagacgaacaatagaatccgcaggaccgaggagggaattagtaacgagatcagccagctggagagtgatgatttcgtgatctgccagaaacctttagaactactcggcgagaagtctgaacaatccggcctttcagttacactcgagtctacgggtctggccgacgagaagcgaaaatacagccattttcagcacctactctaccgcaggtttgccccagatatctcctcttacgttttgagtgacgacatcaaactacattccctgcagctgctgcccatatatcagacaggaagcttaacatctgatggaaaaaacctgtcacaggagaaagaacttctgagcttgttctgtttcttctccctaccgcatgtaggttatctctacatggtggtaaaatcagttgaactgatgtctgtatatcagtatcccgagaaaagtcaacaggctgttctgactccccagttcctgcatgtgatcacctctaacaatctccagtgttttaccgtgaggtgctccgcagccgcagcccgagaagaagatccatatatggacacaacactcaaggcgtgtccccctgtctcaatggacgtgtgcgccctccggattcagctattcatcggcttgaaggctatttgccactttaagaatcatatcatactgctaacaaaagctgagccagaggccatcccggagagaagacaatctcccaaacgtttgctgtctaggaaagacacttctgttaagattaagatcccccctgttgcagaagcgggatggaatctgtatatcgtcaacaccatctctccggttcagttgtataaggagatggtcgattactccaacacctacaaaacagtgaaaacccagtcctgtatccatttgctgtccgaggcccacctgttagttcgggctgcactcatggatgcaagtcagctggaaccgggtgaaaaagcggagctcctggaagcttttaaggagtcatgcggccaccttggcgactgctattcgaggctcgactctcaacacagccacctgacactcccgtattataagatgagtgggctcagtatggcagaggtgctcgcgcgaacagactggactgtcgaagatggcctgcagaagtacgagcgtggccttatcttctatatcaatcatagtctctacgagaacttagacgaagagctgaatgaggaattagccgctaaagtagttcagatgttctacgtcgctgaacctaagcaggtccctcacatcctatgttccccctctatgaaaaatatcaatccactgaccgccatgtcctatcttcggaagctggatacttcggggttttccagcatactagtcaccctcactaaagccgctgtagcgctgaaaatgggagacttagacatgcacagaaatgagatgaagagccatagtgaaatgaaactggtatgcgggtttattctggagcctagactactgatccagcagcgcaaaggtcagattgtgcccactgagctcgccctgcacttaaaagaaacgcaaccaggcctgttagtggctagcgtgctcggactacagaaaaataacaaaattggcatagaagaggctgattcattctttaaggtattgtgtgccaaagacgaagataccatcccccagctgctcgtcgatttctgggaagcccaactcgtcgcttgtttaccagatgtagtgcttcaggagctcttttttaagcttacttcgcaatacatttggcgactgagtaaaaggcagccccctgacactaccccgctgcggacatccgaggaccttatcaacgcatgcagccattacggcttaatttacccctgggtgcatgtggtaatcagctcggactccttagcagacaagaactatacagaggatctctctaaactgcagtctctaatctgcggccctagctttgatattgcatctattatcccctttcttgagcccctgtcggaggatacaatagcagggctctcagtgcatgtgctctgtaggacccggcttaaggagtacgagcagtgcatcgacatcctcttggagaggtgtcctgaagctgtgatcccttatgccaaccatgagctaaaagaggagaatagaactctctggtggaaaaagctgttgcccgaattgtgccagaggattaaatgtggtggagaaaaataccagctgtacctgtctagtctaaaggagactttaagtatagtggcagtggaacttgaactgaaggatttcatgaacgtcctgccagaagatggaacagccaccttctttctaccataccttctttattgttcccggaagaagcccctgacttag

SEQ ID NO: 223851 - DNA, 3015 bp, Artificial Sequence
  derived and/or modified sequence
atggtgcagctgtacaacctgcaccccttcggcagccagcaggtggtgccctgcaagctggagcccgacagattctgcggcggcggcagagacgccctgttcgtggccgccggctgcaaggtggaggccttcgccgtggccggccaggagctgtgccagcccagatgcgccttcagcaccctgggcagagtgctgagactggcctacagcgaggccggcgactacctggtggccatcgaggagaagaacaaggccaccttcctgagagcctacgtgaactggagaaacaagagaaccgagaacagcagagtgtgcatcagaatgatcggccacaacgtggagggccccttcagcaaggccttcagagaccagatgtacatcatcgagatgcccctgagcgaggcccccctgtgcatcagctgctgccccgtgaagggcgacctgctggtgggctgcaccaacaagctggtgctgttcagcctgaagtaccagatcatcaacgaggagttcagcctgctggacttcgagagaagcctgatcatccacatcgacaacatcacccccgtggaggtgagcttctgcgtgggctacgtggccgtgatgagcgacctggaggtgctgatcgtgaagctggagagcggccccaagaacggcgagagagtgcaccaccacccccacaagaccaacaacagaatcagaagaaccgaggagggcatcagcaacgagatcagccagctggagagcgacgacttcgtgatctgccagaagcccctggagctgctgggcgagaagagcgagcagagcggcctgagcgtgaccctggagagcaccggcctggccgacgagaagagaaagtacagccacttccagcacctgctgtacagaagattcgcccccgacatcagcagctacgtgctgagcgacgacatcaagctgcacagcctgcagctgctgcccatctaccagaccggcagcctgaccagcgacggcaagaacctgagccaggagaaggagctgctgagcctgttctgcttcttcagcctgccccacgtgggctacctgtacatggtggtgaagagcgtggagctgatgagcgtgtaccagtaccccgagaagagccagcaggccgtgctgaccccccagttcctgcacgtgatcaccagcaacaacctgcagtgcttcaccgtgagatgcagcgccgccgccgccagagaggaggacccctacatggacaccaccctgaaggcctgcccccccgtgagcatggacgtgtgcgccctgagaatccagctgttcatcggcctgaaggccatctgccacttcaagaaccacatcatcctgctgaccaaggccgagcccgaggccatccccgagagaagacagagccccaagagactgctgagcagaaaggacaccagcgtgaagatcaagatcccccccgtggccgaggccggctggaacctgtacatcgtgaacaccatcagccccgtgcagctgtacaaggagatggtggactacagcaacacctacaagaccgtgaagacccagagctgcatccacctgctgagcgaggcccacctgctggtgagagccgccctgatggacgccagccagctggagcccggcgagaaggccgagctgctggaggccttcaaggagagctgcggccacctgggcgactgctacagcagactggacagccagcacagccacctgaccctgccctactacaagatgagcggcctgagcatggccgaggtgctggccagaaccgactggaccgtggaggacggcctgcagaagtacgagagaggcctgatcttctacatcaaccacagcctgtacgagaacctggacgaggagctgaacgaggagctggccgccaaggtggtgcagatgttctacgtggccgagcccaagcaggtgccccacatcctgtgcagccccagcatgaagaacatcaaccccctgaccgccatgagctacctgagaaagctggacaccagcggcttcagcagcatcctggtgaccctgaccaaggccgccgtggccctgaagatgggcgacctggacatgcacagaaacgagatgaagagccacagcgagatgaagctggtgtgcggcttcatcctggagcccagactgctgatccagcagagaaagggccagatcgtgcccaccgagctggccctgcacctgaaggagacccagcccggcctgctggtggccagcgtgctgggcctgcagaagaacaacaagatcggcatcgaggaggccgacagcttcttcaaggtgctgtgcgccaaggacgaggacaccatcccccagctgctggtggacttctgggaggcccagctggtggcctgcctgcccgacgtggtgctgcaggagctgttcttcaagctgaccagccagtacatctggagactgagcaagagacagccccccgacaccacccccctgagaaccagcgaggacctgatcaacgcctgcagccactacggcctgatctacccctgggtgcacgtggtgatcagcagcgacagcctggccgacaagaactacaccgaggacctgagcaagctgcagagcctgatctgcggccccagcttcgacatcgccagcatcatccccttcctggagcccctgagcgaggacaccatcgccggcctgagcgtgcacgtgctgtgcagaaccagactgaaggagtacgagcagtgcatcgacatcctgctggagagatgccccgaggccgtgatcccctacgccaaccacgagctgaaggaggagaacagaaccctgtggtggaagaagctgctgcccgagctgtgccagagaatcaagtgcggcggcgagaagtaccagctgtacctgagcagcctgaaggagaccctgagcatcgtggccgtggagctggagctgaaggacttcatgaacgtgctgcccgaggacggcaccgccaccttcttcctgccctacctgctgtactgcagcagaaagaagcccctgacctag

SEQ ID NO: 223852 - protein, 1243 aa, Artificial Sequence
  derived and/or modified sequence
MLASPATETTVLMSQTEADLALRPPPPLGTAGQPRLGPPPRRARRFSGKAEPRPRSSRLSRRSSVDLGLLSSWSLPASPAPDPPDPPDSAGPGPARSPPPSSKEPPEGTWTEGAPVKAAEDSARPELPDSAVGPGSREPLRVPEAVALERRREQEEKEDMETQAVATSPDGRYLKFDIEIGRGSFKTVYRGLDTDTTVEVAWCELQTRKLSRAERQRFSEEVEMLKGLQHPNIVRFYDSWKSVLRGQVCIVLVTELMTSGTLKTYLRRFREMKPRVLQRWSRQILRGLHFLHSRVPPILHRDLKCDNVFITGPTGSVKIGDLGLATLKRASFAKSVIGTPEFMAPEMYEEKYDEAVDVYAFGMCMLEMATSEYPYSECQNAAQIYRKVTSGRKPNSFHKVKIPEVKEIIEGCIRTDKNERFTIQDLLAHAFFREERGVHVELAEEDDGEKPGLKLWLRMEDARRGGRPRDNQAIEFLFQLGRDAAEEVAQEMVALGLVCEADYQPVARAVRERVAAIQRKREKLRKARELEALPPEPGPPPATVPMAPGPPSVFPPEPEEPEADQHQPFLFRHASYSSTTSDCETDGYLSSSGFLDASDPALQPPGGVPSSLAESHLCLPSAFALSIPRSGPGSDFSPGDSYASDAASGLSDVGEGMGQMRRPPGRNLRRRPRSRLRVTSVSDQNDRVVECQLQTHNSKMVTFRFDLDGDSPEEIAAAMVYNEFILPSERDGFLRRIREIIQRVETLLKRDTGPMEAAEDTLSPQEEPAPLPALPVPLPDPSNEELQSSTSLEHRSWTAFSTSSSSPGTPLSPGNPFSPGTPISPGPIFPITSPPCHPSPSPFSPISSQVSSNPSPHPTSSPLPFSSSTPEFPVPLSQCPWSSLPTTSPPTFSPTCSQVTLSSPFFPPCPSTSSFPSTTAAPLLSLASAFSLAVMTVAQSLLSPSPGLLSQSPPAPPSPLPSLPLPPPVAPGGQESPSPHTAEVESEASPPPARPLPGEARLAPISEEGKPQLVGRFQVTSSKEPAEPLPLQPTSPTLSGSPKPSTPQLTSESSDTEDSAGGGPETREALAESDRAAEGLGAGVEEEGDDGKEPQVGGSPQPLSHPSPVWMNYSYSSLCLSSEESESSGEDEEFWAELQSLRQKHLSEVETLQTLQKKEIEDLYSRLGKQPPPGIVAPAAMLSSRQRRLSKGSFPTSRRNSLQRSEPPGPGIMRRNSLSGSSTGSQEQRASKGVTFAGDVGRM

SEQ ID NO: 223853 - DNA, 3732 bp, Artificial Sequence
  derived and/or modified sequence
atgctggccagccccgccaccgagaccaccgtgctgatgagccagaccgaggccgacctggccctgagaccccccccccccctgggcaccgccggccagcccagactgggccccccccccagaagagccagaagattcagcggcaaggccgagcccagacccagaagcagcagactgagcagaagaagcagcgtggacctgggcctgctgagcagctggagcctgcccgccagccccgcccccgacccccccgacccccccgacagcgccggccccggccccgccagaagccccccccccagcagcaaggagccccccgagggcacctggaccgagggcgcccccgtgaaggccgccgaggacagcgccagacccgagctgcccgacagcgccgtgggccccggcagcagagagcccctgagagtgcccgaggccgtggccctggagagaagaagagagcaggaggagaaggaggacatggagacccaggccgtggccaccagccccgacggcagatacctgaagttcgacatcgagatcggcagaggcagcttcaagaccgtgtacagaggcctggacaccgacaccaccgtggaggtggcctggtgcgagctgcagaccagaaagctgagcagagccgagagacagagattcagcgaggaggtggagatgctgaagggcctgcagcaccccaacatcgtgagattctacgacagctggaagagcgtgctgagaggccaggtgtgcatcgtgctggtgaccgagctgatgaccagcggcaccctgaagacctacctgagaagattcagagagatgaagcccagagtgctgcagagatggagcagacagatcctgagaggcctgcacttcctgcacagcagagtgccccccatcctgcacagagacctgaagtgcgacaacgtgttcatcaccggccccaccggcagcgtgaagatcggcgacctgggcctggccaccctgaagagagccagcttcgccaagagcgtgatcggcacccccgagttcatggcccccgagatgtacgaggagaagtacgacgaggccgtggacgtgtacgccttcggcatgtgcatgctggagatggccaccagcgagtacccctacagcgagtgccagaacgccgcccagatctacagaaaggtgaccagcggcagaaagcccaacagcttccacaaggtgaagatccccgaggtgaaggagatcatcgagggctgcatcagaaccgacaagaacgagagattcaccatccaggacctgctggcccacgccttcttcagagaggagagaggcgtgcacgtggagctggccgaggaggacgacggcgagaagcccggcctgaagctgtggctgagaatggaggacgccagaagaggcggcagacccagagacaaccaggccatcgagttcctgttccagctgggcagagacgccgccgaggaggtggcccaggagatggtggccctgggcctggtgtgcgaggccgactaccagcccgtggccagagccgtgagagagagagtggccgccatccagagaaagagagagaagctgagaaaggccagagagctggaggccctgccccccgagcccggccccccccccgccaccgtgcccatggcccccggcccccccagcgtgttcccccccgagcccgaggagcccgaggccgaccagcaccagcccttcctgttcagacacgccagctacagcagcaccaccagcgactgcgagaccgacggctacctgagcagcagcggcttcctggacgccagcgaccccgccctgcagccccccggcggcgtgcccagcagcctggccgagagccacctgtgcctgcccagcgccttcgccctgagcatccccagaagcggccccggcagcgacttcagccccggcgacagctacgccagcgacgccgccagcggcctgagcgacgtgggcgagggcatgggccagatgagaagaccccccggcagaaacctgagaagaagacccagaagcagactgagagtgaccagcgtgagcgaccagaacgacagagtggtggagtgccagctgcagacccacaacagcaagatggtgaccttcagattcgacctggacggcgacagccccgaggagatcgccgccgccatggtgtacaacgagttcatcctgcccagcgagagagacggcttcctgagaagaatcagagagatcatccagagagtggagaccctgctgaagagagacaccggccccatggaggccgccgaggacaccctgagcccccaggaggagcccgcccccctgcccgccctgcccgtgcccctgcccgaccccagcaacgaggagctgcagagcagcaccagcctggagcacagaagctggaccgccttcagcaccagcagcagcagccccggcacccccctgagccccggcaaccccttcagccccggcacccccatcagccccggccccatcttccccatcaccagccccccctgccaccccagccccagccccttcagccccatcagcagccaggtgagcagcaaccccagcccccaccccaccagcagccccctgcccttcagcagcagcacccccgagttccccgtgcccctgagccagtgcccctggagcagcctgcccaccaccagcccccccaccttcagccccacctgcagccaggtgaccctgagcagccccttcttccccccctgccccagcaccagcagcttccccagcaccaccgccgcccccctgctgagcctggccagcgccttcagcctggccgtgatgaccgtggcccagagcctgctgagccccagccccggcctgctgagccagagcccccccgccccccccagccccctgcccagcctgcccctgcccccccccgtggcccccggcggccaggagagccccagcccccacaccgccgaggtggagagcgaggccagccccccccccgccagacccctgcccggcgaggccagactggcccccatcagcgaggagggcaagccccagctggtgggcagattccaggtgaccagcagcaaggagcccgccgagcccctgcccctgcagcccaccagccccaccctgagcggcagccccaagcccagcaccccccagctgaccagcgagagcagcgacaccgaggacagcgccggcggcggccccgagaccagagaggccctggccgagagcgacagagccgccgagggcctgggcgccggcgtggaggaggagggcgacgacggcaaggagccccaggtgggcggcagcccccagcccctgagccaccccagccccgtgtggatgaactacagctacagcagcctgtgcctgagcagcgaggagagcgagagcagcggcgaggacgaggagttctgggccgagctgcagagcctgagacagaagcacctgagcgaggtggagaccctgcagaccctgcagaagaaggagatcgaggacctgtacagcagactgggcaagcagcccccccccggcatcgtggcccccgccgccatgctgagcagcagacagagaagactgagcaagggcagcttccccaccagcagaagaaacagcctgcagagaagcgagccccccggccccggcatcatgagaagaaacagcctgagcggcagcagcaccggcagccaggagcagagagccagcaagggcgtgaccttcgccggcgacgtgggcagaatgtag

SEQ ID NO: 223854 - DNA, 3732 bp, Artificial Sequence
  derived and/or modified sequence
atgcttgcctcaccagccacagagactacggtgctcatgagccaaaccgaggctgatctggctctccggcctcctccgcctctgggcacagctgggcaaccccgcctggggcctccccctcgccgggctcggcggttttcagggaaagctgagccaagacccaggagcagccgtttatctcgtagatccagcgtggatctgggcctcctcagctcctggtcgctgccagccagccccgcccccgacccgccagacccccccgattctgccgggcccggccctgctcgctccccacctcctagctccaaagagccacccgaaggaacctggaccgaaggtgcccccgtgaaagccgcagaagacagcgctcgtcctgagctaccagattccgccgtaggtccaggttctcgcgagccactacgggtgccagaggcggttgcactcgagcgaaggcgcgaacaggaagagaaggaagacatggagacacaagccgtagccacatcacccgatgggaggtatttgaagttcgatatagaaatcgggcgtggcagctttaaaacagtgtacaggggattggatacagacacaacggttgaagtggcctggtgtgaacttcagaccagaaagctgtctcgcgccgaacgacagcggttctcagaagaagttgagatgttgaagggactgcagcacccgaacattgtccgattctacgatagctggaaatctgtcctgcgaggacaggtatgcattgtgctggtaaccgaactgatgacaagcggtacccttaagacatacctccgccgctttcgggaaatgaagcccagagtgctccaacgctggtccagacagatccttaggggcttgcactttctgcactcgcgggtccccccaatcttgcacagggatctaaagtgcgacaatgtgttcatcactggcccgacaggtagcgttaagattggcgacctaggccttgcaacccttaagcgggcaagcttcgctaagagcgtcatcggaaccccagagttcatggccccagagatgtatgaggaaaaatacgatgaagccgtcgacgtgtacgccttcggaatgtgtatgctggaaatggcaacatccgagtatccttatagcgagtgtcagaacgcagcccaaatttaccggaaggtgacttcaggcagaaagccaaacagcttccacaaggtgaagattccagaggtgaaggaaattatagagggttgtattcggacagataaaaatgaacgtttcaccattcaggacctgttagcccatgcatttttcagagaagagagaggagttcatgtggagttggcggaggaagacgacggtgaaaagcccggccttaaattgtggcttagaatggaagacgcccggcgcggagggcggcctagggacaatcaagctattgaatttctttttcagctgggcagagacgccgcagaggaagtggcccaggaaatggttgctctagggctcgtgtgcgaagccgattaccagccagtggcccgggccgttagggagcgagtggctgccatccagagaaagcgcgagaagctgcgtaaagcccgtgaactggaggcccttccacccgagccaggtccccccccagcaactgtgcctatggcccctggaccaccgtcggtatttcctcctgaacctgaggagccggaggcggaccagcatcaaccattccttttccggcatgcctcatacagctccaccacatccgattgtgagactgatggatatctgagctccagcgggtttctcgatgcatcagaccctgccctgcagccccctggaggtgtcccaagcagcctcgcggagtcccacctttgtttgccttccgcctttgccctgtcaattcctaggtctgggcccggaagtgacttcagcccaggcgattcatacgcatctgatgccgcctccgggctgtcggacgttggcgagggcatgggtcagatgagaagacccccagggcgcaacctccgcaggcggccacggtcgcgtctgcgggtaacttctgtgagtgatcagaatgacagagtagtggagtgtcagctccagacacacaattccaagatggtaacctttcggttcgatctggatggcgactcacccgaagaaattgctgcggcgatggtttacaacgagttcatactgccttccgagcgggatggtttcctcaggcggattagggagattatccagcgtgtggagaccctccttaagagagacaccgggccaatggaagctgccgaagacaccctgagcccacaggaagagccagcccctctgccggcactgccagtgcctctgcctgatcccagtaacgaggaattacagtcttccacatctttggagcatagaagttggacagcttttagcacctcaagcagctcccctggcacccctctttctccgggaaacccattcagccccggcactcccatatctcccggcccgatctttcccattacaagtcctccctgtcatcctagtccctcaccattttcacccatttcttctcaggtgtccagcaacccctcccctcaccccacatctagcccccttccatttagctcatctacccctgagttcccagtccccctcagtcaatgtccatggtcctcactgcctactacatcacccccaactttctcccctacgtgcagccaagtcaccttgtcatcgccctttttccctccctgtccctctactagcagtttcccgtctacgacagcagctccactgttatcactcgcttcagccttctctctggccgtgatgaccgtggctcagtccctactgagcccaagcccgggcctgctgtcacagagtcctcccgcccctccttctccactcccatcgctgcccctcccccctccggtggcccccgggggccaggagtctcctagtccccatacagccgaggtagagagtgaagcctcaccacctcctgcacgtcccctgccaggggaggcacgcttagccccaatctccgaggaggggaagcctcagctagtcggtaggtttcaggtcacttcaagtaaagaacctgcagagcccctgccactgcagccaaccagccccacactaagtggaagtcctaagccatcaaccccccagctcacaagtgagagcagcgacacggaggatagtgccggaggagggcccgagacccgggaggccttggcagaatccgatagagcggctgaggggctgggcgctggagtggaagaggaaggagacgatggaaaggagcctcaggtcggaggatctccacagccactgtcccatccgagtcccgtttggatgaactactcctatagctctttgtgtttatcatctgaggaatccgaatcaagcggagaagatgaagagttctgggcggaactgcagtccttgcgacagaagcacctgtccgaagtggagaccttacagactctacaaaaaaaagagatagaggatttgtactccagactcggcaaacagccccctccagggattgtcgcacctgcagccatgctgagtagcaggcagagaagactttccaaggggtccttccccacttcaagaaggaattcactgcagcggagtgaaccccccgggccaggcataatgcggcgtaactctttgtccgggagctccactggcagtcaggagcagagggcgtccaagggagtgacattcgcaggcgacgtcgggcgtatgtag

SEQ ID NO: 223855 - DNA, 3732 bp, Artificial Sequence
  derived and/or modified sequence
atgctggccagccctgccacagagaccaccgtgctgatgagccagacagaggccgacctggccctgcggcccccaccacccctgggcacagctggccagccccggctgggccccccaccaagaagagcccggcgcttcagcggcaaggccgagccccggcccaggagcagccggctgagcagaagaagctctgtggacctgggcctgctgagctcctggagcctgcctgccagccctgccccagaccccccagaccccccagattctgctggccctggccctgcccggagccccccacccagcagcaaggagcccccagagggcacctggacagaaggagcccctgtgaaggctgctgaggacagcgcccggcctgagctgcctgacagcgctgtgggccctggcagccgggagcccctgcgggtgcctgaggccgtggccctggagaggagaagagagcaggaggagaaggaggacatggagacccaggccgtggccaccagcccagatggccgctacctgaagtttgacatcgagatcggccggggcagcttcaagacagtgtaccggggcctggacacagacaccaccgtggaggtggcctggtgtgagctgcagaccaggaagctgagcagagctgagcggcagcgcttcagcgaggaggtggagatgctgaagggcctgcagcaccccaacatcgtgcgcttctatgacagctggaagtctgtgctgcggggccaggtgtgcatcgtgctggtgacagagctgatgaccagcggcaccctgaagacctacctgcggcgcttccgggagatgaagccccgggtgctgcagcgctggagccggcagatcctgcggggcctgcacttcctgcacagccgggtgccccccatcctgcaccgggacctgaagtgtgacaacgtgttcatcaccggccccaccggctctgtgaagattggagacctgggcctggccaccctgaagagggccagctttgccaagtctgtgattggcaccccagagttcatggcccctgagatgtatgaggagaagtatgatgaagctgtggatgtgtatgccttcggcatgtgcatgctggagatggccaccagcgagtacccctacagcgagtgccagaatgctgcccagatctacaggaaggtgaccagcggcaggaagcccaacagcttccacaaggtgaagatccctgaggtgaaggagatcatcgagggctgcatcagaacagacaagaatgaacgcttcaccatccaggacctgctggcccacgccttcttccgggaggagcggggcgtgcacgtggagctggccgaggaggatgatggagagaagccaggcctgaagctgtggctgaggatggaggatgccaggagaggaggccggccccgggacaaccaggccatcgagttcctgttccagctgggcagagatgctgctgaggaggtggcccaggagatggtggccctgggcctggtgtgtgaggccgactaccagcctgtggcccgggctgtgcgggagcgggtggccgccatccagaggaagcgggagaagctgaggaaggcccgggagctggaggccctgcccccagagcccggccccccaccagccaccgtgcccatggcccctggcccccccagcgtcttccccccagagcctgaggagcctgaggccgaccagcaccagcccttcctgttcagacatgccagctacagcagcaccaccagtgactgtgaaacagatggctacctgagcagcagcggcttcctggatgccagtgaccctgccctgcagcccccaggaggagtgcccagcagcctggccgagagccacctgtgcctgcccagcgcctttgccctgagcatccccaggagcggccctggcagtgacttcagccctggggacagctatgccagtgatgctgccagcggcctgagtgatgtgggggagggcatgggccagatgagaagacctcctggcaggaacctgcggcggcggcccaggagccggctgcgggtgacctctgtgtctgaccagaatgacagagtggtggagtgccagctgcagacccacaacagcaagatggtgaccttccgctttgacctggatggagacagccctgaggagattgctgctgccatggtgtacaatgagttcatcctgcccagcgagagagatggcttcctgcggcgcatccgggagatcatccagagggtggagaccctgctgaagagggacaccggccccatggaggccgctgaggacaccctgagcccccaggaggagcccgcccccctgcctgccctgcctgtgcccctgcctgaccccagcaatgaggagctgcagagcagcaccagcctggagcaccgctcctggacagccttcagcaccagcagcagcagccctggcacccccctgagccctggcaaccccttcagccctggcacccccatcagccctggccccatcttccccatcaccagccccccctgccaccccagccccagccccttcagccccatcagcagccaggtgagcagcaaccccagcccccaccccaccagcagccccctgcccttcagcagcagcaccccagagttccctgtgcccctgagccagtgcccctggagcagcctgcccaccaccagcccccccaccttcagccccacctgcagccaggtgaccctgagcagccccttcttccccccctgccccagcaccagcagcttccccagcaccacagctgcccccctgctgagcctggccagcgccttcagcctggccgtgatgacagtggcccagagcctgctgagccccagccctggcctgctgagccagagccccccagccccacccagccccctgcccagcctgcccctgcccccacctgtggcccctgggggccaggagagccccagcccccacacagctgaggtggagagcgaggccagccccccaccagcccggcccctgcctggagaggcccggctggcccccatcagcgaggagggcaagccccagctggtgggccgcttccaggtgaccagcagcaaggagcctgctgagcccctgcccctgcagcccaccagccccaccctgagcggcagccccaagcccagcaccccccagctgaccagcgagagcagtgacacagaagattctgctgggggcggccctgagacccgggaggccctggccgagagtgacagagctgctgagggcctgggcgctggggtggaggaggagggagatgatggcaaggagccccaggtgggcggcagcccccagcccctgagccaccccagccctgtgtggatgaactacagctacagcagcctgtgcctgagcagcgaggagagcgagagcagcggggaggatgaggagttctgggccgagctgcagagcctgcggcagaagcacctgtctgaggtggagaccctgcagaccctgcagaagaaggagattgaagatctctacagccggctgggcaagcagcccccacctggcatcgtggccccagctgccatgctgagcagccggcagaggcggctgagcaagggcagcttccccaccagcagaagaaacagcctgcagaggtctgagcccccaggccctggcatcatgagaagaaacagcctgagcggcagcagcacaggcagccaggagcagagggccagcaagggcgtgacctttgctggagatgtgggccgcatgtag

SEQ ID NO: 223856 - DNA, 3732 bp, Artificial Sequence
  derived and/or modified sequence
atgctggccagccccgccaccgagaccaccgtgctgatgagccagactgaagccgatcttgcgcttcgacccccccccccacttggcacggccggacagcctcgtcttgggccgcctcctcggagggcccgccggttctccgggaaggctgagccaagacccaggagctcccgcttgtctcggcgttcctctgtggatctcggcctactttcttcatggagcctgcctgcatcccctgctcccgatccccccgacccaccggattcagctggcccaggccctgcgcgcagcccgccaccatcatccaaggaaccaccggagggtacatggacggagggagccccagtaaaggctgctgaagactccgctcgacctgagctccccgatagcgccgttggccctgggagtagagaaccccttagggtgccagaagccgtcgctctggagaggcgtagggagcaggaggaaaaggaagacatggaaacccaggcagtggccacttccccagacggccggtacctaaaatttgacattgaaatcggaagagggtcttttaaaaccgtttacaggggacttgacacagacactaccgtagaagtggcctggtgtgagctgcagacaagaaaattatcccgtgccgagaggcagcggttctctgaggaagtagagatgctgaagggcctccaacatcctaatatcgtgcgattctatgactcatggaagtctgtgcttcgagggcaagtatgtatcgtcctcgttaccgagctgatgacttccggaaccctgaaaacatatcttaggcggttccgcgagatgaagccacgtgtcctgcaacggtggagcaggcaaattctcaggggtctccactttctccactctcgtgtgccgcccatcctgcacagagacctgaaatgtgacaacgtttttataactggacccacaggctcagtgaaaataggagacctcggtcttgccaccctgaaacgagccagctttgccaagagtgtgataggaactcccgaattcatggcaccagagatgtacgaggagaagtatgacgaagctgtggacgtttacgcctttggaatgtgtatgctagagatggctacctccgaatacccgtactccgagtgtcagaacgcagctcagatttaccggaaggtcacatccggcagaaagcctaatagctttcacaaagttaagatccctgaggttaaggagattatcgagggctgcattaggacagacaaaaacgagaggttcaccatccaggatttgctggcccatgcatttttcagggaagaaaggggagtgcatgtcgagctggccgaggaggatgacggtgagaagcccggcctgaaactctggctgcggatggaggacgcccgtcgagggggtaggcctcgggacaatcaagccattgagtttctcttccaattggggagagacgccgcggaggaggtcgcgcaagaaatggtcgctttaggcttggtatgtgaagctgattaccagcctgtcgcccgggccgttagggagcgagttgccgctatacaacgaaagcgggagaagctgcggaaggcccgcgagctagaggccctaccccccgagcccggaccaccaccggccacagtccccatggccccggggcctccctctgtgttccctcccgagcctgaggagcctgaagcggatcaacatcagccattcctgttcaggcacgcctcatactcctctacaacctccgattgcgagacagacggctatctgagcagcagcggcttcctggatgccagcgaccccgcattacagccacccgggggagtgccaagctccctggcagagagccatctgtgcctaccatctgcttttgcactgagtattcctcgcagcgggccaggcagcgatttctctccaggtgatagctatgcgagtgacgcggcttctgggctgagtgacgtcggagagggaatgggtcagatgcgcagacctcctggccgcaatctgcggcgaaggcctcgtagccgactccgcgtaacttccgtttccgatcagaatgacagagttgtcgagtgccagctgcaaacccataatagcaaaatggtcaccttcaggttcgacctcgacggcgatagccccgaggagatcgcagcagctatggtctacaatgagtttatcctgccgagcgagcgggatgggtttcttaggaggatccgtgaaatcatccagcgcgttgagacccttctgaaaagagatactggtccgatggaggccgccgaggacacactctcccctcaggaggaaccagcccctctgccagccttaccagttccactgcccgacccttcaaatgaggaactgcaatcctctacttctcttgaacacagaagctggacagcgttctctacctcgagctcttcaccgggaaccccactgtccccagggaatcccttttctcctggtaccccaatctcacctggcccgatatttcccataacctcgccaccatgtcatcctagccccagcccgttcagtccgattagctctcaggtctcatcaaacccgagcccccaccccaccagcagcccacttccttttagttcttccactcctgagtttcctgtgcccctgtcacaatgcccatggtctagcctgcccaccacctcacctccaacattttcccctacatgcagtcaggtgaccctgtcatcgcctttttttccaccctgccctagtactagtagttttccgtctacgactgccgctccactgttgtctttggcgagtgcgttttccctggcagtcatgacagtggcccaaagcctactgtcaccgagtccaggactgctctcccagtctccacctgcgcctcctagcccgctgccatcgctacccctcccacctccagttgccccgggtggtcaggagtcgccatccccgcatacagcggaagtggagtctgaggcgtctccgccccccgcccggcccttgcccggcgaggctagactcgccccaatttctgaggaagggaaaccacagttagttggtcggttccaggtaacctcaagcaaagaacctgccgaaccgcttccattacaaccgacctcccccaccctctccggcagccccaagccctctacgcctcagctcacaagtgagagtagcgataccgaggacagcgccggcgggggccccgagacccgggaggccctggcagaaagcgatagggcagccgaaggtctaggcgccggggtggaagaggagggagacgacggcaaggagccacaggtgggcggatcaccccagccactgtcacacccaagtcccgtctggatgaactacagttactcctcattgtgtttgtcctccgaggaatccgaatcttccggagaggatgaagaattttgggccgagctgcagagcctaagacagaagcacctttcagaagttgaaactctgcaaaccctgcagaagaaggaaatcgaggatctatactctcgcctggggaagcaacctcctcccggaattgttgccccggccgccatgttgtcatccagacagcgaagactgtccaaggggtcctttccaacaagtcggaggaattccttgcaacggtctgaacctcccggtccagggatcatgcgccgcaattctctgtccgggagtagtacagggtcacaagaacaacgcgctagcaagggcgttaccttcgcgggggacgtgggcaggatgtag

SEQ ID NO: 223857 - DNA, 3732 bp, Artificial Sequence
  derived and/or modified sequence
atgctcgcgtcccctgccacagagacaacggtcctgatgtcccagaccgaagctgatctggctctacgacctccccctcccttgggaacggccggtcagcctcgtctaggccctcctcccaggcgtgcccgtcggttttctggtaaggccgagcctaggccacgcagttcacgcctgagccggcgatcaagcgttgatctgggactgctttcttcctggtccttgcctgctagtcctgcccctgacccccctgacccacccgactcggcaggcccaggaccggctaggtctcccccaccctcgagcaaggagcccccagaaggaacatggactgagggtgcaccagttaaggcagctgaggactcagctcgccctgaactgccagatagcgccgttggccctggatctcgagagccgcttcgggtgcccgaggcagtggctctcgagaggcggagggagcaggaagagaaggaagatatggaaacacaggctgttgctacatcaccagatggtagatacctgaagtttgatattgagatcggcagggggtccttcaaaacagtgtatcggggactggataccgatactactgtggaggtggcgtggtgcgagctgcaaacacgaaaattaagccgagccgagcggcaaaggttcagcgaagaagtggagatgctcaagggcctgcagcatcctaatatcgtgaggttttatgacagctggaaatctgtgctgaggggacaggtctgcatagtactcgtaactgaactcatgactagcggaacattgaagacatacctccgcaggttcagagagatgaaaccaagggttctacagcgatggtccagacaaatcctcagaggcctccatttcttacactctagagtgcccccaatcctgcaccgtgatctgaagtgtgacaacgtttttataacagggccaaccggttccgtaaagattggcgacctggggctcgctacgctgaagcgggcttcatttgccaaatcagtaatcggtacccctgaattcatggctccagagatgtacgaagagaagtatgatgaagctgtggatgtctacgcatttgggatgtgcatgctggagatggccaccagcgagtacccttactctgagtgccaaaatgcagcacagatctacaggaaagttacctccgggcgaaaacctaattcattccacaaggttaagatccccgaggtaaaagaaattattgaaggctgcatcagaaccgacaagaacgaacgcttcactattcaggatctcctggcacatgcattcttcagggaagaacggggtgttcacgtggaactcgccgaggaagatgacggagagaagccaggccttaagctgtggctccggatggaggacgctagaaggggagggcgtccgagggacaaccaggctattgaatttctcttccagctaggcagggatgcggctgaggaagtggcccaagaaatggttgccctggggctcgtatgcgaagctgactaccagcctgtcgcccgagcagtgcgcgagagagtggccgctattcaacgaaagcgcgagaaactgaggaaggccagagagctggaagccctcccccctgagccgggtccccctccagctaccgtgcccatggccccaggtccacctagcgtattccctccggaacccgaggagcccgaggccgatcagcaccagccctttctgttcagacatgcctcctattctagcaccacctctgattgtgaaaccgatggctatctttcatcatcaggcttcttggatgcgagcgaccctgccctacagccccctggcggtgttccgagttcattggcagaatcccacttgtgtttaccaagcgctttcgctttgtcgataccaagatccgggccaggttcggatttttcacccggtgatagttatgcatctgacgctgcttccgggctgagtgatgtcggagaaggaatgggtcaaatgagacgacctccaggacgtaacctccgacggcgacccaggagccgcctgcgggtaacgtcagtaagtgaccaaaacgaccgtgtcgtcgagtgtcagctccagacccacaattccaagatggtcactttcaggtttgatctcgacggggattcaccagaggagatcgccgctgctatggtctataacgaatttatactgcctagcgagagagacgggttcctgagaaggatccgagaaatcatccagcgggtggagacacttctaaagcgggataccgggccaatggaggctgccgaggacacgctgtccccccaggaggaaccagcgccacttcctgccctccccgtgcctcttccagacccttccaatgaggaactccaatcttctacttctcttgagcacagatcatggaccgcattctcgacatcttcttcatctccgggtaccccccttagtccgggtaaccctttctcacccggaacgcctataagccccggaccaatcttccccattacgtcaccgccatgccatccttctcctagtccgtttagcccaatctcttcacaagttagttctaacccgtctccccatcccacctcttcacctcttcctttcagtagctccaccccggaatttccggtgccacttagccagtgtccttggtcgtccttaccgacgacatcacccccaacattctctccaacttgctcgcaggtgacccttagctctccattctttccgccatgtccctcaacatccagctttccgtcaacgaccgccgcacccctcctgtcgctggcctcagctttttccttggcagttatgactgtagcgcagtctttgctgagtccatcaccaggcctgctgagtcagagtccacctgcccctccctctcctctcccctcgctgccactgccaccgcctgttgctccagggggacaggagagtccctctccacataccgctgaggtggagagcgaggccagtccaccgccagcgagacctttgccaggagaggcccgacttgctcccatttcagaggaaggcaaaccccaactcgtgggcaggtttcaggtcactagcagtaaagagcccgctgaacccctgccacttcagcccacctctccgactctgtctgggtctccaaagccgtctacaccacagttgacttccgagtctagcgatactgaagattccgcagggggtggccctgaaacccgggaggcgctcgccgaaagcgaccgggcagcagaaggcttgggcgcaggggttgaggaggaaggcgatgacggcaaagagccccaggtcggcggaagcccccaacccttgtcccacccatcaccagtttggatgaactacagctatagtagtctgtgtctgtcctcagaagagagcgagtcgagcggagaggatgaggagttctgggccgagctgcagtccctcaggcaaaagcacctcagcgaggtcgaaacactgcagacactgcaaaaaaaagaaatcgaagacctttacagtcggctcggcaaacagccccctccagggatcgtggccccagccgctatgctgtcgagcagacaacggaggctgtccaaaggctcatttccaacatctcgacgaaactctttgcagagaagtgagcccccagggcctggaatcatgagacgcaacagcctgtcaggtagctccactgggagtcaggagcagcgggcatccaagggcgttacctttgcaggagacgtcggacgaatgtag

SEQ ID NO: 223858 - DNA, 4155 bp, Artificial Sequence
  derived and/or modified sequence
gtccgtctgtcaggccgcctcctctccggccgtctgattttctacccttcggcgccctgctcttcctcatgttggcatccccggccacggagaccaccgtcctcatgtcccagactgaggccgacctggccctgcggcccccgcctcctcttggcaccgcggggcagccccgcctcgggccccctcctcgccgagcgcgccgcttctccgggaaggctgagccccggccgcgctcttctcgtctcagccgccgtagctcagtcgacttggggctgctgagctcttggtccctgccagcctcacccgctccggacccccccgatcctccggactccgctggtcctggccccgcgaggagcccaccgcctagctccaaagaaccccccgagggcacgtggaccgagggagcccctgtgaaggctgcggaagactccgcgcgtcccgagctcccggactctgcagtgggcccggggtccagggagccgctaagggtccctgaagctgtggccctagagcggcggcgggagcaggaagaaaaggaggacatggagacccaggctgtggcaacgtcccccgatggccgatacctcaagtttgacatcgagattggacgtggctccttcaagacggtgtatcgagggctagacaccgacaccacagtggaggtggcctggtgtgagctgcagactcggaaactgtctagagctgagcggcagcgcttctcagaggaggtggagatgctcaaggggctgcagcaccccaacatcgtccgcttctatgattcgtggaagtcggtgctgaggggccaggtttgcatcgtgctggtcaccgaactcatgacctcgggcacgctcaagacgtacctgaggcggttccgggagatgaagccgcgggtccttcagcgctggagccgccaaatcctgcggggacttcatttcctacactcccgggttcctcccatcctgcaccgggatctcaagtgcgacaatgtctttatcacgggacctactggctctgtcaaaatcggggacctgggcctggccacgctcaagcgcgcctcctttgccaagagtgtcatcgggaccccggaattcatggcccccgagatgtacgaggaaaagtacgatgaggccgtggacgtgtacgcgttcggcatgtgcatgctggagatggccacctctgagtacccgtactccgagtgccagaatgccgcgcaaatctaccgcaaggtcacttcgggcagaaagccgaacagcttccacaaggtgaagatacccgaggtgaaggagatcattgaaggctgcatccgcacggataagaacgagaggttcaccatccaggacctcctggcccacgccttcttccgcgaggagcgcggtgtgcacgtggaactagcggaggaggacgacggcgagaagccgggcctcaagctctggctgcgcatggaggacgcgcggcgcggggggcgcccacgggacaaccaggccatcgagttcctgttccagctgggccgggacgcggccgaggaggtggcacaggagatggtggctctgggcttggtctgtgaagccgattaccagccagtggcccgtgcagtacgtgaacgggttgctgccatccagcgaaagcgtgagaagctgcgtaaagcaagggaattggaggcactcccaccagagccaggacctccaccagcaactgtgcccatggcccccggtccccccagtgtcttcccccctgagcctgaggagccagaggcagaccagcaccagcccttccttttccgccacgccagctactcatctaccacttcggattgcgagactgatggctacctcagctcctccggcttcctggatgcctcagaccctgcccttcagccccctgggggggtgccatccagcctggctgagtcccatctctgcctgccctcggcttttgccctatccattccacgttctggccctggaagtgacttttcccccggggacagctatgcctcagatgcagcttcaggccttagcgatgtgggagaagggatgggacaaatgaggagacccccagggaggaatctccggcgcagaccccgatcccggctgcgggtcactagtgtctcagaccagaatgacagagtggttgagtgccagctacagacccataacagcaagatggtgaccttccgatttgatctggatggggacagcccggaagagattgcagctgccatggtatataacgagttcattctgccttcggagcgagatggatttctcagacggattcgggagattatccagcgagtggagaccctgttgaagagagacactggccccatggaggctgctgaagacaccctaagcccccaggaggagccagcaccattacctgccctgcccgtccccctcccagacccatccaatgaagagctccagagcagcacctccctggagcacaggagctggacagccttctccacctcctcatcttctcctggaactcctttgtctcctggaaacccattttcccctggaacccccatttccccaggtcccatcttccccatcacttctcccccatgtcatcccagcccctccccattctcccccatttcttcccaggtctcctcaaatccctctccacaccccaccagctctccacttccattctcctccagcacacccgagtttccggtcccactctctcagtgtccctggagttctctccccacgacttctccacctacgttctctcccacttgttctcaggtcactcttagttcccctttctttcctccgtgcccctccacttcttccttcccctccaccacagcagcccctctcctttctctggctagtgccttctcactggctgtgatgactgtggcccagtccctgctgtccccctcacctgggctcctttcccagtctcctccagcccctcctagtcccctccctagcctgccccttccccctcccgttgctcctggtggccaggaaagcccttcaccccacacagctgaggtggagagtgaggcctcaccacctcctgctcggcccctcccaggggaagccaggctggcgcccatctctgaagagggaaagccgcagcttgttgggcgtttccaagtgacttcatccaaggaaccggctgagcctcttcccttgcagccaacatcccccactctctctggttctccaaaaccttcaacccctcagctcacttcagagagctcagatacagaggacagtgctggaggcgggccagagaccagggaagctctggctgagagcgaccgtgcagctgagggtctgggggctggagttgaggaggaaggagatgatgggaaggaaccccaagttgggggcagcccccaacccctgagccatcccagcccagtgtggatgaactactcctacagcagcctgtgtttgagcagcgaggagtcagaaagcagtggggaagatgaggagttctgggctgagctgcagagtcttcggcagaagcacttgtcagaggtggaaacactacagacactacagaaaaaagaaattgaagatttgtacagccggctggggaagcagcccccaccgggtattgtggccccagctgctatgctgtccagccgccagcgccgcctctccaagggcagcttccccacctcccgccgcaacagcctacagcgctctgagcccccaggccctggcatcatgcgaaggaactctctgagtggcagcagcaccggctcccaggagcagcgggcaagcaagggggtgacattcgccggggatgttggcaggatgtgaattcagaacagaagccatgtatctcccccacaccagggcccaccatggagcttgtgttctcagaatctgatgctttctgatcaacaaaactgagcaaggaagatcccaacactgaaggggtagaaggccaggggggcatggagagtgcagctccattatagtgaagagccaaacatatgtgaactgtttgctgtgtggaggtgttagttctgctgcctaccatcttcatctctagcacctcccctgccaagagtcaaccactaagcaatcccacccaagcctggatgcttctagaggggcccactcccagctgggagagtgtaggggatatgctcacaccacattagcagcaacc

SEQ ID NO: 223859 - protein, 521 aa, Artificial Sequence
  derived and/or modified sequence
MAAEPNKTEIQTLFKRLRAVPTNKACFDCGAKNPSWASITYGVFLCIDCSGVHRSLGVHLSFIRSTELDSNWNWFQLRCMQVGGNANATAFFRQHGCTANDANTKYNSRAAQMYREKIRQLGSAALARHGTDLWIDNMSSAVPNHSPEKKDSDFFTEHTQPPAWDAPATEPSGTQQPAPSTESSGLAQPEHGPNTDLLGTSPKASLELKSSIIGKKKPAAAKKGLGAKKGLGAQKVSSQSFSEIERQAQVAEKLREQQAADAKKQAEESMVASMRLAYQELQIDRKKEEKKLQNLEGKKREQAERLGMGLVSRSSVSHSVLSEMQVIEQETPVSAKSSRSQLDLFDDVGTFASGPPKYKDNPFSLGESFGSRWDTDAAWGMDRVEEKEPEVTISSIRPISERATNRREVESRSSGLESSEARQKFAGAKAISSDMFFGREVDAEYEARSRLQQLSGSSAISSSDLFGDMDGAHGAGSVSLGNVLPTADIAQFKQGVKSVAGKMAVLANGVMNSLQDRYGSY

SEQ ID NO: 223860 - DNA, 2803 bp, Artificial Sequence
  derived and/or modified sequence
tgggaaggagagaaaatggcggcggagccgaacaagaccgaaatccagactctttttaagaggcttcgcgcagttccaaccaacaaggcctgtttcgactgcggcgccaagaatccgagttgggccagcatcacgtacggtgttttcttgtgcattgactgttccggggtgcaccgctccctgggcgtccatctgagcttcatcaggtccacagagttggattccaactggaactggttccagctgaggtgtatgcaggtcggcgggaatgccaatgcgacggctttttttcgccaacatggatgcacagccaatgatgccaacaccaaatataatagccgagctgcccagatgtaccgggagaagatccggcagctggggagtgcggccctggctaggcatggcactgatctttggatagacaacatgagtagtgccgttcctaatcactccccagagaagaaggactctgatttcttcacagaacacactcaaccccctgcctgggatgcgccagccactgagccttcagggacccagcagccagccccgtctacagagagcagtggcctggcacagccggagcatggccccaacacagacctgcttggcacctcacccaaagcctcactggaactgaaaagctccatcattggcaagaagaagccagcagcagctaagaaagggctgggtgccaagaaaggcctaggggcccagaaggtgagcagccagagcttcagtgagattgagcggcaggctcaggtggcagagaagctccgtgagcagcaggcagccgatgccaagaagcaggcggaggagtccatggtcgcctccatgcgtctggcctaccaggagctccagattgatcgtaagaaagaggaaaagaagctacagaatctggaagggaagaagcgagagcaggcagaaaggttgggcatgggcttggtatcccgaagctctgtctcccactccgtgctgtctgagatgcaggtgattgagcaggaaaccccagtgagtgcaaaatcctctcgctcgcagctggacttgtttgacgatgttggtactttcgcctctggacccccaaagtacaaggacaatcccttttccttaggggaaagctttggctcccgctgggatacagatgctgcctggggtatggacagggtagaggagaaggagccagaagtgaccatctcaagcatccggcctatttcagaaagagccacaaaccggagggaagtggagagccggagctcaggcctcgagtctagtgaggcgcgtcagaaattcgcaggagccaaagccatctcatctgacatgttctttgggcgggaggtggatgcggagtatgaggccaggtctcggctgcagcagctctcaggcagcagtgccatcagctcttcagacctctttggggacatggatggagctcacggagcaggaagtgtatctctggggaacgtgctgcctacagcggacattgcccagtttaagcagggtgtcaagtctgtggctgggaaaatggctgtgctggccaatggtgtgatgaattccttgcaggatcgctacggttcctactgatccgagctctgtgactcaggcttacgatggtgacggcaacaagaactccacagttcccaggctggggatgctttgccttgtggaagctggggaggatttgttacttcgtatgtgtggtgtgtgtgtggggtggcctttgaggcgctcactcctgtgaggggaatggtcagtaccagcccttgtcctctgcctgtggactgagccctttattccctctcacaccaccctccgtgtgttagactcttgtccttctgtcctgcccccacagctgctgctcacttatcctgccatactgggaaagggggttcccccacgatggcttattctgggtccagactttccccaggtagggaaagcggaaggtagaaggctttttttgctggctctagggttcttctagttcgaggccttgggtccccatcctctggaaccagggggaggcctggaaggagttcactgtagacccgtcccatggggaaagaggctgcggacttgctgctgctgctgctgccagtggcctcttctgggtgccaggagaggggaaggacctttgtctgggcgttaccaagggctggaaactttacctggtacctaaaggtttcatttgggatcagaccggagacccttgggttctcccgtctcaccacccctttctacagtaagcacttggaagattgtttcagggtgtctcagggtccctctgtaccatctgctgtggaatgcaggaccctctgtgacattctttatcccttcttccccgggttggtggccatggagggtcttgtctgctgtgattcgactctggatgctgtgagcttgatgctggccagggaagcagaggatgtgagaggcagaggcaggctcctggggctgagctccttcctctgcatcattctgggcttggcctggacagcacccgccagtgagagctgtgggcctcaccctctggcagctgagccaagcactgtcattcttggtgccatcttcccctgccgcaccggcagtctcagcccagcccccacctttgggttgtaggttgggctcccaagcaacacagaccactcttccccttgcccctcccccagagggacttgactttctttctggactgtttgtattgaaacaaagtggtgtcaaaataaagcccctgcagggcctggctccctgttggtctgagtgaaaaaaaaaaaaaaaaaaaaaaaaaaaaaaaaaaaaaaaaaaa

SEQ ID NO: 223861 - DNA, 1566 bp, Artificial Sequence
  derived and/or modified sequence
atggcggccgagcctaacaagacggaaattcagaccctctttaagcgtctacgtgccgtccccaccaacaaggcctgctttgactgcggggcaaagaacccctcgtgggcctctatcacctatggcgtttttctatgtatcgattgttcaggagtccatcgctcacttggggttcacttgagctttattcgctcgacggagctcgattcgaactggaactggtttcagctgaggtgcatgcaggttggtgggaatgctaacgctaccgctttttttcgccagcatggatgtaccgcaaatgatgcgaatactaaatacaacagtcgcgcagctcaaatgtatcgggagaagattcggcaactggggagtgcagctctggcccgccacggcacagatctctggatagataatatgagctcagcagtacctaaccattctcctgagaaaaaggattcagacttcttcaccgagcacacccagccgcccgcctgggatgcacccgcaacggagcctagtggaactcagcagccagcgccatcaaccgagtcctctggtttggcacaacctgaacacgggccaaacacagatctcctaggtacctcccccaaggcctccctggagctgaaatcatcaatcataggaaagaagaagccagccgcagctaaaaagggcctgggcgccaagaagggcctcggagctcagaaggtttcctcacagtcgttctcggagatcgaaaggcaggctcaggtcgctgaaaagctacgggagcagcaggccgccgatgctaaaaagcaggcagaagagtcaatggtggctagcatgaggctcgcatatcaagagctgcaaatcgatcgtaaaaaagaagagaaaaagctgcaaaacctggaaggcaagaagagagagcaggcggaaaggttgggaatgggcctggtgagcaggtccagtgttagccattccgtcctaagtgaaatgcaggtaatcgaacaggaaacccccgtgtctgccaaatcatcccgctcccaactggatctttttgatgacgtcgggactttcgcctcgggaccccccaagtacaaagacaacccattctccctcggagaatcatttggatcccgatgggataccgacgccgcttggggaatggatagagtagaagagaaagaacccgaggtaacaatttcaagcataagacctatctcagagcgggctacaaataggagggaggtggaaagtcgctcttctggccttgaatcttccgaagcaagacagaaattcgcaggcgcaaaagcaatttctagcgacatgttctttggtcgcgaagtggacgccgagtatgaggcacgctctcgacttcagcagttgagtggatcatctgccatttcatctagcgacctgttcggcgacatggacggagctcatggtgcggggtccgtgagcctcggcaacgtgctgcccaccgcggatattgctcagtttaaacagggcgtaaagtctgttgcaggcaagatggcagttttggcaaatggagttatgaacagtttgcaggaccgatatgggagttattag

SEQ ID NO: 223862 - DNA, 2976 bp, Artificial Sequence
  derived and/or modified sequence
cccgccccggctgcggattggcccggcgcggcgttgattcttgcggccgcggttgtcgtcgccgcccccgtcccgccggctgcccattggtccagatcggactccaatcaccccacccctcggctggcccaggcaccgctgaggccggcctggtgagcccgccctccccgccgtggattggcccgcggcgggacccgtcagccgcggttgtgtctgggaaggagagaaaatggcggcggagccgaacaagaccgaaatccagactctttttaagaggcttcgcgcagttccaaccaacaaggcctgtttcgactgcggcgccaagaatccgagttgggccagcatcacgtacggtgttttcttgtgcattgactgttccggggtgcaccgctccctgggcgtccatctgagcttcatcaggtccacagagttggattccaactggaactggttccagctgaggtgtatgcaggtcggcgggaatgccaatgcgacggctttttttcgccaacatggatgcacagccaatgatgccaacaccaaatataatagccgagctgcccagatgtaccgggagaagatccggcagctggggagtgcggccctggctaggcatggcactgatctttggatagacaacatgagtagtgccgttcctaatcactccccagagaagaaggactctgatttcttcacagaacacactcaaccccctgcctgggatgcgccagccactgagccttcagggacccagcagccagccccgtctacagagagcagtggcctggcacagccggagcatggccccaacacagacctgcttggcacctcacccaaagcctcactggaactgaaaagctccatcattggcaagaagaagccagcagcagctaagaaagggctgggtgccaagaaaggcctaggggcccagaaggtgagcagccagagcttcagtgagattgagcggcaggctcaggtggcagagaagctccgtgagcagcaggcagccgatgccaagaagcaggcggaggagtccatggtcgcctccatgcgtctggcctaccaggagctccagattgatcgtaagaaagaggaaaagaagctacagaatctggaagggaagaagcgagagcaggcagaaaggttgggcatgggcttggtatcccgaagctctgtctcccactccgtgctgtctgagatgcaggtgattgagcaggaaaccccagtgagtgcaaaatcctctcgctcgcagctggacttgtttgacgatgttggtactttcgcctctggacccccaaagtacaaggacaatcccttttccttaggggaaagctttggctcccgctgggatacagatgctgcctggggtatggacagggtagaggagaaggagccagaagtgaccatctcaagcatccggcctatttcagaaagagccacaaaccggagggaagtggagagccggagctcaggcctcgagtctagtgaggcgcgtcagaaattcgcaggagccaaagccatctcatctgacatgttctttgggcgggaggtggatgcagagtatgaggccaggtctcggctgcagcagctctcaggcagcagtgccatcagctcttcagacctctttggggacatggatggagctcacggagcaggaagtgtatctctggggaacgtgctgcctacagcggacattgcccagtttaagcagggtgtcaagtctgtggctgggaaaatggctgtgctggccaatggtgtgatgaattccttgcaggatcgctacggttcctactgatccgagctctgtgactcaggcttacgatggtgacggcaacaagaactccacagttcccaggctggggatgctttgccttgtggaagctggggaggatttgttacttcgtatgtgtggtgtgtgtgtggggtggcctttgaggcgctcactcctgtgaggggaatggtcagtaccagcccttgtcctctgcctgtggactgagccctttattccctctcacaccaccctccgtgtgttagactcttgtccttctgtcctgcccccacagctgctgctcacttatcctgccatactgggaaagggggttcccccacgatggcttattctgggtccagactttccccaggtagggaaagcggaaggtagaaggctttttttgctggctctagggttcttctagttcgaggccttgggtccccatcctctggaaccagggggaggcctggaaggagttcactgtagacccgtcccatggggaaagaggctgcggacttgctgctgctgctgctgccagtggcctcttctgggtgccaggagaggggaaggacctttgtctgggcgttaccaagggctggaaactttacctggtacctaaaggtttcatttgggatcagaccggagacccttgggttctcccgtctcaccacccctttctacagtaagcacttggaagattgtttcagggtgtctcagggtccctctgtaccatctgctgtggaatgcaggaccctctgtgacattctttatcccttcttccccgggttggtggccatggagggtcttgtctgctgtgattcgactctggatgctgtgagcttgatgctggccagggaagcagaggatgtgagaggcagaggcaggctcctggggctgagctccttcctctgcatcattctgggcttggcctggacagcacccgccagtgagagctgtgggcctcaccctctggcagctgagccaagcactgtcattcttggtgccatcttcccctgccgcaccggcagtctcagcccagcccccacctttgggttgtaggttgggctcccaagcaacacagaccactcttccccttgcccctcccccagagggacttgactttctttctggactgtttgtattgaaacaaagtggtgtcaaaataaagcccctgcagggcctggctccctgttggtctgagtgaa

SEQ ID NO: 223863 - DNA, 1566 bp, Artificial Sequence
  derived and/or modified sequence
atggctgctgagcccaacaagacagagatccagaccctcttcaagaggctgcgggctgtgcccaccaacaaggcctgctttgactgtggggccaagaaccccagctgggccagcatcacctatggagtcttcctgtgcatcgactgcagcggcgtgcacaggagcctgggcgtgcacctgtccttcatccgcagcacagagctggacagcaactggaactggttccagctgcgctgcatgcaggtgggcggcaatgccaatgccacagccttcttccggcagcacggctgcacagccaatgatgccaacaccaagtacaacagccgggccgcccagatgtaccgggagaagatccggcagctgggcagcgctgccctggcccggcatggaacagacctgtggattgacaacatgagcagcgctgtgcccaaccacagccctgagaagaaggacagcgacttcttcacagagcacacccagcccccagcctgggatgccccagccacagagcccagcggcacccagcagcctgcccccagcacagagagcagcggcctggcccagcctgagcacggccccaacacagacctgctgggcaccagccccaaggccagcctggagctgaagagcagcatcatcggcaagaagaagccagctgctgccaagaagggcctgggcgccaagaagggcctgggcgcccagaaggtgagcagccagagcttcagcgagattgaaaggcaggcccaggtggccgagaagctgcgggagcagcaggccgcagatgccaagaagcaggccgaggagagcatggtggcctccatgaggctggcctaccaggagctgcagattgacaggaagaaggaggagaagaagctgcagaacctggagggcaagaagcgggagcaggccgagcggctgggcatgggcctggtgagccgcagctctgtgagccacagcgtgctgtctgagatgcaggtgattgagcaggagacccctgtgtctgccaagagcagccgcagccagctggacctgtttgatgatgtgggcacctttgccagcggcccccccaagtacaaggacaaccccttcagcctgggggagagctttggcagccgctgggacacagatgctgcctggggcatggacagagtggaggagaaggagcctgaggtgaccatcagcagcatccggcccatcagcgagcgggccaccaacagaagagaggtggagagccgcagcagcggcctggagagcagcgaggcccggcagaagtttgctggggccaaggccatcagcagtgacatgttcttcggccgggaggtggatgctgaatatgaggcccggagccggctgcagcagctgagcggcagcagcgccatcagcagcagtgacctgtttggagacatggatggagcccatggagctggctctgtgtccctgggcaatgtgctgcccacagctgacatcgcccagttcaagcagggcgtgaagtctgtggccggcaagatggctgtgctggccaacggggtgatgaacagcctgcaggacagatatggcagctactag

SEQ ID NO: 223864 - DNA, 1566 bp, Artificial Sequence
  derived and/or modified sequence
atggccgccgagcccaacaagaccgagatccagaccctgttcaagcgcctccgcgcagtgcctacaaacaaggcatgcttcgactgcggcgccaagaacccttcctgggccagcatcacctatggagtattcctgtgtatcgattgctcgggagtgcatagatctctgggggtgcatctgtcattcattaggtctacagagctggatagcaactggaattggttccagctgagatgtatgcaggtaggaggcaacgccaacgcgacggcattttttcggcagcacggttgtaccgccaatgacgcgaacaccaaatacaactcaagggccgctcagatgtatcgggagaagattcgacagctcgggtcagcagccttagcacgacatgggacagatctgtggatcgacaacatgagctccgctgtgcccaatcactcacccgagaaaaaggattctgactttttcacagaacatactcagcctcccgcgtgggatgcccccgccacagagccctcgggaacacaacaacctgcaccaagtacagaatcatccgggcttgctcagcccgaacatgggcccaatactgatctactgggaacctctcctaaggcctcactggagctaaagtcttccataattggtaagaagaagccggccgcagcaaagaagggtctcggtgccaagaaaggactgggagctcagaaggtgtctagccagtccttctccgagatcgaacgacaagcccaggttgccgaaaagttaagggaacagcaggccgcagacgcaaaaaagcaggccgaggaatctatggtggccagtatgcgattggcttaccaggagttgcagatcgatcgaaaaaaggaggaaaagaagctgcagaacctggagggtaaaaagcgggaacaggcggagaggcttggcatgggcctggtgtctcgtagcagcgtgtctcactccgtactgtcagaaatgcaggtcattgaacaggagacgccggtctctgcaaagagtagcaggtcacagttggatctcttcgatgatgtgggcaccttcgcttccgggccacctaagtacaaggacaatccattctcccttggggaaagctttggtagccgttgggatacagacgctgcctgggggatggatagggtcgaagaaaaggagcctgaagtgactatatcttcgataaggccaatctccgagcgtgccacaaacagaagagaggtcgaaagcaggagcagcggactggagtcctctgaggcgcgccaaaaattcgcaggtgcaaaggctatttcttcagacatgttcttcggccgagaggtcgatgccgagtatgaagccagaagtcggctccagcagctcagcgggagctctgctatttcaagcagtgatctctttggcgacatggacggggctcatggcgcgggtagtgtttcactgggaaacgttcttcctaccgcagacatcgcccaatttaaacagggggttaagtctgttgctgggaaaatggctgttctagcaaacggcgtgatgaatagcctgcaggataggtacggatcttactag

SEQ ID NO: 223865 - DNA, 1566 bp, Artificial Sequence
  derived and/or modified sequence
atggccgcagagccaaacaagacagagattcagactctgttcaagcgactcagagcagtgcctactaacaaagcctgctttgactgtggcgctaagaatcccagctgggccagcataacttatggcgtgttcttgtgcattgattgtagtggtgtgcatagaagcctcggcgtccacttgtctttcatcagatccactgaactcgactcgaactggaattggtttcagttaaggtgcatgcaggtgggcggaaatgcaaacgcaacggccttctttaggcagcacggctgtaccgccaatgatgccaacaccaaatacaatagccgtgcagcccagatgtatcgcgagaagatccgccaactggggtcagccgcactggctcgccatgggaccgacctgtggatcgacaacatgagcagtgccgtgcctaaccacagccccgaaaagaaggattcggacttttttacagagcatacacagcctcccgcttgggacgcgcctgccacggagccctccggaacccagcagcctgctccaagtaccgagtcctccgggttggcccaaccggagcatggaccgaacacagatctgctgggcacatcgcccaaggcctctctggaactgaaatccagcatcataggcaagaagaaacccgctgctgctaagaaaggtttgggtgcaaagaagggattgggtgcgcagaaagtatcatcccagtcttttagcgaaatcgaacgacaggcccaggtggcagaaaagcttcgcgaacaacaggcggcagacgccaagaaacaggccgaggaatcaatggtggctagcatgcgtttggcctaccaagaactccagatcgatcgaaagaaggaggagaaaaagttacagaacctagagggtaaaaaaagggagcaggcagagcgcctgggcatgggactcgtcagccggtccagcgtgagccactctgtccttagcgagatgcaagtgatagaacaagagaccccggtgagtgccaaatcgagtaggtctcagttagatttgtttgacgatgtgggaacatttgcctctgggccacccaaatacaaggacaatcccttttcactgggggaatctttcggctcgcgctgggacactgacgccgcttggggcatggacagggtggaggagaaggaaccagaggtcaccatttctagcatcaggcctatctcagaacgggcaactaatagacgagaggtggaaagcagaagtagcgggctggagagttctgaagcacgacagaaattcgcaggcgctaaagccataagttcagacatgtttttcggccgagaagtggacgccgaatatgaggcaaggtcccggctacaacagctcagtggttcatccgctattagttctagtgacttgtttggagacatggacggagcgcacggcgcaggctcagtttccctgggtaacgtgttgcccactgcagacatcgcccaatttaaacagggagtcaagtccgtggctggcaagatggcagttttggcgaacggcgtaatgaactccctgcaagacaggtacggatcatactag

SEQ ID NO: 223866 - DNA, 1566 bp, Artificial Sequence
  derived and/or modified sequence
atggccgccgagcccaacaagaccgagatccagaccctgttcaagagactgagagccgtgcccaccaacaaggcctgcttcgactgcggcgccaagaaccccagctgggccagcatcacctacggcgtgttcctgtgcatcgactgcagcggcgtgcacagaagcctgggcgtgcacctgagcttcatcagaagcaccgagctggacagcaactggaactggttccagctgagatgcatgcaggtgggcggcaacgccaacgccaccgccttcttcagacagcacggctgcaccgccaacgacgccaacaccaagtacaacagcagagccgcccagatgtacagagagaagatcagacagctgggcagcgccgccctggccagacacggcaccgacctgtggatcgacaacatgagcagcgccgtgcccaaccacagccccgagaagaaggacagcgacttcttcaccgagcacacccagccccccgcctgggacgcccccgccaccgagcccagcggcacccagcagcccgcccccagcaccgagagcagcggcctggcccagcccgagcacggccccaacaccgacctgctgggcaccagccccaaggccagcctggagctgaagagcagcatcatcggcaagaagaagcccgccgccgccaagaagggcctgggcgccaagaagggcctgggcgcccagaaggtgagcagccagagcttcagcgagatcgagagacaggcccaggtggccgagaagctgagagagcagcaggccgccgacgccaagaagcaggccgaggagagcatggtggccagcatgagactggcctaccaggagctgcagatcgacagaaagaaggaggagaagaagctgcagaacctggagggcaagaagagagagcaggccgagagactgggcatgggcctggtgagcagaagcagcgtgagccacagcgtgctgagcgagatgcaggtgatcgagcaggagacccccgtgagcgccaagagcagcagaagccagctggacctgttcgacgacgtgggcaccttcgccagcggcccccccaagtacaaggacaaccccttcagcctgggcgagagcttcggcagcagatgggacaccgacgccgcctggggcatggacagagtggaggagaaggagcccgaggtgaccatcagcagcatcagacccatcagcgagagagccaccaacagaagagaggtggagagcagaagcagcggcctggagagcagcgaggccagacagaagttcgccggcgccaaggccatcagcagcgacatgttcttcggcagagaggtggacgccgagtacgaggccagaagcagactgcagcagctgagcggcagcagcgccatcagcagcagcgacctgttcggcgacatggacggcgcccacggcgccggcagcgtgagcctgggcaacgtgctgcccaccgccgacatcgcccagttcaagcagggcgtgaagagcgtggccggcaagatggccgtgctggccaacggcgtgatgaacagcctgcaggacagatacggcagctactag

SEQ ID NO: 223867 - protein, 57 aa, Artificial Sequence
  derived and/or modified sequence
MLCAHFSDQGPAHLTTSKSAFLSNKKTSTLKHLLGETRSDGSACNSGISGGRGRKIP

SEQ ID NO: 223868 - DNA, 174 bp, Artificial Sequence
  derived and/or modified sequence
atgctatgcgcccatttcagtgaccagggccccgcccatttgactacctctaaatccgcttttttaagcaataaaaagacatctacgcttaaacatctgctgggagagacaaggtccgacggctctgcctgcaattcaggtataagcgggggcaggggtagaaagattccctag

SEQ ID NO: 223869 - DNA, 174 bp, Artificial Sequence
  derived and/or modified sequence
atgctgtgtgcccacttcagtgaccagggccctgcccacctgaccaccagcaagagcgccttcctgagcaacaagaagaccagcaccctgaagcacctgctgggggagaccaggagtgatggcagcgcctgcaacagcggcatcagcggcggccggggcaggaagatcccctag

SEQ ID NO: 223870 - DNA, 383 bp, Artificial Sequence
  derived and/or modified sequence
ccgtccttcctctcctagcctaaggcgtgcaaacagagcgccactgggaggctgaaacctttaggccgatgcttgcttgcaaggtcaggcaagctggattctggtccccacctttgcagagagaacagcgatgttgtgcgcccatttctcagatcaaggaccggcccatcttactacctccaagagtgcttttctctctaataagaaaacatctactttgaaacatctactgggcgagaccaggagtgatggctcagcctgtaattctggaatttcgggaggccgaggcaggaagattccttgagcacaggagttccagaccagcctgggcaatgtagcaagacgctgtctctatttatacaataaaatttttttaaaaaagg

SEQ ID NO: 223871 - DNA, 174 bp, Artificial Sequence
  derived and/or modified sequence
atgctgtgcgcccacttcagcgaccagggccccgcccacctgaccacttccaaatctgccttcctgagcaacaagaaaacaagcacactcaaacacttgttaggcgaaacccgaagcgacggctctgcatgcaatagcggcatcagtggcgggaggggccggaagatcccctag

SEQ ID NO: 223872 - DNA, 174 bp, Artificial Sequence
  derived and/or modified sequence
atgctgtgtgcccactttagtgatcaggggcctgctcacttaaccacctccaaatcagcctttctgtccaacaagaagacaagcaccctcaaacacctgctgggggaaaccaggagcgatgggagtgcctgcaattccggaatttctgggggaaggggtcgcaaaataccgtag

SEQ ID NO: 223873 - DNA, 174 bp, Artificial Sequence
  derived and/or modified sequence
atgctgtgcgcccacttcagcgaccagggccccgcccacctgaccaccagcaagagcgccttcctgagcaacaagaagaccagcaccctgaagcacctgctgggcgagaccagaagcgacggcagcgcctgcaacagcggcatcagcggcggcagaggcagaaagatcccctag

SEQ ID NO: 223874 - protein, 344 aa, Artificial Sequence
  derived and/or modified sequence
MGENDPPAVEAPFSFRSLFGLDDLKISPVAPDADAVAAQILSLLPLKFFPIIVIGIIALILALAIGLGIHFDCSGKYRCRSSFKCIELIARCDGVSDCKDGEDEYRCVRVGGQNAVLQVFTAASWKTMCSDDWKGHYANVACAQLGFPSYVSSDNLRVSSLEGQFREEFVSIDHLLPDDKVTALHHSVYVREGCASGHVVTLQCTACGHRRGYSSRIVGGNMSLLSQWPWQASLQFQGYHLCGGSVITPLWIITAAHCVYDLYLPKSWTIQVGLVSLLDNPAPSHLVEKIVYHSKYKPKRLGNDIALMKLAGPLTFNGTSGSLCGSAALPLFQEDLQLLIEAFL

SEQ ID NO: 223875 - DNA, 1035 bp, Artificial Sequence
  derived and/or modified sequence
atgggcgagaacgacccccccgccgtggaggcccccttcagcttcagaagcctgttcggcctggacgacctgaagatcagccccgtggcccccgacgccgacgccgtggccgcccagatcctgagcctgctgcccctgaagttcttccccatcatcgtgatcggcatcatcgccctgatcctggccctggccatcggcctgggcatccacttcgactgcagcggcaagtacagatgcagaagcagcttcaagtgcatcgagctgatcgccagatgcgacggcgtgagcgactgcaaggacggcgaggacgagtacagatgcgtgagagtgggcggccagaacgccgtgctgcaggtgttcaccgccgccagctggaagaccatgtgcagcgacgactggaagggccactacgccaacgtggcctgcgcccagctgggcttccccagctacgtgagcagcgacaacctgagagtgagcagcctggagggccagttcagagaggagttcgtgagcatcgaccacctgctgcccgacgacaaggtgaccgccctgcaccacagcgtgtacgtgagagagggctgcgccagcggccacgtggtgaccctgcagtgcaccgcctgcggccacagaagaggctacagcagcagaatcgtgggcggcaacatgagcctgctgagccagtggccctggcaggccagcctgcagttccagggctaccacctgtgcggcggcagcgtgatcacccccctgtggatcatcaccgccgcccactgcgtgtacgacctgtacctgcccaagagctggaccatccaggtgggcctggtgagcctgctggacaaccccgcccccagccacctggtggagaagatcgtgtaccacagcaagtacaagcccaagagactgggcaacgacatcgccctgatgaagctggccggccccctgaccttcaacggcaccagcggcagcctgtgcggcagcgccgccctgcccctgttccaggaggacctgcagctgctgatcgaggccttcctgtag

SEQ ID NO: 223876 - DNA, 1035 bp, Artificial Sequence
  derived and/or modified sequence
atgggcgagaatgatccccctgctgtcgaagcacctttctcattccgctcgctcttcgggctcgacgatttaaaaatatctccagtcgctcccgatgcagatgcagttgcagcccaaatactaagtctgctgccactcaagttttttccaatcattgtgatcggaatcatcgcactgatcctggccctggcaattggcttgggcatacacttcgattgttctggaaagtatcggtgccgttcatcattcaaatgtatagaacttatcgccagatgcgacggtgtaagtgactgtaaggacggcgaggacgagtaccgctgtgtgagggtcggcgggcagaacgccgtgctacaggtgttcacagctgcctcttggaagaccatgtgttccgacgattggaaaggccattacgccaacgttgcatgcgctcagcttggcttcccttcatatgtttccagtgacaatctgagagtgtccagcctcgaggggcagttccgtgaggagttcgtgtcaattgatcatctcctgcccgatgacaaggtgacagccttgcaccactccgtttacgtaagagaagggtgtgcttcagggcacgtcgtaacgcttcagtgtacggcctgtgggcaccgaaggggatacagtagccggatagttgggggtaatatgagccttttgagccagtggccctggcaagcctccttgcagttccagggctatcacttatgcgggggcagtgtgattacccccctctggattattacagccgcccactgtgtttacgacctttatctgcctaagtcctggacaattcaagtgggcctggtgtcattgctagacaatcccgccccaagccatctggtagaaaagatcgtgtaccatagtaagtacaagcccaaaaggctgggcaacgatatcgctctgatgaaactcgctgggccattgactttcaatggcacctctgggagcctgtgcgggagcgctgccctacccttgtttcaagaggacttgcagttactgatcgaggccttcctttag

SEQ ID NO: 223877 - DNA, 1035 bp, Artificial Sequence
  derived and/or modified sequence
atgggagaaaatgaccccccagctgtggaggcccccttctccttccgcagcctgtttggcctggatgacctgaagatcagccctgtggccccagatgctgatgctgtggccgcccagatcctgagcctgctgcccctgaagttcttccccatcatcgtcatcggcatcatcgccctgatcctggccctggccatcggcctgggcatccactttgactgcagcggcaagtaccgctgccgcagcagcttcaagtgcatcgagctgattgcccgctgtgatggagtgtctgactgcaaggatggagaagatgagtaccgctgtgtgcgggtgggcggccagaatgctgtgctgcaggtgttcaccgctgcctcctggaagaccatgtgcagtgatgactggaagggccactacgccaacgtggcctgtgcccagctgggcttccccagctatgtgtccagtgacaacctgcgggtgagcagcctggagggccagttccgggaggagtttgtgtccattgaccacctgctgcctgatgacaaggtgacagccctgcaccacagcgtgtatgtgcgggagggctgtgccagcggccacgtggtgaccctgcagtgcacagcctgtggccaccggcggggctacagcagcagaattgtgggcggcaacatgagcctgctgagccagtggccctggcaggccagcctgcagttccagggctaccacctgtgtggcggcagcgtcatcacccccctgtggatcatcacagctgcccactgtgtgtatgacctgtacctgcccaagtcctggaccatccaggtgggcctggtgtccctgctggacaacccagcccccagccacctggtggagaagatcgtgtaccacagcaagtacaagcccaagaggctgggcaatgacatcgccctgatgaagctggccggccccctgaccttcaacggcaccagcggcagcctgtgtggcagcgctgccctgcccctcttccaggaggacctgcagctgctgattgaggccttcctgtag

SEQ ID NO: 223878 - DNA, 1035 bp, Artificial Sequence
  derived and/or modified sequence
atgggcgagaacgacccccccgccgtggaggcccccttcagcttcagatccctttttggattggatgatttgaaaatcagccctgttgccccggacgcagacgccgtcgccgctcagatactcagcctcctgcccttgaaattttttcccatcatcgtgataggcatcattgctctgatcctggctctcgccattggacttggtatccattttgattgcagcgggaaataccggtgcagatcttctttcaagtgcattgaactgatcgcccggtgtgacggggtctccgattgtaaggacggcgaagacgagtacagatgtgtacgagttgggggacagaacgctgttttacaggtgttcaccgcggcttcttggaaaaccatgtgtagtgacgattggaagggtcactacgcgaatgtggcatgcgcccagctgggattcccctcatacgtcagttccgacaacctaagggtctctagcttagagggacagtttagggaagaattcgtctcaatcgatcatcttctgcccgatgacaaagtgactgctttgcaccatagcgtatacgtgcgtgagggttgtgctagtgggcacgtggtaactttgcagtgtactgcgtgcgggcatcggcggggatactcctctcgtatcgtagggggaaatatgtcgttactctcacagtggccatggcaggcgtctctccagttccagggataccacctgtgtggggggagcgtgattacacctctgtggattattactgccgctcactgcgtctatgacctctatctaccgaaaagctggacaattcaggtgggattggtctctctactcgacaaccccgctccatcccacctggtcgaaaaaatcgtttatcattctaagtacaagcctaagcgcctggggaacgatatcgccctaatgaaactcgctgggccccttacctttaacggcaccagtggatcactgtgtggctccgccgcactgccattgtttcaagaggaccttcaactactgattgaagcgttcctgtag

SEQ ID NO: 223879 - DNA, 1035 bp, Artificial Sequence
  derived and/or modified sequence
atgggagagaatgacccgccagctgtggaagcacctttttccttccgttccctctttgggttggatgaccttaaaattagcccagtggccccagatgctgatgcggtggcggcacagatcctatctctgctgcccctgaaattttttcccatcatcgttatcggcatcatcgctctcatcctggcccttgccatcggactcggtatccattttgattgttccggtaagtacagatgtcgctccagcttcaagtgcattgaactgatcgcccgttgcgacggggtttctgactgtaaggatggcgaggacgagtaccggtgtgttagggtgggtggtcagaatgctgtactgcaagtgtttactgcagctagttggaagactatgtgttccgatgactggaaggggcactatgccaatgtcgcatgcgcccagctggggtttcccagctacgtttcatccgacaacctgcgagtcagctctctggaaggccaattcagagaagaattcgtgagcattgatcacttgctgcccgatgacaaggtcactgcactgcatcattctgtctacgtgcgcgagggctgcgcctccgggcatgtcgtaacgcttcaatgtactgcctgtggccaccggagggggtatagttctcgcatcgtgggaggaaatatgtccttactttcgcagtggccttggcaggcctctttgcagtttcagggctaccacctgtgtggcggttccgttattacacccttatggataatcactgccgctcattgtgtgtacgatctttaccttccaaagtcatggacaattcaggttggtctggtaagtcttctcgataaccccgctcctagccatctcgtcgaaaagattgtatatcatagtaagtacaagccgaagcgtttaggcaacgacatagctttaatgaaattggccggtccactcacgtttaacggaacttccggcagcctctgcgggtctgctgccctgccactgtttcaagaagatctccaacttctaatcgaggccttcctgtag

SEQ ID NO: 223880 - DNA, 1342 bp, Artificial Sequence
  derived and/or modified sequence
accgggcaccggacggctcgggtactttcgttcttaattaggtcatgcccgtgtgagccaggaaagggctgtgtttatgggaagccagtaacactgtggcctactatctcttccgtggtgccatctacatttttgggactcgggaattatgaggtagaggtggaggcggagccggatgtcagaggtcctgaaatagtcaccatgggggaaaatgatccgcctgctgttgaagcccccttctcattccgatcgctttttggccttgatgatttgaaaataagtcctgttgcaccagatgcagatgctgttgctgcacagatcctgtcactgctgccattgaagttttttccaatcatcgtcattgggatcattgcattgatattagcactggccattggtctgggcatccacttcgactgctcagggaagtacagatgtcgctcatcctttaagtgtatcgagctgatagctcgatgtgacggagtctcggattgcaaagacggggaggacgagtaccgctgtgtccgggtgggtggtcagaatgccgtgctccaggtgttcacagctgcttcgtggaagaccatgtgctccgatgactggaagggtcactacgcaaatgttgcctgtgcccaactgggtttcccaagctatgtgagttcagataacctcagagtgagctcgctggaggggcagttccgggaggagtttgtgtccatcgatcacctcttgccagatgacaaggtgactgcattacaccactcagtatatgtgagggagggatgtgcctctggccacgtggttaccttgcagtgcacagcctgtggtcatagaaggggctacagctcacgcatcgtgggtggaaacatgtccttgctctcgcagtggccctggcaggccagccttcagttccagggctaccacctgtgcgggggctctgtcatcacgcccctgtggatcatcactgctgcacactgtgtttatgacttgtacctccccaagtcatggaccatccaggtgggtctagtttccctgttggacaatccagccccatcccacttggtggagaagattgtctaccacagcaagtacaagccaaagaggctgggcaatgacatcgcccttatgaagctggccgggccactcacgttcaatggtacatctgggtctctatgtggttctgcagctcttcctttgtttcaagaggatttgcaattgctcattgaagcattcttatgatggctgctttataatccttgtcagatattaataattccaactcctgattcatgttggtgttggcatcagttgattatcttttctcattaaaattgtgatgctccta

SEQ ID NO: 223881 - protein, 1483 aa, Artificial Sequence
  derived and/or modified sequence
MAPLLGRKPFPLVKPLPGEEPLFTIPHTQEAFRTREEYEARLERYSERIWTCKSTGSSQLTHKEAWEEEQEVAELLKEEFPAWYEKLVLEMVHHNTASLEKLVDTAWLEIMTKYAVGEECDFEVGKEKMLKVKIVKIHPLEKVDEEATEKKSDGACDSPSSDKENSSQIAQDHQKKETVVKEDEGRRESINDRARRSPRKLPTSLKKGERKWAPPKFLPHKYDVKLQNEDKIISNVPADSLIRTERPPNKEIVRYFIRHNALRAGTGENAPWVVEDELVKKYSLPSKFSDFLLDPYKYMTLNPSTKRKNTGSPDRKPSKKSKTDNSSLSSPLNPKLWCHVHLKKSLSGSPLKVKNSKNSKSPEEHLEEMMKMMSPNKLHTNFHIPKKGPPAKKPGKHSDKPLKAKGRSKGILNGQKSTGNSKSPKKGLKTPKTKMKQMTLLDMAKGTQKMTRAPRNSGGTPRTSSKPHKHLPPAALHLIAYYKENKDREDKRSALSCVISKTARLLSSEDRARLPEELRSLVQKRYELLEHKKRWASMSEEQRKEYLKKKREELKKKLKEKAKERREKEMLERLEKQKRYEDQELTGKNLPAFRLVDTPEGLPNTLFGDVAMVVEFLSCYSGLLLPDAQYPITAVSLMEALSADKGGFLYLNRVLVILLQTLLQDEIAEDYGELGMKLSEIPLTLHSVSELVRLCLRRSDVQEESEGSDTDDNKDSAAFEDNEVQDEFLEKLETSEFFELTSEEKLQILTALCHRILMTYSVQDHMETRQQMSAELWKERLAVLKEENDKKRAEKQKRKEMEAKNKENGKVENGLGKTDRKKEIVKFEPQVDTEAEDMISAVKSRRLLAIQAKKEREIQEREMKVKLERQAEEERIRKHKAAAEKAFQEGIAKAKLVMRRTPIGTDRNHNRYWLFSDEVPGLFIEKGWVHDSIDYRFNHHCKDHTVSGDEDYCPRSKKANLGKNASMNTQHGTATEVAVETTTPKQGQNLWFLCDSQKELDELLNCLHPQGIRESQLKERLEKRYQDIIHSIHLARKPNLGLKSCDGNQELLNFLRSDLIEVATRLQKGGLGYVEETSEFEARVISLEKLKDFGECVIALQASVIKKFLQGFMAPKQKRRKLQSEDSAKTEEVDEEKKMVEEAKVASALEKWKTAIREAQTFSRMHVLLGMLDACIKWDMSAENARCKVCRKKGEDDKLILCDECNKAFHLFCLRPALYEVPDGEWQCPACQPATARRNSRGRNYTEESASEDSEDDESDEEEEEEEEEEEEEDYEVAGLRLRPRKTIRGKHSVIPPAARSGRRPGKKPHSTRRSQPKAPPVDDAEVDELVLQTKRSSRRQSLELQKCEEILHKIVKYRFSWPFREPVTRDEAEDYYDVITHPMDFQTVQNKCSCGSYRSVQEFLTDMKQVFTNAEVYNCRGSHVLSCMVKTEQCLVALLHKHLPGHPYVRRKRKKFPDRLAEDEGDSEPEAVGQSRGRRQKK

SEQ ID NO: 223882 - DNA, 6079 bp, Artificial Sequence
  derived and/or modified sequence
cgttggccgggcccgggggaggaggggaatctcccgccatttttcaataatttcctccggtgctgctgaggagagtcgtgactgccggccgccgggacccgaagcggaggtcggcggggggctgctgggaggcgcggcggtgtgcgcgggagctctgcgccggtggcgttccgctccatgactgtcgcgcggccgcgccggcggtgagggagccggagttcgcgccgccctctcacccctcccttcacccaccccacccccgggcgcctggcgctcgctccgggccgcggggcctagtgctgcgccgcggggccggccccagcagccgccagtccccaccgccgccgccgcgatggcgccgctcctgggccgcaagcccttcccgctggtgaagccgttgcccggagaggagccgctcttcaccatcccgcacactcaggaggccttccgcacccgggaagagtatgaagcccgcttggaaaggtacagtgagcgcatttggacgtgcaagagtactggaagcagtcagctaacacacaaggaagcctgggaggaagaacaggaagttgctgagcttttgaaggaggagtttcctgcctggtatgagaagcttgttctggaaatggttcaccataacacagcctccttagagaagttagtagatactgcttggttggagatcatgaccaaatatgctgtgggagaagagtgtgacttcgaggttgggaaggagaaaatgctcaaggtgaagattgtgaagattcatcctttggagaaagtggatgaagaggccactgagaagaaatctgatggtgcctgtgattctccatcaagtgacaaagagaactccagtcagattgctcaggaccatcagaagaaggagacagttgtgaaagaggatgaaggaaggagagagagtattaatgacagagcacgtagatcgccacgaaaacttcctacttcattaaaaaaaggagaaaggaaatgggctcctccaaaatttctgcctcacaaatatgatgtgaaactacaaaatgaagataagatcatcagtaacgtgccagcagacagcttgattcgtacagagcgcccaccaaataaggagatagttcgatactttatacggcataatgcattacgagctggtactggtgaaaatgcaccttgggtcgtagaagatgaattggtgaagaaatactctctgcccagcaagttcagtgactttttacttgatccatacaagtatatgactctcaacccttctactaagaggaagaatactggatccccagacaggaagccctcaaagaaatccaagacagacaactcttctcttagttcaccactaaatcctaagttatggtgtcacgtacacttgaagaagtcattgagtggctcgccactcaaagtgaagaactcaaagaattccaaatctcctgaagaacatctagaagaaatgatgaagatgatgtcgcccaataagctgcacactaactttcacattcctaaaaaaggcccacctgccaagaaaccagggaagcacagtgacaagcctttgaaggcaaagggcagaagcaaaggcatcctgaatggacagaaatccacagggaattccaaatctcccaaaaaaggactgaagactcctaaaaccaaaatgaagcagatgactttgttggatatggccaaaggcacgcagaagatgacacgagccccacggaattctgggggtacacctaggacctctagtaaacctcataaacatctgcctcctgcagccctacacctcattgcatactacaaagaaaacaaagacagggaggacaagaggagcgccctgtcctgtgttatctccaaaacagctcgtcttctctctagtgaagatagagctcgtctcccagaagaattgcgaagtcttgttcaaaaacgctatgaacttctagagcacaaaaagaggtgggcttctatgtctgaagaacaacggaaagaatatttgaaaaagaaacgggaggagctgaaaaagaagttgaaggaaaaagccaaagaacgaagagagaaagaaatgcttgagagattagaaaaacagaagcggtatgaggaccaagagttaactggcaaaaaccttccagcattcagattggtggatacccctgaagggctgcccaacacgctgtttggggatgtggccatggtggtggaattcttgagctgttattctgggctacttttaccagatgctcagtatcctattactgctgtgtcccttatggaagccttgagtgcagataagggtggctttttataccttaacagggtgttggtcatcctcttacagaccctcctacaagatgagatagcagaagactatggtgaattgggaatgaagctgtcggaaatccccttgactctgcattctgtttcagagctggtgcggctctgcttgcgcagatctgatgttcaggaggaaagcgagggctcagacacagatgacaataaagattcagctgcatttgaggataatgaggtacaagatgagttcctagaaaagctggagacctctgaattttttgagctgacgtcagaggagaagctacagatcttgacagcactgtgccaccggatcctcatgacatactcagtgcaagaccacatggagaccagacagcagatgtctgcagagttgtggaaggaacggcttgctgtgttgaaggaagaaaatgataagaagagagcagagaaacagaaacggaaagaaatggaagccaaaaataaagaaaatggaaaagttgagaatgggttaggcaaaactgataggaaaaaagaaattgtgaagtttgagccccaagtagatacagaagctgaagacatgattagtgctgtgaagagcagaaggttgcttgccattcaagctaagaaggaacgggaaatccaggaaagagaaatgaaagtgaaactggaacgccaagctgaagaagaacgaatacggaagcacaaagcagctgctgagaaagctttccaggaagggattgccaaggccaaactagtcatgcgcaggactcctattggcacagatcgaaaccataatagatactggctcttctcagatgaagttccaggattattcattgaaaaaggctgggtacatgacagcattgactaccgattcaaccatcactgcaaagaccacacagtctctggtgatgaggattactgtcctcgcagtaagaaagcaaacttaggtaaaaatgcaagcatgaacacacaacatggaacagcaacagaagttgctgtagagacaaccacacccaaacaaggacagaacctatggtttttatgtgatagtcaaaaggagctggatgagttgctaaactgtcttcaccctcagggaataagagaaagtcaacttaaagagagactagagaagaggtaccaggacattattcactctattcatctagcacggaagccaaatttgggtctaaaatcttgtgatggcaaccaggagcttttaaacttccttcgtagtgatctcattgaagttgcaacaaggttacaaaaaggaggacttggatatgtggaagaaacatcagaatttgaagcccgggtcatttcattagagaaattgaaggattttggtgagtgtgtgattgcccttcaggccagtgtcataaagaaatttctccaaggcttcatggctcccaagcaaaagagaagaaaactccaaagtgaagattcagcaaaaactgaggaagtggatgaagagaagaaaatggtagaggaagcaaaggttgcatctgcactggagaaatggaagacagcaatccgggaagctcagactttctccaggatgcacgtgctgcttgggatgcttgatgcctgtatcaagtgggatatgtccgcagaaaatgctaggtgcaaagtttgtcgaaagaaaggtgaggatgacaaattgatcttgtgtgatgagtgtaataaagccttccacctgttttgtctgaggccggccctctatgaagtaccagatggtgagtggcagtgcccagcttgccagcccgctactgccaggcgcaactcccgtggcaggaactatactgaagagtctgcttctgaggacagtgaagatgatgagagtgatgaagaggaggaggaggaagaagaggaggaggaggaagaagattatgaggtggctggtttgcgattgagacctcgaaagaccatccggggcaagcacagcgtcatcccccctgcagcaaggtcaggccggcgcccgggtaagaagccacactctaccaggaggtctcagcccaaggcaccacctgtggatgatgctgaggtggatgagctggtgcttcagaccaagcggagctcccggaggcaaagcctggagctgcagaagtgtgaagagatcctccacatgatcgtgaagtaccgcttcagctggcccttcagggagcctgtgaccagagatgaggccgaggactactatgatgtgatcacgcaccccatggactttcagacagtgcagaacaaatgttcctgtgggagctaccgctctgtgcaggagtttcttactgacatgaagcaagtgtttaccaatgctgaggtttacaactgccgtggcagccatgtgctaagctgcatggtgaagacagaacagtgtctagtggctctgttgcataaacaccttcctggccacccatatgtccgcaggaagcgcaagaagtttcctgataggcttgctgaagatgaaggggacagtgagccagaggccgttggacagtccaggggacgaagacagaagaagtagagaggcagggccgtggtgacagtatcagtgagtgccatacagaattgtgtattcaccagcatcatgaaacagttgtggtcttttgagttgatcttggcagagtaaagggacgtgtcctggagccattcctgaatctccccttctttgtgacagctcctcccacccccccaaaaaataaaaaaaccacaaaaaacaaaaaaacaaaactaaggcacttcacttagagactggagtcctgcttataatcatgcatataacctttactttgatggatctggccagaggggtgttggagcccagcccacccacataccagtcaagctcttaggggagcagaagaaaagcaggaagaatttaaatgtttaattttttttttaaattgacttttctagttattaaaagttgcttgtttcagcagtgatattgtataaagaacatcttgtaagatactcctgacatcttgctttagcacatgtacagtacagtttctatgataatgtgtttgctctaacttccctggcttctccttcagcccatccactctcctctagagcagttgggttggaggctcattgaggcaagcagcaacattggagggggagcagggcagtgctgtgtctgctgcctcccatgcccgttctgacctcagccttggaactcctcaagaacctgaagattgagagcggcagagaagctctgagagccccttcccccacaacaaatctagctctagttgttatatttaggcaaaactttgtagtcttctttcccttttatgatggattttgataaaagtacaaaacagggtttttcttttttatcacctttgaatttggaaattttgagcacccaagctcttctgtacctatttaaagtccaccaaggggactgcagctcctagaacatgagaatcaagcctcttaattttaaactgcggaatgtggcctctgcttcctccgtcctcctgcccaaggacgacgaggattgctccagggctgctgggtagtttaccgtcccttctataggcatggagttggcactgacatcacagcttcataaccccaccaccgccagcttcccctgcctcctacatccagtctgttcttgttcatagtgagaatcctgtgttcccacttcagtgacacctgaattgtttgttgttgttttttttttttattgtcttcaaagaggaagggccccattaaagggtgaacttgtaataaattggaatttcaaataaacctcatgtacttgtgtttataaagaagaaaccaa

SEQ ID NO: 223883 - DNA, 4452 bp, Artificial Sequence
  derived and/or modified sequence
atggcccccctgctgggcagaaagcccttccccctggtgaagcccctgcccggcgaggagcccctgttcaccatcccccacacccaggaggccttcagaaccagagaggagtacgaggccagactggagagatacagcgagagaatctggacctgcaagagcaccggcagcagccagctgacccacaaggaggcctgggaggaggagcaggaggtggccgagctgctgaaggaggagttccccgcctggtacgagaagctggtgctggagatggtgcaccacaacaccgccagcctggagaagctggtggacaccgcctggctggagatcatgaccaagtacgccgtgggcgaggagtgcgacttcgaggtgggcaaggagaagatgctgaaggtgaagatcgtgaagatccaccccctggagaaggtggacgaggaggccaccgagaagaagagcgacggcgcctgcgacagccccagcagcgacaaggagaacagcagccagatcgcccaggaccaccagaagaaggagaccgtggtgaaggaggacgagggcagaagagagagcatcaacgacagagccagaagaagccccagaaagctgcccaccagcctgaagaagggcgagagaaagtgggccccccccaagttcctgccccacaagtacgacgtgaagctgcagaacgaggacaagatcatcagcaacgtgcccgccgacagcctgatcagaaccgagagaccccccaacaaggagatcgtgagatacttcatcagacacaacgccctgagagccggcaccggcgagaacgccccctgggtggtggaggacgagctggtgaagaagtacagcctgcccagcaagttcagcgacttcctgctggacccctacaagtacatgaccctgaaccccagcaccaagagaaagaacaccggcagccccgacagaaagcccagcaagaagagcaagaccgacaacagcagcctgagcagccccctgaaccccaagctgtggtgccacgtgcacctgaagaagagcctgagcggcagccccctgaaggtgaagaacagcaagaacagcaagagccccgaggagcacctggaggagatgatgaagatgatgagccccaacaagctgcacaccaacttccacatccccaagaagggcccccccgccaagaagcccggcaagcacagcgacaagcccctgaaggccaagggcagaagcaagggcatcctgaacggccagaagagcaccggcaacagcaagagccccaagaagggcctgaagacccccaagaccaagatgaagcagatgaccctgctggacatggccaagggcacccagaagatgaccagagcccccagaaacagcggcggcacccccagaaccagcagcaagccccacaagcacctgccccccgccgccctgcacctgatcgcctactacaaggagaacaaggacagagaggacaagagaagcgccctgagctgcgtgatcagcaagaccgccagactgctgagcagcgaggacagagccagactgcccgaggagctgagaagcctggtgcagaagagatacgagctgctggagcacaagaagagatgggccagcatgagcgaggagcagagaaaggagtacctgaagaagaagagagaggagctgaagaagaagctgaaggagaaggccaaggagagaagagagaaggagatgctggagagactggagaagcagaagagatacgaggaccaggagctgaccggcaagaacctgcccgccttcagactggtggacacccccgagggcctgcccaacaccctgttcggcgacgtggccatggtggtggagttcctgagctgctacagcggcctgctgctgcccgacgcccagtaccccatcaccgccgtgagcctgatggaggccctgagcgccgacaagggcggcttcctgtacctgaacagagtgctggtgatcctgctgcagaccctgctgcaggacgagatcgccgaggactacggcgagctgggcatgaagctgagcgagatccccctgaccctgcacagcgtgagcgagctggtgagactgtgcctgagaagaagcgacgtgcaggaggagagcgagggcagcgacaccgacgacaacaaggacagcgccgccttcgaggacaacgaggtgcaggacgagttcctggagaagctggagaccagcgagttcttcgagctgaccagcgaggagaagctgcagatcctgaccgccctgtgccacagaatcctgatgacctacagcgtgcaggaccacatggagaccagacagcagatgagcgccgagctgtggaaggagagactggccgtgctgaaggaggagaacgacaagaagagagccgagaagcagaagagaaaggagatggaggccaagaacaaggagaacggcaaggtggagaacggcctgggcaagaccgacagaaagaaggagatcgtgaagttcgagccccaggtggacaccgaggccgaggacatgatcagcgccgtgaagagcagaagactgctggccatccaggccaagaaggagagagagatccaggagagagagatgaaggtgaagctggagagacaggccgaggaggagagaatcagaaagcacaaggccgccgccgagaaggccttccaggagggcatcgccaaggccaagctggtgatgagaagaacccccatcggcaccgacagaaaccacaacagatactggctgttcagcgacgaggtgcccggcctgttcatcgagaagggctgggtgcacgacagcatcgactacagattcaaccaccactgcaaggaccacaccgtgagcggcgacgaggactactgccccagaagcaagaaggccaacctgggcaagaacgccagcatgaacacccagcacggcaccgccaccgaggtggccgtggagaccaccacccccaagcagggccagaacctgtggttcctgtgcgacagccagaaggagctggacgagctgctgaactgcctgcacccccagggcatcagagagagccagctgaaggagagactggagaagagataccaggacatcatccacagcatccacctggccagaaagcccaacctgggcctgaagagctgcgacggcaaccaggagctgctgaacttcctgagaagcgacctgatcgaggtggccaccagactgcagaagggcggcctgggctacgtggaggagaccagcgagttcgaggccagagtgatcagcctggagaagctgaaggacttcggcgagtgcgtgatcgccctgcaggccagcgtgatcaagaagttcctgcagggcttcatggcccccaagcagaagagaagaaagctgcagagcgaggacagcgccaagaccgaggaggtggacgaggagaagaagatggtggaggaggccaaggtggccagcgccctggagaagtggaagaccgccatcagagaggcccagaccttcagcagaatgcacgtgctgctgggcatgctggacgcctgcatcaagtgggacatgagcgccgagaacgccagatgcaaggtgtgcagaaagaagggcgaggacgacaagctgatcctgtgcgacgagtgcaacaaggccttccacctgttctgcctgagacccgccctgtacgaggtgcccgacggcgagtggcagtgccccgcctgccagcccgccaccgccagaagaaacagcagaggcagaaactacaccgaggagagcgccagcgaggacagcgaggacgacgagagcgacgaggaggaggaggaggaggaggaggaggaggaggaggaggactacgaggtggccggcctgagactgagacccagaaagaccatcagaggcaagcacagcgtgatcccccccgccgccagaagcggcagaagacccggcaagaagccccacagcaccagaagaagccagcccaaggccccccccgtggacgacgccgaggtggacgagctggtgctgcagaccaagagaagcagcagaagacagagcctggagctgcagaagtgcgaggagatcctgcacaagatcgtgaagtacagattcagctggcccttcagagagcccgtgaccagagacgaggccgaggactactacgacgtgatcacccaccccatggacttccagaccgtgcagaacaagtgcagctgcggcagctacagaagcgtgcaggagttcctgaccgacatgaagcaggtgttcaccaacgccgaggtgtacaactgcagaggcagccacgtgctgagctgcatggtgaagaccgagcagtgcctggtggccctgctgcacaagcacctgcccggccacccctacgtgagaagaaagagaaagaagttccccgacagactggccgaggacgagggcgacagcgagcccgaggccgtgggccagagcagaggcagaagacagaagaagtag

SEQ ID NO: 223884 - DNA, 4452 bp, Artificial Sequence
  derived and/or modified sequence
atggcaccactgctgggtaggaaaccgtttccactggttaagcccctgcccggcgaagagcctttatttactattcctcacactcaggaagcctttcgtaccagagaggaatatgaggcccgacttgagagatacagcgaaagaatatggacttgcaagagtacaggatcctcccaactgacgcacaaggaggcctgggaggaggaacaggaggtagccgagctcctgaaagaagaatttccggcatggtacgagaaacttgtccttgagatggtgcaccacaacaccgctagcctggagaaactggtggacaccgcgtggctggaaattatgacgaaatatgctgtcggcgaagaatgtgattttgaagtgggtaaggagaaaatgttaaaagtgaagatcgtgaagatccatcccctcgagaaagttgacgaggaggccacagaaaagaaatctgacggcgcttgtgattctcccagctcggataaagagaacagttctcagatcgcccaggatcatcagaaaaaagagactgtggtcaaagaggacgaaggaaggagggaatccataaacgaccgcgcgcggcgcagccctaggaagctgcccacgtctcttaagaagggggagcgcaagtgggccccccctaaattcctcccacataagtacgatgttaagctgcagaatgaggacaaaatcattagtaatgtccctgctgatagcctgatccgaactgagcgaccaccaaataaggagattgttcgctactttattcgacataatgctttaagggcaggtaccggcgaaaatgctccttgggtcgttgaagatgagttagtcaagaaatatagcctcccttcaaaattctctgacttcctactggatccgtataagtacatgacgttaaatccttcgaccaagcggaaaaatactggctcccctgaccggaaaccgagtaagaaaagcaagaccgataactctagtttgtcaagccctctaaatccaaaactctggtgtcacgtccacttgaaaaaatctttgagtggcagtcccttaaaagttaagaattctaagaatagcaaaagccccgaagaacacttagaggaaatgatgaaaatgatgtctccgaataagctccataccaacttccatatacctaagaagggtcctccggcgaaaaagccagggaaacacagtgacaaaccattaaaggcgaaaggaaggtccaagggtatcctcaatgggcagaagtctacagggaacagtaaaagccccaaaaagggtcttaagacgcccaaaaccaagatgaagcaaatgacacttctagacatggctaaaggcacacaaaagatgacacgggccccaaggaactccggcgggacccctaggacttctagtaagcctcacaagcatttacctccagccgctctccacctcattgcctactacaaggagaataaagatagggaggataaacggtccgcactttcatgtgtcatcagtaagacagcccgcctgctctcttcagaggatcgggctaggctgcctgaagaactcagaagtcttgtgcagaagagatacgaactgctggaacacaagaaacgctgggcatctatgagtgaagaacagaggaaagagtatctgaaaaaaaaaagagaggaattgaaaaaaaagctaaaggagaaggccaaagagcgccgagagaaggagatgctggaacgattggagaagcagaaacgttacgaagaccaggagctcacagggaaaaaccttcctgcatttcgactggtggacacgcctgaaggactccccaataccctctttggggacgtggctatggttgtcgagtttttgtcatgctattccggacttctactgccagacgcacagtatccaatcacagctgtgtctctgatggaagcactgagcgcagacaaggggggctttctgtacctcaaccgggtgcttgtcattttgttacagacattgttgcaggacgagatagcagaagactacggtgaactggggatgaaattgagtgaaatcccattaaccctgcacagcgttagcgagttggtaagactgtgcctacgtaggtcagatgtccaggaggagtccgaggggtctgatactgacgacaacaaagacagcgcggcctttgaggacaatgaagtgcaggacgagtttctggagaagcttgaaacctcggaattctttgaactgacctcagaggaaaagctgcagattttgacggctctgtgccacagaatcctgatgacttatagcgtccaggaccacatggaaactaggcagcaaatgagtgccgagctttggaaggagagattggcagtgctgaaagaggagaatgacaagaaaagggcagagaagcagaagaggaaggaaatggaggccaaaaacaaagagaacggaaaagtggagaacgggttaggcaagaccgacaggaagaaagagattgtgaaattcgaaccacaagtagacacagaagccgaagacatgatttcagccgtcaagagtaggaggcttctggccattcaggctaaaaaagagcgcgaaattcaagagcgagagatgaaggtgaaattggaacggcaggcggaagaggaacgaattagaaaacataaagctgcagcagaaaaggccttccaagaaggaattgccaaggcgaaactcgtgatgaggcggactcccatagggactgaccgcaaccacaatagatattggctgttttcagacgaggtcccaggactgttcatagaaaaagggtgggtgcatgattcaatcgattatcggttcaatcaccactgcaaagatcacacggtgtctggcgacgaggattactgtcctcgctcgaaaaaggctaaccttgggaaaaacgcgtcaatgaacacacagcacggcactgccactgaagtagctgtagagacaacgacccccaaacagggacagaacctctggtttttatgcgactctcagaaggaactggatgaattactcaattgccttcacccacagggaatccgcgagtcccagcttaaagaaaggctcgaaaagagataccaggacattatccactccatacatctggccaggaagcccaatctgggactgaagagttgtgacgggaatcaggaactgttgaattttttaaggtccgacttgatagaggtggccactcgcttgcagaagggcggccttggctatgtagaggagaccagcgaatttgaagctcgagtaatttctcttgaaaaactgaaggacttcggcgaatgcgtcattgctctgcaggcgtctgtgataaagaaatttctgcagggtttcatggcccctaaacagaagcgaagaaagctacagtcagaggacagtgcaaaaaccgaagaagtagacgaggaaaaaaagatggttgaagaagcgaaagtcgctagtgccttagagaagtggaagacagcaatccgggaagcccagactttttccagaatgcatgtgctgctggggatgttggacgcctgtattaaatgggacatgtctgccgaaaatgcacgttgtaaagtgtgccggaaaaagggcgaggatgacaagctcatattgtgtgatgagtgcaataaagcctttcacctgttctgcttgcggccagctctgtacgaagtgcctgatggagagtggcagtgcccggcttgccagccagctaccgcccggcgcaactcccgcggcagaaactatactgaagagtcagctagcgaggacagcgaggatgacgagagcgacgaggaggaagaggaggaagaagaagaagaggaggaagaggattacgaggtggctggactaaggttgcgaccaagaaaaactatccgtggaaaacactccgtgattccacctgccgccaggagcggcagaagaccgggcaagaaaccacattctacaagaaggtcacagcctaaagcgcctccagtagacgatgccgaggtcgacgaattggtgctgcagaccaagcgttcttcgaggcgacagtccctcgaattgcagaaatgcgaagagattctccacaaaatcgtaaagtaccggttctcttggcctttccgggagcccgtgacaagggacgaagcagaggactattacgacgtgattacacaccctatggattttcagacagtccagaacaaatgctcttgcgggagttatcggtctgttcaggagtttctgactgatatgaagcaggtctttacgaatgccgaagtgtataattgtagagggagtcatgtgctcagctgtatggtgaaaactgaacagtgtctggtggcgctgctgcataagcacctaccaggccatccatacgtgagacgaaaaagaaaaaaattccccgatagactcgccgaggatgagggagatagtgaaccagaggcggtcggacagtctaggggaagaagacagaagaagtag

SEQ ID NO: 223885 - DNA, 4452 bp, Artificial Sequence
  derived and/or modified sequence
atggcccccctgctgggcaggaagcccttccccctggtgaagcccctgcctggagaggagcccctcttcaccatcccccacacccaggaggccttccgcacccgggaggagtatgaggcccggctggagcgctacagcgagcgcatctggacctgcaagagcacaggcagcagccagctgacccacaaggaggcctgggaggaggagcaggaggtggccgagctgctgaaggaggagttccctgcctggtatgagaagctggtgctggagatggtgcaccacaacacagccagcctggagaagctggtggacacagcctggctggagatcatgaccaagtatgctgtgggggaggagtgtgactttgaggtgggcaaggagaagatgctgaaggtgaagatcgtgaagatccaccccctggagaaggtggatgaggaggccacagagaagaagagtgatggagcctgtgacagccccagcagtgacaaggagaacagcagccagatcgcccaggaccaccagaagaaggagaccgtggtgaaggaggatgagggccggcgggagagcatcaatgaccgggcccggcgcagccccaggaagctgcccaccagcctgaagaagggggagaggaagtgggccccacccaagttcctgccccacaagtatgatgtgaagctgcagaatgaagacaagatcatcagcaatgtgcctgctgacagcctcatcagaacagagaggcctcccaacaaggagatcgtgcgctacttcatccgccacaatgccctgcgggccggcaccggggagaatgccccctgggtggtggaggatgagctggtgaagaagtacagcctgcccagcaagttcagtgacttcctgctggacccctacaagtacatgaccctgaaccccagcaccaagaggaagaacacaggcagcccagacaggaagcccagcaagaagagcaagacagacaacagcagcctgagcagccccctgaaccccaagctgtggtgccacgtgcacctgaagaagagcctgagcggcagccccctgaaggtgaagaacagcaagaacagcaagagccctgaggagcacctggaggagatgatgaagatgatgagccccaacaagctgcacaccaacttccacatccccaagaagggccccccagccaagaagccaggcaagcacagcgacaagcccctgaaggccaagggccgcagcaagggcatcctgaatggccagaagagcacaggcaacagcaagagccccaagaagggcctgaagacccccaagaccaagatgaagcagatgaccctgctggacatggccaagggcacccagaagatgacccgggcccccagaaattctgggggcacccccaggaccagcagcaagccccacaagcacctgcccccagctgccctgcacctgattgcctactacaaggagaacaaggaccgggaggacaagaggtctgccctgagctgtgtgatcagcaagacagcccggctgctgagcagtgaagatcgggcccggctgcctgaggagctgcggagcctggtgcagaagagatatgagctgctggagcacaagaagcgctgggcctccatgtctgaggagcagaggaaggagtacctgaagaagaagcgggaggagctgaagaagaagctgaaggagaaggccaaggagcggcgggagaaggagatgctggagcggctggagaagcagaagagatatgaggaccaggagctgaccgggaagaacctgcctgccttccggctggtggacaccccagagggcctgcccaacaccctgtttggagatgtggccatggtggtggagttcctgagctgctacagcggcctgctgctgcctgatgcccagtaccccatcacagctgtgtccctgatggaggccctgtctgctgacaagggcggcttcctgtacctgaacagagtgctggtgatcctgctgcagaccctgctgcaggatgaaattgctgaagattatggagagctgggcatgaagctgtctgagatccccctgaccctgcacagcgtgtctgagctggtgcggctgtgcctgcggcggagtgatgtgcaggaggagagcgagggcagtgacacagatgacaacaaggacagcgctgcctttgaggacaatgaggtgcaggatgagttcctggagaagctggagaccagcgagttctttgagctgaccagcgaggagaagctgcagatcctgacagccctgtgccaccgcatcctgatgacctacagcgtgcaggaccacatggagacccggcagcagatgtctgctgagctgtggaaggagcggctggccgtgctgaaggaggagaatgacaagaagagagctgagaagcagaagaggaaggagatggaggccaagaacaaggaaaatggcaaggtggagaatggcctgggcaagacagacaggaagaaggagatcgtgaagtttgagccccaggtggacacagaagctgaggacatgatctctgctgtgaagagccggcggctgctggccatccaggccaagaaggagcgggagatccaggagcgggagatgaaggtgaagctggagcggcaggccgaggaggagcgcatcaggaagcacaaggctgctgctgagaaggccttccaggagggcatcgccaaggccaagctggtgatgaggaggacccccatcggcacagacaggaaccacaaccgctactggctgttcagtgatgaggtgcccggcctcttcatcgagaagggctgggtgcatgacagcattgactaccgcttcaaccaccactgcaaggaccacacagtgtctggagatgaggactactgccccaggagcaagaaggccaacctgggcaagaatgcctccatgaacacccagcacggcacagccacagaggtggccgtggagaccaccacccccaagcagggccagaacctgtggttcctgtgtgacagccagaaggagctggatgagctgctgaactgcctgcacccccagggcatccgggagagccagctgaaggagcggctggagaagcgctaccaggacatcatccacagcatccacctggccaggaagcccaacctgggcctgaagagctgtgatggcaaccaggagctgctgaacttcctgcggagtgacctgattgaggtggccacccggctgcagaagggcggcctgggctacgtggaggagaccagcgagtttgaggcccgggtcatcagcctggagaagctgaaggactttggagaatgtgtgattgccctgcaggccagcgtcatcaagaagttcctgcagggcttcatggcccccaagcagaagaggaggaagctgcagagtgaagattctgccaagacagaggaggtggatgaggagaagaagatggtggaggaggccaaggtggccagcgccctggagaagtggaagacagccatccgggaggcccagaccttcagcaggatgcacgtgctgctgggcatgctggatgcctgcatcaagtgggacatgtctgcagaaaatgcccgctgcaaggtgtgcaggaagaagggagaagatgacaagctgatcctgtgtgatgagtgcaacaaggccttccacctgttctgcctgcggcctgccctgtatgaggtgcctgatggagagtggcagtgcccagcctgccagcctgccacagcccggaggaacagccggggcaggaactacacagaggagagcgccagcgaggacagtgaagatgatgaaagtgatgaggaggaggaggaggaggaggaggaggaggaggaggaggactatgaggtggccggcctgcggctgcggcccaggaagaccatccggggcaagcacagcgtcatccccccagctgcccggtctggaagaagacctgggaagaagccccacagcaccaggaggagccagcccaaggcccctcctgtggatgatgctgaggtggatgagctggtgctgcagaccaagaggagcagccggcggcagagcctggagctgcagaagtgtgaggagatcctgcacaagatcgtgaagtaccgcttctcctggcccttccgggagcctgtgaccagagatgaagctgaggactactatgatgtgatcacccaccccatggacttccagacagtgcagaacaagtgcagctgtggcagctacagatctgtgcaggagttcctgacagacatgaagcaggtgttcaccaatgctgaggtgtacaactgccggggcagccacgtgctgagctgcatggtgaagacagagcagtgcctggtggccctgctgcacaagcacctgcccggccacccctacgtgcggaggaagaggaagaagttcccagaccggctggctgaagatgaaggagacagcgagcctgaggccgtgggccagagccggggccggcggcagaagaagtag

SEQ ID NO: 223886 - DNA, 4452 bp, Artificial Sequence
  derived and/or modified sequence
atggcccccctgctgggccggaagcccttccccctggtgaagcccctccccggggaggagcccctcttcaccataccgcacacccaagaggcctttcgaacgcgggaggaatacgaggcccgactcgaaagatactccgagaggatttggacatgtaagagcaccggcagttcccagttgacccataaggaggcttgggaggaagagcaggaggtggccgagctgctgaaagaggaattccctgcgtggtatgaaaagttggtgctggagatggtgcatcataacaccgcttctctggaaaagctggtggacactgcctggcttgagatcatgacaaagtatgccgtgggcgaagaatgcgatttcgaggtgggaaaggagaaaatgctcaaggtgaagattgtgaaaatccacccactcgaaaaggtcgatgaagaggcaaccgaaaaaaaatcagatggggcatgtgacagtcctagctcagataaggaaaactcctcacaaatcgctcaggaccaccaaaaaaaagagacggtagttaaagaagacgagggaagacgcgagtctatcaacgaccgagcccggcgcagccccaggaagctcccgactagcctgaaaaagggggaacggaagtgggccccccccaagttccttcctcacaagtacgatgtgaagctgcagaacgaggacaagatcatctcaaatgtgcccgccgactccctgataagaacagagcgaccccctaacaaggaaattgtcaggtattttatcaggcataacgcgctccgcgctggaactggggagaacgctccctgggtggtcgaggatgaactcgtgaagaaatatagcttgcctagtaagttctctgattttctgctcgatccatacaaatacatgacacttaatcctagcacaaaacggaagaatactggtagccccgacagaaagcccagcaaaaaatccaagacagacaatagcagcctgtcatcaccactcaaccctaagttgtggtgccatgtgcatctcaagaagtccctctcaggaagccctctgaaggtgaagaattctaaaaatagcaagtcgcctgaagaacatctggaggagatgatgaagatgatgtcgcccaataagctccacacgaacttccacatcccaaaaaaaggcccacccgcaaagaagccaggcaaacacagcgacaagcccttgaaagcgaaaggtagaagcaagggcatcctcaacggccaaaaatctacaggcaattctaaatctcccaaaaagggcctgaaaaccccgaaaaccaagatgaaacaaatgacactgctggacatggccaaggggactcagaagatgactcgagctccgaggaacagtggtggcacccccaggacctcgagcaagccacacaaacatctgccgccagccgcccttcacctgattgcctattataaagagaataaggaccgagaggacaagagatccgctctctcatgcgtaatctctaagactgcccggcttctcagttctgaagatagggctcgccttccagaggagcttcgcagcctggtgcagaagcgatatgaactgctcgaacacaaaaagcgctgggccagtatgagcgaagagcagaggaaggaataccttaagaaaaaacgagaggaactgaagaaaaaacttaaggagaaggctaaggaacgacgtgagaaggagatgctcgagcgcctggaaaagcaaaagcgttacgaagatcaggaacttacagggaagaatctgcccgcgttcaggctggtggataccccagagggcctgccaaataccctgtttggcgatgtggcaatggtagtggagtttctgtcatgctatagtgggctgcttctgccggacgcacagtatcccattacagccgtgagcctaatggaggctctatcagcagacaagggtggattcctttacttaaacagggtgctcgtgatcctccttcagacacttctgcaagatgaaatcgcagaggactacggagagttgggtatgaaattatccgaaattcccctgactcttcattccgtgagtgaacttgtgcggctgtgtcttcgcaggtccgatgtgcaggaggagagcgagggcagcgacactgatgataataaggactccgcagcattcgaggataatgaggtccaagacgaatttcttgagaagttggaaaccagtgagtttttcgagctgacatcggaagagaaactccagattctgactgcattgtgtcatcgaatcctgatgacctacagtgttcaggatcacatggaaaccagacagcagatgagcgctgaactttggaaagagaggctggctgtcttaaaggaggaaaacgacaaaaagcgagcagagaagcagaaaagaaaagagatggaggccaagaacaaggaaaatggaaaggtcgagaacgggcttggaaagacagacagaaagaaagaaatcgtgaaattcgagccacaagtcgacaccgaagccgaggatatgatttctgccgtcaaatcccggaggcttcttgcaattcaagcgaaaaaagagagggagatccaggagagagaaatgaaagtgaagctggagagacaggctgaagaggaaaggatccggaagcataaagctgccgccgagaaggcttttcaggaaggaatcgctaaagccaaactggttatgaggcgaacccccatcggcaccgaccggaaccacaaccggtattggttattttccgacgaggttccaggcttgttcattgagaaaggctgggtgcatgattctattgattacagatttaaccaccattgcaaagaccatacggtcagtggagacgaggattactgtccaagatctaaaaaggccaatctgggcaagaatgccagcatgaatacccaacacgggaccgctactgaagttgccgttgaaactactactcctaagcagggccagaacttatggttcctgtgtgatagccagaaagagttagacgagctcctcaactgtctccaccctcaggggattagggagtctcagttaaaggagcgcctcgaaaaacgctaccaggacatcatccactctattcacctagcccgcaagccaaatctggggctgaagagctgcgatggcaaccaggagttgctcaattttctaagatccgacctgattgaagtggcgacccgattgcagaagggcgggctgggctacgtagaggaaacttccgaatttgaggctagggttatctcacttgaaaaacttaaagattttggagaatgtgtgatcgccctccaggcctccgtaattaagaaattcttacagggctttatggcccctaagcagaagcggcgcaagctgcagtcagaggactccgctaagacggaagaggtggacgaagagaagaagatggtggaggaagccaaggtagctagcgcactcgagaaatggaaaactgccatccgggaagctcagacctttagccgaatgcatgtgttgctggggatgctagatgcctgcattaagtgggatatgtctgctgagaatgccagatgcaaagtgtgtaggaaaaagggggaggacgataagctaatcctgtgcgacgagtgtaataaagcattccaccttttttgtcttcgccctgccctttatgaggttcccgacggagagtggcagtgtcccgcttgtcaacctgctacggcccgccgcaacagtagggggaggaactacacagaagagtccgcatctgaggatagcgaagacgacgagagcgacgaggaggaagaagaggaggaagaggaggaagaagaagaggactacgaagtggcgggcctgcgactgcggcctcgcaaaacaattaggggaaagcacagcgttattccccctgccgctagatcagggagacggccaggcaaaaagccccatagcactaggcgttctcagcctaaagctccacccgtcgatgacgctgaagtcgacgaactggttcttcagactaaacgctcctctcgacggcagagcctcgagctgcagaagtgcgaggagatcctccacaagattgttaaatacagattctcatggccattccgggagcccgtcacccgagacgaagctgaggactattatgacgtgattacacatcccatggatttccagacagttcaaaacaagtgcagctgcgggagttacaggagtgttcaggagtttctgacggatatgaagcaagtttttacgaacgcagaggtgtataactgtcggggaagccatgtgctcagctgcatggttaagacagaacagtgtcttgtagctctactgcacaagcatctaccaggccacccttacgtgcgccggaagaggaagaaattcccagaccgactcgcagaggatgagggcgatagcgagcctgaagcagtggggcaatcccgcgggcggagacaaaaaaagtag

SEQ ID NO: 223887 - DNA, 4452 bp, Artificial Sequence
  derived and/or modified sequence
atggcccctcttctcggccgaaagccctttccacttgtaaagccactgcctggagaagagccactgtttactattccccacactcaggaggctttccgcacaagagaagaatacgaggcacggttagagagatattctgagaggatctggacctgtaagtcaaccgggagctctcagctaacgcacaaagaggcctgggaggaggaacaggaggtagcagagctcctgaaagaagagtttccggcttggtatgagaagctggtgctcgagatggtacaccacaacacagcctctctggagaaactcgtcgacaccgcatggttagagatcatgaccaaatatgcggtgggtgaggaatgcgattttgaagttgggaaggagaagatgctcaaagtgaaaatcgttaaaatccacccactagagaaagtcgacgaggaggcaacggagaagaagtctgacggtgcttgcgatagccccagcagtgataaagagaattcatcgcagatcgctcaggaccaccagaagaaagaaacggtggtgaaggaggacgagggacgaagagaaagtatcaatgatcgcgctcggcgttctcccaggaagctaccaacaagcctcaaaaagggtgagcggaaatgggctccccctaagtttctcccccataagtacgatgtgaagctccagaatgaggacaagataatttccaatgtgcctgctgattcccttatccgaaccgaacgtccccctaacaaagagatcgttcggtactttattagacacaatgcattaagggcgggaaccggagagaacgccccatgggttgtggaagatgaacttgtcaaaaagtatagtctgccgagtaaattctccgactttctcttggacccatataagtacatgacgctaaacccaagcacaaagagaaagaacaccggctcccccgacaggaaaccaagcaagaagtccaagactgacaacagttcactgagtagccccttgaatcctaaactttggtgccacgtgcatctcaagaagagcctgtcaggctcgccactgaaggtgaaaaattcgaaaaattctaagagtcccgaggagcacttggaggaaatgatgaagatgatgtcccctaataagctacatactaactttcacatacctaaaaagggacctccagccaagaaacccggaaaacattctgataagcccctgaaagcgaaaggacggtcaaagggaatcctcaacggacagaaatctactgggaatagcaagagcccaaagaagggcctcaaaacgcctaagaccaagatgaaacagatgacccttcttgatatggcaaaggggacccaaaagatgacacgtgcacctagaaattcaggtgggacgcctcgcacatcaagtaagccccacaaacatctcccacctgctgctctgcacctgattgcttactacaaagaaaataaggatcgggaagacaagcggagtgccctgagctgtgtgatctcaaagacagccaggctgttatctagtgaggaccgtgctagattaccagaagagttgcggtctctcgtgcaaaagaggtacgagttgctagagcacaaaaagcggtgggccagcatgtcagaggagcagcgaaaggaatatctgaagaagaagcgcgaggagttgaagaagaagttaaaggagaaggccaaggagaggcgcgagaaagagatgctagaacgcctcgaaaagcagaaacggtatgaagaccaggagttgacgggtaaaaacctgccggcattcagactcgtcgacacgccggaaggtctgccaaacaccctctttggcgatgttgcaatggtagtggagttccttagttgctactccggacttctcctccctgacgcacagtacccaatcactgccgtgtccctcatggaggctctgtctgccgacaaagggggttttctatatctaaatcgggtgctcgtgatcctactccagacgctcctccaagacgaaattgccgaagactacggggagctgggcatgaaactctcggagatccctcttactctgcattcagtttctgagcttgtgagactttgcctacgcaggagcgacgttcaggaagagagcgagggctcggacactgatgataataaggactctgccgctttcgaagataatgaggtacaagacgaattcctggagaagctagagacatcagagttcttcgagctgacttctgaagaaaaattacagatccttacggccttgtgtcaccggattttgatgacctattcagttcaggaccacatggaaactcgtcagcagatgtccgctgagctatggaaggaaagactcgcagttctgaaggaggagaacgacaagaaaagggctgagaaacaaaagaggaaggagatggaagccaagaacaaggaaaacggaaaggtggagaatggcctcggaaaaacggaccgcaagaaggaaattgtcaaatttgagcctcaggttgatacagaggctgaagacatgattagcgctgttaaatccagacgcctgctggccattcaggcaaagaaagagagagaaatccaggagcgcgagatgaaagtgaagcttgagcggcaggccgaggaggaaaggatccgcaaacataaggccgctgccgagaaagctttccaggagggaatcgcaaaggccaagttagtgatgcgacggacacctattgggactgaccgtaaccacaataggtactggctgttcagtgatgaggttccgggattatttatcgaaaagggctgggtccacgactcaatcgattacaggttcaaccatcactgtaaggatcacacagtgtctggagatgaggactactgccctcgatcaaagaaagccaacttgggtaagaacgcaagcatgaatacacagcacggaaccgccacagaggttgctgtggagactactacacccaaacagggacagaacctatggtttctgtgcgattcccagaaagaattggatgagctgctgaattgcctgcacccacaaggtataagggagtctcagttgaaggaacggctggagaaaaggtatcaggacattatccacagtatacacttggccagaaagccaaacctcggcctcaagtcttgcgatgggaaccaggaactgctaaatttcctgcgatctgacctaatcgaagtagccaccaggctacagaagggagggctaggctacgtagaggaaaccagcgagttcgaggctagagtcatctccctagaaaaacttaaggacttcggtgaatgcgtgattgccttgcaggctagcgtcattaaaaagtttcttcaggggtttatggccccaaaacagaagagaagaaagctgcaatctgaagattccgccaaaaccgaagaagtggatgaagagaaaaaaatggtggaggaggctaaggtcgcttcggccctggagaagtggaagacagctatccgcgaagctcagacattctcacgaatgcatgttttgctagggatgctcgacgcatgcattaagtgggatatgtccgctgaaaacgccaggtgtaaggtgtgtcggaagaaaggcgaagacgataagctgatattgtgtgacgaatgcaacaaagctttccatctcttctgcctgcgtccagcactctatgaggtgccagacggggagtggcagtgccctgcctgtcaacccgcaactgccagacggaactctcgtggtagaaactataccgaggaaagcgcttctgaagatagcgaagacgacgagtcagatgaggaggaggaggaagaggaggaagaagaggaagaggaagactatgaggtggccggtttgcgattaaggccccgtaagaccatccggggaaaacacagcgtaattccacctgctgccaggtctggcaggaggcctggcaagaaacctcattcgacaaggcgttctcagccgaaagctcccccagttgacgatgccgaggttgatgagttagtgttgcagacaaagagaagctcacgtcggcagtctttggagctgcaaaagtgtgaagaaatactgcataaaattgtcaaatatagattcagctggccttttagagagcccgtcaccagggatgaggccgaagattactatgatgttatcacgcatcctatggatttccagactgtgcagaacaagtgcagctgcggttcatacaggagtgtacaggagtttctcacagatatgaaacaagttttcaccaatgccgaagtgtataattgtagggggtcccacgtgctgagctgcatggtgaagacagaacagtgcctggtcgccctactccataaacacctcccaggccatccgtatgtgaggcggaaacgcaaaaaattccctgatagactggcggaagatgagggggattcggaacctgaagccgttggacaatcgcgcggacggcgtcagaagaaatag

SEQ ID NO: 223888 - DNA, 6102 bp, Artificial Sequence
  derived and/or modified sequence
cgggggaggaggggaatctcccgccatttttcaataatttcctccggtgctgctgaggaggagtcgtgactgccggccgccgggacccgaagcggaggtcggcggggggctgctgggaggcgcggcggtgtgcgcgggagctctgcgccgtggcgttccgctccatgactgtcgcgcggccgcgccggcggtgagggagccggagttcgcgccgccctctcacccctcccttcccccaccccacccccgggcgcctggcgctcgctccgggccgcggggcctagtgctgcgccgcggggccggccccagcagccgccagtccccaccgccgccgccgcgatggcgccgctcctgggccgcaagcccttcccgctggtgaagccgttgcccggagaggagccgctcttcaccatcccgcacactcaggaggccttccgcacccgggaagagtatgaagcccgcttggaaaggtacagtgagcgcatttggacgtgcaagagtactggaagcagtcagctaacacacaaggaagcctgggaggaagaacaggaagttgctgagcttttgaaggaggagtttcctgcctggtatgagaagcttgttctggaaatggttcaccataacacagcctccttagagaagttagtagatactgcttggttggagatcatgaccaaatatgctgtgggagaagagtgtgacttcgaggttgggaaggagaaaatgctcaaggtgaagattgtgaagattcatcctttggagaaagtggatgaagaggccactgagaagaaatctgatggtgcctgtgattctccatcaagtgacaaagagaactccagtcagattgctcaggaccatcagaagaaggagacagttgtgaaagaggatgaaggaaggagagagagtattaatgacagagcacgtagatcgccacgaaaacttcctacttcattaaaaaaaggagaaaggaaatgggctcctccaaaatttctgcctcacaaatatgatgtgaaactacaaaatgaagataagatcatcagtaacgtgccagcagacagcttgattcgtacagagcgcccaccaaataaggagatagttcgatactttatacggcataatgcattacgagctggtactggtgaaaatgcaccttgggtcgtagaagatgaattggtgaagaaatactctctgcccagcaagttcagtgactttttacttgatccatacaagtatatgactctcaacccttctactaagaggaagaatactggatccccagacaggaagccctcaaagaaatccaagacagacaactcttctcttagttcaccactaaatcctaagttatggtgtcacgtacacttgaagaagtcattgagtggctcgccactcaaagtgaagaactcaaagaattccaaatctcctgaagaacatctagaagaaatgatgaagatgatgtcgcccaataagctgcacactaactttcacattcctaaaaaaggcccacctgccaagaaaccagggaagcacagtgacaagcctttgaaggcaaagggcagaagcaaaggcatcctgaatggacagaaatccacagggaattccaaatctcccaaaaaaggactgaagactcctaaaaccaaaatgaagcagatgactttgttggatatggccaaaggcacgcagaagatgacacgagccccacggaattctgggggtacacctaggacctctagtaaacctcataaacatctgcctcctgcagccctacacctcattgcatactacaaagaaaacaaagacagggaggacaagaggagcgccctgtcctgtgttatctccaaaacagctcgtcttctctctagtgaagatagagctcgtctcccagaagaattgcgaagtcttgttcaaaaacgctatgaacttctagagcacaaaaagaggtgggcttctatgtctgaagaacaacggaaagaatatttgaaaaagaaacgggaggagctgaaaaagaagttgaaggaaaaagccaaagaacgaagagagaaagaaatgcttgagagattagaaaaacagaagcggtatgaggaccaagagttaactggcaaaaaccttccagcattcagattggtggatacccctgaagggctgcccaacacgctgtttggggatgtggccatggtggtggaattcttgagctgttattctgggctacttttaccagatgctcagtatcctattactgctgtgtcccttatggaagccttgagtgcagataagggtggctttttataccttaacagggtgttggtcatcctcttacagaccctcctacaagatgagatagcagaagactatggtgaattgggaatgaagctgtcggaaatccccttgactctgcattctgtttcagagctggtgcggctctgcttgcgcagatctgatgttcaggaggaaagcgagggctcagacacagatgacaataaagattcagctgcatttgaggataatgaggtacaagatgagttcctagaaaagctggagacctctgaattttttgagctgacgtcagaggagaagctacagatcttgacagcactgtgccaccggatcctcatgacatactcagtgcaagaccacatggagaccagacagcagatgtctgcagagttgtggaaggaacggcttgctgtgttgaaggaagaaaatgataagaagagagcagagaaacagaaacggaaagaaatggaagccaaaaataaagaaaatggaaaagttgagaatgggttaggcaaaactgataggaaaaaagaaattgtgaagtttgagccccaagtagatacagaagctgaagacatgattagtgctgtgaagagcagaaggttgcttgccattcaagctaagaaggaacgggaaatccaggaaagagaaatgaaagtgaaactggaacgccaagctgaagaagaacgaatacggaagcacaaagcagctgctgagaaagctttccaggaagggattgccaaggccaaactagtcatgcgcaggactcctattggcacagatcgaaaccataatagatactggctcttctcagatgaagttccaggattattcattgaaaaaggctgggtacatgacagcattgactaccgattcaaccatcactgcaaagaccacacagtctctggtgatgaggattactgtcctcgcagtaagaaagcaaacttaggtaaaaatgcaagcatgaacacacaacatggaacagcaacagaagttgctgtagagacaaccacacccaaacaaggacagaacctatggtttttatgtgatagtcaaaaggagctggatgagttgctaaactgtcttcaccctcagggaataagagaaagtcaacttaaagagagactagagaagaggtaccaggacattattcactctattcatctagcacggaagccaaatttgggtctaaaatcttgtgatggcaaccaggagcttttaaacttccttcgtagtgatctcattgaagttgcaacaaggttacaaaaaggaggacttggatatgtggaagaaacatcagaatttgaagcccgggtcatttcattagagaaattgaaggattttggtgagtgtgtgattgcccttcaggccagtgtcataaagaaatttctccaaggcttcatggctcccaagcaaaagagaagaaaactccaaagtgaagattcagcaaaaactgaggaagtggatgaagagaagaaaatggtagaggaagcaaaggttgcatctgcactggagaaatggaagacagcaatccgggaagctcagactttctccaggatgcacgtgctgcttgggatgcttgatgcctgtatcaagtgggatatgtccgcagaaaatgctaggtgcaaagtttgtcgaaagaaaggtgaggatgacaaattgatcttgtgtgatgagtgtaataaagccttccacctgttttgtctgaggccggccctctatgaagtaccagatggtgagtggcagtgcccagcttgccagcccgctactgccaggcgcaactcccgtggcaggaactatactgaagagtctgcttctgaggacagtgaagatgatgagagtgatgaagaggaggaggaggaagaagaggaggaggaggaagaagattatgaggtggctggtttgcgattgagacctcgaaagaccatccggggcaagcacagcgtcatcccccctgcagcaaggtcaggccggcgcccgggtaagaagccacactctaccaggaggtctcagcccaaggcaccacctgtggatgatgctgaggtggatgagctggtgcttcagaccaagcggagctcccggaggcaaagcctggagctgcagaagtgtgaagagatcctccacaagatcgtgaagtaccgcttcagctggcccttcagggagcctgtgaccagagatgaggccgaggactactatgatgtgatcacgcaccccatggactttcagacagtgcagaacaaatgttcctgtgggagctaccgctctgtgcaggagtttcttactgacatgaagcaagtgtttaccaatgctgaggtttacaactgccgtggcagccatgtgctaagctgcatggtgaagacagaacagtgtctagtggctctgttgcataaacaccttcctggccacccatatgtccgcaggaagcgcaagaagtttcctgataggcttgctgaagatgaaggggacagtgagccagaggccgttggacagtccaggggacgaagacagaagaagtagagaggcagggccgtggtgacagtatcagtgagtgccatacagaattgtgtattcaccagcatcatgaaacagttgtggtcttttgagttgatcttggcagagtaaagggacgtgtcctggagccattcctgaatctccccttctttgtgacagctcctcccacccccccaaaaaataaaaaaaccacaaaaaacaaaaaaacaaaactaaggcacttcacttagagactggagtcctgcttataatcatgcatataacctttactttgatggatctggccagaggggtgttggagcccagcccacccacataccagtcaagctcttaggggagcagaagaaaagcaggaagaatttaaatgtttaattttttttttaaattgacttttctagttattaaaagttgcttgtttcagcagtgatattgtataaagaacatcttgtaagatactcctgacatcttgctttagcacatgtacagtacagtttctatgataatgtgtttgctctaacttccctggcttctccttcagcccatccactctcctctagagcagttgggttggaggctcattgaggcaagcagcaacattggagggggagcagggcagtgctgtgtctgctgcctcccatgcccgttctgacctcagccttggaactcctcaagaacctgaagattccagtggtcagtgtcggtggggggtgggaggagagagcggcagagaagctctgagagccccttcccccacaacaaatctagctctagttgttatatttaggcaaaactttgtagtcttctttcccttttatgatggattttgataaaagtacaaaacagggtttttcttttttatcacctttgaatttggaaattttgagcacccaagctcttctgtacctatttaaagtccaccaaggggactgcagctcctagaacatgagaatcaagcctcttaattttaaactgcggaatgtggcctctgcttcctccgtcctcctgcccaaggacgacgaggattgctccagggctgctgggtagtttaccgtcccttctataggcatggagttggcactgacatcacagcttcataaccccaccaccgccagcttcccctgcctcctacatccagtctgttcttgttcatagtgagaatcctgtgttcccacttcagtgacacctgaattgtttgttgttgttttttttttttattgtcttcaaagaggaagggccccattaaagggtgaacttgtaataaattggaatttcaaataaacctcatgtacttgtgtttataaagaagaaaccactctg

SEQ ID NO: 223889 - DNA, 4452 bp, Artificial Sequence
  derived and/or modified sequence
atggctccactgcttgggagaaaaccgttcccccttgtgaaacccctcccaggcgaggaaccactctttaccatccctcacacccaggaagcatttagaaccagagaggaatacgaagcacggctcgaacgttacagtgagagaatctggacctgtaaatcaaccgggtcatcccagcttacgcataaagaagcatgggaggaagaacaggaggtggctgagctcctgaaggaggaatttccagcttggtatgagaagctcgttctcgagatggtgcatcataacacagctagccttgagaaacttgtggataccgcgtggctggaaatcatgacgaagtatgctgtgggagaggaatgcgactttgaagtgggcaaagaaaaaatgttgaaggtaaagattgtgaagatccatcccctggagaaggtggatgaagaggccaccgaaaaaaaatccgatggggcttgtgattccccaagcagtgacaaggagaattcatctcagatagctcaggaccaccaaaagaaagaaaccgtcgttaaggaggacgagggacggcgtgaaagtatcaacgatcgggctaggaggagcccacgaaagctgccgacctccctgaagaagggtgagcgcaagtgggctcctccaaaatttctccctcataagtacgacgtgaaactgcagaatgaggataaaattatttctaatgtgcccgccgattctcttattcggaccgagcgcccccctaacaaagagatcgtacggtattttataagacacaacgccctcagggcaggcactggcgaaaacgccccttgggtggtcgaagacgagctagtaaagaaatattccctgccttccaaattttccgatttcctcctcgatccttataaatatatgaccctgaatccctccactaagagaaaaaatactggttccccggatagaaaaccatccaagaagagtaagacagataattcttccctttcatctcccctgaatcccaaactgtggtgccacgtccacctaaagaagtccctctctggctcgccacttaaggtgaagaactcaaaaaactccaagagtccagaggagcacctagaggaaatgatgaaaatgatgtcgcctaataaactgcacacgaacttccatatccctaagaagggacctccagcgaaaaagccaggtaaacactcagacaagcctttaaaagccaaagggaggtccaagggaatcctcaacgggcagaaatccaccggaaactccaagagtcctaaaaaaggcctaaagacacctaaaaccaagatgaaacaaatgacactgttagatatggcgaaggggacacagaagatgaccagagctcctaggaactcaggcggaacccctaggactagcagcaagccccataaacacctgcctccagcagccctccatctgatcgcgtattataaggagaacaaagaccgcgaagacaaacgttctgctttgtcttgcgtgatcagcaagaccgcgagactcctgtcaagtgaggatagggctcgattgcctgaagaactcaggtcccttgtgcaaaaacgctatgaactgctcgaacataagaagcggtgggccagcatgtccgaggaacagagaaaagagtacctgaagaagaaacgcgaggagctcaagaagaaattaaaagagaaagcaaaagaacggcgtgaaaaagagatgctagaacgactcgaaaagcagaaaaggtacgaggaccaagagctgacgggcaagaatctgcctgcattcagactcgttgatacccctgagggccttccaaacaccctgtttggggatgtggctatggtggtggagttcttgagttgctactctgggctactgctaccagatgcccaatacccaatcaccgctgtgagtctgatggaggccctgtcggccgacaagggagggttcctgtacctgaacagagtactcgttatcctactccagaccctactgcaagacgagatcgccgaggattatggcgaattaggaatgaagctcagcgaaatccccttgacgttgcactccgtgtctgaattggtaagactctgcctccgccgtagcgatgtccaggaggagtcagagggaagtgacacagatgacaacaaggatagtgcggccttcgaggataatgaggttcaggatgaatttcttgagaaactggaaacttcggaattcttcgaactaacctctgaggaaaaactccagatcctcaccgccttgtgtcacagaattctcatgacttattctgttcaggatcatatggaaaccaggcagcaaatgtctgccgagttatggaaagaacgcttggcagtattgaaagaagaaaatgacaagaaaagggctgagaaacagaagagaaaggaaatggaagcaaaaaataaggaaaacggtaaggtagagaatggcctcggcaaaacagatcgcaaaaaagaaatagttaagttcgaacctcaggtggatactgaggccgaagacatgatcagcgcagtgaaatctcgtaggctgcttgctattcaggctaaaaaagagcgggaaatccaggagcgagagatgaaagtaaaactagaacgccaggccgaggaagaacggatcagaaaacacaaagccgcagccgagaaagcatttcaggagggaatcgccaaagcaaaactcgtcatgcgaaggacacccattggtacagaccggaaccacaaccgttactggctgttcagtgatgaagtgcctggacttttcattgaaaagggttgggtccacgatagtatcgactacagattcaaccaccattgtaaggatcatacagttagcggcgatgaagactactgtccacggtccaaaaaagccaacctgggcaagaacgcttcaatgaatacacagcacggaaccgctacagaggtcgctgtggagaccaccacccccaaacagggacagaacctgtggtttctctgcgactctcagaaggagttagacgagctccttaactgtttgcatccacagggaatcagggaatcccagcttaaggagagactggagaaacggtaccaggacatcatccactccattcatctggcccgcaaacctaacctcggtttgaaatcatgcgacggcaaccaggagctcctgaatttcctgcgcagtgatctgatcgaagtcgctacacgcctgcagaaagggggtctcggttacgtggaagagacaagcgaattcgaggctagagtgatttcccttgagaaattgaaggacttcggagagtgcgtcattgctctgcaggcctctgtgattaagaaattcctgcagggatttatggcgcctaagcaaaaacgaagaaagctccaaagtgaggattccgccaaaactgaggaggtggacgaagagaagaaaatggtcgaggaggccaaggtcgcctctgcccttgagaaatggaaaactgcgatcagagaggcacagacatttagccgcatgcatgtcttattgggaatgctggatgcttgcatcaaatgggatatgtctgctgagaacgccagatgtaaggtatgtcgtaaaaaaggtgaagacgacaagctaattttatgtgatgagtgcaacaaggccttccacctgttctgtcttcgccctgccttatatgaagtgcctgacggcgaatggcagtgccctgcatgccagccagctaccgcccggcgcaattcccgcgggcgaaattacaccgaggaaagcgcatccgaagatagtgaggatgacgaaagcgacgaagaggaagaggaagaggaggaggaagaggaggaagaggactatgaggtggcaggcttgcgtcttcgacctcggaaaaccattcgggggaaacacagcgtgattccgccagcggcccgctctgggcgccggcccggaaaaaagcctcactcgacccgcagatcgcaacctaaggccccccccgtggatgacgccgaggtggatgaactggtgttacaaactaaacgctcgtcccggcgacagtcgttggaacttcagaaatgtgaggaaatcctacataagatcgtgaaatatagatttagctggccattcagagagccagtgacacgggacgaggctgaagactactatgacgttatcacacacccaatggacttccagacagtccagaacaaatgtagttgcggtagttaccgcagtgtccaagaattcctcacagacatgaagcaggttttcacgaatgcggaggtctacaactgccgaggttcccacgttcttagttgtatggtgaagacagaacaatgcctcgttgccttgctgcacaagcatcttccaggccatccctacgtacgccgcaagcgaaaaaaatttccagaccggctggcagaggatgaaggcgactcagagccagaggccgtcggacagagccgcggccgcagacagaagaagtag

SEQ ID NO: 223890 - DNA, 4452 bp, Artificial Sequence
  derived and/or modified sequence
atggccccgctcttaggtcgcaagcccttccctttggtgaagcccctcccgggtgaagagccactcttcaccatcccgcacacacaggaagctttcaggaccagggaggagtacgaagctcggctggagcgttattcagagcgcatttggacctgcaaatcaactggtagctcacagctgacccacaaggaggcctgggaagaagagcaggaagtggccgagctgctcaaagaggaatttcccgcctggtacgaaaagctcgttctggagatggtgcaccacaataccgcctctctcgaaaaactggtcgacactgcttggctggagataatgaccaagtacgcagtgggggaggaatgcgacttcgaggtgggcaaggaaaagatgctcaaggtgaagattgtgaagatccacccactggagaaggtggatgaagaggctaccgaaaagaaaagtgacggggcctgcgactcaccgtcttctgacaaggaaaattcctctcaaatcgcccaggatcaccaaaagaaagagacagtggttaaggaagacgaaggtcggcgagaaagcatcaacgatagggctaggcgcagccctcggaagcttccaacatcactgaaaaagggcgaaagaaaatgggccccccctaaatttctgcctcacaaatatgacgttaaactgcaaaatgaagacaaaatcatcagtaacgtgccggctgattccttgatacgcacggagcgaccgccgaataaggagatcgtgcggtactttatacgccacaacgccctgagggcaggcactggagagaacgcaccgtgggttgtggaggatgaactggtcaagaaatactctttgcccagcaagtttagtgatttcttgctggatccttacaagtatatgacattgaacccctcgactaagaggaagaatacaggcagccccgatcgaaaacctagcaagaagtctaagaccgataattcctccctttcttctcccttgaaccccaagttgtggtgtcatgtgcacctcaagaaatctctatccgggagccctttgaaagtgaaaaatagcaagaatagcaagtcaccagaagagcacctggaggagatgatgaagatgatgtccccaaacaaactgcacacaaactttcacatccctaaaaaagggccgcccgctaaaaagccagggaaacattctgacaaaccgttaaaagccaaaggacgcagcaagggcatccttaacggacaaaagtctaccggcaactctaaaagtcctaaaaaagggttgaaaacccctaagaccaagatgaaacagatgaccctgctggacatggcgaaaggcacacagaagatgactagagcccctagaaattctggagggacccctcgcacttcatcaaagccgcacaagcacttacctcccgcagctcttcacttgatcgcctactacaaagagaacaaggatagggaagacaaacggtccgccctatcttgcgtgatcagcaagacagcaagactcctttcttccgaggatcgggcccggctacccgaagaactgcgcagtctggtgcagaaacgctatgaactgctagagcacaaaaagcggtgggctagtatgtcagaggaacagagaaaggagtatcttaagaaaaaacgggaagagcttaagaaaaagctaaaggagaaagccaaggaacgaagagaaaaagaaatgctggaaagacttgaaaagcagaagagatatgaagatcaagagctcaccggcaagaatctgcccgctttcagactagtggacacccctgagggactccccaataccctcttcggcgacgtcgctatggtcgttgagttcttgtcatgttattctggcctgctcctgccggacgcccagtacccgataacagctgtgtccctgatggaggccttatcagccgataagggaggttttttgtatctgaacagggtgctagttatactgcttcagaccctgctgcaagatgaaattgcagaagattacggggaacttggcatgaaattgtcggaaatccctctgactctgcattctgtttctgaactggtgcgattgtgcctgcgcagaagtgatgtacaagaagaatccgagggaagcgacaccgatgacaacaaggacagcgccgcgtttgaggacaatgaggtacaagatgagtttttagagaagctggaaacttctgagttctttgagttaacgtcagaagagaaactacagattctgaccgcgctttgccatcgaatcctgatgacctactcagttcaagaccatatggagacaaggcaacagatgtctgctgagctgtggaaggaacggctggccgtcctgaaggaggaaaatgacaaaaagagggccgagaagcagaagcggaaggagatggaagctaagaataaagagaacggtaaggtggagaacgggttggggaagacagatcggaaaaaggagatcgtgaagtttgaaccacaggtggacactgaagccgaagacatgatcagcgccgtgaaatccaggcgcctgctcgcgattcaggccaagaaggagcgggaaatccaagaacgggaaatgaaagtaaagttggaacgtcaagccgaagaggagcggatccgcaagcataaggccgccgccgagaaagccttccaggaaggtattgccaaggctaagctcgttatgcgtaggacccccatcggcacagaccgtaaccacaaccgatattggctcttttcagacgaagtaccaggtctgtttatcgagaagggctgggtccatgacagcatcgactatcgcttcaaccaccattgtaaggatcacacagtttctggcgacgaagactattgcccgcgttcaaagaaagccaacctcgggaagaacgccagtatgaatacacagcatggaaccgccaccgaagtcgctgtggagactacaacccccaaacagggccaaaacctctggttcctgtgtgatagtcaaaaggagttagatgagctcctgaactgccttcaccctcaggggatccgtgagagccagcttaaggagcggcttgagaagcgttaccaagatatcattcactccatacatctggcgagaaagcccaacctcggcctaaagtcatgcgacggaaatcaggagctcttaaactttctcaggtcagacttaatcgaggtggcgaccaggctgcagaaaggcgggcttggatatgtagaggagacgagcgagtttgaagcgcgggttatttcgttagagaagctcaaagacttcggagagtgtgtgatcgctctccaggcctcagtaataaagaagttcttgcaggggtttatggcccctaaacagaaacgcaggaagctacaaagcgaggatagcgcaaagacggaagaagtcgacgaggaaaagaagatggtggaggaagccaaggtcgcgtctgccctggagaagtggaagaccgcaattcgggaggcacagaccttttcccgaatgcacgtactgctgggaatgctcgacgcgtgcatcaagtgggacatgtccgctgagaatgcaagatgtaaagtatgtagaaaaaagggagaagacgacaaacttatcctgtgtgatgagtgtaataaggcgtttcatctcttctgcctgcgccccgcgctatatgaggtgccagatggagaatggcaatgccccgcgtgccagccagccaccgccaggcgcaattctcgcggccgcaactatacagaagagtctgccagcgaagacagtgaggacgacgagtccgatgaagaggaggaggaagaggaggaagaagaggaggaggaagattatgaggttgcggggctgaggctgaggcccaggaagacaattcgcggtaaacactccgtgattcctcccgctgcccggagcggcagaaggccagggaaaaagcctcattcaaccaggcgatcccagccaaaggccccccccgtggatgacgccgaagtggatgagcttgtgcttcagaccaaaaggagctctcgccggcagagtttggagctccagaagtgcgaggaaatcttgcacaaaatcgtgaaatataggttttcttggccttttagggaaccagtcacgagggacgaggctgaagattactacgacgtcataacgcaccccatggattttcaaactgtgcaaaataagtgttcttgcggaagttacaggtcagtccaggagtttcttactgacatgaagcaggtttttaccaatgctgaggtgtacaactgcagggggagtcacgtcctctcttgcatggttaaaaccgagcagtgcctcgttgctctcctccacaaacaccttccaggtcacccatacgtgagaaggaagaggaagaagtttccagatagactggccgaggacgaaggggactccgagcctgaggctgtggggcagtccagggggaggagacaaaagaagtag

SEQ ID NO: 223891 - DNA, 4452 bp, Artificial Sequence
  derived and/or modified sequence
atggcccccctgctgggccggaagcccttccccctggtgaagcccctgcccggggaggaacctttgtttaccatcccccacacgcaggaagccttcaggaccagagaggagtatgaagcaaggctggaacggtatagtgagcgtatttggacgtgcaaatctaccggttcctctcagttgacacataaagaagcttgggaggaagaacaagaggtcgcagagcttctcaaggaggagttccctgcttggtatgagaaactggtcctcgaaatggtgcaccacaatactgcctcattggagaaactggtggacactgcctggctggaaatcatgaccaaatacgcggtgggcgaggagtgcgactttgaagtcgggaaagaaaagatgctgaaagtgaagattgttaagattcatccgctagagaaggtagacgaagaagccacagaaaaaaagtctgatggggcttgcgacagcccaagttccgataaagaaaattcaagccagatcgcccaggaccaccagaagaaagaaactgtggttaaggaggacgagggcagaagagagtccatcaatgaccgcgctaggcgcagtccgcgcaaactcccaacatccctgaaaaaaggggaacggaagtgggcaccgccaaaatttctccctcataaatacgatgtaaaactacagaatgaagataaaataatctcaaacgttccagccgattccctgatcagaactgaacgtcctcccaataaagaaatcgtgcgctattttattagacacaacgctcttcgggccgggacaggggaaaatgcaccttgggtcgtggaggacgagctggtaaagaaatactccctgccatctaagttcagtgactttttactcgatccctataagtatatgacactcaaccctagcaccaagcgaaaaaatactggatcccctgatcggaagccaagtaagaagagtaaaacggacaactcgtcccttagctccccgctcaaccccaaactttggtgtcatgtgcacctgaaaaaatcactcagcggctcacccctcaaagtgaaaaattccaaaaattcaaagtcacccgaggagcacttagaagaaatgatgaagatgatgtctcccaacaagcttcacaccaacttccacatcccaaagaaaggcccgcctgccaagaaacctggcaaacatagtgataagcctctgaaagccaagggaagatcaaaggggatcctgaacggtcagaagtccaccggaaactccaaatctccaaagaagggcctcaagacgccaaagactaaaatgaagcaaatgaccctgctcgatatggcaaaaggtacacagaagatgacccgggcaccccgaaactctggcggaacccctcggacctcaagtaaaccccataaacatcttcctcctgcggctctacatctgatcgcctactataaagagaataaggacagggaggacaagaggagcgctctaagctgtgtcattagtaaaacggcaagactcctttcctcagaagaccgcgcccggctccccgaggagctgcgctcactggtacaaaaaagatatgagctgctggagcacaagaagaggtgggccagcatgtcagaagaacagaggaaggaatacctcaagaaaaagagggaggaactgaagaagaaactgaaggagaaggccaaggaacgcagagaaaaggagatgctcgagcgattggagaagcagaagcggtatgaggaccaggagctcaccggtaaaaacctcccagcttttcgtttggtggatacaccagaggggctcccgaacaccctcttcggcgatgtggccatggtggtggaattccttagctgttactctggactgctgctcccagacgctcaatacccgattactgcagtttctcttatggaggccctgtccgcggataagggcgggtttttataccttaacagggtgttggtcattctgctccagactttacttcaggatgaaatcgccgaggactacggagaactagggatgaaactcagtgagattcccctaacactacacagtgtatccgagttggtacgcctgtgcctgagacgctcggacgtgcaggaggagagcgagggctctgacaccgacgacaataaggacagcgctgccttcgaggataacgaggtgcaggacgagttcctggaaaagctcgagaccagtgaattcttcgagttgacatccgaggagaagctgcagattttgactgctctctgtcacaggatcctcatgacctactccgtacaggatcatatggaaacccgacaacagatgagcgccgagctttggaaagagagactagcggttttgaaagaggaaaacgataagaagagggcggagaagcagaaacggaaggaaatggaggcgaagaacaaagagaacggcaaagtggaaaatgggctaggtaaaaccgatcgcaagaaggagattgtgaaattcgaaccacaagttgacactgaggccgaagatatgatctctgcggtcaaatcaagacgtctgcttgctatacaagccaagaaagaacgcgagattcaagagcgagaaatgaaggtgaaactggagcggcaggccgaggaagaaaggattcgaaagcacaaagctgccgctgagaaggcctttcaggaaggtattgccaaggcaaagctggtgatgcgcagaacacctatcggtactgaccggaatcacaaccgctactggttgttcagtgacgaagtccccgggctatttattgagaaggggtgggttcacgatagtatcgattatagatttaaccaccattgcaaagaccacaccgtgtcaggagatgaggactactgccctcgatcaaaaaaggctaatttagggaagaatgcgtctatgaatactcagcatggaaccgccaccgaggttgcagtggagacaacaacgcctaaacaaggccagaatctctggtttctgtgtgactctcaaaaagagctagacgaactgctaaactgtctccaccctcagggaattcgcgaatcacaactcaaggagcggcttgaaaaaagatatcaggacatcatccattccatacacctcgcccgaaaacccaaccttggcttgaagtcctgtgatggcaatcaggaattactaaatttcctcaggtctgacctcatcgaagtcgccacccggctacagaagggtggtctcggttatgttgaagaaacttccgaattcgaagcgcgagtcataagcctggaaaagcttaaagactttggtgagtgtgtgattgccctgcaagcctcagtgattaagaagttcctccagggcttcatggcaccgaagcagaagcgccgcaagctgcagtctgaagattcagcaaaaactgaagaagtggatgaagagaaaaaaatggtggaagaagccaaagttgctagcgcgttggagaagtggaagactgccatcagggaagcccagacgttcagtcggatgcacgtcttgcttgggatgctggacgcctgtattaagtgggacatgagtgcagagaacgcccggtgcaaggtgtgtcggaaaaaaggtgaggacgataaactcatcctctgcgatgagtgtaacaaagctttccacctgttctgccttcggccagctctctacgaggtaccagacggggagtggcaatgtcctgcttgtcagcccgctacagctaggaggaacagtagggggagaaattacaccgaggagagtgcctcggaggactcagaagatgatgaatctgatgaggaggaagaagaagaggaggaggaggaggaagaagaggattatgaagtggccggtctgaggctgcgcccgaggaagactatcagaggcaagcatagcgtgatccctcctgcagcccgtagtggtcgtcggcctgggaagaaaccacactcaacgcgtcgttcccagccaaaggccccccctgtggatgacgcagaggttgacgagctcgtcctgcagacaaaaagaagcagcagaaggcaaagtcttgagctccagaagtgcgaagagatcctgcacaagatcgtcaagtaccgattctcatggccattcagagaaccagttaccagagatgaagccgaagactactatgatgtgattactcaccctatggactttcagacagtgcagaacaaatgctcttgtgggagctaccggtccgtccaagaattcctgactgacatgaagcaggtgtttacgaatgcagaagtctacaattgtagaggctcacacgttctatcttgtatggtgaagaccgaacagtgcctcgtggctctgctgcataaacacttgccaggacacccatatgtgcgacgaaagcgaaagaaattcccagaccgactcgccgaggatgagggtgacagcgaacccgaggccgttggccagtcacgcggcagacggcagaagaagtag

SEQ ID NO: 223892 - DNA, 4452 bp, Artificial Sequence
  derived and/or modified sequence
atggcccccctgctgggccggaagcccttccccctggtgaagcccctacctggagaagaacccctattcacaatcccacacacccaagaggccttccggacacgtgaagaatatgaggccagactggagcgatattcggagaggatctggacctgtaaatccaccggaagctcacagctaacacacaaggaggcttgggaagaggagcaggaggtcgccgagctgctgaaggaagagttccccgcctggtatgagaaacttgtgctcgaaatggtacaccacaatacggcctctttggagaaactagttgacacggcctggctggaaatcatgaccaagtacgccgttggcgaggaatgtgacttcgaggtgggaaaggagaagatgttgaaggtaaaaattgtgaagatacatcccctcgaaaaagtggacgaggaagccaccgagaagaaatctgacggcgcttgcgacagtccgtcttccgacaaggagaatagcagccaaatcgcgcaggaccatcagaagaaagagaccgtggtgaaggaagatgaaggccggcgggagtccatcaacgacagagccaggcggagccctaggaaactgcccacgagcctcaaaaagggggaacgcaagtgggctccccccaagttcctccctcacaagtatgacgtcaagttgcagaatgaggacaagattatttcgaatgttcccgctgactccttaattagaacagagcgacctccaaacaaagaaatcgttcggtatttcatccggcataatgctctgcgagccggaacaggcgaaaacgcgccatgggtggtagaggatgagcttgtgaagaaatattccctccctagtaagttttccgactttctattggatccctataaatatatgacactcaatccatccaccaagcgaaaaaatactggatcgcctgatagaaagccaagcaagaagtcaaagaccgacaattcctccctgagctcaccgctcaatcccaagctatggtgccacgtccacctgaagaaatctctttcgggatctccactgaaggttaaaaactcaaagaattcaaaatccccagaggagcatctagaggagatgatgaagatgatgtctccaaacaagctccacaccaatttccacatccccaagaaaggcccccccgccaagaagcccggtaaacacagcgataaaccgctgaaggccaaagggaggagcaaaggtatccttaacggccagaaaagcacagggaattctaaatcacccaaaaaggggctgaagacccccaagaccaaaatgaagcaaatgacattactcgacatggccaagggtacacaaaagatgacgcgggccccccgcaactccggtgggacacccaggactagttcgaaaccacacaaacacctaccccctgctgccttacatttgatcgcatactataaggagaataaagacagagaggataagcgcagtgcgctcagctgtgtcatctccaagactgcgcggcttttgtcttcagaggaccgtgcccggctccccgaggagcttcgcagtctcgtccagaagcggtatgagctcctcgagcataagaaaaggtgggcaagcatgtctgaagaacagcgcaaggagtacctaaagaagaagagagaggagctcaagaaaaaattaaaagagaaggcgaaagagcggagagaaaaggagatgttggagaggctggagaagcaaaaacggtacgaggaccaagaactgaccggtaaaaatctgcccgctttccggctagtcgatacgcctgaagggctccccaacacgctgtttggtgatgtggctatggtggtcgaatttctgtcgtgctactccggactgttactacccgacgcccagtacccaataacagccgtttccttgatggaggcgctgagcgccgataagggaggatttctttacttgaatagggtgcttgtgatcttgttgcagacactactgcaggatgagatcgctgaggactatggggagttaggtatgaaactgtccgagatccctctgactcttcattcggtgagtgagctggtgaggttatgtttaagacgcagtgatgtccaggaggagtctgaaggctccgataccgacgacaacaaagattctgcagctttcgaggataacgaggtgcaagatgaattcctggaaaagcttgagaccagcgaattctttgagctgacatcagaggaaaagttgcagattctgaccgccctgtgtcacaggatactgatgacctactcagttcaggaccacatggagactaggcagcaaatgagcgccgagctctggaaagaacggctcgccgtactgaaggaggaaaacgataagaaacgcgccgagaaacaaaaaagaaaagaaatggaggcaaaaaacaaagagaacgggaaagtggaaaatggcctcggcaagacagacagaaaaaaagagatcgtgaaatttgagccccaggtcgacactgaggctgaagatatgatcagtgccgttaagagcagaaggttacttgccatacaagccaaaaaggaaagagaaatccaggaaagagaaatgaaggtcaaactcgagcgccaggccgaagaggagagaattcgcaaacataaagccgccgctgagaaagcgttccaagagggtatcgccaaggcaaaattagtaatgcgccgcactcccatcggaactgaccgcaaccataatagatactggctgttttctgacgaagtgccagggttgttcattgagaagggttgggtgcacgacagtatagactatcggttcaaccatcactgcaaggaccatacagtctcgggagacgaggattactgcccaaggagtaaaaaagcgaacctaggcaaaaacgccagtatgaacacgcagcacggcaccgccacagaggtggccgtggaaacaacaaccccaaagcagggccagaatttgtggttcctgtgcgacagccaaaaggaactcgatgaactccttaattgcctccaccctcaggggatcagagaatctcaactcaaagagaggcttgaaaaaagatatcaagacatcattcacagcatccacctggcccggaagccaaacctggggctaaagtcttgcgatggtaatcaagaactgctgaactttctccggagtgacttgatagaggtggcaaccaggttgcagaaggggggactaggatacgtcgaggagaccagcgagtttgaggctagggtgatctccctggagaagttgaaggacttcggagagtgtgtaattgccctgcaggccagtgtgataaaaaaatttctccaggggttcatggcccctaaacagaaacggaggaaattgcaatccgaggattcagccaagactgaggaggttgacgaggagaagaaaatggtcgaagaggctaaagtagcaagcgccctggagaagtggaagacagcgattagggaagctcagacgttcagtcgcatgcacgttctactgggcatgttagacgcctgcatcaagtgggacatgtctgcagagaatgccaggtgcaaagtgtgtaggaagaagggggaagatgataagttgattctgtgtgatgaatgcaacaaagcgttccaccttttctgcctacgcccagccctttacgaggtgcccgacggggagtggcagtgccccgcctgtcagcctgctaccgcccggagaaacagtcgaggccgcaattacacagaggagtccgctagtgaagactccgaagacgatgagtccgatgaggaagaagaggaagaggaagaggaggaggaggaggaagattatgaggtggccggactgaggctgaggcccagaaagacgataagaggcaaacatagtgttattcctcccgccgcgagatctggtcgacgcccgggaaagaagcctcattccacacggagaagtcagcctaaggctccacctgtggacgatgcagaagtggacgagctggttttgcaaacaaagagaagcagcaggcggcagtcacttgagcttcagaagtgtgaggaaatactgcacaaaatcgtaaagtacaggttttcgtggccctttagggaacccgtcacgagagacgaggcagaagattactacgacgtaattacccaccctatggattttcagaccgttcaaaacaagtgttcatgtgggagttacagaagcgtccaggagttcctcactgacatgaagcaggtgttcactaacgctgaggtgtataattgcaggggttctcacgttttgagctgtatggtcaagactgagcagtgcctggtggcgctcctccataaacatctgcccggccatccttatgtgaggagaaaacgtaagaagttcccagatagactggccgaggatgaaggcgatagcgagccagaggctgtgggccagtccaggggcaggcgacagaagaagtag

SEQ ID NO: 223893 - DNA, 4452 bp, Artificial Sequence
  derived and/or modified sequence
atggcccctctcctgggcagaaagccctttcctctggttaaaccattacccggagaagagccactgttcacgatcccccatactcaggaggcatttagaaccagagaagagtacgaggctaggctggagcgatatagcgagcgaatttggacatgcaagtctacggggtcctcccagctgactcacaaagaggcttgggaggaggaacaggaagttgctgaactccttaaggaggagtttccagcatggtatgaaaagcttgtgctagagatggtgcaccacaacacagcctccctggaaaagctcgtggacacagcatggctggagattatgacaaagtacgccgtcggagaagaatgcgacttcgaggttggcaaggagaagatgctgaaggtgaagatcgtgaagattcatcctcttgagaaggttgatgaggaggccacggagaaaaaatcagacggggcttgtgattcgccctcaagtgataaggagaacagctcacagatagcccaggatcaccaaaagaaggaaaccgtcgtgaaagaggacgaggggaggcgggaatctataaacgatagggcgcgtcgatccccccgaaagctgcccacgtcactcaagaagggtgagcgtaaatgggcccctcccaagttcctgcctcataagtatgacgtcaagctacagaacgaagacaagatcattagtaatgttccggcagattctttgatccggacggaacgccctcccaacaaagaaattgtccgctactttatcaggcacaatgcactccgcgcaggaacgggggaaaatgccccttgggtcgtagaggacgaactagtcaaaaagtacagtcttccctccaagttttcagattttctcctggacccgtataagtatatgacactcaatcccagcacaaaacggaaaaataccggcagccccgatcggaagccttcaaagaagtcaaagactgacaattcaagcctgtcttccccgctcaatccaaaactttggtgtcacgttcatttgaagaagtcgctcagcggctctccactcaaggttaaaaatagcaagaacagcaagagtcccgaggaacacctcgaggaaatgatgaaaatgatgagccctaacaaactacacactaattttcatatcccgaagaagggcccacctgcaaaaaagcccggtaagcattctgacaagccactgaaggccaaaggacggtcaaagggcatactgaacggccaaaaaagcacgggcaacagcaagagccccaaaaagggcctgaagaccccaaagacgaaaatgaagcagatgacactgctggatatggcgaagggaacacagaaaatgactcgcgcaccacgtaattcaggtggaactccacgtacgagcagtaaacctcacaagcacttacccccagccgcactgcacttaatcgcctattacaaggagaataaagaccgggaagacaagcggagcgccctgagctgcgtgatttccaagactgccaggttactttcttctgaggatcgggcacgcctccccgaagagctgagaagccttgtccagaagagatatgaactcctggagcataagaaaaggtgggcctcaatgtcagaagagcagcggaaggagtacctaaagaagaaacgggaagaactcaaaaagaagctgaaggaaaaagccaaggagcggagggaaaaggagatgctcgaaaggcttgaaaagcaaaagcgctatgaggatcaggagctgaccggtaagaatctgcccgcttttcggctggtggatacaccagagggactgcctaatacactgttcggagacgtcgcgatggtcgtagaatttttgtcgtgttacagcggcctactgctgcctgatgctcagtaccccattaccgctgtctccctgatggaggccctttctgcagacaagggcggatttctgtatctgaaccgagttctcgtgattttgctacagaccttgttacaagatgagatcgccgaggattatggtgaactagggatgaagctgagcgagatcccccttaccttgcatagcgtgagcgaactggttcgactgtgcttgagacgatcagacgtacaggaggagagcgagggttccgatacggatgataacaaagacagcgccgcttttgaagacaacgaagtccaagatgaatttctcgaaaagctggaaacaagcgagttctttgagctgacatccgaggagaagcttcaaatccttacagctctctgtcaccgcattttaatgacctactcagtacaggaccacatggagactagacagcagatgagcgccgaactgtggaaagaacgcctggcagtgttgaaggaagagaacgacaaaaaacgggctgagaaacagaaaaggaaagagatggaagcaaaaaacaaggaaaatgggaaggtggagaacggacttgggaagactgacaggaagaaagaaattgtgaaattcgaaccccaagttgacaccgaggcggaggacatgatctctgccgtgaagagccggagactgctagccatccaagctaaaaaggagagggaaatacaggagcgcgagatgaaggtaaaactggaaagacaggcggaagaagaacgtatccggaagcataaggccgcagccgagaaagcatttcaagaaggcattgcaaaagcgaaactggtcatgcgcagaaccccgatcgggaccgatcgaaatcacaaccgatactggctcttttccgacgaagtacctggacttttcatagaaaaaggctgggtgcacgactccattgactacagattcaaccatcattgtaaagaccacactgtatccggtgacgaggactattgcccaaggagcaaaaaggctaatcttgggaagaacgccagtatgaatacccagcacgggactgctaccgaggtggccgtcgaaactacaacgcccaagcagggccagaacctctggttcctctgcgattcacagaaggaattagacgaactattgaattgtttgcatcctcagggcattcgtgagtcacagcttaaggaacgtttggagaagcggtaccaggacattatccacagcattcatttggctagaaagcccaatctcggcctcaaatcatgcgatggtaaccaggagctcctgaactttttgcgaagtgacctcatcgaggttgccactcggctgcagaaggggggactgggctatgtagaagaaacaagtgaatttgaagcaagagtgataagtctggaaaaactgaaagacttcggggaatgtgtcattgctttacaggcatctgtgataaagaagtttctgcaagggtttatggcaccaaaacaaaagcgacgtaagctccagtcagaagatagtgccaagactgaggaagtcgatgaagagaaaaaaatggtggaagaagcaaaagtcgcatctgcgttggagaaatggaaaacagctattagggaggcccagacattctctaggatgcacgtgttgttgggaatgctggacgcatgcataaagtgggatatgagcgcagagaatgctagatgtaaggtttgtaggaagaagggtgaggatgacaagctgatcctgtgcgacgaatgcaacaaggctttccatctgttttgcctccgtcctgcgctatatgaagttcccgatggggagtggcaatgccctgcttgccaacccgctactgctagaaggaattctaggggcagaaattacactgaggaatcagcttcagaagacagcgaggacgacgagtctgatgaggaagaggaagaggaggaagaagaggaggaggaagaggactacgaggtggccggattgcgtctgcgtccgagaaagaccatccgtggaaaacacagcgtgatacccccagcggctcgctcggggagacgcccaggaaagaagcctcactccacccgtagatcccagcccaaagccccacccgtggacgatgccgaagtggacgaactcgtactgcagacgaagcggtcctcacgcaggcagtcactcgaactccagaaatgcgaggaaattttgcacaaaattgtcaagtacagattttcatggccatttagggaaccggtgacgcgcgacgaagcggaggactactacgacgttatcacccaccctatggatttccagactgtgcagaataagtgcagttgcggttcatacaggtccgtgcaggaattcttaaccgacatgaagcaagtcttcacaaacgcagaagtttataattgcagggggtctcatgttctctcttgtatggtaaaaacggagcagtgtctagtggccctattgcacaagcatcttcctgggcacccttacgtgagaaggaagcggaaaaaatttcctgatcggttggctgaagatgaaggcgattccgaacctgaggcagtaggacagagtcgaggaagacggcagaagaaatag

SEQ ID NO: 223894 - DNA, 4452 bp, Artificial Sequence
  derived and/or modified sequence
atggcaccgctgctcgggagaaaaccttttcctctagtgaaacccctcccgggtgaagagcccttgtttacaatcccgcatactcaggaggccttcagaacccgcgaggaatacgaggctcgcctggaaagatatagcgaacgcatctggacctgtaagtcgacaggctcgtcacaacttacacacaaggaagcctgggaagaagagcaagaggttgccgaacttcttaaggaggagtttccagcctggtacgagaaattggttttagagatggtgcaccacaacactgcctctctcgagaaactggtggatacagcctggcttgagatcatgaccaagtatgctgtaggggaggagtgtgacttcgaggtcggcaaggaaaaaatgctaaaggtcaagatagtgaaaatacaccccttagaaaaggtagatgaagaggcaactgagaaaaagtctgatggtgcctgtgatagtccaagttctgataaggagaactcttcgcaaattgcacaggaccaccaaaagaaggagacagtggttaaggaagacgaggggcgacgcgagtccatcaacgacagggccagacgctctcctagaaagctgcccacgtctctgaagaagggcgaacgaaagtgggcccctcccaaattcctgcctcacaaatatgacgttaaactgcagaatgaagataaaattatcagtaatgtgcccgctgattctctgattcgaacagagcgccctcctaacaaagagatagtccgatattttattcgacataatgccttgcgcgctggcactggagagaatgccccatgggtggtcgaggacgagctagttaagaagtacagtctaccttctaagttctcggactttttgcttgatccgtacaaatatatgaccttaaatccctctaccaaaaggaagaataccggttcacctgaccggaagccttccaaaaagtcaaagaccgacaacagctctctgagtagtcccttgaatcccaaactatggtgccacgttcatttgaaaaaatcgctctctggctctccattaaaggtgaaaaacagcaagaactccaagtcccctgaagagcatttggaggagatgatgaaaatgatgtctcccaacaaattgcacactaactttcacatccctaagaagggtcccccagccaagaaacccggtaagcatagtgataagccattaaaggccaagggacgcagcaaagggattttgaacggacagaagtccactggcaactcaaaatcacctaagaaagggctcaaaaccccgaaaactaaaatgaagcagatgaccctattggacatggctaaggggactcaaaaaatgacccgagctcctcgcaattcaggcggaactcctcgcacatcctctaaaccacataagcacctgcctccagccgctctgcatcttatcgcatattacaaagaaaacaaggaccgggaagacaagcgtagcgccctctcttgtgtgatctctaaaaccgccaggctactatcatcggaagaccgggctcgactacccgaggagctgcgcagcctagtgcagaagcggtatgagctgcttgagcacaaaaaaaggtgggcaagtatgtccgaggaacaacgcaaagagtacctcaaaaagaagcgggaggagctgaaaaaaaagctgaaggagaaagcaaaggagaggcgagagaaggaaatgcttgaacggctcgaaaaacagaagagatatgaagaccaagagctgactggcaaaaacctgcccgcattccgactcgtagatacacccgagggtcttcccaacacactgtttggggacgtcgcgatggtggtggagttcctgagctgctatagcggtctactgctaccagatgcccaataccctattacagccgtctcactcatggaggccctatctgccgacaagggcggatttctgtacctcaacagggtgcttgtgatcctgcttcagactctgcttcaggacgaaattgcagaagactatggggagctgggcatgaagctcagtgagatcccactcacccttcattccgtcagcgaactcgtacgactgtgtcttcgacgaagtgatgtgcaggaggagtccgagggaagtgataccgatgacaacaaggactctgccgctttcgaagataatgaggtccaggacgaatttcttgaaaaattggagaccagtgaatttttcgagctgaccagtgaggagaagctacaaatccttacagcactgtgtcacaggatcttgatgacatattccgtccaggaccacatggaaaccaggcagcaaatgagcgctgaactctggaaggaaagactagctgtcctcaaggaagaaaacgacaagaaacgagctgagaaacaaaaacggaaagaaatggaggccaagaacaaggagaacgggaaagtagaaaacgggctcggtaagacagataggaagaaggaaatcgtgaaatttgaaccgcaggtcgacacagaggcggaggacatgatcagcgctgtgaaatcacggaggctgctcgcaatccaggcaaaaaaggaaagagagattcaggagcgcgaaatgaaagtaaaactcgagcggcaagcagaagaggagcgaattcggaagcacaaagccgcagctgagaaagcgtttcaagagggcatcgccaaagcgaagctggttatgcgacgcaccccaatcgggaccgaccgcaatcacaataggtactggctcttcagtgatgaagttcctggcctgtttatcgagaagggctgggtccacgacagcattgattatagatttaatcaccattgcaaggatcacactgtgagtggggacgaggattactgtcccagatcgaagaaggccaatctaggaaagaatgcctccatgaacacacagcacggaacagctacagaagtggccgtggagacaactacacctaagcagggacagaacttgtggttcctctgcgatagccagaaggagctcgatgaactgctcaattgcctacacccccaaggtatacgtgaatctcagctgaaggagcgcctcgagaagcggtatcaagatataatccattcaatccatctagcaaggaagccgaacctggggcttaagtcatgcgatggtaaccaggaactgctgaattttctgaggagcgatctgatcgaagttgccaccagactgcagaagggaggtctcggctacgtagaggagacttctgagtttgaggctagagtgatatcccttgagaaactcaaagattttggggaatgcgtgatcgcgctccaggccagtgtgatcaagaaattcctgcaggggttcatggcccctaaacagaagagaagaaagcttcagtctgaagatagcgccaaaaccgaggaggtggacgaagaaaagaagatggtggaagaggctaaagtcgcgtccgctttagagaaatggaaaaccgcgataagagaggcccagactttcagcaggatgcacgtccttctgggaatgcttgatgcctgtattaagtgggatatgtcagccgagaatgccaggtgcaaagtctgccgtaagaaaggcgaggacgataaactgattttgtgtgatgaatgtaataaagcctttcatctcttctgcctgcgacccgcactgtacgaagttcctgacggcgaatggcaatgtccagcctgtcagcccgctactgctcggagaaactctcggggaagaaattacacagaggaaagcgcaagcgaggatagtgaggacgacgaatctgacgaagaggaagaggaggaggaggaagaggaggaggaagaggactacgaagtggcaggactcaggctgcgacccagaaaaactatacggggtaagcacagtgtgattccccctgccgctaggtccggcaggaggcccggaaaaaagccacattccacgagaagatctcagcctaaggccccaccggtggacgatgctgaagtcgatgagctcgttctgcagaccaagcgatcttcgagacgtcagagcctggaactgcagaagtgcgaagaaatcttgcacaagatcgtgaagtatcgtttttcgtggccctttcgggaaccagtaacgcgggatgaagcagaggactattatgatgtcataactcatcccatggactttcagactgttcagaacaagtgttcgtgcggatcgtaccggagtgtgcaggagttcctgactgacatgaagcaggtgttcactaacgccgaggtgtacaattgccggggttcccatgtactgagttgcatggtcaaaaccgaacagtgcctggtggctctgctccataagcatctgcctgggcatccttatgtgcgtcgcaaacgtaaaaagtttccagaccgcctcgcagaagatgagggcgactctgaacccgaggccgtagggcaatctaggggcagacggcagaagaagtag

SEQ ID NO: 223895 - DNA, 5428 bp, Artificial Sequence
  derived and/or modified sequence
cgggcccgggggaggaggggaatctcccgccatttttcaataatttcctccggtgctgctgaggaggagtcgtgactgccggccgccgggacccgaagcggaggtcggcggggggctgctgggaggcgcggcggtgtgcgcgggagctctgcgccgtggcgttccgctccatgactgtcgcgcggccgcgccggcggtgagggagccggagttcgcgccgccctctcacccctcccttcccccaccccacccccgggcgcctggcgctcgctccgggccgcggggcctagtgctgcgccgcggggccggccccagcagccgccagtccccaccgccgccgccgcgatggcgccgctcctgggccgcaagcccttcccgctggtgaagccgttgcccggagaggagccgctcttcaccatcccgcacactcaggaggccttccgcacccgggaagagtatgaagcccgcttggaaaggtacagtgagcgcatttggacgtgcaagagtactggaagcagtcagctaacacacaaggaagcctgggaggaagaacaggaagttgctgagcttttgaaggaggagtttcctgcctggtatgagaagcttgttctggaaatggttcaccataacacagcctccttagagaagttagtagatactgcttggttggagatcatgaccaaatatgctgtgggagaagagtgtgacttcgaggttgggaaggagaaaatgctcaaggtgaagattgtgaagattcatcctttggagaaagtggatgaagaggccactgagaagaaatctgatggtgcctgtgattctccatcaagtgacaaagagaactccagtcagattgctcaggaccatcagaagaaggagacagttgtgaaagaggatgaaggaaggagagagagtattaatgacagagcacgtagatcgccacgaaaacttcctacttcattaaaaaaaggagaaaggaaatgggctcctccaaaatttctgcctcacaaatatgatgtgaaactacaaaatgaagataagatcatcagtaacgtgccagcagacagcttgattcgtacagagcgcccaccaaataaggagatagttcgatactttatacggcataatgcattacgagctggtactggtgaaaatgcaccttgggtcgtagaagatgaattggtgaagaaatactctctgcccagcaagttcagtgactttttacttgatccatacaagtatatgactctcaacccttctactaagaggaagaatactggatccccagacaggaagccctcaaagaaatccaagacagacaactcttctcttagttcaccactaaatcctaagttatggtgtcacgtacacttgaagaagtcattgagtggctcgccactcaaagtgaagaactcaaagaattccaaatctcctgaagaacatctagaagaaatgatgaagatgatgtcgcccaataagctgcacactaactttcacattcctaaaaaaggcccacctgccaagaaaccagggaagcacagtgacaagcctttgaaggcaaagggcagaagcaaaggcatcctgaatggacagaaatccacagggaattccaaatctcccaaaaaaggactgaagactcctaaaaccaaaatgaagcagatgactttgttggatatggccaaaggcacgcagaagatgacacgagccccacggaattctgggggtacacctaggacctctagtaaacctcataaacatctgcctcctgcagccctacacctcattgcatactacaaagaaaacaaagacagggaggacaagaggagcgccctgtcctgtgttatctccaaaacagctcgtcttctctctagtgaagatagagctcgtctcccagaagaattgcgaagtcttgttcaaaaacgctatgaacttctagagcacaaaaagaggtgggcttctatgtctgaagaacaacggaaagaatatttgaaaaagaaacgggaggagctgaaaaagaagttgaaggaaaaagccaaagaacgaagagagaaagaaatgcttgagagattagaaaaacagaagcggtatgaggaccaagagttaactggcaaaaaccttccagcattcagattggtggatacccctgaagggctgcccaacacgctgtttggggatgtggccatggtggtggaattcttgagctgttattctgggctacttttaccagatgctcagtatcctattactgctgtgtcccttatggaagccttgagtgcagataagggtggctttttataccttaacagggtgttggtcatcctcttacagaccctcctacaagatgagatagcagaagactatggtgaattgggaatgaagctgtcggaaatccccttgactctgcattctgtttcagagctggtgcggctctgcttgcgcagatctgatgttcaggaggaaagcgagggctcagacacagatgacaataaagattcagctgcatttgaggataatgaggtacaagatgagttcctagaaaagctggagacctctgaattttttgagctgacgtcagaggagaagctacagatcttgacagcactgtgccaccggatcctcatgacatactcagtgcaagaccacatggagaccagacagcagatgtctgcagagttgtggaaggaacggcttgctgtgttgaaggaagaaaatgataagaagagagcagagaaacagaaacggaaagaaatggaagccaaaaataaagaaaatggaaaagttgagaatgggttaggcaaaactgataggaaaaaagaaattgtgaagtttgagccccaagtagatacagaagctgaagacatgattagtgctgtgaagagcagaaggttgcttgccattcaagctaagaaggaacgggaaatccaggaaagagaaatgaaagtgaaactggaacgccaagctgaagaagaacgaatacggaagcacaaagcagctgctgagaaagctttccaggaagggattgccaaggccaaactagtcatgcgcaggactcctattggcacagatcgaaaccataatagatactggctcttctcagatgaagttccaggattattcattgaaaaaggctgggtacatgacagcattgactaccgattcaaccatcactgcaaagaccacacagtctctggtgatgaggattactgtcctcgcagtaagaaagcaaacttaggtaaaaatgcaagcatgaacacacaacatggaacagcaacagaagttgctgtagagacaaccacacccaaacaaggacagaacctatggtttttatgtgatagtcaaaaggagctggatgagttgctaaactgtcttcaccctcagggaataagagaaagtcaacttaaagagagactagagaagaggtaccaggacattattcactctattcatctagcacggaagccaaatttgggtctaaaatcttgtgatggcaaccaggagcttttaaacttccttcgtagtgatctcattgaagttgcaacaaggttacaaaaaggaggacttggatatgtggaagaaacatcagaatttgaagcccgggtcatttcattagagaaattgaaggattttggtgagtgtgtgattgcccttcaggccagtgtcataaagaaatttctccaaggcttcatggctcccaagcaaaagagaagaaaactccaaagtgaagattcagcaaaaactgaggaagtggatgaagagaagaaaatggtagaggaagcaaaggttgcatctgcactggagaaatggaagacagcaatccgggaagctcagactttctccaggatgcacgtgctgcttgggatgcttgatgcctgtatcaagtgggatatgtccgcagaaaatgctaggtgcaaagtttgtcgaaagaaaggtgaggatgacaaattgatcttgtgtgatgagtgtaataaagccttccacctgttttgtctgaggccggccctctatgaagtaccagatggtgagtggcagtgcccagcttgccagcccgctactgccaggcgcaactcccgtggcaggaactatactgaagagtctgcttctgaggacagtgaagatgatgagagtgatgaagaggaggaggaggaagaagaggaggaggaggaagaagattatgaggtggctggtttgcgattgagacctcgaaagaccatccggggcaagcacagcgtcatcccccctgcagcaaggtcaggccggcgcccgggtaagaagccacactctaccaggaggtctcagcccaaggcaccacctgtggatgatgctgaggtggatgagctggtgcttcagaccaagcggagctcccggaggcaaagcctggagctgcagaagtgtgaagagatcctccacaagatcgtgaagtaccgcttcagctggcccttcagggagcctgtgaccagagatgaggccgaggactactatgatgtgatcacgcaccccatggactttcagacagtgcagaacaaatgttcctgtgggagctaccgctctgtgcaggagtttcttactgacatgaagcaagtgtttaccaatgctgaggtttacaactgccgtggcagccatgtgctaagctgcatggtgaagacagaacagtgtctagtggctctgttgcataaacaccttcctggccacccatatgtccgcaggaagcgcaagaagtttcctgataggcttgctgaagatgaaggggacagtgagccagaggccgttggacagtccaggggacgaagacagaagaagtagagaggcagggccgtggtaagggagctgaggtggggggacagctagggagggtgggagggaggcgagcgaggaagaccaagaacctggaagagatcacagggagtccagaaacgcctgtcatcccaagcttatgctgtttttctaaaagctctttatggggcttgatattgggttggtggtctttgtccagaaatatgaagggacaaagagggccataaccctcccttctgagagtttccaggaggagtccgagggtctagcttttctggtgaagccagttcctgttcctgccttctttcctaagggcctgctcgctctggcttccaccacagtgccaagcccctctggtctccaggggagggattgctgtgttacatagcaggatcggggtaatcaggccaacaggggagatggtggcgatttttcttttttaatctgtatttattatacagtcttgtttctttaagcccatactctgtctcttcccccgtcttcctctcaggtgacagtatcagtgagtgccatacagaattgtgtattcaccagcatcatgaaacagttgtggtcttttgagttgatcttggcagagtaaagggacgtgtcctggagccattcctgaatctccccttct

SEQ ID NO: 223896 - protein, 718 aa, Artificial Sequence
  derived and/or modified sequence
MFSVESLERAELCESLLTWIQTFNVDAPCQTVEDLTNGVVMAQVLQKIDPAYFDENWLNRIKTEVGDNWRLKISNLKKILKGILDYNHEILGQQINDFTLPDVNLIGEHSDAAELGRMLQLILGCAVNCEQKQEYIQAIMMMEESVQHVVMTAIQELMSKESPVSAGNDAYVDLDRQLKKTTEELNEALSAKEEIAQRCHELDMQVAALQEEKSSLLAENQVLMERLNQSDSIEDPNSPAGRRHLQLQTQLEQLQEETFRLEAAKDDYRIRCEELEKEISELRQQNDELTTLADEAQSLKDEIDVLRHSSDKVSKLEGQVESYKKKLEDLGDLRRQVKLLEEKNTMYMQNTVSLEEELRKANAARSQLETYKRQVVELQNRLSEESKKADKLDFEYKRLKEKVDSLQKEKDRLRTERDSLKETIEELRCVQAQEGQLTTQGLMPLGSQESSDSLAAEIVTPEIREKLIRLQHENKMLKLNQEGSDNEKIALLQSLLDDANLRKNELETENRLVNQRLLEVQSQVEELQKSLQDQGSKAEDSVLLKKKLEEHLEKLHEANNELQKKRAIIEDLEPRFNNSSLKIEELQEALRKKEEEMKQMEERYKKYLEKAKSVIRTLDPKQNQGAAPEIQALKNQLQERDRLFHSLEKEYEKTKSQREMEEKYIVSAWYNMGMTLHKKAAEDRLASTGSGQSFLARQRQATSSRRSYPGHVQPATAR

SEQ ID NO: 223897 - DNA, 2157 bp, Artificial Sequence
  derived and/or modified sequence
atgttctcagtcgaatccctggagcgcgcggagctatgtgagtcactactgacctggattcagactttcaatgtggacgccccgtgccagaccgtggaggatttaacaaatggggtcgtcatggcgcaagttctccaaaaaattgacccagcatacttcgatgagaactggctaaatcgcattaagaccgaagtgggggacaattggcgcctgaagatatctaatttaaaaaagattcttaagggtatcctggattataaccacgaaatcctgggccaacagatcaatgattttacgctcccggacgtcaatttaataggcgagcactctgacgctgctgaactgggccggatgctgcagctcatcttaggatgcgcggtgaactgtgaacagaaacaggaatacattcaagccatcatgatgatggaggagtccgtccaacacgtagtgatgaccgccatccaggagctcatgtctaaggagtccccagtgagcgccggtaatgatgcttatgtagacctggatagacagctcaagaagacaactgaggagctgaatgaagcactttccgctaaggaagagatcgctcagaggtgccatgagcttgatatgcaggtagctgctctgcaggaagagaaatccagtctgctagcagagaatcaggtcttgatggaaaggttgaatcagagcgactctatagaggatcctaactcccccgcaggacgaaggcacctgcagctacagacacagctggagcaattgcaggaagagacctttcgactggaggccgccaaagatgactaccgtatccgatgcgaggagctagagaaagagatctccgagctccgacagcagaacgacgagctcaccacattggccgacgaggcacagagcttgaaggatgagattgatgtgctgagacacagcagtgataaagtcagtaagctggagggacaagtggagagttacaagaagaagctggaagacctgggcgacctgagaagacaggttaaattgttagaggaaaaaaatacgatgtacatgcagaacacagtctcactggaagaagagctgcggaaggcgaacgctgctcgtagccagctggagacgtacaagcggcaggtggtcgaactgcagaatcgcctgagcgaggagagtaagaaggccgataagcttgattttgaatataagcgcctaaaagaaaaagttgacagtttacagaaggaaaaagatcgtctgcgaaccgaaagggacagcttaaaggaaacgatagaggagctcagatgcgtccaggcccaggaaggacagctgacaacacagggcctcatgccccttgggtcccaagagtccagcgacagtttggccgcagaaatagtaactccagagatccgggagaagttaattagacttcagcatgagaacaagatgctaaagctcaatcaggagggttctgacaatgagaagattgccttgctgcaaagcctgctggacgatgctaatcttcggaagaacgaactggagaccgaaaatcgcctggtgaaccaacggctgctcgaggttcagagccaggtggaggaactacagaaatctctgcaggatcagggatctaaggccgaagattctgtcttactgaagaagaagttagaagaacacctagagaagttgcacgaagctaacaatgagttacaaaagaagagagccatcattgaggacctcgagcccagatttaataattcatcacttaaaatcgaagaacttcaggaagcactgcggaagaaggaggaggagatgaagcagatggaggaaaggtacaagaaatacctggaaaaagccaaaagcgtgataaggaccctggacccaaaacagaaccagggcgccgccccagagattcaggctctgaagaaccagctccaagaaagggaccggttattccatagcctcgaaaaggagtacgaaaaaactaaaagccaacgggagatggaggagaaatacattgtctctgcctggtacaacatgggaatgacactgcacaaaaaagccgcagaagacagattggcctccactggtagcggacaatccttccttgctagacagcggcaggccacttcttctcggaggtcatatcctgggcacgtgcagccagccaccgcgcggtag

SEQ ID NO: 223898 - DNA, 3030 bp, Artificial Sequence
  derived and/or modified sequence
cggtcccgagtgaaaggagaaggaggggcgctgggggtgacggtgcggagccgctgccagcgctgggcgagagtcggcggccggatccgaggagcaggcgggcctgaggccgagtcagctgcgcgggcccccggatcccccgacagagcggcggcggtgtctggccaggcggtaggcgctgcctggccgcggcggggaagatgttcagcgtagagtcgctggagcgggcggagctgtgcgagagcctcctcacttggatccagacatttaatgtggatgcaccatgccagaccgtggaagatttaacgaatggggttgtgatggcccaggttcttcaaaagatagatcctgcatattttgatgaaaattggctaaacagaatcaaaactgaagtaggagataattggaggctaaagataagcaatttaaagaaaattttaaaaggaatcttggattataatcatgagattttaggacagcaaattaatgactttacccttcctgatgtgaaccttattggggagcattctgatgcagcagagcttggaaggatgcttcagctcatcttaggctgtgctgtgaactgtgaacagaagcaagagtacatccaagccattatgatgatggaggaatctgttcaacatgttgtcatgacagccattcaagagctgatgagtaaagaatctcctgtctctgctggaaatgatgcctatgttgaccttgatcgtcagctgaagaaaactacagaggaactaaatgaagctttgtcagcaaaggaagaaattgctcaaagatgccatgaactggatatgcaggttgcagcattgcaggaagagaaaagtagtttgttggcagagaatcaggtattaatggaaagactcaatcaatctgattctatagaagaccctaacagtccagcaggaagaaggcatttgcagctccagactcaattagaacagctccaagaagaaacattcagactagaagcagccaaagatgattatcgaatacgttgtgaagagttagaaaaggagatctctgaacttcggcaacagaatgatgaactgaccactttggcagatgaagctcagtctctgaaagatgagatcgacgtgctgagacattcttctgataaagtatctaaactagaaggtcaagtagaatcttataaaaagaagctagaagaccttggtgatttaaggcggcaggttaaactcttagaagagaagaataccatgtatatgcagaatactgtcagtctagaggaagagttaagaaaggccaacgcagcgcgaagtcaacttgaaacctacaagagacaggtagtagaactacaaaacagattatccgaagaatcaaagaaagcagataaactagattttgaatataagcggctaaaagaaaaagttgacagtcttcaaaaagaaaaggacaggctgagaacagaaagggattctctgaaggaaaccattgaagagcttcgttgtgtacaagctcaagaagggcagctcacaacacaagggttaatgcctcttggaagtcaggagtcttcagacagtctagctgcagagattgttacacctgaaatcagggagaaacttattcgtcttcagcatgagaataagatgttaaagcttaaccaagaaggttcggacaatgaaaaaatagccttattgcagagccttctagatgatgcaaatctacgcaagaatgaactggagacagagaataggctggtgaatcaaagacttctggaagtacagtcacaagttgaagaattacaaaaatctttacaggatcaaggctcaaaagcagaagattcagtccttctaaaaaagaagcttgaagaacatctagagaagctgcatgaggccaataatgaactacagaagaagagagccattattgaagatctcgagccaagatttaacaacagctccttaaaaattgaagaattacaagaagctttacgaaagaaagaggaagaaatgaagcaaatggaagaacgatacaaaaaatacttagagaaagccaaaagtgtcatccgtactttagatcctaaacagaatcaaggagcagcaccagaaatacaagctcttaaaaatcagctccaggaacgagaccgactgttccactcattagagaaagaatatgagaaaacaaagagtcagagagagatggaagagaaatatattgttagtgcctggtacaatatgggaatgaccctgcataaaaaggcagctgaagatagactggcaagcacaggctcagggcagtcatttctggcgaggcagaggcaagcgaccagcagcagaagatcatacccaggccacgtgcagccggccacagcaaggtagagaagttgtgccgctcaatcacagacacctgcacccacaacatacttctgttacacacaagaacatttcaggaaactcagccagcttattttttgtttctcttctatgtcaatacttagtgtttctcattttgaggactttttctctctcctgtatctttgttttagtttctttggtttttattttgtagtcctttcagttatttttaatgtgccaaaaatttgtacatgttcaattaaaaatgttgtataatagtgtaatacttttctttgtatgaaaatgtcctcttcttcaaaggtataggctttgtaatgaattagattttctgccaataattgatatacaatttatattctttattgtgcctgtgtgttaccatgctaagaatgtctttgtttaaagggaattaatctttttatgatgtattaatctgtgttttcaattgttttccaagtacagttcaaataacttgcatatttactatacaaaatggttgacaagtgttctttttgcaaagacttgaatacattggcagaggtgctaatcacatcttccctaaggcacctggaagaattatttgaggaaaaaatgagttttcacattgttttataggaaattaaatttgtccaaagatttggagactatttttaaaacataaatacataaaatttca

SEQ ID NO: 223899 - DNA, 2157 bp, Artificial Sequence
  derived and/or modified sequence
atgttttctgtggagagcctggagcgggcagagctgtgtgagagcctgctgacctggatccagaccttcaacgtggatgccccctgccagacagtggaggacctgaccaatggagtggtgatggcccaggtgctgcagaagattgatcctgcctactttgatgagaactggctgaaccgcatcaagacagaggtgggggacaactggaggctgaagatcagcaacctgaagaagatcctgaagggcatcctggactacaaccacgagatcctgggccagcagatcaatgacttcaccctgcctgatgtgaacctgattggagagcacagtgatgctgctgagctgggccgcatgctgcagctgatcctgggctgtgctgtgaactgtgagcagaagcaggagtacatccaggccatcatgatgatggaggagagcgtgcagcacgtggtgatgacagccatccaggagctgatgagcaaggagagccctgtgtctgctggaaatgatgcctacgtggacctggaccggcagctgaagaagaccacagaggagctgaatgaggccctgagcgccaaggaggagatcgcccagcgctgccacgagctggacatgcaggtggccgccctgcaggaggagaagagcagcctgctggccgagaaccaggtgctgatggagcggctgaaccagagcgacagcattgaggaccccaacagccctgctggccgccgccacctgcagctgcagacccagctggagcagctgcaggaggagaccttccggctggaggccgccaaggatgactaccgcatccgctgtgaggagctggagaaggagatcagcgagctgcggcagcagaatgatgagctgaccaccctggctgatgaggcccagagcctgaaggatgaaattgatgtgctgcggcacagcagtgacaaggtgtccaagctggagggccaggtggagagctacaagaagaagctggaggacctgggggacctgcggcggcaggtgaagctgctggaggagaagaacaccatgtacatgcagaacacagtgtccctggaggaggagctgaggaaggccaatgctgcccggagccagctggagacctacaagaggcaggtggtggagctgcagaaccggctgtctgaggagagcaagaaggctgacaagctggactttgagtacaagaggctgaaggagaaggtggacagcctgcagaaggagaaggaccggctgaggacagagcgggacagcctgaaggagaccatcgaggagctgcgctgtgtgcaggcccaggagggccagctgaccacccagggcctgatgcccctgggcagccaggagagcagtgacagcctggccgctgagatcgtgaccccagagatccgggagaagctgatccggctgcagcacgagaacaagatgctgaagctgaaccaggagggcagtgacaatgagaagatcgccctgctgcagagcctgctggatgatgccaacctgaggaagaatgagctggagacagaaaatcggctggtgaaccagaggctgctggaggtgcagagccaggtggaggagctgcagaagagcctgcaggaccagggcagcaaggcagaagattctgtgctgctgaagaagaagctggaggagcacctggagaagctgcacgaggccaacaatgagctgcagaagaagagggccatcatcgaggacctggagccccgcttcaacaacagcagcctgaagattgaggagctgcaggaggccctgaggaagaaggaggaggagatgaagcagatggaggagcgctacaagaagtacctggagaaggccaagagcgtcatccgcaccctggaccccaagcagaaccagggcgccgcccctgagatccaggccctgaagaaccagctgcaggagcgggacaggctcttccacagcctggagaaggagtatgagaagaccaagagccagcgggagatggaggagaagtacatcgtgtctgcctggtacaacatgggcatgaccctgcacaagaaggctgctgaggaccggctggccagcacaggcagcggccagagcttcctggcccggcagaggcaggccaccagcagcagaagaagctacccaggccacgtgcagcctgccacagccaggtag

SEQ ID NO: 223900 - DNA, 2157 bp, Artificial Sequence
  derived and/or modified sequence
atgttcagcgtggagagcctggagcgggccgagctgtgcgagagcttactgacatggattcagacatttaatgttgatgcaccttgtcagacggtcgaggatctgacaaacggagttgtcatggcacaagttctgcagaaaatcgaccctgcctattttgacgaaaattggcttaaccgaattaagactgaagtcggcgacaactggcgactgaagattagcaacctgaagaagatattaaaaggtatcctggactacaaccacgaaatattaggacagcagattaacgactttaccctcccagatgtgaatctgatcggcgagcacagtgatgctgctgaactcgggcgtatgcttcaactgattctaggatgcgcagtgaattgtgaacagaaacaggagtatattcaagccataatgatgatggaagaatccgtgcagcatgtcgtaatgaccgccatacaggagctgatgtccaaagaatcacctgtgtcagccggtaatgatgcctacgtcgacctggaccgacagctcaaaaagacaaccgaagagctcaacgaagccttgagcgccaaagaggaaattgcccagaggtgccacgagcttgacatgcaagtggccgccttgcaggaggagaaaagctccctcctggccgagaatcaggttctgatggaacgactgaatcagtctgatagcatcgaggatcccaactcccccgccgggagaagacacctgcagctccaaacacagttggagcagctgcaagaggagaccttccgcctcgaagctgcaaaggacgattatagaatcagatgcgaggaactggagaaagagatatcagaactccgccagcaaaatgacgaactgactacccttgctgatgaggcccagagcctgaaggatgagattgacgtcctcaggcacagcagcgacaaagtgtctaagttggaagggcaagtcgaaagctacaagaagaagcttgaggatctcggggatctcaggcgacaagtaaaactgctggaagaaaaaaacacaatgtatatgcaaaacactgtttccctcgaggaggagctaaggaaagccaacgctgcgagatcacagctggagacctataagcggcaagttgtcgagctacagaatcggctatccgaggagtccaaaaaggcagacaagctggacttcgaatataagcgcctaaaggagaaagtggactcacttcagaaagaaaaggaccggctcagaacagagagagactcactgaaagagacaatagaagagctgaggtgtgtgcaggcacaggaaggccagctgaccacccagggcctgatgcccctgggttcacaggaatcttcggactctctggcagcagaaatcgttacgcccgagattcgggaaaagcttatccgcctgcagcacgagaataagatgttgaagctaaatcaggagggaagcgacaacgagaagatcgcactgctacagagcttgctggatgacgcaaatctccgcaaaaatgaactggagaccgagaacaggctggttaaccaacggcttctagaagtgcaaagtcaggtagaggagctgcaaaagtcactccaagatcaaggctccaaagcagaggattccgtgctgctcaaaaagaagctagaagaacaccttgaaaaacttcatgaagcaaataatgaattgcagaaaaaacgggccatcattgaagatctcgaacctagatttaacaattcatcactgaaaattgaagagctgcaggaggcccttagaaaaaaggaggaagaaatgaaacagatggaggaaaggtataaaaaatacttagagaaagccaaaagcgtaattaggacgttggacccaaaacaaaaccaaggggcggctcctgaaatccaggctctcaagaatcagttgcaggagcgtgatagattgtttcattcacttgagaaggagtatgaaaagactaaatcgcagcgcgagatggaggagaaatacattgtgagcgcttggtacaacatgggaatgaccctgcacaaaaaagcagctgaagaccggctggcctctactggatccggtcagagtttcctcgcccggcagcgacaggccacctcttcccggagaagttacccaggccatgtgcagcctgcaacagctagatag

SEQ ID NO: 223901 - DNA, 2157 bp, Artificial Sequence
  derived and/or modified sequence
atgttctccgtagaaagccttgagcgagcagagctgtgtgaaagtctgctaacctggattcagacttttaacgtggatgcaccttgtcagacggtagaagatctgacgaatggagtggtgatggcacaggtgctgcagaagatcgacccggcttactttgatgagaactggctgaaccggatcaagactgaggtcggcgacaactggcggctcaaaatcagtaacttgaagaaaatactaaagggaatccttgattataatcacgaaatcttgggccagcagataaatgactttaccttgccggacgtgaatctcattggggaacattcagatgcagccgaattaggccgtatgctccagttaattttgggctgcgcagtgaattgtgagcagaaacaggaatacattcaggcgattatgatgatggaggagtccgtgcagcatgtggtgatgaccgccatccaggagctgatgagtaaggaatcacctgttagcgcgggaaacgatgcttatgtggatttagataggcagctaaaaaaaaccacagaggagctcaacgaggcactgagtgcgaaggaggaaatcgcgcaacgttgccatgaacttgacatgcaggtggccgctctccaggaagaaaagagttctctgttggccgagaaccaggtactcatggagagactgaatcaaagtgactcaattgaggatccaaatagcccagcgggtcgccgacacctgcagcttcaaacacagcttgagcagcttcaagaagagacatttcggctggaagcagccaaggacgactaccggatccggtgcgaggagcttgagaaagagatctctgaattgcgccagcaaaatgacgaactgactacactggccgacgaggcccagagccttaaagatgagatagacgttctaagacacagctctgataaagtgagcaagctagagggtcaggtcgaaagttataaaaagaagctggaggacctaggagaccttcgaaggcaggtcaaactgctcgaggagaagaatacaatgtacatgcagaacacggtgagcctggaagaggagctgcgcaaagccaatgccgcacgctcccagttagaaacttacaagagacaggtggtcgaacttcagaaccgtttaagcgaggaatccaaaaaggcagataagctggattttgaatataagcgcctgaaggaaaaggtcgatagccttcagaaagagaaagacaggcttcgcactgagcgcgacagcctcaaggagaccatcgaagagctccgctgtgtccaggcccaggagggacagctgaccactcaggggctaatgccactgggctcacaagagtcttcagactcactggctgctgagatcgtcacacctgagattagagaaaagctcattcgactgcagcatgagaataagatgctcaaactgaaccaggagggcagtgacaacgaaaagatcgctttgctccaaagccttctcgacgatgctaacctgcgaaagaacgagctggagacggaaaaccgtctcgtaaaccagaggctgctggaggtgcagtcacaggtcgaggagttgcagaaatcgttacaggatcagggcagcaaggccgaggactccgtgctcctgaagaagaagctggaggagcatctggagaagctacatgaggccaacaacgagctgcagaagaagagagccatcatagaggatctggagcccaggttcaacaattcgtctctgaagatcgaagagttgcaggaggccctgcgcaagaaagaggaggaaatgaagcagatggaggaacgatacaagaaatacctcgagaaagcgaaaagtgtcatacgaacgctggaccctaagcaaaaccaaggtgctgcccctgaaattcaagccctcaaaaaccagctgcaggagcgcgatcgtttatttcattcactcgagaaggagtacgaaaagactaaatcacagcgggagatggaggagaaatatatcgtgagcgcttggtataatatgggcatgaccttgcataaaaaggcagccgaagatcgccttgcatcaaccggttcaggccagagctttcttgcgagacaacggcaggcgacgagttcaagacggtcctatcccggtcatgtccagccagcaacagcaagatag

SEQ ID NO: 223902 - DNA, 2157 bp, Artificial Sequence
  derived and/or modified sequence
atgttcagcgtggagagcctggagagagccgagctgtgcgagagcctgctgacctggatccagaccttcaacgtggacgccccctgccagaccgtggaggacctgaccaacggcgtggtgatggcccaggtgctgcagaagatcgaccccgcctacttcgacgagaactggctgaacagaatcaagaccgaggtgggcgacaactggagactgaagatcagcaacctgaagaagatcctgaagggcatcctggactacaaccacgagatcctgggccagcagatcaacgacttcaccctgcccgacgtgaacctgatcggcgagcacagcgacgccgccgagctgggcagaatgctgcagctgatcctgggctgcgccgtgaactgcgagcagaagcaggagtacatccaggccatcatgatgatggaggagagcgtgcagcacgtggtgatgaccgccatccaggagctgatgagcaaggagagccccgtgagcgccggcaacgacgcctacgtggacctggacagacagctgaagaagaccaccgaggagctgaacgaggccctgagcgccaaggaggagatcgcccagagatgccacgagctggacatgcaggtggccgccctgcaggaggagaagagcagcctgctggccgagaaccaggtgctgatggagagactgaaccagagcgacagcatcgaggaccccaacagccccgccggcagaagacacctgcagctgcagacccagctggagcagctgcaggaggagaccttcagactggaggccgccaaggacgactacagaatcagatgcgaggagctggagaaggagatcagcgagctgagacagcagaacgacgagctgaccaccctggccgacgaggcccagagcctgaaggacgagatcgacgtgctgagacacagcagcgacaaggtgagcaagctggagggccaggtggagagctacaagaagaagctggaggacctgggcgacctgagaagacaggtgaagctgctggaggagaagaacaccatgtacatgcagaacaccgtgagcctggaggaggagctgagaaaggccaacgccgccagaagccagctggagacctacaagagacaggtggtggagctgcagaacagactgagcgaggagagcaagaaggccgacaagctggacttcgagtacaagagactgaaggagaaggtggacagcctgcagaaggagaaggacagactgagaaccgagagagacagcctgaaggagaccatcgaggagctgagatgcgtgcaggcccaggagggccagctgaccacccagggcctgatgcccctgggcagccaggagagcagcgacagcctggccgccgagatcgtgacccccgagatcagagagaagctgatcagactgcagcacgagaacaagatgctgaagctgaaccaggagggcagcgacaacgagaagatcgccctgctgcagagcctgctggacgacgccaacctgagaaagaacgagctggagaccgagaacagactggtgaaccagagactgctggaggtgcagagccaggtggaggagctgcagaagagcctgcaggaccagggcagcaaggccgaggacagcgtgctgctgaagaagaagctggaggagcacctggagaagctgcacgaggccaacaacgagctgcagaagaagagagccatcatcgaggacctggagcccagattcaacaacagcagcctgaagatcgaggagctgcaggaggccctgagaaagaaggaggaggagatgaagcagatggaggagagatacaagaagtacctggagaaggccaagagcgtgatcagaaccctggaccccaagcagaaccagggcgccgcccccgagatccaggccctgaagaaccagctgcaggagagagacagactgttccacagcctggagaaggagtacgagaagaccaagagccagagagagatggaggagaagtacatcgtgagcgcctggtacaacatgggcatgaccctgcacaagaaggccgccgaggacagactggccagcaccggcagcggccagagcttcctggccagacagagacaggccaccagcagcagaagaagctaccccggccacgtgcagcccgccaccgccagatag

SEQ ID NO: 223903 - protein, 148 aa, Artificial Sequence
  derived and/or modified sequence
MAASPARPAVLALTGLALLLLLCWGPGGISGNKLKLMLQKREAPVPTKTKVAVDENKAKEFLGSLKRQKRQLWDRTRPEVQQWYQQFLYMGFDEAKFEDDITYWLNRDRNGHEYYGDYYQRHYDEDSAIGPRSPYGFRHGASVNYDDY

SEQ ID NO: 223904 - DNA, 447 bp, Artificial Sequence
  derived and/or modified sequence
atggccgcatcaccagcaagacctgccgtgctggccctgactggtttagcgttgctgttactgctgtgttggggcccaggcggtatctccggtaataagctgaagctgatgctccaaaagcgcgaggcacctgtgcctacaaagacgaaggtagctgtggatgaaaacaaagccaaggagtttcttggatccctgaaaagacagaaacggcagctctgggacagaaccagacctgaagtgcagcagtggtatcagcagtttctatacatgggcttcgacgaagccaaattcgaagacgatatcacatactggctgaaccgagatagaaatgggcacgaatattacggtgactactaccaacgccattatgacgaagactcagctattggtcctcggtctccttatggatttcggcacggggcctccgtcaattatgatgattattag

SEQ ID NO: 223905 - DNA, 447 bp, Artificial Sequence
  derived and/or modified sequence
atggccgccagccctgcccggcctgctgtgctggccctgaccggcctggccctgctgctgctgctgtgctggggccctgggggcatcagcggcaacaagctgaagctgatgctgcagaagcgggaggcccctgtgcccaccaagaccaaggtggccgtggatgagaacaaggccaaggagttcctgggcagcctgaagaggcagaagaggcagctgtgggacaggaccaggcctgaggtgcagcagtggtaccagcagttcctgtacatgggctttgatgaggccaagtttgaagatgacatcacctactggctgaacagagacagaaatggccacgagtactatggagactactaccagaggcactatgatgaagattctgccatcggccccaggagcccctacggcttcagacatggagcctctgtgaactatgatgactactag

SEQ ID NO: 223906 - DNA, 447 bp, Artificial Sequence
  derived and/or modified sequence
atggccgccagccccgcccggcccgccgtgctggccctgaccggcctcgcattgttgctccttctgtgttgggggccggggggcatttctggcaataaactcaaactcatgctccaaaagagagaagcccctgtaccaaccaagaccaaagtagccgtggatgaaaacaaagccaaggagtttttggggtcgctcaagagacagaaaaggcagttgtgggatcgcactaggcctgaagtgcagcagtggtatcagcagttcctgtacatgggcttcgatgaggccaaattcgaggacgacatcacctattggttgaaccgcgataggaatggccatgagtactatggcgattactatcaacggcattatgatgaggacagcgccattggcccgcgatctccttatggttttagacacggagcctctgtgaactacgatgattactag

SEQ ID NO: 223907 - DNA, 447 bp, Artificial Sequence
  derived and/or modified sequence
atggccgcttcccctgccaggccagccgtgctggcactgactggattggcactgctactcctgctctgctggggacctggcggaatatcaggaaataagctgaaattgatgttgcagaaaagggaagcaccagtgcctaccaagactaaggttgcagtagacgagaacaaggccaaggagttcctggggagcctgaaacggcaaaaacgtcagctgtgggatcgcactcgccctgaggtacagcagtggtatcagcaattcttgtacatgggctttgacgaggccaagttcgaggatgatataacgtattggctcaacagggataggaacggacacgagtattacggcgattactaccagcgccattacgacgaggacagcgcgatcggcccacgctcaccatatggctttcgccacggggcaagcgttaactatgacgactactag

SEQ ID NO: 223908 - DNA, 789 bp, Artificial Sequence
  derived and/or modified sequence
gggataacccgcggccgcgcctgcccgctcgcacccctctcccgcgcccggttctccctcgcagcacctcgaagtgcgcccctcgccctcctgctcgcgccccgccgccatggctgcctcccccgcgcggcctgctgtcctggccctgaccgggctggcgctgctcctgctcctgtgctggggcccaggtggcataagtggaaataaactcaagctgatgcttcaaaaacgagaagcacctgttccaactaagactaaagtggccgttgatgagaataaagccaaagaattccttggcagcctgaagcgccagaagcggcagctgtgggaccggactcggcccgaggtgcagcagtggtaccagcagtttctctacatgggctttgacgaagcgaaatttgaagatgacatcacctattggcttaacagagatcgaaatggacatgaatactatggcgattactaccaacgtcactatgatgaagactctgcaattggtccccggagcccctacggctttaggcatggagccagcgtcaactacgatgactactaaccatgacttgccacacgctgtacaagaagcaaatagcgattctcttcatgtatctcctaatgccttacactacttggtttctgatttgctctatttcagcagatcttttctacctactttgtgtgatcaaaaaagaagagttaaaacaacacatgtaaatgccttttgatatttcatgggaatgcctctcatttaaaaatagaaataaagcattttgttaaaaagaaaagtct

SEQ ID NO: 223909 - DNA, 447 bp, Artificial Sequence
  derived and/or modified sequence
atggccgccagccccgccagacccgccgtgctggccctgaccggcctggccctgctgctgctgctgtgctggggccccggcggcatcagcggcaacaagctgaagctgatgctgcagaagagagaggcccccgtgcccaccaagaccaaggtggccgtggacgagaacaaggccaaggagttcctgggcagcctgaagagacagaagagacagctgtgggacagaaccagacccgaggtgcagcagtggtaccagcagttcctgtacatgggcttcgacgaggccaagttcgaggacgacatcacctactggctgaacagagacagaaacggccacgagtactacggcgactactaccagagacactacgacgaggacagcgccatcggccccagaagcccctacggcttcagacacggcgccagcgtgaactacgacgactactag

SEQ ID NO: 223910 - protein, 73 aa, Artificial Sequence
  derived and/or modified sequence
MPGGGPEMDDYMETLKDEEDALWENVECNRHMLSRYINPAKLTPYLRQCKVIDEQDEDEVLNAPMLPSKINRA

SEQ ID NO: 223911 - protein, 1154 aa, Artificial Sequence [sequence omitted]

SEQ ID NO: 223912 - DNA, 3465 bp, Artificial Sequence
  derived and/or modified sequence
atgcctggaggggggcccgagatggatgattatatggagactttgaaagatgaggaagacgcgctttgggaaaatgtggaatgcaacagacatatgcttagccggtacatcaacccagcaaagctcaccccataccttcgccagtgtaaagtgatcgatgaacaggatgaagacgaggtgcttaatgcacctatgctcccatccaagattaatcgtgccggtaggcttctggacattctgcataccaagggtcagcgcggatacgtggtgtttctggaatccttagagttctactaccccgagctttataaactggttaccgggaaagagcctacccgccgatttagtactattgtggtagaagaaggccatgagggattgacacactttctcatgaacgaggttatcaaactgcaacagcagatgaaagctaaagatcttcaaaggtgtgagttgctcgcccgattaagacagctggaagacgaaaaaaaacaaatgactctgacccgcgtagaacttctaaccttccaggagaggtactacaaaatgaaggaagaacgcgattcttacaatgacgagctggtcaaggtaaaggacgacaactataatttggctatgcgctacgcccaactctcagaggagaaaaatatggccgtgatgcggtcccgcgatctccaactggaaatagaccagcttaagcacagactcaacaaaatggaagaggagtgtaaactggaacgaaatcagtccttgaagcttaaaaacgatatcgaaaacaggcccaagaaggaacaggttctagagttagaaagagaaaacgagatgttgaagacaaagaaccaggaactgcagtctatcattcaggccggaaaaaggtccctacctgattccgacaaagccattctcgatattttggaacatgaccgcaaagaggctctcgaggataggcaggagctggtgaataggatctataatctccaggaagaggcgcgccaggcagaagagctgcgagataaatacctcgaagagaaagaggatcttgaattaaagtgcagtacactcggcaaagattgcgaaatgtacaaacaccgaatgaacactgttatgctgcaactcgaagaggtggaaagggaacgcgatcaggctttccactccagggacgaggcacagacacagtactcgcagtgcttgatcgagaaagacaaatatcgcaagcagattagagaactggaagaaaagaacgatgagatgcgcatagaaatggttcgtcgcgaggcatgtatagtgaacttagagtccaaactgcggcgcctgagcaaggattcaaacaacctcgatcagtcactccccagaaacctgcccgtcacaattatctcacaagattttggggatgcttccccaaggactaacggacaggaggctgacgatagtagtacgtcagaagagtcaccagaggattccaagtacttcttaccctaccatcctccccagagaaggatgaatttaaagggcatccagctgcaaagggccaagagccctatcagtctgaagaggactagcgattttcaggcgaagggacacgaagaagagggtacagacgcttctccttcttcctgcggcagcttgcccattactaactcatttaccaagatgcagccacctcggagtagaagctctattatgtctatcacagccgagcccccgggaaacgactcaatagttcgccgttataaagaggacgccccacatcgaagcacagtcgaggaggataacgattctgggggatttgatgccctggacctggacgacgactcccatgagagatactcctttggcccgagctcaatccattcctcctcctcctctcatcagtccgaggggttggacgcctacgacctggagcaggtaaatctgatgttccgcaaattctctctggaaaggccttttcgccccagcgtaacttccgttgggcacgtccgcgggcccggcccatcagtgcagcatacaaccctgaatggcgactctctcacaagtcaactgacacttctgggaggcaacgcccggggcagcttcgtgcatagtgtgaagcctgggtccctagccgaaaaggccggcctccgggagggacaccagttgctcctgttagaaggttgtatacggggcgagaggcaatctgtgcctctggatacttgtaccaaagaagaggcacattggacaatccagcggtgctctggtcccgtgacactgcactacaaggtcaaccatgaaggttataggaaactagttaaggatatggaagatgggcttattacctccggggatagcttttatattcggcttaatctgaatattagtagccagcttgacgcctgtacaatgtccttgaagtgcgacgacgtggttcatgtgcgagacaccatgtaccaggacagacacgagtggttgtgcgcacgggtcgaccccttcactgatcacgatctggatatgggcaccatcccaagttattcaagggctcagcaattgttattggtaaaactgcagaggcttatgcaccgcggttctcgggaagaggtggatggcacccaccacactctgcgcgcgctgcggaacacactgcagcccgaggaggccctgagtacttccgatccccgcgtctcacctagactaagcagagcctccttcctgttcggacagcttctgcagtttgtttccagatcggagaacaagtacaagcggatgaacagtaacgaacgggtgaggattatctcagggtcacctctcggctcacttgctcgcagtagtctggatgcaaccaaactactaacagagaaacaagaagagcttgatcccgaatctgagctcggcaagaacctcagtctcattccttactctctggtaagagccttctattgcgagcgccgaaggccggtgctgttcacccccaccgtgttggctaaaactctcgtgcagagactgctgaattcaggcggggccatggaatttactatctgcaagtctgacattgtcactcgggacgagtttctgcggcggcagaaaacggaaacgattatttactcccgggagaaaaaccctaacgcctttgagtgtattgccccggctaatatcgaagccgtggcagcaaagaataagcattgccttctagaggccgggatcggatgtacgagagacctgataaaaagcaatatctaccccattgtcctattcatccgcgtatgcgaaaaaaatatcaaacggtttagaaagctgctacccagaccagagaccgaagaagaatttctacgcgtgtgcaggctgaaagagaaagagctcgaggcgctgccctgcctctatgccactgtcgaacccgatatgtggggaagtgtggaggagctgctgagggtcgtcaaggataagatcggagaggagcagcgcaaaacaatctgggttgacgaggatcagttatag

SEQ ID NO: 223913 - DNA, 3465 bp, Artificial Sequence
  derived and/or modified sequence
atgcctgggggcggccctgagatggatgactacatggagaccctgaaggatgaagaagatgccctgtgggagaatgtggagtgcaacagacacatgctgagccgctacatcaacccagccaagctgaccccctacctgcggcagtgcaaggtgattgatgagcaggatgaagatgaggtgctgaatgcccccatgctgcccagcaagatcaacagagctggccgcctgctggacatcctgcacaccaagggccagaggggctacgtggtgttcctggagagcctggagttctactacccagagctgtacaagctggtgacaggcaaggagcccacccggcgcttcagcaccatcgtggtggaggagggccacgagggcctgacccacttcctgatgaatgaagtcatcaagctgcagcagcagatgaaggccaaggacctgcagagatgtgagctgctggcccggctgcggcagctggaggatgagaagaagcagatgaccctgaccagggtggagctgctgaccttccaggagcgctactacaagatgaaggaggagcgggacagctacaatgatgagctggtgaaggtgaaggatgacaactacaacctggccatgagatatgcccagctgtctgaggagaagaacatggctgtgatgaggagccgggacctgcagctggagattgaccagctgaagcaccggctgaacaagatggaggaggagtgcaagctggagaggaaccagagcctgaagctgaagaatgacatcgagaaccggcccaagaaggagcaggtgctggagctggagcgggagaatgagatgctgaagaccaagaaccaggagctgcagagcatcatccaggccggcaagaggagcctgcctgacagcgacaaggccatcctggacatcctggagcatgacaggaaggaggccctggaggaccggcaggagctggtgaaccgcatctacaacctgcaggaggaggcccggcaggccgaggagctgcgggacaagtacctggaggagaaggaggacctggagctgaagtgcagcaccctgggcaaggactgtgagatgtacaagcacaggatgaacacagtgatgctgcagctggaggaggtggagcgggagcgggaccaggccttccacagcagagatgaggcccagacccagtacagccagtgcctgattgagaaggacaagtacaggaagcagatccgggagctggaggagaagaatgatgagatgagaattgagatggtgagaagagaggcctgcatcgtgaacctggagagcaagctgcggcggctgagcaaggacagcaacaacctggaccagagcctgcccaggaacctgcctgtgaccatcatcagccaggactttggagatgccagccccaggaccaacggccaggaggctgatgacagcagcaccagcgaggagagccctgaggacagcaagtacttcctgccctaccaccccccccagaggaggatgaacctgaagggcatccagctgcagagggccaagagccccatcagcctgaagaggaccagtgacttccaggccaagggccacgaggaggagggcacagatgccagccccagcagctgtggcagcctgcccatcaccaacagcttcaccaagatgcagcccccaagaagccgcagcagcatcatgagcatcacagctgagcccccaggaaatgacagcatcgtgcggcgctacaaggaggatgccccccacaggagcacagtggaggaggacaatgattctgggggctttgatgccctggacctggatgatgacagccatgagcgctacagctttggccccagcagcatccacagcagcagcagcagccaccagagcgagggcctggatgcctatgacctggagcaggtgaacctgatgttcaggaagttcagcctggagcggcccttccggcccagcgtgacctctgtgggccacgtgcggggccctggccccagcgtgcagcacaccaccctgaatggagacagcctgaccagccagctgaccctgctgggcggcaatgcccggggcagctttgtgcacagcgtgaagccaggcagcctggccgagaaggccggcctgcgggagggccaccagctgctgctgctggagggctgcatccggggggagcggcagagcgtgcccctggacacctgcaccaaggaggaggcccactggaccatccagcgctgcagcggccctgtgaccctgcactacaaggtgaaccacgagggctacaggaagctggtgaaggacatggaggatggcctcatcaccagcggggacagcttctacatccggctgaacctgaacatcagcagccagctggatgcctgcaccatgagcctgaagtgtgatgatgtggtgcacgtgcgggacaccatgtaccaggacagacatgagtggctgtgtgcccgggtggaccccttcacagaccatgacctggacatgggcaccatccccagctacagccgggcccagcagctgctgctggtgaagctgcagaggctgatgcaccggggcagccgggaggaggtggatggcacccaccacaccctgcgggccctgaggaacaccctgcagcctgaggaggccctgagcaccagtgacccccgggtgagcccccggctgagccgggccagcttcctgtttggccagctgctgcagtttgtgagccgctctgagaacaagtacaagaggatgaacagcaatgaaagagtgcgcatcatcagcggcagccccctgggcagcctggcccggagcagcctggatgccaccaagctgctgacagagaagcaggaggagctggaccctgagagcgagctgggcaagaacctgagcctcatcccctacagcctggtgcgggccttctactgtgaaagaagaagacctgtgctcttcacccccaccgtgctggccaagaccctggtgcagaggctgctgaacagcggcggggccatggagttcaccatctgcaagagtgacatcgtgaccagagatgagttcctgcggcggcagaagacagagaccatcatctacagccgggagaagaaccccaatgcctttgaatgtattgccccagccaacatcgaggccgtggccgccaagaacaagcactgcctgctggaggccggcatcggctgcacccgggacctgatcaagagcaacatctaccccatcgtgctcttcatccgggtgtgtgagaagaacatcaagcgcttcaggaagctgctgcccaggcctgagacagaggaggagttcctgcgggtgtgccgcctgaaggagaaggagctggaggccctgccctgcctgtatgccaccgtggagccagacatgtggggctctgtggaggagctgctgcgggtggtgaaggacaagattggagaggagcagaggaagaccatctgggtggatgaggaccagctgtag

SEQ ID NO: 223914 - DNA, 3465 bp, Artificial Sequence
  derived and/or modified sequence
atgcccggcggcggccccgagatggacgactacatggagaccctgaaggacgaggaagatgctctgtgggaaaatgtcgagtgcaatcggcacatgctaagtcgctacattaatcccgccaagttaactccttatctgcgacagtgcaaggttatagatgagcaggacgaagatgaggtgctgaatgctcctatgttgccatctaaaatcaaccgcgcagggagattactggacattttgcacaccaaggggcagcgcgggtatgtagtctttcttgagagcctggaattctactaccctgagttgtataagcttgtaacgggcaaggaacctacgaggcggttctcaacaatcgttgtagaagagggacacgagggactgacccatttccttatgaacgaggttataaaacttcagcagcagatgaaagctaaagacctccagcgatgcgaacttcttgcacggctgcgacagttggaggacgaaaagaaacagatgaccctcactcgggtggagctcctcaccttccaggaaaggtattacaaaatgaaagaggaacgggatagctacaatgacgagcttgtcaaggtcaaagacgacaattacaacttagctatgaggtatgcacagcttagtgaagagaaaaatatggcggtaatgcgaagccgggatctgcagctcgaaattgaccagctgaaacacagacttaataagatggaagaggagtgtaagctcgaacgaaaccaatccctgaagttgaagaatgatattgaaaatcgcccaaaaaaggagcaggtgctcgaactcgagcgcgaaaatgaaatgctgaagaccaagaatcaggaacttcaaagcataatacaggccgggaagcggtcactgcccgacagcgacaaggccatcctggatatcctagagcatgatcgcaaagaggccctggaggataggcaggagttagttaataggatctacaacttacaggaagaggcaaggcaggcagaggaactgagggataaatatttggaggaaaaagaggacttagagttgaagtgttctacactgggcaaagactgcgagatgtataagcacaggatgaatacagttatgctgcagctggaggaagtggaaagagagagggatcaggcatttcattcgcgggacgaggctcaaacacagtatagccagtgcctcattgagaaggacaaatataggaaacagatacgagaactcgaagaaaagaatgacgaaatgaggatagagatggtgcgtagagaggcttgcatagtcaacctggaaagtaagttacggaggctctccaaggattcaaataacctagatcagagcctgcctcggaacctaccagttaccattatctcccaagatttcggagatgccagtcctagaaccaacggacaggaggcagacgactcatccacctctgaggagtcacccgaggacagcaaatacttcctgccctaccacccacctcaacgacgaatgaacttaaaaggaattcagttgcagcgtgcaaaaagtcccatcagcctgaaacgcaccagtgacttccaggcgaagggacacgaagaagaaggaacagacgcttcaccctcaagctgcggtagcctccccattacaaatagtttcactaaaatgcaacctccgcgctctcgatctagcatcatgtccatcactgcagagccccccgggaatgattccatcgtcagaagatataaagaggacgccccccacaggtctaccgtagaagaggacaacgactcagggggctttgacgcgcttgatcttgatgatgatagccacgaaagatattcgtttggccccagttcgattcattcctctagttcaagtcaccagtccgaagggcttgatgcttatgatttggaacaagtgaatctgatgtttaggaagttctcccttgagaggccctttcggccgtcagtgacctcggtcgggcatgttagaggacccggcccaagtgtgcagcataccaccctgaatggggacagcctgacgtcccaactgacccttttgggggggaatgcacgcggttctttcgtgcactctgtcaagcctgggagtctcgcagaaaaggccggcctgcgggaggggcatcagctccttttacttgaggggtgcatccggggagagcgccaaagtgtgccgctggacacttgcaccaaagaagaggcccattggacaatacagaggtgttcagggccagtgactcttcactataaagtcaaccacgagggataccggaaactggtgaaggatatggaagacgggttgatcaccagcggcgattccttttacattcgcctcaacttaaacatctcctcacagctcgatgcctgtacaatgagccttaagtgcgacgatgtcgtacacgtccgcgatacaatgtatcaagacagacatgagtggctctgtgccagggtggatcccttcaccgaccatgacctggacatgggaacaatcccttcatacagccgggcgcaacagctgcttctggtgaagctccagcggttaatgcataggggttctcgggaggaggtagatggaacacatcatacccttagggcccttcggaatactttacagccagaggaggctctgtctacaagcgacccccgggtaagcccccgattgtccagggcctccttcctgttcggccagttgctccagttcgtttccagaagcgagaacaaatacaaacgcatgaactccaatgagcgggtccgtataatttcggggtcccctctgggatctctcgcacggtctagcctggacgctaccaaactgttgaccgaaaaacaggaagaattggaccccgagagtgagctgggtaagaacttgtctctcatcccatattcccttgttcgagcattttactgcgagaggagacgcccagtgctgttcacacctacagtgctcgctaagacgctggtacagcgtctgctgaactccgggggcgccatggaatttactatttgcaaaagtgacattgtcacgcgtgatgaattcctacggaggcaaaagacggagaccatcatttatagccgggaaaagaatccgaatgcctttgagtgtatcgctccagccaacattgaggccgtagctgcaaagaacaagcactgtctgctcgaagccggtattggctgtaccagagacttgattaaatctaacatctatccaattgtgctgttcatcagggtgtgcgaaaagaacatcaaaagattccgcaagttgctgcctaggccggagaccgaagaagagtttctccgcgtgtgcaggctgaaggagaaagagctcgaggcactcccatgtctgtacgccaccgtagagccagacatgtggggttccgttgaagagctcctgcgtgtagtgaaggataaaataggggaggaacaacgcaagacaatatgggtagatgaggaccagttgtag

SEQ ID NO: 223915 - DNA, 3465 bp, Artificial Sequence
  derived and/or modified sequence
atgccgggaggcggacccgaaatggatgattacatggagactttgaaggacgaggaggacgccctgtgggaaaatgtggaatgtaacagacatatgctgtcacgctacataaaccccgcaaagctgaccccatatctgagacagtgcaaagtgattgatgaacaggacgaggacgaagtcctcaacgcacctatgctaccctcaaagattaaccgcgcaggtaggctactggacatcctgcataccaaaggacaacggggatacgtcgtgtttctggagtctttggaattctactatccagagttgtataagctggtcacagggaaggaaccaacaagacggtttagcacaatcgtggtggaggaagggcacgagggacttacccatttcctgatgaatgaagtaatcaagcttcagcagcagatgaaggcgaaagatctacagaggtgcgaactgctagcacgtctccggcagctggaggatgagaagaagcagatgaccctcactagagtcgaactgcttacctttcaggaaaggtattataagatgaaggaggaaagagacagctacaacgatgagctcgtcaaggttaaagacgataattacaacttagctatgcgctacgcccagctttcagaggagaaaaacatggccgtgatgcgttccagagatttacagctggaaatcgaccagctgaaacaccgtctcaacaaaatggaggaggagtgcaagctcgagcgcaatcagagtctaaaactgaaaaatgatatcgaaaaccgccctaaaaaggagcaagtcttggagctcgaacgcgaaaatgagatgctgaagaccaaaaatcaagagctgcaaagcattatccaggccggaaagagaagcctgcccgacagcgataaagccattctggacatcctcgaacacgaccgcaaagaagccctggaggacaggcaggagctcgtgaatagaatctataatcttcaggaagaagcacggcaggccgaggaactgagggacaagtacctggaggagaaggaagacctcgagctaaaatgtagcactctcgggaaagattgtgagatgtataagcatagaatgaacaccgtcatgctgcaactcgaggaagtggagcgggaacgggatcaggcctttcattcacgagatgaggcgcagacacagtattcccagtgtctgattgagaaggacaagtaccgaaaacagatccgcgaacttgaggaaaaaaacgacgagatgcgcatcgaaatggtgcggagggaagcatgcattgtgaatcttgaaagcaaactgagaaggctctccaaggactctaacaaccttgaccagagcttacctcgcaacctgcctgtgaccatcatctcgcaggattttggcgacgcttctccccgaactaacgggcaggaagcagacgacagctctacctcagaggagagcccagaggattcaaagtacttcctgccataccatccacctcaacgaagaatgaatctgaaaggtatccagctacaacgtgcaaaaagtcccattagcctcaaaaggacgtctgacttccaggctaagggccacgaggaagaggggacggatgcctcgccatccagctgcggttctctgcctataacaaattccttcaccaaaatgcagccaccccgatctagaagttctattatgtccatcaccgctgaaccacccggaaatgactccattgtccgcagatacaaagaagatgcccctcaccgtagtaccgttgaagaggacaacgacagcggtggattcgacgcactggatctggacgacgacagtcacgagcgttattccttcggccctagttctatccattcttcaagcagttctcatcagtcagaaggcctcgatgcatacgacctggagcaggtcaatctgatgttcagaaaattcagtctcgagcgcccttttcgaccttcggttacatccgtggggcatgtaaggggcccagggccatccgttcagcataccacactcaacggagattcactcaccagccagctcacgttgctgggcggaaatgctcgcggatctttcgtgcactccgtgaaacctggcagcctagccgaaaaagccggtctcagggaaggccaccaacttctgctgctggagggctgcatccgaggcgaacgtcagtccgttccccttgatacctgtacaaaggaggaagcccattggacaatccagcgctgcagtggccctgtgacacttcactataaagttaatcatgaagggtaccgaaaattagtgaaggacatggaggatggactgattacctccggagactctttctacatccgactgaacctcaatatcagcagccagctggatgcctgcactatgtccctgaaatgcgacgatgtggtacatgtccgggacacgatgtatcaagatagacatgagtggctgtgtgctagagtcgaccctttcacagaccatgacctggacatgggaaccatccccagttactcacgagcacaacagctgttactcgtgaaactccagagactgatgcacagggggagccgcgaggaagtggatggtactcaccataccctacgggcactcagaaacaccctgcaaccagaagaagctctgagtacatccgatcctcgggtgtctccaaggctgagccgtgcctcatttttattcggacagttgctccagttcgtctctaggtctgaaaataagtacaaacggatgaactcaaatgagagagttaggatcattagtggcagccctctcgggagcctcgccaggtcttctttagatgccactaagctgcttaccgagaagcaggaggagctggatccagagtctgaactgggcaagaacctgagtctcattccgtacagtcttgttagagcattctattgcgaacggagaagacctgttctgttcacccccacagtgctcgctaagactttggtccagcgccttttgaactcaggcggtgccatggaattcaccatttgcaaaagcgatatcgttacccgcgacgaatttctgcgaaggcaaaagacagagacaatcatatacagtcgggagaaaaacccgaacgcctttgaatgcatagcaccggctaatatagaggccgtcgccgctaaaaacaagcattgcttactagaggctggcataggctgtacacgggatctaattaagtcaaatatataccccatagtcctgtttatccgggtttgtgagaaaaatattaaacgcttccggaagttgttgcccagaccagaaacagaggaggaatttttgagagtgtgtaggctgaaggaaaaagagctcgaagccctcccatgcttgtatgccacagtggaacccgacatgtggggctctgtcgaagagttacttagagttgtgaaggataaaattggagaggagcagcgcaagacgatttgggtggatgaggaccagttgtag

SEQ ID NO: 223916 - DNA, 4366 bp, Artificial Sequence
  derived and/or modified sequence
agtctcatttcctgtcgggttttgcatttccctcccccgcccctcccagcctatgacatactttctctccttttttctctcctgcctcctctggccttcggactcctgcccgcgccgcccgcagccccctcccggccctgcagcccctgggcgggcggcgcccctcggaggacggctccgggcccggggggacggagggcctggtcgcctggaggaagccggaggcctgcgtggaggaggcgccccgcgcagctggctggcggagcatgagcgccccagatcccaagcactgcaagtccagatgcaacgggagcctggctcaagggacgacaagatccagccggaaagtgtagaagtcacaccccaatggcgggatagcagcccctgtgtgtgagcacccctccatgccaggaggagggccagagatggatgactacatggagacgctgaaggatgaagaggacgccttgtgggagaatgtggagtgtaaccggcacatgctcagccgctatatcaaccctgccaagctcacgccctacctgcgtcagtgtaaggtcattgatgagcaggatgaagatgaagtgcttaatgcccctatgctgccatccaagatcaaccgagcaggccggctgttggacattctacataccaaggggcaaaggggctatgtggtcttcttggagagcctagaattttattacccagaactgtacaaactggtgactgggaaagagcccactcggagattctccaccattgtggtggaggaaggccacgagggcctcacgcacttcctgatgaacgaggtcatcaagctgcagcagcagatgaaggccaaggacctgcaacgctgcgagctgctggccaggttgcggcagctggaggatgagaagaagcagatgacgctgacgcgcgtggagctgctaaccttccaggagcggtactacaagatgaaggaagagcgggacagctacaatgacgagctggtcaaggtgaaggacgacaactacaacttagccatgcgctacgcacagctcagtgaggagaagaacatggcggtcatgaggagccgagacctccaactcgagatcgatcagctaaagcaccggttgaataagatggaggaggaatgtaagctggagagaaatcagtctctaaaactgaagaatgacattgaaaatcggcccaagaaggagcaggttctggaactggagcgggagaatgaaatgctgaagaccaaaaaccaggagctgcagtccatcatccaggccgggaagcgcagcctgccagactcagacaaggccatcctggacatcttggaacacgaccgcaaggaggccctggaggacaggcaggagctggtcaacaggatctacaacctgcaggaggaggcccgccaggcagaggagctgcgagacaagtacctggaggagaaggaggacctggagctcaagtgctcgaccctgggaaaggactgtgaaatgtacaagcaccgcatgaacacggtcatgctgcagctggaggaggtggagcgggagcgggaccaggccttccactcccgagatgaagctcagacacagtactcgcagtgcttaatcgaaaaggacaagtacaggaagcagatccgcgagctggaggagaagaacgacgagatgaggatcgagatggtgcggcgggaggcctgcatcgtcaacctggagagcaagctgcggcgcctctccaaggacagcaacaacctggaccagagtctgcccaggaacctgccagtaaccatcatctctcaggactttggggatgccagccccaggaccaatggtcaagaagctgacgattcttccacctcggaggagtcacctgaagacagcaagtacttcctgccctaccatccgccccagcgcaggatgaacctgaagggcatccagctgcagagagccaaatcccccatcagcctgaagcgaacatcagattttcaagccaaggggcacgaggaagaaggcacggacgccagccctagctcctgcggatctctgcccatcaccaactccttcaccaagatgcagcccccccggagccgcagcagcatcatgtcaatcaccgccgagcccccgggaaacgactccatcgtcagacgctacaaggaggacgcgccccatcgcagcacagtcgaagaagacaatgacagcggcgggtttgacgccttagatctggatgatgacagtcacgaacgctactccttcggaccctcctccatccactcctcctcctcctcccaccaatccgagggcctggatgcctacgacctggagcaggtcaacctcatgttcaggaagttctctctggaaagacccttccggccttcggtcacctctgtggggcacgtgcggggcccagggccctcggtgcagcacacgacgctgaatggcgacagcctcacctcccagctcaccctgctggggggcaacgcgcgagggagcttcgtgcactcggtcaagcctggctctctggccgagaaagccggcctccgtgagggccaccagctgctgctgctagaaggctgcatccgaggcgagaggcagagtgtcccgttggacacatgcaccaaagaggaagcccactggaccatccagaggtgcagcggccccgtcacgctgcactacaaggtcaaccacgaagggtaccggaagctggtgaaggacatggaggacggcctgatcacatcgggggactcgttctacatccggctgaacctgaacatctccagccagctggacgcctgcaccatgtccctgaagtgtgacgatgttgtgcacgtccgtgacaccatgtaccaggacaggcacgagtggctgtgcgcgcgggtcgaccctttcacagaccatgacctggatatgggcaccatacccagctacagccgagcccagcagctcctcctggtgaaactgcagcgcctgatgcaccgaggcagccgggaggaggtagacggcacccaccacaccctgcgggcactccggaacaccctgcagccagaagaagcgctttcaacaagcgacccccgggtcagcccccgtctctcgcgagcaagcttcctttttggccagctccttcagttcgtcagcaggtccgagaacaagtataagcggatgaacagcaacgagcgggtccgcatcatctcggggagtccgctagggagcctggcccggtcctcgctggacgccaccaagctcttgactgagaagcaggaagagctggaccctgagagcgagctgggcaagaacctcagcctcatcccctacagcctggtacgcgccttctactgcgagcgccgccggcccgtgctcttcacacccaccgtgctggccaagacgctggtgcagaggctgctcaactcgggaggtgccatggagttcaccatctgcaagtcagatatcgtcacaagagatgagttcctcagaaggcagaagacggagaccatcatctactcccgagagaagaaccccaacgcgttcgaatgcatcgcccctgccaacattgaagctgtggccgccaagaacaagcactgcctgctggaggctgggatcggctgcacaagagacttgatcaagtccaacatctaccccatcgtgctcttcatccgggtgtgtgagaagaacatcaagaggttcagaaagctgctgccccgacctgagacggaggaggagttcctgcgcgtgtgccggctgaaggagaaggagctggaggccctgccgtgcctgtacgccacggtggaacctgacatgtggggcagcgtagaggagctgctccgcgttgtcaaggacaagatcggcgaggagcagcgcaagaccatctgggtggacgaggaccagctgtgaggcgggcgccctgggcagagagactctgtggcgcggggcatcctatgaggcaggcaccctgggcagagagatgcagtgggtgcggggggatcctgtggcccacagagctgccccagcagacgctccgccccacccggtgatggagccccggggggacagtcgtgcctggggaggagcagggtacagcccattcccccagccctggctgacctggcctagcagtttggccctgctggccttagcagggagacaggggagcaaagaacgccaagccggaggcccgaggccagccggcctctcgagagccagagcagcagttgaatgtaatgctggggacaggcatgctgccgccagtagggcggggacccggacagccaggtgactaccagtcctggggacacactcaccataaacacatccccaggcaggacagatcggggaaggggtgtgtaccaggctatgatttctcttgcattaaaatgtattattatttcttt

SEQ ID NO: 223917 - DNA, 3465 bp, Artificial Sequence
  derived and/or modified sequence
atgcccggcggcggccccgagatggacgactacatggagaccctgaaggacgaggaggacgccctgtgggagaacgtggagtgcaacagacacatgctgagcagatacatcaaccccgccaagctgaccccctacctgagacagtgcaaggtgatcgacgagcaggacgaggacgaggtgctgaacgcccccatgctgcccagcaagatcaacagagccggcagactgctggacatcctgcacaccaagggccagagaggctacgtggtgttcctggagagcctggagttctactaccccgagctgtacaagctggtgaccggcaaggagcccaccagaagattcagcaccatcgtggtggaggagggccacgagggcctgacccacttcctgatgaacgaggtgatcaagctgcagcagcagatgaaggccaaggacctgcagagatgcgagctgctggccagactgagacagctggaggacgagaagaagcagatgaccctgaccagagtggagctgctgaccttccaggagagatactacaagatgaaggaggagagagacagctacaacgacgagctggtgaaggtgaaggacgacaactacaacctggccatgagatacgcccagctgagcgaggagaagaacatggccgtgatgagaagcagagacctgcagctggagatcgaccagctgaagcacagactgaacaagatggaggaggagtgcaagctggagagaaaccagagcctgaagctgaagaacgacatcgagaacagacccaagaaggagcaggtgctggagctggagagagagaacgagatgctgaagaccaagaaccaggagctgcagagcatcatccaggccggcaagagaagcctgcccgacagcgacaaggccatcctggacatcctggagcacgacagaaaggaggccctggaggacagacaggagctggtgaacagaatctacaacctgcaggaggaggccagacaggccgaggagctgagagacaagtacctggaggagaaggaggacctggagctgaagtgcagcaccctgggcaaggactgcgagatgtacaagcacagaatgaacaccgtgatgctgcagctggaggaggtggagagagagagagaccaggccttccacagcagagacgaggcccagacccagtacagccagtgcctgatcgagaaggacaagtacagaaagcagatcagagagctggaggagaagaacgacgagatgagaatcgagatggtgagaagagaggcctgcatcgtgaacctggagagcaagctgagaagactgagcaaggacagcaacaacctggaccagagcctgcccagaaacctgcccgtgaccatcatcagccaggacttcggcgacgccagccccagaaccaacggccaggaggccgacgacagcagcaccagcgaggagagccccgaggacagcaagtacttcctgccctaccaccccccccagagaagaatgaacctgaagggcatccagctgcagagagccaagagccccatcagcctgaagagaaccagcgacttccaggccaagggccacgaggaggagggcaccgacgccagccccagcagctgcggcagcctgcccatcaccaacagcttcaccaagatgcagccccccagaagcagaagcagcatcatgagcatcaccgccgagccccccggcaacgacagcatcgtgagaagatacaaggaggacgccccccacagaagcaccgtggaggaggacaacgacagcggcggcttcgacgccctggacctggacgacgacagccacgagagatacagcttcggccccagcagcatccacagcagcagcagcagccaccagagcgagggcctggacgcctacgacctggagcaggtgaacctgatgttcagaaagttcagcctggagagacccttcagacccagcgtgaccagcgtgggccacgtgagaggccccggccccagcgtgcagcacaccaccctgaacggcgacagcctgaccagccagctgaccctgctgggcggcaacgccagaggcagcttcgtgcacagcgtgaagcccggcagcctggccgagaaggccggcctgagagagggccaccagctgctgctgctggagggctgcatcagaggcgagagacagagcgtgcccctggacacctgcaccaaggaggaggcccactggaccatccagagatgcagcggccccgtgaccctgcactacaaggtgaaccacgagggctacagaaagctggtgaaggacatggaggacggcctgatcaccagcggcgacagcttctacatcagactgaacctgaacatcagcagccagctggacgcctgcaccatgagcctgaagtgcgacgacgtggtgcacgtgagagacaccatgtaccaggacagacacgagtggctgtgcgccagagtggaccccttcaccgaccacgacctggacatgggcaccatccccagctacagcagagcccagcagctgctgctggtgaagctgcagagactgatgcacagaggcagcagagaggaggtggacggcacccaccacaccctgagagccctgagaaacaccctgcagcccgaggaggccctgagcaccagcgaccccagagtgagccccagactgagcagagccagcttcctgttcggccagctgctgcagttcgtgagcagaagcgagaacaagtacaagagaatgaacagcaacgagagagtgagaatcatcagcggcagccccctgggcagcctggccagaagcagcctggacgccaccaagctgctgaccgagaagcaggaggagctggaccccgagagcgagctgggcaagaacctgagcctgatcccctacagcctggtgagagccttctactgcgagagaagaagacccgtgctgttcacccccaccgtgctggccaagaccctggtgcagagactgctgaacagcggcggcgccatggagttcaccatctgcaagagcgacatcgtgaccagagacgagttcctgagaagacagaagaccgagaccatcatctacagcagagagaagaaccccaacgccttcgagtgcatcgcccccgccaacatcgaggccgtggccgccaagaacaagcactgcctgctggaggccggcatcggctgcaccagagacctgatcaagagcaacatctaccccatcgtgctgttcatcagagtgtgcgagaagaacatcaagagattcagaaagctgctgcccagacccgagaccgaggaggagttcctgagagtgtgcagactgaaggagaaggagctggaggccctgccctgcctgtacgccaccgtggagcccgacatgtggggcagcgtggaggagctgctgagagtggtgaaggacaagatcggcgaggagcagagaaagaccatctgggtggacgaggaccagctgtag

SEQ ID NO: 223918 - protein, 97 aa, Artificial Sequence
  derived and/or modified sequence
MDKQSSAGGVKRSVPCDSNEANEMMPETSSGYSDPQPAPKKLKTSESSTILVVRYRRNFKRTSPEELVNDHARKNRINPLQMEEEEFMEIMVEIPAK

SEQ ID NO: 223919 - DNA, 294 bp, Artificial Sequence
  derived and/or modified sequence
atggacaagcagagcagcgccggcggcgtgaagagaagcgtgccctgcgacagcaacgaggccaacgagatgatgcccgagaccagcagcggctacagcgacccccagcccgcccccaagaagctgaagaccagcgagagcagcaccatcctggtggtgagatacagaagaaacttcaagagaaccagccccgaggagctggtgaacgaccacgccagaaagaacagaatcaaccccctgcagatggaggaggaggagttcatggagatcatggtggagatccccgccaagtag

SEQ ID NO: 223920 - DNA, 294 bp, Artificial Sequence
  derived and/or modified sequence
atggacaagcagagctccgctggcggagtgaagcggtctgtaccgtgtgactcgaatgaggctaacgaaatgatgccagaaactagcagcggatattcagatccccagcctgcacctaagaagctgaagacatcagagtctagtacaatcctggtggtgaggtataggcgcaactttaaacggacaagccctgaagagttagtcaacgatcacgcccgaaagaatagaattaatccattacagatggaagaggaggaatttatggagattatggtggaaatccccgcaaagtag

SEQ ID NO: 223921 - DNA, 294 bp, Artificial Sequence
  derived and/or modified sequence
atggacaagcagagcagcgctggaggagtgaagaggtctgtgccctgtgacagcaatgaggccaatgagatgatgcctgagaccagcagcggctacagcgacccccagcctgcccccaagaagctgaagaccagcgagagcagcaccatcctggtggtgcgctacagaagaaacttcaagaggaccagccctgaggagctggtgaatgaccacgccaggaagaaccgcatcaaccccctgcagatggaggaggaggagttcatggagatcatggtggagatcccagccaagtag

SEQ ID NO: 223922 - DNA, 294 bp, Artificial Sequence
  derived and/or modified sequence
atggacaagcagagcagcgccggcggcgtgaagcggagcgtgccctgcgacagtaacgaggccaatgagatgatgccagagaccagcagcggctacagtgatccccagccggcccctaaaaaacttaagacatctgagtcgagtacaatcctggttgtgcgataccgtagaaacttcaagcggacctcgcctgaagaactggtaaatgatcatgcgagaaagaatcgtattaaccccctacagatggaggaggaagaatttatggagattatggtggagatccccgccaagtag

SEQ ID NO: 223923 - DNA, 294 bp, Artificial Sequence
  derived and/or modified sequence
atggacaagcaatcttccgccggtggggtcaagcgttcagtcccatgcgatagcaacgaagccaacgaaatgatgccagaaacaagctccggttactctgaccctcagcctgctccaaagaaattaaaaacatccgaatcctccaccatactagtcgttcgctacagacggaacttcaaaagaacatcgcccgaggagctggtcaatgaccatgcccgtaagaatcggattaatccacttcagatggaagaagaggaattcatggaaataatggtcgagatccctgccaaatag

SEQ ID NO: 223924 - DNA, 682 bp, Artificial Sequence
  derived and/or modified sequence
attaaacatggagaaatgaggagcggcggcagatcggtttgggatgcatcttcaggggatgctgaaacaacagcagcatttggtttgctctacacccctgccacccctcgcccgcaagcccagggagtggtcagcagtggggctttgtgacgtcgaagccaccctagggctgccattggctgggacactgcctgtatgatcaaacaaagctcaagggtgtggctttgccttgtcaccaggagggtatacatagggagggcaagagctccgggccactgagaagattcaaaacctacaaaagcctgccgctgacattgaagaaccaatatatacaatggacaaacaatccagtgccggcggggtgaagaggagcgtcccctgtgattccaacgaggccaacgagatgatgccggagacctcgagtgggtactcagacccgcaacctgctccgaaaaaactaaaaacatctgagtcctcgaccatactagtggttcgctacaggaggaactttaaaagaacatctccagaggaactggtgaatgaccacgcccgaaagaacagaatcaaccccctccaaatggaggaggaggaattcatggaaataatggttgaaatacctgcaaagtagcaagaagctacatctctcaaccttgggcaatgacaataaagtttgagaagctga

SEQ ID NO: 223925 - DNA, 294 bp, Artificial Sequence
  derived and/or modified sequence
atggacaagcagagtagtgcaggtggcgtaaagcgcagtgtcccttgtgactccaacgaagctaacgagatgatgcctgaaacaagttccggatactcagaccctcagcccgccccgaagaaattaaagacctcagagtcctcgacaatcctggtggtaaggtatcgaaggaattttaagcggacctctccagaagaattggtcaacgatcatgctcggaagaacagaattaaccccctgcagatggaggaagaggaattcatggagattatggttgaaatacccgcaaagtag

SEQ ID NO: 223926 - DNA, 294 bp, Artificial Sequence
  derived and/or modified sequence
atggacaagcagagcagcgccggcggcgtgaagcggagcgtgccctgtgactccaacgaagcaaatgaaatgatgcctgaaacatcctccggctacagcgacccccagccggcccccaaaaaactcaagacatctgagagctctaccattttggtcgtccgttacaggagaaactttaagaggacaagtcctgaagaacttgtaaacgaccacgcccggaagaaccggatcaaccctcttcaaatggaggaggaagagttcatggagatcatggtagagattcccgcaaaatag

SEQ ID NO: 223927 - DNA, 294 bp, Artificial Sequence
  derived and/or modified sequence
atggataagcaatccagcgccggtggggtaaagagatcagtaccatgcgacagcaatgaagcaaacgagatgatgcctgaaacttccagcggatactccgacccccagcctgccccaaagaagctcaagaccagcgagagcagcactatcctagtagtcagatatcggaggaacttcaagaggactagccccgaagaattggttaacgaccatgcacgcaaaaacagaattaaccctctacagatggaggaagaggaatttatggagatcatggttgagatccccgctaagtag

SEQ ID NO: 223928 - DNA, 682 bp, Artificial Sequence
  derived and/or modified sequence
attaaacatggagaaatgaggagcggcggcagatcggtttgggatgcatcttcaggggatgctgaaacaacagcagcatttggtttgctctacacccctgtcacccctcgcccgcaagcccagggagtggtcagcagtggggctttgtgacgtcgaagccaccctagggctgccattggctgggacactgcctgtatgatcaaacaaagctcaagggtgtggctttgccttgtcaccaggagggtatacatagggagggcaagagctccgggccactgagaagattcaaaacctacaaaagcctgccgctgacattgaagaaccaatatatacaatggacaaacaatccagtgccggcggggtgaagaggagcgtcccctgtgattccaacgaggccaacgagatgatgccggagacctcgagtgggtactcagacccgcaacctgctccgaaaaaactaaaaacatctgagtcctcgaccatactagtggttcgctacaggaggaactttaaaagaacatctccagaggaactggtgaatgaccacgcccgaaagaacagaatcaaccccctccaaatggaggaggaggaattcatggaaataatggttgaaatacctgcaaagtagcaagaagctacatctctcaaccttgggcaatgacaataaagtttgagaagctga

SEQ ID NO: 223929 - protein, 1237 aa, Artificial Sequence
  derived and/or modified sequence
MDSGAGGRRCPEAALLILGPPRMEHLRHSPGPGGQRLLLPSMLLALLLLLAPSPGHATRVVYKVPEEQPPNTLIGSLAADYGFPDVGHLYKLEVGAPYLRVDGKTGDIFTTETSIDREGLRECQNQLPGDPCILEFEVSITDLVQNGSPRLLEGQIEVQDINDNTPNFASPVITLAIPENTNIGSLFPIPLASDRDAGPNGVASYELQAGPEAQELFGLQVAEDQEEKQPQLIVMGNLDRERWDSYDLTIKVQDGGSPPRASSALLRVTVLDTNDNAPKFERPSYEAELSENSPIGHSVIQVKANDSDQGANAEIEYTFHQAPEVVRRLLRLDRNTGLITVQGPVDREDLSTLRFSVLAKDRGTNPKSARAQVVVTVKDMNDNAPTIEIRGIGLVTHQDGMANISEDVAEETAVALVQVSDRDEGENAAVTCVVAGDVPFQLRQASETGSDSKKKYFLQTTTPLDYEKVKDYTIEIVAVDSGNPPLSSTNSLKVQVVDVNDNAPVFTQSVTEVAFPENNKPGEVIAEITASDADSGSNAELVYSLEPEPAAKGLFTISPETGEIQVKTSLDREQRESYELKVVAADRGSPSLQGTATVLVNVLDCNDNDPKFMLSGYNFSVMENMPALSPVGMVTVIDGDKGENAQVQLSVEQDNGDFVIQNGTGTILSSLSFDREQQSTYTFQLKAVDGGVPPRSAYVGVTINVLDENDNAPYITAPSNTSHKLLTPQTRLGETVSQVAAEDFDSGVNAELIYSIAGGNPYGLFQIGSHSGAITLEKEIERRHHGLHRLVVKVSDRGKPPRYGTALVHLYVNETLANRTLLETLLGHSLDTPLDIDIAGDPEYERSKQRGNILFGVVAGVVAVALLIALAVLVRYCRQREAKSGYQAGKKETKDLYAPKPSGKASKGNKSKGKKSKSPKPVKPVEDEDEAGLQKSLKFNLMSDAPGDSPRIHLPLNYPPGSPDLGRHYRSNSPLPSIQLQPQSPSASKKHQVVQDLPPANTFVGTGDTTSTGSEQYSDYSYRTNPPKYPSKQLPHRRVTFSATSQAQELQDPSQHSYYDSGLEESETPSSKSSSGPRLGPLALPEDHYERTTPDGSIGEMEHPENDLRPLPDVAMTGTCTRECSEFGHSDTCWMPGQSSPSRRTKSSALKLSTFVPYQDRGGQEPAGAGSPSPPEDRNTKTAPVRLLPSYSAFSHSSHDSCKDSATLEEIPLTQTSDFPPAATPASAQTAKREIYL

SEQ ID NO: 223930 - DNA, 3714 bp, Artificial Sequence
  derived and/or modified sequence
atggactctggagccgggggacgcagatgtcccgaagcggctctgctgattctgggcccaccgaggatggaacatttgaggcacagtcctggccctggcggccagagattgctgctgccctccatgctgctcgctctcctgctcctgctggccccctctcccggccatgctacaagggtcgtttacaaggtgcccgaagagcagccccccaatactctgataggcagtttagccgctgattacggctttcccgacgtgggacacctgtacaaactggaggtcggcgccccctacctacgcgttgacggcaaaaccggggatatttttacgactgagacttctatcgaccgggaagggctgcgggaatgccaaaaccaactgcccggtgacccatgcatcctggagttcgaggttagcatcactgatcttgttcaaaatggaagcccaagactgctagaaggccaaatagaagtacaggacatcaatgataacacaccaaacttcgctagtcccgtcatcaccctggctataccagaaaatactaacattggaagcctttttcccatccctctcgcatcagaccgagatgccggacccaacggtgttgcctcttacgagctgcaggcaggaccagaggcacaagagttatttggcctgcaggtggcagaagatcaggaagaaaaacagccccagttgatagtcatgggtaatctggaccgagaaaggtgggactcctatgatctgacaatcaaagttcaggacgggggatcaccccctagggcctccagtgcgctgctgcgtgtaacggtgctggatacaaacgataatgccccaaaattcgagagacccagctacgaggcagagctcagtgagaactcgccaattgggcattcggtgatccaggtgaaagccaacgattccgatcaaggcgcaaacgcggagattgagtacaccttccaccaggcccccgaggtcgttcgaagattactccggcttgatcgcaatacgggattgatcacagtccaaggacccgtcgaccgcgaagatctatctactttacgcttctcagttctggccaaagaccgtggcaccaaccccaagagtgcacgtgcacaggtcgtcgttacagtgaaggatatgaatgataacgcacccactatcgaaatccgcgggattggcctcgtgacacaccaagatggaatggccaacattagcgaggacgtggccgaagaaaccgcagtggccctggtccaagtgtccgatagggacgaaggtgaaaatgcagccgtgacatgcgtcgtggcaggtgacgtgccatttcagctgcgccaggcctcggagacaggcagcgatagtaagaagaagtatttcctccagactacaaccccattagattatgagaaagtgaaggactacacaattgagatagtcgccgttgactccggcaaccctccgctctccagtacaaatagtcttaaggtgcaggtcgtggacgtaaatgacaacgcacccgtgttcactcagtctgtgaccgaggtcgcattccccgagaacaacaagccaggggaggtgatcgctgagatcaccgcctccgatgctgactcaggctctaacgccgagcttgtctactcactcgaaccagagcccgcagcaaaggggctattcactatctcgcctgagaccggagagatacaggtgaaaacgagcctggaccgggaacaaagggagtcatacgagctgaaggttgtcgcggcagaccggggtagccctagcctacaaggcaccgccacagtgctagtgaatgtgctggactgtaatgacaacgacccaaaattcatgctgagtgggtataacttttcagttatggaaaatatgcctgccctctcaccagtgggaatggtcaccgtgattgatggggacaagggtgagaatgcacaggtacaactgtcggtagaacaggacaacggcgatttcgttattcagaatggcacgggcaccattctgtctagcttgagttttgacagggaacagcagagcacttatacctttcagctcaaggccgtagacggtggggttcccccgaggtccgcatacgtaggtgtgacaataaacgtgttagacgagaatgataacgccccttacattaccgcacccagcaacacttcccataaattactcacccctcaaacccgccttggagagacagtgtcccaagttgctgctgaggacttcgactcaggcgtcaatgccgagctcatctacagtatcgcgggagggaacccttatgggttgtttcagatcggctctcacagtggcgcaatcactttagagaaggaaatcgagaggagacaccatgggctgcacaggttggtggtcaaggtttcagatcgtggtaagccaccccgatacggcacagcgctggtgcacctatacgtgaatgaaacacttgcgaatcgaaccctgttggagacgttgctgggccactcattagacacccccctggatattgacatcgcaggcgaccctgaatacgaaagaagtaaacagcgggggaatatcctgtttggagtcgtggccggcgttgtggccgtggctctgttgattgccctggccgtgttagtgaggtactgcagacaaagggaggctaaatccggctaccaagcgggcaaaaaggaaactaaggacttatatgcgcccaaacctagcggaaaagccagcaagggcaataaatcaaaggggaagaaaagtaagagcccaaagcccgtgaagccagtggaggacgaggacgaggcaggcctgcagaagagtcttaagttcaaccttatgtcagacgcccctggtgattccccccgaatccacctgccactgaattatcctccaggttccccagacctcggcagacattatcgtagcaattctccgttgccctcaattcagctgcagccccagagtccgtcagcctccaagaaacaccaggtggtgcaggatctccccccagccaataccttcgtggggaccggcgacaccacatccacaggctccgagcagtattctgactacagctacagaacaaaccccccaaaatatccatctaaacaactgccgcaccgacgagttacgttttcagccacatcccaagcccaggaactgcaggatcccagccagcacagttattacgatagcggactggaagaatcagaaactccctccagcaaatcttcgtccgggcccagactgggcccgctggcactgccagaagaccactatgagcgcactaccccagacgggagcataggtgaaatggagcacccagaaaacgatctcagacctttgccggatgttgccatgaccggcacctgtaccagggagtgcagtgagtttgggcactccgacacctgctggatgccagggcagtcatcaccttcccgtcgcaccaagtcctcagccctaaagttgtcaacattcgtgccctaccaagacagaggcggccaggaacccgctggagcgggatctccttcaccaccagaagaccggaatacaaagacggctcccgttcgcttgctgccttcttattcagcattttcccatagcagccatgatagctgcaaagacagtgccactctggaggagataccgcttacgcaaacaagcgactttccccctgctgccactccggcaagcgcacagactgccaaaagagaaatttacttatag

SEQ ID NO: 223931 - DNA, 3714 bp, Artificial Sequence
  derived and/or modified sequence
atggattctggagctgggggccgccgctgcccagaggccgccctgctgatcctgggcccccccaggatggagcacctgcggcacagccctggccctgggggccagaggctgctgctgcccagcatgctgctggccctgctgctgctgctggcccccagccctggccacgccaccagggtggtgtacaaggtgcctgaggagcagccccccaacaccctcatcggcagcctggccgctgactatggcttcccagatgtgggccacctgtacaagctggaggtgggcgccccctacctgcgggtggatggcaagacaggagacatcttcaccacagagaccagcattgaccgggagggcctgcgggagtgccagaaccagctgcccggggacccctgcatcctggagtttgaggtgtccatcacagacctggtgcagaatggcagcccccggctgctggagggccagatcgaggtgcaggacatcaatgacaacacccccaactttgccagccctgtgatcaccctggccatccctgagaacaccaacatcggcagcctcttccccatccccctggccagtgacagagatgctggccccaacggggtggccagctatgagctgcaggccggccctgaggcccaggagctgtttggcctgcaggtggccgaggaccaggaggagaagcagccccagctgattgtgatgggcaacctggaccgggagcgctgggacagctatgacctgaccatcaaggtgcaggacggcggcagccccccccgggccagcagcgccctgctgcgggtgacagtgctggacaccaatgacaatgcccccaagtttgagcggcccagctatgaagctgagctgtctgagaacagccccatcggccacagcgtcatccaggtgaaggccaatgacagcgaccagggcgccaatgctgagattgagtacaccttccaccaggcccctgaggtggtgcggcggctgctgcggctggacaggaacacaggcctcatcaccgtgcagggccctgtggaccgggaggacctgagcaccctgcgcttctctgtgctggccaaggaccggggcaccaaccccaagagcgcccgggcccaggtggtggtgacagtgaaggacatgaatgacaatgcccccaccatcgagatccggggcatcggcctggtgacccaccaggacggcatggccaacatcagtgaagatgtggccgaggagacagctgtggccctggtgcaggtgtctgacagagatgaaggagaaaatgctgctgtgacctgtgtggtggccggagatgtgcccttccagctgcggcaggccagcgagaccggcagtgacagcaagaagaagtacttcctgcagaccaccacccccctggactatgagaaggtgaaggactacaccatcgagatcgtggccgtggacagcggcaacccccccctgagcagcaccaacagcctgaaggtgcaggtggtggatgtgaatgacaatgcccctgtgttcacccagagcgtgacagaggtggccttccctgagaacaacaagccaggagaggtgattgctgagatcacagccagtgatgctgacagcggcagcaatgctgagctggtgtacagcctggagcctgagcctgctgccaagggcctcttcaccatcagccctgagactggagagatccaggtgaagaccagcctggaccgggagcagcgggagagctatgagctgaaggtggtggccgctgaccggggcagccccagcctgcagggcacagccaccgtgctggtgaatgtgctggactgcaatgacaatgaccccaagttcatgctgagcggctacaacttctctgtgatggagaacatgcctgccctgagccctgtgggcatggtgacagtgattgatggagacaagggagaaaatgcccaggtgcagctgtctgtggagcaggacaatggagactttgtgatccagaatggcaccggcaccatcctgagcagcctgagctttgaccgggagcagcagagcacctacaccttccagctgaaggctgtggatggaggagtgcccccaagaagtgcctacgtgggcgtgaccatcaacgtgctggatgaaaatgacaatgccccctacatcacagcccccagcaacaccagccacaagctgctgaccccccagacccggctgggggagaccgtgtcccaggtggccgctgaggactttgacagcggcgtgaatgctgagctgatctacagcattgctgggggcaacccctacggcctcttccagatcggcagccacagcggggccatcaccctggagaaggagattgaaagaagacaccacggcctgcaccggctggtggtgaaggtgtctgaccggggcaagccacccaggtatggaacagccctggtgcacctgtatgtgaatgagaccctggccaacagaaccctgctggagaccctgctgggccacagcctggacacccccctggacatcgacattgctggggaccctgaatatgaaagaagcaagcagaggggcaacatcctgtttggagtggtggccggcgtggtggccgtggccctgctgattgccctggccgtgctggtgcgctactgccggcagcgggaggccaagagcggctaccaggccggcaagaaggagaccaaggacctgtatgcccccaagcccagcggcaaggccagcaaaggaaacaagagcaagggcaagaagagcaagagccccaagcctgtgaagcctgtggaggatgaagatgaagctggcctgcagaagagcctgaagttcaacctgatgtctgatgcccctggggacagcccccgcatccacctgcccctgaactacccacctggcagcccagacctgggccgccactaccgcagcaacagccccctgcccagcatccagctgcagccccagagccccagcgccagcaagaagcaccaggtggtgcaggacctgcccccagccaacacctttgtgggcaccggggacaccaccagcacaggcagcgagcagtacagcgactacagctaccgcaccaacccccccaagtaccccagcaagcagctgccccacagaagagtgaccttcagcgccaccagccaggcccaggagctgcaggaccccagccagcacagctactatgattctggcctggaggagagcgagacccccagcagcaagagcagcagcggcccccggctgggccccctggccctgcctgaggaccactatgaaagaaccaccccagatggcagcatcggggagatggagcacccagaaaatgacctgcggcccctgcctgatgtggccatgacaggcacctgcaccagagaatgttctgaatttggccacagcgacacctgctggatgcctggccagagcagccccagcaggaggaccaagagcagcgccctgaagctgagcacctttgtgccctaccaggaccggggcggccaggagcctgctggagctggcagccccagccccccagaggacaggaacaccaagacagcccctgtgcggctgctgcccagctacagcgccttcagccacagcagccatgacagctgcaaggacagcgccaccctggaggagatccccctgacccagaccagtgacttccccccagctgccaccccagccagcgcccagacagccaagcgggagatctacctgtag

SEQ ID NO: 223932 - DNA, 3714 bp, Artificial Sequence
  derived and/or modified sequence
atggacagcggcgccggcggccggcggtgccccgaggccgccctgcttattcttgggccaccccgaatggaacacctccgccactctccaggacccggcggtcagcgacttctgttaccatcgatgctcttagccttgctgcttctactggcaccatcccccggccatgcaacacgggtcgtgtataaagtgcctgaagaacaacctcccaataccctcattggaagcttggctgccgattacggttttcccgatgtaggccacctatacaaattagaagtgggcgcaccatacctgagggtggatggcaagacaggcgacatctttaccaccgagacctctatcgaccgagaaggcttacgcgagtgtcagaatcagcttcccggtgatccatgcatattggagtttgaagttagcattaccgacctcgtacaaaacggctctccacggctcctcgagggccaaatcgaggtgcaggatatcaacgataatacacccaatttcgcctccccggttattaccctcgctattcccgaaaatactaacattggcagcttgtttcctataccactggccagtgacagagatgccggcccgaacggtgtggctagctatgagctgcaagccggccctgaagcacaagagctgttcggcttgcaggtggccgaagatcaagaagagaagcagccgcagctgatagtgatgggcaacctcgatagagaacgctgggatagttatgacctgacaatcaaggtgcaggatggcgggagccctccaagggcaagctcagctctcctgcgggtcactgttctagatactaacgataacgcccctaaatttgagagacccagttacgaggctgagctgtctgagaattcccctattggacactctgtgatccaggtgaaggctaacgactctgaccaaggagccaacgcggaaatcgagtacacctttcaccaggcacccgaggtggtcaggcgcctgctgcgccttgaccgcaatacaggactcatcacagtgcaaggaccagtagatcgggaggacctttctacacttcggtttagcgtgctggcaaaggatcgcggaacaaatcctaaatccgcgcgggcccaggtagtggtgactgtgaaggatatgaatgacaacgcacctacaatagaaatacgcggtataggcctggtgacccaccaggatggcatggctaatataagtgaggatgttgccgaggagactgctgtcgctctggtacaggtatccgacagggatgaaggagagaatgctgccgtaacatgtgttgtcgcgggcgatgtaccttttcagctcaggcaggccagtgaaacaggctccgattcaaaaaaaaagtatttcctgcaaaccaccactcctctggactatgagaaggtcaaagattatacaattgagatagtagcagtggactctggcaatccgcctctgtcgagcacaaactcccttaaggtacaagtggtggacgtgaatgataacgctccagtatttacccagtcagttactgaggtcgcgtttccagagaataacaagccaggggaagtgatcgctgagatcaccgcctcagacgcagattctggctcgaacgccgaacttgtgtattctctcgagcccgagccagccgctaaaggactgttcacaatctctcccgagaccggcgagatccaggtgaagacaagcctagacagggagcagagagagagctacgagctcaaagtcgtcgccgccgatcgcggatccccaagccttcaaggcaccgccactgttttagtgaacgtgctggattgcaacgataatgacccaaagttcatgctctctggctacaacttctcggtcatggaaaacatgccagccctcagtcctgtgggcatggtgactgtaatagacggggataaaggtgaaaacgcccaggttcagctcagcgttgagcaggacaacggagactttgtgatacaaaatgggacagggacgatcctgtcgagtctgtctttcgatcgagaacaacaatctacgtacacgttccagctaaaggctgtcgatgggggcgttcctccccgatctgcctacgtgggagttaccattaacgttcttgatgagaatgacaacgcaccatacattaccgcaccctcaaatacatcgcataagctactgacacctcaaacacggctgggagaaacagtgtcgcaggtggcagctgaggattttgactccggggtcaacgctgagcttatatattctatcgccggagggaacccatacggcctcttccagatcggctcgcactctggcgctatcactcttgagaaagagatcgagcgtagacaccacggactccacaggctggtggtgaaagtatccgaccgtggaaagccaccacgatacggcacagcgctcgtacacttatatgtcaacgagaccctggcaaatcggacacttctggaaaccttgctaggccactcactcgacactcctctcgatattgacatagccggtgatcccgaatatgagaggagcaagcagcgtggtaatattttgtttggcgtggtagctggggtggtcgcagtcgcattgctgatagctctcgccgtgttagtgcggtactgtagacaaagggaggccaaatccggctatcaggccggcaagaaagaaacaaaggacctgtacgcgccgaaacccagcggaaaagcctccaaggggaacaaatctaagggaaaaaaatcgaaatctcccaagcccgttaagcctgtggaagatgaggacgaagccggtctccaaaagtcactgaaattcaatttaatgagcgacgctcctggagacagccctcgcatccacctgccactgaattatccgccaggctctccagatctgggtagacactatcgttcaaacagcccgctcccctcgatacagctgcaaccccagtcgccctcagcctcaaaaaaacaccaagtggtgcaagatctgcctcccgccaacacttttgtggggacaggggatactacctcgacggggagtgaacagtacagtgactacagttacaggacgaacccaccaaaatatcctagcaagcagctcccgcatcgacgtgtcacgttttcagctaccagtcaggcccaagaactgcaggaccccagtcaacactcctactatgatagcgggttggaagagagcgaaacacccagctccaaatccagctctggcccccgtctcggccccctggctctcccggaagaccactacgagcgcacaacccccgacggcagcatcggggaaatggagcatccggagaatgaccttcgacctctgccggatgttgccatgaccggaacatgcaccagagaatgctccgagttcggacatagtgacacctgctggatgccaggacaaagctccccctccaggcgcaccaaaagctccgcactgaagctgtccactttcgtgccatatcaggatcgtggcggacaggagccggcaggagcggggtctccatcccccccagaggatagaaacaccaagacagctccggtgcggctacttccttcctattcagctttctctcattcaagccacgacagctgcaaagatagtgcaacattggaggagatacccctcactcagacatctgactttccccccgctgccacccccgcatcagcccaaactgccaaacgggaaatctacctctag

SEQ ID NO: 223933 - DNA, 3714 bp, Artificial Sequence
  derived and/or modified sequence
atggatagtggtgctggcggtcggagatgccctgaggccgctttattaattctcggcccacccaggatggagcatttaagacactcccccggtccaggaggacagaggttgctccttcctagcatgcttctggccttacttctgctcctagctccctcacctgggcatgcaacgagagtggtctataaagtccccgaggagcaacccccaaataccttgattgggagcttagcagcagattacggatttccagatgtcggtcacctgtataagttggaggtcggcgcaccatatctgcgcgtggacggtaagaccggtgatatattcaccacggaaacctcaattgacagggaagggctacgggaatgccagaaccagttgcccggagatccatgtatactggaattcgaagtgagcataactgatctggtgcagaacggaagccccaggctcctggagggacagatcgaggtgcaagatattaacgacaacaccccaaattttgcctcccccgtaattacactggctatcccggagaacacaaacatcggaagccttttcccaatcccattagcctctgatagagacgcagggcctaatggggttgcttcatacgagctccaggcgggtcctgaggcccaagagctgttcggactccaagtcgccgaggaccaggaagagaagcaaccacagctaatcgtgatgggaaatctggatcgtgaacgttgggacagctacgacctgacgatcaaggttcaagatggcggatcaccgccacgggcttcatccgctttgttacgagtgactgtgctggataccaatgacaatgctccgaagtttgagaggccttcatatgaggcagagctttccgagaattccccaataggccattccgttatccaggtaaaagccaatgactcggatcagggcgcaaatgctgaaatcgagtacaccttccatcaggctccagaggtggttcggaggctcctgaggctcgaccgcaatactggactgatcacggtccagggtccggttgatagggaggatctcagcacgctgcgctttagcgtgctcgccaaggaccggggaacaaaccccaaatctgccagagctcaggtggtggtgacagttaaggacatgaatgacaatgcacccacgatcgaaattagaggtattggacttgttactcaccaggatggcatggccaatatctctgaggatgtggccgaggaaacagcggtggccctggtccaagtaagtgacagggacgaaggcgagaacgcggcagtgacatgtgtggtcgctggcgacgttccatttcagctgagacaggcctccgagaccggttccgattccaagaagaagtattttctccagaccactacaccattggattatgagaaggttaaagactacacaatcgaaattgtggccgtggacagcgggaatcctccgctgtcctctacaaattctctgaaggtgcaggtggtggacgtgaacgacaatgctccggtttttacgcaaagcgttactgaggtcgcatttcccgagaataacaagcctggtgaggtcattgcagagatcaccgccagcgatgccgacagtggttctaacgccgagctagtctattccctcgaaccggaaccagcggctaaaggactgttcaccataagccctgaaacaggcgaaatacaagtgaagacctcactagacagagaacagagggaatcttacgaattgaaggtagtggctgccgatcgcggatctccatctcttcaagggacggcaaccgtcttggtcaatgttctggattgcaatgataacgatcccaagttcatgctctccggttacaatttctcagtgatggaaaacatgccagccctgagccccgtgggcatggtgacggttatcgacggcgacaagggcgaaaatgcacaggtgcagttatctgttgagcaggacaacggcgatttcgttatccagaacggcacgggtacgattctgagctccctgtcctttgatcgggagcagcaaagtacttacacattccagttgaaagctgtggatggcggagttcctccaaggagtgcttacgttggagtgacgataaatgtgttggacgaaaacgacaacgcaccatatatcacagcgccaagtaacaccagccacaagcttctgacgccacaaaccaggcttggtgagactgtgtcgcaggttgccgctgaagactttgacagcggcgttaacgctgagcttatctactccattgccggaggaaatccttatggtctcttccaaatcggctcccactcaggagccatcactcttgaaaaggagattgaacgtcggcatcatgggctccatagactcgtcgtcaaagtctctgacaggggcaagccacccaggtacggtaccgcactggttcatctttacgtgaacgaaaccttggctaacaggaccctattggagaccctgcttggacacagcttagataccccgctggacattgatatcgcaggcgaccccgagtatgaaagaagcaagcaaagggggaacatcctgttcggcgtggtggccggtgtcgtggcggtggcgcttctaattgcgttggcagtcctggttcggtactgcagacaacgcgaggccaaaagtgggtatcaggccggaaaaaaggagacaaaggacctatatgcccctaagccctcaggaaaggcttcaaaaggaaacaaaagtaaagggaagaagagcaagagcccgaagccagttaaacctgtagaggatgaggacgaggcaggattgcaaaagtctcttaagtttaatctaatgagtgacgctcccggagattccccacgaatccacctccccttgaactacccccctggcagcccagacctcgggagacattacagatccaatagccccttgccctcgattcaactgcagccccaaagcccctctgccagtaagaaacaccaggtggtgcaagacttaccgcctgcaaataccttcgtaggtactggcgacactacatccacaggctctgaacagtatagcgattacagctaccgaacaaaccctccgaagtacccatccaagcagctgccacacaggagagtgactttttctgcaaccagtcaggcccaggagctgcaggacccctcccagcattcttattatgactctgggttggaagaaagcgagaccccaagctccaagtcatcttctggtccacgactcggccctctcgcactcccagaggaccattacgagaggacaacacctgatggtagtataggcgaaatggaacacccagaaaatgatctacgccctttgcccgacgtggctatgactggaacctgcacacgggagtgttctgagtttggacactcagacacctgttggatgccaggccaatcttctccctctagaagaactaagagtagtgctctgaagctttctactttcgtgccatatcaggaccggggtggccaggagccagccggagccggaagccccagtccccctgaggaccggaataccaaaactgcccctgtacggctgctacccagttatagtgctttctctcactcaagtcacgactcctgcaaggattccgccactttagaggagatacctttaacgcagacatccgactttccaccggctgctactccagctagcgcccagactgcaaaaagggagatctacttgtag

SEQ ID NO: 223934 - DNA, 4530 bp, Artificial Sequence
  derived and/or modified sequence
acacactcggggagcgggagcgcggcgcggacgcaaagccgccgggctgctgcgcccagagccagccggagccggagccggagcccgaactgcagctccagccccagccgtgcggagccgcagcccaggccggggccggcggcggctcatggacagcggggcgggcggccggcgctgcccggaggcggccctcctgattctggggcctcccaggatggagcacctgaggcacagcccaggccctggggggcaacggctactgctgccctccatgctgctagcactgctgctcctgctggctccatccccaggccacgccactcgggtagtgtacaaggtgccggaggaacagccacccaacaccctcattgggagcctcgcagccgactatggttttccagatgtggggcacctgtacaagctagaggtgggtgccccgtaccttcgcgtggatggcaagacaggtgacattttcaccaccgagacctccatcgaccgtgaggggctccgtgaatgccagaaccagctccctggtgatccctgcatcctggagtttgaggtatctatcacagacctcgtgcagaatggcagcccccggctgctagagggccagatagaagtacaagacatcaatgacaacacacccaacttcgcctcaccagtcatcactctggccatccctgagaacaccaacatcggctcactcttccccatcccgctggcttcagaccgtgatgctggtcccaacggtgtggcatcctatgagctgcaggctgggcctgaggcccaggagctatttgggctgcaggtggcagaggaccaggaggagaagcaaccacagctcattgtgatgggcaacctggaccgtgagcgctgggactcctatgacctcaccatcaaggtgcaggatggcggcagccccccacgcgccagcagtgccctgctgcgtgtcaccgtgcttgacaccaatgacaacgcccccaagtttgagcggccctcctatgaggccgaactatctgagaatagccccataggccactcggtcatccaggtgaaggccaatgactcagaccaaggtgccaatgcagaaatcgaatacacattccaccaggcgcccgaagttgtgaggcgtcttcttcgactggacaggaacactggacttatcactgttcagggcccggtggaccgtgaggacctaagcaccctgcgcttctcagtgcttgctaaggaccgaggcaccaaccccaagagtgcccgtgcccaggtggttgtgaccgtgaaggacatgaatgacaatgcccccaccattgagatccggggcatagggctagtgactcatcaagatgggatggctaacatctcagaggatgtggcagaggagacagctgtggccctggtgcaggtgtctgaccgagatgagggagagaatgcagctgtcacctgtgtggtggcaggtgatgtgcccttccagctgcgccaggccagtgagacaggcagtgacagcaagaagaagtatttcctgcagactaccaccccgctagactacgagaaggtcaaagactacaccattgagattgtggctgtggactctggcaaccccccactctccagcactaactccctcaaggtgcaggtggtggacgtcaatgacaacgcacctgtcttcactcagagtgtcactgaggtcgccttcccggaaaacaacaagcctggtgaagtgattgctgagatcactgccagtgatgctgactctggctctaatgctgagctggtttactctctggagcctgagccggctgctaagggcctcttcaccatctcacccgagactggagagatccaggtgaagacatctctggatcgggaacagcgggagagctatgagttgaaggtggtggcagctgaccggggcagtcctagcctccagggcacagccactgtccttgtcaatgtgctggactgcaatgacaatgaccccaaatttatgctgagtggctacaacttctcagtgatggagaacatgccagcactgagtccagtgggcatggtgactgtcattgatggagacaagggggagaatgcccaggtgcagctctcagtggagcaggacaacggtgactttgttatccagaatggcacaggcaccatcctatccagcctgagctttgatcgagagcaacaaagcacctacaccttccagctgaaggcagtggatggtggcgtcccacctcgctcagcttacgttggtgtcaccatcaatgtgctggacgagaatgacaacgcaccctatatcactgccccttctaacacctctcacaagctgctgaccccccagacacgtcttggtgagacggtcagccaggtggcagccgaggactttgactctggtgtcaatgctgagctgatctacagcattgcaggtggcaacccttatggactcttccagattgggtcacattcaggtgccatcaccctggagaaggagattgagcggcgccaccatgggctacaccgcctggtggtgaaggtcagtgaccgcggcaagcccccacgctatggcacagccttggtccatctttatgtcaatgagactctggccaaccgcacgctgctggagaccctcctgggccacagcctggacacgccgctggatattgacattgctggggatccagaatatgagcgctccaagcagcgtggcaacattctctttggtgtggtggctggtgtggtggccgtggccttgctcatcgccctggcggttcttgtgcgctactgcagacagcgggaggccaaaagtggttaccaggctggtaagaaggagaccaaggacctgtatgcccccaagcccagtggcaaggcctccaagggaaacaaaagcaaaggcaagaagagcaagtccccaaagcccgtgaagccagtggaggacgaggatgaggccgggctgcagaagtccctcaagttcaacctgatgagcgatgcccctggggacagtccccgcatccacctgcccctcaactacccaccaggcagccctgacctgggccgccactatcgctctaactccccactgccttccatccagctgcagccccagtcaccctcagcctccaagaagcaccaggtggtacaggacctgccacctgcaaacacattcgtgggcaccggggacaccacgtccacgggctctgagcagtactccgactacagctaccgcaccaacccccccaaataccccagcaagcagttacctcaccgccgcgtcaccttctcggccaccagccaggcccaggagctgcaggacccatcccagcacagttactatgacagtggcctggaggagtctgagacgccgtccagcaagtcatcctcagggcctcgactcggtcccctggccctgcctgaggatcactatgagcgcaccacccctgatggcagcataggagagatggagcaccccgagaatgaccttcgccctttgcctgatgtcgccatgacaggcacatgtacccgggagtgcagtgagtttggccactctgacacatgctggatgcctggccagtcatctcccagccgccggaccaagagcagcgccctcaaactctccaccttcgtgccttaccaggaccgaggagggcaggagcctgcgggcgccggcagccccagccccccggaagaccggaacaccaaaacggcccccgtgcgcctcctgccctcctacagtgccttctcccacagtagccatgattcctgcaaggactcggccaccttggaggaaatccccctgacccagacctcggacttcccacccgcagccacaccggcatctgcccagacggccaagcgcgagatctacctgtgagccccctactggccggccggcccccctcccccagccgccggccagctcccaaatggcccattccagggcctcactctccaccccttcagcgtggacttcctggccagggccccaagtgggggtatcactgacctcatgaccacgctggcccttctcccatgcagggtccaggtcctctcccctcatttccatctcccagcccccaggggccccttcccctttatggggcttcccccatctgatgcccaagagggctcctctgcaatgactgggctccttcccttgacttccagggagcaccccctcgatttgggcagatggtggagtcaagggtgggcagcgtacttctaactcattgtttccctcatggccgaccagggcggggatagcatgcccaattttagccctgaagcagggctgaactggggagcccctttccctgggagctcccagaggaaactcttgaccaccagtggctccctgaagggcttttgttaccaaaggtggggtagggacgggggtgggagtggagcggaggccttgttttcccgtgctgctcctggactggcccacctgcctgccacatgcccacgcctagtcccatctgggcccccattccctgctggtcatgcagtgtctgtatataaggaccttggaatgacgtcccc

SEQ ID NO: 223935 - DNA, 3714 bp, Artificial Sequence
  derived and/or modified sequence
atggacagcggcgccggcggcagaagatgccccgaggccgccctgctgatcctgggcccccccagaatggagcacctgagacacagccccggccccggcggccagagactgctgctgcccagcatgctgctggccctgctgctgctgctggcccccagccccggccacgccaccagagtggtgtacaaggtgcccgaggagcagccccccaacaccctgatcggcagcctggccgccgactacggcttccccgacgtgggccacctgtacaagctggaggtgggcgccccctacctgagagtggacggcaagaccggcgacatcttcaccaccgagaccagcatcgacagagagggcctgagagagtgccagaaccagctgcccggcgacccctgcatcctggagttcgaggtgagcatcaccgacctggtgcagaacggcagccccagactgctggagggccagatcgaggtgcaggacatcaacgacaacacccccaacttcgccagccccgtgatcaccctggccatccccgagaacaccaacatcggcagcctgttccccatccccctggccagcgacagagacgccggccccaacggcgtggccagctacgagctgcaggccggccccgaggcccaggagctgttcggcctgcaggtggccgaggaccaggaggagaagcagccccagctgatcgtgatgggcaacctggacagagagagatgggacagctacgacctgaccatcaaggtgcaggacggcggcagcccccccagagccagcagcgccctgctgagagtgaccgtgctggacaccaacgacaacgcccccaagttcgagagacccagctacgaggccgagctgagcgagaacagccccatcggccacagcgtgatccaggtgaaggccaacgacagcgaccagggcgccaacgccgagatcgagtacaccttccaccaggcccccgaggtggtgagaagactgctgagactggacagaaacaccggcctgatcaccgtgcagggccccgtggacagagaggacctgagcaccctgagattcagcgtgctggccaaggacagaggcaccaaccccaagagcgccagagcccaggtggtggtgaccgtgaaggacatgaacgacaacgcccccaccatcgagatcagaggcatcggcctggtgacccaccaggacggcatggccaacatcagcgaggacgtggccgaggagaccgccgtggccctggtgcaggtgagcgacagagacgagggcgagaacgccgccgtgacctgcgtggtggccggcgacgtgcccttccagctgagacaggccagcgagaccggcagcgacagcaagaagaagtacttcctgcagaccaccacccccctggactacgagaaggtgaaggactacaccatcgagatcgtggccgtggacagcggcaacccccccctgagcagcaccaacagcctgaaggtgcaggtggtggacgtgaacgacaacgcccccgtgttcacccagagcgtgaccgaggtggccttccccgagaacaacaagcccggcgaggtgatcgccgagatcaccgccagcgacgccgacagcggcagcaacgccgagctggtgtacagcctggagcccgagcccgccgccaagggcctgttcaccatcagccccgagaccggcgagatccaggtgaagaccagcctggacagagagcagagagagagctacgagctgaaggtggtggccgccgacagaggcagccccagcctgcagggcaccgccaccgtgctggtgaacgtgctggactgcaacgacaacgaccccaagttcatgctgagcggctacaacttcagcgtgatggagaacatgcccgccctgagccccgtgggcatggtgaccgtgatcgacggcgacaagggcgagaacgcccaggtgcagctgagcgtggagcaggacaacggcgacttcgtgatccagaacggcaccggcaccatcctgagcagcctgagcttcgacagagagcagcagagcacctacaccttccagctgaaggccgtggacggcggcgtgccccccagaagcgcctacgtgggcgtgaccatcaacgtgctggacgagaacgacaacgccccctacatcaccgcccccagcaacaccagccacaagctgctgaccccccagaccagactgggcgagaccgtgagccaggtggccgccgaggacttcgacagcggcgtgaacgccgagctgatctacagcatcgccggcggcaacccctacggcctgttccagatcggcagccacagcggcgccatcaccctggagaaggagatcgagagaagacaccacggcctgcacagactggtggtgaaggtgagcgacagaggcaagccccccagatacggcaccgccctggtgcacctgtacgtgaacgagaccctggccaacagaaccctgctggagaccctgctgggccacagcctggacacccccctggacatcgacatcgccggcgaccccgagtacgagagaagcaagcagagaggcaacatcctgttcggcgtggtggccggcgtggtggccgtggccctgctgatcgccctggccgtgctggtgagatactgcagacagagagaggccaagagcggctaccaggccggcaagaaggagaccaaggacctgtacgcccccaagcccagcggcaaggccagcaagggcaacaagagcaagggcaagaagagcaagagccccaagcccgtgaagcccgtggaggacgaggacgaggccggcctgcagaagagcctgaagttcaacctgatgagcgacgcccccggcgacagccccagaatccacctgcccctgaactacccccccggcagccccgacctgggcagacactacagaagcaacagccccctgcccagcatccagctgcagccccagagccccagcgccagcaagaagcaccaggtggtgcaggacctgccccccgccaacaccttcgtgggcaccggcgacaccaccagcaccggcagcgagcagtacagcgactacagctacagaaccaacccccccaagtaccccagcaagcagctgccccacagaagagtgaccttcagcgccaccagccaggcccaggagctgcaggaccccagccagcacagctactacgacagcggcctggaggagagcgagacccccagcagcaagagcagcagcggccccagactgggccccctggccctgcccgaggaccactacgagagaaccacccccgacggcagcatcggcgagatggagcaccccgagaacgacctgagacccctgcccgacgtggccatgaccggcacctgcaccagagagtgcagcgagttcggccacagcgacacctgctggatgcccggccagagcagccccagcagaagaaccaagagcagcgccctgaagctgagcaccttcgtgccctaccaggacagaggcggccaggagcccgccggcgccggcagccccagcccccccgaggacagaaacaccaagaccgcccccgtgagactgctgcccagctacagcgccttcagccacagcagccacgacagctgcaaggacagcgccaccctggaggagatccccctgacccagaccagcgacttcccccccgccgccacccccgccagcgcccagaccgccaagagagagatctacctgtag

SEQ ID NO: 223936 - protein, 1011 aa, Artificial Sequence
  derived and/or modified sequence
MQKPSGLKPPGRGGKHSSPMGRTSTGSASSSAAVAASSKEGSPLHKQSSGPSSSPAAAAAPEKPGPKAAEVGDDFLGDFVVGERVWVNGVKPGVVQYLGETQFAPGQWAGVVLDDPVGKNDGAVGGVRYFECPALQGIFTRPSKLTRQPTAEGSGSDAHSVESLTAQNLSLHSGTATPPLTSRVIPLRESVLNSSVKTGNESGSNLSDSGSVKRGEKDLRLGDRVLVGGTKTGVVRYVGETDFAKGEWCGVELDEPLGKNDGAVAGTRYFQCPPKFGLFAPIHKVIRIGFPSTSPAKAKKTKRMAMGVSALTHSPSSSSISSVSSVASSVGGRPSRSGLLTETSSRYARKISGTTALQEALKEKQQHIEQLLAERDLERAEVAKATSHICEVEKEIALLKAQHEQYVAEAEEKLQRARLLVESVRKEKVDLSNQLEEERRKVEDLQFRVEEESITKGDLELTTVAEKSRVLQLEEELTLRRGEIEELQQCLLHSGPPPPDHPDAAEILRLRERLLSASKEHQRESGVLRDKYEKALKAYQAEVDKLRAANEKYAQEVAGLKDKVQQATSENMGLMDNWKSKLDSLASDHQKSLEDLKATLNSGPGAQQKEIGELKAVMEGIKMEHQLELGNLQAKHDLETAMHVKEKEALREKLQEAQEELAGLQRHWRAQLEVQASQHRLELQEAQDQRRDAELRVHELEKLDVEYRGQAQAIEFLKEQISLAEKKMLDYERLQRAEAQGKQEVESLREKLLVAENRLQAVEALCSSQHTHMIESNDISEETIRTKETVEGLQDKLNKRDKEVTALTSQTEMLRAQVSALESKCKSGEKKVDALLKEKRRLEAELETVSRKTHDASGQLVLISQELLRKERSLNELRVLLLEANRHSPGPERDLSREVHKAEWRIKEQKLKDDIRGLREKLTGLDKEKSLSDQRRYSLIDRSSAPELLRLQHQLMSTEDALRDALDQAQQVEKLMEAMRSCPDKAQTIGNSGSANGIHQQDKAQKQEDKH

SEQ ID NO: 223937 - protein, 50 aa, Artificial Sequence
  derived and/or modified sequence
LEEERRKVEDLQFRVEEESITKGDLEAEDHLSPEPSMLTTVAEKSRVLQL

SEQ ID NO: 223938 - DNA, 3036 bp, Artificial Sequence
  derived and/or modified sequence
atgcagaagccaagtgggctgaagcctccgggccgagggggtaagcatagtagcccaatgggcaggacatccaccggttccgcgtcaagctccgccgccgtggccgctagctcgaaagaaggctctcctctgcacaaacagtcctccgggccgagctcctctcctgcagccgctgctgccccagaaaagcctggtcctaaagcagccgaggttggagatgatttcttaggtgacttcgtcgttggtgagcgtgtgtgggtaaacggggtgaagccaggagtggtgcaatacctgggggagacccagttcgcgcccggccagtgggccggcgtcgtgctggatgaccccgtggggaagaatgacggtgctgtaggcggggtgagatactttgagtgcccggccctccagggaatcttcaccaggcccagcaagttaacgagacaacctaccgccgagggttccggctctgacgcacactctgtcgaaagtctgacagcacagaatctttctctgcattcagggaccgccacaccacccttgactagcagagtcattcccctcagggagtcagtattgaacagttccgtgaagacaggaaacgaatcagggtcaaatctgtccgactcggggtccgtgaaaaggggtgagaaagatctccgccttggagatagggtgctcgtgggggggaccaaaactggtgttgttcgttacgttggcgaaaccgactttgctaaaggcgagtggtgcggcgtggagctggatgaaccacttggtaagaacgatggtgccgtcgcaggaacgcgatacttccagtgtccacccaagttcggcttgtttgctcccatccataaagtgatccggatcggattcccttcaacgagcccagcaaaagctaagaaaacaaaacgcatggctatgggtgtctccgccctgactcattccccttcatcctcatctatctcctcagtctccagcgttgcgtcttctgtcggtggtcgcccttcccgcagcggtctgctaaccgagacgagctccagatacgctaggaagatcagtggaactaccgcactgcaggaagccttaaaggaaaaacagcaacacattgaacagctgctagccgaaagagaccttgaacgcgccgaagtcgctaaggcgacttctcacatctgcgaggtggagaaggaaatcgcactactgaaagcccagcatgagcagtacgtggcagaggctgaagagaagcttcaacgggctaggctgctcgttgaatctgttagaaaagaaaaagtggacttatctaaccagctagaggaagagcgcaggaaagtggaggacttacagtttcgcgtggaagaggagtccattacaaaaggcgatctcgaactgacgacggtcgcggaaaagtcgagagtcctgcagcttgaggaggagctgactttacgccgcggggaaattgaagagttacagcagtgtctgttgcatagcggaccgcccccccccgaccatccagatgctgctgaaattctgcggctgcgggagaggctcctgtcagcaagcaaagaacaccagcgggaatccggggtcctcagagacaagtacgaaaaagctttgaaggcataccaggctgaggtggataagttgcgtgcggctaacgaaaaatacgcacaggaggtagccggtctcaaggataaagtgcaacaggccaccagcgagaacatgggtctcatggataattggaaaagcaagctggattccttggctagtgaccatcagaaatccctagaggacctcaaagcaaccctcaattcagggccaggcgcacagcagaaagaaattggcgagctgaaagccgtcatggaaggaatcaaaatggagcaccagctggagcttgggaacctgcaggccaagcatgatctggagactgcaatgcacgtgaaggaaaaggaagctctgcgcgagaaattacaggaagcacaagaagagctggccggacttcagcgacactggcgggcccagctcgaggtgcaggcttcacagcatagattggaactgcaggaagcacaggatcagcgcagagatgccgaattgcgggtccacgagctggaaaagctggatgtcgagtaccgagggcaggcccaggcgatcgaattcttgaaggagcagatctcactagcagagaaaaaaatgttggactatgaaaggctgcagagagctgaagcgcaggggaagcaagaagtggaatctctccgggagaaactcctggtggccgaaaatagattgcaggctgttgaggcgctctgttcttcccaacacacccacatgattgagagtaacgatatctcagaggagactattcgaactaaggagaccgttgaaggtctgcaggataagctaaacaagcgtgacaaagaagtgacagcactgacgtctcagactgagatgttgcgggcccaggtaagcgcactggaatctaagtgcaaaagcggcgagaagaaagtggatgccctgctgaaagagaaacggaggcttgaggccgagctggagacagtcagcaggaagacacatgacgcatctggccagcttgtattgataagtcaggagttactaagaaaagagcgttcactcaatgaactgcgagtgttgctactggaagccaataggcattctcctggaccggagcgggacttgtctagggaggtccacaaagctgagtggcgcattaaagaacagaagctcaaagacgatatccgtggactccgggagaagctaactggactcgataaggagaaatccctgtctgatcagagacgttactcattgattgacaggtccagcgcacctgagctcctcaggctgcagcatcaattgatgtccactgaggacgcgctacgtgatgccctggatcaggcccagcaggttgaaaagctgatggaggccatgagatcctgtcccgacaaggcccaaactatcggtaactccggaagcgccaacggcatccatcagcaggacaaggcacagaaacaggaggacaaacactag

SEQ ID NO: 223939 - DNA, 153 bp, Artificial Sequence
  derived and/or modified sequence
ctggaagaggaaaggagaaaggtggaggacctgcagtttagggtggaagaggagagcattactaaaggcgatctcgaggccgaggatcacctttctcccgagccctcgatgctgacaaccgtggccgagaaatctcgcgtccttcaactgtag

SEQ ID NO: 223940 - DNA, 3036 bp, Artificial Sequence
  derived and/or modified sequence
atgcagaagcccagcggcctgaagcccccaggccggggcggcaagcacagcagccccatgggccgcaccagcactggaagtgccagcagcagcgctgctgtggccgccagcagcaaggagggcagccccctgcacaagcagagcagcggccccagcagcagccctgctgctgctgctgcccctgagaagccaggccccaaggctgctgaggtgggagatgacttcctgggggactttgtggtgggggagcgggtgtgggtgaatggagtgaagccaggagtggtgcagtacctgggggagacccagtttgcccctggccagtgggccggcgtggtgctggatgatcctgtgggcaagaatgatggagctgtgggcggcgtgcgctactttgaatgtcctgccctgcagggcatcttcacccggcccagcaagctgacccggcagcccacagctgagggcagcggcagtgatgcccacagcgtggagagcctgacagcccagaacctgagcctgcacagcggcacagccaccccacccctgaccagcagggtcatccccctgcgggagagcgtgctgaacagctctgtgaagacaggaaatgaaagtggcagcaacctgagtgacagcggctctgtgaagagaggagagaaggacctgcggctgggggacagagtgctggtgggcggcaccaagacaggagtggtgcgctacgtgggggagacagactttgccaagggggagtggtgtggggtggagctggatgagcccctgggcaagaatgatggagctgtggccggcacccgctacttccagtgcccccccaagtttggcctgtttgcccccatccacaaggtgatccgcatcggcttccccagcaccagccctgccaaggccaagaagaccaagaggatggccatgggcgtgtctgccctgacccacagccccagcagcagcagcatcagctctgtgtcctctgtggccagctctgtgggcggccggcccagccgcagcggcctgctgacagagaccagcagccgctatgccaggaagatcagcggcaccacagccctgcaggaggccctgaaggagaagcagcagcacatcgagcagctgctggccgagcgggacctggagcgggcagaggtggccaaggccaccagccacatctgtgaggtggagaaggagatcgccctgctgaaggcccagcacgagcagtatgtggccgaggccgaggagaagctgcagagggcccggctgctggtggagagcgtgaggaaggagaaggtggacctgagcaaccagctggaggaggagaggaggaaggtggaggacctgcagttccgggtggaggaggagagcatcaccaagggggacctggagctgaccaccgtggccgagaagagccgggtgctgcagctggaggaggagctgaccctgcggcggggggagattgaggagctgcagcagtgcctgctgcacagcggccccccacctccagaccacccagatgctgctgagatcctgcggctgcgggagcggctgctgagcgccagcaaggagcaccagcgggagagcggcgtgctgcgggacaagtatgagaaggccctgaaggcctaccaggccgaggtggacaagctgcgggccgccaatgagaagtatgcccaggaggtggccggcctgaaggacaaggtgcagcaggccaccagcgagaacatgggcctgatggacaactggaagagcaagctggacagcctggccagtgaccaccagaagagcctggaggacctgaaggccaccctgaacagcggccctggggcccagcagaaggagattggagagctgaaggctgtgatggagggcatcaagatggagcaccagctggagctgggcaacctgcaggccaagcatgacctggagacagccatgcacgtgaaggagaaggaggccctgcgggagaagctgcaggaggcccaggaggagctggccggcctgcagaggcactggagggcccagctggaggtgcaggccagccagcaccggctggagctgcaggaggcccaggaccagaggagagatgctgagctgcgggtgcatgagctggagaagctggatgtggagtaccggggccaggcccaggccatcgagttcctgaaggagcagatcagcctggccgagaagaagatgctggactatgagcggctgcagagagctgaggcccagggcaagcaggaggtggagagcctgcgggagaagctgctggtggccgagaaccggctgcaggccgtggaggccctgtgcagcagccagcacacccacatgattgagagcaatgacatcagcgaggagaccatccgcaccaaggagaccgtggagggcctgcaggacaagctgaacaagagggacaaggaggtgacagccctgaccagccagacagagatgctgcgggcccaggtgtctgccctggagagcaagtgcaagtctggagagaagaaggtggatgccctgctgaaggagaagaggcggctggaggccgagctggagaccgtgtccaggaagacccatgatgccagcggccagctggtgctgatcagccaggagctgctgaggaaggagaggagcctgaatgagctgcgggtgctgctgctggaggccaacagacacagccctggccctgagcgggacctgagccgggaggtgcacaaggccgagtggaggatcaaggagcagaagctgaaggatgacatccggggcctgcgggagaagctgaccggcctggacaaggagaagagcctgagtgaccagaggcgctacagcctgattgacaggagcagcgcccctgagctgctgcggctgcagcaccagctgatgagcacagaagatgccctgagagatgccctggaccaggcccagcaggtggagaagctgatggaggccatgaggagctgcccagacaaggcccagaccatcggcaacagcggcagcgccaacggcatccaccagcaggacaaggcccagaagcaggaggacaagcactag

SEQ ID NO: 223941 - DNA, 153 bp, Artificial Sequence
  derived and/or modified sequence
ctggaggaggagaggaggaaggtggaggacctgcagttccgggtggaggaggagagcatcaccaagggggacctggaggccgaggaccacctgagccctgagcccagcatgctgaccaccgtggccgagaagagccgggtgctgcagctgtag

SEQ ID NO: 223942 - DNA, 3036 bp, Artificial Sequence
  derived and/or modified sequence
atgcagaagcccagcggcctgaagccccccggccggggcggcaagcactccagcccaatgggtcgcacttccaccgggtctgcaagcagtagcgccgctgttgcggcttccagtaaagagggaagccccttgcacaagcaatcttctggcccctcctccagcccggcagccgctgcagctccagagaaacctggaccaaaagccgctgaggtgggcgatgatttcctgggagatttcgtggtgggggagagagtgtgggtaaacggagtcaagcccggtgtagtgcagtatctcggcgaaacacagttcgcccccggccagtgggccggtgtggtgctggatgaccctgttggaaagaatgacggagccgtgggtggtgtgagatatttcgaatgccccgcattgcagggaatctttactcgaccctcaaagttgacccgccaacctactgccgaggggtccggatcagacgcccactctgtcgaatcacttacagcccagaatctttccttgcacagtgggacagcaacacctcccctgacctctcgcgtgattcccctgcgagagagcgtgctcaattcctccgtcaaaacaggcaatgagtcaggatcaaatctcagcgactctggatccgtaaagagaggcgagaaggatctgcgccttggagaccgggtgctagtaggaggaaccaaaacaggcgtggtacggtatgtgggggaaacagatttcgccaagggggagtggtgcggtgtggagctcgacgagccgctcgggaagaacgatggcgccgtggccggaactcgctacttccagtgccccccaaaattcgggctgttcgcgccaatccataaggttatccggattgggttccccagtacatcgccggccaaagcaaaaaagaccaagcgtatggcaatgggagtgtccgcccttactcacagccccagtagcagctccatatcgagcgtgtcatcagttgctagctctgtgggcggaagacctagtaggagtggtctgcttacagagacttcttcacggtacgccaggaaaatttctggaacaaccgctttgcaggaagccttgaaggaaaagcagcagcatatcgagcaactcctggcagagcgtgacctcgagagagctgaggtggccaaggcgactagccacatttgcgaggtggaaaaggaaattgctctgctgaaggcccaacacgagcagtatgttgccgaggctgaagaaaaactccagcgtgctagactccttgtggaatccgtgcgcaaggaaaaggttgatctatcgaaccagctggaggaagagcggagaaaggtagaggatctgcagttccgagtggaggaagaatcaatcacaaagggcgacctcgagctgacgaccgtcgccgaaaagagccgggtactacagttggaagaagaactgaccctcagaagaggggaaatcgaagagcttcagcagtgcttactccactcgggcccaccgccaccggaccatcccgatgcggccgagatcctgcgtttaagagagcgactcttgagtgccagtaaagagcaccaaagggagtctggcgttctccgcgacaaatacgaaaaggccctgaaggcctaccaggcggaagtcgataaacttcgagctgccaacgagaaatatgcgcaagaagtcgccggcttgaaggacaaggttcaacaggcaaccagtgagaacatggggctcatggataattggaaatccaagctggactcactggcttctgaccatcagaaaagcctggaggatctcaaagccactttaaattctggacccggagcccagcaaaaagaaatcggagagcttaaggccgtcatggagggcattaaaatggagcatcaactggagctgggcaacctccaagcaaaacacgatctcgagaccgcaatgcacgtgaaagaaaaagaggcgctccgggagaagctgcaggaggctcaggaagaactggccggcctgcagcgacattggcgcgcccagctggaagtccaggcaagtcagcatcgtctcgagctccaggaggcacaggaccaacgaagagacgccgaactccgcgtgcacgagttagaaaaactagacgttgagtacagaggccaagctcaggctattgaattcctcaaggaacagataagcttggccgaaaaaaagatgctggactacgagcggctgcaaagagccgaggcccagggcaaacaagaagtggagtccctgcgggagaaattgcttgtcgcagaaaacagactgcaggccgtggaggctctgtgttccagccaacatacacatatgatcgagagtaacgacatctccgaggagaccatccggacgaaagaaacggtagaaggcctgcaggataaactaaataagcgagataaggaagtgacagcccttacttctcaaacagagatgctgagggcccaagtgagcgccctggagtccaagtgcaaatccggcgagaaaaaagtggatgccctgttgaaggagaaacgtcgcctcgaggctgagcttgagacagtctcccggaagacgcacgacgccagcgggcagctggtgctcatctctcaggaactgctgcgcaaggaacgaagtctcaatgagcttcgcgtgctgcttcttgaggccaacaggcattcacccggacctgaaagggatctgagtagggaggttcataaagccgagtggcgcattaaagaacagaaactgaaagatgacattcgcggactcagagaaaagctgactggcctggacaaggagaaaagtctcagcgaccaacgccggtattcacttatcgatcgcagttcagcacccgagttgctgcggttgcagcaccagttgatgtcgaccgaggatgccctccgtgatgccctggaccaggcccaacaagtggagaaactgatggaggccatgcgctcatgcccagacaaggcccaaactattgggaacagtggcagtgctaatgggatacaccagcaggacaaagcccagaaacaggaagataagcattag

SEQ ID NO: 223943 - DNA, 153 bp, Artificial Sequence
  derived and/or modified sequence
ctggaggaggagcggcggaaggtggaggacctgcagttccgggtggaggaggagagcatcactaaaggcgacttggaggccgaagatcacctgagcccagaaccgtcaatgctcactaccgttgcagagaaaagcagggtgctgcaattgtag

SEQ ID NO: 223944 - DNA, 3036 bp, Artificial Sequence
  derived and/or modified sequence
atgcagaagccctctggacttaagcccccaggccgtgggggtaaacactcatctcccatgggacgcacatccaccggtagcgctagctcttcagcagccgtggcggcatcatctaaagaagggagcccactgcacaaacagagtagcgggccaagtagcagcccagcagctgccgcagcccctgagaaacctgggccaaaggcagccgaggtcggcgatgacttcctgggggatttcgtggtaggtgagagagtgtgggtgaatggggttaagccaggtgtggtccagtatctaggagaaacacagttcgccccaggccagtgggccggagttgttctggatgaccctgtgggcaagaacgatggcgcagtggggggagttagatacttcgaatgccccgcactgcaggggattttcacgcggccatctaaacttacacgtcagcccacagccgaaggatccggatctgacgcacattccgttgaatcgctgactgcccagaacctgtcactgcactctggcactgccacaccccctctgacgagccgagtcattccacttagggagagtgtcctgaactcatccgttaagacaggcaatgagtccgggagcaacctgtccgacagtggatccgtgaagaggggcgagaaggatctcaggctgggggatagagtcttagtcgggggaaccaaaaccggagtggtcaggtatgtcggtgaaacagacttcgccaagggggagtggtgtggcgttgagctcgatgagcccctgggtaaaaatgatggagccgttgctggtacccgctactttcagtgcccccctaagttcgggttattcgcccctattcacaaggtaatcagaatcggctttccttctaccagtcccgcaaaagccaagaaaactaagcgtatggccatgggggtgtccgctctgacccatagccctagctcctcttcaattagtagtgtgtcttcggtggcatcaagcgttggcggtcgtccatctaggtccgggttgctgacagagactagctctcggtatgcccgaaagattagtggcacaaccgctctgcaggaagcactgaaagaaaagcagcaacacatcgaacagttactcgccgaacgggatctggaaagggccgaagttgctaaggcaacttcccatatctgcgaagtggagaaagaaatcgccctactgaaggctcagcacgagcagtacgttgcagaggccgaagagaaacttcagcgagccagattactcgttgaatccgtgaggaaggaaaaagtggacctctcgaatcaacttgaagaggagcgcagaaaggtggaagatttacaatttcgggtggaagaggaatctataaccaaaggcgatctcgagcttactaccgtcgcagagaaaagcagggtgctccaattggaggaagagctcactttgagacggggagagatagaagaactgcagcagtgtcttttgcactctggccctccccctcctgaccacccagatgctgccgaaatactaaggctacgcgagagattgctgtctgcatctaaggaacatcagcgcgagagcggagtgctcagggacaagtatgaaaaggccctgaaggcataccaggcagaggtagataagctgagggccgctaatgaaaagtatgctcaggaggtggccggacttaaggacaaagtgcagcaggctacctctgaaaatatgggactcatggataactggaagagtaaactggacagcttggcaagcgaccatcagaagagcctggaagacctgaaggctaccctgaacagtggtcccggtgctcagcaaaaggaaattggtgagctgaaagccgtgatggagggaattaagatggaacatcaactcgagctgggcaatctgcaggctaagcacgatttggaaactgcaatgcatgttaaagagaaggaggcccttcgcgaaaaactacaggaggcgcaggaggagctggcaggactccagcgtcactggagagcacaactggaagtccaggcctcacaacaccggctagagctccaggaggcccaagaccagaggcgcgacgctgaactaagggtgcacgaactcgagaaactggacgtcgaataccgtggtcaggctcaagcaatagaattcctaaaagagcaaatttctttggccgagaaaaagatgctcgactatgagaggctgcagagggcagaggcccaggggaagcaggaggtggaatccctaagagagaagctcttggtagcagagaaccggctgcaggctgtcgaggcactgtgtagcagccagcatacccacatgatagagagtaacgatatatcagaagagacaattaggacaaaggagaccgtggaaggcctgcaagataagctgaacaagagggacaaagaggttaccgcacttacatcacagaccgaaatgcttcgagcacaggtgtctgcgcttgaatcaaaatgtaaaagtggagagaagaaggttgatgctttgcttaaagagaaaaggcgccttgaggctgagctggaaactgtgtcccgtaagactcatgatgccagtggccagctggtgcttatcagtcaggagctcttacgaaaggaacggtctttgaacgaactgagagtcctgcttctggaagccaatcgccacagccccggacccgagcgagacttgtctcgcgaggtgcataaggctgagtggaggataaaagaacaaaagctaaaagacgatattcgcggactgcgagaaaaactcacgggcctggataaggaaaaaagtctctcggaccagagaagatactctcttatagaccgttcgtcagccccagaattgctccggttacagcaccagcttatgagtacagaggacgcgctccgtgatgcactcgatcaggctcagcaggtcgagaagctgatggaagctatgagatcttgtccggataaggctcagacgattggcaattcagggagtgccaacggaatccatcagcaggataaggcacaaaagcaagaagacaaacactag

SEQ ID NO: 223945 - DNA, 153 bp, Artificial Sequence
  derived and/or modified sequence
ttagaagaagaaagaagaaaggtggaagatcttcagttccgcgtagaggaggaatcgatcactaagggagatttggaggccgaggatcatctgagtccagagccctccatgctcactaccgtggctgagaagtcccgcgttctccagctgtag

SEQ ID NO: 223946 - DNA, 5445 bp, Artificial Sequence
  derived and/or modified sequence
cggctcggccgcggggcgcgcaggcggctgctgggcggcctcggtgcgcgcctcccgccttcccagagacgtggcgcgaggcccgggccctgagcacctatcgcggggatccccggcgccaggagggggtgcagccggtgggcagcgccgcgcagggaggggccgcagcatcctcgccccccagcgcgcccgggcccgagaggaggaggccggggctctccgggcctcccgccgcttagcctgatgctggaaggacgaaggtgagtgaagatggcagagaggacgtgaccagcactcacccttgtccacctgcccagtggcaccgccatgcagaagcccagcggcctgaagccccccggccgtggggggaagcactccagccccatgggccggacatctactgggtcagcttcatcctcggcggcggtggccgctagctccaaggaaggctccccactgcacaaacagtcatctggaccctcctcctccccggccgcagctgctgcccccgagaagccgggccccaaggcggcggaagtgggggatgacttcctgggggactttgtggtgggcgagcgggtgtgggtgaacggcgtgaagccaggcgtggtgcagtatctgggagagacgcagttcgcaccgggccagtgggctggcgtggtgctggacgacccggtgggcaagaatgatggcgcggtgggcggcgtgcgctacttcgagtgcccggccctccagggtatcttcacgcggccctccaagctgacccggcagcccacggccgagggctcggggagtgatgcccactccgtggagtcgctgactgcccagaacctgtcattgcattcgggcacggccacgcccccgctgaccagccgcgtcatccccctgcgggagagcgtcctcaacagctccgtgaagactggcaacgagtcgggatccaacctctcagacagcggctctgtgaagcggggcgaaaaggacctgcgcctgggggaccgcgtgctggttggcgggacgaagactggcgtggtgcggtacgtgggggagacagactttgccaagggcgagtggtgtggcgtggagctggacgagccccttgggaagaatgatggggcggtggcgggcaccaggtacttccagtgcccacccaagtttggtctcttcgcgcccatccacaaagtgatccgtatcggcttcccatctaccagcccagccaaggccaagaagaccaagcgtatggccatgggtgtgtcagcactgacccacagtcccagcagttcctccatcagctccgtcagctctgtggcctcctccgtggggggtcggcccagccgcagtggcctgctcacggagacctcttcacgctacgcccgcaagatctcgggcaccacggccttgcaggaggcactgaaggagaagcagcagcacattgagcagctgctggctgaacgagacctggaacgggctgaggtggccaaggccacaagccacatctgcgaggtggagaaggagattgccctgctcaaggcacagcatgagcagtatgttgcagaagccgaggagaagctgcagcgagcccggctgctcgtggagagcgtgcggaaagagaaggtggacctgtccaaccagctggaggaggagaggaggaaggtggaggatctgcagttccgcgtggaggaggagtccatcaccaagggagacctggagctgaccacagtggccgagaagtcgcgcgtgctgcagctggaggaggagctcaccctgcgccgaggtgaaatcgaggagctccagcagtgcctgttgcactcgggtcccccacctccggaccacccagacgccgccgagatcctgcggctacgggagcggctgctctcggccagcaaggaacaccagagggagagtggggtgctgcgggataaatacgagaaggccctgaaggcctaccaggcggaggtggacaagctccgcgcggccaacgagaagtacgcacaggaggtggcgggcctgaaggacaaggttcagcaggccaccagcgagaacatggggctaatggacaactggaaatccaagctggactcgctggcctcggaccaccagaagtccctggaggacctcaaagccaccctgaactcgggcccaggcgcccagcagaaggagatcggcgagctgaaggcagtgatggagggcatcaagatggagcaccagctggagctgggtaacttgcaggccaagcatgacctggagaccgccatgcacgtgaaggagaaggaggccctgcgagagaagctgcaggaggcccaggaggagctggctgggctgcagcggcactggcgggcccagctggaggtgcaagccagccagcaccggctggagctgcaggaggcccaggaccagcgccgggatgccgagctgcgtgtgcacgagctggaaaaactggacgtggagtaccggggccaggcgcaggctatcgagttcctcaaggagcagatctcgctggccgagaagaagatgttggactacgagcggctgcagcgggcagaagcccagggcaaacaggaggtcgagagtttgcgggagaagctcctggtggctgagaacagactccaggcggtcgaggccctgtgctcctcccagcacacccacatgattgagtcgaatgacatttcagaggagacgatcaggacgaaggaaactgtggagggcctgcaggacaagctgaacaagagggacaaagaggtgacagccttgacctcccagaccgagatgctcagggcccaagtaagtgcgctggagagcaagtgtaagtcaggcgagaagaaggtggacgccctcctgaaggagaagcggcgcctggaggcagagctggagaccgtgtcccggaagacccatgacgcctcgggccagctagtcctcatcagccaggagctgctgcggaaggagcggagcctgaacgaactgcgggtgttgctgctggaggccaatcgtcactccccagggccggagagggacctgagccgtgaggtacacaaggctgagtggcggatcaaggagcagaaactcaaggatgacatccggggcctgcgtgaaaagctgaccgggctggacaaagagaaatccctgtcggatcagaggcgctactccctcatcgaccggtcctcggcgcccgagcttctgcggctgcagcaccagctgatgagcacggaggacgccctgcgggatgcgctggaccaggctcagcaggtggagaagctgatggaggccatgaggagctgccctgacaaggcccagaccatcggcaattccggttctgcaaacggcatccaccagcaggacaaagctcagaaacaagaggacaagcactgatcctgaggggatactgtggagcagcccagtccacaccagagccccacgcggctgcccggcagtacctcctccaggcaggagccgggactgtcactttggagacaaaacagtgtttgtaacaataacgtactcaccgccgcggacaatcccccaccccgatccctcgccagaccaggacgcttcctcaagcccagccttctacagagagtgtgaacggtacagccccggcctgacccggggaccttcagcctggacacccggcagcttctggagtttgtcagtggaggcagaggggatccggccaggcccctctgtccagaaggagctgccctgaggaccatcttagcggccctgtcctctttttccgcccattctccctcgggtctccccagaggggccggcgggggctggggagggggtaagtttatccatgcagacaccaagggggagcatccagtctttaagagccaagtgggggccccttttccgaagccacttccaggccaaggcagtcgccagggcttcttgtccccaccttctgaaccttcttcaaacagtagtacaagctcccctcagccagcctgcctgcccagcgaggcccccaggttcaaggtgttggcgggggcggagggcaggggaacgggatccttctcccgctgcccaccaacaccaacacacacacacctctaagctgctggccgaagatgtcaccaaggccaaagacacagtattatgaaggtttggaaacccctctcctcacctcccaccgtgaccttgggcaaaccctggctcggagcccagggcagaggcagctcagagtggaggctctaggcaggtttgacaaaggtcagtaatacggtttcccctggggttgaccagatgttccaaaatatctgcatccacctggagatgcagctaagtgggtccttatgtacacaccacgttcacacacacacagagggaccacgtgtgcacgcatgaccgtgtgggtggcggcgtttgctgtgaaccacgctcaggccacacagagacacatacttggtttctgggactgagacccaggcctggcaggaccgtgcctacagatactgcaaacgttcctacagcctagaggtgcgtatacacacccaagtacacgcagccaggcattcaggggtgtgtttgccacatggagcatcccttcctggtcttgccaggcacctgcacagagcgtctccagccccatctcctaacgggggctgggggtaagagaaatctaactgcgctcccccaacccctcgccctgccatcttcccctcaagcctgctaagttatcccaggcctgtgcgtggtggaaaaagccagccttggccctgcagcctccacctcgccgctgggggaccaacaggttgcttacagctttgcaccccggcatcagcacaggggtccctgccccaccctccggcagctcagggagtgttttcctgtgaggcctcccccatcagtggaccagagggagaagcccgatgccccatcccggctttcccgtaacgcacaggacacgtgtgcaattcataggaacggcccagatcgccctcatgagtgccacctggtacaggtaggtggcgctcacgttcctgcccaaatgcagcccatcggggagtcacagtcagtccccccggcccccctcccagtccctgttggctttcggtagctctcgcatgcagttctattaacagccgtctagaagcgatgctttagtggcctaacccagggtcaaatacagctctttctagcaaaatcaggcagctctgccccatcggtaggggcaccgattagtctactaacagccagaggtccatctagcagggtgccgggaggagctgagcccccggaggtgggctcctggtgacgggtgtccaagaagcggtttccttgggagcttctgcctccgtgggcctctcagcccgccccgtgtggccgcccgggtgtggctcagccatgtcccctccccaggtccttcattcacccctcccctccccacagtggaattgttgaagtgtggcgagtctgtgctcgggacaataaagcttgtgacaggtc

SEQ ID NO: 223947 - DNA, 533 bp, Artificial Sequence
  derived and/or modified sequence
gtcagctctgtggcctcctccgtggggggtcggcccagccgcagtggcctgctcacggagacctcttcacgctacgcccgcaagatctcgggcaccacggccttgcaggaggcactgaaggagaagcagcagcacattgagcagctgctggctgaacgagacctggaacgggctgaggtggccaaggccacaagccacatctgcgaggtggagaaggagattgccctgctcaaggcacagcatgagcagtatgttgcagaagccgaggagaagctgcagcgagcccggctgctcgtggagagcgtgcggaaagagaaggtggacctgtccaaccagctggaggaggagaggaggaaggtggaggatctgcagttccgcgtggaggaggagtccatcaccaagggagacctggaggcagaggatcacttgagcccagaaccaagcatgctgaccacagtggccgagaagtcgcgcgtgctgcagctggaggaggagctcaccctgcgccgaggtgaaatcgaggagctccagca

SEQ ID NO: 223948 - DNA, 3036 bp, Artificial Sequence
  derived and/or modified sequence
atgcagaagcccagcggcctgaagccccccggcagaggcggcaagcacagcagccccatgggcagaaccagcaccggcagcgccagcagcagcgccgccgtggccgccagcagcaaggagggcagccccctgcacaagcagagcagcggccccagcagcagccccgccgccgccgccgcccccgagaagcccggccccaaggccgccgaggtgggcgacgacttcctgggcgacttcgtggtgggcgagagagtgtgggtgaacggcgtgaagcccggcgtggtgcagtacctgggcgagacccagttcgcccccggccagtgggccggcgtggtgctggacgaccccgtgggcaagaacgacggcgccgtgggcggcgtgagatacttcgagtgccccgccctgcagggcatcttcaccagacccagcaagctgaccagacagcccaccgccgagggcagcggcagcgacgcccacagcgtggagagcctgaccgcccagaacctgagcctgcacagcggcaccgccaccccccccctgaccagcagagtgatccccctgagagagagcgtgctgaacagcagcgtgaagaccggcaacgagagcggcagcaacctgagcgacagcggcagcgtgaagagaggcgagaaggacctgagactgggcgacagagtgctggtgggcggcaccaagaccggcgtggtgagatacgtgggcgagaccgacttcgccaagggcgagtggtgcggcgtggagctggacgagcccctgggcaagaacgacggcgccgtggccggcaccagatacttccagtgcccccccaagttcggcctgttcgcccccatccacaaggtgatcagaatcggcttccccagcaccagccccgccaaggccaagaagaccaagagaatggccatgggcgtgagcgccctgacccacagccccagcagcagcagcatcagcagcgtgagcagcgtggccagcagcgtgggcggcagacccagcagaagcggcctgctgaccgagaccagcagcagatacgccagaaagatcagcggcaccaccgccctgcaggaggccctgaaggagaagcagcagcacatcgagcagctgctggccgagagagacctggagagagccgaggtggccaaggccaccagccacatctgcgaggtggagaaggagatcgccctgctgaaggcccagcacgagcagtacgtggccgaggccgaggagaagctgcagagagccagactgctggtggagagcgtgagaaaggagaaggtggacctgagcaaccagctggaggaggagagaagaaaggtggaggacctgcagttcagagtggaggaggagagcatcaccaagggcgacctggagctgaccaccgtggccgagaagagcagagtgctgcagctggaggaggagctgaccctgagaagaggcgagatcgaggagctgcagcagtgcctgctgcacagcggcccccccccccccgaccaccccgacgccgccgagatcctgagactgagagagagactgctgagcgccagcaaggagcaccagagagagagcggcgtgctgagagacaagtacgagaaggccctgaaggcctaccaggccgaggtggacaagctgagagccgccaacgagaagtacgcccaggaggtggccggcctgaaggacaaggtgcagcaggccaccagcgagaacatgggcctgatggacaactggaagagcaagctggacagcctggccagcgaccaccagaagagcctggaggacctgaaggccaccctgaacagcggccccggcgcccagcagaaggagatcggcgagctgaaggccgtgatggagggcatcaagatggagcaccagctggagctgggcaacctgcaggccaagcacgacctggagaccgccatgcacgtgaaggagaaggaggccctgagagagaagctgcaggaggcccaggaggagctggccggcctgcagagacactggagagcccagctggaggtgcaggccagccagcacagactggagctgcaggaggcccaggaccagagaagagacgccgagctgagagtgcacgagctggagaagctggacgtggagtacagaggccaggcccaggccatcgagttcctgaaggagcagatcagcctggccgagaagaagatgctggactacgagagactgcagagagccgaggcccagggcaagcaggaggtggagagcctgagagagaagctgctggtggccgagaacagactgcaggccgtggaggccctgtgcagcagccagcacacccacatgatcgagagcaacgacatcagcgaggagaccatcagaaccaaggagaccgtggagggcctgcaggacaagctgaacaagagagacaaggaggtgaccgccctgaccagccagaccgagatgctgagagcccaggtgagcgccctggagagcaagtgcaagagcggcgagaagaaggtggacgccctgctgaaggagaagagaagactggaggccgagctggagaccgtgagcagaaagacccacgacgccagcggccagctggtgctgatcagccaggagctgctgagaaaggagagaagcctgaacgagctgagagtgctgctgctggaggccaacagacacagccccggccccgagagagacctgagcagagaggtgcacaaggccgagtggagaatcaaggagcagaagctgaaggacgacatcagaggcctgagagagaagctgaccggcctggacaaggagaagagcctgagcgaccagagaagatacagcctgatcgacagaagcagcgcccccgagctgctgagactgcagcaccagctgatgagcaccgaggacgccctgagagacgccctggaccaggcccagcaggtggagaagctgatggaggccatgagaagctgccccgacaaggcccagaccatcggcaacagcggcagcgccaacggcatccaccagcaggacaaggcccagaagcaggaggacaagcactag

SEQ ID NO: 223949 - DNA, 153 bp, Artificial Sequence
  derived and/or modified sequence
ctggaggaggagagaagaaaggtggaggacctgcagttcagagtggaggaggagagcatcaccaagggcgacctggaggccgaggaccacctgagccccgagcccagcatgctgaccaccgtggccgagaagagcagagtgctgcagctgtag

SEQ ID NO: 223950 - protein, 608 aa, Artificial Sequence
  derived and/or modified sequence
MARARAGALLALWVLGAAAHPQCLDFRPPFRPTQPLRLCAQYSDFGCCDEGRDAELTRRFWALASRVDAAEWAACAGYARDLLCQECSPYAAHLYDAEDPFTPLRTVPGLCQDYCLDMWHKCRGLFRHLSTDQELWALEGNLARFCRYLSLDDTDYCFPYLLVNKNLNSNLGHVVADAKGCLQLCLEEVANGLRNPVAMVHARDGTHRFFVAEQVGLVWAYLPDRSRLGKPFLNISRVVLTSPWEGDERGFLGIAFHPSFQHNRRLYVYYSVGIRSSEWIRISEFRVSEDDENAVDHSSERIILEVKEPASNHNGGQLLFGDDGYLYIFTGDGGMAGDPFGTFGNAQNKSALLGKVLRIDVDRKERGLPYGIPPDNPFVGDPAAQPEVYALGVRNMWRCSFDRGDPSSGTGRGRLFCGDVGQNKFEEVDVVERGGNYGWRAREGFECYDRSLCANTSLNDLLPIFAYPHTVGKSVTGGYVYRGCEYPNLNGLYIFGDFMSGRLMSLQENPGTGQWQYSEICMGHGQTCEFPGLINNYYPYIISFGEDEAGELYFMSTGEPSATAPRGVVYKIIDASSCKARSAMPGYVPAPSVCSSLTSQPFILQWWK

SEQ ID NO: 223951 - DNA, 1827 bp, Artificial Sequence
  derived and/or modified sequence
atggctagagcgagagctggcgcattgctggcactctgggttttaggggcagctgcccacccacagtgcctcgacttcagacccccattccgccctacccagccactgcggctttgcgctcagtactccgattttggctgctgcgatgagggcagagatgctgagcttacgagaaggttctgggccctcgcttctcgcgtcgacgccgctgaatgggctgcctgtgctgggtacgctcgcgatctgctgtgtcaggaatgtagcccctacgccgctcatctgtacgatgctgaggatccattcactccactgaggactgtgcccggactctgtcaggactactgtctcgatatgtggcataagtgccggggactgtttcgtcacctgagtacagatcaggaactctgggccttggaggggaatctcgcacgcttctgccgctacctcagcctcgatgataccgactactgcttcccctacctgctggtcaacaagaatttaaactccaatcttgggcacgtcgtggcggacgctaaaggctgcctgcagctatgcttggaggaggttgctaatggcctgcgtaatcccgtagctatggtgcacgccagagatgggactcaccggttcttcgtggctgaacaggtgggactcgtatgggcttacctgccggaccgatctcgactgggtaagccgttcctgaatattagtagggtggtcctgacttccccgtgggaaggcgatgagcgagggtttctggggatagcctttcacccttcattccagcacaacagaagactctatgtgtactacagcgtgggcatcagaagtagcgagtggatccggatatccgagtttagagtgtcagaggatgacgagaacgccgtcgatcattcaagcgagaggattattctggaagttaaagaacccgcatcaaatcataacgggggacagctcctattcggcgacgacggatatctgtacattttcaccggagatggaggcatggccggagacccctttggaacattcgggaatgcacagaataagtctgccctgctgggaaaagtgctgcgcatcgacgtggacagaaaggaacgcggactaccttacggaatccccccagataacccattcgtgggcgaccccgctgcacaacctgaagtgtatgctctgggtgtcaggaacatgtggagatgcagctttgatagaggggatccatcatccggcacaggaagaggacgacttttctgtggcgacgtgggacagaataagttcgaggaggtggacgtagtcgaaaggggaggtaattacggatggagagcacgcgaaggatttgagtgttacgaccgatcgctgtgcgctaacacctctttgaatgatctcttgcctattttcgcctacccacacacagtcgggaaaagtgtgactggaggctacgtgtaccgtggatgtgagtaccccaatctgaacggcctgtacattttcggggattttatgtcaggacggctgatgagcctacaggagaatcctggaaccggtcaatggcaatactccgaaatctgcatgggacatggccaaacatgcgaatttcctgggctcattaataattattacccttacatcatcagcttcggggaggatgaggccggtgaattgtattttatgtccactggtgaaccttctgccaccgcccctcggggtgttgtgtacaagatcatagacgcatcctcctgcaaggccagatcggccatgcccggatacgtgcctgcgcctagcgtatgctcctctttgacctctcagccatttatactacaatggtggaagtag

SEQ ID NO: 223952 - DNA, 1827 bp, Artificial Sequence
  derived and/or modified sequence
atggcccgggctcgggccggggctctacttgcactctgggtcttgggcgccgccgctcatcctcagtgcctggattttcgcccaccttttcgtccaacgcagccattgagactgtgcgctcagtattctgattttggatgctgcgacgagggccgcgacgctgagctaacgcgcagattctgggccttggcttcacgcgttgatgcagctgaatgggctgcgtgcgcaggctatgcgcgagacctactgtgtcaggaatgttcaccctacgccgctcatctttacgatgccgaagacccattcactccactccgcactgtaccaggcctgtgccaggattattgtctcgatatgtggcacaagtgccgcgggcttttccggcatctgtctactgatcaggaactttgggcccttgaaggcaacttagctcgattctgtaggtatctaagccttgatgatactgactattgtttcccctatctgctggtaaacaaaaatctgaatagtaacctcgggcacgtcgtcgcggacgccaagggctgtctacagttgtgcttggaagaagtagccaacggccttagaaaccccgtcgccatggttcacgcgcgggatggaacccatcgattctttgtggctgagcaggtgggcctggtgtgggcctatttacccgaccggagccgcctcgggaagccattccttaacatttcccgcgttgtcttgacgagcccctgggagggcgacgaacgcggcttcctcggaatcgcctttcatcccagtttccagcataataggcgcctgtacgtgtactactccgtcggcatacgctccagtgaatggatccggatctccgaattccgcgtgagcgaagacgacgagaacgctgtggatcattcttccgaacgcattatcctggaggtgaaggagcctgcttcgaaccataatggcggacagcttctcttcggcgacgacgggtatttatatatcttcactggagacggcgggatggcaggagacccattcggtaccttcggcaatgctcagaataaatctgctctcctgggaaaggtgttacgcattgatgttgatcgaaaagagcgaggactgccctacggaattcccccagataatcctttcgtgggcgaccctgccgctcagccagaggtgtacgccttaggagtacgcaacatgtggagatgctccttcgaccggggtgatcctagttcaggaactgggagaggccgacttttttgtggggacgtgggccagaacaagttcgaagaagtcgacgtagttgagaggggcggaaattatggatggcgggcaagagaaggcttcgagtgctatgaccgatctctatgcgccaacacatccttaaatgacctcctgcctatcttcgcttatcctcataccgtaggaaagtccgttaccgggggttatgtatacagaggttgtgagtatccaaacttgaacggtctgtatattttcggtgatttcatgtctggacggttaatgtctctgcaagagaacccgggcacaggacagtggcagtacagcgagatttgtatgggccacggacagacttgcgagttccctggtctgatcaataattattacccttacatcatctcttttggagaggatgaggccggggagctctacttcatgtcgactggcgaaccatctgcaaccgcaccacggggcgtggtttataaaataattgatgcctcttcctgcaaggctcgatccgcaatgccaggatatgtgccagcccctagcgtctgctcctccctcacctcccagccttttattctccagtggtggaagtag

SEQ ID NO: 223953 - DNA, 1827 bp, Artificial Sequence
  derived and/or modified sequence
atggccagagcacgcgccggagctctgcttgctctgtgggtgctgggtgcggccgcacacccgcagtgcttggatttccgacctcctttcagacccacacagcccctccgcctctgtgctcaatactcagattttgggtgctgcgacgagggacgggatgctgaacttaccaggagattctgggctctggcctcaagagtcgacgccgccgagtgggccgcttgcgctggatacgccagagatctactgtgccaggagtgtagtccttacgctgctcacctctatgatgccgaagacccttttacccctctgagaactgttcctggactatgccaagattactgcctcgacatgtggcacaaatgcaggggcttgttccgacatctctcaactgatcaggaactatgggcgcttgaagggaatttagctagattttgccggtacctttccctggacgatacggactattgttttccatacctgctggttaataaaaatctgaatagcaatctgggacacgttgtcgccgatgcgaagggctgtcttcaattatgtttagaagaggtggcaaatggtttaagaaatcccgttgctatggtacacgctcgtgatggaacccatagattctttgtagccgaacaagttgggttggtttgggcctacctaccggacaggtccaggcttggcaaacctttcctcaatatatcccgagtggtgctaacctccccttgggagggggacgagcgggggttcttgggcatcgcatttcacccctccttccagcataatcgtaggctgtacgtttattactctgtgggaatacggtcttccgagtggattagaattagtgagtttagagtatctgaagacgacgagaatgcagttgaccattcatcagagagaatcatacttgaggttaaggaaccggcttcaaatcacaatggaggccaactcctgttcggtgatgacgggtatctctacatcttcacaggagatggcggaatggctggagaccctttcggaacattcggtaatgctcagaataagtcagccctgcttggtaaagtgttgagaattgacgtcgataggaaggagaggggtctaccttacggtatcccgccagataacccctttgtaggcgatccggcagcccagcctgaagtctacgcattgggcgtgagaaatatgtggcgttgctccttcgacaggggagacccttcttctggcacgggacgcggacgcctgttttgtggagacgttgggcagaataagttcgaagaagttgatgttgttgagagaggtggtaattacggctggcgcgcaagggaaggatttgaatgctatgatagaagcttatgcgctaacactagtctgaacgatctgttgcctatatttgcctacccacacaccgtggggaaatccgttactggaggttacgtttatagaggctgtgagtacccaaacctgaatggcctgtacatattcggggacttcatgtctgggcgccttatgagtttacaggaaaaccctggcacgggccagtggcagtattccgagatttgcatgggccatggacagacgtgcgaatttcccggccttataaacaattattacccatatatcatctcattcggggaagacgaggccggagaactctattttatgtcaaccggggaacccagcgctaccgccccaagaggcgtcgtgtataagattattgacgcgtcctcctgcaaagcacgttcagccatgccaggatatgtacccgctccctccgtttgttcttcactcaccagtcagccctttatattgcaatggtggaaatag

SEQ ID NO: 223954 - DNA, 1827 bp, Artificial Sequence
  derived and/or modified sequence
atggccagagccagagccggcgccctgctggccctgtgggtgctgggcgccgccgcccacccccagtgcctggacttcagaccccccttcagacccacccagcccctgagactgtgcgcccagtacagcgacttcggctgctgcgacgagggcagagacgccgagctgaccagaagattctgggccctggccagcagagtggacgccgccgagtgggccgcctgcgccggctacgccagagacctgctgtgccaggagtgcagcccctacgccgcccacctgtacgacgccgaggaccccttcacccccctgagaaccgtgcccggcctgtgccaggactactgcctggacatgtggcacaagtgcagaggcctgttcagacacctgagcaccgaccaggagctgtgggccctggagggcaacctggccagattctgcagatacctgagcctggacgacaccgactactgcttcccctacctgctggtgaacaagaacctgaacagcaacctgggccacgtggtggccgacgccaagggctgcctgcagctgtgcctggaggaggtggccaacggcctgagaaaccccgtggccatggtgcacgccagagacggcacccacagattcttcgtggccgagcaggtgggcctggtgtgggcctacctgcccgacagaagcagactgggcaagcccttcctgaacatcagcagagtggtgctgaccagcccctgggagggcgacgagagaggcttcctgggcatcgccttccaccccagcttccagcacaacagaagactgtacgtgtactacagcgtgggcatcagaagcagcgagtggatcagaatcagcgagttcagagtgagcgaggacgacgagaacgccgtggaccacagcagcgagagaatcatcctggaggtgaaggagcccgccagcaaccacaacggcggccagctgctgttcggcgacgacggctacctgtacatcttcaccggcgacggcggcatggccggcgaccccttcggcaccttcggcaacgcccagaacaagagcgccctgctgggcaaggtgctgagaatcgacgtggacagaaaggagagaggcctgccctacggcatcccccccgacaaccccttcgtgggcgaccccgccgcccagcccgaggtgtacgccctgggcgtgagaaacatgtggagatgcagcttcgacagaggcgaccccagcagcggcaccggcagaggcagactgttctgcggcgacgtgggccagaacaagttcgaggaggtggacgtggtggagagaggcggcaactacggctggagagccagagagggcttcgagtgctacgacagaagcctgtgcgccaacaccagcctgaacgacctgctgcccatcttcgcctacccccacaccgtgggcaagagcgtgaccggcggctacgtgtacagaggctgcgagtaccccaacctgaacggcctgtacatcttcggcgacttcatgagcggcagactgatgagcctgcaggagaaccccggcaccggccagtggcagtacagcgagatctgcatgggccacggccagacctgcgagttccccggcctgatcaacaactactacccctacatcatcagcttcggcgaggacgaggccggcgagctgtacttcatgagcaccggcgagcccagcgccaccgcccccagaggcgtggtgtacaagatcatcgacgccagcagctgcaaggccagaagcgccatgcccggctacgtgcccgcccccagcgtgtgcagcagcctgaccagccagcccttcatcctgcagtggtggaagtag

SEQ ID NO: 223955 - DNA, 1827 bp, Artificial Sequence
  derived and/or modified sequence
atggcacgagcccgggcgggagccttacttgccctgtgggtcctaggcgcagcagcacatcctcagtgcttggacttccgcccaccttttcgtccaactcagcccctgagactttgtgctcagtatagtgacttcggatgttgtgatgagggtcgcgatgccgagctcacacgacgattttgggctctggcgtcgcgggtggatgccgctgaatgggctgcttgtgccggttatgcaagggacctgctgtgccaagaatgctctccctatgccgctcacctgtacgatgctgaggatccatttactccactgcgcaccgtgcctggtttatgtcaggattattgcctggacatgtggcacaaatgtcgcggactgtttcggcacctctcaacggaccaggaactttgggccttggaaggtaacctcgccagattttgtcgctacctttccctggatgacaccgactattgctttccctacctgctcgttaacaaaaatctgaactctaatctgggacacgtcgtcgccgatgccaaaggctgcctccagttgtgcttagaagaagtggctaacggcttgagaaaccccgtggccatggtgcacgcccgagacggcacccatcgtttttttgtcgcggagcaagtgggtctcgtgtgggcctaccttccagacagatcgcgacttggaaaacccttcctgaacataagccgggtagtgctcacctcaccttgggagggcgacgaaaggggctttttggggatcgcatttcatccatctttccagcataacaggcggctatacgtatactacagcgtcggcatccgctcatctgaatggatccgcatctctgaatttcgcgtttcagaggacgatgaaaacgcagtagaccacagctctgaacgcatcatactggaggtgaaggaaccagcctctaatcataatgggggacagctgcttttcggagatgacggctatctgtatatcttcacgggagacggcggaatggctggggacccttttggaacctttggcaacgcccagaacaagagtgccttgttagggaaagtacttaggattgatgtggatagaaaagagaggggcctcccctacgggatcccgcctgacaacccgtttgttggagaccccgctgctcagcctgaggtgtacgctttgggtgtcagaaacatgtggagatgctcattcgaccgtggagatccttcctccggcacaggcagagggcggctattttgtggcgacgtgggccaaaataagtttgaggaggtggacgtagtagagaggggaggcaactatgggtggagggcccgcgagggatttgagtgttatgataggtcgctgtgtgcaaatacaagcttgaacgacctactacctatttttgcctatccacacaccgtgggtaaaagcgtgaccggtggttacgtctatcggggatgcgaatacccgaatctgaacggcctctacatattcggagatttcatgtcaggtcggctgatgtcgcttcaggaaaaccctggcaccggccagtggcagtattcagaaatttgcatgggacatgggcaaacttgcgagttccccggtctcatcaataactattacccctatattatttcttttggtgaggacgaggccggcgagttgtacttcatgtccacaggagaacccagcgctaccgccccacgaggtgtggtatataaaattatagatgcttcctcctgcaaggcgcggtcagccatgcctgggtacgttccagcaccctcagtctgctcgtcactgaccagccagcccttcattttacaatggtggaagtag

SEQ ID NO: 223956 - DNA, 2241 bp, Artificial Sequence
  derived and/or modified sequence
cgcgagcgccccgggaggggaccggggctgccgtccctccgcctcttcccccgcggggcgtagcgatggcccgggccagggccggggcgctgctggcgctttgggtgctcggggccgccgcgcatccgcagtgcctggacttcaggccgcccttccggccgacgcagccgctgcgcctctgcgcgcagtactcggacttcggctgctgcgatgaggggcgcgacgccgagctgacccgccgcttctgggccctggcgagccgcgtggacgccgccgagtgggccgcgtgcgccggctacgcgagggacctgctgtgccaggaatgctcgccgtatgcagcccacctctatgacgccgaggacccattcacgcccctgcgcacggtgcccgggctctgccaggattactgcctggacatgtggcataagtgccgggggctgttccgtcacctgtcaactgaccaggagctctgggcgctggagggcaaccttgccaggttctgccgctacctgtccctggatgacacggactactgcttcccttacctgctggtcaacaagaacctcaactcaaacctgggccacgtggtagccgatgccaagggctgcctgcagctgtgcctggaggaggtggccaacgggctgcgcaaccccgtggccatggtccatgccagggatggcacccaccgcttcttcgtggccgagcaggtggggctggtgtgggcctacctgcccgaccgctcgaggctggggaagcctttcctgaacatcagccgggtggtgctcacctcgccctgggagggtgacgagcgtggcttcctgggcattgccttccaccccagcttccagcacaaccgcaggctctacgtctactactcagtgggtatccgcagcagtgagtggatccgcatcagcgagttcagagtctccgaggatgacgagaacgccgtggaccacagctctgagaggataatcctggaggtcaaagaaccagcctcaaaccacaacgggggccagctgcttttcggggatgacgggtacctctacatcttcactggagatggcgggatggccggagacccctttgggacatttggaaatgcccaaaacaagtcggcgctgctgggcaaggtgctgcgcatcgacgtggaccgtaaggagcgcggcctgccctacggcatcccgcccgacaacccgttcgtgggcgaccccgcggcgcagcccgaggtctacgccctgggcgtgcgcaacatgtggcgctgctccttcgaccgtggcgacccctcctcgggcactggccgcgggcgcctcttctgcggcgacgtgggccagaacaagttcgaggaggtggacgtggtggagcgcggcggcaactatggctggcgcgcgcgcgaagggttcgagtgctacgaccgcagcctgtgcgccaacacctctctcaatgacttgctgccgattttcgcctacccgcacacggttggcaagtcggtcacagggggctacgtgtaccggggctgcgagtaccccaacctgaacggcctctacatttttggggatttcatgagcgggcgtctgatgtccctccaagagaacccagggacaggccagtggcagtacagtgagatctgcatgggccacggccagacctgtgagttcccaggcctcatcaacaactactacccgtacatcatctccttcggggaggacgaggccggggagctgtacttcatgtcgacaggggagccgagtgccacagctccacgcggagttgtctacaaaataattgacgcatccagctgtaaggccagaagcgccatgcccggctatgtcccagctccttccgtgtgcagctcattgacgtctcagccgttcattttacagtggtggaaatgagcacaaagacacgaagtcatgggcctggggcccagggccagggtggggcccaggccactggctccagagccctgccctaaccccttggctgtgtgccttcacctcaccctcttcaagcaccttccccaacccacgttgccctccaggcctctgtccagcccttcctcagctctcatcactcagacttggtaatccctgggctacacgactgactctctcccagctgctctgggagtctcagggccaagcctgtatctcttcactctgcagaggccgcccaggtgctgggaatggcacggagcagagactcaggaacacttgatgaataaatgagtgatcagctttctaa

SEQ ID NO: 223957 - DNA, 1827 bp, Artificial Sequence
  derived and/or modified sequence
atggcccgggcccgggccggggccctgctggccctgtgggtgctgggcgccgccgcccacccccagtgcctggacttccggccccccttccggcccacccagcccctgcggctgtgtgcccagtacagcgactttggctgctgtgatgagggcagagatgctgagctgacccggcgcttctgggccctggccagccgggtggatgctgctgagtgggccgcctgtgccggctacgcccgggacctgctgtgccaggagtgcagcccctatgctgcccacctgtatgatgctgaggaccccttcacccccctgaggacagtgcccggcctgtgccaggactactgcctggacatgtggcacaagtgccggggcctcttccgccacctgagcacagaccaggagctgtgggccctggagggcaacctggcccgcttctgccgctacctgagcctggatgacacagactactgcttcccctacctgctggtgaacaagaacctgaacagcaacctgggccacgtggtggctgatgccaagggctgcctgcagctgtgcctggaggaggtggccaacggcctgaggaaccctgtggccatggtgcacgccagagatggcacccaccgcttctttgtggccgagcaggtgggcctggtgtgggcctacctgcctgacaggagccggctgggcaagcccttcctgaacatcagccgggtggtgctgaccagcccctgggagggagatgagcggggcttcctgggcatcgccttccaccccagcttccagcacaacagaaggctgtatgtgtactacagcgtgggcatccgcagcagcgagtggatccgcatcagcgagttccgggtgtctgaagatgatgaaaatgctgtggaccacagcagcgagcgcatcatcctggaggtgaaggagcccgccagcaaccacaacggcggccagctgctgtttggagatgatggctacctgtacatcttcaccggagatggcggcatggccggggaccccttcggcacctttggaaatgcccagaacaagagcgccctgctgggcaaggtgctgagaattgatgtggacaggaaggagcggggcctgccctacggcatccccccagacaacccctttgtgggggaccctgctgcccagcctgaggtgtatgccctgggcgtgaggaacatgtggcgctgcagctttgacagaggagaccccagcagcggcaccggccggggccgcctcttctgtggagatgtgggccagaacaagtttgaggaggtggatgtggtggagcggggcggcaactacggctggagggcccgggagggctttgagtgctatgacaggagcctgtgtgccaacaccagcctgaatgacctgctgcccatctttgcctacccccacacagtgggcaagtctgtgactggaggctacgtgtaccggggctgtgagtaccccaacctgaatggcctgtacatctttggagacttcatgagcggccgcctgatgagcctgcaggagaaccctggcaccggccagtggcagtacagcgagatctgcatgggccacggccagacctgtgagttccctggcctcatcaacaactactacccctacatcatcagctttggagaagatgaagctggggagctgtacttcatgagcactggagagcccagcgccacagccccccggggcgtggtgtacaagatcattgatgccagcagctgcaaggcccggagcgccatgcctggctacgtgcctgcccccagcgtgtgcagcagcctgaccagccagcccttcatcctgcagtggtggaagtag

SEQ ID NO: 223958 - DNA, 1827 bp, Artificial Sequence
  derived and/or modified sequence
atggcccgggcccgggccggcgccctgctggccctgtgggtgctgggcgctgctgcccacccgcagtgcctggactttagacctccctttcgccccacgcagcccctgcgtctgtgcgctcagtattctgactttggctgctgtgacgagggccgtgatgccgagttgacccgaagattttgggcactggccagtcgtgtggacgcagcagagtgggccgcatgtgcggggtatgcccgggaccttctttgccaggaatgcagtccttacgctgctcatctctacgacgccgaagacccatttaccccccttagaaccgtgccagggttatgtcaagactattgccttgacatgtggcacaagtgtagaggattgtttcgtcatctgtctacagaccaggaattatgggcactcgagggtaacctggctcgtttctgcagatacctgtccctggatgacacggattactgctttccatatctgctcgttaacaagaacctaaactctaacctgggccacgtggtggctgatgctaaagggtgtctgcaactgtgcctagaggaggtagccaacggtctgagaaatccagtggccatggtacacgcccgtgacggaactcatagattctttgtggcagaacaagtggggctagtctgggcataccttccggatagaagtcgcttaggaaaacccttcctaaacattagcagagtcgttttgacgtctccctgggaaggcgacgaaaggggtttcctgggcattgcgttccacccttctttccagcacaaccgccggctgtacgtttactatagcgttgggattcggtcttctgagtggatcagaatttcagaatttcgggtcagtgaggatgatgaaaacgccgttgaccattcgtccgaacgcattattctggaggtgaaggagccagcctccaatcacaatgggggacagttgctctttggagatgacggttacttatacatctttaccggcgacggcggcatggccggggaccccttcggtacattcgggaatgcccagaacaaatcagccctgctgggtaaagtgctacggatcgacgtggatcgcaaggaaaggggcctcccctatgggatcccccccgacaaccccttcgtgggcgaccccgcagcccagccagaggtttacgctctaggagttaggaacatgtggagatgttcctttgatcgcggagatccaagctccggaaccggccgcggccggttgttttgcggagacgtcgggcagaataagtttgaagaggtagacgtagtggagagagggggcaattacggatggcgggccagggagggattcgaatgttacgataggtccctgtgtgccaatacctccctgaatgatctgctgcccatattcgcttaccctcataccgtggggaaatccgtcaccggaggctatgtgtataggggttgcgagtatccaaacctcaacggactctacatctttggggactttatgagtggacggctgatgtccctacaggagaatccgggcaccggccaatggcaatatagcgaaatatgtatgggccacggccagacttgcgagtttccaggcctgattaacaattattatccatacattatctcctttggggaagacgaggccggcgagctatacttcatgagcacaggcgagccctctgctaccgctcctcggggagtggtgtacaaaattattgacgcatcttcatgtaaggctagatcagctatgccaggatacgtccccgctccttccgtgtgctcaagcctgacatcgcagccattcattcttcagtggtggaagtag

SEQ ID NO: 223959 - RNA, 1827 nt, Artificial Sequence
  derived and/or modified sequence
auggcccgggcucgggccggggcucuacuugcacucugggucuugggcgccgccgcucauccucagugccuggauuuucgcccaccuuuucguccaacgcagccauugagacugugcgcucaguauucugauuuuggaugcugcgacgagggccgcgacgcugagcuaacgcgcagauucugggccuuggcuucacgcguugaugcagcugaaugggcugcgugcgcaggcuaugcgcgagaccuacugugucaggaauguucacccuacgccgcucaucuuuacgaugccgaagacccauucacuccacuccgcacuguaccaggccugugccaggauuauugucucgauauguggcacaagugccgcgggcuuuuccggcaucugucuacugaucaggaacuuugggcccuugaaggcaacuuagcucgauucuguagguaucuaagccuugaugauacugacuauuguuuccccuaucugcugguaaacaaaaaucugaauaguaaccucgggcacgucgucgcggacgccaagggcugucuacaguugugcuuggaagaaguagccaacggccuuagaaaccccgucgccaugguucacgcgcgggauggaacccaucgauucuuuguggcugagcaggugggccuggugugggccuauuuacccgaccggagccgccucgggaagccauuccuuaacauuucccgcguugucuugacgagccccugggagggcgacgaacgcggcuuccucggaaucgccuuucaucccaguuuccagcauaauaggcgccuguacguguacuacuccgucggcauacgcuccagugaauggauccggaucuccgaauuccgcgugagcgaagacgacgagaacgcuguggaucauucuuccgaacgcauuauccuggaggugaaggagccugcuucgaaccauaauggcggacagcuucucuucggcgacgacggguauuuauauaucuucacuggagacggcgggauggcaggagacccauucgguaccuucggcaaugcucagaauaaaucugcucuccugggaaagguguuacgcauugauguugaucgaaaagagcgaggacugcccuacggaauucccccagauaauccuuucgugggcgacccugccgcucagccagagguguacgccuuaggaguacgcaacauguggagaugcuccuucgaccggggugauccuaguucaggaacugggagaggccgacuuuuuuguggggacgugggccagaacaaguucgaagaagucgacguaguugagaggggcggaaauuauggauggcgggcaagagaaggcuucgagugcuaugaccgaucucuaugcgccaacacauccuuaaaugaccuccugccuaucuucgcuuauccucauaccguaggaaaguccguuaccggggguuauguauacagagguugugaguauccaaacuugaacggucuguauauuuucggugauuucaugucuggacgguuaaugucucugcaagagaacccgggcacaggacaguggcaguacagcgagauuuguaugggccacggacagacuugcgaguucccuggucugaucaauaauuauuacccuuacaucaucucuuuuggagaggaugaggccggggagcucuacuucaugucgacuggcgaaccaucugcaaccgcaccacggggcgugguuuauaaaauaauugaugccucuuccugcaaggcucgauccgcaaugccaggauaugugccagccccuagcgucugcuccucccucaccucccagccuuuuauucuccagugguggaaguag

SEQ ID NO: 223960 - RNA, 1827 nt, Artificial Sequence
  derived and/or modified sequence
auggccagagcacgcgccggagcucugcuugcucugugggugcugggugcggccgcacacccgcagugcuuggauuuccgaccuccuuucagacccacacagccccuccgccucugugcucaauacucagauuuugggugcugcgacgagggacgggaugcugaacuuaccaggagauucugggcucuggccucaagagucgacgccgccgagugggccgcuugcgcuggauacgccagagaucuacugugccaggaguguaguccuuacgcugcucaccucuaugaugccgaagacccuuuuaccccucugagaacuguuccuggacuaugccaagauuacugccucgacauguggcacaaaugcaggggcuuguuccgacaucucucaacugaucaggaacuaugggcgcuugaagggaauuuagcuagauuuugccgguaccuuucccuggacgauacggacuauuguuuuccauaccugcugguuaauaaaaaucugaauagcaaucugggacacguugucgccgaugcgaagggcugucuucaauuauguuuagaagagguggcaaaugguuuaagaaaucccguugcuaugguacacgcucgugauggaacccauagauucuuuguagccgaacaaguuggguugguuugggccuaccuaccggacagguccaggcuuggcaaaccuuuccucaauauaucccgaguggugcuaaccuccccuugggagggggacgagcggggguucuugggcaucgcauuucaccccuccuuccagcauaaucguaggcuguacguuuauuacucugugggaauacggucuuccgaguggauuagaauuagugaguuuagaguaucugaagacgacgagaaugcaguugaccauucaucagagagaaucauacuugagguuaaggaaccggcuucaaaucacaauggaggccaacuccuguucggugaugacggguaucucuacaucuucacaggagauggcggaauggcuggagacccuuucggaacauucgguaaugcucagaauaagucagcccugcuugguaaaguguugagaauugacgucgauaggaaggagaggggucuaccuuacgguaucccgccagauaaccccuuuguaggcgauccggcagcccagccugaagucuacgcauugggcgugagaaauauguggcguugcuccuucgacaggggagacccuucuucuggcacgggacgcggacgccuguuuuguggagacguugggcagaauaaguucgaagaaguugauguuguugagagaggugguaauuacggcuggcgcgcaagggaaggauuugaaugcuaugauagaagcuuaugcgcuaacacuagucugaacgaucuguugccuauauuugccuacccacacaccguggggaaauccguuacuggagguuacguuuauagaggcugugaguacccaaaccugaauggccuguacauauucggggacuucaugucugggcgccuuaugaguuuacaggaaaacccuggcacgggccaguggcaguauuccgagauuugcaugggccauggacagacgugcgaauuucccggccuuauaaacaauuauuacccauauaucaucucauucggggaagacgaggccggagaacucuauuuuaugucaaccggggaacccagcgcuaccgccccaagaggcgucguguauaagauuauugacgcguccuccugcaaagcacguucagccaugccaggauauguacccgcucccuccguuuguucuucacucaccagucagcccuuuauauugcaaugguggaaauag

SEQ ID NO: 223961 - protein, 1156 aa, Artificial Sequence
  derived and/or modified sequence
MGDTAPPQAPAGGLGGASGAGLLGGGSVTPRVHSAIVERLRARIAVCRQHHLSCEGRYERGRAESSDRERESTLQLLSLVQHGQGARKAGKHTKATATAATTTAPPPPPAAPPAASQAAATAAPPPPPDYHHHHQQHLLNSSNNGGSGGINGEQQPPASTPGDQRNSALIALQGSLKRKQVVNLSPANSKRPNGFVDNSFLDIKRIRVGENLSAGQGGLQINNGQSQIMSGTLPMSQAPLRKTNTLPSHTHSPGNGLFNMGLKEVKKEPGETLSCSKHMDGQMTQENIFPNRYGDDPGEQLMDPELQELFNELTNISVPPMSDLELENMINATIKQDDPFNIDLGQQSQRSTPRPSLPMEKIVIKSEYSPGLTQGPSGSPQLRPPSAGPAFSMANSALSTSSPIPSVPQSQAQPQTGSGASRALPSWQEVSHAQQLKQIAANRQQHARMQQHQQQHQPTNWSALPSSAGPSPGPFGQEKIPSPSFGQQTFSPQSSPMPGVAGGSGQSKVMANYMYKAGPSAQGGHLDVLMQQKPQDLSRSFINNPHPAMEPRQGNTKPLFHFNSDQANQQMPSVLPSQNKPSLLHYTQQQQQQQQQQQQQQQQQQQQQQQQQQQQQQQQQQSSISAQQQQQQQSSISAQQQQQQQQQQQQQQQQQQQQQQQQQQQPSSQPAQSLPSQPLLRSPLPLQQKLLLQQMQNQPIAGMGYQVSQQQRQDQHSVVGQNTGPSPSPNPCSNPNTGSGYMNSQQSLLNQQLMGKKQTLQRQIMEQKQQLLLQQQMLADAEKIAPQDQINRHLSRPPPDYKDQRRNVGNMQPTAQYSGGSSTISLNSNQALANPVSTHTILTPNSSLLSTSHGTRMPSLSTAVQNMGMYGNLPCNQPNTYSVTSGMNQLTQQRNPKQLLANQNNPMMPRPPTLGPSNNNNVATFGAGSVGNSQQLRPNLTHSMASMPPQRTSNVMITSNTTAPNWASQEGTSKQQEALTSAGVRFPTGTPAAYTPNQSLQQAVGSQQFSQRAVAPPNQLTPAVQMRPMNQMSQTLNGQTMGPLRGLNLRPNQLSTQILPNLNQSGTGLNQSRTGINQPPSLTPSNFPSPNQSSRAFQGTDHSSDLAFDFLSQQNDNMGPALNSDADFIDSLLKTEPGNDDWMKDINLDEILGNNS

SEQ ID NO: 223962 - DNA, 3471 bp, Artificial Sequence
  derived and/or modified sequence
atgggtgatactgcgcccccacaagctcccgccggtggtctggggggggcttctggtgccgggcttttgggaggaggctcagtaacccccagggtacatagtgccatcgtggagcgtctgagagcacggatagctgtgtgtaggcagcatcatctctcttgtgaagggcggtacgagagagggcgagccgagagctctgatcgggagcgtgagtccactcttcagctgctgtccctagtgcagcacggtcagggcgctaggaaggctgggaagcacactaaagccactgcgacggccgccacaaccacagccccacccccgccgccagctgcgcccccagcggctagtcaggcggccgctactgccgcaccaccccctccacctgattaccaccaccaccatcagcagcatctgcttaattcaagtaacaatggcggctcaggagggatcaacggagagcagcagccccccgcttcgacccccggcgaccaacgaaactcggcccttattgccctgcaagggtctctgaaacggaagcaagtggtgaacttaagcccagcaaattccaagcgacctaatgggttcgttgataatagcttcttagatatcaaaagaattcgggtgggggaaaacttgtcggctgggcagggcggattgcaaattaataacggccagagccagatcatgtccggaacgcttcccatgagccaggcaccgctgcgcaagacgaacactcttccttcacacacccattcacctggtaacgggctttttaatatgggtttgaaggaagtcaagaaggagccgggcgagacgctgtcctgctctaagcacatggacggacaaatgacccaggagaacatttttcccaatcgctatggtgatgacccaggcgagcagttaatggatcctgaactgcaggagcttttcaacgagcttacaaatatcagcgtcccacccatgtccgatttggagctcgaaaatatgataaacgccaccatcaagcaggatgatccatttaatatcgatctcggtcagcagtcccaacgatctacacctaggccgagtcttcctatggagaaaatagtcataaaaagcgaatatagccccggactcacccagggcccgtccggatcaccacagctgcgccctccttctgcagggcccgctttttccatggccaattccgccctgtcaacaagtagcccaattccctctgtgcctcagtcacaagcacagccacagaccggttcaggagcctcccgcgcacttcctagctggcaagaagtcagtcacgcccagcagctgaaacagattgcagctaaccgccaacaacacgcccgcatgcagcaacatcaacagcagcatcaacccaccaattggtcagccctgccgtcgagcgcagggccgagcccaggaccattcggacaggagaaaatcccaagccccagttttggacagcagacattctctccacagagttcaccaatgcccggtgtggcaggaggtagtggccaatctaaagttatggccaactacatgtacaaggccggacccagtgcacaagggggtcatctggatgtcttgatgcagcagaaaccacaagatttgagtcggtccttcattaacaatccacaccctgctatggagcctaggcaggggaacaccaagccattgtttcacttcaactcggaccaggccaaccagcagatgccttcagtcttacctagccagaacaaaccaagtttattgcattacacccagcagcagcagcagcagcagcagcagcagcagcagcagcagcaacagcagcagcaacagcaacaacagcagcagcagcagcagcaacagcagcagcagcagtcctccatcagcgcccagcagcagcagcagcagcagtcctccatcagcgcccagcagcagcaacaacaacaacagcagcagcagcaacagcagcaacagcagcagcagcaacagcagcaacagcagcaacagccctcgagtcagcctgcacaaagcctgccttcccaacctctgctgcgttcccctctgccgttacagcaaaaactcctgctgcagcagatgcaaaatcaaccaattgcagggatgggatatcaggtaagtcaacaacagagacaggatcaacacagcgtggtcgggcaaaacactggaccatccccttcacccaacccttgttctaatccaaatactggatctggctacatgaactcacaacagagccttctaaaccagcagctcatggggaaaaaacagaccctacagcgacagattatggaacagaagcaacagctactgcttcagcagcagatgttggcagacgctgagaagattgccccgcaagaccagatcaatagacacctgtcacgacccccccccgattacaaggaccagcggcgcaacgttggcaacatgcagcccactgcccagtactccgggggatcttctaccatctccttgaactcaaaccaggccctagcaaatcccgtgtcaacgcatactattctgaccccgaatagttccttattatcaacctcccatggcacccgcatgccttccctcagtactgctgtgcagaacatgggcatgtatggtaacctgccctgcaatcagccaaacacctattccgtgacatccgggatgaatcagctgacacaacagagaaacccgaagcaactgctggccaaccaaaacaaccccatgatgccgagacctccaacactcggcccaagcaataacaataatgtcgcaacgttcggggccggaagtgtggggaactctcagcagctgcgaccgaacctcacgcacagcatggcctccatgcctccgcaaagaacctcaaacgtgatgattacttcaaacacaaccgcaccaaattgggcttcacaagaaggaacaagcaaacagcaggaagccttaaccagcgccggagtgagatttcctacaggcaccccagcagcttacacaccgaatcagtcccttcagcaagctgtaggaagccagcagtttagccagcgggctgtggccccccccaaccagcttacccccgctgtgcagatgagacctatgaatcaaatgagccaaactctaaacggccagaccatgggcccactgagagggctcaatttgagaccgaaccagctgtctacccagatcctgcctaaccttaatcagagcggcaccggtctaaaccagtcccgaaccggtatcaatcaacccccatctctcactccatcgaacttcccttcgccaaatcagtcatcacgagcatttcagggaacagatcactctagcgatttagctttcgattttctctctcagcagaatgataacatgggacctgctctcaacagtgacgccgattttattgacagcctgttaaagacagagcccggaaatgatgattggatgaaagatatcaatctggatgaaatcttagggaataatagctag

SEQ ID NO: 223963 - DNA, 3471 bp, Artificial Sequence
  derived and/or modified sequence
atgggagacaccgcaccacctcaagcaccagccggcggccttggtggcgcctccggtgccggccttctggggggaggatcggtaactccaagagttcactctgcaattgttgagagactcagggccaggattgctgtctgtaggcagcatcacttatcttgcgaaggtaggtacgaaaggggcagggccgaaagctctgaccgcgaacgcgaatccacacttcagctcctttcgctcgtgcaacacggacaaggcgccagaaaggccggcaagcacaccaaggctacagcgacagccgctacaacaactgcacctccaccaccaccagcagcgccaccagctgcttctcaggccgcagcgaccgccgcccctccgcctccaccagactaccaccaccatcaccagcagcatctgcttaatagttccaacaatggaggctctggtggtatcaatggagaacagcagccaccggcatcaacacctggagaccaaagaaactccgcgctcattgcgctgcagggtagcctgaagcgtaaacaggtcgtaaacctgtcacccgcgaattctaagaggcccaatggcttcgtagataatagctttctagacattaagagaattcgtgttggcgaaaacttgtccgctgggcagggtggacttcagatcaacaatggtcaatcacagatcatgagcggcactctccccatgagccaggccccactgaggaagactaatactctaccgtcacacacccacagtcccggtaatggcctgttcaatatgggcctgaaagaagtgaagaaagagcccggcgagaccctgtcttgtagcaagcatatggatggtcagatgacccaggaaaacatcttcccaaatcgctatggtgacgatccgggcgaacagctgatggacccggagttgcaggaactcttcaacgagctgacaaacattagcgttccccctatgtccgaccttgaactggaaaacatgataaatgctaccattaaacaggacgaccccttcaacatcgatctcggtcagcagtcccagcggagcacacctcgcccctcactgcccatggagaaaatcgtgattaaaagcgaatactcccccgggctgactcagggcccaagtggctcacctcagctgagacctccaagcgccggacccgccttctcaatggctaatagcgccctttccacctcctcacctatcccatcagtcccccaatcccaagctcagccccaaacaggctctggggcatctcgagccctgcctagctggcaggaagtgtcacacgcacagcagctaaagcagattgcggctaatagacagcagcacgctcgcatgcaacaacaccagcaacaacaccagcccacaaactggtcagctctgcccagtagtgctggcccaagcccaggccccttcggccaggaaaagataccgagcccaagcttcggccagcaaactttcagccctcagagttccccaatgccaggcgtagccgggggaagcggccaaagcaaagtgatggccaactacatgtataaagctggaccaagtgctcagggcggccacctcgacgtgcttatgcagcagaaacctcaggatctgtctcggagttttattaataacccgcacccagccatggaaccaaggcaaggcaatacgaagcccttattccatttcaactctgaccaagctaaccagcaaatgcctagcgtccttccatcccagaataagccctcactattacattacacacaacagcagcagcagcagcagcaacaacaacagcagcaacaacagcagcagcagcagcagcagcagcagcagcagcagcagcaacagcaacagcagcagcagtcgtccattagcgcccagcagcagcagcagcagcagtcatcaatctctgctcagcagcagcagcagcagcagcaacagcagcaacagcaacagcagcaacagcaacagcaacagcagcagcagcaacagcaaccaagttcccaacccgcacagtcacttccttcccagcccttgttacggagccctttgccattacagcagaagctcctgctgcagcagatgcagaaccagccaatagccgggatgggttatcaagtgtctcagcagcaaagacaggaccaacactccgtcgtaggccagaatactggtccctcacctagtccaaatccttgctccaacccaaatactggatccggttacatgaactcacagcagtctctactgaaccagcagctgatgggtaagaagcaaaccctccagaggcagattatggaacaaaagcagcagctgctgctgcagcagcagatgttggccgatgcagagaagatcgccccgcaggatcaaattaacaggcacctgagcagaccgcccccggattataaagaccaacgacggaacgtaggtaacatgcaacctactgcacaatatagcggcggatcctcaaccatcagccttaactccaaccaggcactagcgaatcctgtaagcacgcacactatcctgactccaaattctagtctgctgtctacctctcatggcactcgaatgcctagtctcagtactgccgtgcagaatatgggaatgtatgggaatctgccctgtaaccagcccaatacgtactcagtcacatcaggtatgaatcagttaacccagcagcggaatccgaaacaactgctggctaaccaaaacaatccaatgatgcccaggccacccacactaggcccaagcaataacaacaatgtcgcaacctttggtgccggctccgtcggtaattcccagcagctacgccccaaccttacccatagtatggcctccatgcccccacagcggacctcaaacgtgatgatcaccagtaacaccacagccccaaactgggctagtcaagagggtacatcaaagcagcaggaagcactcacctccgccggcgttcggtttccaaccggtacccccgccgcttatacgccaaaccagtctctccagcaggccgtgggatcacagcagttctcacagagggcagtcgctccccctaatcagcttactcctgctgtccagatgcgtccaatgaatcagatgagtcagacgctgaatggtcagaccatgggcccccttcggggattaaacctgcgcccaaatcaactgagtacccagatattacccaatctaaaccagtcaggcactgggttgaatcaaagccgcacagggattaatcagcccccttcactaacacccagcaacttcccatcaccaaatcaaagcagtagagcgtttcaaggtaccgaccactcatccgatctcgcgttcgatttcctttcccaacagaatgacaacatgggcccggcactcaactccgacgccgatttcatcgatagcctgttgaagacagaacctggaaatgacgattggatgaaagacatcaatctcgacgagatacttggcaataacagctag

SEQ ID NO: 223964 - DNA, 3471 bp, Artificial Sequence
  derived and/or modified sequence
atgggagacacagccccaccccaggccccagctgggggcctgggcggggccagcggggccggcctgctgggcggcggctctgtgaccccccgggtgcacagcgccatcgtggagcggctgcgggccagaattgctgtgtgccggcagcaccacctgagctgtgagggccgctatgaaagaggccgggcagagagcagtgaccgggagcgggagagcaccctgcagctgctgagcctggtgcagcacggccagggcgccaggaaggccggcaagcacaccaaggccacagccacagctgccaccaccacagcccctcctcctcctcctgctgcccccccagctgccagccaggccgccgccacagctgcccctcctcctcctccagactaccaccaccaccaccagcagcacctgctgaacagcagcaacaacggcggcagcggcggcatcaatggagagcagcagcccccagccagcacccctggggaccagagaaattctgccctgattgccctgcagggcagcctgaagaggaagcaggtggtgaacctgagccctgccaacagcaagaggcccaatggatttgtggacaacagcttcctggacatcaagaggatccgggtgggggagaacctgtctgctggccagggcggcctgcagatcaacaacggccagagccagatcatgagcggcaccctgcccatgagccaggcccccctgaggaagaccaacaccctgcccagccacacccacagccctggaaatggcctcttcaacatgggcctgaaggaggtgaagaaggagcctggagagaccctgagctgcagcaagcacatggatggccagatgacccaggagaacatcttccccaacagatatggagatgatcctggagagcagctgatggaccctgagctgcaggagctgttcaatgagctgaccaacatctctgtgccccccatgtctgacctggagctggagaacatgatcaatgccaccatcaagcaggatgaccccttcaacatcgacctgggccagcagagccagaggagcaccccccggcccagcctgcccatggagaagatcgtcatcaagtctgagtacagccctggcctgacccagggccccagcggcagcccccagctgcggccccccagcgctggccctgccttctccatggccaacagcgccctgagcaccagcagccccatccccagcgtgccccagagccaggcccagccccagacaggcagcggggccagccgggccctgcccagctggcaggaggtgagccacgcccagcagctgaagcagattgctgccaaccggcagcagcacgccaggatgcagcagcaccagcagcagcaccagcccaccaactggagcgccctgcccagcagcgctggccccagccctggccccttcggccaggagaagatccccagccccagctttggccagcagaccttcagcccccagagcagccccatgcctggggtggccggcggcagcggccagagcaaggtgatggccaactacatgtacaaggccggccccagcgcccagggcggccacctggatgtgctgatgcagcagaagccccaggacctgagccgctccttcatcaacaacccccacccagccatggagccccggcagggcaacaccaagcccctcttccacttcaacagcgaccaggccaaccagcagatgcccagcgtgctgcccagccagaacaagcccagcctgctgcactacacccagcagcagcagcagcagcagcagcagcagcagcagcagcagcagcagcagcagcagcagcagcagcagcagcagcagcagcagcagcagcagcagcagcagagcagcatcagcgcccagcagcagcagcagcagcagagcagcatcagcgcccagcagcagcagcagcagcagcagcagcagcagcagcagcagcagcagcagcagcagcagcagcagcagcagcagcagcagcccagcagccagcctgcccagagcctgcccagccagcccctgctgcggagccccctgcccctgcagcagaagctgctgctgcagcagatgcagaaccagcccatcgccggcatgggctaccaggtgtcccagcagcagaggcaggaccagcacagcgtggtgggccagaacacaggccccagccccagccccaacccctgcagcaaccccaacacaggcagcggctacatgaacagccagcagagcctgctgaaccagcagctgatgggcaagaagcagaccctgcagaggcagatcatggagcagaagcagcagctgctgctgcagcagcagatgctggctgatgctgagaagatcgccccccaggaccagatcaacagacacctgagcaggcctcctccagactacaaggaccagaggagaaatgtgggcaacatgcagcccacagcccagtacagcggcggcagcagcaccatcagcctgaacagcaaccaggccctggccaaccctgtgtccacccacaccatcctgacccccaacagcagcctgctgagcaccagccacggcaccaggatgcccagcctgagcacagctgtgcagaacatgggcatgtatggcaacctgccctgcaaccagcccaacacctacagcgtgaccagcggcatgaaccagctgacccagcagaggaaccccaagcagctgctggccaaccagaacaaccccatgatgcccaggcctcccaccctgggccccagcaacaacaacaacgtggccacctttggagctggctctgtgggcaacagccagcagctgcggcccaacctgacccacagcatggcctccatgccaccccagaggaccagcaatgtgatgatcaccagcaacaccacagcccccaactgggccagccaggagggcaccagcaagcagcaggaggccctgaccagcgctggggtgcgcttccccaccggcaccccagctgcctacacccccaaccagagcctgcagcaggccgtgggcagccagcagttcagccagagagctgtggccccacccaaccagctgaccccagctgtgcagatgaggcccatgaaccagatgagccagaccctgaatggccagaccatgggccccctgcggggcctgaacctgcggcccaaccagctgagcacccagatcctgcccaacctgaaccagagcggcaccggcctgaaccagagcaggacaggcatcaaccagccccccagcctgacccccagcaacttccccagccccaaccagagcagccgggccttccagggcacagaccacagcagtgacctggcctttgacttcctgagccagcagaatgacaacatgggccctgccctgaacagtgatgctgacttcatcgacagcctgctgaagacagagcctggaaatgatgactggatgaaggacatcaacctggatgagatcctgggcaacaacagctag

SEQ ID NO: 223965 - DNA, 4534 bp, Artificial Sequence
  derived and/or modified sequence
ctctctttctccttctctgtctcactctctctctttctctccctctcctatcggagcacaatgaaagcctgtgtatcgccgtgactccgggcgcgagccagtgtcagcaaagcggctaacaacagacgagaaagagaaaggaaaatacaagctactttttttttccatctataaagcggagcaaatacaggagatagaaccagattgcttattgcgagtccagaccctcagatccactggccggggatggaatgtacaaaagtggacagaaaagtggctggacatgactcggtgcaatttgctggaagtttgtaagtttgaccatcgtttgtaaattactctcggaagagtttgtctctcttgatactgtattagaatagagccggggcgaaaggaaagggaggaaaaattaaaagccaaaagacagtctcccttgatttttgcacattttgaacagtgacttaaacatcttctgaaacagcactgttttgttttgttttggttttttatttaacctgaggaaaagtcaaggctgctggttacatagacatggtagaaatgtgtttctctgcagaaacatccccataaagaattgtcggaaacaactaggtgagggggagtcctctctattaatacctctctcaataccttttgctgtgtgtttctgtctcttgctggacaatccctgaattcttgatctaacccccagatcgtgtgtttacaaagtacctagtggctcttgtcagcttggtggaggaaaaaaaatccaccaactctgtccaacttctccagagctgtcaaatgcaattagagtaagttaatcagggtttgtttccaacttatcctccccccagttggtttctattctttctccccaccctctttttactaactcccctcccccacaacttctccacggctcccccacaacctctgaagacctctattcatgtggccctgaacactgagctcacattgtcaaaaacagacttgcctgcaatagccagcagtagcctctttccacctcaccatcccagaggcagcaatcattgtgtccggtaagatgggggacacagcgcccccgcaggcccccgcaggagggctagggggggcctctggggcggggctccttggagggggctcagtcaccccgagagtgcacagtgctatcgtggagcgcctccgggctcggatcgctgtctgccgccaacaccacctgagctgtgaaggacgatatgaacgaggtagggccgagagctcagaccgggaaagagaaagcaccttgcagctcctgagccttgtacagcatggccagggggcaaggaaagctggcaaacacaccaaggccaccgccactgctgccaccactacagcccctccaccgccccctgctgcccctcctgcggcctcccaagcagcagcaacagcagccccaccgcccccaccagactatcaccatcaccaccagcagcacctgctgaacagtagcaataatggtggcagtggtgggataaacggagagcagcagccgcccgcttcaaccccaggggaccagaggaactcagccctgattgcgctccagggttccttgaaaagaaaacaggtagttaacctatctcctgccaacagcaagcgacccaatggctttgtggacaactcatttcttgatatcaaaagaattcgtgttggggagaatctctctgcaggacaaggtggcctccaaataaacaatggacaaagtcagattatgtcagggaccttgcctatgagccaagcacccctgcgaaagactaacactctgccatcccatacacattctcctggcaatggcctgtttaacatgggcttaaaggaggtaaagaaggagccaggagagactctgtcttgcagtaagcacatggatggccaaatgacccaagagaatatttttcctaataggtacggagacgaccctggagaacaactgatggatcctgagctgcaggaactgttcaatgaactgaccaacatatctgtgcctcccatgagtgaccttgaactggagaacatgatcaatgccaccataaagcaggatgacccatttaacattgacttgggtcagcaaagccagaggagcacacctaggccctccttacccatggagaaaatagtgatcaaaagtgaatactcaccgggcttgactcagggcccctcaggctctcctcagctgaggcccccatcagctggccccgcattctccatggccaactctgccctctccacttcgtctccaatcccttcagtccctcagagccaggctcagcctcagacaggctccggagcaagccgggccttgccaagctggcaggaagtatcccatgcccagcagctcaaacagatagctgctaatcgtcagcagcatgcccggatgcagcagcaccagcagcagcaccagcctaccaactggtcagccttgccctcttctgctggaccatcaccaggtccatttgggcaggagaaaatccccagcccttcttttggtcagcagacattcagcccacagagctcccccatgcctggggtagctggcggcagcggccagtcgaaagtaatggctaactacatgtacaaggccggcccctcagcccagggtgggcacctagatgtcctcatgcagcaaaagcctcaggatctcagtcgaagttttattaacaacccgcacccagccatggagccccgtcagggcaacaccaagcctttgtttcattttaactcagatcaagcgaaccagcagatgccttctgttttgccttcccagaacaagccttctctcctacactacacccaacagcaacagcagcaacagcagcagcagcagcagcagcagcagcagcagcagcagcaacagcagcagcagcagcaacagcaacagcaacagcaacagcagagttcaatttcagctcaacaacagcaacagcagcagagctcaatttcagcccaacagcagcagcagcagcaacaacagcagcagcagcagcaacaacaacagcaacaacagcagcagcagcagcagcaacaaccatcttctcagcctgcccaatctctaccaagccagcctttgctaaggtcacctttgccacttcagcaaaagctcctacttcagcaaatgcagaatcagcccattgcaggaatgggataccaagtctcccaacaacagagacaggatcaacactctgtggtaggccagaacacaggccccagtccaagtcctaacccctgctcaaatccaaacactggaagtggttacatgaactcccagcaatcactgttgaatcagcaattgatgggaaagaagcagactctacagaggcagatcatggagcagaaacagcaacttcttctccagcagcagatgctggctgacgcggagaaaattgctccacaagatcagataaaccgacatttgtcaaggccacctccagattataaagaccaaagaagaaatgtgggcaatatgcaaccaactgctcagtattctggtggctcatccacaataagcttaaactctaaccaggctttggcaaacccagtttcaacacacaccattttaactcccaattccagcctcctgtctacttctcacgggacaagaatgccatcattatctacagcagttcagaatatggggatgtatggaaatctgccttgtaatcaacctaacacatacagtgtcacttcaggaatgaatcaattgacccaacagagaaacccaaagcaattgttagcaaatcaaaacaaccctatgatgccacggccacctaccttagggccaagtaataataacaatgtagccacttttggagctggatctgttggtaattcacaacaattgagaccaaatttaacccatagtatggcaagcatgccaccacagagaacatcaaacgtaatgatcacatccaacacaactgcaccaaactgggcctctcaagaaggaacaagcaaacagcaagaagccctgacgtctgcaggagtccgcttccccacaggtacacctgcagcctataccccaaatcagtcactgcaacaggcagtaggtagccagcaattttcccagagggcagtggctcctcctaaccagttaacaccagcagtgcaaatgagacccatgaaccaaatgagccaaacactaaatgggcaaaccatgggtcccctcaggggtctgaatctcagacccaatcagctaagcacacagattttgcctaatttgaatcagtcaggaacagggttgaatcagtcgaggacgggcatcaaccagccaccatccctgacgcccagcaattttccttcacccaaccaaagttccagggcttttcaaggaactgaccacagcagtgacttagcttttgacttcctcagccaacaaaatgataacatgggccctgccctaaacagtgatgctgatttcattgattctttattgaagacagagcctggtaatgatgactggatgaaagacatcaatcttgatgaaatcttggggaacaattcctaa

SEQ ID NO: 223966 - DNA, 3471 bp, Artificial Sequence
  derived and/or modified sequence
atgggcgacaccgcccccccccaggcccccgccggcggcctgggcggggccagcggagccggcctgcttggaggaggtagtgtgacgccacgggtccattcagctatcgttgagagattgagagctcgcatagcggtttgtcggcagcatcatttgtcatgcgagggaaggtacgaaaggggccgcgccgaatcttctgatcgggagcgcgagtcaaccctccagctactgagcctagtccagcatggtcaaggcgccagaaaggccggtaaacacacaaaagcaactgccaccgctgccactacaacggcccctcctccgccacccgctgccccccctgcagccagccaggccgcggcaaccgcagctcccccccctcctccagattatcatcaccaccaccaacagcatcttttgaactcctccaacaacggcggctctggtggaatcaatggcgagcagcagccccctgctagcaccccgggtgaccagaggaatagcgcacttatcgctctgcaaggcagcctgaaaaggaagcaggtggttaacctgtctccagctaactccaagcgcccaaatgggttcgtcgataactccttcctcgacatcaagaggattcgggttggggaaaatctgtctgcagggcagggtggccttcagattaacaacggccaaagccaaattatgagcggtacactaccaatgtctcaagctcctctgcgtaagaccaacacactgccaagccacactcactctccaggtaatggcctgtttaatatgggccttaaggaggtgaagaaagagcctggagagacactgtcatgtagcaagcacatggacggccaaatgacccaggagaacatattccccaaccgctatggcgacgatcccggtgagcagctgatggatcccgaactccaggaactgttcaatgagctcaccaacatatctgtcccccccatgtccgatttggaactggaaaacatgatcaatgcaacgataaaacaagacgacccttttaatatcgatctgggacagcagagccagagatctacccctaggccgagtctgcccatggagaagatagtgatcaaatccgagtactcacctgggctgacacagggaccgtccggatccccacagctcagaccgccaagcgctgggcctgcgtttagcatggcaaatagcgcgctgagtacatctagcccaattccttctgtgcctcaatcccaggctcagccgcaaaccggctctggtgcgagccgcgcgctcccctcctggcaggaggtgagccacgctcaacagctaaaacagattgcagcgaatagacagcagcatgccagaatgcagcagcatcaacaacagcaccagccaacaaattggtccgcgctaccatcctctgcaggaccctctcccgggccatttgggcaggaaaaaatcccaagtccttcgttcggacagcagaccttctccccacaaagttcccctatgcccggggtagccggcgggtccggacagagtaaagtaatggcaaactacatgtacaaagccggcccaagcgcccaggggggacatttagatgtgttaatgcaacaaaaaccccaggatctatctaggtcgttcattaacaatccacatcccgctatggagcctcgccagggcaacacaaagccactgttccatttcaactccgaccaagcaaaccaacagatgccatccgtgcttccctcccagaataagcctagtttgttgcactacacccagcagcagcagcagcagcagcagcaacaacagcagcagcagcagcagcagcaacagcagcagcagcaacagcagcagcagcagcagcaacagcagcaacagtcctctatctcagcccagcagcagcagcaacaacagtcaagtatctccgctcaacagcaacaacagcagcaacagcagcagcagcagcagcagcagcagcaacagcagcagcagcagcagcagcagcaacaaccatcgtcccagccagctcagagcctcccctcccaacccctgttacgatctcccttgccactacagcagaaactattgcttcagcagatgcagaaccagccaatcgctggcatgggctaccaggtgagccagcagcagaggcaggatcagcattcggtggtcggacagaacacggggcctagtcccagccccaatccttgttccaatcctaatacagggtcaggatatatgaattcacagcagagcctcctgaatcagcagcttatgggtaaaaagcagaccctgcagcggcagatcatggaacagaagcagcagttactcctccagcagcaaatgctagcagacgctgagaagattgcccctcaggaccagattaatagacacctgtctcgcccgccaccagattacaaagatcaaagacgcaacgtcggcaatatgcaacctacggctcagtactctggtggcagttccactatttccctcaattccaaccaagccctcgccaatccagtcagcacgcataccatcctcactcctaacagcagcctgctttccacaagtcacgggacaagaatgccctccctctcgactgcggtgcagaatatgggcatgtatggcaacctgccgtgcaatcagcccaacacatattccgtaacaagcggcatgaaccagttaacccagcaaaggaacccaaaacagctcctggcaaaccagaacaatcccatgatgccaagacccccgacactcggccccagcaataataataatgttgctaccttcggtgccgggtctgtggggaatagtcagcagctgcggcccaacctgacccacagcatggctagcatgccgcctcaacgtacaagtaacgtaatgattacatctaatacaacagcacctaactgggccagccaggagggaacttccaagcaacaggaagctctcacctctgccggagtacggtttccaacaggcacacctgccgcatatacgccaaaccaatccttgcagcaggcagtgggctcccagcagttctcacagagggctgtggcccccccgaaccaactgacacctgctgtccaaatgcggccaatgaatcagatgagtcagacattgaacggacagacgatgggaccactgcgggggttgaaccttcgccctaatcagctctctacgcagatcttgcctaatctgaaccagtctggtacaggtctgaatcagtccaggacgggcattaaccagcctccttcgctgacccctagcaatttccctagcccaaatcagagttccagagcctttcagggtactgaccactccagcgatctcgcgtttgactttctgtctcagcagaatgataacatgggccctgccctgaacagtgatgcagacttcatcgattccctacttaagaccgagcctgggaatgacgactggatgaaggacattaacctcgacgaaatactcgggaataacagctag

SEQ ID NO: 223967 - DNA, 3471 bp, Artificial Sequence
  derived and/or modified sequence
atgggcgacaccgcccccccccaggcccccgccggcggcctgggcggtgcgtccggtgccggcttattaggcgggggctccgtgactccacgggtacactccgccatcgtggaacgcctgcgggccagaatcgcagtgtgccgtcaacatcacctgtcatgtgaaggccgttacgagagaggtagagccgagagctccgacagagagcgagagagcaccctgcagttgctgtctctggtgcagcatggccagggagcccgcaaggccggtaaacatactaaggcgacagcgactgcagctaccactacagcccccccccccccccccgccgctccccctgccgcgtctcaggctgctgccactgcagcgccccctccgccacctgattatcatcaccaccatcagcagcacctgctgaactcatcaaataatggaggctcagggggcatcaacggagagcagcagcccccagcttccactcccggggaccagagaaattcagcactcattgcgctgcaaggatcccttaagcggaaacaagtagtgaacctctctcccgctaattctaaaagacccaatggtttcgtggataattcttttctggacataaagcggatcagggtcggagagaacttgagcgctgggcagggtggcttacagatcaacaacgggcagtcccagattatgagcggaaccctgcctatgtcgcaggccccactccgcaaaacaaatactctgccgtctcatacccactccccagggaatggactgtttaatatggggctaaaggaggtcaagaaggagcccggcgagactttgagctgttccaagcacatggatggacaaatgacacaggagaatatttttccgaacagatatggtgacgacccaggtgagcagctgatggaccctgaattacaggaactcttcaatgagttaacgaacatttcagtacctccaatgtcagatttggagttggaaaatatgatcaacgcgactatcaagcaggacgaccccttcaacatcgacctcgggcaacaaagccagaggagcacaccacgacctagtctccctatggaaaaaattgttatcaaatcagaatactccccaggcctcacccagggtccctccggcagtccacaactgaggcctcccagcgcaggcccagcattctctatggcgaacagcgcgttgtccaccagtagtcccatcccatcagtccctcagagtcaggctcagccacagacagggagcggagcatcgcgtgctcttccttcctggcaggaagtctctcatgcacagcaacttaagcaaatcgccgcaaaccgacagcaacacgcacgaatgcagcaacaccagcagcagcatcagcccactaattggtccgccttaccctcctcggccggaccctccccaggaccatttggtcaggagaagattccgtctcccagttttggtcagcaaactttttcaccacagtctagtccaatgccaggcgtggcggggggcagtggccagtccaaggtgatggcaaattatatgtacaaggcaggaccctccgcgcagggtggacatctggacgtgctgatgcaacagaagccccaggatctcagtcgcagttttattaacaaccctcatcctgccatggagccacgtcagggcaataccaagcctcttttccactttaatagcgaccaggcaaatcaacagatgcccagcgtgctgcctagccaaaataagccttcactgttgcattacactcagcagcagcagcagcagcagcagcagcagcaacagcagcagcagcagcagcagcagcagcaacagcagcaacagcaacaacagcagcagcagcagcagcagtcaagcatatctgctcaacagcagcagcagcaacagtcgtccatttccgctcaacagcagcaacaacagcaacaacagcaacagcagcaacagcagcagcagcaacagcagcagcaacagcagcagcagcagccctcatcccagccagcgcagtctcttcccagccagcccctgttgagaagtcctcttccactccagcagaagttgctcctccagcagatgcaaaaccagccaatagccggcatggggtaccaggtatcccagcaacagcggcaagaccagcactcggttgtgggacagaatacaggtccaagcccatcacccaatccttgtagcaatcccaacacaggtagtggatatatgaactcccagcagtccctgctcaatcagcagctgatgggcaaaaagcagacactccagagacagatcatggaacagaaacagcagcttctccttcagcagcagatgcttgccgatgccgaaaagatcgcgccacaggaccaaatcaaccgacacctgtcacgtcccccaccagactacaaggaccagaggcgcaatgtaggcaacatgcagcctaccgctcagtattctggtggctcctccacaatcagtctgaactccaatcaggccctggccaaccctgtctctacacacacaatccttactcccaactccagcctgttgtctacatctcacggtacgagaatgcctagcctcagcaccgctgtgcagaatatgggcatgtacggaaacttgccttgtaatcagcccaatacctactccgtaacatcaggtatgaatcagcttactcagcagagaaatccaaagcagttactggccaaccaaaataatcctatgatgccgcgtccacctacgttgggacctagcaataataacaatgtagccacatttggcgctggttctgtgggaaattcacaacagctgcggcctaatcttacccatagtatggcgagcatgcctccacagcgcacttctaatgtgatgatcacctcaaacactacagctcctaactgggcatcacaggaaggcaccagcaaacagcaggaagccctcactagcgcaggagttagattccctaccggcactcccgccgcatacactccgaaccaatcactgcaacaggccgtgggctcacaacagttttctcagcgagcagtggcgccgccaaaccaactcacaccagccgtgcagatgcgccctatgaaccaaatgagtcagactctaaatggccagacaatgggacccctacgcggcctcaatctgagacctaaccagcttagtacccagatcctcccaaatctgaaccaaagcggcacaggtttaaaccaatcacgaactggtattaatcagcccccgtctctgacaccttccaacttcccctctccaaatcagtcctctagagctttccaaggcacagaccactcctctgacctcgcctttgacttcttatcgcagcagaacgataacatgggccccgctctgaactcagatgccgactttatcgactcacttttgaagactgaacccggcaatgacgattggatgaaagatattaaccttgacgagatccttggaaataatagttag

SEQ ID NO: 223968 - DNA, 3471 bp, Artificial Sequence
  derived and/or modified sequence
atgggagacaccgctcctccccaggccccagccggtgggctggggggtgcttccggtgcaggcctcttaggaggcggtagcgtgactcccagggttcattccgccatcgtggagcgattacgggctcgtatcgccgtctgtcgccagcatcacctctcctgtgaaggtcggtacgagcgaggacgcgcagaatcgtccgatcgcgaaagagaatctacactgcagctgctttctctcgttcagcatgggcagggagctagaaaggccggtaagcatacaaaggccactgccaccgctgcaaccacaacagcacctccccctccacctgcggcacctcctgccgcttcccaggcagcagctactgccgcaccgccacctccacctgattaccaccatcatcaccagcagcacttgctgaattcatcgaacaatggaggatccggaggcataaatggtgagcagcaaccacccgcatccactcctggggaccagaggaattcagctttgattgctttacagggcagcctaaagcggaaacaggtggtgaacctctctccagccaactcaaagaggcccaatgggttcgtcgacaactcattccttgacattaagcggatcagagtcggcgaaaatctgtccgctgggcagggaggtctgcagataaataatggtcaatcacaaatcatgagcggaacgttaccgatgagccaagcacccctgagaaagacaaatacactcccaagtcacacacactcccctggcaacggcctgttcaacatggggctaaaggaagtcaaaaaagagccaggagaaacactctcgtgtagcaaacacatggacggccagatgacccaggagaacatctttcctaacaggtatggcgacgaccccggagagcaactcatggatccagagttacaagagctctttaacgagctgaccaatatatcagtgcccccaatgtcagacctggaactcgagaatatgattaacgcaaccatcaagcaagacgacccatttaatatagacctgggacagcagtcgcagcgtagtacgcctagaccctcgctccctatggaaaaaatagttataaaatcagaatatagtccgggtctgacacaggggcctagtggcagtccacagttgcggcctccaagtgcagggcctgcattctctatggccaacagcgctctgtccacctcttctccaatcccttcagtaccgcagagccaagctcaacctcaaacaggaagcggcgcttctcgtgccctgcctagttggcaggaggtgtcccacgcccagcaactcaaacagatcgcagccaacaggcagcagcatgctagaatgcagcagcaccaacagcagcaccagcctaccaattggtccgcccttccatcgagtgcaggtcctagcccgggaccttttggacaggagaagattcctagtccatctttcgggcaacagactttttcaccccagtccagcccaatgcctggggtggcaggcggaagcggtcagagtaaagtgatggccaattacatgtacaaagcaggcccttctgcacaaggcggacacctggacgtgctgatgcagcagaagccacaagacttgtcccggtcttttattaacaaccctcatcctgcaatggaaccgagacagggcaacactaagccgcttttccactttaatagtgatcaggcgaatcagcagatgccctctgtcttgccgtcacagaacaagcctagtctgctgcactatacacagcaacagcagcaacaacaacagcagcagcagcagcagcagcaacagcagcaacagcagcaacaacagcagcaacaacagcagcaacagcagcagcagcagtcctcaatctccgcacagcagcaacagcagcagcagtcctcaatctccgcgcaacagcagcaacagcagcaacagcagcagcagcaacagcagcagcagcagcaacagcaacagcagcagcagcaacagcagccatcatctcagccagcgcaatccctgccctctcagccattactgcggtcgcctcttcctcttcagcagaaattgctactgcagcaaatgcagaaccagccgattgccggaatgggataccaagtgagccagcagcaacgccaggatcaacattccgtggttggccagaatactggccctagccccagccctaatccttgcagcaaccccaataccggaagcggatatatgaactctcagcagagcctgctgaaccagcagttgatgggaaaaaaacagaccctacagcgccagattatggaacaaaagcagcaactcctcctccaacagcagatgttagctgatgcggagaagattgcgcctcaggatcaaatcaatcggcatctctcccgcccacccccagactataaagatcaaagaaggaacgtcgggaatatgcagcctacggctcagtatagcgggggtagctctaccatcagcctcaatagtaatcaggccttggccaaccctgttagtacacatacaattcttacacccaattcttctttgcttagcacatcccacggaacaaggatgcccagcctgtccaccgctgtgcagaatatgggaatgtatgggaacctgccttgcaaccagcctaatacttattccgttacctcaggtatgaatcagttgactcagcagaggaaccctaaacagctgttggcaaatcaaaacaaccccatgatgccccgaccaccaaccctgggcccatctaacaacaataatgtggccacattcggtgccggaagtgttggcaattctcaacagctcaggcccaacctgacacactctatggccagcatgcctccccagaggaccagtaatgtcatgataacgtccaatacaacagcccctaattgggccagtcaggagggtacttccaagcaacaggaggcactgacgtctgcaggcgttcggtttcccactggcacccctgcagcctatactcctaatcagagcttgcagcaggctgtgggatcacaacagttcagccaacgagccgtcgcaccacccaatcaactcacccccgcagtccagatgcgcccaatgaaccagatgtcgcagaccctgaacggtcagaccatgggcccactacgcggtctgaacctgcgaccaaaccaactcagcactcaaatcttgcccaatctgaatcagtcaggaactggcctgaaccagagccgaactggcatcaaccaacctcccagcttgacaccatcaaatttcccgagtccaaatcagagcagcagggcattccaggggacagatcattcctcggacctggcattcgattttttgtcccagcagaacgacaacatggggccagctctaaattccgacgccgactttatcgactccctgctaaagacagagccgggaaacgacgactggatgaaagatatcaatctcgatgaaatcctgggaaacaacagttag

SEQ ID NO: 223969 - DNA, 3471 bp, Artificial Sequence
  derived and/or modified sequence
atgggggatacagcgcctccccaggcccctgcaggcggacttggtggagctagcggtgcgggtctcctggggggaggtagcgttacccctcgtgtgcattcagcaatagtggagcgcctgcgagccaggatcgctgtttgtagacagcaccacctctcctgtgaaggaagatatgagcgcggacgagcagagtccagcgacagggagagagaatctactctgcaactgctgtcactggtgcagcacggccagggcgctcggaaggcgggtaaacacacaaaggctaccgccactgctgccaccactacagcacctccccctccacccgcagcccctcccgctgcctctcaagccgcagccactgccgcacctccgccaccacccgattaccaccatcaccaccagcagcacctgctcaacagctcaaacaatgggggaagcggaggtatcaacggtgagcagcagccacccgcatcgacccctggcgaccaacggaacagtgccctcattgcattgcaaggcagtctaaaaagaaagcaagtcgtgaacctgagtcccgcaaacagtaagcgtcctaacggctttgtggacaatagctttctcgatatcaaaagaattcgtgtgggcgagaacctgagtgccggtcagggtgggctacagattaacaacggtcagtctcagattatgtccgggactctacctatgtcccaggcacccctccgaaagaccaatacattaccaagccacacgcattcacccggaaacggccttttcaatatggggctgaaggaagtgaagaaggaacctggcgaaactttatcctgtagtaaacacatggacggtcaaatgacccaggagaacatctttcctaatcgatatggcgacgatcccggagaacagctgatggatcccgagttgcaggagctgttcaacgagctgaccaacatttccgtacctcctatgtccgatctggaattggagaatatgataaatgccactattaaacaggacgatccattcaatattgatctgggccaacagagtcagcggtcaacgcccaggccgagcttacctatggagaagattgttataaagtcagagtactcccccggtctgacccagggtccttcagggagtccacaattacgcccaccaagcgccggaccagcgttcagtatggccaatagtgccctgtcaacttcaagccctatcccgtctgtaccgcaaagccaagcccagccacagacggggtctggtgcttccagagccctaccatcttggcaagaagtcagtcacgcacagcagctaaagcagatagccgctaacaggcagcagcatgcacgcatgcaacagcaccagcagcagcatcagcctaccaattggtccgccctgccttcttccgcaggtccctctccaggcccattcggccaagaaaagattccttctccttcctttgggcagcagactttcagtccacaaagcagtcctatgccaggagttgctggcggatccggccagtccaaggtcatggccaattacatgtataaagcaggcccttctgcccaggggggacacctcgatgtcctgatgcagcagaagccccaggacctctcccgcagtttcatcaacaatccccaccccgctatggaaccacgccaggggaacacgaagcccctgtttcactttaattcggaccaggcaaatcagcagatgccctcagtgctgccctcccagaacaagccttcattgctgcactacactcagcaacaacaacaacaacagcagcagcagcagcaacagcagcagcagcagcagcaacagcagcagcagcagcagcaacagcagcagcagcagcagcagcagtcttcaatctctgcccaacagcagcagcagcagcaaagtagtatctctgctcagcagcagcagcaacagcagcagcaacagcagcagcagcagcagcagcagcagcagcaacagcaacagcagcagcagcagcccagctcacagcctgctcagtccctgccctctcagcctttgctccgtagtccactgccactgcagcaaaagcttctgctacaacaaatgcagaatcagcccatagccggtatggggtaccaggtgtcgcaacagcagagacaggaccagcacagtgtcgtgggccagaacaccggtccgtccccctccccaaacccatgcagtaaccccaatactggctccgggtacatgaattcccagcagtcattgctaaatcagcagcttatgggcaagaagcagacactgcaacgccaaatcatggagcagaaacagcagttactgctccagcagcagatgctcgctgatgcagagaaaatcgcccctcaagatcagataaaccgccacctgagtcgaccccctcccgattacaaggaccaacggaggaatgtgggtaatatgcagcctaccgcccaatactcaggaggctcttctacaatctctcttaacagcaatcaggccttggccaaccccgtcagcacacacacaattctgacgcctaactcgagtctgctctccactagccatgggacccgaatgcctagcttgagcacagccgtgcaaaatatgggcatgtatgggaatctgccttgcaatcagcctaacacctactcagtcacctctggtatgaaccagctgacccagcagaggaacccgaaacagctgctggcaaatcagaacaatcccatgatgcccaggccgcctactctcgggcctagcaataataataacgtcgccacgtttggagcaggtagcgtgggtaatagtcagcaactgcgtcccaatcttacgcacagtatggcctccatgccaccgcagcgaacgtctaacgttatgataacaagcaataccaccgcacccaattgggccagtcaggagggcacttccaaacagcaggaggcgctgacaagtgccggagttcggttccccaccggaactcctgcggcatataccccaaaccagtcactccagcaggcggtgggcagtcagcagttttctcagcgagctgtcgccccacctaatcaactgacacctgcagtgcagatgagacccatgaaccaaatgtcgcagacgttgaatggacagaccatgggacctctacgcggactgaatttgagaccaaaccagctgtcaactcaaatcctgccaaacctcaatcaaagtgggacgggcctcaatcagtcaagaacaggcattaaccaacctccatcccttacgccctctaatttccccagccccaatcagagctctagagctttccagggtactgaccactcctccgatctcgcgtttgacttcctttctcagcaaaatgacaacatgggccctgcactgaactcggacgctgattttattgatagtcttctgaaaacggaacctggaaatgacgactggatgaaagacattaatctggatgaaattctgggcaataatagttag

SEQ ID NO: 223970 - DNA, 3471 bp, Artificial Sequence
  derived and/or modified sequence
atgggcgacaccgcccccccccaggcccccgccggcggcctgggcggcgccagcggcgccggcctgctgggcggcggcagcgtgacccccagagtgcacagcgccatcgtggagagactgagagccagaatcgccgtgtgcagacagcaccacctgagctgcgagggcagatacgagagaggcagagccgagagcagcgacagagagagagagagcaccctgcagctgctgagcctggtgcagcacggccagggcgccagaaaggccggcaagcacaccaaggccaccgccaccgccgccaccaccaccgcccccccccccccccccgccgccccccccgccgccagccaggccgccgccaccgccgcccccccccccccccccgactaccaccaccaccaccagcagcacctgctgaacagcagcaacaacggcggcagcggcggcatcaacggcgagcagcagccccccgccagcacccccggcgaccagagaaacagcgccctgatcgccctgcagggcagcctgaagagaaagcaggtggtgaacctgagccccgccaacagcaagagacccaacggcttcgtggacaacagcttcctggacatcaagagaatcagagtgggcgagaacctgagcgccggccagggcggcctgcagatcaacaacggccagagccagatcatgagcggcaccctgcccatgagccaggcccccctgagaaagaccaacaccctgcccagccacacccacagccccggcaacggcctgttcaacatgggcctgaaggaggtgaagaaggagcccggcgagaccctgagctgcagcaagcacatggacggccagatgacccaggagaacatcttccccaacagatacggcgacgaccccggcgagcagctgatggaccccgagctgcaggagctgttcaacgagctgaccaacatcagcgtgccccccatgagcgacctggagctggagaacatgatcaacgccaccatcaagcaggacgaccccttcaacatcgacctgggccagcagagccagagaagcacccccagacccagcctgcccatggagaagatcgtgatcaagagcgagtacagccccggcctgacccagggccccagcggcagcccccagctgagaccccccagcgccggccccgccttcagcatggccaacagcgccctgagcaccagcagccccatccccagcgtgccccagagccaggcccagccccagaccggcagcggcgccagcagagccctgcccagctggcaggaggtgagccacgcccagcagctgaagcagatcgccgccaacagacagcagcacgccagaatgcagcagcaccagcagcagcaccagcccaccaactggagcgccctgcccagcagcgccggccccagccccggccccttcggccaggagaagatccccagccccagcttcggccagcagaccttcagcccccagagcagccccatgcccggcgtggccggcggcagcggccagagcaaggtgatggccaactacatgtacaaggccggccccagcgcccagggcggccacctggacgtgctgatgcagcagaagccccaggacctgagcagaagcttcatcaacaacccccaccccgccatggagcccagacagggcaacaccaagcccctgttccacttcaacagcgaccaggccaaccagcagatgcccagcgtgctgcccagccagaacaagcccagcctgctgcactacacccagcagcagcagcagcagcagcagcagcagcagcagcagcagcagcagcagcagcagcagcagcagcagcagcagcagcagcagcagcagcagcagcagcagagcagcatcagcgcccagcagcagcagcagcagcagagcagcatcagcgcccagcagcagcagcagcagcagcagcagcagcagcagcagcagcagcagcagcagcagcagcagcagcagcagcagcagcagcccagcagccagcccgcccagagcctgcccagccagcccctgctgagaagccccctgcccctgcagcagaagctgctgctgcagcagatgcagaaccagcccatcgccggcatgggctaccaggtgagccagcagcagagacaggaccagcacagcgtggtgggccagaacaccggccccagccccagccccaacccctgcagcaaccccaacaccggcagcggctacatgaacagccagcagagcctgctgaaccagcagctgatgggcaagaagcagaccctgcagagacagatcatggagcagaagcagcagctgctgctgcagcagcagatgctggccgacgccgagaagatcgccccccaggaccagatcaacagacacctgagcagacccccccccgactacaaggaccagagaagaaacgtgggcaacatgcagcccaccgcccagtacagcggcggcagcagcaccatcagcctgaacagcaaccaggccctggccaaccccgtgagcacccacaccatcctgacccccaacagcagcctgctgagcaccagccacggcaccagaatgcccagcctgagcaccgccgtgcagaacatgggcatgtacggcaacctgccctgcaaccagcccaacacctacagcgtgaccagcggcatgaaccagctgacccagcagagaaaccccaagcagctgctggccaaccagaacaaccccatgatgcccagaccccccaccctgggccccagcaacaacaacaacgtggccaccttcggcgccggcagcgtgggcaacagccagcagctgagacccaacctgacccacagcatggccagcatgcccccccagagaaccagcaacgtgatgatcaccagcaacaccaccgcccccaactgggccagccaggagggcaccagcaagcagcaggaggccctgaccagcgccggcgtgagattccccaccggcacccccgccgcctacacccccaaccagagcctgcagcaggccgtgggcagccagcagttcagccagagagccgtggccccccccaaccagctgacccccgccgtgcagatgagacccatgaaccagatgagccagaccctgaacggccagaccatgggccccctgagaggcctgaacctgagacccaaccagctgagcacccagatcctgcccaacctgaaccagagcggcaccggcctgaaccagagcagaaccggcatcaaccagccccccagcctgacccccagcaacttccccagccccaaccagagcagcagagccttccagggcaccgaccacagcagcgacctggccttcgacttcctgagccagcagaacgacaacatgggccccgccctgaacagcgacgccgacttcatcgacagcctgctgaagaccgagcccggcaacgacgactggatgaaggacatcaacctggacgagatcctgggcaacaacagctag

SEQ ID NO: 223971 - protein, 778 aa, Artificial Sequence
  derived and/or modified sequence
MSSGAKEGGGGSPAYHLPHPHPHPPQHAQYVGPYRLEKTLGKGQTGLVKLGVHCITGQKVAIKIVNREKLSESVLMKVEREIAILKLIEHPHVLKLHDVYENKKYLYLVLEHVSGGELFDYLVKKGRLTPKEARKFFRQIVSALDFCHSYSICHRDLKPENLLLDEKNNIRIADFGMASLQVGDSLLETSCGSPHYACPEVIKGEKYDGRRADMWSCGVILFALLVGALPFDDDNLRQLLEKVKRGVFHMPHFIPPDCQSLLRGMIEVEPEKRLSLEQIQKHPWYLGGKHEPDPCLEPAPGRRVAMRSLPSNGELDPDVLESMASLGCFRDRERLHRELRSEEENQEKMIYYLLLDRKERYPSCEDQDLPPRNDVDPPRKRVDSPMLSRHGKRRPERKSMEVLSITDAGGGGSPVPTRRALEMAQHSQRSRSVSGASTGLSSSPLSSPRSPVFSFSPEPGAGDEARGGGSPTSKTQTLPSRGPRGGGAGEQPPPPSARSTPLPGPPGSPRSSGGTPLHSPLHTPRASPTGTPGTTPPPSPGGGVGGAAWRSRLNSIRNSFLGSPRFHRRKMQVPTAEEMSSLTPESSPELAKRSWFGNFISLDKEEQIFLVLKDKPLSSIKADIVHAFLSIPSLSHSVLSQTSFRAEYKASGGPSVFQKPVRFQVDISSSEGPEPSPRRDGSGGGGIYSVTFTLISGPSRRFKRVVETIQAQLLSTHDQPSVQALADEKNGAQTRPAGAPPRSLQPPPGRPDPELSSSPRRGPPKDKKLLATNGTPLP

SEQ ID NO: 223972 - protein, 473 aa, Artificial Sequence
  derived and/or modified sequence
MRSLPSNGELDPDVLESMASLGCFRDRERLHRELRSEEENQEKMIYYLLLDRKERYPSCEDQDLPPRNDVDPPRKRVDSPMLSRHGKRRPERKSMEVLSITDAGGGGSPVPTRRALEMAQHSQRSRSVSGASTGLSSSPLSSPRSPVFSFSPEPGAGDEARGGGSPTSKTQTLPSRGPRGGGAGEQPPPPSARSTPLPGPPGSPRSSGGTPLHSPLHTPRASPTGTPGTTPPPSPGGGVGGAAWRSRLNSIRNSFLGSPRFHRRKMQVPTAEEMSSLTPESSPELAKRSWFGNFISLDKEEQIFLVLKDKPLSSIKADIVHAFLSIPSLSHSVLSQTSFRAEYKASGGPSVFQKPVRFQVDISSSEGPEPSPRRDGSGGGGIYSVTFTLISGPSRRFKRVVETIQAQLLSTHDQPSVQALADEKNGAQTRPAGAPPRSLQPPPGRPDPELSSSPRRGPPKDKKLLATNGTPLP

SEQ ID NO: 223973 - DNA, 2337 bp, Artificial Sequence
  derived and/or modified sequence
atgtcctccggagcaaaagagggaggaggaggctcaccagcgtatcatctgccccacccccacccacatcctccacagcatgcccagtatgtgggcccatatcgcctggagaaaactctcggaaaaggccagactgggctcgtaaagctcggcgtacactgcattactggccagaaggtcgcaatcaaaattgtaaatcgagagaagctttctgagtctgtgttgatgaaggtcgagagagagatagcaatcttaaagctgatcgaacacccacacgttttaaaactccatgacgtgtatgagaacaagaagtatctctaccttgtgctagagcatgtatcaggaggtgagttatttgattacctggtgaagaaagggagactgacaccgaaggaggccaggaaatttttccggcagattgtgtccgcactcgatttctgccactcatatagcatctgccaccgcgacctgaagcctgagaacctgctgctagacgagaaaaacaatatcagaatcgctgatttcggaatggcctcactgcaggtgggcgacagcctcttggagactagctgtggatctcctcactatgcctgtcccgaagtcattaagggcgaaaaatacgatggtaggagagcagacatgtggtcctgtggcgtgatcctcttcgcactgctggtgggggcattacctttcgacgacgacaatttacgccagctgcttgagaaagtgaagagaggagtgtttcacatgccacatttcatcccgcccgactgccagagcctgttacgcggaatgattgaggtggaaccagagaagcggctgtctcttgaacagattcagaaacatccctggtacctagggggaaagcatgagcctgatccctgtctcgagccagcccctggacggagagtggcgatgcgttcgttaccatccaacggtgagctcgaccccgacgtgctagagtctatggctagtctcggatgcttccgagacagggagaggctccaccgtgaattgcgctctgaagaagagaaccaggaaaaaatgatatattatctgctgttagataggaaagagagatatccatcatgtgaagaccaggatctgccccccagaaacgatgtcgacccgccgaggaaacgggttgacagccccatgctaagcaggcacggcaaaagacgtcccgagcggaagtccatggaggtcctatcaataactgacgccggcgggggagggagccccgtccccactcggcgtgccttggagatggcccagcactcgcagcggagcaggagcgttagtggcgcgtcaaccgggctctcctcaagccccctttccagtcctcgctcacctgtcttctctttcagccccgaaccaggtgctggcgatgaagcaaggggcgggggctctccgactagcaagactcagaccttgccttccagagggccaagaggcggaggtgctggagagcagcctcctcctccttctgcccggagcacccccctgccaggacccccaggaagcccacggtcatctggtggaaccccccttcatagtccgcttcacaccccccgtgcgtctcccacgggcacgcctggaacaacacctcctccctcaccggggggaggggtggggggggccgcttggaggagtcggctcaactctatacgaaattcttttctagggagccctcggtttcatcgtcggaagatgcaggtccccacagcggaagagatgagtagtctgacgcccgagtccagcccagaactcgcaaagaggagctggttcggtaattttatatcgctggataaagaagagcagatcttcctcgtattaaaggataagccactttcctccatcaaggccgacatcgtgcatgcatttttgtccatcccctcactgagccactcagtcctgagtcagacatcgtttagagcggaatacaaggcctccggtggccccagcgtgtttcagaaacctgttagattccaggtagacatatcatcttctgaaggtcctgagccgtcaccccggagagacggctccggtggtggggggatttacagtgttacattcactttgatatctggcccaagccggcggttcaaacgggtcgttgagaccatccaggcacagttactgtctacgcacgatcagccctccgtccaggccctggctgatgaaaagaacggagctcagactaggcccgccggggcaccccccagatcgctgcaaccaccgcccggtaggccagatccagaactctcctcctcgcctcgccgcggtcctcctaaggataaaaaactgctcgcaacaaacggcacccccctcccctag

SEQ ID NO: 223974 - DNA, 2337 bp, Artificial Sequence
  derived and/or modified sequence
atgagcagcggggccaaggagggcggcggcggcagccctgcctaccacctgccccacccccacccccaccccccccagcacgcccagtatgtgggcccctaccgcctggagaagaccctgggcaagggccagacaggcctggtgaagctgggcgtgcactgcatcaccggccagaaggtggccatcaagatcgtgaaccgggagaagctgtctgagagcgtgctgatgaaggtggagcgggagatcgccatcctgaagctgattgagcacccccacgtgctgaagctgcatgatgtgtatgagaacaagaagtacctgtacctggtgctggagcacgtgtctggaggagagctgtttgactacctggtgaagaagggccgcctgacccccaaggaggccaggaagttcttccggcagatcgtgtctgccctggacttctgccacagctacagcatctgccaccgggacctgaagccagagaacctgctgctggatgagaagaacaacatcagaattgctgactttggcatggccagcctgcaggtgggggacagcctgctggagaccagctgtggcagcccccactacgcctgcccagaggtgatcaagggggagaagtatgatggccggcgggctgacatgtggagctgtggggtcatcctgtttgccctgctggtgggcgccctgccctttgatgatgacaacctgcggcagctgctggagaaggtgaagaggggcgtcttccacatgccccacttcatccccccagactgccagagcctgctgcggggcatgattgaggtggagcctgagaagaggctgagcctggagcagatccagaagcacccctggtacctgggcggcaagcatgagccagacccctgcctggagcccgcccctggccggcgggtggccatgaggagcctgcccagcaatggagagctggaccctgatgtgctggagagcatggccagcctgggctgcttccgggaccgggagcggctgcaccgggagctgcggtctgaggaggagaaccaggagaagatgatctactacctgctgctggacaggaaggagcgctaccccagctgtgaggaccaggacctgcccccaagaaatgatgtggacccccccaggaagagggtggacagccccatgctgagccgccacggcaagagaagacctgagaggaagtccatggaggtgctgagcatcacagatgctgggggcggcggcagccctgtgcccacccggcgggccctggagatggcccagcacagccagaggagccgctctgtgtctggggccagcacaggcctgagcagcagccccctgagcagccccaggagccctgtgttctccttcagccctgagcctggagctggagatgaggcccggggcggcggcagccccaccagcaagacccagaccctgcccagccggggcccccggggcggcggggccggggagcagcccccaccacccagcgcccggagcacccccctgcccggccccccaggcagccccaggagcagcggcggcacccccctgcacagccccctgcacaccccccgggccagccccaccggcaccccaggcaccaccccaccacccagccctgggggcggcgtgggcggggccgcctggaggagccggctgaacagcatcagaaattccttcctgggcagcccccgcttccacaggaggaagatgcaggtgcccacagctgaggagatgagcagcctgaccccagagagcagccctgagctggccaagaggtcctggtttggaaacttcatcagcctggacaaggaggagcagatcttcctggtgctgaaggacaagcccctgagcagcatcaaggctgacatcgtgcacgccttcctgagcatccccagcctgagccacagcgtgctgagccagaccagcttccgggcagagtacaaggccagcggcggccccagcgtcttccagaagcctgtgcgcttccaggtggacatcagcagcagcgagggccctgagcccagccccaggagagatggcagcggcggcggcggcatctacagcgtgaccttcaccctcatcagcggccccagccgccgcttcaagagggtggtggagaccatccaggcccagctgctgagcacccatgaccagcccagcgtgcaggccctggctgatgagaagaatggagcccagaccaggcctgctggggccccacccaggagcctgcagcccccacctggccgcccagaccctgagctgagcagcagcccccggcggggcccccccaaggacaagaagctgctggccaccaacggcacccccctgccctag

SEQ ID NO: 223975 - DNA, 2337 bp, Artificial Sequence
  derived and/or modified sequence
atgagcagcggcgccaaggagggcggcggcggcagccccgcctaccaccttccccatcctcacccccaccctccccagcacgcccagtacgttggcccttacaggttggagaagacccttggcaagggccagaccggattggtgaagctgggcgttcactgcatcacaggacagaaagtggcaattaagattgtcaacagggaaaagctgtcagagagcgtgctcatgaaggtcgaacgagagattgcgattctgaagctgatagaacacccgcacgtgcttaagttgcatgacgtctatgaaaacaagaagtatttatatctggtcttagagcacgtttccgggggggaactctttgattacctagtcaaaaagggtcgtttaacccccaaggaagctcgcaaattcttccgccagattgtttctgctttagatttctgccacagctatagcatctgtcacagagatcttaagcctgaaaatttacttcttgacgaaaaaaacaacatccggatagcagacttcggcatggcctccctgcaggtgggtgactccctattggaaacgagctgcgggagtcctcactatgcatgtcccgaagtcattaagggcgaaaagtatgacggcaggagggctgatatgtggtcttgtggtgtcatcttgtttgcactgctggtgggtgcactccctttcgacgatgacaatctccgccagctgctggaaaaggtaaaaaggggcgtctttcacatgcctcatttcattccaccagactgtcagtcccttctgcgaggaatgatagaagtggagcccgagaaacgcctgtcattagaacagattcaaaagcatccgtggtatctaggaggcaaacacgagcccgatccatgcctggagcccgcacccggccgtcgtgtcgctatgaggtccttgccaagcaacggagagctggatccagatgtcttggagagcatggcgagcctggggtgcttccgtgatagagaaaggctgcacagagaactccgctccgaagaggagaaccaggagaagatgatctactatctcctgctggatcgcaaggagcgctacccatcttgcgaggatcaggatctgccgccacgaaacgacgtcgacccacccagaaagcgcgtagattccccaatgttgagccgtcacggtaaaaggcggccagaaagaaagtctatggaggtcctcagtatcacggacgccggcggtggcgggtctcctgttcccacaaggcgagccctggagatggcgcaacactcccagagatcgcggagtgtgagtggggcctccacaggactctcctcaagtccccttagcagtccccggtcccccgtcttttccttcagtcccgagcccggagcgggcgacgaagcgaggggcggcggctcccctacatctaagactcagactcttccaagccggggcccccgcggcggaggggctggtgagcagccacctccaccttccgcgcgctccactccgctgccaggtcctcccgggtcccccagaagctcagggggcacgcccctccattcgccacttcacacgcctcgagcaagtccaactgggactcctggtactacacccccaccttcgcccggtgggggagttgggggggccgcttggaggtcacgactcaattctattcggaacagcttcctcgggtctcctcggtttcatcgacgcaagatgcaggtccctacagctgaggagatgagctctttaaccccagagagttcacccgagctggccaaacgaagttggtttgggaattttattagcctggataaggaggagcaaatcttcttggtgcttaaggacaaaccactgagcagtatcaaggctgatatcgtccacgcattcctgagtattccatcgttgagccacagcgtcctgtctcagacatccttcagagctgagtacaaagcctctgggggtccttccgtgtttcagaagcctgtacgatttcaagttgatatctcttcgagcgaaggaccagagccaagtccccgacgtgacggaagcggaggtggcggaatctacagtgtgactttcacactgatctctggccccagccgccggttcaagcgagtggtggaaacaattcaggcccaactcttgtccactcacgaccagccttcagtgcaggcgctagcggatgaaaagaatggggcccagacaagaccagctggtgcgccacccaggtccctgcagcctccccctggtcggcccgacccagagctgagcagttccccacgacgtggacctcccaaagataagaaactgctggccacaaacgggactcctttgccctag

SEQ ID NO: 223976 - DNA, 2337 bp, Artificial Sequence
  derived and/or modified sequence
atgtcgtctggcgcaaaggaaggagggggtgggtcccctgcttaccatctcccacacccacatccccatccgccacagcacgcccagtatgtggggccttacagactggagaaaacactgggaaaaggccagactggcctggtgaagcttggggtacattgtattactgggcagaaggtggcgattaaaatagtgaaccgtgagaaactaagcgaaagtgttctaatgaaagtcgaacgggagatcgccattctgaagctgattgaacacccacacgtcttaaagttgcatgatgtgtacgaaaacaagaagtatttgtatcttgtgctggaacatgtgtctggaggcgaactttttgactaccttgtgaagaaaggacgcctgacccccaaggaagcccgaaagtttttccgacagatcgtaagtgctctcgacttctgccatagttacagcatctgtcacagagacctgaagccagaaaatcttctgctggacgaaaagaacaacattcgtatcgccgacttcggaatggccagtctccaagttggagactcacttcttgagacctcgtgcggtagtccccattatgcctgccccgaagtgatcaagggcgaaaaatacgacggtaggagagccgacatgtggagctgcggtgtgatcctgttcgccctcctggtaggtgcccttccgtttgatgatgataacctcaggcaactgctggagaaggtcaagagaggtgtctttcacatgccgcattttattcctcccgactgtcagagcctgctgcgtggaatgattgaggtggagccggagaagcggctgagccttgagcagattcaaaaacacccatggtatctgggtggtaagcacgagccagacccctgcctggaaccagcccctggtaggcgggtggcgatgcggtctcttccttcaaatggagaattagatcctgatgtcctggagtctatggcatcattaggctgctttcgggaccgcgagcgtctacatcgagaacttagatccgaagaagagaatcaggagaagatgatctattatcttctgttagaccgtaaagaaaggtacccctcctgcgaagatcaagacctgccaccgcgaaacgacgttgaccctccacgcaaacgggtcgattcgcctatgctcagcagacatggtaagcggaggcccgaaaggaaatccatggaagtcctttcgatcaccgatgcaggcggaggaggatctcctgtgcctaccagacgagccttggagatggcacagcattcacagcgatcccgcagcgtatcaggggcatccactggcctctctagctctccactgtcaagtcctcggtcacctgtcttctccttctctcctgaaccaggagcaggcgacgaggctcggggaggaggctcccctaccagcaaaacccaaacattgccttctagggggccacggggaggaggcgcaggggagcaaccgcctccaccaagcgcacgttcaactcccctgcccggacctccaggttcccccaggtcttccggcggaacgccattacattctcctcttcatacaccgagggcctcacccactggaaccccaggcactactccgccaccctcaccaggtggcggagtcggcggagccgcttggcgctcaaggctaaattccatcaggaacagcttcttaggctctcctcgcttccatagacggaaaatgcaggttccaactgcagaggagatgtcctcactgactcccgaatcgagtcccgagcttgctaaaaggtcctggttcggtaactttatatctctggataaagaagagcaaatctttctcgttcttaaggataagcctttgtcttcaatcaaagcagacatcgtccatgccttcttgagtattcccagtttatcacattctgttctgagtcaaacgagcttcagagcagaatataaggctagcggtgggccttctgtgtttcagaagccagtgagatttcaggtcgatatctcatccagcgaggggccagagcctagccctagaagggatggctcaggaggcggagggatctacagcgtcactttcaccttgatttctgggccaagtagacgatttaaacgagtagtggaaaccattcaggcccagctgttgtctacccacgaccaaccctctgttcaggcactggctgatgagaaaaacggtgctcagactagaccagccggagcaccacctcgatccctgcagccgcctccaggcagacctgaccctgaattatcaagctcaccacgtcgcggacccccaaaggacaaaaaacttctcgccaccaatggtactcccctgccctag

SEQ ID NO: 223977 - DNA, 3079 bp, Artificial Sequence
  derived and/or modified sequence
gggggccggccagaaacgggctggggagggggggccccgcagcccccctgggccatgctgactcccggggcctgacccccccgggccagccccccctcccccagctccgcggcccgccgactggggggggccagcccagccccctggggacccccggagaggtggggggcagccgggggggccgggacggagcggtcgccggcccccaccggagagacggggcgacggccgcagggggggcggccgggggaccggtcgggccgggaccaagggcaccatgtcgtccggggccaaggagggaggtgggggctctcccgcctaccacctcccccacccccacccccacccaccccagcacgcccaatatgtgggcccctatcggctggagaagacgctgggcaaaggacagacagggctggttaaactcggggtccactgcatcacgggtcagaaggtcgccatcaagatcgtgaaccgggagaagctgtcggagtcggtgctgatgaaggtggagcgggagatcgccatcctgaagctcatcgaacacccacatgtcctcaagctccacgacgtctacgagaacaagaaatatttgtacctggttctggagcacgtctcggggggtgagctattcgactacctggtaaagaaggggagactgacgcccaaggaggcccgaaagttcttccgccagattgtgtctgcgctggacttctgccacagctactccatctgccacagagacctaaagcccgagaacctgcttttggatgagaaaaacaacatccgcattgcagacttcggcatggcgtccctgcaggtgggggacagcctcctggagaccagctgcgggtccccccattatgcgtgtccagaggtgattaagggggaaaaatatgatggccgccgggcagacatgtggagctgtggagtcatcctcttcgccctgctcgtgggggctctgccctttgatgacgacaacctccgccagctgctggagaaggtgaaacggggcgtcttccacatgccccacttcattcctccagattgccagagcctcctgaggggaatgatcgaagtggagcccgaaaaaaggctcagtctggagcaaattcagaaacatccttggtacctaggcgggaaacacgagccagacccgtgcctggagccagcccctggccgccgggtagccatgcggagcctgccatccaacggagagctggaccccgacgtcctagagagcatggcatcactgggctgcttcagggaccgcgagaggctgcatcgcgagctgcgcagtgaggaggagaaccaagaaaagatgatatattatctgcttttggatcggaaggagcggtatcccagctgtgaggaccaggacctgcctccccggaatgatgttgaccccccccggaagcgtgtggattctcccatgctgagccgtcacgggaagcggcgaccagagcggaagtccatggaagtcctgagcatcaccgatgccgggggtggtggctcccctgtacccacccgacgggccttggagatggcccagcacagccagagatcccgtagcgtcagtggagcctccacgggtctgtcctccagccctctaagcagcccaaggagtccggtcttttccttttcaccggagccgggggctggagatgaggctcgaggcgggggctccccgacttccaaaacgcagacgctgccttctcggggccccaggggtgggggcgccggggagcagcccccgccccccagtgcccgctccacacccctgcccggccccccaggctccccgcgctcctctggcgggacccccttgcactcgcctctgcacacgccccgggccagtcccaccgggaccccggggacaacaccaccccccagccccggcggtggcgtcgggggagccgcctggaggagtcgtctcaactccatccgcaacagcttcctgggctcccctcgctttcaccggcgcaagatgcaggtccctaccgctgaggagatgtccagcttgacgccagagtcctccccggagctggcaaaacgctcctggttcgggaacttcatctccttggacaaagaagaacaaatattcctcgtgctaaaggacaaacctctcagcagcatcaaagcagacatcgtccatgcctttctgtcgatccccagcctgagtcacagtgtgctgtcacagaccagcttcagggccgagtacaaggccagtggcggcccctccgtcttccaaaagcccgtccgcttccaggtggacatcagctcctctgagggtccagagccctccccgcgacgggacggcagcggaggtggtggcatctactccgtcaccttcactctcatctcgggtcccagccgtcggttcaagcgagtggtggagaccatccaggcacagctcctgagcactcatgaccagccctccgtgcaggccctggcagacgagaagaacggggcccagacccggcctgctggtgccccaccccgaagcctgcagcccccacccggccgcccagacccagagctgagcagctctccccgccgaggcccccccaaggacaagaagctcctggccaccaacgggacccctctgccctgaccccacggggccggggagggaggggacccccctccaccccccttccgtgccccccaactgtgaatctgtaaataaggcccaaggaacatgtcgggaggggggtggacacaaaaaccggccttgccctgcagggatggggctccacaggccgtgcccaactgggggtggttctaggggaacagggggcgggggagctgtttctattttatttattgattaatttattattttatttattgatcaatctctctgcggggtggggtgggggagggacgggagctggttggggtggcttagcagatccggacagggccctctgtccctgtgtcgtccccaaccccctcttcccgggcccctcctcccctggtcctccccccacgaccttctgtacggatttgctctccggaaggaattctggtttcgcgtgatcctgcctgcgtccgtgtctctgattccgccggcggc

SEQ ID NO: 223978 - DNA, 2337 bp, Artificial Sequence
  derived and/or modified sequence
atgagcagcggcgccaaggagggcggcggcggcagccccgcctaccacctgccccacccccacccccaccccccccagcacgcccagtacgtgggcccctacagactggagaagaccctgggcaagggccagaccggcctggtgaagctgggcgtgcactgcatcaccggccagaaggtggccatcaagatcgtgaacagagagaagctgagcgagagcgtgctgatgaaggtggagagagagatcgccatcctgaagctgatcgagcacccccacgtgctgaagctgcacgacgtgtacgagaacaagaagtacctgtacctggtgctggagcacgtgagcggcggcgagctgttcgactacctggtgaagaagggcagactgacccccaaggaggccagaaagttcttcagacagatcgtgagcgccctggacttctgccacagctacagcatctgccacagagacctgaagcccgagaacctgctgctggacgagaagaacaacatcagaatcgccgacttcggcatggccagcctgcaggtgggcgacagcctgctggagaccagctgcggcagcccccactacgcctgccccgaggtgatcaagggcgagaagtacgacggcagaagagccgacatgtggagctgcggcgtgatcctgttcgccctgctggtgggcgccctgcccttcgacgacgacaacctgagacagctgctggagaaggtgaagagaggcgtgttccacatgccccacttcatcccccccgactgccagagcctgctgagaggcatgatcgaggtggagcccgagaagagactgagcctggagcagatccagaagcacccctggtacctgggcggcaagcacgagcccgacccctgcctggagcccgcccccggcagaagagtggccatgagaagcctgcccagcaacggcgagctggaccccgacgtgctggagagcatggccagcctgggctgcttcagagacagagagagactgcacagagagctgagaagcgaggaggagaaccaggagaagatgatctactacctgctgctggacagaaaggagagataccccagctgcgaggaccaggacctgccccccagaaacgacgtggacccccccagaaagagagtggacagccccatgctgagcagacacggcaagagaagacccgagagaaagagcatggaggtgctgagcatcaccgacgccggcggcggcggcagccccgtgcccaccagaagagccctggagatggcccagcacagccagagaagcagaagcgtgagcggcgccagcaccggcctgagcagcagccccctgagcagccccagaagccccgtgttcagcttcagccccgagcccggcgccggcgacgaggccagaggcggcggcagccccaccagcaagacccagaccctgcccagcagaggccccagaggcggcggcgccggcgagcagccccccccccccagcgccagaagcacccccctgcccggcccccccggcagccccagaagcagcggcggcacccccctgcacagccccctgcacacccccagagccagccccaccggcacccccggcaccacccccccccccagccccggcggcggcgtgggcggcgccgcctggagaagcagactgaacagcatcagaaacagcttcctgggcagccccagattccacagaagaaagatgcaggtgcccaccgccgaggagatgagcagcctgacccccgagagcagccccgagctggccaagagaagctggttcggcaacttcatcagcctggacaaggaggagcagatcttcctggtgctgaaggacaagcccctgagcagcatcaaggccgacatcgtgcacgccttcctgagcatccccagcctgagccacagcgtgctgagccagaccagcttcagagccgagtacaaggccagcggcggccccagcgtgttccagaagcccgtgagattccaggtggacatcagcagcagcgagggccccgagcccagccccagaagagacggcagcggcggcggcggcatctacagcgtgaccttcaccctgatcagcggccccagcagaagattcaagagagtggtggagaccatccaggcccagctgctgagcacccacgaccagcccagcgtgcaggccctggccgacgagaagaacggcgcccagaccagacccgccggcgccccccccagaagcctgcagcccccccccggcagacccgaccccgagctgagcagcagccccagaagaggcccccccaaggacaagaagctgctggccaccaacggcacccccctgccctag

SEQ ID NO: 223979 - protein, 616 aa, Artificial Sequence
  derived and/or modified sequence
MFRTAVMMAASLALTGAVVAHAYYLKHQFYPTVVYLTKSSPSMAVLYIQAFVLVFLLGKVMGKVFFGQLRAAEMEHLLERSWYAVTETCLAFTVFRDDFSPRFVALFTLLLFLKCFHWLAEDRVDFMERSPNISWLFHCRIVSLMFLLGILDFLFVSHAYHSILTRGASVQLVFGFEYAILMTMVLTIFIKYVLHSVDLQSENPWDNKAVYMLYTELFTGFIKVLLYMAFMTIMIKVHTFPLFAIRPMYLAMRQFKKAVTDAIMSRRAIRNMNTLYPDATPEELQAMDNVCIICREEMVTGAKRLPCNHIFHTSCLRSWFQRQQTCPTCRMDVLRASLPAQSPPPPEPADQGPPPAPHPPPLLPQPPNFPQGLLPPFPPGMFPLWPPMGPFPPVPPPPSSGEAVAPPSTSAALSRPSGAATTTAAGTSATAASATASGPGSGSAPEAGPAPGFPFPPPWMGMPLPPPFAFPPMPVPPAGFAGLTPEELRALEGHERQHLEARLQSLRNIHTLLDAAMLQINQYLTVLASLGPPRPATSVNSTEETATTVVAAASSTSIPSSEATTPTPGASPPAPEMERPPAPESVGTEEMPEDGEPDAAELRRRRLQKLESPVAH

SEQ ID NO: 223980 - protein, 565 aa, Artificial Sequence
  derived and/or modified sequence
MFRTAVMMAASLALTGAVVAHAYYLKHQFYPTVVYLTKSSPSMAVLYIQAFVLVFLLGKVMGKVFFGQLRAAEMEHLLERSWYAVTETCLAFTVFRDDFSPRFVALFTLLLFLKCFHWLAEDRVDFYAILMTMVLTIFIKYVLHSVDLQSENPWDNKAVYMLYTELFTGFIKVLLYMAFMTIMIKVHTFPLFAIRPMYLAMRQFKKAVTDAIMSRRAIRNMNTLYPDATPEELQAMDNVCIICREEMVTGAKRLPCNHIFHTSCLRSWFQRQQTCPTCRMDVLRASLPAQSPPPPEPADQGPPPAPHPPPLLPQPPNFPQGLLPPFPPGMFPLWPPMGPFPPVPPPPSSGEAVAPPSTSAALSRPSGAATTTAAGTSATAASATASGPGSGSAPEAGPAPGFPFPPPWMGMPLPPPFAFPPMPVPPAGFAGLTPEELRALEGHERQHLEARLQSLRNIHTLLDAAMLQINQYLTVLASLGPPRPATSVNSTEETATTVVAAASSTSIPSSEATTPTPGASPPAPEMERPPAPESVGTEEMPEDGEPDAAELRRRRLQKLESPVAH

SEQ ID NO: 223981 - DNA, 174 bp, Artificial Sequence
  derived and/or modified sequence
atgggcaccgccgtggggccccaccattcccctgccccccatgacagtgcccttcccgcccggctcctcacaagtgatttcccctacggccggagctgtcagattgagcaggtgaaatatagcgtacctgataccggcttgttccagcactgggaggggtccataccaacctag

SEQ ID NO: 223982 - DNA, 1851 bp, Artificial Sequence
  derived and/or modified sequence
atgttcagaaccgccgtgatgatggccgccagcctggccctgaccggcgccgtggtggcccacgcctactacctgaagcaccagttctaccccaccgtggtgtacctgaccaagagcagccccagcatggccgtgctgtacatccaggccttcgtgctggtgttcctgctgggcaaggtgatgggcaaggtgttcttcggccagctgagagccgccgagatggagcacctgctggagagaagctggtacgccgtgaccgagacctgcctggccttcaccgtgttcagagacgacttcagccccagattcgtggccctgttcaccctgctgctgttcctgaagtgcttccactggctggccgaggacagagtggacttcatggagagaagccccaacatcagctggctgttccactgcagaatcgtgagcctgatgttcctgctgggcatcctggacttcctgttcgtgagccacgcctaccacagcatcctgaccagaggcgccagcgtgcagctggtgttcggcttcgagtacgccatcctgatgaccatggtgctgaccatcttcatcaagtacgtgctgcacagcgtggacctgcagagcgagaacccctgggacaacaaggccgtgtacatgctgtacaccgagctgttcaccggcttcatcaaggtgctgctgtacatggccttcatgaccatcatgatcaaggtgcacaccttccccctgttcgccatcagacccatgtacctggccatgagacagttcaagaaggccgtgaccgacgccatcatgagcagaagagccatcagaaacatgaacaccctgtaccccgacgccacccccgaggagctgcaggccatggacaacgtgtgcatcatctgcagagaggagatggtgaccggcgccaagagactgccctgcaaccacatcttccacaccagctgcctgagaagctggttccagagacagcagacctgccccacctgcagaatggacgtgctgagagccagcctgcccgcccagagcccccccccccccgagcccgccgaccagggccccccccccgccccccaccccccccccctgctgccccagccccccaacttcccccagggcctgctgccccccttcccccccggcatgttccccctgtggccccccatgggccccttcccccccgtgccccccccccccagcagcggcgaggccgtggccccccccagcaccagcgccgccctgagcagacccagcggcgccgccaccaccaccgccgccggcaccagcgccaccgccgccagcgccaccgccagcggccccggcagcggcagcgcccccgaggccggccccgcccccggcttccccttcccccccccctggatgggcatgcccctgcccccccccttcgccttcccccccatgcccgtgccccccgccggcttcgccggcctgacccccgaggagctgagagccctggagggccacgagagacagcacctggaggccagactgcagagcctgagaaacatccacaccctgctggacgccgccatgctgcagatcaaccagtacctgaccgtgctggccagcctgggcccccccagacccgccaccagcgtgaacagcaccgaggagaccgccaccaccgtggtggccgccgccagcagcaccagcatccccagcagcgaggccaccacccccacccccggcgccagcccccccgcccccgagatggagagaccccccgcccccgagagcgtgggcaccgaggagatgcccgaggacggcgagcccgacgccgccgagctgagaagaagaagactgcagaagctggagagccccgtggcccactag

SEQ ID NO: 223983 - DNA, 1698 bp, Artificial Sequence
  derived and/or modified sequence
atgttcagaaccgccgtgatgatggccgccagcctggccctgaccggcgccgtggtggcccacgcctactacctgaagcaccagttctaccccaccgtggtgtacctgaccaagagcagccccagcatggccgtgctgtacatccaggccttcgtgctggtgttcctgctgggcaaggtgatgggcaaggtgttcttcggccagctgagagccgccgagatggagcacctgctggagagaagctggtacgccgtgaccgagacctgcctggccttcaccgtgttcagagacgacttcagccccagattcgtggccctgttcaccctgctgctgttcctgaagtgcttccactggctggccgaggacagagtggacttctacgccatcctgatgaccatggtgctgaccatcttcatcaagtacgtgctgcacagcgtggacctgcagagcgagaacccctgggacaacaaggccgtgtacatgctgtacaccgagctgttcaccggcttcatcaaggtgctgctgtacatggccttcatgaccatcatgatcaaggtgcacaccttccccctgttcgccatcagacccatgtacctggccatgagacagttcaagaaggccgtgaccgacgccatcatgagcagaagagccatcagaaacatgaacaccctgtaccccgacgccacccccgaggagctgcaggccatggacaacgtgtgcatcatctgcagagaggagatggtgaccggcgccaagagactgccctgcaaccacatcttccacaccagctgcctgagaagctggttccagagacagcagacctgccccacctgcagaatggacgtgctgagagccagcctgcccgcccagagcccccccccccccgagcccgccgaccagggccccccccccgccccccaccccccccccctgctgccccagccccccaacttcccccagggcctgctgccccccttcccccccggcatgttccccctgtggccccccatgggccccttcccccccgtgccccccccccccagcagcggcgaggccgtggccccccccagcaccagcgccgccctgagcagacccagcggcgccgccaccaccaccgccgccggcaccagcgccaccgccgccagcgccaccgccagcggccccggcagcggcagcgcccccgaggccggccccgcccccggcttccccttcccccccccctggatgggcatgcccctgcccccccccttcgccttcccccccatgcccgtgccccccgccggcttcgccggcctgacccccgaggagctgagagccctggagggccacgagagacagcacctggaggccagactgcagagcctgagaaacatccacaccctgctggacgccgccatgctgcagatcaaccagtacctgaccgtgctggccagcctgggcccccccagacccgccaccagcgtgaacagcaccgaggagaccgccaccaccgtggtggccgccgccagcagcaccagcatccccagcagcgaggccaccacccccacccccggcgccagcccccccgcccccgagatggagagaccccccgcccccgagagcgtgggcaccgaggagatgcccgaggacggcgagcccgacgccgccgagctgagaagaagaagactgcagaagctggagagccccgtggcccactag

SEQ ID NO: 223984 - DNA, 1854 bp, Artificial Sequence
  derived and/or modified sequence
atgttcagaaccgccgtgatgatggccgccagcctggccctgaccggcgccgtggtggcccacgcctactacctgaagcaccagttctaccccaccgtggtgtacctgaccaagagcagccccagcatggccgtgctgtacatccaggccttcgtgctggtgttcctgctgggcaaggtgatgggcaaggtgttcttcggccagctgagagccgccgagatggagcacctgctggagagaagctggtacgccgtgaccgagacctgcctggccttcaccgtgttcagagacgacttcagccccagattcgtggccctgttcaccctgctgctgttcctgaagtgcttccactggctggccgaggacagagtggacttcatggagagaagccccaacatcagctggctgttccactgcagaatcgtgagcctgatgttcctgctgggcatcctggacttcctgttcgtgagccacgcctaccacagcatcctgaccagaggcgccagcgtgcagctggtgttcggcttcgagtacgccatcctgatgaccatggtgctgaccatcttcatcaagtacgtgctgcacagcgtggacctgcagagcgagaacccctgggacaacaaggccgtgtacatgctgtacaccgagctgttcaccggcttcatcaaggtgctgctgtacatggccttcatgaccatcatgatcaaggtgcacaccttccccctgttcgccatcagacccatgtacctggccatgagacagttcaagaaggccgtgaccgacgccatcatgagcagaagagccatcagaaacatgaacaccctgtaccccgacgccacccccgaggagctgcaggccatggacaacgtgtgcatcatctgcagagaggagatggtgaccggcgccaagagactgccctgcaaccacatcttccacaccagctgcctgagaagctggttccagagacagcagacctgccccacctgcagaatggacgtgctgagagccagcctgcccgcccagagcccccccccccccgagcccgccgaccagggccccccccccgccccccaccccccccccctgctgccccagccccccaacttcccccagggcctgctgccccccttcccccccggcatgttccccctgtggccccccatgggccccttcccccccgtgccccccccccccagcagcggcgaggccgtggccccccccagcaccagcgccgccgccctgagcagacccagcggcgccgccaccaccaccgccgccggcaccagcgccaccgccgccagcgccaccgccagcggccccggcagcggcagcgcccccgaggccggccccgcccccggcttccccttcccccccccctggatgggcatgcccctgcccccccccttcgccttcccccccatgcccgtgccccccgccggcttcgccggcctgacccccgaggagctgagagccctggagggccacgagagacagcacctggaggccagactgcagagcctgagaaacatccacaccctgctggacgccgccatgctgcagatcaaccagtacctgaccgtgctggccagcctgggcccccccagacccgccaccagcgtgaacagcaccgaggagaccgccaccaccgtggtggccgccgccagcagcaccagcatccccagcagcgaggccaccacccccacccccggcgccagcccccccgcccccgagatggagagaccccccgcccccgagagcgtgggcaccgaggagatgcccgaggacggcgagcccgacgccgccgagctgagaagaagaagactgcagaagctggagagccccgtggcccactag

SEQ ID NO: 223985 - DNA, 1890 bp, Artificial Sequence
  derived and/or modified sequence
atgttcagaaccgccgtgatgatggccgccagcctggccctgaccggcgccgtggtggcccacgcctactacctgaagcaccagttctaccccaccgtggtgtacctgaccaagagcagccccagcatggccgtgctgtacatccaggccttcgtgctggtgttcctgctgggcaaggtgatgggcaaggtgttcttcggccagctgagagccgccgagatggagcacctgctggagagaagctggtacgccgtgaccgagacctgcctggccttcaccgtgttcagagacgacttcagccccagattcgtggccctgttcaccctgctgctgttcctgaagtgcttccactggctggccgaggacagagtggacttcatggagagaagccccaacatcagctggctgttccactgcagaatcgtgagcctgatgttcctgctgggcatcctggacttcctgttcgtgagccacgcctaccacagcatcctgaccagaggcgccagcgtgcagctggtgttcggcttcgagtacgccatcctgatgaccatggtgctgaccatcttcatcaagtacgtgctgcacagcgtggacctgcagagcgagaacccctgggacaacaaggccgtgtacatgctgtacaccgagctgttcaccggcttcatcaaggtgctgctgtacatggccttcatgaccatcatgatcaaggtgcacaccttccccctgttcgccatcagacccatgtacctggccatgagacagttcaagaaggccgtgaccgacgccatcatgagcagaagagccatcagaaacatgaacaccctgtaccccgacgccacccccgaggagctgcaggccatggacaacgtgtgcatcatctgcagagaggagatggtgaccggcgccaagagactgccctgcaaccacatcttccacaccagctgcctgagaagctggttccagagacagcagacctgccccacctgcagaatggacgtgctgagagccagcctgcccgcccagagcccccccccccccgagcccgccgaccagggccccccccccgccccccaccccccccccctgctgccccagccccccaacttcccccagggcctgctgccccccttcccccccggcatgttccccctgtggccccccatgggccccttcccccccgtgccccccccccccagcagcggcgaggccgtggccccccccagcaccagcgccgccgccctgagcagacccagcggcgccgccaccaccaccgccgccggcaccagcgccaccgccgccagcgccaccgccagcggccccggcagcggcagcgcccccgaggccggccccgcccccggcttccccttcccccccccctggatgggcatgcccctgcccccccccttcgccttcccccccatgcccgtgccccccgccggcttcgccggcctgacccccgaggagctgagagccctggagggccacgagagacagcacctggaggccagactgcagagcctgagaaacatccacaccctgctggacgccgccatgctgcagatcaaccagtacctgaccgtgctggccagcctgggcccccccggcctgcccctgcagagcacccccctgagaagactgcccctgcagctgctgctgctgccccccccccccgccagcctggcccagagacccagaccccagccccaggagcccccccaccagcccctgaagtggaagggcctgcagctgctgagccagtgggcccagagaagatgcctgagaatggagagccccatgcagcagagcagcgccggcgccgcctgcagaagctggagcctgctgctgcccaccgacaccgcccccgcccagccccagcccctgctgttctag

SEQ ID NO: 223986 - DNA, 1851 bp, Artificial Sequence
  derived and/or modified sequence
atgttccgtacggccgtgatgatggccgcaagtctcgctctgacaggcgcagtcgtggcccacgcttattaccttaaacatcagttctaccctactgtcgtctatcttacaaagtcgtctcccagtatggctgtgctgtacattcaggccttcgtactcgtgtttctgctgggaaaggtgatgggtaaagtgttcttcggacagctgagagccgcggagatggaacacctgttagagcgctcatggtacgcagttaccgaaacgtgcttagcctttactgtcttccgcgacgattttagcccacggtttgtggctctgtttacgcttctcctcttcctcaagtgtttccactggcttgccgaagaccgcgttgactttatggagcggtctccaaacatttcttggctgtttcactgccgtattgtaagtctgatgtttctgttaggaatcttggactttctcttcgtgagccacgcctatcacagcattctcacacgaggcgcctcagtgcagctagttttcggcttcgagtatgcaatattgatgaccatggtgctgaccattttcatcaaatacgtgttgcactctgtggatctgcagtcggagaatccatgggacaataaggctgtgtacatgttatacacagaactcttcacaggcttcatcaaggtcctcctgtacatggcatttatgacaatcatgattaaggtacacactttcccgttgtttgcaatacggcctatgtatctggcaatgaggcagttcaagaaggccgtaaccgacgccatcatgtccaggcgcgccatcagaaacatgaacaccctctatccagatgcgactccagaagagctgcaggctatggataatgtttgcatcatctgtcgcgaggagatggtgactggggctaagagactcccctgcaatcacatttttcataccagctgtctaagatcatggtttcagcgccaacagacatgcccaacttgtcgcatggatgtgctccgtgcctctctgccagcacagtcaccaccacctccagaacccgccgaccaggggccaccccccgccccacacccccctccacttctgcctcaacctcctaacttcccccaggggctgcttcctccctttccaccagggatgttcccactttggcctcccatgggcccgttcccacccgtgcccccgccaccatctagcggtgaagcggtggcccctcccagcaccagcgctgctctcagccgacccagtggggcagccacaaccacagccgccggcacctccgcaactgccgccagtgctacggctagcggacctgggagcggtagcgcccctgaggccggcccggcccccggttttccttttcccccaccatggatgggcatgcctctgccccctccgtttgccttcccacctatgcctgtaccaccagccggcttcgctggattgacccctgaagaactacgggccttggagggccacgaacggcaacacctcgaagcgagactccagtccttaaggaacattcataccctattggatgccgctatgctccaaatcaaccaatatctcactgtcctggcgtcgctgggaccccctaggcctgccaccagtgtcaactccacagaagagaccgccactacagtcgtcgccgcagctagctccacgtccattccgagcagtgaagctaccacccccacccccggcgcctcccctcccgcccctgagatggagaggccaccggcccctgaatcagtcgggaccgaagagatgccagaggatggtgaacctgacgccgcagaactccggaggcggcgcctgcagaaactggagagtccagttgcccattag

SEQ ID NO: 223987 - DNA, 1698 bp, Artificial Sequence
  derived and/or modified sequence
atgtttcgcactgctgtgatgatggccgcgtcattggccttgactggcgcagtggtggctcacgcctattatttaaagcaccagttctaccccacagtggtttacctgacgaagtcctccccttccatggccgtgctctacattcaggccttcgtattggttttccttctggggaaagtaatgggcaaagtattcttcggccagctgagagccgccgaaatggagcatctgctggagagaagctggtatgcagtcactgagacgtgtctcgcttttacggtttttcgggatgatttcagtcctcgctttgtggccctcttcacactcctgctttttctgaagtgtttccattggcttgcagaggatagggtagatttctacgccatcctcatgacaatggtactcactatttttatcaagtatgtactgcacagcgtcgatttacaatcagagaatccttgggataataaggcggtgtatatgctttacacagaactgtttactggctttattaaggtgctcctgtatatggcattcatgaccattatgattaaggttcatacttttcccctcttcgccattaggccgatgtatttagctatgcgccagtttaaaaaggcagtgactgacgccatcatgagtagacgcgccattcgtaacatgaacacgttgtatccagacgcgaccccagaggagttgcaagccatggacaatgtgtgtatcatctgtagggaggaaatggtgacaggggctaaacgcttgccatgcaaccatatttttcacacttcttgcctcaggtcatggttccagcggcagcagacgtgccccacgtgtcggatggatgtgctgcgcgctagcctcccggcccaaagcccccctcctccagaaccagcagatcagggccccccgcccgcgccccacccaccccctcttctgccacagccccccaattttccccagggattgctccctcccttcccccccggaatgttccccctttggcctcccatggggccattcccacccgttccccctccacctagttcaggggaggccgtagctccaccatctactagcgctgccctctcgcggccatccggggcagccactaccacagcggctgggacgtcggcaactgccgccagtgccactgcctctggcccaggctcaggctctgctccagaggctggccccgctccaggatttccctttccgcccccatggatgggaatgcccctccccccaccattcgccttcccaccaatgcctgttccccccgctggatttgccggtctaacccctgaggagcttagagcgctcgaaggccatgaacgacagcacctggaagccagactccaatcactccggaatatccataccctgctggatgcagccatgctgcaaatcaaccaatatctgaccgtacttgcatctctgggaccaccgcggccagcaacctccgttaatagcaccgaggaaacagctacaacggtagtcgcagccgcaagttctacatctatcccatcttccgaggccaccacgcccactccaggcgcttcccctcccgcccccgaaatggaaaggcccccggccccagagagcgtaggaacggaggagatgcccgaggacggtgagccagatgctgctgaactgcgcagaagacggctgcagaaacttgagagtccagtggcacactag

SEQ ID NO: 223988 - DNA, 1854 bp, Artificial Sequence
  derived and/or modified sequence
atgttccggactgctgtgatgatggcagcttccctagccttgactggggcagtcgtagcacacgcttactatctgaagcaccagttttatcctactgtggtatacttgactaagtctagcccctctatggctgtcctgtacatccaggcctttgttctggtgttcttgttgggtaaggtgatgggcaaggtcttcttcggccagctcagggctgcagagatggaacatctgctcgaaagatcctggtacgcagtgactgagacctgcctggcctttactgtgtttagagatgactttagcccacgatttgtcgcattgttcacgttgctactctttctcaagtgtttccattggctggcagaagaccgtgtagatttcatggagcgttcacctaatatcagctggctgttccattgccgtatcgtgtcactcatgtttctcctgggcatcctcgatttcctgtttgttagtcatgcgtaccactcgatcctaacccgcggagcctccgtgcaactggtgtttggcttcgaatacgcaatcttgatgaccatggtgttgacaatctttatcaagtatgtgctacacagtgtagacctgcagagtgagaacccctgggacaataaggccgtatacatgctgtatacagaattgttcaccggcttcattaaggtgctgctatatatggcgtttatgacgataatgattaaagttcacaccttcccattatttgccattaggcccatgtatctggctatgaggcagttcaagaaagccgtgacggacgctatcatgtcccggcgagctatacgcaacatgaacactctgtaccccgacgcgacacctgaagaactgcaggccatggacaacgtttgcattatatgccgagaggaaatggttacgggcgccaaaaggctgccctgtaaccatatcttccacacctcttgcctgaggagctggtttcagaggcagcagacttgcccaacctgccgcatggacgtgctgagggcgtctttgcctgctcaatcaccccctccccccgagcctgcagaccagggtccaccacctgccccacaccccccacccctgttgccccaaccacctaattttcctcaaggcctgctcccgccctttccccctggtatgtttcccctgtggccccccatgggaccctttcctcccgtgccaccacctccgagctccggggaagccgtcgcccccccctcaactagtgccgccgccctgagcaggccgagcggcgccgcgactactaccgctgcagggaccagcgccacagccgcctcggccaccgcctctgggcccgggagtggcagcgccccagaggccggccctgcgccagggtttccgttccctcccccgtggatggggatgcccctaccaccccccttcgcctttccccccatgcccgtacccccagccggtttcgccggcctgacacctgaggagttgcgtgcattggagggacatgagcgtcagcatctggaggcccggctccagtcgttaagaaacatacacacactgctcgatgccgccatgttacagatcaaccaatatctaactgtgctcgcgagtctcggacctccccggccggctacttcagtgaattctaccgaagaaacagcaacaactgttgtggcggctgccagcagtacaagcatcccctcctctgaggccacgactcctacgccgggggcaagcccccctgcgcctgagatggagcgaccacccgcaccagaaagtgtgggaacagaagagatgccagaagacggagaacccgacgccgcagaactccgtcgaaggcggctccagaaactggaaagtcccgtggcacactag

SEQ ID NO: 223989 - DNA, 1890 bp, Artificial Sequence
  derived and/or modified sequence
atgttcaggacggctgtgatgatggcagcatctctggcgctcaccggagcagtggttgcccacgcatattatttgaaacaccagttttatcctacagtcgtctacctgaccaaatcttcgccatcaatggccgtactctacatccaggccttcgtcctcgtcttccttctcggtaaagtgatgggcaaagtattctttggccagttgagagctgccgagatggagcacctcctggagcgctcctggtatgctgtcacagaaacctgtctggcgttcacagtttttcgcgacgatttttcaccacgcttcgtcgcattatttactctgttactgttcttaaaatgtttccactggctcgcagaggatcgggtagattttatggaaagatcaccgaatatatcatggctgtttcactgtcgcattgtctcactaatgttcctgctgggaatcctcgatttcttgttcgtgtcccacgcctatcatagtatcttgacccgcggcgcttccgtgcaactcgttttcggttttgagtatgcgatcctgatgaccatggtgctgacaatctttatcaagtacgtcctgcattctgtggacctgcagtctgaaaatccttgggacaacaaggccgtgtatatgctatacacagagctgtttacgggatttattaaggttcttctgtatatggccttcatgacaataatgattaaggtccacacttttcccctgttcgccataaggcccatgtacctggcgatgcgccagttcaagaaagccgttaccgacgctatcatgagtcgacgtgcaatcaggaatatgaacacactgtaccctgacgccactcctgaagaattgcaagctatggacaacgtgtgtattatctgtagagaagagatggtcacaggagctaagcgcctcccgtgcaaccacatctttcatacgtcctgtctgagaagctggtttcagagacaacagacttgtcccacttgccgtatggatgtgctgagagcttccctgccggcgcaaagtcctcctccacccgaacccgctgatcagggcccccccccagctccccatccaccccctttactgccccagccaccaaactttccccagggtctgcttcctcccttcccacctggaatgtttcctctctggcccccaatgggtccctttcctcccgtgcctcccccaccatccagcggcgaggccgtcgcacccccttcaacctcagccgctgccctgagccggccaagtggtgcagccactaccacagcagctggcacctcagctaccgcggcatctgccaccgccagcggtcccggttctgggagcgcacccgaagccggacccgcccccggtttccctttcccccctccttggatggggatgcccctgccaccaccatttgcatttccccccatgcctgtccctccagccggattcgcaggcttgacccctgaggagctcagagcattggagggacacgagagacaacacttggaggcacgcttgcaatccttgcggaacatccacaccctcttagatgcggcaatgttgcagatcaatcaatacctgacagttttggcttcgcttggcccaccgggcctgcccctccagtccacccccctgcgtcgcctccctttgcaactcctcctcctgcctcccccaccggcttccctggcacagcgcccccgcccacagccccaagaacctccccatcagccgcttaagtggaaggggctgcagctccttagccagtgggcgcagaggaggtgccttaggatggaatcccccatgcagcagtcctcagccggtgctgcatgtaggagctggtccctgcttctccccaccgatacggcccccgcacagcctcagcctcttttgttctag

SEQ ID NO: 223990 - DNA, 1851 bp, Artificial Sequence
  derived and/or modified sequence
atgtttaggaccgctgttatgatggcagccagccttgctctcacaggagcagtggtggctcacgcctactacctgaagcaccagttttaccccacagttgtgtacctgacgaagtcatcacccagcatggctgtgctgtacattcaagcctttgtacttgtctttctcctggggaaagtgatggggaaagttttctttggacagcttagggccgcagaaatggagcatttactcgagaggtcctggtatgccgtgaccgagacgtgcctggctttcacggtgttccgggacgatttctctcccagattcgtggcactcttcacattactgctgttcctgaagtgtttccattggctggcagaagatagagtggattttatggaacgatcaccaaatatctcctggttgttccattgtaggattgtcagtctgatgtttctgctaggcatcctggatttcctgttcgtcagccacgcttaccactctatcctcacgcggggtgcgtcggttcagctggtgttcggattcgagtatgccattctgatgaccatggtgctgaccatttttatcaagtatgtcttacattcggtcgacctgcagtccgaaaacccctgggacaacaaagccgtgtacatgttatataccgagctctttaccgggttcattaaagtcctcctttacatggcatttatgaccatcatgatcaaggtgcacaccttcccccttttcgcaattcggcctatgtacctagccatgaggcagttcaaaaaagctgttaccgacgccatcatgagccggcgagccatcaggaatatgaatacactctaccctgacgctaccccagaagaactacaggccatggacaatgtctgtataatatgtagggaggagatggtgactggcgccaagaggctgccttgtaaccacatttttcacaccagctgccttaggagttggtttcagaggcaacagacttgccctacttgccggatggatgtgctgagggcaagtctgcctgcccagtcgcctcctccacccgagccagccgatcagggcccccctcctgcgccacaccccccgcccctgctgccccaaccacccaacttccctcaaggcttgctacccccattccccccaggcatgttcccactgtggcctccaatgggcccctttcctcccgtgcctccaccaccctcatctggggaagctgttgcccctccaagtaccagcgcagccttaagtcggccctccggagccgctactacaactgctgccggaacgagtgccaccgccgctagcgccacagcatcggggcctggcagtgggtccgcacccgaagctggaccggcaccagggttccctttcccaccaccctggatgggcatgccgctgcctccccctttcgcatttccacctatgccagtgcccccagcgggttttgcaggattaacccccgaggaactgcgcgcccttgagggtcatgaacgccagcacctcgaggccaggctacagagcctgcgcaatattcataccctactggacgcagctatgctgcaaattaaccaatatcttaccgtcttagcttcactaggcccacccaggcctgcaaccagcgtgaatagtacagaggagaccgctaccaccgtggtagctgccgcctcaagcacctccataccttcgtctgaagctaccacccccacccctggggcttcaccaccagcccccgagatggaaaggccaccggctccggagagtgtaggtaccgaggagatgcccgaggatggagagcccgacgccgcagaattgagaaggcgcaggctgcagaagctagagagtcccgttgcccactag

SEQ ID NO: 223991 - DNA, 1851 bp, Artificial Sequence
  derived and/or modified sequence
atgttcagaacagctgtgatgatggccgccagcctggccctgactggagctgtggtggcccacgcctactacctgaagcaccagttctaccccaccgtggtgtacctgaccaagagcagccccagcatggctgtgctgtacatccaggcctttgtgctggtgttcctgctgggcaaggtgatgggcaaggtgttcttcggccagctgcgggctgctgagatggagcacctgctggagaggtcctggtatgctgtgacagagacctgcctggccttcaccgtcttcagagatgacttcagccccaggtttgtggccctcttcaccctgctgctcttcctgaagtgcttccactggctggctgaagatagagtggacttcatggagaggagccccaacatctcctggctgttccactgcagaattgtgtccctgatgttcctgctgggcatcctggacttcctgtttgtgagccacgcctaccacagcatcctgaccaggggggcctctgtgcagctggtgtttggatttgaatatgccatcctgatgaccatggtgctgaccatcttcatcaagtatgtgctgcacagcgtggacctgcagagcgagaacccctgggacaacaaggctgtgtacatgctgtacacagagctgttcaccggcttcatcaaggtgctgctgtacatggccttcatgaccatcatgatcaaggtgcacaccttccccctgtttgccatccggcccatgtacctggccatgaggcagttcaagaaggctgtgacagatgccatcatgagccggcgggccatccggaacatgaacaccctgtacccagatgccaccccagaggagctgcaggccatggacaacgtgtgcatcatctgccgggaggagatggtgactggagccaagaggctgccctgcaaccacatcttccacaccagctgcctgcgctcctggttccagaggcagcagacctgccccacctgcaggatggatgtgctgcgggccagcctgcctgcccagagccccccacctcctgagcctgctgaccagggccccccaccagccccccaccccccacccctgctgccccagccccccaacttcccccagggcctgctgccccccttccccccaggcatgttccccctgtggccacccatgggccccttcccccctgtgcccccaccacccagcagcggggaggccgtggccccacccagcaccagcgctgccctgagccggcccagcggggccgccaccaccacagctgctggcaccagcgccacagctgccagcgccacagccagcggccctggcagcggcagcgcccctgaggccggccctgcccctggcttccccttccccccaccctggatgggcatgcccctgcccccaccatttgccttcccccccatgcctgtgcccccagctggctttgctggcctgaccccagaggagctgcgggccctggagggccacgagcggcagcacctggaggcccggctgcagagcctgaggaacatccacaccctgctggatgctgccatgctgcagatcaaccagtacctgactgtgctggccagcctgggcccccccaggcctgccacctctgtgaacagcacagaggagacagccaccaccgtggtggccgccgccagcagcaccagcatccccagcagcgaggccaccacccccacccctggggccagccccccagcccctgagatggagcggcccccagcccctgagagcgtgggcacagaggagatgccagaagatggagagccagatgctgctgagctgcggcggcggcggctgcagaagctggagagccctgtggcccactag

SEQ ID NO: 223992 - DNA, 1698 bp, Artificial Sequence
  derived and/or modified sequence
atgttcagaacagctgtgatgatggccgccagcctggccctgactggagctgtggtggcccacgcctactacctgaagcaccagttctaccccaccgtggtgtacctgaccaagagcagccccagcatggctgtgctgtacatccaggcctttgtgctggtgttcctgctgggcaaggtgatgggcaaggtgttcttcggccagctgcgggctgctgagatggagcacctgctggagaggtcctggtatgctgtgacagagacctgcctggccttcaccgtcttcagagatgacttcagccccaggtttgtggccctcttcaccctgctgctcttcctgaagtgcttccactggctggctgaagatagagtggacttctacgccatcctgatgaccatggtgctgaccatcttcatcaagtatgtgctgcacagcgtggacctgcagagcgagaacccctgggacaacaaggctgtgtacatgctgtacacagagctgttcaccggcttcatcaaggtgctgctgtacatggccttcatgaccatcatgatcaaggtgcacaccttccccctgtttgccatccggcccatgtacctggccatgaggcagttcaagaaggctgtgacagatgccatcatgagcagaagagccatccggaacatgaacaccctgtacccagatgccaccccagaggagctgcaggccatggacaacgtgtgcatcatctgccgggaggagatggtgactggagccaagaggctgccctgcaaccacatcttccacaccagctgcctgcgctcctggttccagaggcagcagacctgccccacctgcaggatggatgtgctgcgggccagcctgcctgcccagagccccccacctcctgagcctgctgaccagggccccccaccagccccccaccccccacccctgctgccccagccccccaacttcccccagggcctgctgccccccttccccccaggcatgttccccctgtggccacccatgggccccttcccccctgtgcccccaccacccagcagtggagaggccgtggccccacccagcaccagcgctgccctgagccggcccagcggggccgccaccaccacagctgctggcaccagcgccacagctgccagcgccacagccagcggccctggcagcggcagcgcccctgaggccggccctgcccctggcttccccttccccccaccctggatgggcatgcccctgcccccaccatttgccttcccccccatgcctgtgcccccagctggctttgctggcctgaccccagaggagctgcgggccctggagggccacgagcggcagcacctggaggcccggctgcagagcctgaggaacatccacaccctgctggatgctgccatgctgcagatcaaccagtacctgactgtgctggccagcctgggcccccccaggcctgccacctctgtgaacagcacagaggagacagccaccaccgtggtggccgccgccagcagcaccagcatccccagcagcgaggccaccacccccacccctggggccagccccccagcccctgagatggagcggcccccagcccctgagagcgtgggcacagaggagatgccagaagatggagagccagatgctgctgagctgcggcggcggcggctgcagaagctggagagccctgtggcccactag

SEQ ID NO: 223993 - DNA, 1854 bp, Artificial Sequence
  derived and/or modified sequence
atgttcagaacagctgtgatgatggccgccagcctggccctgactggagctgtggtggcccacgcctactacctgaagcaccagttctaccccaccgtggtgtacctgaccaagagcagccccagcatggctgtgctgtacatccaggcctttgtgctggtgttcctgctgggcaaggtgatgggcaaggtgttcttcggccagctgcgggctgctgagatggagcacctgctggagaggtcctggtatgctgtgacagagacctgcctggccttcaccgtcttcagagatgacttcagccccaggtttgtggccctcttcaccctgctgctcttcctgaagtgcttccactggctggctgaagatagagtggacttcatggagaggagccccaacatctcctggctgttccactgcagaattgtgtccctgatgttcctgctgggcatcctggacttcctgtttgtgagccacgcctaccacagcatcctgaccaggggggcctctgtgcagctggtgtttggatttgaatatgccatcctgatgaccatggtgctgaccatcttcatcaagtatgtgctgcacagcgtggacctgcagagcgagaacccctgggacaacaaggctgtgtacatgctgtacacagagctgttcaccggcttcatcaaggtgctgctgtacatggccttcatgaccatcatgatcaaggtgcacaccttccccctgtttgccatccggcccatgtacctggccatgaggcagttcaagaaggctgtgacagatgccatcatgagccggcgggccatccggaacatgaacaccctgtacccagatgccaccccagaggagctgcaggccatggacaacgtgtgcatcatctgccgggaggagatggtgactggagccaagaggctgccctgcaaccacatcttccacaccagctgcctgcgctcctggttccagaggcagcagacctgccccacctgcaggatggatgtgctgcgggccagcctgcctgcccagagccccccacctcctgagcctgctgaccagggccccccaccagccccccaccccccacccctgctgccccagccccccaacttcccccagggcctgctgccccccttccccccaggcatgttccccctgtggccacccatgggccccttcccccctgtgcccccaccacccagcagcggggaggccgtggccccacccagcaccagcgctgctgccctgagccggcccagcggggccgccaccaccacagctgctggcaccagcgccacagctgccagcgccacagccagcggccctggcagcggcagcgcccctgaggccggccctgcccctggcttccccttccccccaccctggatgggcatgcccctgcccccaccatttgccttcccccccatgcctgtgcccccagctggctttgctggcctgaccccagaggagctgcgggccctggagggccacgagcggcagcacctggaggcccggctgcagagcctgaggaacatccacaccctgctggatgctgccatgctgcagatcaaccagtacctgactgtgctggccagcctgggcccccccaggcctgccacctctgtgaacagcacagaggagacagccaccaccgtggtggccgccgccagcagcaccagcatccccagcagcgaggccaccacccccacccctggggccagccccccagcccctgagatggagcggcccccagcccctgagagcgtgggcacagaggagatgccagaagatggagagccagatgctgctgagctgcggcggcggcggctgcagaagctggagagccctgtggcccactag

SEQ ID NO: 223994 - DNA, 1890 bp, Artificial Sequence
  derived and/or modified sequence
atgttcagaacagctgtgatgatggccgccagcctggccctgactggagctgtggtggcccacgcctactacctgaagcaccagttctaccccaccgtggtgtacctgaccaagagcagccccagcatggctgtgctgtacatccaggcctttgtgctggtgttcctgctgggcaaggtgatgggcaaggtgttcttcggccagctgcgggctgctgagatggagcacctgctggagaggtcctggtatgctgtgacagagacctgcctggccttcaccgtcttcagagatgacttcagccccaggtttgtggccctcttcaccctgctgctcttcctgaagtgcttccactggctggctgaagatagagtggacttcatggagaggagccccaacatctcctggctgttccactgcagaattgtgtccctgatgttcctgctgggcatcctggacttcctgtttgtgagccacgcctaccacagcatcctgaccaggggggcctctgtgcagctggtgtttggatttgaatatgccatcctgatgaccatggtgctgaccatcttcatcaagtatgtgctgcacagcgtggacctgcagagcgagaacccctgggacaacaaggctgtgtacatgctgtacacagagctgttcaccggcttcatcaaggtgctgctgtacatggccttcatgaccatcatgatcaaggtgcacaccttccccctgtttgccatccggcccatgtacctggccatgaggcagttcaagaaggctgtgacagatgccatcatgagccggcgggccatccggaacatgaacaccctgtacccagatgccaccccagaggagctgcaggccatggacaacgtgtgcatcatctgccgggaggagatggtgactggagccaagaggctgccctgcaaccacatcttccacaccagctgcctgcgctcctggttccagaggcagcagacctgccccacctgcaggatggatgtgctgcgggccagcctgcctgcccagagccccccacctcctgagcctgctgaccagggccccccaccagccccccaccccccacccctgctgccccagccccccaacttcccccagggcctgctgccccccttccccccaggcatgttccccctgtggccacccatgggccccttcccccctgtgcccccaccacccagcagcggggaggccgtggccccacccagcaccagcgctgctgccctgagccggcccagcggggccgccaccaccacagctgctggcaccagcgccacagctgccagcgccacagccagcggccctggcagcggcagcgcccctgaggccggccctgcccctggcttccccttccccccaccctggatgggcatgcccctgcccccaccatttgccttcccccccatgcctgtgcccccagctggctttgctggcctgaccccagaggagctgcgggccctggagggccacgagcggcagcacctggaggcccggctgcagagcctgaggaacatccacaccctgctggatgctgccatgctgcagatcaaccagtacctgactgtgctggccagcctgggccccccaggcctgcccctgcagagcacccccctgcggcggctgcccctgcagctgctgctgctgcccccacctccagccagcctggcccagaggccccggccccagccccaggagcccccccaccagcccctgaagtggaagggcctgcagctgctgagccagtgggcccagaggcgctgcctgaggatggagagccccatgcagcagagcagcgctggggccgcctgccgctcctggagcctgctgctgcccacagacacagccccagcccagccccagcccctgctcttctag

SEQ ID NO: 223995 - DNA, 1851 bp, Artificial Sequence
  derived and/or modified sequence
atgttccggaccgccgtgatgatggccgccagcctggccctgaccggagcagtggttgcccatgcctactacctgaaacatcagttttatcccacggtcgtctatctcactaaaagttctccgtccatggccgtgctctacattcaagcattcgttttggtgttcctgctaggcaaggtgatgggtaaggtgttttttggtcagctgagggcggctgagatggagcatttacttgaacgttcctggtatgccgttactgagacctgcctagcttttaccgtgttccgagacgactttagcccccggttcgttgctttgtttacacttctgctgtttctgaagtgcttccactggttggctgaagatcgtgttgatttcatggagcgatcccctaatatatcgtggttgttccattgccgcatcgtgtcgctgatgtttttgctgggcattctcgattttctctttgtttcacacgcctatcatagtatcctgacccggggagcgagcgtacagctggtgtttggcttcgagtacgccattctcatgaccatggtacttacaatcttcatcaagtatgtactccatagcgtcgatctccagagcgaaaacccatgggataacaaggctgtgtacatgctctatactgagttgtttactggcttcattaaagtgcttctgtatatggcatttatgacaatcatgataaaggtgcataccttccctctcttcgcaattcgacccatgtacctggccatgcgccagtttaagaaggctgtgactgacgcgatcatgtcacgccgagccatcagaaacatgaatactctttacccggacgctacccccgaagagctccaagcaatggataatgtctgtatcatttgtagggaggagatggtaacaggagcaaagcggctgccctgcaatcacatctttcacacaagttgcctcagaagttggttccagaggcaacagacctgcccgacatgtcggatggatgtgctgcgagcctctctgcccgcccagagtccccctccccccgaaccggcagatcaggggccgccccccgcaccacaccccccacctttgctgccccagccgcccaatttccctcagggactgctgccccctttcccccctggaatgttccctctttggccccctatgggacctttcccccctgtgccacctcccccctcctcgggcgaagcagttgctcccccgagcacaagtgccgccctgagcaggccgtcaggagctgcgactacaacagcagccggcaccagcgccaccgccgccagcgctaccgcttccggccccggatcagggtctgcccctgaggctggccccgcgcctggattccctttcccgcccccatggatgggtatgccattgccccccccattcgcctttccacccatgcccgttcctccagctgggtttgcggggctgactccagaagagctgcgggcgcttgaagggcatgaacgtcaacacctggaggccaggctgcagagccttcggaacatacacactttacttgacgcagctatgctgcagatcaatcagtatttgacagtgctggcctccctgggcccgccacgccccgccacaagcgtgaactccaccgaagagactgcgactactgttgtagcggctgccagcagcacctcgatcccctcctccgaggcgactactcccacacctggcgccagcccacctgctcccgagatggaacgccccccggctcccgaaagcgtgggcacagaggagatgcccgaggacggggaacccgatgcagctgaactcagacgccgacgcttgcagaagttagagtctccagtggcccattag

SEQ ID NO: 223996 - DNA, 1698 bp, Artificial Sequence
  derived and/or modified sequence
atgttccggaccgccgtgatgatggccgccagcctggccctgaccggggccgtggtggcacacgcctactaccttaaacatcaattttacccaactgttgtgtacctgactaaaagttctccttcaatggcagtgctttatatccaagccttcgtgctcgtgttcctgttaggcaaggtcatgggcaaggtcttttttggccagctgagagctgcagaaatggaacatctcttggaacgctcctggtatgctgtgacagaaacttgcctcgcttttactgtcttccgcgatgatttcagtcctcgcttcgtcgcgctgtttacacttctattattcctaaaatgctttcactggctcgctgaggacagggtggacttttatgctatcctcatgacaatggtgctgaccatttttataaagtacgtcttgcacagtgtggacttgcagtctgagaacccttgggacaataaagccgtgtatatgctttacaccgaactgtttacaggcttcatcaaagtactgctttatatggctttcatgaccatcatgatcaaggtccacaccttccccttatttgcgatacgcccaatgtatcttgccatgcgacaatttaagaaggccgtcacggacgccatcatgtcccgtagagctataaggaacatgaacacactgtatcctgacgcgacaccagaggagctgcaagccatggacaatgtatgcattatctgtagggaagagatggtgactggcgccaaaaggctgccttgcaaccatatttttcacacatcatgcctcagatcctggttccaacgccagcagacgtgtccaacctgtagaatggacgtactgcgcgcatctttacctgcccagtctcccccccctcccgagccagccgatcagggtccacccccagcgccacacccccctcctctgctgcctcaaccgccaaattttccccaaggcttattacccccattccctcccggcatgtttcccctctggcctccaatgggaccgtttcctccagttcctcctccaccctcatcaggtgaggccgtagccccaccctcaacgagcgccgccctttcaagaccctcaggagctgccaccacaaccgccgccgggacctctgcaacggcagcatcagccaccgcgtctggaccaggaagcggatccgccccggaggccggtcccgccccaggcttcccttttccccccccttggatgggtatgcctctgcctcccccatttgcctttccaccgatgcctgtgcctcctgccggatttgcaggactgacccccgaagagctgcgtgcgctcgaagggcatgagcggcagcatctggaagcgcgcctgcagtcgctcaggaatattcacactctgctggacgccgctatgttacagattaaccagtacctgactgtgctggcttctttgggcccgccccgccccgctaccagcgtgaattccactgaggaaaccgcaacgacagtggtagcggccgcgtcctctacctctatccccagttctgaggcaacgacacccacgcccggggcctcccctcctgccccagagatggagaggccacccgctcctgagtctgtgggcacagaagagatgccggaagatggtgagcccgatgctgccgaactaaggaggagaaggttgcaaaagttggagtctccagtggcacactag

SEQ ID NO: 223997 - DNA, 1854 bp, Artificial Sequence
  derived and/or modified sequence
atgttccggaccgccgtgatgatggccgccagcctggccctgaccggtgctgtggttgcacatgcctactacctaaagcaccagttctatcccactgtcgtctatctgactaaatcctctccgtctatggctgttctgtatatccaggctttcgttctggtcttcttgctaggcaaggtgatgggcaaggtcttcttcgggcagctacgggcggcagaaatggagcatctcctcgaacgttcttggtacgcagtgaccgagacttgcctggctttcactgtgttccgcgacgacttttctccccgttttgtcgccttgttcactctgctgcttttcttgaagtgctttcattggctggccgaggatcgcgtggacttcatggagcggtcgccaaatataagctggctattccattgccgcattgtctcccttatgttcctgttggggattctggactttctattcgtgagccatgcctaccactcgatcctgacgagaggagcttcagtgcagctagtctttggatttgaatatgccatcctcatgaccatggtgttaacaatcttcatcaaatatgtgctccatagcgtggacttgcagagcgaaaacccatgggataataaggccgtgtatatgctgtatactgagttgtttaccggcttcatcaaagtgctactctacatggcctttatgaccatcatgataaaggtccacacattcccactatttgcgatacggcctatgtatttggcgatgcgtcagttcaagaaggcggtgactgatgccatcatgagccgccgagcgatcagaaacatgaacactctgtaccctgacgccacccctgaggagctgcaggcgatggacaatgtgtgcatcatatgcagagaagaaatggtgactggggccaaacgcctcccgtgtaaccatatttttcacacaagctgtctgagaagctggttccagcgtcagcagacatgcccaacatgccgcatggatgtgttacgtgcttcactgcctgcccagagtccccctcccccagagcccgccgatcaggggcccccacccgcaccccacccacccccgctgctcccccaaccgcccaacttcccacaaggcctgctgccgcctttcccgccagggatgtttcctttgtggccccctatgggtccatttccacccgtccctccccctccatcctctggcgaggcggtcgcaccaccaagtacaagcgcagctgctctttcacgcccatccggtgcagcaacaactacagcggccgggactagcgccacggccgcttctgccacggcttcagggcccggaagcgggtccgcaccagaggcagggccagccccggggtttccctttcccccgccttggatgggcatgcctctaccaccacccttcgccttccctcccatgccggtacctcccgcaggcttcgccggactgacccctgaggagctgcgagccctcgaggggcacgagcgtcaacacctggaggctaggctgcagtctctgaggaatattcacacgctgctcgatgccgctatgctccagattaaccagtacctcacagtgctcgcatccctgggccctcccagaccggctaccagtgtgaacagtactgaggagacagctaccaccgtggtcgcggcagcttcttccacttcgatccccagttctgaagcaaccacgcccacgcccggcgccagcccaccagctccggagatggagcgaccgcctgctccagagagtgtgggtacagaagaaatgcctgaggatggtgagcccgatgcagccgagctccgaaggcgcaggcttcagaagctcgaatcccctgttgctcattag

SEQ ID NO: 223998 - DNA, 1890 bp, Artificial Sequence
  derived and/or modified sequence
atgttccggaccgccgtgatgatggccgccagcctggccctgaccggggcagtcgtggcccatgcctactatttaaagcatcagttttaccctacagtggtttacctgactaaaagctcaccatcaatggcagtgctgtacatccaggctttcgtgcttgtcttcctgctcggcaaggtgatgggtaaggtgttttttggacagctccgcgccgccgagatggagcacctattagagaggtcctggtatgcagtaaccgaaacatgcctggcttttacagtttttcgcgacgacttctccccaaggttcgtggcactcttcacactgctattgtttctaaagtgcttccactggcttgcagaagatagggttgacttcatggagcgctcaccaaacatcagctggctgtttcattgcaggatagtgagtctcatgttcctactggggattctcgactttttattcgtcagtcacgcttaccacagtattctaacaaggggagcctccgtccagttggtgtttggatttgagtacgctattctgatgaccatggttctgactatattcatcaagtacgtactccacagtgtggacctgcaatctgagaatccctgggacaacaaggctgtgtatatgctctataccgagctcttcaccgggttcatcaaggtactgttgtatatggcttttatgacaattatgattaaggtccacacattccccctgttcgccatccgtcctatgtacctcgctatgaggcagtttaagaaggctgttaccgacgcaataatgtcacgtcgtgctatcaggaatatgaataccctttatcctgatgccacgccagaggagctccaggccatggataatgtttgcataatctgccgggaggagatggtgacaggagctaagcgtcttccatgcaaccatatctttcacacctcctgcctccgctcctggttccagcgacagcagacctgtcctacatgccgaatggacgttctccgggctagtttgccggcccagagtccgccccccccagaacctgccgatcagggaccacctccagctccacatccgccacctctcctcccccagccaccaaacttcccccagggcctactgccccccttccctccgggtatgttcccactatggcctcctatggggccctttccaccggttccacccccaccttcttctggagaggccgtcgcgcctccctcaacaagcgccgccgcactgtcacgcccaagcggggcagcaactactactgctgccggaacctccgccactgccgcgtcagccaccgcaagcggacctggctctgggtctgccccggaggcaggccctgccccaggttttccattccccccaccatggatggggatgccactgccacccccgttcgccttccctccaatgccagtgcccccggctgggttcgcagggctgacccccgaagagctcagggcccttgagggccatgagagacagcatttagaggctcgcctgcagtccctgcggaacattcacacgctgctcgatgccgcaatgctgcaaattaatcagtacctgactgtgctggctagcttgggtccacctggcctgccgctacagagcacccctttgaggaggctaccattgcagctgctattgctccctccacctcccgcttccctggcccaacggccgcgcccacagccacaagagcccccccatcaacccctgaaatggaagggcctgcagctgctgagtcagtgggctcagcggaggtgtctcagaatggagagcccaatgcagcaatcctcagccggggccgcttgcagaagctggtccttgttgttgccaacggataccgcccctgcccagccacaaccacttcttttttag

SEQ ID NO: 223999 - DNA, 1851 bp, Artificial Sequence
  derived and/or modified sequence
atgttccggaccgccgtgatgatggccgccagcctggccctgaccggcgccgtggtagcccacgcttactatctaaagcatcagttttatccaacggttgtatatttgactaagagctcgcccagcatggccgtgctgtacatacaagcgttcgtcctggttttcctgctcggtaaggtaatgggcaaagtcttctttggacagttaagggctgcggagatggagcatcttcttgagagatcttggtacgctgtgactgaaacctgtctcgccttcaccgttttccgcgacgatttttctcctcgctttgtcgctctgttcacactgcttctgtttctcaaatgcttccactggttggcagaggaccgggtagactttatggaaagatccccaaacatctcgtggctgttccattgtaggattgtctccttgatgttcctcctgggcattcttgactttctctttgtgagtcatgcatatcacagtatcctgacgagaggggcctcagtgcagttggtgtttggtttcgaatatgcgatactcatgactatggtcctcacaattttcattaagtatgttctgcacagtgtggacctgcagtctgaaaatccctgggacaacaaggcagtttacatgctttacaccgaactatttaccggctttatcaaagtcttgctttacatggccttcatgaccatcatgatcaaagtgcacacatttccattatttgcaatcaggcctatgtatctcgctatgagacagtttaaaaaggcggtgaccgatgcaattatgtcaaggagggccatacggaacatgaacaccttgtaccccgatgccacaccagaagaattacaggctatggataatgtgtgtataatttgcagagaagagatggttaccggggccaaacgtctcccatgcaaccacatctttcatacgagctgtctgaggagctggtttcagcgccagcagacatgccccacctgcagaatggacgttctgagggcctccctccccgcacaatcgccgccacctccagagcccgctgaccagggaccccctccggcccctcacccaccacctctgctcccacaaccaccaaattttccccaaggcttgctccctcccttcccccctggaatgtttcccctatggcctccaatgggccctttcccacctgtgcccccaccaccttcctctggcgaggctgtggcaccacctagtaccagtgcggcactctctagacccagtggggctgccacaacaactgccgctggaactagtgcaaccgcagcaagtgccactgccagcggtcctggatccgggtcagctccggaggctgggcctgccccaggtttcccatttccccctccttggatgggaatgcccctgccaccgccgttcgcattcccccccatgcccgtccccccggccgggttcgccggtttaacgcctgaggagctgagggctttagaaggtcatgaaaggcagcacctggaggctaggttgcaatccctcagaaacattcacaccttactggacgcagcgatgctacagattaaccagtatctgaccgtcctggcttccctgggtccacctcgccctgcaacctccgtcaacagcaccgaagagaccgcgaccacagtagtggccgccgctagttccacgagcatcccatcaagcgaagcgacaacccccacccccggtgcttccccacctgcccctgagatggagaggcccccggccccagaatccgtgggcaccgaggaaatgcccgaagatggggagccagacgctgcagagctgcggaggcgaaggctgcagaaactggaatccccggtagcacactag

SEQ ID NO: 224000 - DNA, 1851 bp, Artificial Sequence
  derived and/or modified sequence
atgttccggactgccgttatgatggccgctagtctcgcgctgacgggcgcagtggtcgctcacgcttactatcttaagcaccagttttacccaaccgtcgtttacttaaccaaaagttcccctagcatggcagtactgtatattcaggcttttgtgttggtgttcttactgggaaaggtcatgggtaaagtattctttggacagctgagagccgctgaaatggagcatctcttagaaaggagctggtatgctgtgaccgagacatgtctggcattcacagtgtttcgggatgacttcagtccaagatttgtggcactctttacactcctgctgttcctcaagtgttttcactggttagctgaggatagagtggattttatggaaagatcccctaatatcagctggttatttcactgcagaatagtatcgctgatgtttctgctcggcatcttggacttcctgtttgtgtcccatgcctatcatagtattctcacccgtggcgcttcagtacagttggtttttgggttcgagtacgcaatcttaatgaccatggttctgacaatttttatcaagtacgttttacactcggtggacctccagtctgagaacccttgggataacaaagctgtgtatatgctgtataccgagcttttcactggctttatcaaggtgctcctatatatggccttcatgaccattatgattaaggtgcacacattcccactctttgcaatccgccctatgtacttggcaatgagacagttcaagaaagcagttaccgacgccattatgtcacgcagagctatcagaaacatgaacactctgtatcccgatgcgacccccgaagagcttcaggcgatggataacgtgtgcatcatctgccgcgaggaaatggtaactggagctaaaaggctgccatgcaatcacatctttcatacttcttgcttacgaagttggttccagagacagcagacgtgtccaacctgtcgcatggatgttctgcgtgccagccttcctgcccagagccccccacctcccgagcctgcagatcaggggccaccccctgctccccacccacctccgctgctgcctcagccaccgaactttccacaggggctattgccaccattccccccaggtatgttcccactgtggccacctatgggacctttcccacccgtcccacccccaccttcttctggggaagcagtggccccaccatctaccagcgcagcactctctcgtccttccggagccgcaactacgacagctgctgggacgtcggccacagctgcatcagctaccgcatccggacctggcagcggcagtgccccagaagccggacccgctcctggcttcccttttccacctccttggatgggtatgcccctacctcccccttttgcttttccacccatgcctgtcccacccgctggtttcgcaggcttgacacctgaggagcttcgagccttagaaggtcatgagcgtcagcacttggaggcccgacttcaatctctcaggaatattcataccttgctcgatgctgccatgctccaaattaaccagtacctcactgtgcttgccagccttgggcctcccaggccggcaacctctgtaaactcgaccgaggaaacagcgacaaccgtcgtcgctgccgcatcatccacctccatcccctcgtctgaggccacaactccaaccccaggggcatcgcctccggcaccagaaatggagcggccacccgcacccgaatcagtgggtacggaggaaatgccagaagacggggagccggatgccgctgagctccggcgaaggcggttacagaaactggagtcccctgtggcgcattag

SEQ ID NO: 224001 - DNA, 1698 bp, Artificial Sequence
  derived and/or modified sequence
atgttccgcactgccgtaatgatggctgccagcctcgcactcacaggcgctgttgttgcccacgcctactatttaaagcaccaattctatccaaccgtcgtctacctgactaaaagctccccctctatggcagtgctttacatacaggcttttgttcttgtttttttactgggtaaggtcatgggaaaagttttctttggccaattgagagctgccgagatggaacacctcctggagcggtcatggtatgcagtcaccgaaacctgtcttgcctttacggtctttcgcgatgatttcagcccaaggttcgtggcgctgttcactctgctcctttttctaaagtgtttccattggctcgccgaggatcgggttgatttttacgctattttgatgacaatggtgttgaccatttttatcaagtatgttctccattcagtggatctccagagcgaaaacccctgggacaacaaagcagtgtatatgctctacacagagctcttcaccggcttcatcaaggtgctgttgtacatggccttcatgacaatcatgatcaaggttcataccttcccactgtttgcgattcgacccatgtatctcgctatgcgtcagttcaagaaggcagtgacagacgccattatgtccaggcgcgcaattagaaatatgaatacgttgtacccggacgctacacccgaggaactgcaggcaatggacaatgtctgcatcatctgccgggaagagatggtaacaggagcaaagagactcccctgcaaccacattttccatacatcatgtctacgatcctggtttcaacgccagcagacatgccccacctgcagaatggacgtcttaagggcctccttgcccgcacagagtcctcctccccctgagcctgctgatcagggcccaccccctgctccacatcccccaccactccttccccagccacccaattttccacagggtttgctccccccattcccaccaggtatgtttcctctgtggccacctatgggtcccttccctcccgtgccaccgccaccctcgagcggagaggccgtggctccccctagcacgtcagctgcactatccaggccttccggcgctgccaccactaccgcggcagggacatctgccacagccgcttcagccaccgctagcgggccaggctcaggcagtgctccagaagccggaccagcccctgggttccctttcccacctccttggatgggcatgccactgccccctccattcgcctttccacctatgcctgttcctcccgctggctttgctggccttacccctgaggagctccgtgctctggaaggccacgaacgccagcatctcgaggctcggttacagagcctgaggaatatccatacactattggacgctgccatgctgcagataaatcagtacttgaccgtcctggcatcgctgggcccaccccgaccagctacatccgtcaattccacagaagaaaccgctacaactgtcgttgccgcagccagttccacctccattccgtcgagtgaggctactacgcccaccccaggagcctcacctcccgctcccgaaatggagcgcccaccagcccctgaaagtgtaggtacggaagagatgcccgaagacggggagcctgacgcggctgaactcaggcggaggcgattgcagaagctggagtcaccagtggcacactag

SEQ ID NO: 224002 - DNA, 1854 bp, Artificial Sequence
  derived and/or modified sequence
atgtttcggacagccgtgatgatggctgcttccctagctctcacaggcgctgtagttgcccatgcgtattacctgaaacaccagttctaccctacagtcgtgtatctcaccaaatccagtccgtctatggctgtgctgtatatccaggctttcgtgctggtcttcctgctcggcaaggtgatggggaaagtttttttcggtcagctgagagccgctgagatggagcacctgctggaacggtcatggtatgcagttaccgaaacatgtctggccttcaccgtgtttcgggacgacttcagcccacgctttgtggccctgtttaccctgttattgttccttaaatgtttccactggctggctgaggatagggtcgatttcatggagcgtagccctaacatctcttggcttttccattgcaggattgtttctttgatgttcctgttagggatcctggattttctcttcgtttcgcacgcctatcacagcattcttactcgcggagcgagtgtgcaactagtgttcggatttgaatatgccattctcatgacaatggtccttactatttttatcaagtacgttttgcacagcgtggacctgcagagcgagaatccttgggacaataaggcagtgtatatgttgtacacagagttgtttaccgggtttatcaaagtcctgctatacatggcctttatgacaataatgatcaaggtgcacacctttcccttattcgctattcgacctatgtaccttgcaatgcgccagtttaagaaagctgtgacggatgcaattatgagtcggagggccatccggaacatgaacacactctatccagatgccactcctgaagaactgcaggccatggacaatgtctgcatcatttgccgcgaagaaatggtgactggagctaaacgactaccatgcaatcacatcttccacaccagctgcctgcgctcctggttccagcgccaacaaacctgtcctacatgcagaatggatgtcctccgcgcttcgctgcccgctcagtcgcctccccctcccgaacctgctgaccagggaccaccacccgcacctcacccaccacccttactgccccagcccccaaatttcccccaggggttactgccacctttcccgcctgggatgtttcccctctggccaccgatgggaccatttcccccagtgccccctccccctagttccggagaggccgttgctccacctagtacaagcgccgctgccctctcacgccctagtggagccgcaacgacgaccgctgctggtacatccgcgactgccgcatccgccaccgcatcaggtcccggaagcgggtccgccccagaagccggtcctgctcccggtttccctttccctcctccgtggatgggcatgccgctgccccctcccttcgcttttccccctatgcccgttcccccagccggatttgccggtttgactcccgaggaactgcgggcactggaggggcatgaaagacaacatctggaggccaggctccaatcactgcgtaatatccacaccctcctggatgctgcaatgttgcaaatcaaccagtatctgactgtgttagcgagcctgggacctcctagacctgcaacctccgtgaattctactgaagaaactgcgactactgtggtggcggctgccagctcgacatcgatcccctcttcagaggctacgacacctactcctggtgcctctccacctgcccctgaaatggaaagacctcccgctcctgagtctgttggaacagaggaaatgccagaggatggggagcctgacgccgcagagctacgtagacgacggttgcagaagctagagtcccctgtagcgcactag

SEQ ID NO: 224003 - DNA, 1890 bp, Artificial Sequence
  derived and/or modified sequence
atgtttagaaccgccgtcatgatggcagcgagcctcgcactgacaggcgctgttgtagcccatgcttactatttaaagcatcagttttatccaactgtagtgtacctaaccaagtcaagcccctccatggctgttctgtacattcaggcctttgttctcgtcttcctactcggcaaggtcatgggaaaggtgttttttgggcaactgcgtgctgcagaaatggagcacctgctcgagaggtcatggtatgccgttacagagacttgccttgcatttaccgtcttccgtgacgacttttcaccgagatttgtcgcgctgttcaccctgcttctatttttgaagtgctttcactggctggctgaggatagggtggattttatggagaggtctccaaacatttcctggttgttccactgtaggattgtctccctgatgttccttctgggtatcttggacttcctgtttgtatctcatgcctaccactccattcttaccaggggggcatctgtgcagttagtattcggatttgaatacgctatacttatgaccatggtgctgacgatttttataaaatacgtattacacagtgtggatctgcagtccgaaaatccttgggacaataaggccgtgtatatgctgtacaccgagctgtttactggctttattaaggtgctcctctatatggcgtttatgacaatcatgatcaaggtgcataccttccccctgttcgcgattagaccgatgtatctggccatgaggcagttcaaaaaggccgtcacagacgcaattatgagtaggagagcaatacggaacatgaatactctatacccagacgcaacccccgaagagctgcaggcaatggacaatgtttgtattatttgccgggaagagatggtgactggagcaaagcgactgccctgcaaccatatttttcacactagttgtttgaggtcttggttccagagacagcagacttgcccaacatgccgcatggacgtccttagagcctcgctgccggctcagtcccccccacctccagagcctgcagaccaaggcccacctcctgccccacacccacccccactcctgccccagccgccaaactttcctcaaggactgttgccaccctttccacctgggatgttcccactgtggcctcctatgggccctttccctccggtcccccctccccctagttccggggaagcagtcgcacctccatccacttctgccgcagcgttgagtcggccatctggtgccgctacgaccaccgccgcaggaacgtccgctactgccgcttcggctacagcctcgggacctgggtccggctccgctcccgaggccggtcctgcacctggcttccccttccccccaccctggatgggcatgcccttacctccgccttttgccttccctcctatgcccgtgcccccagcaggctttgccggattaacgccggaggagttacgggcactggagggtcatgagcggcagcacctggaggctcgactgcagagcctcagaaatattcacaccttacttgacgcagcaatgctacagattaaccagtatctcactgtgttagcatctcttggaccccctgggctgccgctgcagtccacaccacttaggcgcctgcccctccaactgcttctccttcctcctcccccagccagcttggcacaaaggcctcgcccacaaccccaggaacctccgcaccaacctttaaagtggaaagggctccaactgctgtctcagtgggcccagcggcgatgcctgcgcatggagagccccatgcagcaatcaagcgccggagccgcttgcagatcatggagccttctgctaccaactgacaccgccccagcacagccacagcctttattgttctag

SEQ ID NO: 224004 - DNA, 1851 bp, Artificial Sequence
  derived and/or modified sequence
atgttccgcaccgccgtgatgatggctgcttctcttgctcttaccggcgcagtggtcgcacacgcttattatctcaagcaccaattctatcctaccgttgtctacctcacaaagagttcaccatccatggctgtcctgtacatccaggcttttgtgttggtattcctcctgggaaaagttatgggaaaagtgtttttcggccaattgagggcggcagagatggagcatctgctggagcggagttggtatgccgttaccgaaacctgtttagcttttaccgtgttccgggatgatttcagccctaggtttgtggcattgtttacacttcttctctttcttaaatgctttcactggcttgcagaagaccgggtcgacttcatggagaggagccccaacattagctggttgttccactgcagaatagtgagcttaatgttccttttgggcattctcgactttctcttcgtgagccatgcttatcatagtatcctgaccaggggggctagtgtgcagttagttttcgggtttgagtatgccatcctcatgacaatggtgctaacaatcttcatcaagtacgtcctccacagtgttgatcttcagtctgaaaatccctgggataacaaggctgtctacatgctgtatactgaactgtttaccggtttcatcaaagtgcttctgtatatggcgtttatgaccattatgattaaagttcacaccttccctctgttcgctatccggcctatgtacttggcgatgcgccagttcaaaaaagctgtaacagatgccatcatgagccggagagcaatccggaacatgaatactctataccccgacgcaacacccgaagagcttcaggctatggataatgtttgtattatctgccgcgaggaaatggtgaccggggctaagagattaccatgcaaccacatcttccacacctcctgcctccgtagttggtttcagcgccaacagacctgccccacgtgtaggatggacgttctgagagcaagcctgcccgcacagtcaccgccacctcccgagccagcagaccagggtccaccccctgcaccacatcctcccccactgcttccccagccacccaactttccacagggactgttgcccccattccctcctggcatgttcccgctctggccgcctatggggccattcccacctgtaccacctccacccagcagcggggaagctgttgccccaccttccactagcgccgctctgtccaggccatcgggagccgctactaccactgcagcaggcaccagcgcaacagcggcttccgccactgcttctgggcctggctcaggcagtgcgccagaggctggccctgccccaggattcccatttcctcccccatggatgggaatgcctttgcccccaccctttgcattccctccgatgcctgtgccgcctgcagggttcgccggattgacccccgaggagctgagggccctggaaggacatgagaggcagcacttggaggccaggctgcagtccctgcgtaacatacacacattgctcgacgctgccatgctgcaaatcaatcagtatttgacagttctcgcatcgctcggccctcccagacccgctaccagcgtgaactcgacggaagaaactgctacaacggtagttgctgcggcttcgagcactagtatccctagcagcgaagccactacacccacgccgggagcaagtccacctgcacccgagatggaacggccaccagcccctgagagtgtgggcactgaagaaatgcccgaggatggcgaacctgatgccgctgagctgcgtcgccgaaggctgcagaagctcgaatcacctgtggctcattag

SEQ ID NO: 224005 - DNA, 3048 bp, Artificial Sequence
  derived and/or modified sequence
gggggtggggagtgttgttaaccggaggggcagccgcagtcgcgcggattgagcgggctcgcggcgctgggttcctggtctccgggccagggcaatgttccgcacggcagtgatgatggcggccagcctggcgctgaccggggctgtggtggctcacgcctactacctcaaacaccagttctaccccactgtggtgtacctgaccaagtccagccccagcatggcagtcctgtacatccaggcctttgtccttgtcttccttctgggcaaggtgatgggcaaggtgttctttgggcaactgagggcagcagagatggagcaccttctggaacgttcctggtacgccgtcacagagacttgtctggccttcaccgtttttcgggatgacttcagcccccgctttgttgcactcttcactcttcttctcttcctcaaatgtttccactggctggctgaggaccgtgtggactttatggaacgcagccccaacatctcctggctctttcactgccgcattgtctctcttatgttcctcctgggcatcctggacttcctcttcgtcagccacgcctatcacagcatcctgacccgtggggcctctgtgcagctggtgtttggctttgagtatgccatcctgatgacgatggtgctcaccatcttcatcaagtatgtgctgcactccgtggacctccagagtgagaacccctgggacaacaaggctgtgtacatgctctacacagagctgtttacaggcttcatcaaggttctgctgtacatggccttcatgaccatcatgatcaaggtgcacaccttcccactctttgccatccggcccatgtacctggccatgagacagttcaagaaagctgtgacagatgccatcatgtctcgccgagccatccgcaacatgaacaccctgtatccagatgccaccccagaggagctccaggcaatggacaatgtctgcatcatctgccgagaagagatggtgactggtgccaagagactgccctgcaaccacattttccataccagctgcctgcgctcctggttccagcggcagcagacctgccccacctgccgtatggatgtccttcgtgcatcgctgccagcgcagtcaccaccacccccggagcctgcggatcaggggccaccccctgccccccaccccccaccactcttgcctcagccccccaacttcccccagggcctcctgcctccttttcctccaggcatgttcccactgtggccccccatgggcccctttccacctgtcccgcctccccccagctcaggagaggctgtggctcctccatccaccagtgcagccctttctcggcccagtggagcagctacaaccacagctgctggcaccagtgctactgctgcttctgccacagcatctggcccaggctctggctctgccccagaggctggccctgcccctggtttccccttccctcctccctggatgggtatgcccctgcctccaccctttgccttccccccaatgcctgtgccccctgcgggctttgctgggctgaccccagaggagctacgagctctggagggccatgagcggcagcacctggaggcccggctgcagagcctgcgtaacatccacacactgctggacgccgccatgctgcagatcaaccagtacctcaccgtgctggcctccttggggcccccccggcctgccacttcagtcaactccactgaggagactgccactacagttgttgctgctgcctcctccaccagcatccctagctcagaggccacgaccccaaccccaggagcctccccaccagcccctgaaatggaaaggcctccagctcctgagtcagtgggcacagaggagatgcctgaggatggagagcccgatgcagcagagctccgccggcgccgcctgcagaagctggagtctcctgttgcccactgacactgccccagcccagccccagcctctgctcttttgagcagccctcgctggaacatgtcctgccaccaagtgccagctccctctctgtctgcaccagggagtagtacccccagctctgagaaagaggcggcatcccctaggccaagtggaaagaggctggggttcccatttgactccagtcccaggcagccatggggatctcgggtcagttccagccttcctctccaactcttcagccctgtgttctgctggggccatgaaggcagaaggtttagcctctgagaagccctcttcttcccccacccctttccaggagaaggggctgcccctccaagccctacttgtatgtgcggagtcacactgcagtgccgaacagtattagctcccgttcccaagtgtggactccagaggggctggaggcaagctatgaacttgctcgctggcccacccctaagactggtacccatttccttttcttaccctgatctccccagaagcctcttgtggtggtggctgtgccccctatgccctgtggcatttctgcgtcttactggcaaccacacaactcagggaaaggaatgcctgggagtgggggtgcaggcgggcagcactgagggaccctgccccgcccctccccccaggcccctttcctctgcagcttctcaagtgagactgacctgtctcacccagcagccactgcccagccgcactccaggcaagggccagtgcgcctgctcctgaccactgcaatcccagcgcccaaggaaggccacttctcaactggcagaacttctgaagtttagaattggaattacttccttactagtgtcttttggcttaaattttgtcttttgaagttgaatgcttaatcccgggaaagaggaacaggagtgccagactcctggtctttccagtttagaaaaggctctgtgccaaggagggaccacaggagctgggacctgcctgcccctgtcttttccccttggttttgtgttacaagagttgttggagacagtttcagatgattatttaatttgtaaatattgtacaaattttaatagcttaaattgtatatacagccaaataaaaacttgcattaacaa

SEQ ID NO: 224006 - DNA, 2841 bp, Artificial Sequence
  derived and/or modified sequence
gcgggctcgcggcgctgggttcctggtctccgggccagggcaatgttccgcacggcagtgatgatggcggccagcctggcgctgaccggggctgtggtggctcacgcctactacctcaaacaccagttctaccccactgtggtgtacctgaccaagtccagccccagcatggcagtcctgtacatccaggcctttgtccttgtcttccttctgggcaaggtgatgggcaaggtgttctttgggcaactgagggcagcagagatggagcaccttctggaacgttcctggtacgccgtcacagagacttgtctggccttcaccgtttttcgggatgacttcagcccccgctttgttgcactcttcactcttcttctcttcctcaaatgtttccactggctggctgaggaccgtgtggacttttatgccatcctgatgacgatggtgctcaccatcttcatcaagtatgtgctgcactccgtggacctccagagtgagaacccctgggacaacaaggctgtgtacatgctctacacagagctgtttacaggcttcatcaaggttctgctgtacatggccttcatgaccatcatgatcaaggtgcacaccttcccactctttgccatccggcccatgtacctggccatgagacagttcaagaaagctgtgacagatgccatcatgtctcgccgagccatccgcaacatgaacaccctgtatccagatgccaccccagaggagctccaggcaatggacaatgtctgcatcatctgccgagaagagatggtgactggtgccaagagactgccctgcaaccacattttccataccagctgcctgcgctcctggttccagcggcagcagacctgccccacctgccgtatggatgtccttcgtgcatcgctgccagcgcagtcaccaccacccccggagcctgcggatcaggggccaccccctgccccccaccccccaccactcttgcctcagccccccaacttcccccagggcctcctgcctccttttcctccaggcatgttcccactgtggccccccatgggcccctttccacctgtcccgcctccccccagctcaggagaggctgtggctcctccatccaccagtgcagccctttctcggcccagtggagcagctacaaccacagctgctggcaccagtgctactgctgcttctgccacagcatctggcccaggctctggctctgccccagaggctggccctgcccctggtttccccttccctcctccctggatgggtatgcccctgcctccaccctttgccttccccccaatgcctgtgccccctgcgggctttgctgggctgaccccagaggagctacgagctctggagggccatgagcggcagcacctggaggcccggctgcagagcctgcgtaacatccacacactgctggacgccgccatgctgcagatcaaccagtacctcaccgtgctggcctccttggggcccccccggcctgccacttcagtcaactccactgaggagactgccactacagttgttgctgctgcctcctccaccagcatccctagctcagaggccacgaccccaaccccaggagcctccccaccagcccctgaaatggaaaggcctccagctcctgagtcagtgggcacagaggagatgcctgaggatggagagcccgatgcagcagagctccgccggcgccgcctgcagaagctggagtctcctgttgcccactgacactgccccagcccagccccagcctctgctcttttgagcagccctcgctggaacatgtcctgccaccaagtgccagctccctctctgtctgcaccagggagtagtacccccagctctgagaaagaggcggcatcccctaggccaagtggaaagaggctggggttcccatttgactccagtcccaggcagccatggggatctcgggtcagttccagccttcctctccaactcttcagccctgtgttctgctggggccatgaaggcagaaggtttagcctctgagaagccctcttcttcccccacccctttccaggagaaggggctgcccctccaagccctacttgtatgtgcggagtcacactgcagtgccgaacagtattagctcccgttcccaagtgtggactccagaggggctggaggcaagctatgaacttgctcgctggcccacccctaagactggtacccatttccttttcttaccctgatctccccagaagcctcttgtggtggtggctgtgccccctatgccctgtggcatttctgcgtcttactggcaaccacacaactcagggaaaggaatgcctgggagtgggggtgcaggcgggcagcactgagggaccctgccccgcccctccccccaggcccctttcctctgcagcttctcaagtgagactgacctgtctcacccagcagccactgcccagccgcactccaggcaagggccagtgcgcctgctcctgaccactgcaatcccagcgcccaaggaaggccacttctcaactggcagaacttctgaagtttagaattggaattacttccttactagtgtcttttggcttaaattttgtcttttgaagttgaatgcttaatcccgggaaagaggaacaggagtgccagactcctggtctttccagtttagaaaaggctctgtgccaaggagggaccacaggagctgggacctgcctgcccctgtcttttccccttggttttgtgttacaagagttgttggagacagtttcagatgattatttaatttgtaaatattgtacaaattttaatagcttaaattgtatatacagccaaataaaaacttgcattaac

SEQ ID NO: 224007 - DNA, 3052 bp, Artificial Sequence
  derived and/or modified sequence
agggggtggggagtgttgttaaccggaggggcagccgcagtcgcgcggattgagcgggctcgcggcgctgggttcctggtctccgggccagggcaatgttccgcacggcagtgatgatggcggccagcctggcgctgaccggggctgtggtggctcacgcctactacctcaaacaccagttctaccccactgtggtgtacctgaccaagtccagccccagcatggcagtcctgtacatccaggcctttgtccttgtcttccttctgggcaaggtgatgggcaaggtgttctttgggcaactgagggcagcagagatggagcaccttctggaacgttcctggtacgccgtcacagagacttgtctggccttcaccgtttttcgggatgacttcagcccccgctttgttgcactcttcactcttcttctcttcctcaaatgtttccactggctggctgaggaccgtgtggactttatggaacgcagccccaacatctcctggctctttcactgccgcattgtctctcttatgttcctcctgggcatcctggacttcctcttcgtcagccacgcctatcacagcatcctgacccgtggggcctctgtgcagctggtgtttggctttgagtatgccatcctgatgacgatggtgctcaccatcttcatcaagtatgtgctgcactccgtggacctccagagtgagaacccctgggacaacaaggctgtgtacatgctctacacagagctgtttacaggcttcatcaaggttctgctgtacatggccttcatgaccatcatgatcaaggtgcacaccttcccactctttgccatccggcccatgtacctggccatgagacagttcaagaaagctgtgacagatgccatcatgtctcgccgagccatccgcaacatgaacaccctgtatccagatgccaccccagaggagctccaggcaatggacaatgtctgcatcatctgccgagaagagatggtgactggtgccaagagactgccctgcaaccacattttccataccagctgcctgcgctcctggttccagcggcagcagacctgccccacctgccgtatggatgtccttcgtgcatcgctgccagcgcagtcaccaccacccccggagcctgcggatcaggggccaccccctgccccccaccccccaccactcttgcctcagccccccaacttcccccagggcctcctgcctccttttcctccaggcatgttcccactgtggccccccatgggcccctttccacctgtcccgcctccccccagctcaggagaggctgtggctcctccatccaccagtgcagcagccctttctcggcccagtggagcagctacaaccacagctgctggcaccagtgctactgctgcttctgccacagcatctggcccaggctctggctctgccccagaggctggccctgcccctggtttccccttccctcctccctggatgggtatgcccctgcctccaccctttgccttccccccaatgcctgtgccccctgcgggctttgctgggctgaccccagaggagctacgagctctggagggccatgagcggcagcacctggaggcccggctgcagagcctgcgtaacatccacacactgctggacgccgccatgctgcagatcaaccagtacctcaccgtgctggcctccttggggcccccccggcctgccacttcagtcaactccactgaggagactgccactacagttgttgctgctgcctcctccaccagcatccctagctcagaggccacgaccccaaccccaggagcctccccaccagcccctgaaatggaaaggcctccagctcctgagtcagtgggcacagaggagatgcctgaggatggagagcccgatgcagcagagctccgccggcgccgcctgcagaagctggagtctcctgttgcccactgacactgccccagcccagccccagcctctgctcttttgagcagccctcgctggaacatgtcctgccaccaagtgccagctccctctctgtctgcaccagggagtagtacccccagctctgagaaagaggcggcatcccctaggccaagtggaaagaggctggggttcccatttgactccagtcccaggcagccatggggatctcgggtcagttccagccttcctctccaactcttcagccctgtgttctgctggggccatgaaggcagaaggtttagcctctgagaagccctcttcttcccccacccctttccaggagaaggggctgcccctccaagccctacttgtatgtgcggagtcacactgcagtgccgaacagtattagctcccgttcccaagtgtggactccagaggggctggaggcaagctatgaacttgctcgctggcccacccctaagactggtacccatttccttttcttaccctgatctccccagaagcctcttgtggtggtggctgtgccccctatgccctgtggcatttctgcgtcttactggcaaccacacaactcagggaaaggaatgcctgggagtgggggtgcaggcgggcagcactgagggaccctgccccgcccctccccccaggcccctttcctctgcagcttctcaagtgagactgacctgtctcacccagcagccactgcccagccgcactccaggcaagggccagtgcgcctgctcctgaccactgcaatcccagcgcccaaggaaggccacttctcaactggcagaacttctgaagtttagaattggaattacttccttactagtgtcttttggcttaaattttgtcttttgaagttgaatgcttaatcccgggaaagaggaacaggagtgccagactcctggtctttccagtttagaaaaggctctgtgccaaggagggaccacaggagctgggacctgcctgcccctgtcttttccccttggttttgtgttacaagagttgttggagacagtttcagatgattatttaatttgtaaatattgtacaaattttaatagcttaaattgtatatacagccaaataaaaacttgcattaacaa

SEQ ID NO: 224008 - DNA, 3049 bp, Artificial Sequence
  derived and/or modified sequence
agggggtggggagtgttgttaaccggaggggcagccgcagtcgcgcggattgagcgggctcgcggcgctgggttcctggtctccgggccagggcaatgttccgcacggcagtgatgatggcggccagcctggcgctgaccggggctgtggtggctcacgcctactacctcaaacaccagttctaccccactgtggtgtacctgaccaagtccagccccagcatggcagtcctgtacatccaggcctttgtccttgtcttccttctgggcaaggtgatgggcaaggtgttctttgggcaactgagggcagcagagatggagcaccttctggaacgttcctggtacgccgtcacagagacttgtctggccttcaccgtttttcgggatgacttcagcccccgctttgttgcactcttcactcttcttctcttcctcaaatgtttccactggctggctgaggaccgtgtggactttatggaacgcagccccaacatctcctggctctttcactgccgcattgtctctcttatgttcctcctgggcatcctggacttcctcttcgtcagccacgcctatcacagcatcctgacccgtggggcctctgtgcagctggtgtttggctttgagtatgccatcctgatgacgatggtgctcaccatcttcatcaagtatgtgctgcactccgtggacctccagagtgagaacccctgggacaacaaggctgtgtacatgctctacacagagctgtttacaggcttcatcaaggttctgctgtacatggccttcatgaccatcatgatcaaggtgcacaccttcccactctttgccatccggcccatgtacctggccatgagacagttcaagaaagctgtgacagatgccatcatgtctcgccgagccatccgcaacatgaacaccctgtatccagatgccaccccagaggagctccaggcaatggacaatgtctgcatcatctgccgagaagagatggtgactggtgccaagagactgccctgcaaccacattttccataccagctgcctgcgctcctggttccagcggcagcagacctgccccacctgccgtatggatgtccttcgtgcatcgctgccagcgcagtcaccaccacccccggagcctgcggatcaggggccaccccctgccccccaccccccaccactcttgcctcagccccccaacttcccccagggcctcctgcctccttttcctccaggcatgttcccactgtggccccccatgggcccctttccacctgtcccgcctccccccagctcaggagaggctgtggctcctccatccaccagtgcagcagccctttctcggcccagtggagcagctacaaccacagctgctggcaccagtgctactgctgcttctgccacagcatctggcccaggctctggctctgccccagaggctggccctgcccctggtttccccttccctcctccctggatgggtatgcccctgcctccaccctttgccttccccccaatgcctgtgccccctgcgggctttgctgggctgaccccagaggagctacgagctctggagggccatgagcggcagcacctggaggcccggctgcagagcctgcgtaacatccacacactgctggacgccgccatgctgcagatcaaccagtacctcaccgtgctggcctccttgggcccccccggcctgccacttcagtcaactccactgaggagactgccactacagttgttgctgctgcctcctccaccagcatccctagctcagaggccacgaccccaaccccaggagcctccccaccagcccctgaaatggaaaggcctccagctcctgagtcagtgggcacagaggagatgcctgaggatggagagcccgatgcagcagagctccgccggcgccgcctgcagaagctggagtctcctgttgcccactgacactgccccagcccagccccagcctctgctcttttgagcagccctcgctggaacatgtcctgccaccaagtgccagctccctctctgtctgcaccagggagtagtacccccagctctgagaaagaggcggcatcccctaggccaagtggaaagaggctggggttcccatttgactccagtcccaggcagccatggggatctcgggtcagttccagccttcctctccaactcttcagccctgtgttctgctggggccatgaaggcagaaggtttagcctctgagaagccctcttcttcccccacccctttccaggagaaggggctgcccctccaagccctacttgtatgtgcggagtcacactgcagtgccgaacagtattagctcccgttcccaagtgtggactccagaggggctggaggcaagctatgaacttgctcgctggcccacccctaagactggtacccatttccttttcttaccctgatctccccagaagcctcttgtggtggtggctgtgccccctatgccctgtggcatttctgcgtcttactggcaaccacacaactcagggaaaggaatgcctgggagtgggggtgcaggcgggcagcactgagggaccctgccccgcccctccccccaggcccctttcctctgcagcttctcaagtgagactgacctgtctcacccagcagccactgcccagccgcactccaggcaagggccagtgcgcctgctcctgaccactgcaatcccagcgcccaaggaaggccacttctcaactggcagaacttctgaagtttagaattggaattacttccttactagtgtcttttggcttaaattttgtcttttgaagttgaatgcttaatcccgggaaagaggaacaggagtgccagactcctggtctttccagtttagaaaaggctctgtgccaaggagggaccacaggagctgggacctgcctgcccctgtcttttccccttggttttgtgttacaagagttgttggagacagtttcagatgattatttaatttgtaaatattgtacaaattttaatagcttaaattgtatatacagccaaataaaaacttgcattaac

SEQ ID NO: 224009 - DNA, 3144 bp, Artificial Sequence
  derived and/or modified sequence
ttgtggttggggtcgggacccgaaccttccccttgaggtctccggagtcggcacgcccctcagccccgccgcacgctttcggcctgtcagctggccggagacctcagacgccggtgcggccgctttgctcaagcctgggccctgcctgcgacgcccgcaactcctggtgctcacaggtctccgggccagggcaatgttccgcacggcagtgatgatggcggccagcctggcgctgaccggggctgtggtggctcacgcctactacctcaaacaccagttctaccccactgtggtgtacctgaccaagtccagccccagcatggcagtcctgtacatccaggcctttgtccttgtcttccttctgggcaaggtgatgggcaaggtgttctttgggcaactgagggcagcagagatggagcaccttctggaacgttcctggtacgccgtcacagagacttgtctggccttcaccgtttttcgggatgacttcagcccccgctttgttgcactcttcactcttcttctcttcctcaaatgtttccactggctggctgaggaccgtgtggactttatggaacgcagccccaacatctcctggctctttcactgccgcattgtctctcttatgttcctcctgggcatcctggacttcctcttcgtcagccacgcctatcacagcatcctgacccgtggggcctctgtgcagctggtgtttggctttgagtatgccatcctgatgacgatggtgctcaccatcttcatcaagtatgtgctgcactccgtggacctccagagtgagaacccctgggacaacaaggctgtgtacatgctctacacagagctgtttacaggcttcatcaaggttctgctgtacatggccttcatgaccatcatgatcaaggtgcacaccttcccactctttgccatccggcccatgtacctggccatgagacagttcaagaaagctgtgacagatgccatcatgtctcgccgagccatccgcaacatgaacaccctgtatccagatgccaccccagaggagctccaggcaatggacaatgtctgcatcatctgccgagaagagatggtgactggtgccaagagactgccctgcaaccacattttccataccagctgcctgcgctcctggttccagcggcagcagacctgccccacctgccgtatggatgtccttcgtgcatcgctgccagcgcagtcaccaccacccccggagcctgcggatcaggggccaccccctgccccccaccccccaccactcttgcctcagccccccaacttcccccagggcctcctgcctccttttcctccaggcatgttcccactgtggccccccatgggcccctttccacctgtcccgcctccccccagctcaggagaggctgtggctcctccatccaccagtgcagccctttctcggcccagtggagcagctacaaccacagctgctggcaccagtgctactgctgcttctgccacagcatctggcccaggctctggctctgccccagaggctggccctgcccctggtttccccttccctcctccctggatgggtatgcccctgcctccaccctttgccttccccccaatgcctgtgccccctgcgggctttgctgggctgaccccagaggagctacgagctctggagggccatgagcggcagcacctggaggcccggctgcagagcctgcgtaacatccacacactgctggacgccgccatgctgcagatcaaccagtacctcaccgtgctggcctccttggggcccccccggcctgccacttcagtcaactccactgaggagactgccactacagttgttgctgctgcctcctccaccagcatccctagctcagaggccacgaccccaaccccaggagcctccccaccagcccctgaaatggaaaggcctccagctcctgagtcagtgggcacagaggagatgcctgaggatggagagcccgatgcagcagagctccgccggcgccgcctgcagaagctggagtctcctgttgcccactgacactgccccagcccagccccagcctctgctcttttgagcagccctcgctggaacatgtcctgccaccaagtgccagctccctctctgtctgcaccagggagtagtacccccagctctgagaaagaggcggcatcccctaggccaagtggaaagaggctggggttcccatttgactccagtcccaggcagccatggggatctcgggtcagttccagccttcctctccaactcttcagccctgtgttctgctggggccatgaaggcagaaggtttagcctctgagaagccctcttcttcccccacccctttccaggagaaggggctgcccctccaagccctacttgtatgtgcggagtcacactgcagtgccgaacagtattagctcccgttcccaagtgtggactccagaggggctggaggcaagctatgaacttgctcgctggcccacccctaagactggtacccatttccttttcttaccctgatctccccagaagcctcttgtggtggtggctgtgccccctatgccctgtggcatttctgcgtcttactggcaaccacacaactcagggaaaggaatgcctgggagtgggggtgcaggcgggcagcactgagggaccctgccccgcccctccccccaggcccctttcctctgcagcttctcaagtgagactgacctgtctcacccagcagccactgcccagccgcactccaggcaagggccagtgcgcctgctcctgaccactgcaatcccagcgcccaaggaaggccacttctcaactggcagaacttctgaagtttagaattggaattacttccttactagtgtcttttggcttaaattttgtcttttgaagttgaatgcttaatcccgggaaagaggaacaggagtgccagactcctggtctttccagtttagaaaaggctctgtgccaaggagggaccacaggagctgggacctgcctgcccctgtcttttccccttggttttgtgttacaagagttgttggagacagtttcagatgattatttaatttgtaaatattgtacaaattttaatagcttaaattgtatatacagccaaataaaaacttgcattaa

SEQ ID NO: 224010 - protein, 521 aa, Artificial Sequence
  derived and/or modified sequence
MSAVSQPQAAPSPLEKSPSTAILCNTCGNVCKGEVLRVQDKYFHIKCFVCKACGCDLAEGGFFVRQGEYICTLDYQRLYGTRCFSCDQFIEGEVVSALGKTYHPDCFVCAVCRLPFPPGDRVTFNGKECMCQKCSLPVSVGSSAHLSQGLRSCGGCGTEIKNGQALVALDKHWHLGCFKCKSCGKLLNAEYISKDGLPYCEADYHAKFGIRCDSCEKYITGRVLEAGEKHYHPSCALCVRCGQMFAEGEEMYLQGSSIWHPACRQAARTEDRNKETRTSSESIISVPASSTSGSPSRVIYAKLGGEILDYRDLAALPKSKAIYDIDRPDMISYSPYISHSAGDRQSYGEGDQDDRSYKQCRTSSPSSTGSVSLGRYTPTSRSPQHYSRPAARRSDGEDGSLDQDNRKQKSSWLMLKGDADTRTNSPDLDTQSLSHSSGTDRDPLQRMAGDSFHSQYKIYPYDSLIVTNRIRVKLPKDVDRTRLERHLSPEEFQEVFGMSIEEFDRLALWKRNDLKKKALLF

SEQ ID NO: 224011 - DNA, 1566 bp, Artificial Sequence
  derived and/or modified sequence
atgtccgccgtctctcagccacaggccgcgccctccccactagagaagagtcctagcaccgcgatactgtgtaatacctgcggtaatgtctgcaaaggcgaggtattgcgtgtgcaggacaagtacttccacatcaaatgcttcgtctgcaaagcctgtggttgtgatctggctgaggggggattcttcgtccgccagggcgaatacatctgtaccctcgactaccagagactctacgggacacggtgcttcagctgcgatcagttcatagagggcgaagtcgtctccgctttaggcaagacttaccaccctgactgcttcgtgtgcgccgtgtgtcgactgcctttccccccaggcgatcgggtgacgtttaacggcaaagagtgcatgtgccagaagtgctcactcccagtctctgtagggagctctgcacatctttcacagggcctgcgcagctgtgggggttgtggtacagaaatcaagaacgggcaggccctcgtggctcttgacaagcattggcacctaggctgttttaagtgtaaaagctgcgggaaactcctcaatgctgaatatatttccaaagacggtttgccttattgcgaggctgactatcatgctaagttcggtatacggtgtgactcctgcgagaagtacataactgggagagttcttgaggcaggtgagaagcactatcatccgagctgcgccctgtgcgtgaggtgcggccaaatgtttgccgaaggggaggaaatgtatcttcagggcagctcaatctggcatccggcctgccgtcaggcggctcgaactgaggacagaaataaagaaactcgcacttcctctgagagtatcatttcggtgcctgcgtcttcgacttctggatctccatcccgggtaatctatgctaagttaggaggcgagatcctcgactatcgggatctggccgcgctacccaaatccaaggccatttacgatatcgacaggcctgatatgatctcctattccccatatatctctcactcagccggcgaccgtcagagctacggcgaaggagaccaggacgaccgatcctataagcagtgccgcacctctagccccagttctaccggctctgtttctttaggtagatataccccaacaagccgaagtccacagcactattcacgccccgcagcaaggcgttctgacggagaggacgggtccctagaccaggataacagaaagcaaaagtcttcttggctcatgcttaagggagacgccgacaccaggaccaatagtccggacctggacacccagtccctcagtcacagcagcgggactgaccgggacccgcttcagcgcatggcaggggacagctttcacagccaatacaagatctacccatacgactctctgatcgtcacaaatcgtatccgcgtgaaattgcctaaggatgtcgaccgaaccagactggagaggcatctctcacctgaggagtttcaggaagtattcggaatgagcatcgaagagttcgatcggctggcgctgtggaaaagaaatgacctgaaaaaaaaagccctgctgttctag

SEQ ID NO: 224012 - DNA, 1566 bp, Artificial Sequence
  derived and/or modified sequence
atgtctgctgtgtcccagccccaggccgcccccagccccctggagaagagccccagcacagccatcctgtgcaacacctgtggaaatgtgtgcaagggggaggtgctgcgggtgcaggacaagtacttccacatcaagtgctttgtgtgcaaggcctgtggctgtgacctggccgagggcggcttctttgtgcggcagggcgagtacatctgcaccctggactaccagaggctgtatggcacccgctgcttcagctgtgaccagttcatcgagggggaggtggtgtctgccctgggcaagacctaccacccagactgctttgtgtgtgctgtgtgccgcctgcccttccccccaggggacagagtgaccttcaacgggaaggagtgcatgtgccagaagtgcagcctgcctgtgtctgtgggcagcagcgcccacctgagccagggcctgcggagctgtggcggctgcggcacagagatcaagaatggccaggccctggtggccctggacaagcactggcacctgggctgcttcaagtgcaagagctgtgggaagctgctgaatgctgagtacatcagcaaggatggcctgccctactgtgaggccgactaccacgccaagtttggcatccgctgtgacagctgtgagaagtacatcaccggccgggtgctggaggccggggagaagcactaccaccccagctgtgccctgtgtgtgcgctgtggccagatgtttgctgagggggaggagatgtacctgcagggcagcagcatctggcacccagcctgccggcaggccgccaggacagaggacaggaacaaggagaccaggaccagcagcgagagcatcatctctgtgcctgccagcagcaccagcggcagccccagcagggtcatctatgccaagctgggcggggagatcctggactacagagacctggccgccctgcccaagagcaaggccatctatgacatcgacagaccagacatgatctcctacagcccctacatcagccacagcgctggggaccggcagagctatggagagggggaccaggatgacaggagctacaagcagtgcaggaccagcagccccagcagcacaggctctgtgtccctgggccgctacacccccaccagccgcagcccccagcactacagcaggcctgctgcccggcggagtgatggagaagatggcagcctggaccaggacaacaggaagcagaagagctcctggctgatgctgaagggagatgctgacaccaggaccaacagcccagacctggacacccagagcctgagccacagcagcggcacagaccgggaccccctgcagaggatggccggggacagcttccacagccagtacaagatctacccctatgacagcctgattgtgaccaaccgcatccgggtgaagctgcccaaggatgtggacaggacccggctggagcggcacctgagccctgaggagttccaggaggtgtttggcatgagcattgaggagtttgaccggctggccctgtggaagagaaatgacctgaagaagaaggccctgctcttctag

SEQ ID NO: 224013 - DNA, 1566 bp, Artificial Sequence
  derived and/or modified sequence
atgagcgccgtgagccagccccaggccgcccccagccccctggagaaatcacccagcacggcaatactttgtaacacctgcgggaatgtatgtaagggcgaggtgctgagagttcaggacaagtatttccacattaagtgcttcgtttgcaaagcatgcggctgtgacctggccgaggggggcttcttcgttagacaaggggagtatatatgtacccttgactaccaaaggctgtacggaactcgctgtttttcttgcgatcagtttatagagggggaagtggtatcggctctcggcaagacctatcaccccgattgcttcgtgtgtgccgtttgtcgactcccattcccacccggcgatcgagtgaccttcaacggaaaggagtgtatgtgccagaagtgttctcttccagtaagcgttggctcttcagcacacctctcccagggcctacgcagctgcggtggctgcggtacagaaataaaaaatggacaggccttggtagctctggataagcactggcacctgggctgcttcaagtgtaaatcctgtggtaaactactaaatgccgagtacatcagcaaagatggactgccttactgcgaagccgattaccacgccaaatttggaatccgctgcgactcctgtgaaaaatatattaccggcagagttctggaggctggcgaaaagcactatcacccaagctgtgccctttgtgtgcggtgcggccagatgtttgccgagggtgaggagatgtacctccaggggagttctatatggcatcctgcctgtagacaagccgctaggacagaagacaggaacaaagaaaccaggacctcctcagagagtattatcagtgtccctgcttcttccacatccgggtcccctagtcgggttatatatgccaagctcggcggagagatcttggattatcgagatctggctgcgctgcctaagtccaaagctatttacgacatcgatagaccggacatgatcagctattcaccctatatcagtcattccgctggagatcgccagtcctatggcgagggtgatcaggacgaccgatcttataaacaatgtagaacaagtagcccctcctccacagggagtgttagtctcggcagatacacaccaacatctagatccccacagcactacagcagacccgctgcacgacgatcagacggagaggacgggtctctcgatcaggataaccgcaagcagaagtcttcctggttaatgctcaaaggcgacgccgatacgcggacgaatagcccagatctggacacgcagtccctatctcactcatcgggaaccgatcgcgatcctcttcagagaatggctggggactcttttcatagccaatacaagatctatccatatgactccctgatcgtgacaaatcggattcgtgtcaagctcccgaaggatgtcgaccggactcggcttgagcggcatctgtcgccagaggagtttcaggaggtttttggaatgtccatagaggaatttgaccgcttagccctgtggaagaggaatgatctcaagaagaaggctctcctgttttag

SEQ ID NO: 224014 - DNA, 1566 bp, Artificial Sequence
  derived and/or modified sequence
atgagcgccgtttcccagcctcaggccgctcctagccctttggagaagtcccccagcacagcgatcctctgtaatacatgtggaaatgtgtgtaagggtgaagtactacgggttcaggacaagtatttccacattaaatgcttcgtgtgcaaggcttgtggctgcgacctcgcggaagggggattcttcgtgagacagggagaatatatatgcacgttggactaccaacgattatatggcaccaggtgcttctcatgtgatcagttcattgagggagaagtcgtttcagccctgggcaagacgtatcaccctgattgctttgtttgtgctgtatgccggttacccttcccccctggtgacagggtgacattcaatggcaaggagtgtatgtgtcagaagtgctccctgcctgttagtgtgggctcctcggcgcatctgtcacagggcctgaggagctgcggcggatgcggaactgagataaaaaacggacaggccttggtggcactcgataaacactggcacctgggctgttttaaatgcaagtcatgtggcaagcttctgaatgctgagtatatttccaaggacggcttgccctactgcgaagctgactatcacgccaagttcggaattagatgtgacagctgtgagaaatatatcaccggaagagtgcttgaagcaggtgagaaacactaccacccgtcctgcgccctgtgcgtccgatgtgggcaaatgttcgccgagggggaggagatgtacctacaaggatctagcatctggcacccggcttgcaggcaggcagccagaacggaggaccggaacaaagagacaaggactagcagcgaatcaatcatctcagtccccgcttcctctactagtgggtcccccagtcgggtaatctatgccaagctgggtggtgagattcttgactaccgggatctggcagctctgccaaagtctaaggccatatatgatatcgacagaccagacatgatatcctattccccctatatttcccattctgccggtgatcgtcagagctatggggagggagatcaggacgacaggagctataaacaatgtcggaccagtagccctagcagtacgggatccgtttctctgggacgttatactcctacatcaaggagcccccaacactacagtcgcccagcagcacggagatccgatggggaagatggaagcttagatcaggataacagaaaacagaaatctagctggctgatgttaaaaggcgacgccgatacacgcacaaattctcctgacctagacacccagtccctatcccacagctcagggaccgaccgggatccactgcagcgcatggccggagatagcttccattcccaatataagatatatccttacgactctctgatagtgaccaaccgcatacgagttaaactgccaaaggacgtagaccggactagactcgaacgccacttatcacccgaggagtttcaggaagtgttcggcatgagcattgaggaattcgatcggcttgctctctggaagcgaaacgacttaaagaaaaaggcattactgttctag

SEQ ID NO: 224015 - DNA, 2291 bp, Artificial Sequence
  derived and/or modified sequence
gggcgggcggaggatagcgcgggcgcggcacctgcgggcccgagggtctggctgtcgcagcgccgggccgccccgactccgagcggctgctgagatgagtgcagtgtcgcagccccaggctgctcccagcccgctggagaagtcgcccagcacggcgatcctgtgcaacacgtgtgggaatgtgtgcaagggcgaggtgctgcgggtgcaggacaagtacttccacatcaagtgcttcgtctgtaaagcatgtggctgcgacctggccgagggcggcttcttcgtgcggcagggcgagtacatctgcacgctggactaccagaggctctacggcacccgctgcttcagctgcgaccagttcattgagggtgaggtggtgtcggcgctgggcaagacctaccaccccgactgcttcgtgtgtgccgtctgccggctgcccttcccccccggggaccgagtgaccttcaacgggaaggaatgcatgtgccagaagtgttccctgcccgtatcggtgggcagcagcgcgcacctgtcccagggcctccgaagttgtgggggctgcggcacagaaatcaagaatggccaggccctggtagccttggacaagcactggcacttgggctgttttaagtgcaagagctgtgggaagctcctgaatgccgagtacatcagcaaggatgggctgccctactgcgaagctgactatcacgccaagttcggcatccgctgtgacagctgtgagaaatacatcacggggcgcgtgctggaggccggagagaagcactaccacccttcctgcgcgctatgtgtcaggtgcggccagatgtttgcagaaggcgaagagatgtatcttcaaggttcctccatctggcatccggcgtgtcgacaagcagccagaactgaagacagaaacaaggaaaccagaacttcctcagagagcatcatttctgtccctgcttccagcacctcagggtctccgagccgtgtgatttatgccaagcttggtggtgagatcctggactacagggacttggcagcccttcctaaaagtaaggccatctatgacatcgaccgccccgacatgatctcctactcaccctacatcagccactctgcaggggacaggcagagctacggcgagggggatcaggatgaccggtcctacaagcagtgtcggacctccagcccaagctccactgggtcggttagcctcgggcgctacactccgacctcacggtcaccacagcactacagccgtccagctgccaggcgatcggatggggaggatggaagcttggaccaggataacaggaagcagaagagcagctggctgatgctcaagggggatgcagacacaaggaccaattctccagacctggacacccagtccttgtcccacagcagcgggaccgacagagaccctctccaaaggatggcaggggacagctttcactcacaatacaagatctatccgtatgactccctcatcgtcacaaaccgaattcgcgtgaaactgcccaaagacgtggaccggacgagactggagagacacttgtcgcccgaggagttccaggaagtgtttgggatgagcatcgaggagtttgaccgcctggccctctggaagaggaatgaccttaagaagaaagcccttttgttctgacggctgccagcctgccccactggtgtgtgccgggcgccgaggccaggggcccctggcgagaaccgcacacacccctcccacacaccttgctctggcttctctgtgtccatggggtgggcgggagggggtcccccagcaggtgcggcccctgcacctgccggcgacactcctgccggtagtttagggccgagacggctagcttcacgccacccttccccgctgtggcttggtgtcagggagaggctgtagagtggctgtgtcgggcatcagatggagcacacaggtggctgcagcccagcccaccttcccagcgttctcgaggtgccctggccccggtgctgggcacgtgggggacagaggtggccgggacgtgagctgtgaggcttgttgatgatggttgctgacaccatcatcgggggtgggcacacggcccttcggagcctgggcagcctggcctcacaggcagactcgcagacggggcagtgagcgtctgggacagtgccaagagtggggtgtgtgatttttgcaggcgtctgtgatgggtctctttagggacaaatgtcaacaagggacaagacagggcaccttccgccagcgcccctccatgcgctgcgttcctcctccagatcga

SEQ ID NO: 224016 - DNA, 1566 bp, Artificial Sequence
  derived and/or modified sequence
atgagcgccgtgagccagccccaggccgcccccagccccctggagaagagccccagcaccgccatcctgtgcaacacctgcggcaacgtgtgcaagggcgaggtgctgagagtgcaggacaagtacttccacatcaagtgcttcgtgtgcaaggcctgcggctgcgacctggccgagggcggcttcttcgtgagacagggcgagtacatctgcaccctggactaccagagactgtacggcaccagatgcttcagctgcgaccagttcatcgagggcgaggtggtgagcgccctgggcaagacctaccaccccgactgcttcgtgtgcgccgtgtgcagactgcccttcccccccggcgacagagtgaccttcaacggcaaggagtgcatgtgccagaagtgcagcctgcccgtgagcgtgggcagcagcgcccacctgagccagggcctgagaagctgcggcggctgcggcaccgagatcaagaacggccaggccctggtggccctggacaagcactggcacctgggctgcttcaagtgcaagagctgcggcaagctgctgaacgccgagtacatcagcaaggacggcctgccctactgcgaggccgactaccacgccaagttcggcatcagatgcgacagctgcgagaagtacatcaccggcagagtgctggaggccggcgagaagcactaccaccccagctgcgccctgtgcgtgagatgcggccagatgttcgccgagggcgaggagatgtacctgcagggcagcagcatctggcaccccgcctgcagacaggccgccagaaccgaggacagaaacaaggagaccagaaccagcagcgagagcatcatcagcgtgcccgccagcagcaccagcggcagccccagcagagtgatctacgccaagctgggcggcgagatcctggactacagagacctggccgccctgcccaagagcaaggccatctacgacatcgacagacccgacatgatcagctacagcccctacatcagccacagcgccggcgacagacagagctacggcgagggcgaccaggacgacagaagctacaagcagtgcagaaccagcagccccagcagcaccggcagcgtgagcctgggcagatacacccccaccagcagaagcccccagcactacagcagacccgccgccagaagaagcgacggcgaggacggcagcctggaccaggacaacagaaagcagaagagcagctggctgatgctgaagggcgacgccgacaccagaaccaacagccccgacctggacacccagagcctgagccacagcagcggcaccgacagagaccccctgcagagaatggccggcgacagcttccacagccagtacaagatctacccctacgacagcctgatcgtgaccaacagaatcagagtgaagctgcccaaggacgtggacagaaccagactggagagacacctgagccccgaggagttccaggaggtgttcggcatgagcatcgaggagttcgacagactggccctgtggaagagaaacgacctgaagaagaaggccctgctgttctag

SEQ ID NO: 224017 - protein, 567 aa, Artificial Sequence
  derived and/or modified sequence
MSSRLGAVPATSGPTTFKQQRSTRIVGAKNSRTQCSIKDNSFQYTIPHDDSLSGSSSASSCEPVSDFPASFRKSTYWMKMRRIKPAATSHVEGSGGVSAKGKRKPRQEEDEDYREFPQKKHKLYGRKQRPKTQPNPKSQARRIRKEPPVYAAGSLEEQWYLEIVDKGSVSCPTCQAVGRKTIEGLKKHMENCKQEMFTCHHCGKQLRSLAGMKYHVMANHNSLPILKAGDEIDEPSERERLRTVLKRLGKLRCMRESCSSSFTSIMGYLYHVRKCGKGAAELEKMTLKCHHCGKPYRSKAGLAYHLRSEHGPISFFPESGQPECLKEMNLESKSGGRVQRRSAKIAVYHLQELASAELAKEWPKRKVLQDLVPDDRKLKYTRPGLPTFSQEVLHKWKTDIKKYHRIQCPNQGCEAVYSSVSGLKAHLGSCTLGNFVAGKYKCLLCQKEFVSESGVKYHINSVHAEDWFVVNPTTTKSFEKLMKIKQRQQEEEKRRQQHRSRRSLRRRQQPGIELPETELSLRVGKDQRRNNEELVVSASCKEPEQEPVPAQFQKVKPPKTNHKRGRK

SEQ ID NO: 224018 - protein, 566 aa, Artificial Sequence
  derived and/or modified sequence
MSSRLGAVPATSGPTTFKQQRSTRIVGAKNRTQCSIKDNSFQYTIPHDDSLSGSSSASSCEPVSDFPASFRKSTYWMKMRRIKPAATSHVEGSGGVSAKGKRKPRQEEDEDYREFPQKKHKLYGRKQRPKTQPNPKSQARRIRKEPPVYAAGSLEEQWYLEIVDKGSVSCPTCQAVGRKTIEGLKKHMENCKQEMFTCHHCGKQLRSLAGMKYHVMANHNSLPILKAGDEIDEPSERERLRTVLKRLGKLRCMRESCSSSFTSIMGYLYHVRKCGKGAAELEKMTLKCHHCGKPYRSKAGLAYHLRSEHGPISFFPESGQPECLKEMNLESKSGGRVQRRSAKIAVYHLQELASAELAKEWPKRKVLQDLVPDDRKLKYTRPGLPTFSQEVLHKWKTDIKKYHRIQCPNQGCEAVYSSVSGLKAHLGSCTLGNFVAGKYKCLLCQKEFVSESGVKYHINSVHAEDWFVVNPTTTKSFEKLMKIKQRQQEEEKRRQQHRSRRSLRRRQQPGIELPETELSLRVGKDQRRNNEELVVSASCKEPEQEPVPAQFQKVKPPKTNHKRGRK

SEQ ID NO: 224019 - protein, 490 aa, Artificial Sequence
  derived and/or modified sequence
MKMRRIKPAATSHVEGSGGVSAKGKRKPRQEEDEDYREFPQKKHKLYGRKQRPKTQPNPKSQARRIRKEPPVYAAGSLEEQWYLEIVDKGSVSCPTCQAVGRKTIEGLKKHMENCKQEMFTCHHCGKQLRSLAGMKYHVMANHNSLPILKAGDEIDEPSERERLRTVLKRLGKLRCMRESCSSSFTSIMGYLYHVRKCGKGAAELEKMTLKCHHCGKPYRSKAGLAYHLRSEHGPISFFPESGQPECLKEMNLESKSGGRVQRRSAKIAVYHLQELASAELAKEWPKRKVLQDLVPDDRKLKYTRPGLPTFSQEVLHKWKTDIKKYHRIQCPNQGCEAVYSSVSGLKAHLGSCTLGNFVAGKYKCLLCQKEFVSESGVKYHINSVHAEDWFVVNPTTTKSFEKLMKIKQRQQEEEKRRQQHRSRRSLRRRQQPGIELPETELSLRVGKDQRRNNEELVVSASCKEPEQEPVPAQFQKVKPPKTNHKRGRK

SEQ ID NO: 224020 - protein, 385 aa, Artificial Sequence
  derived and/or modified sequence
MSKGQVEYQPRGKGNPGRKKMKTIENFLRRSISFMGGSNGLKLSPIPNPRPVVFGRNHQFMQQEMFTCHHCGKQLRSLAGMKYHVMANHNSLPILKAGDEIDEPSERERLRTVLKRLGKLRCMRESCSSSFTSIMGYLYHVRKCGKGAAELEKMTLKCHHCGKPYRSKAGLAYHLRSEHGPISFFPESGQPECLKEMNLESKSGGRVQRRSAKIAVYHLQELASAELAKEWPKRKVLQDLVPDDRKLKYTRPGLPTFSQEVLHKWKTDIKKYHRIQCPNQGCEAVYSSVSGLKAHLGSCTLGNFVAGKYKCLLCQKEFVSESGVKYHINSVHAEDWFVVNPTTTKSFEKLMKIKQRQQEEEKRRQQHRSRRGSQDTCMPKALHRM

SEQ ID NO: 224021 - DNA, 1704 bp, Artificial Sequence
  derived and/or modified sequence
atgagcagcagactgggcgccgtgcccgccaccagcggccccaccaccttcaagcagcagagaagcaccagaatcgtgggcgccaagaacagcagaacccagtgcagcatcaaggacaacagcttccagtacaccatcccccacgacgacagcctgagcggcagcagcagcgccagcagctgcgagcccgtgagcgacttccccgccagcttcagaaagagcacctactggatgaagatgagaagaatcaagcccgccgccaccagccacgtggagggcagcggcggcgtgagcgccaagggcaagagaaagcccagacaggaggaggacgaggactacagagagttcccccagaagaagcacaagctgtacggcagaaagcagagacccaagacccagcccaaccccaagagccaggccagaagaatcagaaaggagccccccgtgtacgccgccggcagcctggaggagcagtggtacctggagatcgtggacaagggcagcgtgagctgccccacctgccaggccgtgggcagaaagaccatcgagggcctgaagaagcacatggagaactgcaagcaggagatgttcacctgccaccactgcggcaagcagctgagaagcctggccggcatgaagtaccacgtgatggccaaccacaacagcctgcccatcctgaaggccggcgacgagatcgacgagcccagcgagagagagagactgagaaccgtgctgaagagactgggcaagctgagatgcatgagagagagctgcagcagcagcttcaccagcatcatgggctacctgtaccacgtgagaaagtgcggcaagggcgccgccgagctggagaagatgaccctgaagtgccaccactgcggcaagccctacagaagcaaggccggcctggcctaccacctgagaagcgagcacggccccatcagcttcttccccgagagcggccagcccgagtgcctgaaggagatgaacctggagagcaagagcggcggcagagtgcagagaagaagcgccaagatcgccgtgtaccacctgcaggagctggccagcgccgagctggccaaggagtggcccaagagaaaggtgctgcaggacctggtgcccgacgacagaaagctgaagtacaccagacccggcctgcccaccttcagccaggaggtgctgcacaagtggaagaccgacatcaagaagtaccacagaatccagtgccccaaccagggctgcgaggccgtgtacagcagcgtgagcggcctgaaggcccacctgggcagctgcaccctgggcaacttcgtggccggcaagtacaagtgcctgctgtgccagaaggagttcgtgagcgagagcggcgtgaagtaccacatcaacagcgtgcacgccgaggactggttcgtggtgaaccccaccaccaccaagagcttcgagaagctgatgaagatcaagcagagacagcaggaggaggagaagagaagacagcagcacagaagcagaagaagcctgagaagaagacagcagcccggcatcgagctgcccgagaccgagctgagcctgagagtgggcaaggaccagagaagaaacaacgaggagctggtggtgagcgccagctgcaaggagcccgagcaggagcccgtgcccgcccagttccagaaggtgaagccccccaagaccaaccacaagagaggcagaaagtag

SEQ ID NO: 224022 - DNA, 1701 bp, Artificial Sequence
  derived and/or modified sequence
atgagcagcagactgggcgccgtgcccgccaccagcggccccaccaccttcaagcagcagagaagcaccagaatcgtgggcgccaagaacagaacccagtgcagcatcaaggacaacagcttccagtacaccatcccccacgacgacagcctgagcggcagcagcagcgccagcagctgcgagcccgtgagcgacttccccgccagcttcagaaagagcacctactggatgaagatgagaagaatcaagcccgccgccaccagccacgtggagggcagcggcggcgtgagcgccaagggcaagagaaagcccagacaggaggaggacgaggactacagagagttcccccagaagaagcacaagctgtacggcagaaagcagagacccaagacccagcccaaccccaagagccaggccagaagaatcagaaaggagccccccgtgtacgccgccggcagcctggaggagcagtggtacctggagatcgtggacaagggcagcgtgagctgccccacctgccaggccgtgggcagaaagaccatcgagggcctgaagaagcacatggagaactgcaagcaggagatgttcacctgccaccactgcggcaagcagctgagaagcctggccggcatgaagtaccacgtgatggccaaccacaacagcctgcccatcctgaaggccggcgacgagatcgacgagcccagcgagagagagagactgagaaccgtgctgaagagactgggcaagctgagatgcatgagagagagctgcagcagcagcttcaccagcatcatgggctacctgtaccacgtgagaaagtgcggcaagggcgccgccgagctggagaagatgaccctgaagtgccaccactgcggcaagccctacagaagcaaggccggcctggcctaccacctgagaagcgagcacggccccatcagcttcttccccgagagcggccagcccgagtgcctgaaggagatgaacctggagagcaagagcggcggcagagtgcagagaagaagcgccaagatcgccgtgtaccacctgcaggagctggccagcgccgagctggccaaggagtggcccaagagaaaggtgctgcaggacctggtgcccgacgacagaaagctgaagtacaccagacccggcctgcccaccttcagccaggaggtgctgcacaagtggaagaccgacatcaagaagtaccacagaatccagtgccccaaccagggctgcgaggccgtgtacagcagcgtgagcggcctgaaggcccacctgggcagctgcaccctgggcaacttcgtggccggcaagtacaagtgcctgctgtgccagaaggagttcgtgagcgagagcggcgtgaagtaccacatcaacagcgtgcacgccgaggactggttcgtggtgaaccccaccaccaccaagagcttcgagaagctgatgaagatcaagcagagacagcaggaggaggagaagagaagacagcagcacagaagcagaagaagcctgagaagaagacagcagcccggcatcgagctgcccgagaccgagctgagcctgagagtgggcaaggaccagagaagaaacaacgaggagctggtggtgagcgccagctgcaaggagcccgagcaggagcccgtgcccgcccagttccagaaggtgaagccccccaagaccaaccacaagagaggcagaaagtag

SEQ ID NO: 224023 - DNA, 1704 bp, Artificial Sequence
  derived and/or modified sequence
atgtcttcccgcctcggcgcagtccctgccacatccggcccaacgactttcaaacagcaaaggagcactcggatcgtcggtgccaagaacagccgaacccagtgcagcatcaaggataattctttccaatacaccatcccacacgatgactctctctcagggagctcctccgcctcaagttgcgaacctgtctcagactttcctgcctcttttcggaagtctacttattggatgaagatgcgtagaatcaaaccggcagctacttctcatgtcgaaggctccggcggggtgtcggccaaaggcaagcgcaagccaaggcaggaggaggacgaggattatcgcgagtttcctcaaaagaaacataaactgtacgggcggaaacagcgcccgaaaacccagccaaatcctaagagtcaagcaaggcgcataaggaaggagcctcctgtgtatgcggcgggcagcctggaggagcagtggtatctcgaaatcgtggacaaagggagcgttagctgtccgacgtgccaagctgtgggcagaaagacaatcgagggactgaagaaacatatggagaactgcaagcaggaaatgtttacctgtcaccattgtggcaagcaactacgctctctcgccggtatgaaataccacgttatggcaaaccacaactcactacctattctgaaggcgggggacgagattgatgaaccaagcgaacgcgagcgacttagaacagttctaaaaaggctaggcaagctcagatgcatgcgcgaatcttgctcctcctcttttacttccatcatgggttatctgtaccacgtaaggaaatgtgggaagggcgctgctgagctcgagaagatgactctgaagtgccatcattgcggtaaaccctaccgctcaaaggccggcttggcctatcacctcaggtccgaacacggcccaatttcttttttccctgagagcgggcaacccgaatgcctgaaggaaatgaatctcgagtcaaagtccggcgggcgagtgcaacgcagatctgccaaaattgccgtgtatcatctgcaggaactcgcttccgccgaactggcaaaggaatggcccaaacgaaaggtcttacaggatcttgttcccgatgaccgcaagctgaaatacacgcggccaggcctccctacattctctcaggaagtgctgcacaaatggaagactgacattaaaaagtatcatcggattcaatgtcccaatcagggatgcgaggctgtgtattcatcagtctcagggttgaaggcacatttagggtcatgtacactcggtaactttgtcgccggtaagtacaagtgtctgctgtgccagaaggagtttgtgtctgaaagtggagtcaagtatcacataaactcggtgcacgcagaggactggttcgtggtgaatcctaccacaactaagagcttcgaaaagctcatgaagattaagcagagacagcaagaggaagagaaaagaaggcagcagcatcgatctaggcggtcacttcggcgacgccagcagcctggcattgagctgcccgaaacagagctgtcactcagggtggggaaggatcagcggagaaataatgaggagttggtggtgagcgcgagttgtaaggaaccagaacaggaacctgttcccgcccagttccagaaggtcaaaccgcccaagacaaaccataagcgcggacggaaatag

SEQ ID NO: 224024 - DNA, 1701 bp, Artificial Sequence
  derived and/or modified sequence
atgtcatcccggttgggcgcagtgccagctacttctggaccaaccacctttaagcagcaacgatctacccggatcgtgggcgccaaaaatcgaacgcagtgtagcatcaaggacaatagttttcagtacaccattcctcacgacgactccctgtccggcagtagcagtgctagctcttgtgagccggtctcagatttccccgccagtttcaggaagtccacgtactggatgaagatgcggagaattaaaccagctgccacaagtcacgtggaggggtctgggggagtctctgccaagggcaagcgaaagcctcggcaggaggaagacgaggactatagagagttcccccagaagaagcacaaactgtacgggaggaagcagcgaccgaagacccagcccaatccgaagagtcaggcccgtcggatccggaaagagccaccggtgtatgccgccggttctttggaagagcagtggtatctggagatcgtcgacaaaggctctgtgtcttgtcctacttgtcaggccgtgggcaggaaaactattgagggcctcaaaaaacatatggaaaattgcaaacaggagatgtttacttgtcaccattgcgggaaacagctgagatcccttgccggtatgaaataccacgtgatggctaaccacaacagcctcccaatcctgaaggccggggatgagatcgacgagccaagtgaaagagagcgtctgaggaccgttctgaagagactcgggaagcttaggtgtatgcgtgaaagttgttccagctcatttacatccataatgggttacttgtaccacgtgagaaaatgcggaaaaggggccgctgagctggagaagatgactttaaagtgccaccactgcggcaaaccgtacagatctaaggccggtctggcctatcacctgagatccgagcacggccccatctcattctttcccgagtccggtcagcccgagtgcttaaaggagatgaacctggaatctaaatcaggtggaagagtccagcgcaggagtgcgaaaattgctgtatatcatctgcaagagctagccagcgccgagctggcaaaggaatggcccaaaaggaaggtcctgcaggacctggtaccagatgatcggaagctcaagtatacacgcccagggctccccacattctcacaggaggtgctccacaagtggaaaacagatataaaaaaataccaccgaatacaatgccctaaccagggctgtgaggctgtgtactctagtgtgagcggactcaaggctcatctgggatcgtgcacactcggaaattttgtagcaggaaaatacaagtgtctgctgtgccagaaagaattcgtgtctgagtctggagtcaagtaccatataaactccgtccatgcagaagattggttcgtggtaaatccaaccaccactaagtctttcgagaagctgatgaaaattaagcagcggcaacaagaggaagagaagaggcggcagcagcaccggagtaggcgtagcctgagaagaagacagcagcctggcatagagttgcctgaaacagagttatcccttagagtggggaaggatcagagacggaacaatgaagaactggtagtctctgcctcgtgcaaggagccagaacaggagcccgttccagcacagtttcagaaggttaaaccccccaaaaccaatcataaacgggggagaaagtag

SEQ ID NO: 224025 - DNA, 1704 bp, Artificial Sequence
  derived and/or modified sequence
atgagcagccggctgggcgctgtgcctgccaccagcggccccaccaccttcaagcagcagaggagcaccagaattgtgggcgccaagaacagcaggacccagtgcagcatcaaggacaacagcttccagtacaccatcccccatgatgacagcctgagcggcagcagcagcgccagcagctgtgagcctgtgtctgacttccctgccagcttcaggaagagcacctactggatgaagatgaggcgcatcaagccagctgccaccagccacgtggagggcagcggcggcgtgtctgccaagggcaagaggaagccccggcaggaggaggatgaggactaccgggagttcccccagaagaagcacaagctgtatggcaggaagcagaggcccaagacccagcccaaccccaagagccaggcccggcgcatcaggaaggagccccctgtgtatgctgctggcagcctggaggagcagtggtacctggagatcgtggacaagggctctgtgtcctgccccacctgccaggccgtgggcaggaagaccatcgagggcctgaagaagcacatggagaactgcaagcaggagatgttcacctgccaccactgtgggaagcagctgcggagcctggccggcatgaagtaccacgtgatggccaaccacaacagcctgcccatcctgaaggctggagatgaaattgatgagcccagcgagcgggagcggctgaggacagtgctgaagaggctgggcaagctgcgctgcatgagggagagctgcagcagcagcttcaccagcatcatgggctacctgtaccacgtgaggaaatgtgggaaaggagctgctgagctggagaagatgaccctgaagtgccaccactgtgggaagccctaccgcagcaaggccggcctggcctaccacctgcggtctgagcacggccccatctccttcttccctgagagcggccagccagaatgtctgaaggagatgaacctggagagcaagagcggcggccgggtgcagaggagaagtgccaagattgctgtgtaccacctgcaggagctggccagcgctgagctggccaaggagtggcccaagaggaaggtgctgcaggacctggtgcctgatgacaggaagctgaagtacaccaggcctggcctgcccaccttcagccaggaggtgctgcacaagtggaagacagacatcaagaagtaccaccgcatccagtgccccaaccagggctgtgaggccgtgtacagctctgtgtctggcctgaaggcccacctgggcagctgcaccctgggcaactttgtggccggcaagtacaagtgcctgctgtgccagaaggagtttgtgtctgagagcggcgtgaagtaccacatcaacagcgtgcatgctgaggactggtttgtggtgaaccccaccaccaccaagagctttgagaagctgatgaagatcaagcagaggcagcaggaggaggagaagaggcggcagcagcacaggagcagaagaagcctgcggcggcggcagcagcccggcatcgagctgcctgagacagagctgagcctgcgggtgggcaaggaccagaggagaaataatgaggagctggtggtgtctgccagctgcaaggagcctgagcaggagcctgtgcctgcccagttccagaaggtgaagccacccaagaccaaccacaagaggggcaggaagtag

SEQ ID NO: 224026 - DNA, 1701 bp, Artificial Sequence
  derived and/or modified sequence
atgagcagccggctgggcgctgtgcctgccaccagcggccccaccaccttcaagcagcagaggagcaccagaattgtgggcgccaagaacagaacccagtgcagcatcaaggacaacagcttccagtacaccatcccccatgatgacagcctgagcggcagcagcagcgccagcagctgtgagcctgtgtctgacttccctgccagcttcaggaagagcacctactggatgaagatgaggcgcatcaagccagctgccaccagccacgtggagggcagcggaggagtgtctgccaagggcaagaggaagccccggcaggaggaggatgaggactaccgggagttcccccagaagaagcacaagctgtatggcaggaagcagaggcccaagacccagcccaaccccaagagccaggcccggcgcatcaggaaggagccccctgtgtatgctgctggcagcctggaggagcagtggtacctggagatcgtggacaagggctctgtgtcctgccccacctgccaggccgtgggcaggaagaccatcgagggcctgaagaagcacatggagaactgcaagcaggagatgttcacctgccaccactgcggcaagcagctgcggagcctggccggcatgaagtaccacgtgatggccaaccacaacagcctgcccatcctgaaggctggagatgaaattgatgagcccagcgagcgggagcggctgaggacagtgctgaagaggctgggcaagctgcgctgcatgagggagagctgcagcagcagcttcaccagcatcatgggctacctgtaccacgtgaggaaatgtgggaaaggagctgctgagctggagaagatgaccctgaagtgccaccactgcggcaagccctaccgcagcaaggccggcctggcctaccacctgcggagtgaacatggccccatctccttcttccctgagagcggccagcctgagtgcctgaaggagatgaacctggagagcaagagcggcggccgggtgcagaggagaagtgccaagattgctgtgtaccacctgcaggagctggccagcgctgagctggccaaggagtggcccaagaggaaggtgctgcaggacctggtgcctgatgacaggaagctgaagtacacccggcccggcctgcccaccttcagccaggaggtgctgcacaagtggaagacagacatcaagaagtaccaccgcatccagtgccccaaccagggctgtgaggccgtgtacagctctgtgtctggcctgaaggcccacctgggcagctgcaccctgggcaactttgtggccggcaagtacaagtgcctgctgtgccagaaggagtttgtgtctgagagcggcgtgaagtaccacatcaacagcgtgcatgctgaggactggtttgtggtgaaccccaccaccaccaagagctttgagaagctgatgaagatcaagcagaggcagcaggaggaggagaagaggcggcagcagcacaggagccgccgcagcctgcggcggcggcagcagcccggcatcgagctgcctgagacagagctgagcctgcgggtgggcaaggaccagaggaggaacaatgaggagctggtggtgtctgccagctgcaaggagcctgagcaggagcctgtgcctgcccagttccagaaggtgaagccacccaagaccaaccacaagaggggcaggaagtag

SEQ ID NO: 224027 - DNA, 1704 bp, Artificial Sequence
  derived and/or modified sequence
atgagcagccggctgggcgccgtgcccgccaccagcggccccaccaccttcaaacagcaacgctccacaaggattgttggagcgaaaaacagcagaactcagtgcagtatcaaagataactccttccaatatacaatcccgcacgatgacagcctatcaggatcaagcagtgccagttcctgtgagcccgtatcagatttcccggcatcttttcgcaagagcacatactggatgaagatgcggaggataaagcctgcagccacctcacacgtcgaagggtcaggtggagtgtccgcgaagggaaaacgaaaaccgaggcaggaggaggacgaagactatagagaattccctcagaagaaacacaagctgtacggaaggaagcagaggccaaagacccagcctaatcctaaatctcaggcgcgaaggatccggaaggagccccccgtttacgcagcagggtctttagaggagcagtggtacctagaaattgtcgacaaaggaagtgtcagctgtcccacttgtcaggccgtgggccgaaagaccatcgaaggactcaagaagcacatggagaactgcaaacaggagatgttcacttgtcatcattgtggcaagcagctgagaagtctggcaggtatgaaatatcacgtaatggccaaccataactcactcccaattttgaaggccggcgatgaaattgacgagccctccgaacgggaaaggttgcggaccgttctaaaacgcctcggcaagctgcggtgtatgagggagtcatgtagctcttcctttaccagcatcatgggctatctttaccatgtgcgtaagtgcggcaaaggagctgccgagctcgaaaaaatgaccctcaagtgtcaccattgtgggaagccatataggagtaaggccggacttgcttaccacctccgctccgaacatgggccaataagtttttttcctgaatcagggcagcctgagtgcctcaaagagatgaaccttgagagcaagtctggcgggagagtacagcgcagaagcgctaagatcgcagtataccacctgcaggaactcgccagcgcagaactggcaaaagaatggcccaagcggaaagtcctgcaggacctggtgccagacgatcggaaattaaaatatactcgtcctggtttacccactttcagtcaagaagtgctccataagtggaagaccgacattaaaaagtaccaccgtatacagtgtcctaaccagggatgcgaagcagtctattcgtccgtctcgggactgaaggcgcacttgggttcatgtactctagggaacttcgtggcgggaaagtacaagtgtctcttatgtcagaaggaattcgtcagcgagtccggcgtgaagtatcacatcaacagcgtgcacgccgaagattggtttgttgttaatccaacgaccacaaagtccttcgagaagttgatgaaaatcaaacagcggcagcaagaggaagagaagagacgccagcaacaccggtctagacgctccctgcgccggcgccaacagcctgggattgagctgcctgagacagagctttcacttcgggttgggaaagaccagaggaggaacaacgaggaattggtggtctcagccagttgcaaagagcctgaacaagaacccgttcccgcccagtttcagaaagtgaaaccacccaaaaccaaccacaagaggggcagaaagtag

SEQ ID NO: 224028 - DNA, 1701 bp, Artificial Sequence
  derived and/or modified sequence
atgagcagccggctgggcgccgtgcccgccaccagcggccccaccacgtttaagcagcagagaagtacaagaatcgttggcgcaaagaatagaacccagtgttcaattaaggataacagctttcaatacacaatcccccatgatgatagcctctccggatccagctccgcaagcagctgcgaaccagtgtctgacttccccgcgtctttcaggaaaagtacatactggatgaagatgcgcagaatcaagccagccgcgaccagccacgtagaaggcagtgggggagtctcagcaaaaggtaaaagaaaacccaggcaggaggaggacgaagattaccgggaattcccccagaaaaagcacaagctttacggaagaaagcagaggcccaagactcagcccaaccctaagagccaggcccggcgcattcgcaaggagcccccagtgtacgctgccggatctctggaagaacagtggtacctggaaatcgtggataagggcagcgtttcctgtcccacttgtcaggcagtgggacgcaaaacaatcgagggtctgaaaaaacatatggaaaactgcaagcaggaaatgttcacctgtcatcactgcgggaagcagctgcggtcactggcaggcatgaagtatcacgtgatggctaaccacaacagcttaccaattttgaaggcaggggacgagatagacgagccatccgagcgcgaaaggctaagaactgttctaaaaaggcttggtaaactgcggtgtatgcgtgaatcctgtagttccagctttacatctataatgggatacttgtaccatgtgagaaaatgtggaaagggagctgcagagctcgagaaaatgactctgaagtgtcatcactgtgggaagccctacaggtcaaaagccggcctagcctaccatctgcggagcgaacacggtcccatctctttttttcctgaatcaggacagccggagtgcctcaaggagatgaaccttgagtcaaagtccgggggccgcgtgcagagaaggtccgccaagattgccgtgtaccatcttcaggagctcgcttccgccgaactcgccaaagaatggcccaaaagaaaggtccttcaggatctggtgcccgatgataggaaattaaaatatacaagacctggcctcccgacattttcccaagaggtgctgcataagtggaagaccgacattaaaaagtatcacaggatccagtgtcccaaccaaggttgtgaagcagtgtatagctccgtttcaggactgaaagctcatctcggcagctgcacactagggaacttcgtggcaggtaaatataagtgcttactgtgtcagaaggaatttgtgagtgaatctggcgttaaataccacatcaatagcgtgcacgctgaggattggttcgtggtgaaccccacaaccacgaaatcctttgagaaactgatgaagattaaacagcgacaacaggaggaagagaagcgccgccagcagcacaggagcagacggagcctgagacggaggcaacagccgggcatcgagttgccagaaaccgagcttagcctgagggtaggaaaggaccagcgaaggaataatgaagagctggttgtttccgcatcgtgcaaggaaccggagcaggaacctgtcccagctcagttccagaaagtcaagcccccaaaaaccaaccataagcggggccgcaaatag

SEQ ID NO: 224029 - DNA, 1704 bp, Artificial Sequence
  derived and/or modified sequence
atgtcaagtagactgggagccgttcccgctacctcagggcctaccacttttaaacagcagaggagcactcggatagttggtgccaagaactcacgaacacagtgtagtattaaggacaatagtttccagtacacaataccacatgacgatagtctgtctggaagcagctccgcatcaagttgtgagcctgtctccgatttccctgcctcgtttaggaagagcacatactggatgaaaatgagaagaataaagcccgcagccaccagccacgtagaagggtctggcggtgtgagcgccaaaggcaagcgtaaacccaggcaggaagaggatgaggattatcgcgagttcccccagaagaagcacaaattatatggaaggaaacagcgccctaaaactcagcctaaccccaagtcccaagcgaggagaattcggaaagagcctcccgtctatgccgctgggagtctggaagagcagtggtacctggaaatcgtcgacaaagggtctgtgagttgtcccacttgtcaggctgtagggaggaagactatcgaggggttgaagaagcacatggaaaactgcaagcaagaaatgttcacttgccatcactgtggcaaacagctgaggtccctcgctggtatgaagtaccatgtcatggccaaccacaattctctgcctatcctcaaggccggtgatgagattgatgagccgagtgaacgtgagaggcttaggaccgtccttaagcggttgggtaaactgaggtgtatgagggagtcttgctcctccagttttacaagcatcatgggttacctataccatgtcagaaaatgcggaaagggcgctgccgagctggagaagatgacgttgaagtgccaccattgcggcaagccttaccgtagtaaagcaggcttggcctaccatctgaggtccgagcatggccctatatccttcttcccagagtcgggccagccagaatgtctcaaagagatgaacctagaatccaaatctggaggcagagtgcagcgaaggtcggctaaaatcgccgtctatcacctgcaggagctggcaagcgctgaattagctaaagagtggccaaagcgcaaggtcctgcaggatctcgtacccgatgaccgcaagctgaaatacactagacccggtctgcccacctttagccaggaggtacttcacaaatggaagactgatattaaaaagtatcatcgtatccagtgtccgaatcagggctgcgaggccgtctacagctctgtgtctggactcaaggcccatctgggatcgtgcactcttggaaacttcgtcgcaggtaagtacaagtgcctactctgtcagaaagagtttgttagtgaaagcggagtcaaataccacatcaattcagtgcacgctgaggactggtttgtcgttaaccccacaacaactaagagttttgagaaactgatgaagatcaagcagcgccagcaagaggaggagaagcgccgtcagcagcaccgctcccgcagatcgctgcgtaggaggcagcagcccggtattgagctccccgagactgagctttccttgcgcgtgggaaaagatcagcgacggaacaacgaggagcttgttgtgtcggcttcctgtaaggagccggaacaggagcccgttccagcacagtttcagaaagtgaaacccccaaaaacaaaccacaagagaggaagaaaatag

SEQ ID NO: 224030 - DNA, 1701 bp, Artificial Sequence
  derived and/or modified sequence
atgagctctcggcttggggcagttcccgctacctccggtcccaccacctttaagcagcagcggtcaacaagaattgtcggagccaaaaaccgcactcagtgttctattaaagataactcctttcagtatacaatccctcacgatgattcattatccgggtctagttccgcaagctcatgtgaacccgtatctgattttcccgcttcctttcgcaagagtacctactggatgaagatgagaaggattaaacccgctgcaacatcccatgtcgaagggagcgggggagtgtctgccaagggtaaacgcaagcctcgacaggaggaggatgaagattacagggagttccctcagaaaaaacacaagctatatggtcgcaaacagaggccaaagactcaacccaaccccaagtcccaggcacggaggataaggaaagagcctccagtctacgccgcaggaagcctcgaagagcagtggtatctggaaatcgtcgataagggctctgtttcctgtccgacctgccaggctgtcggccgtaaaaccatcgagggccttaaaaaacacatggagaactgcaagcaggaaatgttcacctgccaccattgcgggaagcagcttcgaagcctggccggaatgaagtaccatgtgatggctaatcacaacagcttgcctatcttgaaagcaggcgacgagatcgacgaaccgtccgagagagaaagactaagaaccgtgcttaaacgactgggaaagctgagatgtatgcgggaatcctgctcttcctctttcaccagcattatggggtatctgtatcacgttagaaaatgtggtaagggcgctgcggaactggagaagatgactctaaaatgtcaccactgcggcaagccctatcgctctaaagcagggctggcctaccatctgcgctcagagcacgggccaatcagctttttcccagagagtggccagccagagtgccttaaagagatgaaccttgagtctaaaagcggcggtagggtgcagaggaggtcagcgaaaatagcggtgtatcacctccaggagctcgccagtgcggaacttgccaaagagtggccaaaacgcaaggtgttacaagatcttgtgcccgatgataggaaattaaagtatactcggcctggtctgcccaccttttcacaggaggtccttcataaatggaaaaccgatataaaaaagtatcataggattcagtgccctaaccaaggctgcgaagctgtctactcgtccgtgtcgggacttaaagcccatttgggaagttgcacgttaggtaactttgtggctggaaaatacaagtgtctgctttgtcagaaggagttcgtttcagagtcgggcgtgaagtatcacattaacagcgtgcacgcggaagattggtttgtggtgaacccgaccaccacgaagtcgttcgaaaaattgatgaaaattaaacaacggcagcaggaggaggaaaagcggaggcagcagcaccgctctcgaaggtcattgaggcggcgacaacaacccggtatcgagctccccgaaacagaacttagtttacgggtgggaaaggatcagcgcagaaataatgaggagctggtggtctctgcttcctgcaaggaacccgagcaggaaccggtcccagcccagttccagaaggttaaaccgccaaaaaccaatcacaagagagggcgtaagtag

SEQ ID NO: 224031 - DNA, 3422 bp, Artificial Sequence
  derived and/or modified sequence
cccacatccgggagaggagagcggaagtggcgttggtctggccggagcccttgggtgaaattgttaggcgtggagagggagtgatgtcttccagactcggtgctgtacccgccacttcgggacccacaacctttaagcagcagaggagcacgaggatcgtgggagctaagaatagcaggacccagtgctccataaaggataatagtttccagtacactatccctcatgatgactccttaagtggttcatcgtctgcatcttcgtgtgaaccagtgagtgattttccagcatctttccgaaaatctacctactggatgaagatgagaagaatcaagccagctgctacttctcatgtcgaagggtcaggtggagtatcagccaaggggaaaaggaaacccaggcaggaagaagatgaagactatcgagaatttcctcagaagaagcataagctttatgggaggaagcaacggcctaaaactcagcccaatcccaaatcccaggcccgtcgtattcggaaggaaccaccagtttatgcagcaggcagtttggaggagcaatggtacttagaaatcgttgataaaggcagtgtctcctgccctacctgccaggcagtggggaggaagaccatagagggtttaaagaaacacatggaaaactgcaagcaggaaatgtttacttgtcatcattgtgggaaacaacttcgttcactggcagggatgaagtatcatgtcatggcaaatcataatagtttgcccattttgaaagccggagatgaaatagatgagccaagtgagagggaaaggctccgaacagttctaaagagactgggaaagctcaggtgcatgcgtgagagttgctccagtagcttcaccagcatcatgggatatctctaccatgtcagaaaatgtggcaaaggggctgcagagctggaaaagatgaccctgaaatgtcaccactgtggaaaaccatataggtcgaaggctggacttgcatatcacctgaggtcagagcatgggcctatatccttctttccagagtcaggacagccagagtgcttaaaggagatgaacctagagtcaaagagtgggggccgagttcagagacgttctgccaagatagctgtataccacctacaggagctggcctctgctgaactggccaaggaatggcccaagaggaaggtgcttcaggacctggtacctgatgatcgaaagttaaaatatactcgtccagggctccctaccttcagccaggaagtactacataaatggaagacagatatcaagaaatatcatcgtattcagtgtcctaaccagggctgtgaggctgtctacagcagtgtatctggccttaaagctcacctgggctcttgtacattgggaaactttgtggctggaaaatacaaatgtcttctatgtcagaaagaatttgtgtcagagagtggtgtcaagtatcacatcaactccgtccatgctgaggactggttcgttgtaaacccaacaacaaccaaaagctttgaaaagctgatgaagataaagcagcggcagcaagaagaagaaaagcggaggcagcagcacaggagcagaaggtctctaagaaggcggcagcagcctggcattgagcttcccgagacagagctgagtcttagagtagggaaggatcagaggaggaataatgaggaactggtagtgtcagcctcctgtaaggaaccagagcaggagccagtgccagcacagttccagaaagtaaagcccccaaagactaatcataaacgaggaaggaaataggcagtcagtgtaaaagtgctcctaggaaagcagatgtgatgctgttgtcacggggacctgtgctgggaggactgagtgaagattctttcagctgtttgtgtaaggctgtgactttctcagctccttcctcctgtgtaaatttcactgtcttcccttcttacattttgattcccccctccccttttagtaggttttcctgctattcctcgtcaagtcctcttgtttttttatcttgcccaaagagctccctctcaaggccaactataggctcctcttgccctgtacaaaactaagaaacctctttggttgtcctttccttcctggggtatagaatgttcttggaagctccattgatttagtagctgctccatcatctagcttgtgaaaccattccaaactaattttttaaaaccataactgatttgtcattttgtatttgtgatataacaagtctagaagttagaactgttgtcattcacataataagattactctgtctccttgggaaaaaaactttatggaggctgtttgtcctctcaatatggttttaagattgaaagtaagaaaacggatttaggatgaaaactctagaactaccctatgctgtttatactgggaaatgctttgtaccaagtagcagtgactagacccacagacatgaaaagcaaccttaggagtaaagtgacccaaacattaaaatgacaggaaagagaaagtagaagcagcaataaatactgccccaactttcctggagcccgaggcctcatccatagctatgatcacttgccctctgaagcttatttttgcttctttggttttaagaattgagaaatatcacattgcccctgatgttttgacagtctcctagtgctcctggtagtgccactaagggaaaaccaaggtgcgcattccttctccctggactttaccttacttgttagtctacgccccactgtttccacccatccccttagccaacctctgtctttttgaattttctgagaatattgtcctatcctcttttatatatggagttctctcctctttatatcctgagactttgacaccagatgtagatatttatctggagctggaaagaaaaattctttttctgtacctcatgcctatctggtaatgtttaatgggttatttctctttgagggtggctttctctggaacattggttagagcagctttgttgtcgtgtttctggattctcttccccattttgcgtaaatattggtcttatatattcttgcctattttgtggcatatgccacataaaaaatgaacctgatatagacaagtactaccttttcaaattctgaaaggctattaccactttaactctttgtgctcctccaaatagctttaaaatgtgggcttttgtgaagaccactttcaaacaagggagcactgaaacctgaattggatactgccagaataggtagttttgaaacaagttaaggacatggtatatgcactctgcattttcattggcagtgtgcccttaaagccctttcagtagatgagggttgtcagggaggagaaatgaagaagctatgttaatttctggtgagtaagacctggggaatgtttggcaatgacaaaagaaataaatgactctcagaaaga

SEQ ID NO: 224032 - DNA, 3417 bp, Artificial Sequence
  derived and/or modified sequence
cccacatccgggagaggagagcggaagtggcgttggtctggccggagcccttgggtgaaattgttaggcgtggagagggagtgatgtcttccagactcggtgctgtacccgccacttcgggacccacaacctttaagcagcagaggagcacgaggatcgtgggagctaagaacaggacccagtgctccataaaggataatagtttccagtacactatccctcatgatgactccttaagtggttcatcgtctgcatcttcgtgtgaaccagtgagtgattttccagcatctttccgaaaatctacctactggatgaagatgagaagaatcaagccagctgctacttctcatgtcgaagggtcaggtggagtatcagccaaggggaaaaggaaacccaggcaggaagaagatgaagactatcgagaatttcctcagaagaagcataagctttatgggaggaagcaacggcctaaaactcagcccaatcccaaatcccaggcccgtcgtattcggaaggaaccaccagtttatgcagcaggcagtttggaggagcaatggtacttagaaatcgttgataaaggcagtgtctcctgccctacctgccaggcagtggggaggaagaccatagagggtttaaagaaacacatggaaaactgcaagcaggaaatgtttacttgtcatcattgtgggaaacaacttcgttcactggcagggatgaagtatcatgtcatggcaaatcataatagtttgcccattttgaaagccggagatgaaatagatgagccaagtgagagggaaaggctccgaacagttctaaagagactgggaaagctcaggtgcatgcgtgagagttgctccagtagcttcaccagcatcatgggatatctctaccatgtcagaaaatgtggcaaaggggctgcagagctggaaaagatgaccctgaaatgtcaccactgtggaaaaccatataggtcgaaggctggacttgcatatcacctgaggtcagagcatgggcctatatccttctttccagagtcaggacagccagagtgcttaaaggagatgaacctagagtcaaagagtgggggccgagttcagagacgttctgccaagatagctgtataccacctacaggagctggcctctgctgaactggccaaggaatggcccaagaggaaggtgcttcaggacctggtacctgatgatcgaaagttaaaatatactcgtccagggctccctaccttcagccaggaagtactacataaatggaagacagatatcaagaaatatcatcgtattcagtgtcctaaccagggctgtgaggctgtctacagcagtgtatctggccttaaagctcacctgggctcttgtacattgggaaactttgtggctggaaaatacaaatgtcttctatgtcagaaagaatttgtgtcagagagtggtgtcaagtatcacatcaactccgtccatgctgaggactggttcgttgtaaacccaacaacaaccaaaagctttgaaaagctgatgaagataaagcagcggcagcaagaagaagaaaagcggaggcagcagcacaggagcagaaggtctctaagaaggcggcagcagcctggcattgagcttcccgagacagagctgagtcttagagtagggaaggatcagaggaggaataatgaggaactggtagtgtcagcctcctgtaaggaaccagagcaggagccagtgccagcacagttccagaaagtaaagcccccaaagactaatcataaacgaggaaggaaataggcagtcagtgtaaaagtgctcctaggaaagcagatgtgatgctgttgtcacggggacctgtgctgggaggactgagtgaagattctttcagctgtttgtgtaaggctgtgactttctcagctccttcctcctgtgtaaatttcactgtcttcccttcttacattttgattcccccctccccttttagtaggttttcctgctattcctcgtcaagtcctcttgtttttttatcttgcccaaagagctccctctcaaggccaactataggctcctcttgccctgtacaaaactaagaaacctctttggttgtcctttccttcctggggtatagaatgttcttggaagctccattgatttagtagctgctccatcatctagcttgtgaaaccattccaaactaattttttaaaaccataactgatttgtcattttgtatttgtgatataacaagtctagaagttagaactgttgtcattcacataataagattactctgtctccttgggaaaaaaactttatggaggctgtttgtcctctcaatatggttttaagattgaaagtaagaaaacggatttaggatgaaaactctagaactaccctatgctgtttatactgggaaatgctttgtaccaagtagcagtgactagacccacagacatgaaaagcaaccttaggagtaaagtgacccaaacattaaaatgacaggaaagagaaagtagaagcagcaataaatactgccccaactttcctggagcccgaggcctcatccatagctatgatcacttgccctctgaagcttatttttgcttctttggttttaagaattgagaaatatcacattgcccctgatgttttgacagtctcctagtgctcctggtagtgccactaagggaaaaccaaggtgcgcattccttctccctggactttaccttacttgttagtctacgccccactgtttccacccatccccttagccaacctctgtctttttgaattttctgagaatattgtcctatcctcttttatatatggagttctctcctctttatatcctgagactttgacaccagatgtagatatttatctggagctggaaagaaaaattctttttctgtacctcatgcctatctggtaatgtttaatgggttatttctctttgagggtggctttctctggaacattggttagagcagctttgttgtcgtgtttctggattctcttccccattttgcgtaaatattggtcttatatattcttgcctattttgtggcatatgccacataaaaaatgaacctgatatagacaagtactaccttttcaaattctgaaaggctattaccactttaactctttgtgctcctccaaatagctttaaaatgtgggcttttgtgaagaccactttcaaacaagggagcactgaaacctgaattggatactgccagaataggtagttttgaaacaagttaaggacatggtatatgcactctgcattttcattggcagtgtgcccttaaagccctttcagtagatgagggttgtcagggaggagaaatgaagaagctatgttaatttctggtgagtaagacctggggaatgtttggcaatgacaaaagaaataaatgactctcagaaa

SEQ ID NO: 224033 - DNA, 2062 bp, Artificial Sequence
  derived and/or modified sequence
agtgatgtcttccagactcggtgctgtacccgccagcctgggacagggctttgagaatgggggaagacgaaggctctggtattgttacccgcctttgcactgctggaagataggacagcatatttttcctaaaagacttcgggacccacaacctttaagcagcagaggagcacgaggatcgtgggagctaagaatagcaggacccagtgctccataaaggataatagtttccagtacactatccctcatgatgactccttaagtggttcatcgtctgcatcttcgtgtgaaccagtgagtgattttccagcatctttccgaaaatctacctactggatgaagatgagaagaatcaagccagctgctacttctcatgtcgaagggtcaggtggagtatcagccaaggggaaaaggaaacccaggcaggaagaagatgaagactatcgagaatttcctcagaagaagcataagctttatgggaggaagcaacggcctaaaactcagcccaatcccaaatcccaggcccgtcgtattcggaaggaaccaccagtttatgcagcaggcagtttggaggagcaatggtacttagaaatcgttgataaaggcagtgtctcctgccctacctgccaggcagtggggaggaagaccatagagggtttaaagaaacacatggaaaactgcaagcaggaaatgtttacttgtcatcattgtgggaaacaacttcgttcactggcagggatgaagtatcatgtcatggcaaatcataatagtttgcccattttgaaagccggagatgaaatagatgagccaagtgagagggaaaggctccgaacagttctaaagagactgggaaagctcaggtgcatgcgtgagagttgctccagtagcttcaccagcatcatgggatatctctaccatgtcagaaaatgtggcaaaggggctgcagagctggaaaagatgaccctgaaatgtcaccactgtggaaaaccatataggtcgaaggctggacttgcatatcacctgaggtcagagcatgggcctatatccttctttccagagtcaggacagccagagtgcttaaaggagatgaacctagagtcaaagagtgggggccgagttcagagacgttctgccaagatagctgtataccacctacaggagctggcctctgctgaactggccaaggaatggcccaagaggaaggtgcttcaggacctggtacctgatgatcgaaagttaaaatatactcgtccagggctccctaccttcagccaggaagtactacataaatggaagacagatatcaagaaatatcatcgtattcagtgtcctaaccagggctgtgaggctgtctacagcagtgtatctggccttaaagctcacctgggctcttgtacattgggaaactttgtggctggaaaatacaaatgtcttctatgtcagaaagaatttgtgtcagagagtggtgtcaagtatcacatcaactccgtccatgctgaggactggttcgttgtaaacccaacaacaaccaaaagctttgaaaagctgatgaagataaagcagcggcagcaagaagaagaaaagcggaggcagcagcacaggagcagaaggtctctaagaaggcggcagcagcctggcattgagcttcccgagacagagctgagtcttagagtagggaaggatcagaggaggaataatgaggaactggtagtgtcagcctcctgtaaggaaccagagcaggagccagtgccagcacagttccagaaagtaaagcccccaaagactaatcataaacgaggaaggaaataggcagtcagtgtaaaagtgctcctaggaaagcagatgtgatgctgttgtcacggggacctgtgctgggaggactgagtgaagattctttcagctgtttgtgtaaggctgtgactttctcagctccttcctcctgtgtaaatttcactgtcttcccttcttacattttgattcccccctccccttttagtaggttttcctgctattcctcgtcaagtcctcttgtttttttatcttgcccaaagagctccctctc

SEQ ID NO: 224034 - protein, 482 aa, Artificial Sequence
  derived and/or modified sequence
MFFLVTSDESNKTWGRNTVFRQEEFEDVKRNFKKKGCTWGPNSIQMKDRTDCKERIRPLSDGNSPWSTILIKNQKTMPLASLFVDQPGSCEEPKLSPDGLEHRKPKQIKLPSQAYIDLPLGKDAQRENPAEAESWEEAASANAATVSIEMTPTNSLSRSPQRKKTESALYGCTVLLASVALGLDLRELHKAQAAEEPLPKEEKKKREGIFQRASKSRRSASPPTSLPSTCGEASSPPSLPLSSALGILSTPSFSTKCLLQMDSEDPLVDSAPVTCDSEMLTPDFCPTAPGSGREPALMPRLDTDCSVSRNLPSSFLQQTCGNVPYCASSKHRPSHHRRTMSDGNPTPTGATIISATGASALPLCPSPAPHSHLPREVSPKKHSTVHIVPQRRPASLRSRSDLPQAYPQTAVSQLAQTACVVGRPGPHPTQFLAAKERTKSHVPSLLDADVEGQSRDYTVPLCRMRSKTSRPSIYELEKEFLS

SEQ ID NO: 224035 - protein, 570 aa, Artificial Sequence
  derived and/or modified sequence
MALRGAAGATDTPVSSAGGAPGGSASSSSTSSGGSASAGAGLWAALYDYEARGEDELSLRRGQLVEVLSQDAAVSGDEGWWAGQVQRRLGIFPANYVAPCRPAASPAPPPSRPSSPVHVAFERLELKELIGAGGFGQVYRATWQGQEVAVKAARQDPEQDAAAAAESVRREARLFAMLRHPNIIELRGVCLQQPHLCLVLEFARGGALNRALAAANAAPDPRAPGPRRARRIPPHVLVNWAVQIARGMLYLHEEAFVPILHRDLKSSNILLLEKIEHDDICNKTLKITDFGLAREWHRTTKMSTAGTYAWMAPEVIKSSLFSKGSDIWSYGVLLWELLTGEVPYRGIDGLAVAYGVAVNKLTLPIPSTCPEPFAKLMKECWQQDPHIRPSFALILEQLTAIEGAVMTEMPQESFHSMQDDWKLEIQQMFDELRTKEKELRSREEELTRAALQQKSQEELLKRREQQLAEREIDVLERELNILIFQLNQEKPKVKKRKGKFKRSRLKLKDGHRISLPSDFQHKITVQASPNLDKRRSLNSSSSSPPSSPTMMPRLRAIQCELSALPRGLLC

SEQ ID NO: 224036 - protein, 1036 aa, Artificial Sequence
  derived and/or modified sequence
MALRGAAGATDTPVSSAGGAPGGSASSSSTSSGGSASAGAGLWAALYDYEARGEDELSLRRGQLVEVLSQDAAVSGDEGWWAGQVQRRLGIFPANYVAPCRPAASPAPPPSRPSSPVHVAFERLELKELIGAGGFGQVYRATWQGQEVAVKAARQDPEQDAAAAAESVRREARLFAMLRHPNIIELRGVCLQQPHLCLVLEFARGGALNRALAAANAAPDPRAPGPRRARRIPPHVLVNWAVQIARGMLYLHEEAFVPILHRDLKSSNILLLEKIEHDDICNKTLKITDFGLAREWHRTTKMSTAGTYAWMAPEVIKSSLFSKGSDIWSYGVLLWELLTGEVPYRGIDGLAVAYGVAVNKLTLPIPSTCPEPFAKLMKECWQQDPHIRPSFALILEQLTAIEGAVMTEMPQESFHSMQDDWKLEIQQMFDELRTKEKELRSREEELTRAALQQKSQEELLKRREQQLAEREIDVLERELNILIFQLNQEKPKVKKRKGKFKRSRLKLKDGHRISLPSDFQHKITVQASPNLDKRRSLNSSSSSPPSSPTMMPRLRAIQLTSDESNKTWGRNTVFRQEEFEDVKRNFKKKGCTWGPNSIQMKDRTDCKERIRPLSDGNSPWSTILIKNQKTMPLASLFVDQPGSCEEPKLSPDGLEHRKPKQIKLPSQAYIDLPLGKDAQRENPAEAESWEEAASANAATVSIEMTPTNSLSRSPQRKKTESALYGCTVLLASVALGLDLRELHKAQAAEEPLPKEEKKKREGIFQRASKSRRSASPPTSLPSTCGEASSPPSLPLSSALGILSTPSFSTKCLLQMDSEDPLVDSAPVTCDSEMLTPDFCPTAPGSGREPALMPRLDTDCSVSRNLPSSFLQQTCGNVPYCASSKHRPSHHRRTMSDGNPTPTGATIISATGASALPLCPSPAPHSHLPREVSPKKHSTVHIVPQRRPASLRSRSDLPQAYPQTAVSQLAQTACVVGRPGPHPTQFLAAKERTKSHVPSLLDADVEGQSRDYTVPLCRMRSKTSRPSIYELEKEFLS

SEQ ID NO: 224037 - DNA, 1449 bp, Artificial Sequence
  derived and/or modified sequence
atgttcttcctggtgaccagcgacgagagcaacaagacctggggcagaaacaccgtgttcagacaggaggagttcgaggacgtgaagagaaacttcaagaagaagggctgcacctggggccccaacagcatccagatgaaggacagaaccgactgcaaggagagaatcagacccctgagcgacggcaacagcccctggagcaccatcctgatcaagaaccagaagaccatgcccctggccagcctgttcgtggaccagcccggcagctgcgaggagcccaagctgagccccgacggcctggagcacagaaagcccaagcagatcaagctgcccagccaggcctacatcgacctgcccctgggcaaggacgcccagagagagaaccccgccgaggccgagagctgggaggaggccgccagcgccaacgccgccaccgtgagcatcgagatgacccccaccaacagcctgagcagaagcccccagagaaagaagaccgagagcgccctgtacggctgcaccgtgctgctggccagcgtggccctgggcctggacctgagagagctgcacaaggcccaggccgccgaggagcccctgcccaaggaggagaagaagaagagagagggcatcttccagagagccagcaagagcagaagaagcgccagcccccccaccagcctgcccagcacctgcggcgaggccagcagcccccccagcctgcccctgagcagcgccctgggcatcctgagcacccccagcttcagcaccaagtgcctgctgcagatggacagcgaggaccccctggtggacagcgcccccgtgacctgcgacagcgagatgctgacccccgacttctgccccaccgcccccggcagcggcagagagcccgccctgatgcccagactggacaccgactgcagcgtgagcagaaacctgcccagcagcttcctgcagcagacctgcggcaacgtgccctactgcgccagcagcaagcacagacccagccaccacagaagaaccatgagcgacggcaaccccacccccaccggcgccaccatcatcagcgccaccggcgccagcgccctgcccctgtgccccagccccgccccccacagccacctgcccagagaggtgagccccaagaagcacagcaccgtgcacatcgtgccccagagaagacccgccagcctgagaagcagaagcgacctgccccaggcctacccccagaccgccgtgagccagctggcccagaccgcctgcgtggtgggcagacccggcccccaccccacccagttcctggccgccaaggagagaaccaagagccacgtgcccagcctgctggacgccgacgtggagggccagagcagagactacaccgtgcccctgtgcagaatgagaagcaagaccagcagacccagcatctacgagctggagaaggagttcctgagctag

SEQ ID NO: 224038 - DNA, 3111 bp, Artificial Sequence
  derived and/or modified sequence
atggccctgagaggcgccgccggcgccaccgacacccccgtgagcagcgccggcggcgcccccggcggcagcgccagcagcagcagcaccagcagcggcggcagcgccagcgccggcgccggcctgtgggccgccctgtacgactacgaggccagaggcgaggacgagctgagcctgagaagaggccagctggtggaggtgctgagccaggacgccgccgtgagcggcgacgagggctggtgggccggccaggtgcagagaagactgggcatcttccccgccaactacgtggccccctgcagacccgccgccagccccgcccccccccccagcagacccagcagccccgtgcacgtggccttcgagagactggagctgaaggagctgatcggcgccggcggcttcggccaggtgtacagagccacctggcagggccaggaggtggccgtgaaggccgccagacaggaccccgagcaggacgccgccgccgccgccgagagcgtgagaagagaggccagactgttcgccatgctgagacaccccaacatcatcgagctgagaggcgtgtgcctgcagcagccccacctgtgcctggtgctggagttcgccagaggcggcgccctgaacagagccctggccgccgccaacgccgcccccgaccccagagcccccggccccagaagagccagaagaatccccccccacgtgctggtgaactgggccgtgcagatcgccagaggcatgctgtacctgcacgaggaggccttcgtgcccatcctgcacagagacctgaagagcagcaacatcctgctgctggagaagatcgagcacgacgacatctgcaacaagaccctgaagatcaccgacttcggcctggccagagagtggcacagaaccaccaagatgagcaccgccggcacctacgcctggatggcccccgaggtgatcaagagcagcctgttcagcaagggcagcgacatctggagctacggcgtgctgctgtgggagctgctgaccggcgaggtgccctacagaggcatcgacggcctggccgtggcctacggcgtggccgtgaacaagctgaccctgcccatccccagcacctgccccgagcccttcgccaagctgatgaaggagtgctggcagcaggacccccacatcagacccagcttcgccctgatcctggagcagctgaccgccatcgagggcgccgtgatgaccgagatgccccaggagagcttccacagcatgcaggacgactggaagctggagatccagcagatgttcgacgagctgagaaccaaggagaaggagctgagaagcagagaggaggagctgaccagagccgccctgcagcagaagagccaggaggagctgctgaagagaagagagcagcagctggccgagagagagatcgacgtgctggagagagagctgaacatcctgatcttccagctgaaccaggagaagcccaaggtgaagaagagaaagggcaagttcaagagaagcagactgaagctgaaggacggccacagaatcagcctgcccagcgacttccagcacaagatcaccgtgcaggccagccccaacctggacaagagaagaagcctgaacagcagcagcagcagcccccccagcagccccaccatgatgcccagactgagagccatccagctgaccagcgacgagagcaacaagacctggggcagaaacaccgtgttcagacaggaggagttcgaggacgtgaagagaaacttcaagaagaagggctgcacctggggccccaacagcatccagatgaaggacagaaccgactgcaaggagagaatcagacccctgagcgacggcaacagcccctggagcaccatcctgatcaagaaccagaagaccatgcccctggccagcctgttcgtggaccagcccggcagctgcgaggagcccaagctgagccccgacggcctggagcacagaaagcccaagcagatcaagctgcccagccaggcctacatcgacctgcccctgggcaaggacgcccagagagagaaccccgccgaggccgagagctgggaggaggccgccagcgccaacgccgccaccgtgagcatcgagatgacccccaccaacagcctgagcagaagcccccagagaaagaagaccgagagcgccctgtacggctgcaccgtgctgctggccagcgtggccctgggcctggacctgagagagctgcacaaggcccaggccgccgaggagcccctgcccaaggaggagaagaagaagagagagggcatcttccagagagccagcaagagcagaagaagcgccagcccccccaccagcctgcccagcacctgcggcgaggccagcagcccccccagcctgcccctgagcagcgccctgggcatcctgagcacccccagcttcagcaccaagtgcctgctgcagatggacagcgaggaccccctggtggacagcgcccccgtgacctgcgacagcgagatgctgacccccgacttctgccccaccgcccccggcagcggcagagagcccgccctgatgcccagactggacaccgactgcagcgtgagcagaaacctgcccagcagcttcctgcagcagacctgcggcaacgtgccctactgcgccagcagcaagcacagacccagccaccacagaagaaccatgagcgacggcaaccccacccccaccggcgccaccatcatcagcgccaccggcgccagcgccctgcccctgtgccccagccccgccccccacagccacctgcccagagaggtgagccccaagaagcacagcaccgtgcacatcgtgccccagagaagacccgccagcctgagaagcagaagcgacctgccccaggcctacccccagaccgccgtgagccagctggcccagaccgcctgcgtggtgggcagacccggcccccaccccacccagttcctggccgccaaggagagaaccaagagccacgtgcccagcctgctggacgccgacgtggagggccagagcagagactacaccgtgcccctgtgcagaatgagaagcaagaccagcagacccagcatctacgagctggagaaggagttcctgagctag

SEQ ID NO: 224039 - DNA, 1449 bp, Artificial Sequence
  derived and/or modified sequence
atgttttttctggttacctccgacgaatccaacaaaacgtggggcagaaataccgttttccggcaggaggagtttgaagacgttaagaggaatttcaagaaaaagggttgcacgtggggcccaaacagtatccagatgaaggataggactgattgcaaggaacgcatcaggcctctcagcgacggtaacagtccctggagcacaattcttataaagaatcaaaaaaccatgccactagccagcctgttcgttgatcagccaggaagctgcgaagagccaaagctgtctcccgacggcttggagcatcggaagcctaagcagattaagctccccagccaggcatacatcgacctgcctctaggcaaagacgcccagcgcgagaacccagccgaggccgaatcatgggaagaagctgcctccgctaatgcagctaccgtctccatcgaaatgacacccaccaacagtctcagccggagcccccagcggaagaaaacggagtccgctctttacggttgcaccgtcctgctggcctctgtagccctaggtctggacttgagggaacttcacaaggcacaggctgctgaggagcccttgccgaaggaggaaaagaagaagcgagagggaatctttcagcgggcgtccaaatcacgcagaagcgcatctccccctacaagcctccccagtacctgtggtgaggctagtagccccccctccttgcccctctcatctgcgctgggaatcttgagtaccccgagtttcagcactaagtgtctcctgcagatggatagtgaggaccctctggtcgattcagccccagtaacatgtgattcagagatgttaacacccgatttttgtcccacagcacccgggagtggccgcgagccggcgctcatgccacgccttgatactgactgtagcgtctccaggaatcttccatcctcattcctgcagcagacgtgtggtaatgtaccatactgcgcatcttccaagcatcggcccagtcatcaccgtcggacaatgagcgacggcaatcccacaccaacaggcgccacaatcatctcggctaccggcgcctcagctttacctctgtgcccgagccctgccccacattcgcacctgcctcgggaagtgtctcccaaaaagcacagcactgtgcatattgtgcctcaaagaagacctgcatcactgcggtcccggagtgatttacctcaggcgtatcctcaaaccgctgtgagccaattggcccaaacagcctgtgtcgtgggccgccccggaccgcaccctacccaattcttagctgcaaaagagcggaccaaatctcacgtgccctctctcctagacgccgacgttgaaggtcagtcccgagattacaccgtcccactgtgtcgcatgaggagcaaaacgtcccgcccctcaatctacgaactggagaaagaattcctaagttag

SEQ ID NO: 224040 - DNA, 3111 bp, Artificial Sequence
  derived and/or modified sequence
atggctctgcggggagccgccggcgccactgacactccagtgtccagtgctggaggtgccccgggaggaagtgctagcagtagttccaccagttcaggcggttctgcctccgccggcgccggactgtgggcggcgctgtacgactatgaagcccgcggggaagacgagctttcactgaggaggggccagctggtggaagttctgtctcaggatgctgccgtcagtggcgatgagggctggtgggctggacaggtacagcgacgtctgggtatttttcccgctaattatgtcgcgccctgccgtcctgccgcatccccagcccccccaccctcccggccctccagcccggtccatgttgccttcgaacgcctggagctaaaggagctaattggggccggtgggttcgggcaggtgtacagagctacttggcaggggcaggaggttgcagtcaaagccgctagacaggacccggaacaagatgctgctgccgcggctgagagtgtccgccgcgaggctcgcttatttgctatgttaagacaccccaatattatcgaactgcggggcgtgtgtctacagcagcctcatctctgcctcgtcctggagttcgcccgcggcggtgccctgaaccgagcgctggctgccgctaatgcagcaccggaccctagagcccctgggcccaggcgcgcgcggcgcatcccaccccacgtcctggtgaattgggccgttcagattgcccgcgggatgctgtacttacacgaggaggcctttgtcccgattctgcaccgcgacttgaagtcctccaacattttgttattggaaaagatcgagcatgacgatatctgtaacaaaacgctgaaaatcacagatttcggcctggcccgagagtggcacaggacaactaagatgagtaccgcgggtacctacgcatggatggcccccgaggtcatcaaaagcagcctgttcagcaaaggatcagatatttggagttacggagtgttgctgtgggagttacttacaggcgaggtcccctacagaggtatcgacggcctagccgtagcctatggcgtggccgtcaataagctcacattgcccatcccatcaacatgcccagagccctttgccaaacttatgaaagagtgttggcagcaggatccacacattcggcccagttttgccttaatcttggaacagttaacggccatcgaaggcgctgttatgactgagatgccccaagagagtttccacagtatgcaggatgattggaaattggagatacaacagatgttcgatgagctgcgtacgaaagagaaggagctgagatcacgggaggaagaactgactcgtgccgcccttcagcagaaatcacaagaagaactgcttaagaggcgggagcagcagttagcggaacgggagattgacgtgttagagcgggaactgaatattctgatttttcagctcaaccaggaaaagcccaaggtgaagaaaagaaaaggaaaatttaagcgttcccgattgaagttgaaagatggacatcgtatctccctcccaagtgactttcagcataaaattactgtgcaggcctctcctaatctggacaaacgaaggagtctgaactcgtctagctcctctcccccctctagtcctactatgatgccccggcttagagccatccaactaaccagcgatgagtcaaataaaacttggggacgtaatacagtgtttcggcaggaagagttcgaggacgtgaagcggaacttcaaaaaaaaaggctgcacctggggcccgaattcgatccagatgaaggatcgcacggactgcaaagaacggattagaccactgtccgacggaaattccccctggtccaccatccttattaaaaaccagaagacgatgcccttagcaagcctcttcgttgaccaaccgggatcttgtgaggaacccaagcttagtccagacgggctggaacaccggaagcccaaacagatcaagctcccaagccaggcctacattgacctccccctgggcaaagacgctcagagggaaaacccagccgaagctgaaagttgggaagaggccgcctcagccaatgcagccaccgtgagtattgagatgacccccactaacagtctgtcccgtagccctcagcggaaaaaaactgaaagtgctctttacggctgcacagtgctgcttgccagtgtagcactgggcctcgacttaagagagctgcacaaagctcaggcagccgaggaaccactgcctaaggaggagaaaaaaaagagagaaggaattttccagcgcgcaagcaagtctaggcgatcggcctcaccacccacctctctgccgagcacgtgcggagaggcatcctcccccccatcactgcctttgtcctccgccctgggaattctgagcactccatcctttagtactaagtgcttgctgcagatggacagtgaggatcctttggttgattcagcccctgtaacatgcgacagtgagatgttaacccccgacttttgtccgactgccccaggtagcggaagggaacctgctctgatgccccggctggatactgattgcagcgtttccaggaaccttcctagctccttcttgcagcaaacttgtggtaatgttccctactgtgcctccagcaaacacagaccgtcccatcaccggagaaccatgtccgatggaaaccctacaccgacaggtgccaccattatcagtgcgacaggagcttccgcactcccgctctgtccttctcctgcccctcattcccatctccccagagaagtctctccaaagaagcatagcacagtgcacatagtcccgcaacgtagacctgcgtctcttcggtctcgatcagacttaccccaggcctacccccagacggccgtgagccagcttgcacagaccgcgtgtgtggtgggacgacccggcccacaccctacacaattcctcgcagccaaagaacgcacgaagagccacgtgccgagcctcctggacgctgacgtggaaggtcaaagccgggattatactgtgcctctttgtaggatgaggagcaagacttccagaccaagtatctacgaactggaaaaggagttcctatcatag

SEQ ID NO: 224041 - DNA, 1449 bp, Artificial Sequence
  derived and/or modified sequence
atgttcttcctggtgaccagtgatgagagcaacaagacctggggcaggaacacagtgttccggcaggaggagtttgaagatgtgaagaggaacttcaagaagaagggctgcacctggggccccaacagcatccagatgaaggacagaacagactgcaaggagcgcatccggcccctgagtgatggcaacagcccctggagcaccatcctgatcaagaaccagaagaccatgcccctggccagcctgtttgtggaccagcccggcagctgtgaggagcccaagctgagcccagatggcctggagcacaggaagcccaagcagatcaagctgcccagccaggcctacatcgacctgcccctgggcaaggatgcccagagagaaaatcctgctgaggccgagagctgggaggaggccgccagcgccaatgctgccaccgtgtccattgagatgacccccaccaacagcctgagccgcagcccccagaggaagaagacagaaagtgccctgtatggctgcaccgtgctgctggcctctgtggccctgggcctggacctgcgggagctgcacaaggcccaggccgctgaggagcccctgcccaaggaggagaagaagaagcgggagggcatcttccagagggccagcaagagcagaagaagtgccagcccccccaccagcctgcccagcacctgtggggaggccagcagcccccccagcctgcccctgagcagcgccctgggcatcctgagcacccccagcttcagcaccaagtgcctgctgcagatggattctgaggaccccctggtggacagcgcccctgtgacctgtgacagcgagatgctgaccccagacttctgccccacagcccctggcagcggccgggagcccgccctgatgccccggctggacacagactgcagcgtgtccaggaacctgcccagcagcttcctgcagcagacctgtggaaatgtgccctactgtgccagcagcaagcaccggcccagccaccacaggaggaccatgtctgatggcaaccccacccccaccggggccaccatcatcagcgccaccggggccagcgccctgcccctgtgccccagccctgccccccacagccacctgccccgggaggtgagccccaagaagcacagcacagtgcacatcgtgccccagaggaggcctgccagcctgcggagcagaagtgacctgccccaggcctacccccagacagctgtgtcccagctggcccagacagcctgtgtggtgggccggcccggcccccaccccacccagttcctggccgccaaggagaggaccaagagccacgtgcccagcctgctggatgctgatgtggagggccagagccgggactacacagtgcccctgtgcaggatgaggagcaagaccagccggcccagcatctatgagctggagaaggagttcctgtcctag

SEQ ID NO: 224042 - DNA, 3111 bp, Artificial Sequence
  derived and/or modified sequence
atggccctgcggggagctgctggggccacagacacccctgtgagcagcgctggaggagcccctgggggcagcgccagcagcagcagcaccagcagcggcggcagcgccagcgctggggccggcctgtgggccgccctgtatgactatgaggcccggggggaggatgagctgagcctgcggcggggccagctggtggaggtgctgagccaggatgctgctgtgtctggagatgagggctggtgggccggccaggtgcagaggcggctgggcatcttccctgccaactacgtggccccctgcaggcctgctgccagccctgcccccccacccagccggcccagcagccctgtgcacgtggcctttgagcggctggagctgaaggagctgattggagctgggggcttcggccaggtgtaccgggccacctggcagggccaggaggtggccgtgaaggccgcccggcaggaccctgagcaggatgctgctgctgctgctgagagcgtgagaagagaggcccggctgtttgccatgctgcggcaccccaacatcatcgagctgcggggcgtgtgcctgcagcagccccacctgtgcctggtgctggagtttgcccggggcggggccctgaacagagccctggccgccgccaatgctgccccagacccccgggcccctggcccccggcgggcccggcgcatcccccctcatgtgctggtgaactgggccgtgcagatcgcccggggcatgctgtacctgcacgaggaggcctttgtgcccatcctgcaccgggacctgaagagcagcaacatcctgctgctggagaagattgaacatgatgacatctgcaacaagaccctgaagatcacagactttggcctggcccgggagtggcacaggaccaccaagatgagcacagctggcacctacgcctggatggcccctgaggtgatcaagagcagcctcttcagcaaaggaagtgacatctggagctatggagtgctgctgtgggagctgctgactggagaggtgccctaccggggcattgatggcctggccgtggcctacggcgtggccgtgaacaagctgaccctgcccatccccagcacctgcccagagccctttgccaagctgatgaaggagtgctggcagcaggacccccacatccggcccagctttgccctgatcctggagcagctgacagccattgaaggagctgtgatgacagagatgccccaggagagcttccacagcatgcaggatgactggaagctggagatccagcagatgtttgatgagctgcggaccaaggagaaggagctgcggagccgggaggaggagctgaccagggctgccctgcagcagaagagccaggaggagctgctgaagaggcgggagcagcagctggccgagcgggagattgatgtgctggagcgggagctgaacatcctgatcttccagctgaaccaggagaagcccaaggtgaagaagaggaagggcaagttcaagaggagccggctgaagctgaaggatggccaccgcatcagcctgcccagcgacttccagcacaagatcaccgtgcaggccagccccaacctggacaagaggaggagcctgaacagcagcagcagcagcccccccagcagccccaccatgatgccccggctgcgggccatccagctgaccagtgatgagagcaacaagacctggggcaggaacacagtgttccggcaggaggagtttgaagatgtgaagaggaacttcaagaagaagggctgcacctggggccccaacagcatccagatgaaggacagaacagactgcaaggagcgcatccggcccctgagtgatggcaacagcccctggagcaccatcctgatcaagaaccagaagaccatgcccctggccagcctgtttgtggaccagcccggcagctgtgaggagcccaagctgagcccagatggcctggagcacaggaagcccaagcagatcaagctgcccagccaggcctacatcgacctgcccctgggcaaggatgcccagagagaaaatcctgctgaggccgagagctgggaggaggccgccagcgccaatgctgccaccgtgtccattgagatgacccccaccaacagcctgagccgcagcccccagaggaagaagacagaaagtgccctgtatggctgcaccgtgctgctggcctctgtggccctgggcctggacctgcgggagctgcacaaggcccaggccgctgaggagcccctgcccaaggaggagaagaagaagcgggagggcatcttccagagggccagcaagagcagaagaagtgccagcccccccaccagcctgcccagcacctgtggggaggccagcagcccccccagcctgcccctgagcagcgccctgggcatcctgagcacccccagcttcagcaccaagtgcctgctgcagatggattctgaggaccccctggtggacagcgcccctgtgacctgtgacagcgagatgctgaccccagacttctgccccacagcccctggcagcggccgggagcccgccctgatgccccggctggacacagactgcagcgtgtccaggaacctgcccagcagcttcctgcagcagacctgtggaaatgtgccctactgtgccagcagcaagcaccggcccagccaccacaggaggaccatgtctgatggcaaccccacccccaccggggccaccatcatcagcgccaccggggccagcgccctgcccctgtgccccagccctgccccccacagccacctgccccgggaggtgagccccaagaagcacagcacagtgcacatcgtgccccagaggaggcctgccagcctgcggagcagaagtgacctgccccaggcctacccccagacagctgtgtcccagctggcccagacagcctgtgtggtgggccggcccggcccccaccccacccagttcctggccgccaaggagaggaccaagagccacgtgcccagcctgctggatgctgatgtggagggccagagccgggactacacagtgcccctgtgcaggatgaggagcaagaccagccggcccagcatctatgagctggagaaggagttcctgtcctag

SEQ ID NO: 224043 - DNA, 1449 bp, Artificial Sequence
  derived and/or modified sequence
atgttcttcctggtgaccagcgacgagagcaacaagacctggggccgtaatactgttttccgccaagaagaattcgaggacgtcaaaagaaactttaaaaagaaggggtgtacctgggggcctaatagtattcagatgaaagatcggaccgactgtaaagaaagaatccggcccctttccgacggaaacagcccctggtcaacaattctgatcaaaaaccagaagaccatgccactggccagcctgttcgttgaccagccaggcagctgtgaggagccgaagttgagtcccgacggcctcgagcataggaaacccaaacaaatcaaacttccctctcaggcatacatcgaccttccgctgggaaaggacgcacagcgcgagaatccagctgaagcagaatcttgggaagaggctgcctccgccaacgcggctacagtgtccatcgaaatgaccccgacaaacagtctctctcgctctccccagaggaagaaaaccgagagcgccctctacggctgtaccgtgttactggctagcgtcgccttgggcctcgacctccgtgaactgcataaggcgcaagctgctgaggagccccttcccaaagaggagaaaaaaaagcgggaaggaatcttccaacgagccagcaagtcgaggcgcagtgcctccccgccaacttcacttcccagcacttgtggagaagcctcttcccccccttcattaccgctgagctctgccctcgggattctgtctaccccctcctttagtacgaaatgcttactgcagatggatagtgaggaccctctggttgattccgctcctgtcacatgtgattctgaaatgctcacccccgacttttgtccaactgctccaggttctggcagagagccggcccttatgccacggctggacaccgattgttcagtctcccgcaaccttccctcatcttttctgcagcagacatgcgggaatgtgccctactgcgcctcttcgaagcaccgtccctcccaccataggaggaccatgtctgacggcaaccccacccccaccggtgcaacaattattagcgccaccggggcttccgctctgccattgtgcccctcccccgcccctcattcacacttgccccgcgaagtgtcacctaagaaacactccacagtgcacatcgtaccacagcgacgcccagcctctctgcgaagccgcagtgatttgccgcaggcataccctcagaccgccgttagccagctggcccaaacagcttgtgtcgtaggcagacccggtcctcatcctacgcagtttctggccgccaaagagaggacgaagtcacatgttcctagcctgctggatgcagacgtggagggtcaaagccgagattacacagtacccctttgtcgaatgcggagtaaaacgagccggccaagcatctatgaattggagaaagaatttctgagctag

SEQ ID NO: 224044 - DNA, 3111 bp, Artificial Sequence
  derived and/or modified sequence
atggccctgcggggcgccgccggcgccaccgacacccccgtgagctccgccggtggggctcctggaggcagcgcaagttcctcctctacctcttcaggcggctcagcatctgccggagccgggttatgggctgctctgtatgattatgaagcacggggcgaagacgagctcagcctgcggaggggccagcttgtggaagtcctctctcaagatgccgcagtcagcggggacgagggttggtgggcggggcaggttcaacgacgactcggcatatttcccgctaactacgtcgctccatgtcggcccgctgcctccccagcgcccccaccgtccaggccttcgtcacccgtgcacgtggccttcgaacggctggaactgaaggaattgattggggcaggcgggtttggccaggtgtatagggctacttggcaaggtcaagaagtggccgttaaggcagccagacaggaccctgagcaagacgccgcagcagccgccgaaagcgtgcgccgggaggcccgcctcttcgccatgttacgtcaccctaacatcatcgaactgcggggcgtttgtttgcagcaaccacacctgtgcctggttctggagtttgctcgtgggggggcgctgaaccgcgctctggcggccgctaatgccgccccagacccacgcgcccccggaccaaggcgggcaaggagaatcccccctcatgtgctggtaaactgggctgtgcaaattgcccgtggcatgctgtacctgcacgaggaggcctttgtgccgattttacacagagatttgaagtcatcaaatattctcctgctggagaaaatcgagcatgatgatatttgcaacaagacattgaagataaccgatttcgggcttgcacgggaatggcatagaactaccaagatgagcaccgccgggacatatgcttggatggcgcccgaggtaataaagtctagcctcttttccaaaggaagcgacatctggagctacggggtcctgctctgggagctactcaccggagaggtgccttaccggggcatcgatgggctggcagttgcctatggggtcgctgtaaacaagctgacgctgcccataccatcaacctgcccagagccatttgcaaaactgatgaaggagtgctggcagcaggacccccacataaggccttcatttgcattgatcctggagcagctgacagctatcgaaggcgcagtgatgactgaaatgccccaggaaagcttccacagcatgcaggacgattggaagctcgaaatacagcagatgttcgacgagttgcggactaaggaaaaagagctgcgttcacgggaggaggaactgacaagagcagcgctacagcagaagtctcaagaagaactgctaaagagacgcgagcagcaacttgctgaacgagagatcgatgtgttggagcgtgaattgaacattctgatctttcaactgaatcaagaaaagcccaaggtcaaaaagaggaaaggtaaattcaaacgatcaagactcaagttaaaggatggccataggatctccttaccctccgactttcagcataaaataactgtccaagcctctcctaaccttgataagcggaggtcactgaactcgagcagctcaagcccaccttcttcccctaccatgatgccccggttgagagcgattcagctcacttctgacgagagcaacaaaacttggggccggaatacagtcttcaggcaagaggaatttgaggatgttaagaggaacttcaaaaagaaggggtgcacgtggggaccgaatagcattcagatgaaggatcggacggattgtaaggaacggatccgccccttaagtgatgggaactccccttggtccaccatactgatcaaaaaccaaaaaacaatgccccttgcaagcctttttgtggatcagcctggatcttgcgaagagcccaagctgtctccagacggcctcgagcaccggaaaccaaagcaaattaaactcccttcacaggcttatatcgatctccccctgggtaaggacgcccagcgggaaaatcctgcggaggccgaaagttgggaagaggctgctagcgccaacgccgctactgtgtctatcgaaatgacccctaccaatagtcttagtcgcagcccacaacgaaagaagaccgagtccgccctgtatggctgtacggtgttgctggcgagcgttgctttggggctggatttgcgggaactgcataaagctcaggcagccgaggagcctttgccaaaggaagagaagaagaaacgcgaaggaatattccagcgggcgagcaaaagccgaaggagcgccagccctccaacgagcctaccatcaacatgcggcgaggcctccagcccaccatctcttccactgtcctccgctctgggtattcttagcacaccttccttctctactaagtgtttactgcaaatggacagcgaggaccctctagtagacagtgcccctgtgacctgcgatagtgaaatgttgactcctgacttctgccctacagcgccaggttccggaagagagcctgcgctcatgccgcgcctagatacagactgcagtgtatcaaggaacctgccttcttcctttttgcaacagacttgtggaaacgtgccgtattgcgcatccagcaagcataggccatcacaccacagacgcactatgtcagatggcaaccccacgccgacgggagccacaattatctcagcaacaggagcaagtgcattgccattgtgtccaagccccgctccgcactcccacctcccacgcgaggtaagtccaaaaaagcatagcacggttcacatagtaccccagaggaggcccgcttctctgagaagcaggtcagatctgccccaggcatacccacagactgctgtgtcccagctggctcagaccgcttgcgttgtggggagacccgggcctcaccctacccaattcctggctgccaaagagcggactaagagtcacgtacctagcttgttggacgctgacgtagagggccagtcgcgggattacaccgtgcctttatgtaggatgcgctcaaagacatctcgcccctcaatctacgagctcgagaaggaatttctgtcatag

SEQ ID NO: 224045 - DNA, 4005 bp, Artificial Sequence
  derived and/or modified sequence
taattttctcattgttttcatgttttgagtaaggtagtttcacaactgatatgattcatttagcttttttaacaaagccaatattggttaatatgattgttgtggttaatatggttaataatgttctttttagtgacttcagatgaaagcaataaaacttggggaaggaacacagtctttcgacaagaagaatttgaggatgtaaaaaggaattttaagaaaaaaggttgtacctggggaccaaattccattcaaatgaaagatagaacagattgcaaagaaaggataagacctctctccgatggcaacagtccttggtcaactatcttaataaaaaatcagaaaaccatgcccttggcttcattgtttgtggaccagccagggtcctgtgaagagccaaaactttcccctgatggattagaacacagaaaaccaaaacaaataaaattgcctagtcaggcctacattgatctacctcttgggaaagatgctcagagagagaatcctgcagaagctgaaagctgggaggaggcagcctctgcgaatgctgccacagtctccattgagatgactcctacgaatagtctgagtagatccccccagagaaagaaaacggagtcagctctgtatgggtgcaccgtccttctggcatcggtggctctgggactggacctcagagagcttcataaagcacaggctgctgaagaaccgttgcccaaggaagagaagaagaaacgagagggaatcttccagcgggcttccaagtcccgcagaagcgccagtcctcccacaagcctgccatccacctgtggggaggccagcagcccaccctccctgccactgtcaagtgccctgggcatcctctccacaccttctttctccacaaagtgcctgctgcagatggacagtgaagatccactggtggacagtgcacctgtcacttgtgactctgagatgctcactccggatttttgtcccactgccccaggaagtggtcgtgagccagccctcatgccaagacttgacactgattgtagtgtatcaagaaacttgccgtcttccttcctacagcagacatgtgggaatgtaccttactgtgcttcttcaaaacatagaccgtcacatcacagacggaccatgtctgatggaaatccgaccccaactggtgcaactattatctcagccactggagcctctgcactgccactctgcccctcacctgctcctcacagtcatctgccaagggaggtctcacccaagaagcacagcactgtccacatcgtgcctcagcgtcgccctgcctccctgagaagccgctcagatctgcctcaggcttacccacagacagcagtgtctcagctggcacagactgcctgtgtagtgggtcgcccaggaccacatcccacccaattcctcgctgccaaggagagaactaaatcccatgtgccttcattactggatgctgacgtggaaggtcagagcagggactacactgtgccactgtgcagaatgaggagcaaaaccagccggccatctatatatgaactggagaaagaattcctgtcttaaactaagtgccttactgttgtttaagcatttttttaaggtgaacaaatgaacacaatgtatctacctttgaactgtttcatgctgctgtgttttcaaaagctgtggccatgttcctaaattagtaagatatatccagcttctcaaaaaatgtatatgattgctgttagccatgtctattgtttttcctctggattcttttcttataacttggaatacacaaaagtgtaaaacaagagatgtgcaccaatgaaaactatgctgggtcgaattaccttcagcacaatgttaatgtttttgttctcatttatgcctttgtccatttgcacacaacagaaattgtaatgagcttcactatttttgtttctttccttccttttttttcttttttcctttctttcctttttcttgtcttgtttcttgtttttttttcttgtagtttcttttcttaattgtcatttttgcaacaaaaagccaagaaagagctttagtttcttggcaagaataatgtgatattagtaagtaaaggtcttaaaagtctgacgactggaatagatataaagtcctgtttaaactacctaaccttggctgtgggccgataatgcatatgtccagttctcacttaaattatgcaatgatatttctctctgaggaaattatacggaatgtaacttataaaagctttactgaatataagttataagcattttattcattagaactccaaaatagatgttcaaagttcagtccttgccatttgactgagaccacatggtgtgccccttgagtgaggctaatctttaggtttttcctatagaaaacattcttcctccatcagtagccctttatttgatattcagaagtggaaagctttttcattctccagtagaacttttaaaaattgttacagatacctagctcttcacagatatcatgtactgtaaacagtcatgtgtcttaattttattttctctatttgagtgcataattatcctaataatcccaaagacactgacaactcaaggaacagcagtacagtactattagaagttaagtatgttgttgttatttcacatttcatttaattgtggataaatgttagacatctgttgaaataagctcatatggtggaaacgacaactatattatgaattattttcagaaatggatctttgaatagcagatcaggatttaaataataaaattatctatgaatcacttttatggtcatacatatatgatacaaatccagagttattggtgcagaaatggctacccgagagcttggtaaatttgccttggtttcttatgttaaatgtattgtgcttcccttctgtctctagaatgtggctcttcagaagacagacaatcgacatttaaatttttccaaacaatgaaaaactaaattaaaaacattgcttgatatttcatttaaaattgcaccttgcttaaggtttactgaataactgaaatgtcagcaatttaaaataaattcaattgtgtgataaaatatctcacctataatagaagaaaaggaaaatcatattatttggcaattttgcagcattgtggttgcctaacaggtatatccagcagatgagaaacagtatgaaaggattgtattaacatggtaagttttgccctaaggaaaacgatcttgcattctggattcttgcagcaaagtctcagatacttaatacgttttcttgttttatcatctgttctatgattcggcttcactttgtgtggttattgaattatgtaacagagatttggttttcccaaaatgttatcacatttgaaactatgattgctttgtgttcagtccttttggaacacgtagcttccagcttaagggtagagaaatatatacctaaaatcatcaatacatgaaagaaaaaggatggaaactatgtcctcagttttacttctaccaaaacatccctgtatgtgtgtgcatgtatgttggcgtgtgtgtgtgtgcatgcatattagtaaatgtgtgtttgcatgtgtgtgttggggagtgtatgtgatctgggtgtttgtttatctctgttattattcccctttagctttattttagtcaactctacattatgatgaatttcaaaatgaagctgtattaaaataattgtaatataacaattcaatctcacatgttactgcagatagttaacttttgctgcaatctattgtacatttgcaattttctgtgttagtaaacttagcagaatctggttatttatttttgtgtaggcttaatgttcactgaaagataagtcaattactgttagtaaaaaattaaggtactctcactgcagagatttaaggcctgggcctaatgtgctgtattatgaagccttgtgactgaaaaatatgtttacatatgttgtctatttttttaataaacttttatagctggtctatttgctcagt

SEQ ID NO: 224046 - DNA, 5809 bp, Artificial Sequence
  derived and/or modified sequence
cagggcctgggcacgaccatggtgggacgtcgcccgcggcttcggggaccgctgcggcagcagaggcggctggccaggaacgcgggccgaggctggaccctttgggcagctagcccgtgatctctgccgtcaccgatcgcgattcctaccccctcgccttcccccggcgccgacggccacaccgccggacgatgcgcgcccgcggccgcccgggaggctgagcccagcttcccgctccgccttccccgcgcagctgcccccatggctttgcggggcgccgcgggagcgaccgacaccccggtgtcctcggccgggggagcccccggcggctcagcgtcctcgtcgtccacctcctcgggcggctcggcctcggcgggcgcggggctgtgggccgcgctctatgactacgaggctcgcggcgaggacgagctgagcctgcggcgcggccagctggtggaggtgctgtcgcaggacgccgccgtgtcgggcgacgagggctggtgggcaggccaggtgcagcggcgcctcggcatcttccccgccaactacgtggctccctgccgcccggccgccagccccgcgccgccgccctcgcggcccagctccccggtacacgtcgccttcgagcggctggagctgaaggagctcatcggcgctgggggcttcgggcaggtgtaccgcgccacctggcagggccaggaggtggccgtgaaggcggcgcgccaggacccggagcaggacgcggcggcggctgccgagagcgtgcggcgcgaggctcggctcttcgccatgctgcggcaccccaacatcatcgagctgcgcggcgtgtgcctgcagcagccgcacctctgcctggtgctggagttcgcccgcggcggagcgctcaaccgagcgctggccgctgccaacgccgccccggacccgcgcgcgcccggcccccgccgcgcgcgccgcatccctccgcacgtgctggtcaactgggccgtgcagatagcgcggggcatgctctacctgcatgaggaggccttcgtgcccatcctgcaccgggacctcaagtccagcaacattttgctacttgagaagatagaacatgatgacatctgcaataaaactttgaagattacagattttgggttggcgagggaatggcacaggaccaccaaaatgagcacagcaggcacctatgcctggatggcccccgaagtgatcaagtcttccttgttttctaagggaagcgacatctggagctatggagtgctgctgtgggaactgctcaccggagaagtcccctatcggggcattgatggcctcgccgtggcttatggggtagcagtcaataaactcactttgcccattccatccacctgccctgagccgtttgccaagctcatgaaagaatgctggcaacaagaccctcatattcgtccatcgtttgccttaattctcgaacagttgactgctattgaaggggcagtgatgactgagatgcctcaagaatcttttcattccatgcaagatgactggaaactagaaattcaacaaatgtttgatgagttgagaacaaaggaaaaggagctgcgatcccgggaagaggagctgactcgggcggctctgcagcagaagtctcaggaggagctgctaaagcggcgtgagcagcagctggcagagcgcgagatcgacgtgctggagcgggaacttaacattctgatattccagctaaaccaggagaagcccaaggtaaagaagaggaagggcaagtttaagagaagtcgtttaaagctcaaagatggacatcgaatcagtttaccttcagatttccagcacaagataaccgtgcaggcctctcccaacttggacaaacggcggagcctgaacagcagcagttccagtcccccgagcagccccacaatgatgccccgactccgagccatacagttgacttcagatgaaagcaataaaacttggggaaggaacacagtctttcgacaagaagaatttgaggatgtaaaaaggaattttaagaaaaaaggttgtacctggggaccaaattccattcaaatgaaagatagaacagattgcaaagaaaggataagacctctctccgatggcaacagtccttggtcaactatcttaataaaaaatcagaaaaccatgcccttggcttcattgtttgtggaccagccagggtcctgtgaagagccaaaactttcccctgatggattagaacacagaaaaccaaaacaaataaaattgcctagtcaggcctacattgatctacctcttgggaaagatgctcagagagagaatcctgcagaagctgaaagctgggaggaggcagcctctgcgaatgctgccacagtctccattgagatgactcctacgaatagtctgagtagatccccccagagaaagaaaacggagtcagctctgtatgggtgcaccgtccttctggcatcggtggctctgggactggacctcagagagcttcataaagcacaggctgctgaagaaccgttgcccaaggaagagaagaagaaacgagagggaatcttccagcgggcttccaagtcccgcagaagcgccagtcctcccacaagcctgccatccacctgtggggaggccagcagcccaccctccctgccactgtcaagtgccctgggcatcctctccacaccttctttctccacaaagtgcctgctgcagatggacagtgaagatccactggtggacagtgcacctgtcacttgtgactctgagatgctcactccggatttttgtcccactgccccaggaagtggtcgtgagccagccctcatgccaagacttgacactgattgtagtgtatcaagaaacttgccgtcttccttcctacagcagacatgtgggaatgtaccttactgtgcttcttcaaaacatagaccgtcacatcacagacggaccatgtctgatggaaatccgaccccaactggtgcaactattatctcagccactggagcctctgcactgccactctgcccctcacctgctcctcacagtcatctgccaagggaggtctcacccaagaagcacagcactgtccacatcgtgcctcagcgtcgccctgcctccctgagaagccgctcagatctgcctcaggcttacccacagacagcagtgtctcagctggcacagactgcctgtgtagtgggtcgcccaggaccacatcccacccaattcctcgctgccaaggagagaactaaatcccatgtgccttcattactggatgctgacgtggaaggtcagagcagggactacactgtgccactgtgcagaatgaggagcaaaaccagccggccatctatatatgaactggagaaagaattcctgtcttaaactaagtgccttactgttgtttaagcatttttttaaggtgaacaaatgaacacaatgtatctacctttgaactgtttcatgctgctgtgttttcaaaagctgtggccatgttcctaaattagtaagatatatccagcttctcaaaaaatgtatatgattgctgttagccatgtctattgtttttcctctggattcttttcttataacttggaatacacaaaagtgtaaaacaagagatgtgcaccaatgaaaactatgctgggtcgaattaccttcagcacaatgttaatgtttttgttctcatttatgcctttgtccatttgcacacaacagaaattgtaatgagcttcactatttttgtttctttccttccttttttttcttttttcctttctttcctttttcttgtcttgtttcttgtttttttttcttgtagtttcttttcttaattgtcatttttgcaacaaaaagccaagaaagagctttagtttcttggcaagaataatgtgatattagtaagtaaaggtcttaaaagtctgacgactggaatagatataaagtcctgtttaaactacctaaccttggctgtgggccgataatgcatatgtccagttctcacttaaattatgcaatgatatttctctctgaggaaattatacggaatgtaacttataaaagctttactgaatataagttataagcattttattcattagaactccaaaatagatgttcaaagttcagtccttgccatttgactgagaccacatggtgtgccccttgagtgaggctaatctttaggtttttcctatagaaaacattcttcctccatcagtagccctttatttgatattcagaagtggaaagctttttcattctccagtagaacttttaaaaattgttacagatacctagctcttcacagatatcatgtactgtaaacagtcatgtgtcttaattttattttctctatttgagtgcataattatcctaataatcccaaagacactgacaactcaaggaacagcagtacagtactattagaagttaagtatgttgttgttatttcacatttcatttaattgtggataaatgttagacatctgttgaaataagctcatatggtggaaacgacaactatattatgaattattttcagaaatggatctttgaatagcagatcaggatttaaataataaaattatctatgaatcacttttatggtcatacatatatgatacaaatccagagttattggtgcagaaatggctacccgagagcttggtaaatttgccttggtttcttatgttaaatgtattgtgcttcccttctgtctctagaatgtggctcttcagaagacagacaatcgacatttaaatttttccaaacaatgaaaaactaaattaaaaacattgcttgatatttcatttaaaattgcaccttgcttaaggtttactgaataactgaaatgtcagcaatttaaaataaattcaattgtgtgataaaatatctcacctataatagaagaaaaggaaaatcatattatttggcaattttgcagcattgtggttgcctaacaggtatatccagcagatgagaaacagtatgaaaggattgtattaacatggtaagttttgccctaaggaaaacgatcttgcattctggattcttgcagcaaagtctcagatacttaatacgttttcttgttttatcatctgttctatgattcggcttcactttgtgtggttattgaattatgtaacagagatttggttttcccaaaatgttatcacatttgaaactatgattgctttgtgttcagtccttttggaacacgtagcttccagcttaagggtagagaaatatatacctaaaatcatcaatacatgaaagaaaaaggatggaaactatgtcctcagttttacttctaccaaaacatccctgtatgtgtgtgcatgtatgttggcgtgtgtgtgtgtgcatgcatattagtaaatgtgtgtttgcatgtgtgtgttggggagtgtatgtgatctgggtgtttgtttatctctgttattattcccctttagctttattttagtcaactctacattatgatgaatttcaaaatgaagctgtattaaaataattgtaatataacaattcaatctcacatgttactgcagatagttaacttttgctgcaatctattgtacatttgcaattttctgtgttagtaaacttagcagaatctggttatttatttttgtgtaggcttaatgttcactgaaagataagtcaattactgttagtaaaaaattaaggtactctcactgcagagatttaaggcctgggcctaatgtgctgtattatgaagccttgtgactgaaaaatatgtttacatatgttgtctatttttttaataaacttttatagctggtctatttgctcagta

SEQ ID NO: 224047 - DNA, 1449 bp, Artificial Sequence
  derived and/or modified sequence
atgttcttcttagtgacgtctgacgagtcaaataaaacgtggggtaggaatactgtgttccgtcaggaggaatttgaagacgtgaaacggaacttcaaaaagaagggctgcacttggggaccgaactccatccagatgaaagaccggactgattgcaaagagaggatccggccactttcagatggaaactccccgtggtctactattctgattaaaaaccagaaaacaatgccactcgcgtcacttttcgtggaccaaccaggctcttgtgaagagcctaaactctcaccggacggcctggaacataggaagcctaaacaaattaagctgccgtctcaggcctacattgacttgcctctggggaaagacgcccagcgtgagaatcccgcagaggcagaaagctgggaagaggccgcatctgccaacgcggcaactgtatctatagagatgacaccaactaactcgttgtctagatctcctcagagaaaaaagaccgagtccgccctgtacggatgcactgtgctgctcgctagtgtggccctggggttagacctcagggagcttcacaaggcccaggccgcagaagagccccttccgaaagaggagaaaaagaagcgtgagggcattttccagcgcgcttccaaaagtcgaaggagtgcatctcccccaacgtcactgccctccacgtgcggcgaggcctccagtccacctagcctccctctctcctcagctcttgggatcttaagcacaccatcatttagtaccaagtgcttgctgcagatggacagcgaagaccccctggtcgatagtgcgcctgtgacatgtgattctgaaatgttgacccctgacttctgtccgacagccccagggagcggcagagagcctgccttgatgcccagactggacacagactgtagcgtctccaggaatctccccagctcttttctccagcagacctgcggaaacgtgccttactgtgcgagttctaagcataggccttcccaccacaggcgcacaatgtcagatggaaatcccacgcctactggagctacgatcatttcagcaactggagctagcgctttacccttgtgtccatccccagcccctcactcccatctgccaagggaagtcagcccgaaaaagcatagcacagtccatatagtgcctcaaagacggcctgcatccctcaggtctcgatcagatcttcctcaagcgtacccgcagaccgccgtctcccagctggcacagacagcgtgcgtcgtggggcgaccaggaccacacccaactcagttccttgccgctaaggaacgaaccaaatcacatgtcccaagtcttctggacgcggacgtcgagggccagtctagggattataccgtgccactgtgccggatgcgcagcaagacttcgcgccctagcatctatgaactggaaaaggagttcctgtcttag

SEQ ID NO: 224048 - DNA, 3111 bp, Artificial Sequence
  derived and/or modified sequence
atggcgttacggggagccgcaggtgctacggatacccccgtgagctcggccggaggcgctccaggaggatccgcctcaagctcttctacatcgtcaggtgggagcgcatcagccggagccggtctgtgggccgcactttatgactatgaggcgcgaggtgaggatgaactttccttgcggcgtggccagctggtggaggttctttcacaggacgcagccgttagtggggatgagggttggtgggccggacaggtgcaacgccgtttgggaatttttcctgccaactacgtggctccatgtaggccagccgcatctcccgctccacctccatctcgcccttcaagcccagtgcacgttgcctttgagcgtctcgagcttaaagagctcatcggtgccggtgggttcgggcaggtgtaccgagctacctggcaggggcaggaggtcgctgtgaaagccgctcggcaggatccagaacaagatgctgctgccgctgccgaatctgtgaggcgcgaagcccgactctttgccatgctccgccatcccaacattattgagttgcggggtgtatgcctgcagcagcctcatctgtgtctggtgctcgagttcgctcggggaggagccctgaacagagctctggcagcagctaacgccgcaccagaccccagggcccctggcccacgacgtgcacgcaggattcccccacatgtgcttgtaaactgggcagtgcagatcgcgagagggatgctgtatctccatgaagaagcttttgtgccaatcctccacagggacctgaaatcctccaacatcttactcctagaaaaaatcgagcacgatgatatctgcaataagacgttgaaaatcactgacttcggactggccagagagtggcataggacgacaaagatgagtactgctggcacgtatgcctggatggccccagaggtcatcaaatctagtttgttcagcaaagggtcggacatttggtcttacggagtcttgctgtgggagctcctgactggggaggttccttaccgagggatcgacggcttagctgtcgcttacggcgtagccgttaacaaacttactctgcctattccatccacctgccctgaaccgtttgctaagctgatgaaggagtgctggcagcaggaccctcatattaggccctcattcgccctcatacttgaacagctcaccgctattgagggggcagtaatgaccgagatgccgcaagagtcgttccactccatgcaagatgactggaagctggaaattcagcagatgttcgatgagttacggacgaaggaaaaggagctgcggagtcgagaggaagagctgacacgggctgctctgcagcagaagagtcaggaggagctgctcaaacggcgtgagcagcagctggccgagagggaaattgacgtgctggaacgggagctgaacatattgatcttccagctaaaccaggagaaacctaaagtgaagaaacggaaaggaaaattcaaaagatcaaggctgaaactcaaagacggacaccgaatatctctgcctagcgatttccagcataagattacagtccaggcaagtcctaacctcgataagcgacggagtctgaatagttcatcatcctctcccccatctagccccacgatgatgcccaggctgcgcgctatacagctgacatctgatgaatctaataagacttggggtcggaatacagtgttcagacaggaggagttcgaggacgtgaagaggaacttcaagaagaagggctgcacatggggtccaaatagcatacagatgaaagaccgcaccgattgtaaagaacggatccggccactgagtgacgggaacagtccttggtctacgattcttataaagaatcagaagacaatgcctctggccagtctattcgtggaccagcccggtagctgcgaggagccaaaattgtcacccgatggattagagcacaggaagcctaagcagattaaacttccgagccaggcttacattgatctccctctgggcaaggacgctcagcgtgaaaacccagctgaagctgaatcttgggaggaagcggcttctgccaacgcagccaccgtctcgattgaaatgactcctacaaacagtttatctagatcccctcagcgaaagaagaccgagagcgcactgtacggatgcacagttctgctcgcatccgtagcactcggacttgatctcagggagctgcacaaggcacaggccgctgaagaacctctgcctaaggaagagaagaagaagcgagaaggcatcttccagagagcctctaaatcaaggaggtccgcatccccacctacaagcctaccgtctacctgcggcgaagccagctctcctcccagcctgccattgtcaagtgcccttgggatcctcagtacacccagcttttccaccaaatgtctgctacagatggacagcgaagacccactggtcgattccgctccggtcacctgcgactcagagatgctcacgcccgatttttgtcccaccgcccctggatccggaagggaacccgctctcatgccaagactggacacagactgcagcgtttcaaggaaccttcctagttctttccttcaacagacctgtggcaatgtcccttattgtgcctctagtaagcatcgcccttctcaccaccgtagaaccatgtctgacggcaaccccaccccgactggagctactatcatctcagccacaggagctagcgccctcccgctttgcccctcaccagctcctcactcacatctgcctcgtgaagtgtctccaaagaagcactctactgtgcacattgtcccccagcgcagacctgccagtttgcgatctagatcagacctgccacaggcctacccacaaactgccgtttcacaacttgcccagaccgcctgtgtcgtgggacggcctggccctcatcctactcagttcctcgcggcaaaagagcgcaccaaatctcacgtgcctagcctgctggacgccgacgtggaagggcagagcagggattataccgtgcctctgtgtagaatgaggtccaagacaagccgcccttcgatttacgagctggaaaaggagttcctctcttag

SEQ ID NO: 224049 - protein, 780 aa, Artificial Sequence
  derived and/or modified sequence
MTESASSTSGQEFDVFSVMDWKDGVGTLPGSDLKFRVNEFGALEVITDENEMENVKKATATTTWMVPTAQEAPTSPPSSRPVFPPAYWTSPPGCPTVFSEKTGMPFRLKDPVKVEGLQFCENCCQYGNVDECLSGGNYCSQNCARHIKDKDQKEERDVEEDNEEEDPKCSRKKKPKLSLKADTKEDGEERDDEMENKQDVRILRGSQRARRKRRGDSAVLKQGLPPKGKKAWCWASYLEEEKAVAVPAKLFKEHQSFPYNKNGFKVGMKLEGVDPEHQSVYCVLTVAEVCGYRIKLHFDGYSDCYDFWVNADALDIHPVGWCEKTGHKLHPPKGYKEEEFNWQTYLKTCKAQAAPKSLFENQNITVIPSGFRVGMKLEAVDKKNPSFICVATVTDMVDNRFLVHFDNWDESYDYWCEASSPHIHPVGWCKEHRRTLITPPGYPNVKHFSWDKYLEETNSLPAPARAFKVKPPHGFQKKMKLEVVDKRNPMFIRVATVADTDDHRVKVHFDGWNNCYDYWIDADSPDIHPVGWCSKTGHPLQPPLSPLELMEASEHGGCSTPGCKGIGHFKRARHLGPHSAANCPYSEINLNKDRIFPDRLSGEMPPASPSFPRNKRTDANESSSSPEIRDQHADDVKEDFEERTESEMRTSHEARGAREEPTVQQAQRRSAVFLSFKSPIPCLPLRWEQQSKLLPTVAGIPASKVSKWSTDEVSEFIQSLPGCEEHGKVFKDEQIDGEAFLLMTQTDIVKIMSIKLGPALKIFNSILMFKAAEKNSHNEL

SEQ ID NO: 224050 - protein, 190 aa, Artificial Sequence
  derived and/or modified sequence
MTESASSTSGQEFDVFSVMDWKDGVGTLPGSDLKFRVNEFGALEVITDENEMENVKKATATTTWMVPTAQEAPTSPPSSRPVFPPAYWTSPPGCPTVFSEKTGMPFRLKDPVKVEGLQFCENCCQYGNVDECLSGGNYCSQNCARHIKDKDQKEERDVEEDNEEEDPKCSRKKKPKLSLKADTKEDGEER

SEQ ID NO: 224051 - DNA, 4101 bp, Artificial Sequence
  derived and/or modified sequence
agagtggacagcaattgtgaagatcgccagagagttctgtgtttcatcaccgccgaaaggttaaaaaataaatcatgactgaatctgcctctagcacaagtggtcaagagtttgatgtgttcagtgttatggactggaaagatggagtgggcacgttaccaggaagtgacttaaagtttcgggtaaatgagtttggagccctggaagttattacagatgagaatgagatggaaaatgttaaaaaagcaactgctaccaccacttggatggtaccaactgctcaagaagccccgacctctcccccgagctccaggcccgtatttccacctgcctactggacatctccacctggatgtcccacagtcttttcagagaagactgggatgcctttcaggttgaaggatccagtgaaagtagaagggcttcagttctgtgagaactgttgtcagtatggcaacgtagatgagtgtctttctggaggaaactattgcagccagaattgtgctcggcacatcaaagataaagatcagaaggaagaaagggacgtagaagaagacaatgaggaagaagatcctaagtgtagtcggaagaaaaaaccaaaattatctctgaaagctgacaacaaggaggatggagaagagagagatgatgaaatggagaacaaacaagatgtaagaatcctgaggggttcgcagagagcacggaggaaaagacgaggggattcggctgtactaaagcagggtttgcctcctaaaggaaagaaagcgtggtgctgggcatcctacctggaagaggagaaagcggtggcagtgccggcgaagctgttcaaggagcatcaatcctttccatataacaaaaatggattcaaagttggcatgaaattagaaggcgtggatcccgagcatcagtctgtgtactgtgtcctcaccgtcgcggaggtttgtggataccggataaagcttcactttgatgggtattctgattgctatgacttctgggtgaatgcagacgctctggatatccacccagttgggtggtgtgagaaaaccggccacaaactccatcctccaaaagggtataaagaagaagaattcaattggcagacctatcttaagacatgtaaagctcaagctgctcctaagtcattatttgaaaatcagaatataacagtgatcccatcgggctttcgagttggtatgaagcttgaggcagtagacaaaaagaatccctcattcatctgtgttgctacggtaacagatatggtggacaatcgtttcctggtacattttgacaactgggatgagagctatgactattggtgtgaagcatcaagtccacatattcatccagttggttggtgtaaggaacatagaagaacccttattactccaccaggttatccaaatgtgaaacatttttcttgggataaatacttagaagaaaccaattctttacctgctcctgcaagagctttcaaagtgaaacctcctcatggattccagaaaaaaatgaagcttgaggttgtagacaaaaggaaccctatgtttattagagtagcaactgtggcagacacagatgatcaccgggtaaaagttcactttgatggctggaacaattgctatgattactggatagatgcagattctcctgatattcaccctgtaggctggtgttcaaaaacaggacatccccttcagcctcctttgagccccttagaattaatggaagcttcagaacatggtggatgctcaaccccgggatgtaaagggattggccatttcaagagagcgagacatctgggccctcacagtgctgccaactgtccctattcagaaatcaatttgaataaagaccgtatttttccagaccgcttaagtggtgagatgcctccggctagtccgtcatttccaagaaataaaaggacagatgcaaatgaaagctcttcttcccctgaaatcagagaccagcatgctgatgatgtcaaagaagactttgaagagagaacagaaagtgaaatgagaacatcacatgaagccagaggtgcccgggaagaacccaccgtccagcaggcacagcgtcggtcagctgtctttctgtcctttaagtccccaattccatgtctgcccttgcgctgggagcagcaaagcaaacttcttccaactgtcgcaggaatccctgccagtaaagtttccaaatggagcacagacgaggtgtcagaatttatacagagcttacctgggtgtgaagaacatggaaaggtatttaaagatgaacaaattgatggagaagcatttctacttatgactcaaacagacattgttaaaattatgagcattaaactgggccctgctctcaaaattttcaattccatcctgatgttcaaagctgcagagaagaattctcacaatgaactttgaagatggtgaattctgaataccatcagcattctgctttaaagctcatgttttattcaaagcacaaggacggttataactcctaagtgagaagtctccaaaactcaaaagagcaacactatcggattatttatattactcaagagacaatatatatgaattcttatgaaagtgcttgagcttttaaccaggtactgtctaacaacagtcatcttttggttctgttcactgagctaaatttatctttgtaaatctttttgagtctggggggtggggggaaggggggcttcattaattatttatggtaatggggggcagagtaagaacttttggcattttgtaaacattgttgaattctctttcatgtacactgtttctttttcaatactttcagaaacctttttatataatcaaatttcaatttaaaccaaattagtcgaaacctggctaagtttagccagtaggactgttatctgtattgttaattttgtgccatattttgaattgcaacattatgctaagtataactttgcaagtcatgatattgcctaactgcttgtcataattgtcagggctgaatagttgtaagaatgacttttctttgaatcagtatttttccttttgcacgcattatgaaatgttaaacaaattacttttcaccagcatctttactataattaccaaaaacatgtatataaaagaatgaaattgaaaaataaaatatataaacataaataaattaggtagtgtattttgagtggcatcagtctcactcatcttggtgccccggtgtttacaagagccagatggtgtcagaggagtacgcagttgtatgcagttatggttggggggaatgtttgtgagggtcttgaactatttatgagatgatcttgagcttctaattttcattgatgaaattgtggtggtttacagagactaagagctcattctgtcaacagaaacactaatctgtacagagcgctgtctcaggtcatgcattgtcctccaaacccaaaggtttttttcagggttggctagagagcgagtattgtgattttgctgaaaagacaaggtgtgaaggagcaacttcagttgacacaaaatttgaaatgctcacagatcagggaggtgatttcccaaagtaattgcccaagaacctccgttttggaaggattcctttttctgtagaatactttgcctcgatatataagcatacagatgcactttaaatgaaaacccttgattataaattgatagctggtagtgtttcttttgcaagaatgcatttctaaggcaaaaggtaaattattttgtccgtcttttgatgtactttctgattccaggattggatatttattcaaggactattttaaaaatagaaagtaagtttgtagcatgctgtctgaattctggggtaagttccacctcttctttagttgctttcgttttttatgatgtaggacttcctttgatatccctgttggaagtccattagcagtcctttgcatttgccaattcaaggtaaaacagggtcagtgacatctgcagtgtcccagtcatttatttgcatgaatctgcttaaataagttttttgttgctgttttttcttttttatgttttgttcagaatttgtacattcaagttgtacttgttatatctgacatgaatgaaataaaatcttaattac

SEQ ID NO: 224052 - DNA, 4197 bp, Artificial Sequence
  derived and/or modified sequence
gcattgcgcccgcagccctggaccatttgtcaggactactcgtgagacggagaaaaaaaaaagagaaaatttggggaacccttaggagaaatcttgagagtggacagcaattgtgaagatcgccagagagttctgtgtttcatcaccgccgaaaggttaaaaaataaatcatgactgaatctgcctctagcacaagtggtcaagagtttgatgtgttcagtgttatggactggaaagatggagtgggcacgttaccaggaagtgacttaaagtttcgggtaaatgagtttggagccctggaagttattacagatgagaatgagatggaaaatgttaaaaaagcaactgctaccaccacttggatggtaccaactgctcaagaagccccgacctctcccccgagctccaggcccgtatttccacctgcctactggacatctccacctggatgtcccacagtcttttcagagaagactgggatgcctttcaggttgaaggatccagtgaaagtagaagggcttcagttctgtgagaactgttgtcagtatggcaacgtagatgagtgtctttctggaggaaactattgcagccagaattgtgctcggcacatcaaagataaagatcagaaggaagaaagggacgtagaagaagacaatgaggaagaagatcctaagtgtagtcggaagaaaaaaccaaaattatctctgaaagctgacaccaaggaggatggagaagagagagatgatgaaatggagaacaaacaagatgtaagaatcctgaggggttcgcagagagcacggaggaaaagacgaggggattcggctgtactaaagcagggtttgcctcctaaaggaaagaaagcgtggtgctgggcatcctacctggaagaggagaaagcggtggcagtgccggcgaagctgttcaaggagcatcaatcctttccatataacaaaaatggattcaaagttggcatgaaattagaaggcgtggatcctgagcatcagtctgtgtactgtgtcctcaccgtcgcggaggtttgtggataccggataaagcttcactttgatgggtattctgattgctatgacttctgggtgaatgcagacgctctggatatccacccagttgggtggtgtgagaaaaccggccacaaactccatcctccaaaagggtataaagaagaagaattcaattggcagacctatcttaagacatgtaaagctcaagctgctcctaagtcattatttgaaaatcagaatataacagtgatcccatcgggctttcgagttggtatgaagcttgaggcagtagacaaaaagaatccctcattcatctgtgttgctacggtaacagatatggtggacaatcgtttcctggtacattttgacaactgggatgagagctatgactattggtgtgaagcatcaagtccacatattcatccagttggttggtgtaaggaacatagaagaacccttattactccaccaggttatccaaatgtgaaacatttttcttgggataaatacttagaagaaaccaattctttacctgctcctgcaagagctttcaaagtgaaacctcctcatggattccagaaaaaaatgaagcttgaggttgtagacaaaaggaaccctatgtttattagagtagcaactgtggcagacacagatgatcaccgggtaaaagttcactttgatggctggaacaattgctatgattactggatagatgcagattctcctgatattcaccctgtaggctggtgttcaaaaacaggacatccccttcagcctcctttgagccccttagaattaatggaagcttcagaacatggtggatgctcaaccccgggatgtaaagggattggccatttcaagagagcgagacatctgggccctcacagtgctgccaactgtccctattcagaaatcaatttgaataaagaccgtatttttccagaccgcttaagtggtgagatgcctccggctagtccgtcatttccaagaaataaaaggacagatgcaaatgaaagctcttcttcccctgaaatcagagaccagcatgctgatgatgtcaaagaagactttgaagagagaacagaaagtgaaatgagaacatcacatgaagccagaggtgcccgggaagaacccaccgtccagcaggcacagcgtcggtcagctgtctttctgtcctttaagtccccaattccatgtctgcccttgcgctgggagcagcaaagcaaacttcttccaactgtcgcaggaatccctgccagtaaagtttccaaatggagcacagacgaggtgtcagaatttatacagagcttacctgggtgtgaagaacatggaaaggtatttaaagatgaacaaattgatggagaagcatttctacttatgactcaaacagacattgttaaaattatgagcattaaactgggccctgctctcaaaattttcaattccatcctgatgttcaaagctgcagagaagaattctcacaatgaactttgaagatggtgaattctgaataccatcagcattctgctttaaagctcatgttttattcaaagcacaaggacggttataactcctaagtgagaagtctccaaaactcaaaagagcaacactatcggattatttatattactcaagagacaatatatatgaattcttatgaaagtgcttgagcttttaaccaggtactgtctaacaacagtcatcttttggttctgttcactgagctaaatttatctttgtaaatctttttgagtctggggggtggggggaaggggggcttcattaattatttatggtaatggggggcagagtaagaacttttggcattttgtaaacattgttgaattctctttcatgtacactgtttctttttcaatactttcagaaacctttttatataatcaaatttcaatttaaaccaaattagtcgaaacctggctaagtttagccagtaggactgttatctgtattgttaattttgtgccatattttgaattgcaacattatgctaagtataactttgcaagtcatgatattgcctaactgcttgtcataattgtcagggctgaatagttgtaagaatgacttttctttgaatcagtatttttccttttgcacgcattatgaaatgttaaacaaattacttttcaccagcatctttactataattaccaaaaacatgtatataaaagaatgaaattgaaaaataaaatatataaacataaataaattaggtagtgtattttgagtggcatcagtctcactcatcttggtgccccggtgtttacaagagccagatggtgtcagaggagtacgcagttgtatgcagttatggttggggggaatgtttgtgagggtcttgaactatttatgagatgatcttgagcttctaattttcattgatgaaattgtggtggtttacagagactaagagctcattctgtcaacagaaacactaatctgtacagagcgctgtctcaggtcatgcattgtcctccaaacccaaaggtttttttcagggttggctagagagcgagtattgtgattttgctgaaaagacaaggtgtgaaggagcaacttcagttgacacaaaatttgaaatgctcacagatcagggaggtgatttcccaaagtaattgcccaagaacctccgttttggaaggattcctttttctgtagaatactttgcctcgatatataagcatacagatgcactttaaatgaaaacccttgattataaattgatagctggtagtgtttcttttgcaagaatgcatttctaaggcaaaaggtaaattattttgtccgtcttttgatgtactttctgattccaggattggatatttattcaaggactattttaaaaatagaaagtaagtttgtagcatgctgtctgaattctggggtaagttccacctcttctttagttgctttcgttttttatgatgtaggacttcctttgatatccctgttggaagtccattagcagtcctttgcatttgccaattcaaggtaaaacagggtcagtgacatctgcagtgtcccagtcatttatttgcatgaatctgcttaaataagttttttgttgctgttttttcttttttatgttttgttcagaatttgtacattcaagttgtacttgttatatctgacatgaatgaaataaaatcttaattac

SEQ ID NO: 224053 - DNA, 4235 bp, Artificial Sequence
  derived and/or modified sequence
agggctgggggcgtcggtctgtccgtcgcgctcagagggaggtgggggtaactagccgctttccagggcgcggggaccgcggctctaccccacccttccacgggagacggagaacccttaggagaaatcttgagagtggacagcaattgtgaagatcgccagagagttctgtgtttcatcaccgccgaaaggttaaaaaataaatcatgactgaatctgcctctagcacaagtggtcaagagtttgatgtgttcagtgttatggactggaaagatggagtgggcacgttaccaggaagtgacttaaagtttcgggtaaatgagtttggagccctggaagttattacagatgagaatgagatggaaaatgttaaaaaagcaactgctaccaccacttggatggtaccaactgctcaagaagccccgacctctcccccgagctccaggcccgtatttccacctgcctactggacatctccacctggatgtcccacagtcttttcagagaagactgggatgcctttcaggttgaaggatccagtgaaagtagaagggcttcagttctgtgagaactgttgtcagtatggcaacgtagatgagtgtctttctggaggaaactattgcagccagaattgtgctcggcacatcaaagataaagatcagaaggaagaaagggacgtagaagaagacaatgaggaagaagatcctaagtgtagtcggaagaaaaaaccaaaattatctctgaaagctgacaccaaggaggatggagaagagagagatgatgaaatggagaacaaacaagatgtaagaatcctgaggggttcgcagagagcacggaggaaaagacgaggggattcggctgtactaaagcagggtttgcctcctaaaggaaagaaagcgtggtgctgggcatcctacctggaagaggagaaagcggtggcagtgccggcgaagctgttcaaggagcatcaatcctttccatataacaaaaatggattcaaagttggcatgaaattagaaggcgtggatcctgagcatcagtctgtgtactgtgtcctcaccgtcgcggaggtttgtggataccggataaagcttcactttgatgggtattctgattgctatgacttctgggtgaatgcagacgctctggatatccacccagttgggtggtgtgagaaaaccggccacaaactccatcctccaaaagggtataaagaagaagaattcaattggcagacctatcttaagacatgtaaagctcaagctgctcctaagtcattatttgaaaatcagaatataacagtgatcccatcgggctttcgagttggtatgaagcttgaggcagtagacaaaaagaatccctcattcatctgtgttgctacggtaacagatatggtggacaatcgtttcctggtacattttgacaactgggatgagagctatgactattggtgtgaagcatcaagtccacatattcatccagttggttggtgtaaggaacatagaagaacccttattactccaccaggttatccaaatgtgaaacatttttcttgggataaatacttagaagaaaccaattctttacctgctcctgcaagagctttcaaagtgaaacctcctcatggattccagaaaaaaatgaagcttgaggttgtagacaaaaggaaccctatgtttattagagtagcaactgtggcagacacagatgatcaccgggtaaaagttcactttgatggctggaacaattgctatgattactggatagatgcagattctcctgatattcaccctgtaggctggtgttcaaaaacaggacatccccttcagcctcctttgagccccttagaattaatggaagcttcagaacatggtggatgctcaaccccgggatgtaaagggattggccatttcaagagagcgagacatctgggccctcacagtgctgccaactgtccctattcagaaatcaatttgaataaagaccgtatttttccagaccgcttaagtggtgagatgcctccggctagtccgtcatttccaagaaataaaaggacagatgcaaatgaaagctcttcttcccctgaaatcagagaccagcatgctgatgatgtcaaagaagactttgaagagagaacagaaagtgaaatgagaacatcacatgaagccagaggtgcccgggaagaacccaccgtccagcaggcacagcgtcggtcagctgtctttctgtcctttaagtccccaattccatgtctgcccttgcgctgggagcagcaaagcaaacttcttccaactgtcgcaggaatccctgccagtaaagtttccaaatggagcacagacgaggtgtcagaatttatacagagcttacctgggtgtgaagaacatggaaaggtatttaaagatgaacaaattgatggagaagcatttctacttatgactcaaacagacattgttaaaattatgagcattaaactgggccctgctctcaaaattttcaattccatcctgatgttcaaagctgcagagaagaattctcacaatgaactttgaagatggtgaattctgaataccatcagcattctgctttaaagctcatgttttattcaaagcacaaggacggttataactcctaagtgagaagtctccaaaactcaaaagagcaacactatcggattatttatattactcaagagacaatatatatgaattcttatgaaagtgcttgagcttttaaccaggtactgtctaacaacagtcatcttttggttctgttcactgagctaaatttatctttgtaaatctttttgagtctggggggtggggggaaggggggcttcattaattatttatggtaatggggggcagagtaagaacttttggcattttgtaaacattgttgaattctctttcatgtacactgtttctttttcaatactttcagaaacctttttatataatcaaatttcaatttaaaccaaattagtcgaaacctggctaagtttagccagtaggactgttatctgtattgttaattttgtgccatattttgaattgcaacattatgctaagtataactttgcaagtcatgatattgcctaactgcttgtcataattgtcagggctgaatagttgtaagaatgacttttctttgaatcagtatttttccttttgcacgcattatgaaatgttaaacaaattacttttcaccagcatctttactataattaccaaaaacatgtatataaaagaatgaaattgaaaaataaaatatataaacataaataaattaggtagtgtattttgagtggcatcagtctcactcatcttggtgccccggtgtttacaagagccagatggtgtcagaggagtacgcagttgtatgcagttatggttggggggaatgtttgtgagggtcttgaactatttatgagatgatcttgagcttctaattttcattgatgaaattgtggtggtttacagagactaagagctcattctgtcaacagaaacactaatctgtacagagcgctgtctcaggtcatgcattgtcctccaaacccaaaggtttttttcagggttggctagagagcgagtattgtgattttgctgaaaagacaaggtgtgaaggagcaacttcagttgacacaaaatttgaaatgctcacagatcagggaggtgatttcccaaagtaattgcccaagaacctccgttttggaaggattcctttttctgtagaatactttgcctcgatatataagcatacagatgcactttaaatgaaaacccttgattataaattgatagctggtagtgtttcttttgcaagaatgcatttctaaggcaaaaggtaaattattttgtccgtcttttgatgtactttctgattccaggattggatatttattcaaggactattttaaaaatagaaagtaagtttgtagcatgctgtctgaattctggggtaagttccacctcttctttagttgctttcgttttttatgatgtaggacttcctttgatatccctgttggaagtccattagcagtcctttgcatttgccaattcaaggtaaaacagggtcagtgacatctgcagtgtcccagtcatttatttgcatgaatctgcttaaataagttttttgttgctgttttttcttttttatgttttgttcagaatttgtacattcaagttgtacttgttatatctgacatgaatgaaataaaatcttaattacag

SEQ ID NO: 224054 - DNA, 762 bp, Artificial Sequence
  derived and/or modified sequence
cgcgcgccgcccctgcggccccctccgcccgtgtggcctttgtgccgggcgcgcaccggagagcgagcgagcgggcgggcgagcgcgagaagtacaaaacccttaggagaaatcttgagagtggacagcaattgtgaagatcgccagagagttctgtgtttcatcaccgccgaaaggttaaaaaataaatcatgactgaatctgcctctagcacaagtggtcaagagtttgatgtgttcagtgttatggactggaaagatggagtgggcacgttaccaggaagtgacttaaagtttcgggtaaatgagtttggagccctggaagttattacagatgagaatgagatggaaaatgttaaaaaagcaactgctaccaccacttggatggtaccaactgctcaagaagccccgacctctcccccgagctccaggcccgtatttccacctgcctactggacatctccacctggatgtcccacagtcttttcagagaagactgggatgcctttcaggttgaaggatccagtgaaagtagaagggcttcagttctgtgagaactgttgtcagtatggcaacgtagatgagtgtctttctggaggaaactattgcagccagaattgtgctcggcacatcaaagataaagatcagaaggaagaaagggacgtagaagaagacaatgaggaagaagatcctaagtgtagtcggaagaaaaaaccaaaattatctctgaaagctgacaccaaggaggatggagaagagagag

SEQ ID NO: 224055 - DNA, 4518 bp, Artificial Sequence
  derived and/or modified sequence
gtactggcggctgttgtcacagatagtggcaccaaaggattctttgtagaaaactttgacagcagcctttaaagtcattattcctacaactctgaggcggtgaccgggctattgaaaagatgcacctgaaacaggatctgcgggcagctgcatttgccacccggctttattgctgctttccagcggcgaaggcgcagcagcagtaacagggaagccagagcgagcctccccggcagcggcggcggcggcggcggcaccggcaccagcgcagtttcccctctccccagccctgactctacgcgcacatgcgcattgcgcccgcagccctggaccatttgtcaggactactcgtgagacggagaaaaaaaaaagagaaaatttggggaacccttaggagaaatcttgagagtggacagcaattgtgaagatcgccagagagttctgtgtttcatcaccgccgaaaggttaaaaaataaatcatgactgaatctgcctctagcacaagtggtcaagagtttgatgtgttcagtgttatggactggaaagatggagtgggcacgttaccaggaagtgacttaaagtttcgggtaaatgagtttggagccctggaagttattacagatgagaatgagatggaaaatgttaaaaaagcaactgctaccaccacttggatggtaccaactgctcaagaagccccgacctctcccccgagctccaggcccgtatttccacctgcctactggacatctccacctggatgtcccacagtcttttcagagaagactgggatgcctttcaggttgaaggatccagtgaaagtagaagggcttcagttctgtgagaactgttgtcagtatggcaacgtagatgagtgtctttctggaggaaactattgcagccagaattgtgctcggcacatcaaagataaagatcagaaggaagaaagggacgtagaagaagacaatgaggaagaagatcctaagtgtagtcggaagaaaaaaccaaaattatctctgaaagctgacaccaaggaggatggagaagagagagatgatgaaatggagaacaaacaagatgtaagaatcctgaggggttcgcagagagcacggaggaaaagacgaggggattcggctgtactaaagcagggtttgcctcctaaaggaaagaaagcgtggtgctgggcatcctacctggaagaggagaaagcggtggcagtgccggcgaagctgttcaaggagcatcaatcctttccatataacaaaaatggattcaaagttggcatgaaattagaaggcgtggatcctgagcatcagtctgtgtactgtgtcctcaccgtcgcggaggtttgtggataccggataaagcttcactttgatgggtattctgattgctatgacttctgggtgaatgcagacgctctggatatccacccagttgggtggtgtgagaaaaccggccacaaactccatcctccaaaagggtataaagaagaagaattcaattggcagacctatcttaagacatgtaaagctcaagctgctcctaagtcattatttgaaaatcagaatataacagtgatcccatcgggctttcgagttggtatgaagcttgaggcagtagacaaaaagaatccctcattcatctgtgttgctacggtaacagatatggtggacaatcgtttcctggtacattttgacaactgggatgagagctatgactattggtgtgaagcatcaagtccacatattcatccagttggttggtgtaaggaacatagaagaacccttattactccaccaggttatccaaatgtgaaacatttttcttgggataaatacttagaagaaaccaattctttacctgctcctgcaagagctttcaaagtgaaacctcctcatggattccagaaaaaaatgaagcttgaggttgtagacaaaaggaaccctatgtttattagagtagcaactgtggcagacacagatgatcaccgggtaaaagttcactttgatggctggaacaattgctatgattactggatagatgcagattctcctgatattcaccctgtaggctggtgttcaaaaacaggacatccccttcagcctcctttgagccccttagaattaatggaagcttcagaacatggtggatgctcaaccccgggatgtaaagggattggccatttcaagagagcgagacatctgggccctcacagtgctgccaactgtccctattcagaaatcaatttgaataaagaccgtatttttccagaccgcttaagtggtgagatgcctccggctagtccgtcatttccaagaaataaaaggacagatgcaaatgaaagctcttcttcccctgaaatcagagaccagcatgctgatgatgtcaaagaagactttgaagagagaacagaaagtgaaatgagaacatcacatgaagccagaggtgcccgggaagaacccaccgtccagcaggcacagcgtcggtcagctgtctttctgtcctttaagtccccaattccatgtctgcccttgcgctgggagcagcaaagcaaacttcttccaactgtcgcaggaatccctgccagtaaagtttccaaatggagcacagacgaggtgtcagaatttatacagagcttacctgggtgtgaagaacatggaaaggtatttaaagatgaacaaattgatggagaagcatttctacttatgactcaaacagacattgttaaaattatgagcattaaactgggccctgctctcaaaattttcaattccatcctgatgttcaaagctgcagagaagaattctcacaatgaactttgaagatggtgaattctgaataccatcagcattctgctttaaagctcatgttttattcaaagcacaaggacggttataactcctaagtgagaagtctccaaaactcaaaagagcaacactatcggattatttatattactcaagagacaatatatatgaattcttatgaaagtgcttgagcttttaaccaggtactgtctaacaacagtcatcttttggttctgttcactgagctaaatttatctttgtaaatctttttgagtctggggggtggggggaaggggggcttcattaattatttatggtaatggggggcagagtaagaacttttggcattttgtaaacattgttgaattctctttcatgtacactgtttctttttcaatactttcagaaacctttttatataatcaaatttcaatttaaaccaaattagtcgaaacctggctaagtttagccagtaggactgttatctgtattgttaattttgtgccatattttgaattgcaacattatgctaagtataactttgcaagtcatgatattgcctaactgcttgtcataattgtcagggctgaatagttgtaagaatgacttttctttgaatcagtatttttccttttgcacgcattatgaaatgttaaacaaattacttttcaccagcatctttactataattaccaaaaacatgtatataaaagaatgaaattgaaaaataaaatatataaacataaataaattaggtagtgtattttgagtggcatcagtctcactcatcttggtgccccggtgtttacaagagccagatggtgtcagaggagtacgcagttgtatgcagttatggttggggggaatgtttgtgagggtcttgaactatttatgagatgatcttgagcttctaattttcattgatgaaattgtggtggtttacagagactaagagctcattctgtcaacagaaacactaatctgtacagagcgctgtctcaggtcatgcattgtcctccaaacccaaaggtttttttcagggttggctagagagcgagtattgtgattttgctgaaaagacaaggtgtgaaggagcaacttcagttgacacaaaatttgaaatgctcacagatcagggaggtgatttcccaaagtaattgcccaagaacctccgttttggaaggattcctttttctgtagaatactttgcctcgatatataagcatacagatgcactttaaatgaaaacccttgattataaattgatagctggtagtgtttcttttgcaagaatgcatttctaaggcaaaaggtaaattattttgtccgtcttttgatgtactttctgattccaggattggatatttattcaaggactattttaaaaatagaaagtaagtttgtagcatgctgtctgaattctggggtaagttccacctcttctttagttgctttcgttttttatgatgtaggacttcctttgatatccctgttggaagtccattagcagtcctttgcatttgccaattcaaggtaaaacagggtcagtgacatctgcagtgtcccagtcatttatttgcatgaatctgcttaaataagttttttgttgctgttttttcttttttatgttttgttcagaatttgtacattcaagttgtacttgttatatctgacatgaatgaaataaaatcttaattacagatgcttttta

SEQ ID NO: 224056 - DNA, 2343 bp, Artificial Sequence
  derived and/or modified sequence
atgactgagtcagcaagttcaacaagcggccaagaattcgacgtgttctctgttatggactggaaagatggcgtggggaccctgccaggtagtgatctcaagtttagagtaaatgaattcggtgcgctggaggtgatcactgacgaaaatgagatggagaacgtgaagaaggcgactgccaccactacatggatggttcctacagcccaggaagcacctacttcccctcctagcagccgcccggtttttcccccagcctactggacaagtcccccagggtgccctactgtgtttagcgaaaaaactgggatgcctttcagactaaaggatcccgtgaaagtcgaaggcttacaattttgcgagaattgttgccagtacggaaacgtcgatgaatgtctgagcggaggtaattattgctcccagaattgcgctagacatatcaaagataaggatcagaaagaggagcgcgatgtggaggaggacaatgaggaagaagaccccaagtgttcgagaaaaaagaaaccaaagttgagtttgaaagctgataccaaagaagatggcgaggagcgcgacgacgagatggagaataaacaagacgtgcgaatattgagggggagccagcgcgcacgaaggaaacgtagaggcgactctgccgtcctgaaacaggggctcccaccgaagggcaagaaggcctggtgctgggcctcctacctagaggaggagaaggctgtggccgttccagccaagctctttaaagagcatcaatcattcccctacaataagaatggttttaaagtggggatgaagctggagggagttgacccagagcaccagagcgtctactgtgtgttaacggtcgccgaggtgtgcggatataggattaaactgcacttcgatggctactccgattgctacgatttctgggtgaatgcagacgccctcgacatacatccagttggatggtgtgaaaagactggacataaacttcacccacctaagggctacaaagaggaagagtttaactggcagacatatttaaaaacttgcaaggcacaagctgcccccaagtctctctttgaaaatcagaatattacagtcatcccctccggcttccgagtcggcatgaagctggaggccgtggacaagaagaacccatcatttatctgcgtagccaccgtcacggacatggtggacaacagatttctggtccattttgacaattgggatgagtcttacgattattggtgcgaggcctcttcaccccacatccaccctgtggggtggtgcaaggaacatcgaagaacactgatcacgcccccgggctacccaaacgtgaaacatttctcgtgggacaaatacctggaagagaccaattctctgcctgcacctgctcgtgctttcaaggtgaagccgccccacgggttccagaagaaaatgaagttggaagtggtcgacaagcgtaaccctatgttcatccgggttgctaccgttgccgacaccgatgatcaccgcgtgaaagtccatttcgacggctggaacaattgttacgactattggatagacgccgatagtcctgacattcaccctgtgggatggtgtagcaagacagggcatcccctgcaaccaccgctcagtccccttgagctcatggaggcatctgaacacggcggctgcagcactccaggttgtaaaggcataggccactttaaaagggctcggcatctgggtccacactccgccgcaaactgtccctatagcgagattaatctgaataaggacagaatctttcctgaccgactttccggtgagatgccgccagccagccccagcttcccgaggaataagaggaccgacgccaacgaatcatcatcaagcccggaaatcagggaccagcatgcagacgacgttaaggaggacttcgaagaacgaaccgagagcgaaatgaggacctcacatgaggcccggggagctagagaggaaccaacagtacagcaggctcaaagacggagtgctgtctttctatccttcaaaagccctatcccttgccttccgctaaggtgggagcagcagtcgaaactacttcccactgtggccggcatcccagcaagcaaggtgtccaagtggagcacagatgaggtttccgagtttatccagtctcttccaggctgtgaagaacatggaaaggtctttaaagacgaacagatagatggtgaggctttccttcttatgacccagaccgacattgttaaaatcatgtccattaagctgggccccgctctcaaaatctttaactccattctgatgtttaaagcggctgaaaaaaatagccataacgaactatag

SEQ ID NO: 224057 - DNA, 2343 bp, Artificial Sequence
  derived and/or modified sequence
atgacagagtctgcaagttctaccagcggccaggagtttgacgtatttagtgtgatggactggaaggatggtgtgggcacgctgccaggatccgacctgaagttccgagttaatgaatttggagctctggaggtaatcacggacgagaacgagatggagaacgtgaagaaggcaacagcaactacaacttggatggtgcccacggcccaggaagctcctacctcaccaccttcgagccgcccagtgtttccgcctgcctactggacaagccctcccggctgccccactgtgttcagcgaaaaaacaggaatgccgtttcgactaaaggatcctgtgaaggtcgaggggctgcagttctgcgagaactgttgccaatacggaaatgtcgatgagtgcctgtccggtgggaattactgttcccagaactgtgcccggcatatcaaggataaagatcagaaggaggaacgggatgtggaagaggacaacgaagaagaggaccccaaatgttcacggaagaaaaagcccaaactgagtctcaaggcagacacaaaggaagatggagaggaacgtgacgacgagatggaaaataaacaggatgttcggatcctgaggggcagccagagagcacgccgcaagcggcgcggagattcggcagtgcttaaacaggggctcccgccaaaaggaaagaaagcctggtgttgggcttcctacctagaggaggagaaggccgtcgctgtacccgccaagctgtttaaagagcatcagtcgtttccatacaataagaacggcttcaaggtcggcatgaagctcgaaggtgtggaccctgagcatcagtcggtatactgtgtcctgaccgtggctgaagtatgtgggtatcgcatcaagcttcacttcgacggctattccgactgttacgacttttgggtgaacgccgatgcactggatatccaccccgtgggctggtgtgaaaagactggtcataaactccatccccccaagggatataaagaagaagagttcaattggcagacatacctgaagacttgcaaggcacaggctgctcccaaaagtctctttgaaaaccagaacatcacggttattccttcaggatttagggttgggatgaagctggaggcagttgataagaaaaacccatcttttatctgcgttgctactgtgactgatatggtagacaatcgattcttggtgcattttgataactgggacgaaagttatgattattggtgcgaggcttcaagcccacatatccatccggttggttggtgcaaggaacatcggcgtacactaatcacaccgcctgggtacccgaatgttaagcatttctcctgggataagtatctcgaggaaacaaatagcctgccagccccggcgagggcatttaaggtcaagccaccccatggcttccagaaaaaaatgaagcttgaagttgtggataagagaaaccccatgttcatacgggtggcaaccgtcgctgatactgacgaccaccgagttaaggttcactttgatggctggaataattgttacgactactggatcgatgccgactccccagacatccaccctgttgggtggtgcagtaaaaccggtcatcctctgcagccccctctgtctccactggaactgatggaggcttctgagcacgggggatgcagtacccctgggtgcaaagggattggccactttaaacgagcacgccacctaggcccacacagtgccgctaactgtccttatagcgagattaacctgaataaggatcgtatcttcccagaccgactatctggagaaatgccacctgcaagtccgtcattccccaggaacaaacgcacagatgccaatgaaagctcatcatcgcccgaaatccgggatcagcacgccgacgacgttaaagaggacttcgaagagcgaaccgagagcgaaatgagaacctctcacgaagctcgcggagcccgagaagagcccaccgttcagcaagcacagcggaggagcgctgtctttctaagcttcaagagccccatcccttgtctgccgttgaggtgggaacagcagagtaaactgttgcccaccgtggctggaatcccagcttctaaagtgtctaagtggtccacagatgaagtctctgaattcatacagagtctgcccggctgtgaggagcacgggaaagtgtttaaagacgaacagatcgatggagaggctttcttgctgatgactcagaccgatatcgtaaagatcatgtcaattaaactagggccagcgctgaagatcttcaattctatactgatgtttaaggccgcagagaagaattcccataacgagctgtag

SEQ ID NO: 224058 - DNA, 573 bp, Artificial Sequence
  derived and/or modified sequence
atgacagagtccgctagttctactagcggccaggagtttgacgtgttttcagtgatggactggaaggatggggtaggtacgttgccaggaagtgatcttaaattccgagtaaatgagtttggagccctagaagtgataacggatgagaacgaaatggaaaatgtgaagaaggctaccgcgacgaccacctggatggtgcctaccgcacaagaggcacctacatcccccccctcttcgcggcctgtgttccctcctgcctattggacgagcccgccaggatgccctacagtgttctccgagaagaccgggatgccctttaggcttaaagaccctgtcaaggtggaaggactccaattctgcgagaattgctgtcagtacgggaacgttgatgaatgcttgagcggcgggaattactgctctcagaattgcgccaggcatatcaaagataaagatcagaaggaagagcgagatgtggaggaagataacgaggaggaagacccgaagtgttcccgcaaaaagaaaccaaagttgtctctgaaagccgacacgaaagaagatggcgaggaacgttag

SEQ ID NO: 224059 - DNA, 2343 bp, Artificial Sequence
  derived and/or modified sequence
atgactgaatctgcatccagcactagtggccaggagtttgatgttttcagtgtgatggattggaaggacggagttgggacactgcccggaagcgacttaaaatttcgggtaaacgagtttggagccttggaggtaataaccgatgaaaatgagatggagaacgtgaaaaaagccactgcaactactacatggatggttccaactgcacaagaggccccgacatcacctcccagctcacgacccgtcttcccccctgcctattggacaagcccaccaggttgccccaccgtatttagtgaaaagacggggatgcccttccgccttaaggaccctgttaaggttgaagggctccagttctgtgaaaattgctgtcagtacgggaatgtggacgaatgtctgtcaggagggaattactgcagccagaactgtgctcggcatattaaagacaaagaccaaaaagaggagagggatgttgaggaggacaacgaggaggaggatcccaaatgttcgagaaagaaaaagcctaagctttccctgaaggccgacactaaggaggacggtgaggaaagagatgacgaaatggaaaacaagcaggatgtgagaatcctgagaggctcccaacgcgcccgtagaaagcgcaggggggacagtgctgtactcaaacagggactcccgcccaagggtaagaaggcttggtgctgggcctcgtatctggaggaggaaaaggctgtcgctgttcccgctaaactgtttaaggagcatcaatcattcccttataacaaaaatggttttaaagtcggaatgaagttggagggggtcgaccccgaacaccagtccgtgtactgtgtgctgacagttgccgaggtgtgcgggtaccgaattaagctgcatttcgatggttattccgattgttacgatttctgggtcaacgccgacgcgctggacattcacccagtcggctggtgtgaaaaaactggccataagctgcaccccccgaaaggatacaaagaggaggagtttaactggcaaacttaccttaagacctgtaaggcacaggctgcgccgaagagtcttttcgagaatcagaacataaccgttattccatcggggttccgtgtgggcatgaagttggaagctgtggataagaagaaccctagcttcatctgcgtcgcaacagttacggacatggtcgacaatcgtttcctggtgcacttcgacaactgggacgagtcgtatgattactggtgcgaggcgagcagccctcacattcaccccgtgggatggtgcaaggaacacaggaggacgctgatcactcctcccgggtaccctaacgttaagcactttagctgggataagtacctggaagaaactaacagcttgccagcccccgctagagcatttaaagtgaaaccccctcatggattccaaaaaaagatgaagctggaggtggtcgacaagcgcaatcctatgtttatccgggtggccaccgtagctgacaccgatgatcatcgagtgaaggtgcatttcgacggatggaataactgctacgactactggatcgacgctgactcccctgatatccatccagtaggttggtgttcgaaaacaggacacccactccaacctcctttgtccccactggagctaatggaggcatccgagcacggaggctgcagtacccctgggtgcaaaggaatcggacatttcaaaagggcccgccatctcggtccgcacagtgccgctaactgtccatactcagagattaatctgaataaggatcgaatcttcccagataggctgtctggcgaaatgccccctgcttctccgtcttttccccgcaacaagcgaactgacgcaaatgaaagctcaagctcacctgaaattagagaccagcacgccgacgatgtgaaggaagacttcgaagagagaaccgaatctgaaatgagaacgagccacgaagcgaggggtgctcgggaagagcccacagttcagcaagcccaaagacgatccgccgtcttcttgagctttaagagccccatcccttgtctgcccttgaggtgggagcagcagagcaagctgttgccgacagtcgccggcattccagcatctaaagtgtcaaaatggtctactgacgaagttagcgagtttatccagtccctgccgggctgcgaagagcacggtaaagtgtttaaggacgaacagatcgatggggaggctttcctgctaatgacacagaccgatatcgtgaagatcatgagcatcaagctgggccctgctctgaagatcttcaattcaattctgatgtttaaagcggctgaaaagaatagccataacgagctgtag

SEQ ID NO: 224060 - DNA, 2343 bp, Artificial Sequence
  derived and/or modified sequence
atgacagagagcgccagcagcaccagcggccaggagtttgatgtgttttctgtgatggactggaaggatggagtgggcaccctgcccggcagtgacctgaagttccgggtgaatgaatttggagccctggaggtgatcacagatgaaaatgagatggagaatgtgaagaaggccacagccaccaccacctggatggtgcccacagcccaggaggcccccaccagcccccccagcagcaggcctgtgttccccccagcctactggaccagccccccaggctgccccaccgtcttcagcgagaagacaggcatgcccttccggctgaaggaccctgtgaaggtggagggcctgcagttctgtgagaactgctgccagtatggaaatgtggatgaatgtctgagcggcggcaactactgcagccagaactgtgcccggcacatcaaggacaaggaccagaaggaggagagagatgtggaggaggacaatgaggaggaggaccccaagtgcagcaggaagaagaagcccaagctgagcctgaaggctgacaccaaggaggatggagaggagagagatgatgagatggagaacaagcaggatgtgcgcatcctgcggggcagccagagggcccggaggaagagaagaggagacagcgctgtgctgaagcagggcctgccccccaagggcaagaaggcctggtgctgggccagctacctggaggaggagaaggctgtggccgtgcctgccaagctgttcaaggagcaccagagcttcccctacaacaagaatggcttcaaggtgggcatgaagctggagggcgtggaccctgagcaccagagcgtgtactgtgtgctgactgtggccgaggtgtgtggctaccgcatcaagctgcactttgatggctacagcgactgctatgacttctgggtgaatgctgatgccctggacatccaccctgtgggctggtgtgagaagacaggccacaagctgcacccccccaagggctacaaggaggaggagttcaactggcagacctacctgaagacctgcaaggcccaggccgcccccaagagcctgtttgagaaccagaacatcaccgtcatccccagcggcttccgggtgggcatgaagctggaggccgtggacaagaagaaccccagcttcatctgtgtggccaccgtgacagacatggtggacaaccgcttcctggtgcactttgacaactgggatgagagctatgactactggtgtgaggccagcagcccccacatccaccctgtgggctggtgcaaggagcacaggaggaccctcatcaccccacctggctaccccaacgtgaagcacttctcctgggacaagtacctggaggagaccaacagcctgcctgccccagcccgggccttcaaggtgaagccccctcatggcttccagaagaagatgaagctggaggtggtggacaagaggaaccccatgttcatccgggtggccaccgtggccgacacagatgaccaccgggtgaaggtgcactttgatggctggaacaactgctatgactactggattgatgctgacagcccagacatccaccctgtgggctggtgcagcaagacaggccaccccctgcagccccccctgagccccctggagctgatggaggccagcgagcacggcggctgcagcaccccaggctgcaagggcatcggccacttcaagagggcccggcacctgggcccccacagcgctgccaactgcccctacagcgagatcaacctgaacaaggaccgcatcttcccagaccggctgtctggagagatgcccccagccagccccagcttccccaggaacaagaggacagatgccaatgaaagcagcagcagccctgagatccgggaccagcacgcagatgatgtgaaggaggactttgaggagaggacagagagcgagatgaggaccagccatgaggcccggggggcccgggaggagcccaccgtgcagcaggcccagaggagatctgctgtgttcctgtccttcaagagccccatcccctgcctgcccctgcgctgggagcagcagagcaagctgctgcccaccgtggccggcatcccagccagcaaggtgtccaagtggagcacagatgaggtgtctgagttcatccagagcctgcccggctgtgaggagcacggcaaggtgttcaaggatgagcagattgatggagaggccttcctgctgatgacccagacagacatcgtgaagatcatgagcatcaagctgggccctgccctgaagatcttcaacagcatcctgatgttcaaggctgctgagaagaacagccacaatgagctgtag

SEQ ID NO: 224061 - DNA, 573 bp, Artificial Sequence
  derived and/or modified sequence
atgacagagagcgccagcagcaccagcggccaggagtttgatgtgttttctgtgatggactggaaggatggagtgggcaccctgcccggcagtgacctgaagttccgggtgaatgaatttggagccctggaggtgatcacagatgaaaatgagatggagaatgtgaagaaggccacagccaccaccacctggatggtgcccacagcccaggaggcccccaccagcccccccagcagcaggcctgtgttccccccagcctactggaccagccccccaggctgccccaccgtcttcagcgagaagacaggcatgcccttccggctgaaggaccctgtgaaggtggagggcctgcagttctgtgagaactgctgccagtatggaaatgtggatgaatgtctgagcggcggcaactactgcagccagaactgtgcccggcacatcaaggacaaggaccagaaggaggagagagatgtggaggaggacaatgaggaggaggaccccaagtgcagcaggaagaagaagcccaagctgagcctgaaggctgacaccaaggaggatggagaggagaggtag

SEQ ID NO: 224062 - DNA, 2343 bp, Artificial Sequence
  derived and/or modified sequence
atgaccgagagcgccagcagcaccagcggccaggagttcgacgtgttctctgtgatggattggaaagatggggtggggacattgcctggatctgacttgaagtttagggtaaatgagttcggcgctctagaggtgataacagatgaaaacgaaatggagaacgtaaagaaagcgactgcaaccactacctggatggttcctacagcccaagaagcaccaaccagccccccttcttcaagacctgtattcccacctgcttattggaccagtcctcccggctgccctacggttttcagcgagaagacagggatgccgttccggctgaaagaccctgtaaaggtggaaggcctgcagttctgcgagaattgttgccagtatggcaacgtggatgagtgcctgagtggaggtaattactgctcccagaattgtgctcggcatataaaagacaaagaccagaaagaggagcgggacgtggaggaggacaacgaggaggaggacccgaagtgttctagaaagaagaaacccaaactgtccctaaaggcggacaccaaagaggatggcgaggaacgggacgacgagatggaaaacaagcaggacgtgagaattctgcgaggtagtcagagagccaggcgcaagcgcaggggcgacagtgcggtcctgaaacaggggttgccgcccaagggaaaaaaggcatggtgttgggcatcctacctggaggaggaaaaggctgtggccgttcccgctaaactgtttaaggaacaccagtcatttccctacaacaaaaacgggttcaaagttggtatgaaactggagggcgtggatcctgagcatcaaagcgtctactgtgtgctaactgtagccgaagtttgcgggtatcgtataaagctccattttgatggctattccgactgttacgatttctgggtgaacgccgacgcgctggacatccatcccgttggatggtgtgagaagactggccataagcttcaccccccaaaggggtacaaggaagaggaatttaattggcagacatatcttaagacctgtaaagcccaggccgctccaaaaagcctctttgagaaccagaacataaccgtgatcccctcagggtttagggtgggcatgaagttggaagccgtggataagaagaatccctcttttatctgtgtggccacagtgaccgatatggttgataatagattcttggtccattttgacaattgggacgaaagctacgattattggtgtgaggcatcctctccacacattcatcctgtgggctggtgtaaggagcacaggagaacgctgataacccctccaggatatccaaatgtgaagcacttttcctgggataagtatctagaagaaaccaatagtctaccggccccggcgcgcgcattcaaggtaaaacctcctcatggattccagaaaaagatgaagctcgaagttgtcgacaagcgcaaccccatgttcatacgagttgcaacagtggccgataccgacgaccatcgggttaaagtgcacttcgatgggtggaacaactgttacgactactggatcgacgccgattctcctgatatccatcctgtcggatggtgcagcaagacaggtcatccccttcagcctccgttgtccccactagagcttatggaggccagtgagcatggtggctgctcaaccccaggatgcaaagggataggacacttcaaaagggcccgccacctcggaccacacagtgcggctaactgtccgtattctgaaatcaatctgaataaggaccgaattttccccgatagactctcaggggagatgccacctgcgagcccatcattccctcgcaataagcgcacagacgccaatgagtcgtcttcgtctcccgaaatcagagaccagcacgccgatgatgtgaaagaagacttcgaggagcgtaccgaatctgagatgcggaccagccacgaagcccgaggggcccgggaagagccaacagtgcaacaggcccagcggaggagcgccgtctttctttcatttaaatctccgattccatgtctccccctgcgatgggaacagcaatctaagcttttgccgaccgtggccgggatcccggccagcaaagtgagtaaatggtcgactgatgaagtgagcgaatttattcagtctctacccgggtgcgaggagcatggcaaggttttcaaggacgagcaaatcgatggcgaggccttcttactgatgactcagaccgatattgtcaagataatgtcaattaaacttggtcctgcgttaaaaatctttaattccattcttatgtttaaggccgccgaaaaaaactctcataatgagttgtag

SEQ ID NO: 224063 - DNA, 2343 bp, Artificial Sequence
  derived and/or modified sequence
atgaccgagagcgccagcagcaccagcggccaggagttcgacgtgtttagcgttatggattggaaagatggtgtgggcacactgcccgggagtgacctaaagtttcgcgtcaatgagttcggagccctggaggtcattactgacgagaacgagatggagaacgtaaagaaggctacagctactactacatggatggtgcccactgcccaggaggcacctacatcacccccaagctcccgccctgtgtttcctccagcctactggacatcgccaccaggctgccctacagtgttttccgagaagactggtatgcccttccgcttgaaagaccctgttaaggtagagggactccagttctgcgaaaactgttgccagtacggaaacgtggacgagtgtttaagtggtggaaactattgtagtcagaattgcgcccggcatatcaaagacaaggatcaaaaggaagagcgtgacgtggaagaggacaacgaagaggaggatcccaaatgctccaggaagaagaaaccaaagctgagtttgaaggcagataccaaagaggatggcgaggaacgggatgatgaaatggaaaacaagcaggacgttaggatcctccggggatctcagcgggcccggcgaaaaaggagaggcgacagcgctgttctgaaacaggggcttcctccaaaaggtaaaaaggcatggtgttgggcgtcataccttgaggaagagaaggcggtagcagtcccggcaaagctgttcaaagaacaccagtcctttccatacaacaaaaatgggtttaaagtaggcatgaagctcgagggcgtcgaccccgagcaccagagcgtatattgcgtgttgacagtcgcggaggtctgtggatacaggatcaagttgcattttgatggttattcggactgttatgatttttgggtgaatgcagatgcacttgacatacacccagtcgggtggtgtgaaaagacagggcataagttgcacccgccgaagggatacaaagaggaagagttcaattggcagacatatctcaaaacatgtaaagctcaggcagccccgaagagtctgttcgaaaaccagaacattactgtaatcccgtcgggtttcagagtgggcatgaagctggaagcagtagacaaaaagaacccctcatttatctgtgtggccactgtgactgacatggtagataatcgatttctagtccatttcgacaactgggacgagtcctacgattactggtgtgaggccagcagtcctcacatccatcccgtcggatggtgtaaagaacaccgcagaaccctgattacacccccaggttacccgaacgtgaagcacttctcatgggataagtacttagaggagacgaacagtttacctgccccggctagggccttcaaagtgaagccaccacacgggttccaaaaaaagatgaaactcgaggtagtcgataagagaaatcccatgtttatcagagtggccactgtcgctgataccgacgatcatcgcgtgaaagtgcattttgatggctggaataattgctatgattactggatcgacgctgactcccccgatattcaccctgtggggtggtgttccaaaaccggacaccccctgcagcctcctctctctcccctggagctcatggaggcgtccgaacatggtggatgcagcaccccagggtgcaaagggatcggccacttcaaacgggcgaggcacctaggcccccatagcgctgccaattgcccttacagcgagattaatttaaataaggaccgcatatttcccgatcggttatctggagagatgcccccagccagcccctcattccctagaaataagcgtactgatgccaatgaatccagcagtagtcctgaaattagagaccagcacgccgatgacgtcaaggaggattttgaagagcgaacagagtcggagatgcggaccagccatgaggctcggggtgcccgcgaagagcctacagtgcaacaggcccagaggaggtccgctgtgttccttagtttcaagtctcctatcccatgtctgcctttacgctgggaacagcaatcgaagctactgccaactgttgctggtattcccgcgtctaaagtgtccaaatggtccactgacgaggtgagtgaattcatacaaagcctgcccggctgcgaagagcacgggaaggtgtttaaggatgaacagatcgacggagaagcattcctgctgatgacccagaccgatattgttaaaataatgtctatcaagctaggcccagccctgaaaatcttcaacagcatattaatgtttaaagccgctgaaaagaattcccacaacgaattatag

SEQ ID NO: 224064 - DNA, 573 bp, Artificial Sequence
  derived and/or modified sequence
atgaccgagagcgccagcagcaccagcggccaggagttcgacgtgttttcagtaatggattggaaggatggggtcgggaccctgccaggatcagacctcaagttccgcgtcaacgagttcggtgccctcgaagtcatcaccgatgaaaacgaaatggagaacgtgaagaaagctacagccacaaccacctggatggtgcctactgcccaggaggcaccaactagcccaccttcctcccgtcccgtctttcctcctgcctactggacttctcccccgggatgtccaaccgttttctcggagaagacaggcatgccctttcggctgaaggacccagtgaaggtggaaggtttgcaattttgcgaaaattgctgtcaatacggaaatgttgatgaatgcttgtctggtggcaactactgcagtcagaattgtgctagacatatcaaggacaaggaccagaaagaagaacgggacgtcgaagaggataatgaggaggaagatcctaagtgttccaggaagaaaaaacccaagctcagcctgaaggctgatacaaaagaagacggagaagaacgttag

SEQ ID NO: 224065 - DNA, 2343 bp, Artificial Sequence
  derived and/or modified sequence
atgaccgagagcgccagcagcaccagcggccaggagttcgacgtgttctccgtaatggactggaaggacggagtcggcaccttgccgggttctgatttgaagtttcgggtgaatgagtttggggcactggaagtgattacagacgaaaacgagatggaaaatgtcaagaaagccaccgcgacgactacctggatggtcccaaccgcgcaggaggctccgaccagcccaccaagtagcaggcctgtcttccccccagcttattggacatctccccccggctgccccacagtgtttagcgagaaaactggcatgccttttcggctcaaggacccagtcaaggtagaaggcttgcaattttgcgaaaactgctgccagtacgggaatgtagacgagtgtttatcgggcggaaactactgctcacagaattgtgccagacacatcaaagataaggaccagaaagaggagagagacgtggaggaggacaatgaagaggaggacccaaagtgcagtcgtaagaagaaaccgaagttgagtctcaaagctgatacaaaggaggatggggaggagcgggatgatgaaatggaaaataaacaggatgtgcggatcttaagggggagccagcgggctagacgcaaacgaagaggcgattcggcagtcctcaagcagggccttcctcccaagggcaaaaaggcctggtgctgggctagctacttagaggaggagaaagccgtggctgttcccgctaagttgtttaaggagcaccagtcttttccatataacaaaaacgggttcaaagtgggcatgaagcttgaaggggtggacccagaacatcaaagtgtgtactgcgtcctgacagtagccgaagtgtgtggctaccgtattaaactccactttgatggctatagcgattgctacgacttttgggtgaatgctgacgcattagacatccatccagtgggatggtgcgagaagacaggacacaaactgcatcctccaaagggctataaggaggaggagttcaactggcagacttatttaaagacatgtaaggcccaggcagcgcctaagagcctatttgaaaatcagaatatcaccgtcatcccctctggctttcgagtgggcatgaaactggaagccgtagataaaaagaatccaagctttatctgtgttgccactgtcaccgacatggtggataaccggttcctggttcactttgacaactgggatgaaagttacgattactggtgtgaggccagcagccctcatatccatcccgttggttggtgtaaagaacatcgcaggacactgattactccccctggctaccctaatgtaaaacattttagttgggataagtacctggaagagaccaactcattgcctgctccagctagggcattcaaggtgaagccccctcatggctttcagaagaaaatgaagctggaagttgttgacaagcgaaatccgatgtttattcgggttgccaccgtggctgacactgacgaccatagggtaaaagttcactttgatgggtggaacaattgttatgattactggattgatgccgatagtcccgacatccacccagtaggctggtgctcaaaaacgggccatccactgcagcctcctttgtctccgctggaattaatggaggcttcggagcacggaggttgctcgacacccggctgcaaaggcatcggacatttcaaaagggccagacacctgggccctcacagcgccgcgaactgcccatatagcgagattaatctcaataaagacagaattttccctgatagactgagtggggagatgccacccgcttcaccgtcttttccccggaataagcgaaccgacgcgaatgaatccagtagcagtcccgagattagggaccagcacgctgatgatgtgaaggaggattttgaggagcgcactgagtctgaaatgagaaccagccacgaggctaggggggcgagggaggaaccaaccgtgcagcaggctcaacggcggtccgctgtcttcttgtcattcaagagcccaatcccttgcctgccgcttcgctgggaacagcagtcgaaattacttccaactgtcgctggaattccagcctctaaggtgagtaagtggtccacagacgaagtaagcgagttcatccaatcgctgcctggttgcgaggagcatggtaaagtctttaaagatgagcagatcgatggcgaagcctttctgcttatgacacagactgacattgttaaaatcatgtccataaaactcggtccagccctgaagattttcaattctatcctgatgtttaaggctgccgagaagaactcacacaatgaactgtag

SEQ ID NO: 224066 - DNA, 2343 bp, Artificial Sequence
  derived and/or modified sequence
atgacagagagtgccagttccacatccggacaggaattcgatgtgttctcggtcatggactggaaagacggcgtggggaccctccctggttcagatctcaagtttagagtgaacgagttcggggctctcgaagtcattacagacgagaatgagatggaaaatgtcaaaaaagccacggccacgacaacctggatggtgcctacggctcaagaagctcccacttcaccaccgagcagccggccagttttcccccctgcctactggacatcccccccaggctgccccaccgtgtttagtgaaaagaccggcatgccctttagacttaaagacccagtaaaagtggagggtttacagttttgtgaaaactgttgtcaatatggtaacgtggatgaatgtctttcaggaggaaattactgcagtcagaattgtgctaggcatattaaggacaaagatcagaaggaagagagagatgtggaggaggacaacgaggaagaggacccaaaatgtagcaggaaaaagaaaccgaaactctctttgaaggcagacaccaaggaagatggggaagagagagacgacgaaatggagaataagcaggacgtgcggatcttgagaggctcccagcgcgcaaggcgtaaaagaaggggagacagcgccgtactaaaacagggattgcccccaaaggggaagaaggcatggtgttgggcctcctacctcgaagaggagaaagccgtcgctgtccccgcaaagctatttaaggaacaccagtcgttcccatataacaagaacggatttaaagtagggatgaagttggaaggtgtggatcccgagcatcagtccgtgtactgtgtactcacagtcgcagaagtttgcggctatcggatcaaactgcatttcgatggttacagtgattgttacgatttctgggttaatgccgacgctcttgatattcacccggtcggttggtgcgagaagacaggacacaagcttcatccaccaaaagggtacaaggaggaagagttcaattggcagacatatctcaagacctgcaaagctcaggccgcaccaaaatcattgttcgagaaccagaacataaccgtgatcccttcaggattcagggtgggaatgaagcttgaagccgtcgacaagaagaacccatcatttatttgtgtggctactgtcaccgacatggtcgataaccgcttcctagtgcatttcgataattgggatgagtcctacgattactggtgcgaggccagctccccacacatccatcccgtgggatggtgtaaggaacacaggcggacattgatcactccacctggatacccaaacgtcaaacacttctcttgggacaagtacttagaagaaaccaattccttacccgcacctgcaagggcttttaaggttaagccgccacatggttttcagaaaaagatgaaactcgaagtcgtggataaacgcaatcccatgtttatccgcgtggcgacagtcgcggacaccgacgaccatcgggtcaaggtccactttgacggttggaacaattgttacgactactggattgatgctgattctcctgatatccatccggtgggatggtgctccaagacagggcatcctctccagccacccctgagccccctcgagctgatggaggcctctgaacacggcggatgctcgactcccggatgcaaaggaattgggcacttcaagagggctcggcatcttgggccacactctgccgcaaactgcccgtacagcgagatcaatctgaacaaggaccgaatattccccgatcgtctgtctggggagatgccccctgctagtccttctttcccaagaaacaagcgaaccgatgccaatgagagctcctcctcccctgagattcgcgatcagcacgcagacgacgtgaaagaggactttgaggaaaggaccgaatccgaaatgcgcacttcccacgaagccaggggggctcgcgaggaaccgaccgtacagcaggcccagagacgcagcgcagtgttcctgtctttcaaatcccccatcccatgcctgccactgcggtgggagcagcagtccaaattactcccgacggtagcaggcattccggctagcaaggtgtctaagtggagcaccgatgaggtgagtgagttcatccagtccctccccggttgtgaggaacacggcaaggtctttaaagatgaacagattgacggagaagcatttctcttgatgacccagacggatattgtcaagattatgtccattaagctgggcccagctttgaagatcttcaacagcattttaatgtttaaggctgccgagaagaattcgcataacgagctgtag

SEQ ID NO: 224067 - DNA, 2343 bp, Artificial Sequence
  derived and/or modified sequence
atgacggaaagtgcgtccagtacttctggccaggagtttgacgtgtttagtgtaatggattggaaggatggagttggcaccttgcccggatcagatttgaaatttagagtgaatgaatttggggctttggaagttattaccgacgagaatgagatggaaaatgtgaagaaagccacggcgacgactacttggatggtcccaaccgctcaggaggcccctacgtctccacccagctctcgacctgtatttcctccagcttattggacatctcccccaggatgccctacagtcttctcagagaaaaccggaatgccttttagactgaaggatcccgtgaaagtcgaaggactgcagttctgtgaaaactgttgccaatacggcaacgtggatgaatgtctgtcaggagggaactattgtagtcagaattgtgctaggcatatcaaggacaaggatcaaaaagaagagcgcgatgtcgaagaggataatgaagaggaagatccaaagtgttctaggaagaagaaacccaagctgagcttgaaagctgacaccaaggaggacggcgaggagcgagacgacgagatggaaaacaaacaggacgtgcgtatcctgagaggatcccaacgtgcgagacgcaaacgtcgcggtgattctgcagtgctgaagcaaggactcccacccaaaggcaaaaaggcctggtgttgggctagttacctggaagaagaaaaggccgtcgcggtgcctgctaagctattcaaggagcaccagagctttccctacaacaaaaacggtttcaaggttggaatgaaactggaaggtgtggatccagagcaccagagcgtgtactgcgtgctcaccgtcgcagaggtgtgcggttatagaatcaagttacacttcgacgggtattccgattgctatgatttttgggtgaatgcagacgccctggatattcatcctgtcgggtggtgcgaaaagactggccacaaactccaccctcccaaaggttacaaggaagaagaattcaactggcagacttacctgaaaacttgcaaggcccaagccgcacccaaaagcctgtttgaaaatcagaatattacggtgataccatctggttttcgtgtcgggatgaaactggaggctgtggataaaaagaacccttcttttatctgtgtcgcaaccgtcactgatatggttgacaaccgctttctggtgcacttcgacaactgggacgagagctatgattattggtgcgaggcttcctcccctcatatccaccctgtggggtggtgcaaagaacatcgacgcactctcattacaccgccagggtaccccaatgtgaaacacttcagctgggataaatacctggaggagaccaatagtctgccagccccagcacgcgcattcaaagtaaaaccacctcacggatttcaaaaaaaaatgaagcttgaagtcgtggataaaagaaaccctatgttcatacgcgttgccaccgtggcggatacggacgatcatagggtgaaagttcacttcgatgggtggaacaactgctacgactactggatcgatgccgacagtcctgatatccatccagtgggctggtgctctaagacaggtcaccccctgcagccccctctgagccctttggagctaatggaggcgtctgagcacgggggttgctcaacacccggttgtaagggcatcggtcacttcaaaagagcacgacacctgggacctcatagtgccgctaactgcccttactcagagattaacctgaacaaggatagaatctttcctgatcggctgtccggcgagatgccgcctgcatcccctagctttcctcgaaacaagaggacagatgcaaacgaaagctcctcttctcctgagattcgcgatcagcatgcagatgacgtgaaggaggacttcgaagaaaggacagaaagtgagatgaggacgtcacacgaagcgagaggagctagggaggagcctactgtccagcaggctcagcgcaggtcggctgtattcctttcttttaaaagtcccattccgtgcctacccttgcgctgggagcagcagtcgaaactgctgcccacagtggcagggatacctgcatccaaggtaagcaaatggagcacggatgaagtctctgaattcattcaatctctgcctggttgtgaggagcacgggaaagtttttaaggacgagcagatagatggcgaggcctttttgctgatgacgcagacggacattgtcaaaatcatgtccatcaaactgggacctgccctcaagatctttaattctatacttatgtttaaggctgcagaaaagaacagccacaatgagctctag

SEQ ID NO: 224068 - DNA, 573 bp, Artificial Sequence
  derived and/or modified sequence
atgacagagtcggcctcaagcacatcgggacaagagttcgatgtgttctccgtaatggattggaaggacggtgtgggaaccctaccaggaagcgatctcaaattcagggtcaatgagtttggggcactggaagtgatcacggatgaaaatgagatggaaaatgtgaaaaaagcaaccgccactactacatggatggtgccaaccgctcaggaggctccgacctctcctcccagttctagacctgtcttcccgccagcttattggacctccccccctgggtgcccaactgtgttttccgaaaaaacaggcatgcctttcagattgaaggacccggtgaaggtggagggcctccagttctgtgagaattgctgccagtacggcaatgtggatgagtgcctttctgggggaaattattgcagccagaattgcgcaaggcacatcaaagataaagaccagaaggaagaacgagacgtagaggaggacaatgaggaagaagacccaaagtgcagtcgaaagaagaaacccaagctcagcctgaaagcagacacaaaagaagacggggaagagagatag

SEQ ID NO: 224069 - DNA, 2343 bp, Artificial Sequence
  derived and/or modified sequence
atgaccgagagtgcgtcatccacctcaggacaggaattcgacgtgttctccgtaatggactggaaggacggagtaggcactctgcctggctccgatctgaaatttagagtcaatgagtttggggctttggaagttataacagatgaaaacgagatggagaacgtcaaaaaagccactgctactaccacatggatggtgcctaccgctcaggaagctcccacttcccctccctcatccagaccagtttttcctcctgcgtattggacgtcccctccaggatgcccgactgtgttcagtgaaaagacaggtatgccttttcgtttaaaggacccggttaaagtggagggcctgcaattctgcgaaaactgttgtcaatacggaaatgtggatgagtgccttagcggcggaaattattgctctcagaattgtgcaagacatataaaagataaagatcagaaggaggaacgggacgtggaggaagataatgaggaagaggacccgaaatgtagccgcaaaaagaaacctaaactgagcctgaaagcagatacgaaagaagatggcgaagagcgcgatgacgagatggaaaataagcaagacgtgagaatcctgagaggatcccagagagcccgacgtaagcgtagaggagactctgcagttctcaagcagggtctgccccctaagggcaagaaagcctggtgctgggcatcttatttagaggaggaaaaggcggttgcagtccccgcaaaattgttcaaggagcaccagtcttttccatataataaaaacgggtttaaagtgggaatgaaactcgagggggtggaccccgaacaccaaagcgtctactgcgtcctgacggttgcggaggtttgtgggtatcgaatcaaattgcactttgacggctattcagactgctatgacttctgggttaatgctgacgcattagatattcatcctgtgggttggtgtgagaagacaggccacaaattacacccgcctaaggggtacaaagaggaagaattcaattggcagacttacctaaagacctgcaaggcccaggccgctccaaagtccctgtttgaaaaccagaacattactgtcattccctcaggattccgggttggtatgaaattggaggccgtggacaagaagaaccccagttttatctgtgtcgcaacggtgactgatatggtagacaacagattcctggtacattttgacaattgggacgaatcctatgattactggtgcgaggcatcatcccctcacatccacccagttggatggtgcaaagagcaccggcgaacattaatcaccccacccggttatccgaatgtaaagcattttagctgggataaatacttggaggagacgaattctctgcctgcccctgcgagagcttttaaggtcaaacctccccacgggttccaaaagaaaatgaaattggaagtggtggacaagcggaacccgatgtttatccgggtggctaccgtggcagacacggacgatcatcgggtgaaggtccacttcgacgggtggaacaactgctacgattactggatcgacgccgatagtcctgatatacatccagttggctggtgttcgaaaacaggtcacccactccagcctccccttagtcccctggagctaatggaagccagcgagcatggcggatgctcaacaccgggatgtaagggcatcggacatttcaagagggctagacacttgggccctcattccgccgcaaattgtccttactcagagattaacctgaacaaagacagaatttttccagaccggctgtccggcgaaatgccccctgcttcaccttctttcccacgcaataaacggactgatgcgaacgagtctagttctagccctgaaatcagagatcagcacgcagatgatgtgaaggaggacttcgaagaacgaaccgagtccgagatgcggacaagccatgaagctcggggagccagagaagagcctacagtgcagcaggctcagagacggagtgccgtcttcctgtccttcaagagcccaatcccctgtctcccgctgcgttgggaacagcagagcaaattgctgccaaccgttgctgggatccctgcatcaaaagtttctaagtggtctacggatgaagtgagcgagtttattcagtccctaccagggtgcgaagaacacgggaaggttttcaaggatgagcagattgacggagaggcattcctgctgatgacacaaaccgacattgtaaagatcatgagcattaaattaggccctgccctgaaaatttttaattcaattttaatgttcaaggccgctgaaaagaattcccataacgagctctag

SEQ ID NO: 224070 - DNA, 2343 bp, Artificial Sequence
  derived and/or modified sequence
atgaccgagagcgccagcagcaccagcggccaggagttcgacgtgttcagcgtgatggactggaaggacggcgtgggcaccctgcccggcagcgacctgaagttcagagtgaacgagttcggcgccctggaggtgatcaccgacgagaacgagatggagaacgtgaagaaggccaccgccaccaccacctggatggtgcccaccgcccaggaggcccccaccagcccccccagcagcagacccgtgttcccccccgcctactggaccagcccccccggctgccccaccgtgttcagcgagaagaccggcatgcccttcagactgaaggaccccgtgaaggtggagggcctgcagttctgcgagaactgctgccagtacggcaacgtggacgagtgcctgagcggcggcaactactgcagccagaactgcgccagacacatcaaggacaaggaccagaaggaggagagagacgtggaggaggacaacgaggaggaggaccccaagtgcagcagaaagaagaagcccaagctgagcctgaaggccgacaccaaggaggacggcgaggagagagacgacgagatggagaacaagcaggacgtgagaatcctgagaggcagccagagagccagaagaaagagaagaggcgacagcgccgtgctgaagcagggcctgccccccaagggcaagaaggcctggtgctgggccagctacctggaggaggagaaggccgtggccgtgcccgccaagctgttcaaggagcaccagagcttcccctacaacaagaacggcttcaaggtgggcatgaagctggagggcgtggaccccgagcaccagagcgtgtactgcgtgctgaccgtggccgaggtgtgcggctacagaatcaagctgcacttcgacggctacagcgactgctacgacttctgggtgaacgccgacgccctggacatccaccccgtgggctggtgcgagaagaccggccacaagctgcacccccccaagggctacaaggaggaggagttcaactggcagacctacctgaagacctgcaaggcccaggccgcccccaagagcctgttcgagaaccagaacatcaccgtgatccccagcggcttcagagtgggcatgaagctggaggccgtggacaagaagaaccccagcttcatctgcgtggccaccgtgaccgacatggtggacaacagattcctggtgcacttcgacaactgggacgagagctacgactactggtgcgaggccagcagcccccacatccaccccgtgggctggtgcaaggagcacagaagaaccctgatcaccccccccggctaccccaacgtgaagcacttcagctgggacaagtacctggaggagaccaacagcctgcccgcccccgccagagccttcaaggtgaagcccccccacggcttccagaagaagatgaagctggaggtggtggacaagagaaaccccatgttcatcagagtggccaccgtggccgacaccgacgaccacagagtgaaggtgcacttcgacggctggaacaactgctacgactactggatcgacgccgacagccccgacatccaccccgtgggctggtgcagcaagaccggccaccccctgcagccccccctgagccccctggagctgatggaggccagcgagcacggcggctgcagcacccccggctgcaagggcatcggccacttcaagagagccagacacctgggcccccacagcgccgccaactgcccctacagcgagatcaacctgaacaaggacagaatcttccccgacagactgagcggcgagatgccccccgccagccccagcttccccagaaacaagagaaccgacgccaacgagagcagcagcagccccgagatcagagaccagcacgccgacgacgtgaaggaggacttcgaggagagaaccgagagcgagatgagaaccagccacgaggccagaggcgccagagaggagcccaccgtgcagcaggcccagagaagaagcgccgtgttcctgagcttcaagagccccatcccctgcctgcccctgagatgggagcagcagagcaagctgctgcccaccgtggccggcatccccgccagcaaggtgagcaagtggagcaccgacgaggtgagcgagttcatccagagcctgcccggctgcgaggagcacggcaaggtgttcaaggacgagcagatcgacggcgaggccttcctgctgatgacccagaccgacatcgtgaagatcatgagcatcaagctgggccccgccctgaagatcttcaacagcatcctgatgttcaaggccgccgagaagaacagccacaacgagctgtag

SEQ ID NO: 224071 - DNA, 573 bp, Artificial Sequence
  derived and/or modified sequence
atgaccgagagcgccagcagcaccagcggccaggagttcgacgtgttcagcgtgatggactggaaggacggcgtgggcaccctgcccggcagcgacctgaagttcagagtgaacgagttcggcgccctggaggtgatcaccgacgagaacgagatggagaacgtgaagaaggccaccgccaccaccacctggatggtgcccaccgcccaggaggcccccaccagcccccccagcagcagacccgtgttcccccccgcctactggaccagcccccccggctgccccaccgtgttcagcgagaagaccggcatgcccttcagactgaaggaccccgtgaaggtggagggcctgcagttctgcgagaactgctgccagtacggcaacgtggacgagtgcctgagcggcggcaactactgcagccagaactgcgccagacacatcaaggacaaggaccagaaggaggagagagacgtggaggaggacaacgaggaggaggaccccaagtgcagcagaaagaagaagcccaagctgagcctgaaggccgacaccaaggaggacggcgaggagagatag

SEQ ID NO: 224072 - protein, 433 aa, Artificial Sequence
  derived and/or modified sequence
MQRMIQQFAAEYTSKNSSTQDPSQPNSTKNQSLPKASPVTTSPTAATTQNPVLSKLLMADQDSPLDLTVRKSQSEPSEQDGVLDLSTKKSPCAGSTSLSHSPGCSSTQGNGRPGRPSQYRPDGLRSGDGVPPRSLQDGTREGFGHSTSLKVPLARSLQISEELLSRNQLSTAASLGPSGLQNHGQHLILSREASWAKPHYEFNLSRMKFRGNGALSNISDLPFLAENSAFPKMALQAKQDGKKDVSHSSPVDLKIPQVRGMDLSWESRTGDQYSYSSLVMGSQTESALSKKLRAILPKQSRKSMLDAGPDSWGSDAEQSTSGQPYPTSDQEGDPGSKQPRKKRGRYRQYNSEILEEAISVVMSGKMSVSKAQSIYGIPHSTLEYKVKERLGTLKNPPKKKMKLMRSEGPDVSVKIELDPQGEAAQSANESKNE

SEQ ID NO: 224073 - DNA, 1302 bp, Artificial Sequence
  derived and/or modified sequence
atgcagcgaatgatccagcagtttgccgccgagtacacgtctaagaacagctctacccaggacccatcccaaccaaacagcacaaaaaaccagtcactccctaaggccagtccagttactacctctccaaccgctgcaacaacacaaaaccctgtattatcaaagcttctgatggcagaccaggattctccactggacctcacggtgaggaaatcccagtctgaaccatccgaacaggatggggtgctcgacctgagcacaaagaagagcccgtgtgctgggagcaccagcctgtcacactcacccggctgtagcagtacccaggggaacggacgccccggccgtccttctcagtatcggccagacgggctgcgcagtggagatggagttcccccacgaagtctacaggacggtactcgtgagggatttggtcactctacctccttgaaggtgccccttgccagatcactgcagatcagcgaggaactgctatcaagaaatcagctgtcgaccgcagcttccctaggccctagcgggctgcaaaaccatggtcaacacctcattttgagccgcgaggcctcctgggccaagccccactatgaatttaacctttcccgcatgaagttcaggggaaatggggcgctgagtaatatcagcgacctgccctttctcgccgaaaactcagcttttcccaagatggccttgcaggccaagcaagacggcaagaaagatgtctcccatagctccccagtcgacctcaagatacctcaagtacgaggcatggacctgtcatgggaaagtaggaccggtgaccagtactcttattcttctctcgttatggggtcgcaaacagaaagtgcactctctaagaagttacgcgcaatcctgcccaagcaaagcaggaagtctatgctcgacgctgggcctgattcctggggatcggacgctgagcagagcacttccggacagccttatcccacatccgatcaggagggggatcctgggtcaaaacaacctagaaaaaaaagaggtagatataggcagtacaacagcgaaattctggaagaggctattagtgttgtgatgtcagggaagatgtcagtgtcaaaggcccagtccatttatggaatcccacactccaccttagagtacaaagtgaaagagagactcggcaccctgaagaatcctcctaaaaaaaaaatgaaactgatgcgtagtgaaggccctgacgtctccgtaaaaatcgagctggacccgcaaggtgaggccgcacagtcagcaaatgaaagcaagaacgaatag

SEQ ID NO: 224074 - DNA, 1302 bp, Artificial Sequence
  derived and/or modified sequence
atgcagagaatgattcagcagtttgccgcagaatatacttcaaaaaacagcagcacccaggacccatcccagcctaacagtacaaagaatcagtccttacctaaagcgagtcctgtcaccaccagccctaccgcagccacgactcaaaaccctgtcttgtccaaactattaatggcagaccaggacagcccccttgacctgaccgtgcggaagtcacagtctgaaccgtctgagcaggacggcgttctggacttgtctaccaagaaaagcccttgcgccgggagcactagcctgtcacactcccccggatgtagtagcacacaaggcaatggccgcccaggtaggccctcacagtatagacctgatggactcaggagcggggatggggtcccacccagaagcctgcaggacggtaccagggaaggctttgggcactccacaagcctaaaggtcccgctggcacggtcactgcagatatccgaagaactcctgtccagaaaccagcttagcaccgcagcctctttgggcccctcaggacttcagaatcacggtcagcacctgattctgagccgggaggcatcttgggccaaaccacattacgagttcaatctgagtcgcatgaagtttcgcggaaacggtgctctcagcaacatttcagacttgccatttctggcagagaattccgcttttccaaagatggccttacaagccaaacaagacggcaaaaaagacgtgagccattcctctcccgtggacctgaagatccctcaagttagaggaatggatttgagttgggagagtaggacaggtgatcagtacagttatagttcactcgtcatggggagccagaccgaaagcgctctaagtaaaaagctgcgtgctatattgcccaagcagtcacgcaagtcaatgttggatgccggccccgatagctggggttccgatgcagagcagagtacttccggccagccgtaccccacatcagaccaagaaggagatcctggcagtaaacaacctcggaaaaagcggggccgttaccgacagtacaactccgagatcttggaggaggcgatttcagtggtgatgagcgggaagatgagcgtctcaaaagcccaatccatttacggcatccctcacagcacacttgagtacaaagtgaaggagcggctgggaacgctcaagaacccccctaagaagaagatgaagctgatgcggtcagaaggtcccgacgtcagcgttaaaatcgaattagatccacagggagaggcggctcagtccgccaatgagtccaagaatgagtag

SEQ ID NO: 224075 - DNA, 1302 bp, Artificial Sequence
  derived and/or modified sequence
atgcagagaatgatccaacagtttgctgccgaatatacgtctaagaactcatctactcaagatccctctcagcctaacagtacgaagaatcagtctctgcctaaagcctccccagtaaccaccagcccaacagccgcgacaacgcaaaatccagtcctctctaagctgcttatggctgatcaggactccccgctggacctgaccgtgaggaaatctcagagtgagcccagcgagcaagatggggtgctggatcttagcacaaaaaaatctccatgtgccggatccacgagtctgtcccacagtcccggctgctccagcacacaagggaacgggcgccctggacggccaagtcagtataggcctgatggcctcaggtcaggtgacggggtcccccctaggtccctgcaagacggaactagagagggcttcgggcacagcacgagtctgaaagtaccactggccagaagcctccagatcagtgaggaactgctgtctaggaatcaactgtccaccgccgcaagcctgggcccgtcagggctgcagaatcacgggcagcatctcattctgtcgcgcgaagcatcgtgggccaagccccattacgaattcaatttaagtcgaatgaaattccgtggcaacggcgctttgtctaatatttcagacctcccctttctggcggagaacagtgcatttccgaaaatggcgcttcaggcgaaacaagatggtaaaaaggacgttagccactcatccccagtagatctcaaaatcccccaggttcggggaatggatttgagttgggagtctcgtactggagatcagtacagctatagcagcctggtgatggggagtcagaccgaatctgccctgtctaaaaaactgagggccatcctgcctaagcagtcccgtaagagtatgctggatgccgggccggacagctggggcagcgacgctgaacagagtacttctggtcaaccttatcccaccagcgaccaggagggcgaccccgggtctaagcagcctagaaagaaacggggacgctacagacaatataattctgaaatccttgaggaagccatctcagtagtgatgagtggtaaaatgagcgtctccaaggcccagtccatttacgggataccccacagtacgctggaatacaaagtgaaggagcggctcggaacactcaagaatccaccgaagaaaaagatgaagctcatgcgctcagaagggcctgatgtgagtgtcaaaatcgaattggatccgcagggcgaggcagcacaatctgccaatgaatccaagaacgaatag

SEQ ID NO: 224076 - DNA, 1302 bp, Artificial Sequence
  derived and/or modified sequence
atgcagaggatgatccagcagtttgctgctgagtacaccagcaagaacagcagcacccaggaccccagccagcccaacagcaccaagaaccagagcctgcccaaggccagccctgtgaccaccagccccacagctgccaccacccagaaccctgtgctgagcaagctgctgatggctgaccaggacagccccctggacctgactgtgaggaagagccagagcgagcccagcgagcaggatggagtgctggacctgagcaccaagaagagcccctgtgccggcagcaccagcctgagccacagccctggctgcagcagcacccagggcaatggccggcccggccggcccagccagtacagaccagatggcctgcggtctggagatggagtgcccccaagaagcctgcaggacggcacccgggagggcttcggccacagcaccagcctgaaggtgcccctggcccggagcctgcagatcagcgaggagctgctgagcaggaaccagctgagcacagctgccagcctgggccccagcggcctgcagaaccacggccagcacctgatcctgagccgggaggcctcctgggccaagccccactatgagttcaacctgagcaggatgaagttcagaggaaatggagccctgagcaacatcagtgacctgcccttcctggccgagaacagcgccttccccaagatggccctgcaggccaagcaggacggcaagaaggatgtgagccacagcagccctgtggacctgaagatcccccaggtgcggggcatggacctgtcctgggagagcaggactggagaccagtacagctacagcagcctggtgatgggcagccagacagagagcgccctgagcaagaagctgcgggccatcctgcccaagcagagcaggaagtccatgctggatgctggccctgacagctggggcagtgatgctgagcagagcaccagcggccagccctaccccaccagtgaccaggagggggaccccggcagcaagcagcccaggaagaagaggggccgctaccggcagtacaacagcgagatcctggaggaggccatctctgtggtgatgtctgggaagatgtctgtgtccaaggcccagagcatctacggcatcccccacagcaccctggagtacaaggtgaaggagcggctgggcaccctgaagaacccccccaagaagaagatgaagctgatgaggtctgagggcccagatgtgtctgtgaagattgagctggacccccagggcgaggccgcccagagcgccaatgaaagcaagaatgaatag

SEQ ID NO: 224077 - DNA, 1302 bp, Artificial Sequence
  derived and/or modified sequence
atgcagcggatgatccagcagttcgccgccgagtacaccagcaagaacagcagcactcaggatcctagtcagcccaatagcacaaagaaccaatcgctgccgaaggcttcccccgtcacaaccagcccgacagcagctacaacacagaatccggtgctgtcgaaactgctaatggcagatcaggacagccccctcgatctgaccgtacgaaaatcccagagcgaaccctctgagcaggacggcgtgttggacctttccaccaagaagagcccttgtgctggaagtacttcgttaagtcacagccctggttgctctagcactcagggtaacggacggcccggccggccatctcagtaccgaccagacggtctgcggagtggggacggcgtacctccacgctcccttcaggacggcacccgtgaggggttcgggcatagcacatcactaaaggtgcccctcgcaaggtctctgcagatttctgaggagttactgagccgtaatcagctctcaaccgctgcaagcctcgggccttcgggactgcagaaccacggacagcatcttatcctcagccgggaagcttcttgggcaaagcctcactacgagtttaacctgtcacgcatgaaatttaggggaaacggtgctttgtcaaacataagtgatctgccgtttctcgctgagaatagtgccttcccaaagatggctttgcaggcaaagcaagacggaaagaaagatgtatcccactccagccccgtggacctgaagatcccccaagttagggggatggatctcagttgggaatctaggacaggcgaccagtattcttacagttcgcttgtcatgggctctcagaccgaaagtgcacttagtaagaaactaagggccattctgcccaaacagtcccgtaagtctatgttggacgcaggccccgactcctgggggtccgatgccgagcagagcactagtggccagccctatcccacaagcgatcaagaaggcgatccaggaagtaaacagcctaggaaaaagagagggagataccggcagtataactctgagattctggaagaggcaatcagcgtggtaatgtctggaaagatgtctgtgtcaaaagcacagagcatctatggcataccccatagcaccttggagtacaaggtcaaagaacgcctaggaacgctcaagaacccacctaagaagaaaatgaagctcatgcgaagcgagggccccgatgtaagtgttaagatcgaactcgacccccagggggaagccgcgcaatccgcaaatgagagcaagaatgagtag

SEQ ID NO: 224078 - DNA, 1302 bp, Artificial Sequence
  derived and/or modified sequence
atgcagcggatgatccagcagttcgccgccgagtacaccagcaagaattcatctactcaagatccgtcacagcccaactccacgaagaatcagtccttaccgaaggcatcccccgtgactacaagccctaccgctgctaccacacagaacccagtcctcagtaaactcctgatggctgaccaggattcccccttggatttgactgtccgaaaaagtcagtctgaaccttccgagcaggatggtgtactggatctgtctacaaagaaatcgccctgcgctggcagtaccagcctatcccatagtccaggctgtagttctacacaaggtaacgggcgacccgggcgaccttctcagtataggcccgacggactgaggtcaggcgatggcgtgccacccaggagtttgcaggatgggacccgtgaaggtttcggccactctacttctctgaaagtacctctggcccgcagcttgcagatctccgaggagctgctctccaggaatcagctgagcacagccgcctccctgggaccgagtggtttgcaaaatcacggacaacatctgattctgtcccgggaggcctcatgggctaagccgcattacgagttcaatctcagccgcatgaaattccggggcaacggcgctctctcgaatatctcagatctgccctttctggccgagaatagcgcttttccaaagatggccttgcaggcaaagcaggacgggaaaaaggatgttagccactcatctcctgtggatctgaagataccacaagtccgggggatggacctgagctgggaatcccggacaggggatcaatactcctatagcagcctcgtaatgggttcccagacagaaagtgccctcagtaagaagcttcgcgccattctgcccaagcagtcccgtaagtccatgctggatgctggccctgatagttggggttccgatgcggaacaatcgactagcggtcaaccttatcctacgtcagaccaggaaggagaccccggcagcaaacagcctcgcaagaagagggggcggtatagacagtacaactccgaaatccttgaggaggccatttcagtcgtcatgtccggcaagatgagtgtcagcaaggctcaaagcatatatggtatcccgcattccaccttagaatacaaagtcaaggaaaggctcggaacacttaagaacccaccaaaaaaaaagatgaagctcatgaggtcagaaggccctgacgtctcagtcaagatcgagcttgacccccaaggggaggcggcccagagcgcaaacgaatcaaaaaatgagtag

SEQ ID NO: 224079 - DNA, 1302 bp, Artificial Sequence
  derived and/or modified sequence
atgcagcggatgatccagcagttcgccgccgagtacaccagcaagaattcctcaacgcaggacccgagccagcctaactctacaaagaatcagtcgctgccaaaagcctcgcctgtaaccacatcacctactgccgctactacccaaaaccccgttctcagtaagcttctgatggccgaccaggattccccattagacttaactgttcggaaatcacagtccgagcccagcgagcaggatggggtactcgacctgtcaaccaaaaaatcaccatgcgcagggtccacaagtctttcccattcccctggctgtagttccacccagggtaatgggagaccaggacggccttctcagtaccggccggacggactacgaagcggggacggcgtcccgccacgctcacttcaagacggcacaagagaaggcttcggacatagcacatctttaaaggttccacttgcacgctcactgcaaatttcagaggagctgctctcccggaaccagctctcaactgctgccagcctaggtccaagcggcctgcagaatcatggtcagcaccttattctgtctagggaagcttcctgggcaaagcctcattatgagttcaatctctcccgcatgaaattcaggggcaatggcgccctatccaatatttctgacctgcctttcttggccgagaatagcgcctttccaaagatggcactccaggcaaagcaggatggtaagaaagacgtctcccactccagccctgtcgatctcaagatacctcaagtgaggggaatggatctgtcctgggaatccagaaccggggatcagtacagttatagcagtctggtgatgggaagccagacggagagcgcgctcagtaagaagctgagagcaattcttcccaaacagtctcgcaagagcatgctcgacgcagggcccgactcctggggtagtgatgcagagcagtctacctctggacaaccataccccacttcagaccaggagggagacccaggcagcaaacagcccagaaaaaagcgtggaagatatcggcaatataatagcgaaatcctagaagaggcaatttccgtggtgatgtccgggaagatgtcagtgtccaaggctcagagcatctatggcataccccactccacactcgaatacaaggttaaggaacgcctcggcactctcaaaaatccccctaagaagaagatgaagctgatgagatcagagggtccagacgtgtccgtaaagattgaactcgacccacagggcgaagcagcacagtctgctaacgagagcaagaatgagtag

SEQ ID NO: 224080 - DNA, 1302 bp, Artificial Sequence
  derived and/or modified sequence
atgcaacggatgatacagcagtttgcagccgagtatacttccaaaaacagtagcacgcaggatcccagtcagccgaatagcaccaagaatcagtctctgccgaaagcctcccctgttactacatccccaactgccgcaacaactcaaaacccagtgttgagcaagctgctcatggcagatcaggattcacccttggatctcactgtgcggaaatctcagagcgagcctagcgaacaggacggcgttttggacctatcaaccaaaaaatccccatgtgctggctcaacgagtctgagccactctcccggatgttcgagcacccaagggaacgggagacctggacggccaagccagtacagaccagacggcctgagaagtggagacggggtcccaccaaggagtctgcaggatggaaccagagagggcttcggccactcaacctccctgaaggtgccactggctcggagcctccagattagcgaggaattgcttagcaggaaccagctctctactgctgcctccttaggaccatccgggttgcagaatcacgggcagcatctgattctttctagggaagctagttgggcaaagcctcactatgagtttaatctctctaggatgaaatttagaggcaacggtgcgcttagcaacatttcagatttacctttcctggcagagaacagtgcctttcccaagatggctcttcaagccaagcaggacggtaagaaagatgtaagccacagctctccagtagacctcaagatcccccaggtgaggggtatggatctctcgtgggaatcacggactggggaccagtattcatattcaagcctagttatgggctcacagactgagtctgccttatccaagaagctacgagcaatcttgccgaagcaatcacgcaagagcatgctcgatgctggtcctgatagctggggttccgacgcagaacagtccacctccggacagccatatcccacatccgatcaggagggggacccgggatctaagcagcccaggaagaagcggggtaggtatagacaatacaactccgagatactagaagaggccatttccgtggtcatgtcaggaaagatgtccgtgtctaaagctcaatctatttatggcatcccacactctactctggaatataaggtgaaagaacgccttggcactctgaaaaatccacctaagaaaaaaatgaaacttatgcgctcggaaggccctgatgtcagcgtcaaaatagagcttgaccctcagggagaggcagcccagtctgccaatgaatccaagaatgagtag

SEQ ID NO: 224081 - DNA, 1302 bp, Artificial Sequence
  derived and/or modified sequence
atgcagaggatgatccagcaatttgcagcggagtacacgagcaaaaattcttcaacccaggatccatctcagccaaactcgactaaaaatcagtcactgccaaaggccagcccagtgaccacctcccccacagccgcaacgactcagaacccagtgttgagtaaactgttgatggctgatcaggattcacctcttgatcttacggtaaggaaatctcagtctgagccttcagagcaagacggcgtgcttgatctctctaccaaaaagtcgccatgtgcaggcagtacaagtctgtcgcactcccctggctgttcaagtacacaaggcaacggcagaccgggaaggccttcccagtatcgccctgatggactcagaagcggtgatggtgttccacctagatcgctgcaggacggcacccgtgagggctttggccacagcacatctcttaaggtcccccttgcacgcagcttgcaaatcagcgaggaacttctttcgaggaatcagctgtctacagccgctagtctcggcccttctggcctgcagaatcacggccagcatctcattctttccagagaggcatcctgggcaaaaccacactatgagtttaacttatctaggatgaagttccgcggtaacggtgccctaagcaacatcagcgatctgccttttctagcagaaaattccgcttttcccaagatggctttgcaagccaagcaggacggaaaaaaggacgtgagtcactcttcgccagtggacctgaagatccctcaggtaagaggaatggatttaagctgggagtcccgcactggcgaccagtactcttactcctctctggtgatgggctcacaaactgaaagtgctttgtcgaaaaagctcagggcaattctcccgaaacaatcccgcaaatccatgctcgacgccggacctgattcctgggggtcggatgctgagcaatctacgtctggacagccttatccgacttctgatcaggaaggggacccaggttccaagcagccccgaaaaaagaggggaaggtaccgtcaatacaactcagagattctggaggaggctatttcagtcgtgatgtccggaaaaatgtctgtctccaaggctcaatcaatttacggaataccccactcaacactggagtataaagtcaaagaacgactcggaacactgaagaaccccccaaagaagaaaatgaagttaatgcggagcgagggcccagacgtgtctgtgaagattgaattggatccgcagggggaagcagcacagagcgctaatgagtccaaaaacgagtag

SEQ ID NO: 224082 - DNA, 1302 bp, Artificial Sequence
  derived and/or modified sequence
atgcaacggatgatacagcagtttgccgctgagtacaccagcaaaaatagcagcacccaagatccttcacagcctaactcaactaagaatcagtccctgccaaaagcttcccccgtgacaacctcccccactgctgcaaccacgcagaatcccgttctttccaaattgctgatggccgaccaggactcaccgcttgacctgaccgtgcgaaaatcacagagcgagccctcagaacaggatggagtgctagacttatcaaccaagaagagcccgtgcgcagggtctacgtccctgtctcatagtcctggatgcagtagcacgcaaggcaacgggaggccagggaggccgagccaatacaggcccgatggacttcgcagcggggacggggtcccacctcgaagtctgcaggacgggacaagggagggtttcgggcacagcactagcttgaaagtacctcttgctcgctccctgcagatttccgaggaacttttaagtcgaaatcaacttagcaccgctgcaagcctcggacccagcggcctgcagaatcacgggcagcacctgatactcagtagagaggcctcctgggccaaacctcattacgaattcaatctgtcccgcatgaagtttcgcggaaacggtgcactgtctaacatctctgacttgccgtttctggccgagaattccgccttccccaagatggccctgcaggccaaacaggacggcaaaaaagatgtatctcattcgagcccagtcgatctaaagataccgcaggtgcgcggtatggacctgtcatgggaaagtagaacaggggatcagtatagttatagtagcctggtcatgggatcgcaaacagaatcagcgctgtcaaagaaactccgagcgatcttgccgaagcaatcgcgcaagtcaatgctggatgccggaccagatagctggggatctgacgccgaacagtcaacaagcggtcagccttatccaaccagcgaccaggaaggcgatcctggctccaagcagccacgcaagaagcgtggacgctatagacagtacaactccgagattttagaggaggccatctcagtggtcatgagcggcaaaatgagcgtatcgaaggctcaaagcatttatggcattccccattcgaccctggagtacaaggtcaaggaaagactggggacgctgaagaatcctcccaagaaaaaaatgaagctgatgcgctccgagggccctgacgtctctgtaaaaattgagctggatccccaaggggaagctgcccagtcagctaacgaatctaagaacgagtag

SEQ ID NO: 224083 - DNA, 1302 bp, Artificial Sequence
  derived and/or modified sequence
atgcagagaatgatccagcagttcgccgccgagtacaccagcaagaacagcagcacccaggaccccagccagcccaacagcaccaagaaccagagcctgcccaaggccagccccgtgaccaccagccccaccgccgccaccacccagaaccccgtgctgagcaagctgctgatggccgaccaggacagccccctggacctgaccgtgagaaagagccagagcgagcccagcgagcaggacggcgtgctggacctgagcaccaagaagagcccctgcgccggcagcaccagcctgagccacagccccggctgcagcagcacccagggcaacggcagacccggcagacccagccagtacagacccgacggcctgagaagcggcgacggcgtgccccccagaagcctgcaggacggcaccagagagggcttcggccacagcaccagcctgaaggtgcccctggccagaagcctgcagatcagcgaggagctgctgagcagaaaccagctgagcaccgccgccagcctgggccccagcggcctgcagaaccacggccagcacctgatcctgagcagagaggccagctgggccaagccccactacgagttcaacctgagcagaatgaagttcagaggcaacggcgccctgagcaacatcagcgacctgcccttcctggccgagaacagcgccttccccaagatggccctgcaggccaagcaggacggcaagaaggacgtgagccacagcagccccgtggacctgaagatcccccaggtgagaggcatggacctgagctgggagagcagaaccggcgaccagtacagctacagcagcctggtgatgggcagccagaccgagagcgccctgagcaagaagctgagagccatcctgcccaagcagagcagaaagagcatgctggacgccggccccgacagctggggcagcgacgccgagcagagcaccagcggccagccctaccccaccagcgaccaggagggcgaccccggcagcaagcagcccagaaagaagagaggcagatacagacagtacaacagcgagatcctggaggaggccatcagcgtggtgatgagcggcaagatgagcgtgagcaaggcccagagcatctacggcatcccccacagcaccctggagtacaaggtgaaggagagactgggcaccctgaagaacccccccaagaagaagatgaagctgatgagaagcgagggccccgacgtgagcgtgaagatcgagctggacccccagggcgaggccgcccagagcgccaacgagagcaagaacgagtag

SEQ ID NO: 224084 - protein, 1834 aa, Artificial Sequence
  derived and/or modified sequence
MKLSVNEAQLGFYLGSLSHLSACPGIDPRSSEDQPESLKTGQMMDESDEDFKELCASFFQRVKKHGIKEVSGERKTQKAASNGTQIRSKLKRTKQTATKTKTLQGPAEKKPPSGSQAPRTKKQRVTKWQASEPAHSVNGEGGVLASAPDPPVLRETAQNTQTGNQQEPSPNLSREKTRENVPNSDSQPPPSCLTTAVPSPSKPRTAQLVLQRMQQFKRADPERLRHASEECSLEAAREENVPKDPQEEMMAGNVYGLGPPAPESDAAVALTLQQEFARVGASAHDDSLEEKGLFFCQICQKNLSAMNVTRREQHVNRCLDEAEKTLRPSVPQIPECPICGKPFLTLKSRTSHLKQCAVKMEVGPQLLLQAVRLQTAQPEGSSSPPMFSFSDHSRGLKRRGPTSKKEPRKRRKVDEAPSEDLLVAMALSRSEMEPGAAVPALRLESAFSERIRPEAENKSRKKKPPVSPPLLLVQDSETTGRQIEDRVALLLSEEVELSSTPPLPASRILKEGWERAGQCPPPPERKQSFLWEGSALTGAWAMEDFYTARLVPPLVPQRPAQGLMQEPVPPLVPPEHSELSERRSPALHGTPTAGCGSRGPSPSASQREHQALQDLVDLAREGLSASPWPGSGGLAGSEGTAGLDVVPGGLPLTGFVVPSQDKHPDRGGRTLLSLGLLVADFGAMVNNPHLSDVQFQTDSGEVLYAHKFVLYARCPLLIQYVNNEGFSAVEDGVLTQRVLLGDVSTEAARTFLHYLYTADTGLPPGLSSELSSLAHRFGVSELVHLCEQVPIATDSEGKPWEEKEAENCESRAENFQELLRSMWADEEEEAETLLKSKDHEEDQENVNEAEMEEIYEFAATQRKLLQEERAAGAGEDADWLEGGSPVSGQLLAGVQVQKQWDKVEEMEPLEPGRDEAATTWEKMGQCALPPPQGQHSGARGAEAPEQEAPEEALGHSSCSSPSRDCQAERKEGSLPHSDDAGDYEQLFSSTQGEISEPSQITSEPEEQSGAVRERGLEVSHRLAPWQASPPHPCRFLLGPPQGGSPRGSHHTSGSSLSTPRSRGGTSQVGSPTLLSPAVPSKQKRDRSILTLSKEPGHQKGKERRSVLECRNKGVLMFPEKSPSIDLTQSNPDHSSSRSQKSSSKLNEEDEVILLLDSDEELELEQTKMKSISSDPLEEKKALEISPRSCELFSIIDVDADQEPSQSPPRSEAVLQQEDEGALPENRGSLGRRGAPWLFCDRESSPSEASTTDTSWLVPATPLASRSRDCSSQTQISSLRSGLAVQAVTQHTPRASVGNREGNEVAQKFSVIRPQTPPPQTPSSCLTPVSPGTSDGRRQGHRSPSRPHPGGHPHSSPLAPHPISGDRAHFSRRFLKHSPPGPSFLNQTPAGEVVEVGDSDDEQEVASHQANRSPPLDSDPPIPIDDCCWHMEPLSPIPIDHWNLERTGPLSTSSPSRRMNEAADSRDCRSPGLLDTTPIRGSCTTQRKLQEKSSGAGSLGNSRPSFLNSALWDVWDGEEQRPPETPPPAQMPSAGGAQKPEGLETPKGANRKKNLPPKVPITPMPQYSIMETPVLKKELDRFGVRPLPKRQMVLKLKEIFQYTHQTLDSDSEDESQSSQPLLQAPHCQTLASQTYKPSRAGVHAQQEATTGPGAHRPKGPAKTKGPRHQRKHHESITPPSRSPTKEAPPGLNDDAQIPASQESVATSVDGSDSSLSSQSSSSCEFGAAFESAGEEEGEGEVSASQAAVQAADTDEALRCYIRSKPALYQKVLLYQPFELRELQAELRQNGLRVSSRRLLDFLDTHCITFTTAATRREKLQGRRRQPRGKKKVERN

SEQ ID NO: 224085 - DNA, 5505 bp, Artificial Sequence
  derived and/or modified sequence
atgaagctgagcgtgaacgaggcccagctgggcttctacctgggcagcctgagccacctgagcgcctgccccggcatcgaccccagaagcagcgaggaccagcccgagagcctgaagaccggccagatgatggacgagagcgacgaggacttcaaggagctgtgcgccagcttcttccagagagtgaagaagcacggcatcaaggaggtgagcggcgagagaaagacccagaaggccgccagcaacggcacccagatcagaagcaagctgaagagaaccaagcagaccgccaccaagaccaagaccctgcagggccccgccgagaagaagccccccagcggcagccaggcccccagaaccaagaagcagagagtgaccaagtggcaggccagcgagcccgcccacagcgtgaacggcgagggcggcgtgctggccagcgcccccgacccccccgtgctgagagagaccgcccagaacacccagaccggcaaccagcaggagcccagccccaacctgagcagagagaagaccagagagaacgtgcccaacagcgacagccagcccccccccagctgcctgaccaccgccgtgcccagccccagcaagcccagaaccgcccagctggtgctgcagagaatgcagcagttcaagagagccgaccccgagagactgagacacgccagcgaggagtgcagcctggaggccgccagagaggagaacgtgcccaaggacccccaggaggagatgatggccggcaacgtgtacggcctgggcccccccgcccccgagagcgacgccgccgtggccctgaccctgcagcaggagttcgccagagtgggcgccagcgcccacgacgacagcctggaggagaagggcctgttcttctgccagatctgccagaagaacctgagcgccatgaacgtgaccagaagagagcagcacgtgaacagatgcctggacgaggccgagaagaccctgagacccagcgtgccccagatccccgagtgccccatctgcggcaagcccttcctgaccctgaagagcagaaccagccacctgaagcagtgcgccgtgaagatggaggtgggcccccagctgctgctgcaggccgtgagactgcagaccgcccagcccgagggcagcagcagcccccccatgttcagcttcagcgaccacagcagaggcctgaagagaagaggccccaccagcaagaaggagcccagaaagagaagaaaggtggacgaggcccccagcgaggacctgctggtggccatggccctgagcagaagcgagatggagcccggcgccgccgtgcccgccctgagactggagagcgccttcagcgagagaatcagacccgaggccgagaacaagagcagaaagaagaagccccccgtgagcccccccctgctgctggtgcaggacagcgagaccaccggcagacagatcgaggacagagtggccctgctgctgagcgaggaggtggagctgagcagcaccccccccctgcccgccagcagaatcctgaaggagggctgggagagagccggccagtgcccccccccccccgagagaaagcagagcttcctgtgggagggcagcgccctgaccggcgcctgggccatggaggacttctacaccgccagactggtgccccccctggtgccccagagacccgcccagggcctgatgcaggagcccgtgccccccctggtgccccccgagcacagcgagctgagcgagagaagaagccccgccctgcacggcacccccaccgccggctgcggcagcagaggccccagccccagcgccagccagagagagcaccaggccctgcaggacctggtggacctggccagagagggcctgagcgccagcccctggcccggcagcggcggcctggccggcagcgagggcaccgccggcctggacgtggtgcccggcggcctgcccctgaccggcttcgtggtgcccagccaggacaagcaccccgacagaggcggcagaaccctgctgagcctgggcctgctggtggccgacttcggcgccatggtgaacaacccccacctgagcgacgtgcagttccagaccgacagcggcgaggtgctgtacgcccacaagttcgtgctgtacgccagatgccccctgctgatccagtacgtgaacaacgagggcttcagcgccgtggaggacggcgtgctgacccagagagtgctgctgggcgacgtgagcaccgaggccgccagaaccttcctgcactacctgtacaccgccgacaccggcctgccccccggcctgagcagcgagctgagcagcctggcccacagattcggcgtgagcgagctggtgcacctgtgcgagcaggtgcccatcgccaccgacagcgagggcaagccctgggaggagaaggaggccgagaactgcgagagcagagccgagaacttccaggagctgctgagaagcatgtgggccgacgaggaggaggaggccgagaccctgctgaagagcaaggaccacgaggaggaccaggagaacgtgaacgaggccgagatggaggagatctacgagttcgccgccacccagagaaagctgctgcaggaggagagagccgccggcgccggcgaggacgccgactggctggagggcggcagccccgtgagcggccagctgctggccggcgtgcaggtgcagaagcagtgggacaaggtggaggagatggagcccctggagcccggcagagacgaggccgccaccacctgggagaagatgggccagtgcgccctgccccccccccagggccagcacagcggcgccagaggcgccgaggcccccgagcaggaggcccccgaggaggccctgggccacagcagctgcagcagccccagcagagactgccaggccgagagaaaggagggcagcctgccccacagcgacgacgccggcgactacgagcagctgttcagcagcacccagggcgagatcagcgagcccagccagatcaccagcgagcccgaggagcagagcggcgccgtgagagagagaggcctggaggtgagccacagactggccccctggcaggccagccccccccacccctgcagattcctgctgggccccccccagggcggcagccccagaggcagccaccacaccagcggcagcagcctgagcacccccagaagcagaggcggcaccagccaggtgggcagccccaccctgctgagccccgccgtgcccagcaagcagaagagagacagaagcatcctgaccctgagcaaggagcccggccaccagaagggcaaggagagaagaagcgtgctggagtgcagaaacaagggcgtgctgatgttccccgagaagagccccagcatcgacctgacccagagcaaccccgaccacagcagcagcagaagccagaagagcagcagcaagctgaacgaggaggacgaggtgatcctgctgctggacagcgacgaggagctggagctggagcagaccaagatgaagagcatcagcagcgaccccctggaggagaagaaggccctggagatcagccccagaagctgcgagctgttcagcatcatcgacgtggacgccgaccaggagcccagccagagcccccccagaagcgaggccgtgctgcagcaggaggacgagggcgccctgcccgagaacagaggcagcctgggcagaagaggcgccccctggctgttctgcgacagagagagcagccccagcgaggccagcaccaccgacaccagctggctggtgcccgccacccccctggccagcagaagcagagactgcagcagccagacccagatcagcagcctgagaagcggcctggccgtgcaggccgtgacccagcacacccccagagccagcgtgggcaacagagagggcaacgaggtggcccagaagttcagcgtgatcagaccccagaccccccccccccagacccccagcagctgcctgacccccgtgagccccggcaccagcgacggcagaagacagggccacagaagccccagcagaccccaccccggcggccacccccacagcagccccctggccccccaccccatcagcggcgacagagcccacttcagcagaagattcctgaagcacagcccccccggccccagcttcctgaaccagacccccgccggcgaggtggtggaggtgggcgacagcgacgacgagcaggaggtggccagccaccaggccaacagaagcccccccctggacagcgacccccccatccccatcgacgactgctgctggcacatggagcccctgagccccatccccatcgaccactggaacctggagagaaccggccccctgagcaccagcagccccagcagaagaatgaacgaggccgccgacagcagagactgcagaagccccggcctgctggacaccacccccatcagaggcagctgcaccacccagagaaagctgcaggagaagagcagcggcgccggcagcctgggcaacagcagacccagcttcctgaacagcgccctgtgggacgtgtgggacggcgaggagcagagaccccccgagacccccccccccgcccagatgcccagcgccggcggcgcccagaagcccgagggcctggagacccccaagggcgccaacagaaagaagaacctgccccccaaggtgcccatcacccccatgccccagtacagcatcatggagacccccgtgctgaagaaggagctggacagattcggcgtgagacccctgcccaagagacagatggtgctgaagctgaaggagatcttccagtacacccaccagaccctggacagcgacagcgaggacgagagccagagcagccagcccctgctgcaggccccccactgccagaccctggccagccagacctacaagcccagcagagccggcgtgcacgcccagcaggaggccaccaccggccccggcgcccacagacccaagggccccgccaagaccaagggccccagacaccagagaaagcaccacgagagcatcaccccccccagcagaagccccaccaaggaggccccccccggcctgaacgacgacgcccagatccccgccagccaggagagcgtggccaccagcgtggacggcagcgacagcagcctgagcagccagagcagcagcagctgcgagttcggcgccgccttcgagagcgccggcgaggaggagggcgagggcgaggtgagcgccagccaggccgccgtgcaggccgccgacaccgacgaggccctgagatgctacatcagaagcaagcccgccctgtaccagaaggtgctgctgtaccagcccttcgagctgagagagctgcaggccgagctgagacagaacggcctgagagtgagcagcagaagactgctggacttcctggacacccactgcatcaccttcaccaccgccgccaccagaagagagaagctgcagggcagaagaagacagcccagaggcaagaagaaggtggagagaaactag

SEQ ID NO: 224086 - DNA, 5505 bp, Artificial Sequence
  derived and/or modified sequence
atgaagctgagcgtcaatgaagcgcagcttggattctatctcggttcactctcacatctgagtgcgtgtcctggcatcgaccctagaagctcagaagaccagccagaaagcctgaaaaccggtcaaatgatggacgagtccgacgaggacttcaaagagctgtgcgcgagctttttccagagggtcaagaagcatggtataaaagaagtgtcaggcgaacgaaagactcagaaagctgcgtccaacggtacccaaattcggagcaagttgaagcgcaccaagcagacagcaactaagacaaagactttgcagggccctgcggagaaaaaaccaccatctgggagccaggctccgagaacaaagaaacagcgggtgacaaaatggcaggcatccgaacccgcacattccgtgaacggggagggcggggtgctggccagcgctccggacccacccgttctgcgcgaaacagctcagaacactcaaactggaaatcagcaggagccctcccctaatctgtcccgcgagaaaacacgcgagaatgtgcctaacagtgattcccagccccctccaagctgcttaacgactgctgtgccttctcccagcaagccaagaaccgcgcagcttgtattgcaaagaatgcagcagtttaaacgtgctgatccagagcggctcagacacgcctcagaagagtgttcattggaagcagccagagaagaaaacgtccccaaagaccctcaggaagagatgatggcgggcaatgtttacggtctggggccacccgccccggagagcgatgctgctgtggcccttactttgcagcaggagtttgcccgggtaggcgcttccgcacatgatgacagtttagaagagaaaggactgtttttctgtcagatctgccaaaaaaatctttccgccatgaatgtgacacgacgggagcaacatgtgaaccgctgcctcgatgaagccgaaaagactctacgtccgtcagtgccgcaaatccccgagtgcccaatttgcggaaagccgttcctgaccctgaaaagccgcacctctcacctgaaacagtgtgcagtgaaaatggaggtgggaccacagctgctactgcaggctgtgaggttgcagacggcacaaccagaggggagctcctctccaccaatgttttcattttcagaccacagtcgtggactgaaaagacgaggcccaacttccaagaaagaaccacgtaaaagaaggaaggtcgacgaggccccttcagaggatcttttggtagcgatggcgcttagcaggagtgagatggaacccggagccgcagtgcccgccctgcgtctggagagcgccttcagtgagagaattagacccgaggctgagaataaatcacgcaagaagaagccacccgtctctccgcctctgctgctggttcaagatagtgaaactacggggcgccagatcgaagatagggtcgctctcctcctgtccgaggaggtagaactgagctctactccacctctgcctgcctctcggatcctgaaggaaggctgggagcgggcagggcagtgcccccccccaccagagcgcaagcaatctttcctttgggagggtagtgccctgaccggcgcatgggcgatggaggacttttataccgctcgactggtgcccccattagtccctcagcggcccgcgcagggtctgatgcaggaacctgtccctcccttagtaccccccgaacatagtgaactgtcggagagaagatctccggcgctccatggaacacctaccgcagggtgtggatccaggggtccctctcccagcgcatcacagagggagcaccaggcacttcaggaccttgtcgatctcgcccgggaaggtctctcggcctcaccttggcctggctccggggggttggctggctcagaggggaccgctggactggacgtggtaccaggtggcctgccactcacaggatttgtagtcccgagccaagataaacaccccgacagagggggccgcacacttttatcccttggtttattggtcgctgactttggcgccatggtgaataacccccacctgtccgacgtgcaattccagaccgactccggagaggtactttatgcccataagttcgtgctatacgcgcgatgccccctgctgatacagtacgtcaataatgagggattctcagcagtcgaggacggggttctaacacagcgcgttctgctgggtgacgtgagcaccgaggctgccaggacgttcctccactatctctacacagctgataccgggctaccgccgggtctcagctccgaactttctagcctcgcccaccgcttcggagtcagcgagctggtccacctctgcgagcaggttcctatcgccacagattctgagggcaagccttgggaagagaaagaggcagagaactgtgaaagtagggcagagaatttccaggaactgctgcggtccatgtgggcagacgaagaagaagaagccgagacattgcttaaatccaaggaccacgaggaggatcaggagaacgtgaatgaagcggaaatggaggaaatctacgaatttgctgccacccaacggaaacttctgcaggaggaaagggcggcaggggccggagaggatgccgactggctagaaggtgggtctccggtctccgggcagctattagctggagtccaagtacaaaagcaatgggacaaagtagaagagatggagcctctggagccaggaagagatgaggctgctacgacttgggagaagatgggccagtgcgccctccctccacctcaggggcagcattccggagctaggggcgccgaggctcccgaacaagaagccccagaggaggctctcgggcactcttcatgtagctccccaagtagggactgtcaggctgagagaaaagagggctcgctgcctcattcagacgacgccggagactatgagcagctttttagtagcactcagggcgaaattagtgaaccgagccagatcactagcgaacccgaggaacaatctggcgcggttcgggagcggggcctggaggtgagccacaggctggcaccatggcaggccagtccaccgcacccttgcaggtttctgttgggaccgccacagggcggatcaccgaggggtagtcaccacacgtctgggtcctccctatcaactcccaggagccgaggaggaacgagtcaggtagggtcacccaccctcctctccccggccgtgccgagcaaacaaaagagagacagaagcattctgacactctcgaaggagccgggacaccagaagggcaaggaacgacgctctgttttggagtgtcgaaacaagggggtgttaatgttccccgaaaaaagtccatctattgatctcactcagtcaaacccagaccacagttctagccgcagccaaaagtccagctccaagctgaacgaggaggatgaggtaatcctgcttctggatagtgatgaggagctagagctggaacagacgaagatgaaatccatctccagcgaccccttagaggaaaagaaggccttggagattagcccacgaagctgcgagctcttttccattatagacgttgacgctgaccaagaaccaagtcaaagcccacccagatcggaggccgtgctgcagcaagaggatgagggcgcactccccgaaaataggggctcactcggacggcgcggcgcaccatggctgttttgcgaccgggaatcctcaccaagtgaagcaagtacaacggacactagttggctcgtaccagccacaccgctggccagcagaagtagggactgttcttctcaaacacagatcagttctctgcgctccggcctagccgtacaggcggtgactcagcacacccctcgcgcttcagtggggaatcgagaagggaacgaggttgcgcagaaatttagcgtgatacgaccccagaccccccctccgcaaactccgagctcctgcctgacgcctgtttctccaggcaccagtgatgggagaaggcaaggacacaggtccccttcccgcccacatccaggtggtcatccccatagtagccccctagcacctcaccctataagcggagatagagctcatttcagccgcaggttcctgaagcatagccctcccggcccctcctttctcaaccaaactcccgctggcgaagttgtcgaggtgggggacagcgatgatgagcaggaagtggcaagtcatcaggccaataggtctcccccgctggacagtgaccctccaattcccattgacgactgctgctggcacatggaacccttatcaccaattccgatcgatcactggaatttggaaagaaccgggcctctgagtacgagttcacccagtcgacgaatgaacgaggccgctgactccagggactgcaggagccccggccttttagacaccaccccaattagggggtcatgcacaacccagcggaaactgcaggaaaaatcttcaggagctggaagtctgggaaacagtagaccttcttttctgaattctgctttgtgggatgtatgggatggagaagaacaacgtccacccgaaaccccaccccctgcccagatgcctagtgctgggggcgcacagaaacctgaaggcctcgagactccgaagggagccaatcgtaaaaaaaacttacctcccaaggtgccgattacccccatgcctcagtattctattatggaaacgcccgtcctgaagaaagagctcgaccgcttcggagtgcgacctctacccaaacggcagatggttctgaagctgaaggagatcttccagtatacacaccaaacgctagacagcgactccgaagatgagtcccaatctagccaacccctactgcaagcacctcactgccaaacgctcgcatcccaaacatacaagccctctcgcgctggggtccatgcacagcaggaggctactacgggccctggtgctcatcgcccaaagggtccagctaagactaagggcccgcggcaccaacgcaaacaccacgaatcaattacccccccctccagaagtcctactaaggaagccccccccggcctgaacgacgacgcccagatacctgccagccaggagagcgtggccacttcagtcgatggctcagatagctcactgagttcccagtcttcctcttcctgcgagttcggcgccgctttcgagagcgccggcgaggaagaaggcgaaggcgaagtgagcgccagccaggccgccgtccaggccgctgacacagacgaagcccttagatgttatattcgctccaaacccgcattataccagaaagttctcctctaccagcccttcgagctgcgcgagctacaggccgaactgaggcagaacgggcttagggtttcatccagacggttactggatttcctggatactcattgcattacatttaccacggcggcaacacggcgggagaagttgcagggacgccgcaggcagccaagaggtaaaaagaaggtcgaacgcaactag

SEQ ID NO: 224087 - DNA, 5505 bp, Artificial Sequence
  derived and/or modified sequence
atgaagctgtctgtgaatgaggcccagctgggcttctacctgggcagcctgagccacctgagcgcctgccccggcatcgaccccaggagcagcgaggaccagcctgagagcctgaagacaggccagatgatggatgaaagtgatgaggacttcaaggagctgtgtgccagcttcttccagagggtgaagaagcacggcatcaaggaggtgtctggagagaggaagacccagaaggccgccagcaatggcacccagatccgcagcaagctgaagaggaccaagcagacagccaccaagaccaagaccctgcagggccctgctgagaagaagcccccatctggcagccaggcccccaggaccaagaagcagagggtgaccaagtggcaggccagcgagcccgcccacagcgtgaatggagagggcggcgtgctggccagcgccccagacccccctgtgctgcgggagacagcccagaacacccagacaggcaaccagcaggagcccagccccaacctgagccgggagaagaccagagaaaatgtgcccaacagcgacagccagcccccacccagctgcctgaccacagctgtgcccagccccagcaagcccaggacagcccagctggtgctgcagaggatgcagcagttcaagagagctgaccctgagcggctgcggcatgccagcgaggagtgcagcctggaggccgcccgggaggagaatgtgcccaaggacccccaggaggagatgatggctggaaatgtgtatggcctgggccccccagcccctgagagtgatgctgctgtggccctgaccctgcagcaggagtttgcccgggtgggcgccagcgcccatgatgacagcctggaggagaagggcctcttcttctgccagatctgccagaagaacctgagcgccatgaatgtgacccggcgggagcagcacgtgaaccgctgcctggatgaggccgagaagaccctgcggcccagcgtgccccagatcccagaatgtcccatctgtgggaagcccttcctgaccctgaagagcaggaccagccacctgaagcagtgtgctgtgaagatggaggtgggcccccagctgctgctgcaggccgtgcggctgcagacagcccagcctgagggcagcagcagcccccccatgttctccttcagtgaccacagccggggcctgaagaggcggggccccaccagcaagaaggagcccaggaagaggaggaaggtggatgaggcccccagcgaggacctgctggtggccatggccctgagccgctctgagatggagcccggggctgctgtgcctgccctgcggctggagagcgccttcagcgagcgcatccggcctgaggccgagaacaagagcaggaagaagaagccccctgtgagcccccccctgctgctggtgcaggacagcgagaccaccggccggcagatcgaggacagagtggccctgctgctgtctgaggaggtggagctgagcagcaccccacccctgcctgccagccgcatcctgaaggagggctgggagcgggccggccagtgccccccacctcctgagaggaagcagagcttcctgtgggagggcagcgccctgactggagcctgggccatggaggacttctacacagcccggctggtgccccccctggtgccccagaggcctgcccagggcctgatgcaggagcctgtgccccccctggtgcccccagagcacagcgagctgtctgagcggcgcagccctgccctgcacggcacccccacagctggctgcggcagccggggccccagccccagcgccagccagcgggagcaccaggccctgcaggacctggtggacctggcccgggagggcctgagcgccagcccctggccaggcagcggcggcctggccggcagcgagggcacagctggcctggatgtggtgcctgggggcctgcccctgactggatttgtggtgcccagccaggacaagcacccagacagaggaggccgcaccctgctgagcctgggcctgctggtggccgactttggagccatggtgaacaacccccacctgagtgatgtgcagttccagacagattctggagaggtgctgtatgcccacaagtttgtgctgtatgcccgctgccccctgctgatccagtatgtgaacaatgaaggcttctctgctgtggaggatggagtgctgacccagagggtgctgctgggagatgtgtccacagaagctgcccggaccttcctgcactacctgtacacagctgacaccggcctgcccccaggcctgagcagcgagctgagcagcctggcccacagatttggagtgtctgagctggtgcacctgtgtgagcaggtgcccatcgccacagattctgagggcaagccctgggaggagaaggaggccgagaactgtgagagcagagctgagaacttccaggagctgctgcgctccatgtgggcagatgaggaggaggaggccgagaccctgctgaagagcaaggaccacgaggaggaccaggagaatgtgaatgaagctgagatggaggagatctatgaatttgctgccacccagaggaagctgctgcaggaggagagagctgctggagctggagaagatgctgactggctggagggcggcagccctgtgtctggccagctgctggccggcgtgcaggtgcagaagcagtgggacaaggtggaggagatggagcccctggagcccggcagagatgaggccgccaccacctgggagaagatgggccagtgtgccctgcccccaccccagggccagcacagcggggcccggggagctgaggcccctgagcaggaggcccctgaggaggccctgggccacagcagctgcagcagccccagccgggactgccaggccgagaggaaggagggcagcctgccccacagtgatgatgctggggactatgagcagctgttcagcagcacccagggcgagatcagcgagcccagccagatcaccagcgagcctgaggagcagagcggggctgtgcgggagcggggcctggaggtgagccaccggctggccccctggcaggccagccccccccacccctgccgcttcctgctgggccccccccagggcggcagcccccggggcagccaccacaccagcggcagcagcctgagcacccccaggagcagaggaggcaccagccaggtgggcagccccaccctgctgagccctgctgtgcccagcaagcagaagagggacaggagcatcctgaccctgagcaaggagcccggccaccagaagggcaaggagaggagatctgtgctggagtgcaggaacaagggcgtgctgatgtttcctgagaagagccccagcattgacctgacccagagcaacccagaccacagcagcagccgcagccagaagagcagcagcaagctgaatgaggaggatgaagtcatcctgctgctggacagtgatgaggagctggagctggagcagaccaagatgaagagcatcagcagtgaccccctggaggagaagaaggccctggagatcagccccaggagctgtgagctgttcagcatcattgatgtggatgctgaccaggagcccagccagagccccccaagaagtgaggccgtgctgcagcaggaggatgagggcgccctgcctgagaacagaggcagcctgggcagaagaggagccccctggctgttctgtgaccgggagagcagccccagcgaggccagcaccacagacacctcctggctggtgcctgccacccccctggccagccgcagccgggactgcagcagccagacccagatcagcagcctgcggagcggcctggccgtgcaggccgtgacccagcacaccccccgggcctctgtgggcaaccgggagggcaatgaggtggcccagaagttcagcgtcatccggccccagaccccaccaccccagacccccagcagctgcctgacccctgtgtccccaggcaccagtgatggccggcggcagggccacaggagccccagccggccccaccctgggggccacccccacagcagccccctggccccccaccccatcagcggggaccgggcccacttcagccgccgcttcctgaagcacagccccccaggccccagcttcctgaaccagaccccagctggggaggtggtggaggtgggggacagtgatgatgagcaggaggtggccagccaccaggccaacagaagcccccccctggacagcgacccccccatccccattgatgactgctgctggcacatggagcccctgagccccatccccatcgaccactggaacctggagaggacaggccccctgagcaccagcagccccagcaggaggatgaatgaagctgctgacagccgggactgccgcagccctggcctgctggacaccacccccatccggggcagctgcaccacccagaggaagctgcaggagaagagcagtggagctggcagcctgggcaacagccggcccagcttcctgaacagcgccctgtgggatgtgtgggatggagaggagcagaggcctcctgagaccccacctccagcccagatgcccagcgctggaggagcccagaagccagagggcctggagacccccaagggggccaacaggaagaagaacctgccccccaaggtgcccatcacccccatgccccagtacagcatcatggagacccctgtgctgaagaaggagctggacagatttggagtgcggcccctgcccaagaggcagatggtgctgaagctgaaggagatcttccagtacacccaccagaccctggacagcgacagtgaagatgagagccagagcagccagcccctgctgcaggccccccactgccagaccctggccagccagacctacaagcccagcagagctggggtgcacgcccagcaggaggccaccactggacctggggcccaccggcccaagggccctgccaagaccaagggccccaggcaccagaggaagcaccacgagagcatcaccccacccagccgcagccccaccaaggaggcccctcctggcctgaatgatgatgcccagatcccagccagccaggagagcgtggccacctctgtggatggcagtgacagcagcctgagcagccagagcagcagcagctgtgaatttggagctgcctttgagagcgctggggaggaggagggggagggggaggtgtctgccagccaggccgctgtgcaggccgctgacacagatgaggccctgcgctgctacatccgcagcaagccagccctgtaccagaaggtgctgctgtaccagccctttgagctgcgggagctgcaggccgagctgcggcagaatggcctgcgggtgagcagccggcggctgctggacttcctggacacccactgcatcaccttcaccacagctgccacccggcgggagaagctgcagggcagaagacggcagccccggggcaagaagaaggtggagagaaattag

SEQ ID NO: 224088 - DNA, 5505 bp, Artificial Sequence
  derived and/or modified sequence
atgaagctgagcgtgaacgaggcccagctgggcttctacctgggctctctttcacacctcagtgcgtgtcctggcatcgatcctcggagctcggaagatcagcctgagtctcttaaaactggccagatgatggatgagtccgacgaagatttcaaggaactctgtgcctccttctttcagcgcgtgaaaaagcacggcattaaagaagtttcgggcgaaaggaagacacagaaggcagcctccaacggcacccagatcagatcgaagctgaagaggacaaagcagacggccacgaaaaccaaaaccttacaggggcccgccgagaagaaaccacctagtggatcccaggccccacgcacaaaaaagcagcgtgtgacaaaatggcaggccagcgagcccgctcactccgtaaatggcgagggtggggttctggccagtgcgcccgatcctcctgtgctgagggaaaccgcccagaatactcaaaccggtaaccagcaggaaccctcgcctaacctttctagggaaaagacccgagagaacgtgcctaacagcgattcccaacctccgccttcctgtctgacgacagccgtgcccagtccttctaagccccggacggcccagctagttttgcagaggatgcagcagtttaagagggcagatcctgagcgtctgcgccatgctagcgaagagtgcagtctggaagcagctagagaagaaaatgtgcctaaggatccccaggaggagatgatggccgggaacgtttatggactcggcccccccgctccggagtcagacgccgcagtggccttaactttacaacaggaattcgcacgggtcggagcttctgcccatgacgactctttagaggagaagggcctttttttctgtcaaatctgccagaagaatttgagcgccatgaatgtcactagaagagaacagcacgtcaatcgatgtcttgacgaggcggagaaaaccctgaggcccagcgtgccacagattccagagtgcccaatttgtgggaaacccttcctgaccttgaaaagtcgcacaagtcacctaaagcaatgtgccgtgaaaatggaggtgggtccgcagcttctactgcaggccgtgcgacttcagacagctcagcccgaagggtcttcaagtccacctatgttctcattctcagatcactctagagggttgaagcgacggggcccgacctcaaagaaggagccgcgcaaacgccggaaagtggacgaggccccctcggaagacttactcgtagccatggcgctgagtaggtccgaaatggaacctggggccgcagttccagctttgcgcctggagagtgccttttctgaacggattaggcctgaggctgagaataaaagccgaaaaaaaaagccgccagtctcgcctccactgctgctcgtccaggactccgagaccacaggcagacagatcgaagaccgggtggcacttttactgtccgaggaagtggagctctcctccaccccgcctctgcccgcatccaggattcttaaagagggatgggaacgcgccggccagtgtcctcctccccctgaaaggaaacaaagctttctttgggaagggagcgcactgactggcgcttgggccatggaagacttctacacagccaggctggtgcccccccttgtacctcagcgacccgcacaagggttgatgcaagagcccgtgccgcccttggtgccacctgaacactcggaacttagcgaaagaagaagccctgccctgcacgggacacctactgccggttgcggcagcagggggccaagtccttcagcaagccagagggagcatcaagccctgcaggatttagtggatctggctagggagggactgagtgcatcaccttggcccggctccggaggactggctgggagtgagggtacagccggattggatgtcgtccctggcggactgcccttgactggctttgtggtcccatcacaggataaacatcctgatcgcgggggtagaaccctcctcagtctgggactcctggtggccgatttcggtgcaatggtcaataatccacacctctctgacgttcagtttcagaccgactccggggaggtgctttatgcacataaatttgtgttgtacgcccgctgccctcttcttatccaatacgtgaataacgaagggttcagcgccgtggaggatggcgtcctcacccagcgggttctgctcggggacgtttccaccgaggccgcacggaccttcttgcactacctctatactgcagatacaggtctgccccctggactttccagcgagctgagttccctcgctcaccgctttggagtttccgagctcgtacacctttgtgaacaggttcccatagctactgactccgaggggaagccatgggaggagaaagaagccgaaaattgcgagagtcgggccgaaaactttcaggagctgctgcgatctatgtgggccgacgaggaggaggaggctgaaactctcctgaaatccaaagatcacgaagaggatcaggaaaacgtgaacgaagccgagatggaggaaatctacgagttcgctgccactcagagaaagcttctgcaggaggaaagagcggctggggctggcgaagatgcggattggcttgaaggcggttccccagtgtcgggacagctcttagctggggtacaggtgcagaagcagtgggataaggtcgaagaaatggagccactcgagcctggccgggacgaggctgccacaacctgggaaaaaatgggacagtgcgcattgccacctccgcaggggcagcatagtggagcaaggggggccgaggcccctgagcaggaggctcccgaggaggcattaggccacagcagctgttccagtccaagcagagattgccaggctgagcgtaaggaaggttctctgcctcattccgacgacgccggtgattacgaacaactgttcagcagcacacaaggggaaatttcagagccgtcccagataacaagcgaacctgaggaacaaagcggtgctgtgagggaaagagggttagaggtaagtcacagactggctccctggcaggcatccccacctcacccttgccgatttttgctgggaccaccccagggcggaagcccccgaggttcacatcacactagtggcagcagcttgtcaaccccccgctctcggggaggcacgagccaggtaggatcccccaccctcctgtccccggccgttccttcaaagcagaagcgtgaccggagcattttgaccctgtcgaaagagcccgggcaccaaaaaggcaaggagaggcgatcagtgcttgagtgtagaaataagggggtgctcatgtttccagaaaagtctccctccatagacctgacccagagtaaccccgatcactctagctcccgaagtcaaaagtctagttccaagctgaacgaagaggacgaagtgatattgctgctcgattcagacgaagagctggagctggagcaaacgaaaatgaagtccatttcatcggatccccttgaggagaagaaggcgttggaaatctctccgaggtcatgcgagcttttctctatcattgatgtggacgcggaccaggaaccaagtcagtccccgccgagatccgaagccgtcctccagcaggaagatgagggtgcactaccagaaaaccggggatccctcggcagaaggggggccccatggttattctgcgaccgggagtccagcccatctgaggcgtctaccacagataccagctggcttgtgccggcaactccactcgcttcccggagtagagactgctcttctcagacgcagatcagcagcttacgctccgggctagccgtccaggctgtgacacagcacacccctcgagcctcagtagggaacagggaggggaatgaggtggcgcagaaattctctgtcatcagaccccagactcctcctcctcagacacctagctcttgtcttacacccgtgtcgcctggcacctcagatggtcgccgacagggtcataggtcgccctccagaccgcatcccggcggacacccccattcttcccccctggcaccccatcctatcagcggagatcgggcccacttttcaaggaggtttttgaaacatagccctccgggaccttcattcctgaaccagacccctgctggcgaggtagtggaagtaggcgacagtgacgacgagcaagaagtggcctctcaccaagctaacaggtcaccacccctagacagtgatccccctattcctatcgacgactgctgttggcacatggagccactcagccccattcccatcgaccactggaacctggagaggactggccccttgagcacaagcagcccttccaggagaatgaatgaagccgctgattccagggattgccgaagcccgggactccttgacaccaccccgatcaggggaagttgcaccacccagaggaagctacaggagaagagctccggggctgggagcttgggtaacagtaggccctccttcctgaatagcgcgttatgggatgtctgggatggagaagagcagcggccacccgaaacacctccacccgcccagatgccgagcgcagggggcgctcagaagcctgaaggtctggaaacacctaagggggctaaccggaagaagaatcttcctccgaaagtacctatcacacctatgccacagtactctataatggaaacgcctgtgctgaaaaaggaactcgatagattcggggttcgaccactgcccaaacgtcagatggtgttaaagctaaaagagatcttccagtacacacaccagactctggactcggactcagaagatgaaagccagagtagtcagccactacttcaagcacctcactgccagactttggcgtctcagacgtacaagcctagtcgggccggggttcacgcacagcaagaggcgacaacaggacccggcgcccacaggcccaagggccctgccaagaccaaaggtccaagacaccagcggaagcatcatgaaagtattacgcccccgagcaggtctccgaccaaggaggcccctcctgggctcaacgacgacgcgcaaattcctgcctctcaggagagtgttgctacctctgtcgacggcagtgattcttccctatcatctcagtccagtagttcctgcgaatttggtgctgcctttgaaagcgctggggaggaagagggcgaaggggaagtgtctgcatcccaagccgccgtccaggcagcggatactgatgaagctttaagatgctatatccgctcgaaaccagccctctatcagaaagtgctgttataccagcctttcgagctcagggagctccaggcggaactgcggcaaaacggattaagggtttcctctaggcgactactggattttctggatacacattgtatcactttcaccactgccgcgaccaggagagagaagctccaggggcgaagaaggcagccccgtggaaagaagaaagtggaaaggaactag

SEQ ID NO: 224089 - DNA, 5505 bp, Artificial Sequence
  derived and/or modified sequence
atgaagctctctgttaatgaggcacagcttggattttatctcggatcgttgtcacacctgagtgcctgccccggaatcgatcccaggagctccgaggaccagcccgagagccttaagacaggtcagatgatggatgagagcgacgaagacttcaaggagctctgcgcatcattttttcaaagggtgaaaaagcatggaataaaagaggtgtctggggagcgtaaaactcagaaggcggcttctaacggcactcagattcgcagtaagctgaagcgcacgaaacagactgccaccaagactaagaccttgcagggaccagcggagaagaagccacctagtggaagtcaggctccaaggacgaagaagcaaagagtcaccaagtggcaagcttcggagcccgcacacagcgtcaatggagagggtggggtgctcgccagcgcccctgatcctccagttctccgagagactgcccaaaacacccagacagggaaccagcaggagccctctccaaacctatccagggaaaagactagagaaaatgtgcccaacagcgacagccaacctcctccaagctgtctgactacggcagtgccgagcccttcaaagccaagaacggcccaacttgtgctccagagaatgcaacagttcaagagagccgatcccgagagactcaggcacgccagcgaagaatgctcattagaggccgcacgggaagagaacgtgcccaaggacccccaggaagagatgatggccggaaacgtgtacggtctgggaccgcctgctccagaaagtgacgcggctgtggccctaacactgcaacaggaattcgcgagagtcggcgcaagcgcccacgacgatagcctggaagagaagggtctctttttttgtcagatttgccagaagaatttatccgctatgaatgtgacccggagagaacagcatgtgaatagatgtctggatgaagccgaaaagactcttcgacctagtgtgccgcagataccggaatgccctatttgcggtaagccttttttaacactcaaatcgcggacatctcatctgaaacagtgtgctgtcaagatggaagtgggtccacagcttctgctgcaagctgtgagattacaaactgctcagccggaggggtcaagctcgcctcccatgttctccttctctgaccactcaagaggactcaagcgacgcggtcctacttcaaagaaagaacctcggaagagacgaaaagttgatgaggctccctccgaagacttgctggtcgctatggctctgagtcgttctgagatggagcccggagccgcagtaccagccctgcggcttgagtctgctttttccgaacggatccggcctgaggcggagaacaaaagtcgaaagaagaaaccccctgtgagcccccctctccttctggttcaggacagtgagactaccggacgtcaaattgaagacagagtggccctgctactcagtgaagaagtagaactgtcgtcaactccgcctctgcctgcgtctcggatcctgaaggaggggtgggaacgggctggccagtgtccccctcctccagagaggaagcaaagcttcctgtgggagggtagcgccttgactggggcttgggcaatggaggatttttatacggccaggctggtacccccactagtgcctcagcgtccggcacagggactcatgcaggaacccgtgccacctctggtacccccagagcacagcgagctgagcgaaagacggagccccgcattgcatggtaccccaacagccggatgcggaagtcgcggaccatcccctagtgccagccagagggaacaccaggccttacaggacctcgtagatcttgctagagagggccttagcgcctctccctggccgggatcgggtgggctagctggttccgaggggaccgccggattggatgttgtgccaggcggtttgcccctgaccgggttcgtcgtgccatcgcaagacaagcaccccgaccgtggaggaagaacactgctttcacttggcctgctggtggctgacttcggcgcaatggtgaataaccctcacctgtctgacgtccagttccagacggattctggcgaggtgctatacgcgcataagtttgtgctgtacgccagatgccctctcctgattcagtacgtgaataacgaggggttctcagcggtggaagatggcgtgctgacccaaagggtgctgcttggagacgtctccactgaagcggcaaggaccttcctgcactacctatatactgctgatacgggattaccacctgggctgtcaagtgagcttagcagccttgcccaccggtttggcgtgagcgagctggtgcatctttgcgagcaggtgcccatagcgactgactccgagggcaaaccctgggaggagaaggaggcggaaaattgcgagagtcgcgcagaaaattttcaagaattgctgcgatcaatgtgggcggacgaggaggaggaagccgaaacactgctgaagagcaaagaccacgaggaggatcaagaaaacgtcaacgaggcagagatggaagaaatttatgagtttgccgcaacccaacgcaaacttctgcaggaagagcgggcagcaggcgctggtgaggatgccgattggctcgaaggcggatcacccgtttccggccaactgctggccggagtgcaggtccagaagcagtgggacaaggtcgaagagatggaacctttagaacctggcagagatgaagcggcaacgacgtgggagaaaatgggacagtgtgctctgccaccgcctcagggacagcactcgggcgcacgaggtgctgaggcccctgagcaggaagcccctgaagaggcactgggtcatagctcatgttcgtccccttctagggactgtcaggcggagcgaaaagagggcagcctaccccactcggacgacgcgggtgattacgagcagttattttcgtccactcagggcgagatctcggagccttcacagatcacttcagaaccagaggaacagtccggtgcagttagggaaagggggttagaggtcagccatcggttagccccatggcaggcaagcccacctcacccttgccggttcttgttgggaccaccccagggcggatcgccgaggggatctcatcacactagtggctccagtttatctacacccagatcccggggaggcaccagccaggtgggtagccctacgttgctgtcacccgctgtcccaagcaagcaaaaaagagatcggagtatactgactttaagcaaggaacctgggcaccagaaaggcaaggagcgtcgatcggtactggaatgccggaacaaaggcgtcctgatgttcccagagaagagccccagcatcgacctgactcagtctaaccccgaccacagttcttcaagaagtcaaaaatcgagttccaaattaaatgaggaagatgaagtgattctcctgctggacagtgacgaagagctggagctcgagcagaccaagatgaaatccatcagcagcgatcctttggaggaaaaaaaggccctagagatttctccacgctcatgcgaactcttctcgatcatcgatgtagatgcggaccaggaaccctcccagtcacctccccgaagcgaagcagtgctgcagcaggaggatgagggcgcactccccgagaacaggggaagcctgggtagacgtggtgcgccatggctattttgcgaccgggaatcaagcccatcagaggctagtactacagatacaagttggcttgttcctgcgacacctctcgcctcccggagtcgagattgctcctcgcagacacagattagcagtttgaggtccggactcgccgtgcaggcagtcacccagcacacgccacgtgccagtgtaggcaacagggagggaaatgaggtggcacagaagttctcagttattcggcctcaaacccccccaccccagaccccctcatcgtgtctaactccagtctctcctggaactagtgacggtcggaggcaaggccacaggtctccaagccggccacatcctgggggtcacccgcactcaagccccctcgcacctcatccgatctccggggacagggctcacttttccaggcgcttcttaaaacacagccctccagggcctagcttcctgaatcagaccccagccggtgaggttgtggaggtaggagacagtgatgacgagcaggaagtggccagccaccaggcgaaccggtccccaccgcttgactcagatcctccaattccgatagacgattgctgctggcacatggaacctctaagcccaatccctattgatcattggaacctggagcggacgggaccactaagcacgtcttccccaagccgtcgcatgaacgaggccgctgattcacgggattgccgatcacctggcctactggacacaactccgatcagagggtcgtgtacaacacaaagaaaactccaggagaagagctcaggcgctggttccctcgggaacagtcgcccttcctttctgaacagcgccctgtgggatgtttgggacggagaggagcagcgtcctcctgaaacaccgcctcctgcacagatgccctccgctggcggtgcccagaaaccagagggtctggaaaccccaaagggcgcaaatagaaaaaagaatttaccaccaaaggtcccaattactccgatgcctcagtatagcattatggaaacaccagttctgaagaaggaactagatcgattcggggtgaggcctctgccaaaacgccagatggtgctgaaattgaaagaaatcttccaatatactcaccagacactcgattcagattcagaagatgaaagccagtctagccaacccttgctgcaggcccctcattgccagactttggcgtcacagacatacaagccatcaagggctggcgtgcacgcacagcaggaagcaaccactggcccaggcgcacaccgccctaaaggtcccgcaaagaccaagggaccgaggcaccaaaggaagcatcacgaaagtatcactccaccctctcggagtcctaccaaggaggcaccccctggcttgaacgacgacgcccaaatcccagcctctcaggagtcagtagctacttcagtcgacgggtccgactcgagcttgtccagccaaagttcttctagctgcgagttcggggcagcatttgagtcagccggagaagaagaaggcgagggcgaggtatccgcctcccaagcggctgtgcaggccgcagacaccgacgaagcacttcgctgttatatccgctccaagcccgcactgtatcagaaggtgctgctgtaccagccatttgaactccgggaactccaggctgagttgagacagaacggcctgagggtgtccagccgaagattgctcgattttctcgacacgcactgtataaccttcaccactgccgctacacgaagagaaaaactgcaagggagaagacgacaacccaggggaaaaaaaaaggtcgaacggaattat

SEQ ID NO: 224090 - DNA, 7307 bp, Artificial Sequence
  derived and/or modified sequence
gcgagtctccgttaagaaggtgccgcggcggcgccggagatgtgtaattaagtgaaccatatatgtttcatcatcatggagatcttggagaattatctgagcaccaggttcatatgtattcgatctcagaggcatctattggacaacaaaacactctttcagttgtgaactttatttatttattattattattttttgagacagagttttgctcttgttgcccaggttagagtgcagtggcacgatctcggctcactgcaatctccgcctcccaggttcaagcgattctcttgcctctgcctcccgagtagctgggattacaggcatctgctaccacgcctggccaattttttgtattttcagttgaaacgaggtttcaccatattggccaggctggtctcgaacttctgacctcaggtgatccaccccccgcctcgtcctccaaaagagctgggattacaagtgtgagccaccgcgcccggcccagttgtggactttaacagagggaagctttaaacatgtttaaccacaggcccaatttgaacaaagatacttcaatcattatagagaggaaaacagtactttttgttcaattgtgcaaactctccaagtatctaatggagaagtagagaagaaccctaatgaaactgagtgtgaatgaggctcagctaggcttctacttgggttcactttctcatctgtctgcctgtcctgggattgaccctcgctcctctgaagaccagcctgaaagccttaaaactggtcagatgatggatgagtctgatgaggactttaaagaactctgcgctagctttttccaaagggtgaaaaaacatggaatcaaggaagtgtcaggagaaaggaagacacaaaaggctgcctcaaacggcactcagataagaagcaaattgaaaaggaccaaacaaactgctaccaagaccaaaacccttcaaggccctgcagagaagaaacctccgtctggcagccaggcccctaggactaaaaagcaaagggtaaccaaatggcaagcaagtgaaccggcccactctgtgaatggggaggggggtgtgcttgcctctgctccagatccacctgtgctccgggaaacagcacaaaacacccagacgggtaaccagcaagaaccatcgccaaacctttccagagagaaaaccagagagaatgtgcccaacagcgactcccagcctcctccttcctgtttgacaacagcagtgccaagtccctccaaaccccgcacagcacaattggtcctacagcgaatgcagcagttcaagagagcagaccccgagcgtttgagacacgcttcagaagagtgctccctcgaggctgcgcgggaagaaaatgtcccaaaggatcctcaagaggagatgatggcggggaatgtgtatgggcttgggccccctgccccagagagcgacgctgcggtggccttgaccctgcagcaggagtttgcacgggtaggagcatcggcacatgatgatagcctggaggaaaagggtttgttcttctgccagatttgtcaaaagaacctctcagccatgaacgtgacccgaagggaacagcatgtgaacaggtgcttggatgaagctgaaaagacactaagaccttctgtgcctcagatccctgagtgcccgatttgtgggaaaccgtttcttaccttaaagagcagaaccagtcacttgaagcagtgtgctgtgaagatggaggttggcccccagctcctgcttcaggctgtgcggctgcagacagcacagcctgagggtagcagcagcccacccatgttcagcttcagtgatcacagtagaggtctgaaacggagaggacccaccagcaagaaggagccacggaagaggcggaaggtggacgaggcaccgtccgaggacctgctggtggccatggctctgtcccggtcggagatggagccgggtgcggctgtaccagcgctcaggctggaaagtgccttttctgagaggataagaccagaagcagagaataaaagtcgcaagaagaaacccccggtatcccccccattgttgttagtccaggactctgaaaccacaggccgacagatagaggaccgtgtggccctgctcctctctgaggaagtggaattgtctagcacgccaccacttcctgccagcaggattttaaaggaagggtgggaaagagcgggccagtgtcctcctccacctgaacgcaagcagagctttctgtgggagggcagcgcactgactggggcctgggccatggaggacttctacacggccaggctggtccctcctctcgtgccccagcggcctgcccagggccttatgcaggagcccgtgccgcctctggtgccacctgagcactcagagctgagcgagcgaaggtcacccgctctccacggcacccccactgcaggctgtggctccaggggcccgtcgccttcggccagccagagggagcaccaggccctgcaggacctcgtggacctggcgagggagggactgagcgccagcccgtggcccggcagtgggggcctggctggctcggaagggactgcagggttggacgtggtgcccggcggccttcctctgactgggtttgtggtgccatcgcaggacaagcacccggacaggggcggccgcaccttgctctccctcgggctgctggttgctgactttggcgccatggtcaataacccacacctgagtgatgtccagtttcagacggacagcggggaggtgctttacgcccacaagttcgtgctttatgcccgatgcccgctcctcatccagtatgtgaacaatgaaggcttctccgctgtagaggacggggttctgacccagcgtgtcctgctgggtgacgtgagcaccgaggccgcccgcacgttcctgcactatctctacactgcggacactggccttcctcctggccttagctctgagctgagctccctggcccacaggtttggcgtgagtgagctcgttcacctgtgcgaacaggtgcctattgccactgactcagagggcaaaccatgggaggagaaggaagcagagaattgcgaaagcagggccgagaatttccaggaactcttgaggtcaatgtgggcagatgaagaggaggaagcggagactttgttgaaatccaaggaccacgaagaagatcaagaaaacgtgaatgaagcagaaatggaagaaatttatgaatttgcagctactcagcgaaagcttctccaggaagaaagggcagcgggtgccggcgaggacgctgactggctggagggtggcagtccggtttctgggcaactcctagcaggtgtccaggtgcagaaacagtgggacaaggtggaggagatggagccgttggagccaggaagagatgaggccgccaccacctgggagaagatgggacagtgcgctctcccgccaccccagggccagcactcaggggcacggggagcagaggcccctgagcaggaggcgccagaggaggcgcttggccattccagctgctccagcccttccagggactgccaggcagagagaaaagaaggctctcttccgcactcagatgatgccggggattacgaacagctcttctcatcaactcagggagagatctcagagccgtcccaaataacaagtgagcccgaggaacaaagtggcgctgtcagggaaagggggctggaggtttctcatcgcctggctccctggcaggcatctccaccgcacccgtgccgcttcctattggggcctccccagggcgggagtccccgcgggtctcatcacacaagtgggtcgtccctgtcaacaccccggtcccgtggcggaacttcccaggtgggctccccaaccttgctgtctccagctgtgccatcaaagcagaaaagggacaggagcatcctcacgctgtctaaagagccagggcaccagaaaggcaaagagcgtcggtccgtgctggagtgcagaaataagggggtcctgatgttcccagaaaaatctccgtctattgacctaacccagtcaaatcctgaccattcgagctccagatctcagaaatcttcatccaaactgaacgaagaagatgaggtcatcctcttactggactcggatgaggagctggagctagaacaaaccaaaatgaagtccatttctagtgatcctctggaagaaaagaaagctctagaaattagccctaggtcctgtgagctgttttccatcattgatgttgatgcagatcaggaaccttcccagagcccaccaagaagcgaagctgtgctgcagcaggaggatgagggggcgctgccggagaatcggggctctttgggcaggagaggggctccctggctgttctgtgaccgtgagagcagccccagcgaggccagcaccacagacacctcgtggctggtgcccgccaccccgctggccagcagaagccgtgactgttcttcccagacccaaatcagcagcctcaggagcgggctggccgtgcaggcggtgactcagcacacgcccagggcctcagtaggaaacagggaagggaacgaagtcgcacagaagttttctgtcatcaggccccagacaccaccgccccagacaccgtcctcatgcctcactcccgtctctccaggaacttctgacggcagaaggcaaggccacagaagcccttcccgtccccaccccgggggccacccgcactcctctccgctggctccacatcccatctcaggggaccgcgcccacttcagcaggcggttcctgaaacactcgccgcctgggccaagcttcctgaaccagaccccagcgggtgaagtggtggaagtcggagacagtgacgatgagcaggaggtggcctcccatcaggccaacagaagccccccactggacagtgaccccccaattccaattgacgactgctgctggcacatggagcccctctcgccaattcccattgaccactggaacctggagcggaccggccccctgagcaccagcagccccagccgcaggatgaacgaggccgccgacagccgtgactgtcgctccccgggactcctggacaccacccccatccgaggaagctgcactacccagaggaaattgcaagagaagtcctcgggcgcgggctccctggggaatagcaggccgagctttctgaattcggctctgtgggacgtttgggacggggaagagcagaggcctccagagacccctcctccggcccagatgccaagcgctggtggagctcagaagcccgaagggttagagacacccaaaggtgctaatcggaagaagaacttgccccccaaagtgcccataacgccgatgccacagtattccattatggagacgccggtgctgaagaaggaactggataggtttggagtccgccctctgcctaaacgccagatggttctgaagctgaaggagatattccagtacactcaccagaccctggactcagactccgaggacgagagccagtcctcacagccgctgttgcaggcgcctcactgccagaccctcgcctcccagacctacaagccttcaagggcaggggtccatgcccagcaggaggccaccacaggacctggggcccataggcccaagggacctgctaagaccaagggcccccgacatcaaaggaagcatcatgaaagcatcacacccccaagcaggtcgcccaccaaggaggcacctccaggcctcaatgatgacgcccagatcccagcctctcaagaatccgtggccacctctgtggatggcagtgacagctccttgagctcacagagttcttcctcctgtgagtttggagcggcatttgagtctgcaggtgaagaggagggcgagggggaggtcagtgcctcgcaggcagccgtgcaggcggcggacacagacgaggcgctgaggtgctacatccgctccaagccggccctgtaccagaaggtgctgctgtaccagccctttgagctgcgggagctgcaggcagagctgaggcagaacggcctccgtgtgtcctcgcgcaggctgttggacttcctggacacccactgtatcaccttcaccactgccgccacccgcagggagaagctccagggcaggaggcggcagcctcggggcaagaagaaggtggagcggaactgatggggccatcccgaccccaccccaacctgccatcagcagcccccacccccgccatttgcagggaggacctgggacacccagcgtgggtcaggcctccacaggcatttctgggcctggggaccacatcagctctgcgctgtgatgatgaccacagcccaatccagggcttcctcctctgggctctgctttctagggtggcatttggagcatgtcacccactggatttacagactccagccccttcctctgtccgtgctcacagtgtgtctccctttttggttttctttttttttttctttttgagacagtcgtgctgtgtcacctaggctggagtgcagtggcacaatctcggctcactgcaacctccgcctcccgggttcaagcaattctcctgcctcagcctcccagatagctgggactacaggcacacgctgccacgcccagctgattttttatattttagtagaaacggggtttcaccatgttgctcaggctggtcacaaactccagagctcaggcaatccgcctgctgcggcctcccaaagtgctgggatcacaggcgccagccactgcgcccggcccagtgtgtctcccttaacccaagagggccctcagctgtcccagggggcagtgggccatcaccagctggccagggcatggcctattctgccacatttgccaccctctgagcccaccagtcctgggcacagctgccctacatgtctgtcctgagatggacgtcaggtccagcctgccccggcagcccgggcccgtcctcctcagcactcaggccaaccccagccaccgccagcctgagaccaggtgtcctgaggctccctgcactgccacagcccagatgcagttctcctgacccagccgtgctacccggacacttgtcattgttaccagcagtctccaaactggacagtgcacaagggcccagaacaactctgatgccaccacaaaacaaacatgttcactagcggattccattctttgggttaaagctgcctccagcctcaggagcagtgtggaggaagatgagggccaggaaagaaggaaaccttggtttctccatccttgtgaatgtcctcgtctgtttcaaatacagtgcagtcagttttatatgatgtgcaataaaccaaaaaggctttattaaaa

SEQ ID NO: 224091 - protein, 969 aa, Artificial Sequence
  derived and/or modified sequence
MHTPSIRSITHDAQTSSTGSSAPGTALCTEECVHGRCVSPDTCHCEPGWGGPDCSSGCDSDHWGPHCSNRCQCQNGALCNPITGACVCAAGFRGWRCEELCAPGTHGKGCQLPCQCRHGASCDPRAGECLCAPGYTGVYCEELCPPGSHGAHCELRCPCQNGGTCHHITGECACPPGWTGAVCAQPCPPGTFGQNCSQDCPCHHGGQCDHVTGQCHCTAGYMGDRCQEECPFGSFGFQCSQHCDCHNGGQCSPTTGACECEPGYKGPRCQERLCPEGLHGPGCTLPCPCDADNTISCHPVTGACTCQPGWSGHHCNESCPVGYYGDGCQLPCTCQNGADCHSITGGCTCAPGFMGEVCAVSCAAGTYGPNCSSICSCNNGGTCSPVDGSCTCKEGWQGLDCTLPCPSGTWGLNCNESCTCANGAACSPIDGSCSCTPGWLGDTCELPCPDGTFGLNCSEHCDCSHADGCDPVTGHCCCLAGWTGIRCDSTCPPGRWGPNCSVSCSCENGGSCSPEDGSCECAPGFRGPLCQRICPPGFYGHGCAQPCPLCVHSSRPCHHISGICECLPGFSGALCNQVCAGGYFGQDCAQLCSCANNGTCSPIDGSCQCFPGWIGKDCSQACPPGFWGPACFHACSCHNGASCSAEDGACHCTPGWTGLFCTQRCPAAFFGKDCGRVCQCQNGASCDHISGKCTCRTGFTGQHCEQRCAPGTFGYGCQQLCECMNNSTCDHVTGTCYCSPGFKGIRCDQAALMMEELNPYTKISPALGAERHSVGAVTGIMLLLFLIVVLLGLFAWHRRRQKEKGRDLAPRVSYTPAMRMTSTDYSLSGACGMDRRQNTYIMDKGFKDYMKESVCSSSTCSLNSSENPYATIKDPPILTCKLPESSYVEMKSPVHMGSPYTDVPSLSTSNKNIYEVEPTVSVVQEGCGHNSSYIQNAYDLPRNSHIPGHYDLLPVRQSPANGPSQDKQS

SEQ ID NO: 224092 - protein, 875 aa, Artificial Sequence
  derived and/or modified sequence
MVLSLTGLIAFSFLQATLALNPEDPNVCSHWESYAVTVQESYAHPFDQIYYTRCTDILNWFKCTRHRISYKTAYRRGLRTMYRRRSQCCPGYYESGDFCIPLCTEECVHGRCVSPDTCHCEPGWGGPDCSSGCDSDHWGPHCSNRCQCQNGALCNPITGACVCAAGFRGWRCEELCAPGTHGKGCQLPCQCRHGASCDPRAGECLCAPGYTGVYCEELCPPGSHGAHCELRCPCQNGGTCHHITGECACPPGWTGAVCAQPCPPGTFGQNCSQDCPCHHGGQCDHVTGQCHCTAGYMGDRCQEECPFGSFGFQCSQHCDCHNGGQCSPTTGACECEPGYKGPRCQERLCPEGLHGPGCTLPCPCDADNTISCHPVTGACTCQPGWSGHHCNESCPVGYYGDGCQLPCTCQNGADCHSITGGCTCAPGFMGEVCAVSCAAGTYGPNCSSICSCNNGGTCSPVDGSCTCKEGWQGLDCTLPCPSGTWGLNCNESCTCANGAACSPIDGSCSCTPGWLGDTCELPCPDGTFGLNCSEHCDCSHADGCDPVTGHCCCLAGWTGIRCDSTCPPGRWGPNCSVSCSCENGGSCSPEDGSCECAPGFRGPLCQRICPPGFYGHGCAQPCPLCVHSSRPCHHISGICECLPGFSGALCNQVCAGGYFGQDCAQLCSCANNGTCSPIDGSCQCFPGWIGKDCSQACPPGFWGPACFHACSCHNGASCSAEDGACHCTPGWTGLFCTQRKPHLLASQPLRIPCCGLLATVGIVQTSREGGMQAAPGLVVPDSCPTRTEELCRGSSRPDWIQGIDKPKVLEGQGCKAAQQHFLGRTVGAYASVRMAPAVTTSVASAPAAQASPGNTVSRDVPQEPLAMGVSSYVSA

SEQ ID NO: 224093 - protein, 1044 aa, Artificial Sequence
  derived and/or modified sequence
MVLSLTGLIAFSFLQATLALNPEDPNVCSHWESYAVTVQESYAHPFDQIYYTRCTDILNWFKCTRHRISYKTAYRRGLRTMYRRRSQCCPGYYESGDFCIPLCTEECVHGRCVSPDTCHCEPGWGGPDCSSGCDSDHWGPHCSNRCQCQNGALCNPITGACVCAAGFRGWRCEELCAPGTHGKGCQLPCQCRHGASCDPRAGECLCAPGYTGVYCEELCPPGSHGAHCELRCPCQNGGTCHHITGECACPPGWTGAVCAQPCPPGTFGQNCSQDCPCHHGGQCDHVTGQCHCTAGYMGDRCQEECPFGSFGFQCSQHCDCHNGGQCSPTTGACECEPGYKGPRCQERLCPEGLHGPGCTLPCPCDADNTISCHPVTGACTCQPGWSGHHCNESCPVGYYGDGCQLPCTCQNGADCHSITGGCTCAPGFMGEVCAVSCAAGTYGPNCSSICSCNNGGTCSPVDGSCTCKEGWQGLDCTLPCPSGTWGLNCNESCTCANGAACSPIDGSCSCTPGWLGDTCELPCPDGTFGLNCSEHCDCSHADGCDPVTGHCCCLAGWTGIRCDSTCPPGRWGPNCSVSCSCENGGSCSPEDGSCECAPGFRGPLCQRICPPGFYGHGCAQPCPLCVHSSRPCHHISGICECLPGFSGALCNQVCAGGYFGQDCAQLCSCANNGTCSPIDGSCQCFPGWIGKDCSQACPPGFWGPACFHACSCHNGASCSAEDGACHCTPGWTGLFCTQRCPAAFFGKDCGRVCQCQNGASCDHISGKCTCRTGFTGQHCEQRCAPGTFGYGCQQLCECMNNSTCDHVTGTCYCSPGFKGIRCDQAALMMEELNPYTKISPALGAERHSVGAVTGIMLLLFLIVVLLGLFAWHRRRQKEKGRDLAPRVSYTPAMRMTSTDYSLSGACGMDRRQNTYIMDKGFKDYMKESVCSSSTCSLNSSENPYATIKDPPILTCKLPESSYVEMKSPVHMGSPYTDVPSLSTSNKNIYEVEPTVSVVQEGCGHNSSYIQNAYDLPRNSHIPGHYDLLPVRQSPANGPSQDKQS

SEQ ID NO: 224094 - DNA, 324 bp, Artificial Sequence
  derived and/or modified sequence
atgacaggccggatggctactctggagaagtctcacagctctgcctgttggaggaagcggagctcacggacttgtgtggaacccgatcggactcaggatgccatccacgaacccaggggtttaagtcggtcccacactgtcctgcggcacaggcactttgtgtttctccccttgtcctccggggcacacccaagtgtccctcctaggcgaaaaaattgtgctatgaaaaacgggaagcttctgaggtcatgttcttctgttagaagagccgcggacaagcttgactggggacggttttttctgcaggatctgcaaagtgtgtag

SEQ ID NO: 224095 - DNA, 2910 bp, Artificial Sequence
  derived and/or modified sequence
atgcacaccccctccatccgtagcataacccacgacgcgcagacttccagtactgggtcctctgccccaggcacagctctttgcaccgaagagtgtgtgcatggccgttgtgtatcgcccgacacctgccattgtgagccaggttggggcgggcctgactgttcttctggttgcgactcagaccactggggtcctcactgctccaataggtgtcagtgtcaaaatggagccctgtgtaatccaattacaggcgcttgtgtttgcgccgcagggttccgaggatggagatgcgaagagctctgcgcccccggcacccacggtaagggctgccagctcccttgccagtgtagacacggcgcgtcctgtgacccaagagcaggggaatgcctgtgtgctcctggttacacaggcgtgtactgtgaggagctttgtcctcctgggagtcatggagcacattgcgaactccgctgcccttgccagaatggtggaacctgtcaccacattacgggcgagtgtgcctgtccacccgggtggactggggccgtgtgcgcccaaccttgcccacccggtacatttgggcaaaattgcagccaagactgcccatgtcatcatggggggcagtgtgatcatgtaaccgggcagtgtcattgcaccgccgggtacatgggcgatagatgccaggaagagtgtccgttcggctctttcgggttccagtgctctcagcactgcgactgtcacaacggggggcagtgctctcccacaactggagcctgtgagtgcgagcccggttataaggggcctcgctgtcaggagcggttgtgccctgaaggactccatggtcctggatgtactctaccttgtccgtgcgatgccgacaacacaatctcatgccaccccgtgacgggtgcgtgcacctgtcaacccggctggtccggccaccattgtaatgagtcgtgcccggtcggatactacggcgacgggtgtcaactgccatgcacatgtcagaatggcgctgattgtcactcgatcaccggtggatgtacatgtgctcccggattcatgggcgaggtgtgtgcagtctcctgtgcagccggcacgtatggccccaactgttccagcatctgctcatgtaacaacggtggcacgtgcagtcccgtcgacgggtcatgcacttgtaaggaaggttggcagggcctggattgcacgctcccttgcccatcagggacatggggactgaattgtaatgagagttgtacgtgcgctaatggggccgcctgctccccaatcgacggctcttgcagctgtaccccaggttggctgggtgatacatgtgaattaccttgccctgatggcacatttggcctaaattgcagtgagcactgtgattgctctcacgcggatggctgcgatccagttacaggacactgctgttgcctggccggttggacggggattcgctgtgactccacctgtcctcccggcaggtgggggccaaattgttccgttagttgttcttgtgagaacggaggcagttgctcgcctgaagatggcagctgtgagtgcgcccccgggttccggggcccgctttgccagagaatctgtccacctggcttttacggtcatggctgcgctcagccatgccctctctgcgtccacagcagcagaccttgccaccacatctccggcatctgtgaatgcctgccaggattttcaggcgcactatgtaatcaggtatgtgcagggggttacttcggacaggattgcgcccagctgtgtagctgcgctaataacgggacttgtagtcctattgatggttcatgccagtgttttcccggatggattgggaaggattgcagccaggcttgtccccccgggttctgggggcccgcttgctttcacgcctgctcctgccataacggcgcctcctgttctgcagaggacggagcctgtcactgcacccctggctggacaggccttttttgcacccagagatgccctgcagcattctttggaaaggattgtggaagagtatgtcagtgccagaacggggcttcctgtgatcatatctccgggaaatgtacctgcagaacggggtttaccggccagcactgcgagcaaagatgcgctccagggacttttggatacggatgccagcaactttgtgagtgtatgaacaatagcacatgcgatcatgttaccgggacttgttactgttcccccggctttaagggcatccgctgcgatcaggcggctctcatgatggaggaacttaacccttacacaaagatcagtcccgcactgggcgcagagaggcactctgttggagccgttacaggaattatgctgctgctcttcctgatagtggtgctgctgggcctgttcgcatggcataggagacgccaaaaagagaagggcagggaccttgctccccgggtcagctatactcccgctatgagaatgactagcacagattatagcctgtctggagcttgcggcatggaccgccgccaaaacacttacatcatggataagggatttaaggactatatgaaagagtcggtgtgcagcagctcaacatgcagtctgaatagctctgaaaacccctatgcaaccatcaaagatcctccaattcttacatgtaagcttcctgaatcctcctacgtggagatgaagtctccagtgcacatgggttccccttataccgatgtgccatctctcagtacctcaaacaagaatatatacgaagtcgagccgactgtatcagttgtccaagagggatgtgggcacaatagttcatacattcagaatgcatacgatctgcccagaaattctcatatccctggacactacgatctgctgccggtgcgacagtctcccgctaacggaccttctcaagataaacaatcctag

SEQ ID NO: 224096 - DNA, 2628 bp, Artificial Sequence
  derived and/or modified sequence
atggttttgagcctgactggcctcatcgcattcagcttcctccaggcaactctggctctcaatccagaagatcctaatgtttgttcacattgggagtcttatgccgtgacagtccaggagagctacgcacatcccttcgatcagatctactacaccaggtgtacagacatcctaaattggtttaaatgtacccgccatagaattagttataagactgcctatcgtcggggactccggactatgtatagaagaaggtcacaatgctgtcctggttactatgagtccggggacttttgtatccccctctgcaccgaagagtgcgtacacgggcgctgcgtttcacccgatacctgccattgtgagcccggttggggcggacctgattgctcttccgggtgcgactcagaccactggggcccccattgcagcaatagatgccagtgccagaatggtgctctctgcaatcccatcacgggggcgtgtgtctgtgccgcaggtttccgcggatggcgatgcgaggaactgtgcgcacccgggacccatggtaaggggtgtcagctcccctgtcagtgtcggcatggcgcatcctgcgaccctcgcgcaggggaatgcctgtgtgctcctggatataccggcgtatattgcgaagaactctgtccccccggcagtcatggagcccactgtgaactccgctgtccctgtcagaatgggggaacttgccatcatatcactggagaatgcgcctgtcctccagggtggactggagccgtctgtgcgcagccttgccccccagggacgttcgggcagaattgttcccaagactgtccctgccatcacggcggacagtgcgatcatgtaaccggccagtgccactgcactgcaggctacatgggagacagatgccaggaggagtgcccgtttggctccttcggctttcagtgcagtcagcactgtgactgccacaatgggggccagtgttcaccaacaacaggcgcgtgtgaatgcgaacccggctataagggtcctagatgccaggaaagactatgccccgagggactccatggccccggctgcacgttaccatgcccatgcgacgcggacaatacgatttcctgccacccagtgactggcgcctgtacgtgtcagccaggctggagtggccatcattgtaatgaaagctgccctgtgggatattatggagatggatgccagctgccctgcacttgccagaacggagccgactgccactccatcaccggggggtgcacatgcgccccaggcttcatgggcgaggtttgcgccgtaagttgcgcagccggcacttacggccctaactgcagttcaatttgttcttgtaacaatggaggcacatgttcaccagtcgacggcagctgtacatgtaaagaaggttggcagggcctggactgtaccctaccctgtccctctggcacttgggggcttaattgcaatgaaagctgtacttgcgccaatggggcagcttgctctcctatagatggcagctgtagctgtacacctgggtggctcggcgacacctgtgaactgccttgtcccgatggaacttttggactaaactgtagcgagcactgtgattgctcccatgcggatggttgtgatcccgtaactgggcactgctgctgtttggccggctggactgggattaggtgtgatagcacatgcccacctggccgatggggacctaattgttcagttagctgcagttgtgagaacggcggctcttgttccccagaagacggttcatgcgaatgcgcccctggattccgggggcccctctgccagaggatctgccccccaggcttctacggtcatggatgcgcccaaccatgccctctgtgtgtgcactcttcacggccatgccaccacatatcaggaatctgcgaatgtctccccggcttctcaggggctctgtgcaatcaggtgtgtgctggtgggtatttcggacaagattgtgcacagctgtgcagttgcgctaataacggtacatgctccccaatagacgggagctgtcagtgctttccaggatggatcggtaaagactgttcacaggcatgtccgccaggtttctggggacccgcatgcttccacgcatgcagctgccataatggagctagttgttcagcagaggacggcgcatgccactgtaccccgggctggaccgggctcttctgtactcaaagaaaacctcatcttctggcgagccagccactccgaatcccgtgctgtggcttgctcgctacagtgggtatcgtacagaccagccgcgagggagggatgcaggccgcccctgggcttgtggttcctgatagctgtccgaccagaactgaggagctgtgccggggatcgtcaaggccagactggattcagggaattgacaagcctaaggtactcgaagggcagggatgcaaagcggctcaacagcactttctcggccgcactgtgggggcatacgctagtgttcgcatggcacccgctgtcacaacctccgtggctagtgcccctgcagctcaggctagccctgggaatacagtgtctagagacgtaccgcaggagccactcgccatgggagtatcttcatacgtcagcgcgtag

SEQ ID NO: 224097 - DNA, 2910 bp, Artificial Sequence
  derived and/or modified sequence
atgcacacccctagcattcggtctatcacccatgacgcccagacctcttctactggctcaagcgctcctgggaccgcgctatgcaccgaagaatgcgtacacggtcgttgtgtttccccagacacatgtcattgcgagcccggttggggtggccccgactgttctagcggctgcgactcagaccattggggaccccattgtagcaacagatgtcagtgccagaacggggctctctgtaatcccattacgggagcatgtgtgtgtgccgctgggttccggggatggcgttgtgaagaactgtgcgctccaggaactcatggaaagggatgccagctgccatgccagtgtagacatggagcctcatgcgatcctcgagccggtgagtgcttgtgtgctccaggatatactggcgtttactgcgaagaattgtgtccccccggtagccatggcgctcactgtgagctgcgttgtccatgtcagaatggaggaacatgccaccatattactggagagtgcgcctgtcctcccggctggaccggggccgtgtgtgcacagccttgccctcccgggacattcggccagaattgcagccaggactgtccatgccaccacgggggccagtgtgaccacgtgacaggtcagtgtcactgcaccgcaggttatatgggtgatcggtgtcaggaagaatgcccctttggctcctttggattccaatgcagtcagcattgtgactgccacaacggtggccaatgctcaccaactactggagcttgtgaatgtgagcctggctataagggtccccggtgtcaggagcggttgtgccccgaaggactgcatgggcctggctgtacactgccatgcccgtgtgatgccgacaacacaatttcttgccaccccgtgacgggcgcctgtacctgtcaacctggatggtctgggcatcactgcaacgaatcttgccccgtcggctattacggggatggatgccaactgccatgcacctgccagaatggagccgattgccactcaatcactggcgggtgtacttgcgcccccggtttcatgggagaggtgtgtgccgtctcatgtgctgctggcacctacggcccaaattgctcctccatctgttcttgtaacaatggaggtacttgctctccagtcgatggatcgtgcacttgtaaggagggatggcagggtctcgactgtacccttccgtgtccaagcggtacgtggggattgaactgcaatgaatcctgcacatgtgctaacggtgcagcctgcagtccgattgacggatcttgctcatgtaccccaggttggttaggagatacatgcgaactcccctgcccagacggaaccttcggtcttaattgcagcgagcactgtgactgctcccacgctgatggatgcgatcctgttactggtcactgctgttgtctggctggttggactgggatcaggtgcgattcgacatgtccaccgggacgttggggtccgaactgtagtgtcagctgtagctgcgagaacggtggcagttgtagccctgaggacgggtcatgtgagtgcgcccccggatttcgcggacctttatgccagaggatctgtccacctggattttatggacatggctgcgcccagccctgtcctctgtgtgtccactcctcccgtccgtgtcaccatatcagcgggatttgcgagtgtctccccggatttagcggagcgctgtgcaatcaggtctgtgccggtgggtattttggccaggactgtgctcagctgtgtagctgcgccaataatggaacctgtagccccattgatggctcctgtcagtgttttcccggctggattgggaaagactgcagtcaagcctgccctccagggttctggggaccagcctgctttcacgcctgcagttgtcacaacggcgcttcttgctccgccgaagacggagcttgccattgtacacctggctggaccgggcttttttgtacccagagatgtcctgctgccttctttggaaaggattgtgggcgggtctgtcagtgtcagaacggcgcatcatgcgatcatataagcggaaagtgcacttgcaggaccggcttcacgggtcagcactgcgagcagcgatgcgcgcctggtaccttcggctacggctgccagcagctttgtgagtgcatgaacaatagcacgtgcgatcatgtaaccggaacctgttactgtagcccaggcttcaaaggaatccgttgcgatcaagctgccctcatgatggaagagctgaacccctatacaaagatcagccccgctctgggagccgaacgtcactccgtgggcgccgtgacagggatcatgttactgctcttcctgatcgtggtgttgctcggcctcttcgcttggcaccggcgccgccagaaagaaaaggggagggatctcgccccaagggtcagctatacccccgcaatgcgcatgactagcacagactattccttgagcggggcctgtgggatggatcggagacaaaacacgtacatcatggacaaggggttcaaggactatatgaaggaaagcgtatgttcctcttccacgtgctccttaaattcatccgagaatccctatgctaccataaaagaccctccaattctcacctgtaaactgcccgagagctcatacgtcgagatgaagtcgccggtgcacatggggtccccctacaccgatgtcccttcgctcagtactagtaataagaatatatatgaagtcgagccaaccgtgagcgtcgtgcaggaagggtgtggtcacaattctagctacatccagaatgcgtatgatttgccaaggaattcccatatccctgggcattatgacctccttcctgtcagacagtctcccgccaacggtccgtctcaggacaagcaatcatag

SEQ ID NO: 224098 - DNA, 3135 bp, Artificial Sequence
  derived and/or modified sequence
atggttctttccctgacgggactaattgccttctcttttctgcaggcaactctggcactgaaccctgaagacccgaacgtgtgttctcattgggagtcctacgcggtgacggtacaagaatcttatgcccacccatttgatcagatttattatacaagatgtaccgacatccttaactggttcaagtgtacccgccaccggatctcctacaagaccgcataccggcgcgggctccgaactatgtaccggcggcggtctcagtgctgccctggatactacgagagcggcgacttctgcattcctctatgtacggaggagtgcgtccatggacgttgtgtctcccctgatacatgtcactgtgagcctgggtgggggggaccagattgtagcagcggttgcgattcagaccactggggccctcactgctctaaccgctgccagtgtcagaatggcgcgctttgcaatccgatcactggtgcttgcgtatgcgccgccggctttcgggggtggagatgcgaggagctgtgcgcacccggcactcatggcaagggctgccagctgccttgtcagtgtcgccacggagcctcctgtgatccacgagctggagagtgtctttgtgctcctggctacactggggtgtactgcgaagaattgtgtccccctggatcacacggcgcccattgtgagctgaggtgtccttgccaaaacggtgggacttgtcatcatatcaccggggagtgcgcttgcccccccggttggactggcgcggtgtgcgcccagccttgccctccaggaaccttcggacagaactgttcacaggactgtccctgccaccacgggggccaatgcgaccatgttaccggacagtgccactgtactgcaggctatatgggggaccggtgtcaggaagagtgcccattcggttcctttggcttccagtgcagccagcactgcgattgccacaacgggggccagtgctcacctaccacgggagcctgtgaatgtgagcctggatacaagggtccgaggtgtcaggagaggctatgccctgaaggactgcatggcccgggctgcaccttgccatgcccatgcgacgccgacaacacaatcagttgtcaccccgtcactggagcatgcacatgccagccagggtggagcggccaccattgcaacgaatcttgccctgtggggtattacggcgacggctgtcagctcccgtgtacttgtcaaaatggagctgattgtcattctattaccggcggctgcacttgcgcgcccggtttcatgggcgaagtgtgcgcagtgtcctgtgcagctggcacttatgggccaaactgctcaagcatctgttcatgtaacaacggtgggacgtgtagtcctgtggacggtagctgtacttgcaaggaaggttggcagggtttagattgcactctgccttgccccagtgggacatgggggctgaactgcaacgagtcttgtacatgtgccaacggagccgcttgcagccctatcgacggctcctgcagttgcactcctggctggttgggagatacctgcgagctcccttgtcccgacggcacctttgggttgaactgttcagaacattgtgactgctctcatgccgatgggtgtgaccccgtgaccggtcattgttgttgtcttgcaggatggactgggattcgctgcgatagtacatgccctccaggccgctggggccctaactgtagtgtgtcctgctcctgtgagaatggcggttcttgcagcccggaggatgggtcatgcgagtgtgcacccggctttcgcggcccactgtgccaaagaatttgtccccccgggttttatgggcacgggtgcgcccagccgtgtcccctctgcgtacactcatccaggccatgccaccacatcagcggtatctgtgaatgcctgcccggtttctctggggccttatgcaatcaggtttgtgcgggggggtactttggacaggactgcgctcagctgtgttcttgtgcaaacaacggcacctgctcccccatcgacgggtcgtgtcagtgcttcccgggctggatcggtaaagattgctctcaggcctgtccaccaggcttctggggtcctgcttgctttcatgcctgcagctgccacaatggagcgagctgctcagccgaggatggcgcctgtcactgtactcccggttggactggactcttttgcacgcagcggtgtcctgctgcattttttggcaaggattgcggaagggtctgtcagtgtcagaacggggcctcttgtgaccatatcagtggaaagtgtacgtgtcggactggcttcaccggacagcactgcgaacagaggtgcgcccccggtacttttggctatggttgccaacagttatgcgagtgtatgaataactcgacttgcgaccacgtgaccggaacttgctactgctcgcctggcttcaaagggattagatgcgaccaggctgccctaatgatggaagaacttaacccttacaccaagattagccccgctctcggggccgagcgccacagcgtgggcgccgtgacggggattatgcttttactgtttctgattgtggtattactgggtctgtttgcatggcatcgccggcgtcagaaggaaaagggaagggatcttgcccctagggtctcctatacccccgcaatgcgcatgaccagcactgattattccctgagtggcgcttgcggaatggacagacgccagaatacatacattatggataagggtttcaaggactatatgaaggagtctgtgtgctcatcctcaacatgttccttgaacagctctgagaatccttatgcaacaatcaaggatccaccaatactaacttgcaagctacccgagtcgagctacgtggaaatgaaaagtcctgtacatatgggttctccctacaccgacgtaccaagcttgtcaaccagtaacaagaacatctatgaggtagagccaactgtgtcagttgtgcaagaaggatgcggccataattccagctacatacaaaacgcctacgatctgcccagaaattctcacattccgggccactatgaccttctcccagtgcgtcagtctccagcaaatggcccatcccaggacaaacagagctag

SEQ ID NO: 224099 - DNA, 3135 bp, Artificial Sequence
  derived and/or modified sequence
atggtcctgtccctgacaggtttgatagccttcagcttccttcaggcgaccctcgctttgaatcccgaggaccccaatgtctgcagccactgggagtcatatgccgtgaccgtgcaggagtcttacgctcatccttttgaccagatttactacacacggtgtacagatattttaaactggtttaagtgtactcggcaccggatcagctataaaaccgcataccgcagaggacttcgcactatgtatcgaaggagaagtcagtgctgtcctgggtattacgaatccggggatttttgcattcccctgtgtactgaggaatgcgtacatggacgatgtgtttctcctgacacatgtcattgtgaacctggctggggcggtcctgattgtagcagcgggtgtgatagcgaccactggggccctcattgtagtaaccgttgccagtgtcagaacggcgcgctctgtaatccgatcactggggcttgtgtgtgcgcagccggttttcgcgggtggaggtgtgaggaactttgtgcaccaggtacgcacggaaaggggtgccagttgccctgtcaatgcaggcatggtgctagttgcgaccctagggccggggagtgtctgtgtgcaccgggttacacaggggtatactgtgaagagctgtgtcctcccggttcacatggagcccattgcgaactcagatgtccctgtcagaacggaggcacatgtcaccacattaccggggagtgcgcctgccctcctggatggacgggcgccgtctgcgcccagccctgtcctcccggcacttttggccaaaactgctcccaggattgcccctgccaccacggggggcagtgtgaccacgtgactggccagtgccactgtacagcgggttacatgggagaccgatgtcaggaggagtgccccttcggctcattcggatttcagtgctctcaacattgcgactgccacaatggcggccagtgtagccccacaacaggagcctgcgagtgcgagcctggatacaagggtccgagatgtcaggagaggctttgtcctgaaggactccacggccctggatgcacattaccgtgtccttgcgacgccgacaacacaatcagttgtcaccctgtgaccggtgcctgcacttgccagcctggttggtccgggcatcattgtaacgagtcatgtccagtgggttactacggagacggctgtcagctgccgtgtacttgccagaacggagctgattgtcattctatcaccggcggatgtacatgcgcgccgggcttcatgggcgaagtgtgcgccgtgtcctgtgccgcaggaacctacggcccgaactgctcttccatttgttcctgcaacaatggcggaacgtgtagccccgtggacgggagctgtacttgtaaagagggttggcaaggtctggactgtaccctgccatgtccgagcgggacttggggactgaattgcaacgaaagctgtacttgtgccaatggggctgcatgttcacctatagacgggagctgctcctgtacaccgggatggctaggtgatacgtgcgaacttccatgccccgatggaacatttgggctgaattgttcggagcactgtgactgttctcatgccgacggatgcgacccggttactggccactgttgctgcctggccggatggaccggtatccgctgtgattccacgtgtcctccaggcagatggggccccaactgttcggtcagctgtagttgcgaaaacggtggtagctgttcaccagaggacggctcatgtgagtgcgccccaggcttccgcgggccactgtgtcaacgcatctgccctccaggcttttacggacacgggtgtgcccagccatgtcctttgtgtgtgcattcatcccggccctgccaccacatctctggcatctgtgagtgcctccctggcttctcgggggcgctttgtaatcaggtgtgtgccgggggctatttcggtcaggactgcgctcaactgtgttcctgcgccaacaatggaacatgctctcccattgatgggtcgtgtcagtgcttccctgggtggattgggaaagattgcagccaggcatgcccccccgggttttggggacccgcttgcttccacgcttgtagttgccataatggagcgtcctgttcggcagaggacggtgcttgccactgcacgccagggtggaccggactcttctgtacccagaggtgcccagcagcgttctttggtaaagattgtggccgcgtatgtcagtgccagaacggggctagttgtgaccatatctcagggaagtgtacctgtaggactgggttcaccggtcagcattgcgagcaaaggtgtgctcctgggacatttgggtacggctgccagcagctgtgtgaatgcatgaacaactcgacatgcgaccacgtcactggaacctgctactgttcacccggctttaaaggaatccgttgtgatcaggccgccctgatgatggaggagctcaacccctatacaaagattagcccggccctgggcgctgaaagacattctgtgggggccgttaccggcatcatgctgctgctgttcctgatcgttgtgctgctggggctctttgcctggcaccgtaggagacaaaaggaaaagggcagagatctggctcctagggtctcctatacccctgctatgcgaatgacctctactgattactcactgagtggtgcctgcgggatggatagaagacagaatacatacatcatggataaggggtttaaggattatatgaaggagagtgtgtgttcctcatctacatgtagcttgaacagcagcgagaacccctacgcgacgattaaagatccgcccatcctgacgtgtaaactgccagagtcgtcgtatgttgagatgaaatcccctgttcacatgggctccccttacacggatgtgccgtctctgtccacttccaataaaaatatctacgaagtcgagcccacggtctctgtggtgcaggaagggtgcggacacaattcctcatatattcagaatgcttatgatctgcctcggaactcccacatcccaggccattacgaccttctccccgttaggcagtcacccgctaacggaccgtcacaggataagcagagctag

SEQ ID NO: 224100 - DNA, 2910 bp, Artificial Sequence
  derived and/or modified sequence
atgcacacccccagcatccgcagcatcacccatgatgcccagaccagcagcacaggcagcagcgcccctggaacagccctgtgcacagaagaatgtgtgcacggccgctgtgtgtccccagacacctgccactgtgagcccggctggggcggccctgactgcagcagcggctgtgacagcgaccactggggcccccactgcagcaaccgctgccagtgccagaatggagccctgtgcaaccccatcactggagcctgtgtgtgtgccgccggcttccggggctggaggtgtgaggagctgtgtgcccctggcacccacggcaagggctgccagctgccctgccagtgccgccacggggccagctgtgacccccgggccggggagtgcctgtgtgcccctggctacacaggagtgtactgtgaggagctgtgccccccaggcagccatggagcccactgtgagctgcgctgcccctgccagaatggaggcacctgccaccacatcactggagaatgtgcctgccccccaggctggacaggagctgtgtgtgcccagccctgccccccaggcaccttcggccagaactgcagccaggactgcccctgccaccacggcggccagtgtgaccacgtgacaggccagtgccactgcacagctggctacatgggagaccgctgccaggaggagtgccccttcggcagctttggcttccagtgcagccagcactgtgactgccacaatggaggccagtgcagccccaccactggagcctgtgaatgtgagcccggctacaagggcccccgctgccaggagcggctgtgcccagagggcctgcacggccctggctgcaccctgccctgcccctgtgatgctgacaacaccatcagctgccaccctgtgactggagcctgcacctgccagcccggctggagcggccaccactgcaatgaaagctgccctgtgggctactatggagatggctgccagctgccctgcacctgccagaatggagctgactgccacagcatcaccggcggctgcacctgtgcccctggcttcatgggagaggtgtgtgctgtgtcctgtgccgccggcacctacggccccaactgcagcagcatctgcagctgcaacaatggaggcacctgcagccctgtggatggcagctgcacctgcaaggagggctggcagggcctggactgcaccctgccctgccccagcggcacctggggcctgaactgcaatgaaagctgcacctgtgccaacggggccgcctgcagccccattgatggcagctgcagctgcaccccaggctggctgggggacacctgtgagctgccctgcccagatggcaccttcggcctgaactgcagcgagcactgtgactgcagccatgctgatggctgtgaccctgtgacaggccactgctgctgcctggccggctggacaggcatccgctgtgacagcacctgccccccaggccgctggggccccaactgcagcgtgtcctgcagctgtgaaaatggaggcagctgcagcccagaagatggcagctgtgaatgtgcccctggcttccggggccccctgtgccagaggatctgccccccaggcttctacggccacggctgtgcccagccctgccccctgtgtgtgcacagcagccggccctgccaccacatcagcggcatctgtgaatgtctgcccggcttcagcggggccctgtgcaaccaggtgtgtgccggcggctacttcggccaggactgtgcccagctgtgcagctgtgccaacaacggcacctgcagccccattgatggcagctgccagtgcttccctggctggattggcaaggactgcagccaggcctgccccccaggcttctggggccctgcctgcttccacgcctgcagctgccacaatggagccagctgcagcgcagaagatggagcctgccactgcaccccaggctggacaggcctcttctgcacccagcgctgcccagctgccttcttcggcaaggactgtggccgggtgtgccagtgccagaatggagccagctgtgaccacatcagcggcaagtgcacctgcaggacaggcttcaccggccagcactgtgagcagagatgtgcccctggcaccttcggctacggctgccagcagctgtgtgagtgcatgaacaacagcacctgtgaccacgtgacaggcacctgctactgcagccctggcttcaagggcatccgctgtgaccaggccgccctgatgatggaggagctgaacccctacaccaagatcagccctgccctgggcgctgagcggcacagcgtgggcgctgtgacaggcatcatgctgctgctcttcctgattgtggtgctgctgggcctgtttgcctggcacagaagacggcagaaggagaagggccgggacctggccccccgggtgtcctacaccccagccatgaggatgaccagcacagactacagcctgagcggggcctgtggcatggaccggcggcagaacacctacatcatggacaagggcttcaaggactacatgaaggagagcgtgtgcagcagcagcacctgcagcctgaacagcagcgagaacccctatgccaccatcaaggacccccccatcctgacctgcaagctgcctgagagcagctatgtggagatgaagagccctgtgcacatgggcagcccctacacagatgtgcccagcctgagcaccagcaacaagaacatctatgaggtggagcccaccgtgtctgtggtgcaggagggctgcggccacaacagcagctacatccagaatgcctatgacctgcccaggaacagccacatccctggccactatgacctgctgcctgtgcggcagagccctgccaacggccccagccaggacaagcagagctag

SEQ ID NO: 224101 - DNA, 2628 bp, Artificial Sequence
  derived and/or modified sequence
atggtgctgagcctgaccggcctgattgccttctccttcctgcaggccaccctggccctgaaccctgaggaccccaacgtgtgcagccactgggagagctatgctgtgacagtgcaggagagctatgcccacccctttgaccagatctactacacccgctgcacagacatcctgaactggttcaagtgcaccaggcaccgcatctcctacaagacagcctacagaagaggcctgcggaccatgtacagaagaagaagccagtgctgccccggctactatgaaagtggggacttctgcatccccctgtgcacagaggagtgtgtgcacggccgctgtgtgtccccagacacctgccactgtgagcccggctggggcggccctgactgcagcagcggctgtgacagcgaccactggggcccccactgcagcaaccgctgccagtgccagaatggagccctgtgcaaccccatcaccggggcctgtgtgtgtgccgccggcttccggggctggaggtgtgaggagctgtgtgcccctggcacccacggcaagggctgccagctgccctgccagtgcagacatggagccagctgtgaccccagggctggagaatgtctgtgtgcccctggctacacaggagtgtactgtgaggagctgtgccccccaggcagccacggggcccactgtgagctgcgctgcccctgccagaatggaggcacctgccaccacatcaccggggagtgtgcctgccccccaggctggacaggagctgtgtgtgcccagccctgccccccaggcaccttcggccagaactgcagccaggactgcccctgccaccacggcggccagtgtgaccacgtgacaggccagtgccactgcacagctggctacatgggagaccgctgccaggaggagtgccccttcggcagctttggcttccagtgcagccagcactgtgactgccacaacggcggccagtgcagccccaccaccggggcctgtgaatgtgagcccggctacaagggcccccgctgccaggagcggctgtgcccagagggcctgcacggccctggctgcaccctgccctgcccctgtgatgctgacaacaccatcagctgccaccctgtgactggagcctgcacctgccagcccggctggagcggccaccactgcaatgaaagctgccctgtgggctactatggagatggctgccagctgccctgcacctgccagaatggagctgactgccacagcatcactggaggctgcacctgtgcccctggcttcatgggagaggtgtgtgctgtgtcctgtgccgccggcacctacggccccaactgcagcagcatctgcagctgcaacaacggcggcacctgcagccctgtggatggcagctgcacctgcaaggagggctggcagggcctggactgcaccctgccctgccccagcggcacctggggcctgaactgcaatgaaagctgcacctgtgccaatggagctgcctgcagccccattgatggcagctgcagctgcaccccaggctggctgggggacacctgtgagctgccctgcccagatggcaccttcggcctgaactgcagcgagcactgtgactgcagccatgctgatggctgtgaccctgtgacaggccactgctgctgcctggccggctggacaggcatccgctgtgacagcacctgccccccaggccgctggggccccaactgcagcgtgtcctgcagctgtgaaaatggaggcagctgcagcccagaagatggcagctgtgaatgtgcccctggcttccggggccccctgtgccagaggatctgccccccaggcttctacggccacggctgtgcccagccctgccccctgtgtgtgcacagcagccggccctgccaccacatcagcggcatctgtgagtgcctgcccggcttcagcggggccctgtgcaaccaggtgtgtgccggcggctacttcggccaggactgtgcccagctgtgcagctgtgccaacaacggcacctgcagccccattgatggcagctgccagtgcttccctggctggattggcaaggactgcagccaggcctgccccccaggcttctggggccctgcctgcttccacgcctgcagctgccacaacggggccagctgcagcgcagaagatggagcctgccactgcaccccaggctggacaggcctcttctgcacccagaggaagccccacctgctggccagccagcccctgcgcatcccctgctgcggcctgctggccaccgtgggcatcgtgcagaccagccgggagggcggcatgcaggccgcccctggcctggtggtgcctgacagctgccccaccaggacagaggagctgtgccggggcagcagcaggccagactggatccagggcatcgacaagcccaaggtgctggagggccagggctgcaaggccgcccagcagcacttcctgggccgcacagtgggcgcctatgcctctgtgaggatggccccagctgtgaccacctctgtggccagcgccccagctgcccaggccagccctggcaacacagtgtccagagatgtgccccaggagcccctggccatgggcgtgtcctcctatgtgtctgcctag

SEQ ID NO: 224102 - DNA, 3135 bp, Artificial Sequence
  derived and/or modified sequence
atggtgctgagcctgaccggcctgattgccttctccttcctgcaggccaccctggccctgaaccctgaggaccccaacgtgtgcagccactgggagagctatgctgtgacagtgcaggagagctatgcccacccctttgaccagatctactacacccgctgcacagacatcctgaactggttcaagtgcaccaggcaccgcatctcctacaagacagcctacagaagaggcctgcggaccatgtacagaagaagaagccagtgctgccccggctactatgaaagtggggacttctgcatccccctgtgcacagaggagtgtgtgcacggccgctgtgtgtccccagacacctgccactgtgagcccggctggggcggccctgactgcagcagcggctgtgacagcgaccactggggcccccactgcagcaaccgctgccagtgccagaatggagccctgtgcaaccccatcaccggggcctgtgtgtgtgccgccggcttccggggctggaggtgtgaggagctgtgtgcccctggcacccacggcaagggctgccagctgccctgccagtgcagacatggagccagctgtgaccccagggctggagaatgtctgtgtgcccctggctacacaggagtgtactgtgaggagctgtgccccccaggcagccacggggcccactgtgagctgcgctgcccctgccagaatggaggcacctgccaccacatcaccggggagtgtgcctgccccccaggctggacaggagctgtgtgtgcccagccctgccccccaggcaccttcggccagaactgcagccaggactgcccctgccaccacggcggccagtgtgaccacgtgacaggccagtgccactgcacagctggctacatgggagaccgctgccaggaggagtgccccttcggcagctttggcttccagtgcagccagcactgtgactgccacaacggcggccagtgcagccccaccaccggggcctgtgaatgtgagcccggctacaagggcccccgctgccaggagcggctgtgcccagagggcctgcacggccctggctgcaccctgccctgcccctgtgatgctgacaacaccatcagctgccaccctgtgactggagcctgcacctgccagcccggctggagcggccaccactgcaatgaaagctgccctgtgggctactatggagatggctgccagctgccctgcacctgccagaatggagctgactgccacagcatcactggaggctgcacctgtgcccctggcttcatgggagaggtgtgtgctgtgtcctgtgccgccggcacctacggccccaactgcagcagcatctgcagctgcaacaacggcggcacctgcagccctgtggatggcagctgcacctgcaaggagggctggcagggcctggactgcaccctgccctgccccagcggcacctggggcctgaactgcaatgaaagctgcacctgtgccaatggagctgcctgcagccccattgatggcagctgcagctgcaccccaggctggctgggggacacctgtgagctgccctgcccagatggcaccttcggcctgaactgcagcgagcactgtgactgcagccatgctgatggctgtgaccctgtgacaggccactgctgctgcctggccggctggacaggcatccgctgtgacagcacctgccccccaggccgctggggccccaactgcagcgtgtcctgcagctgtgaaaatggaggcagctgcagcccagaagatggcagctgtgaatgtgcccctggcttccggggccccctgtgccagaggatctgccccccaggcttctacggccacggctgtgcccagccctgccccctgtgtgtgcacagcagccggccctgccaccacatcagcggcatctgtgagtgcctgcccggcttcagcggggccctgtgcaaccaggtgtgtgccggcggctacttcggccaggactgtgcccagctgtgcagctgtgccaacaacggcacctgcagccccattgatggcagctgccagtgcttccctggctggattggcaaggactgcagccaggcctgccccccaggcttctggggccctgcctgcttccacgcctgcagctgccacaacggggccagctgcagcgcagaagatggagcctgccactgcaccccaggctggacaggcctcttctgcacccagcgctgcccagctgccttcttcggcaaggactgtggccgggtgtgccagtgccagaatggagccagctgtgaccacatcagcggcaagtgcacctgcaggacaggcttcaccggccagcactgtgagcagagatgtgcccctggcaccttcggctacggctgccagcagctgtgtgagtgcatgaacaacagcacctgtgaccacgtgacaggcacctgctactgcagccctggcttcaagggcatccgctgtgaccaggccgccctgatgatggaggagctgaacccctacaccaagatcagccctgccctgggcgctgagcggcacagcgtgggcgctgtgacaggcatcatgctgctgctcttcctgattgtggtgctgctgggcctgtttgcctggcacagaagacggcagaaggagaagggccgggacctggccccccgggtgtcctacaccccagccatgaggatgaccagcacagactacagcctgagcggggcctgtggcatggaccggcggcagaacacctacatcatggacaagggcttcaaggactacatgaaggagagcgtgtgcagcagcagcacctgcagcctgaacagcagcgagaacccctatgccaccatcaaggacccccccatcctgacctgcaagctgcctgagagcagctatgtggagatgaagagccctgtgcacatgggcagcccctacacagatgtgcccagcctgagcaccagcaacaagaacatctatgaggtggagcccaccgtgtctgtggtgcaggagggctgcggccacaacagcagctacatccagaatgcctatgacctgcccaggaacagccacatccctggccactatgacctgctgcctgtgcggcagagccctgccaacggccccagccaggacaagcagagctag

SEQ ID NO: 224103 - DNA, 5707 bp, Artificial Sequence
  derived and/or modified sequence
gcccgctgcccgccgcccggctcccggctgctcgcggccccctgctcctgcctggcgctctggccaggctcgggctccggaggacaggaccgcgcgactggccggccgatccctgggccggccgcgggagcagctatgctgtgactgtccaggaatcgtatgcacaccccttcgatcagatctattacacacgatgcacagacatcctcaactggttcaagtgcaccaggcaccgccctgtgtacggaggagtgtgtgcacggccgctgcgtttccccggacacctgccactgcgagcctggctggggagggcccgactgctccagcggctgcgacagcgaccactgggggccccactgcagcaaccggtgccagtgccagaacggcgccctgtgtaaccccatcacaggcgcctgcgtgtgcgccgccggcttccgtggatggcgctgcgaggagctctgcgcacctggcacccacggcaagggatgccagctgccgtgccagtgccgacacggtgccagctgcgacccccgcgccggcgagtgcctctgcgcacctggctacaccggcgtctactgcgaggagctgtgccctcctgggagccatggagctcactgtgagctgcgctgcccctgtcagaatgggggcacctgccaccacatcactggcgagtgtgcctgccccccaggctggacgggagcagtgtgtgcccagccctgcccaccagggacatttggccagaactgcagccaggattgtccttgccaccatggagggcagtgtgaccacgtgactggacagtgccactgtacagctggatacatgggggacaggtgccaagaggagtgccccttcgggtccttcggcttccagtgctcacagcactgtgactgccacaatggggggcagtgttcacccaccacgggtgcctgcgagtgtgagcctggctacaagggcccacgctgccaggagcgactgtgcccggagggcctgcatggcccaggctgcaccctgccctgcccctgtgacgctgacaacaccatcagctgccacccagtaactggagcttgtacctgccagccaggctggtctggtcaccactgcaatgaatcctgccctgttggctactatggcgatggctgccagctgccttgcacctgtcagaatggcgccgactgccacagcatcactgggggctgcacttgtgctccgggcttcatgggagaggtctgtgccgtttcctgtgcagcagggacctatggccccaactgctcgtccatctgtagctgtaacaatggtggcacctgctccccagtagatggctcctgtacctgcaaggaagggtggcagggcctggactgcaccctgccatgtcccagtgggacgtggggcctgaactgcaacgagagctgcacctgtgccaatggggcagcctgcagccccatagacggctcctgctcctgcactcctggctggctgggagacacctgtgagctgccttgcccggatggcacatttgggctgaactgcagtgaacactgtgactgcagccatgctgatggatgtgaccccgtcacaggccactgctgctgcctggccggatggacaggcatccgctgtgacagcacgtgtccacctggccgctggggccccaactgctctgtctcctgcagctgtgagaatggaggctcctgctccccagaggatgggagctgcgagtgtgcccctggcttccgaggacccttatgccagagaatctgcccccctgggttctatggccacggctgcgcccagccatgccccctctgcgtgcacagcagcaggccctgccaccacatcagcggcatctgtgagtgcctcccaggattctctggagctctctgcaaccaagtgtgtgctggaggatactttgggcaggactgtgcccagctctgctcctgtgccaacaacgggacctgcagccctatcgatggctcctgccagtgctttcctggatggattggcaaggactgctcacaggcttgcccacccgggttctggggccccgcctgcttccacgcatgcagctgccacaacggggcgagctgcagcgccgaggacggggcctgccactgcacccctggctggactggactcttctgcacacagcgctgcccagcagcattttttgggaaggactgtgggcgcgtatgccagtgtcagaatggcgccagctgtgaccacatcagtggcaagtgcacctgccgcacaggcttcaccgggcaacactgtgagcagagatgtgccccaggaacctttggctatgggtgtcagcagctatgtgagtgcatgaacaactccacctgtgaccatgtcaccggcacctgttactgcagccctggcttcaaaggaatcaggtgtgaccaagctgccctcatgatggaggagctgaatccctacaccaagatcagcccagcactgggtgcagagcggcactcggtgggtgctgtcacaggcatcatgctcctgttattcctcattgtggtgctgctgggcctatttgcctggcatcggcggcggcagaaagagaagggccgagacctggctccccgtgtctcctacacacctgccatgaggatgaccagcaccgactactccctctcaggtgcttgtggaatggatagacgtcagaacacatacattatggacaaaggcttcaaagattacatgaaagaatccgtgtgcagttctagtacttgttccttgaatagcagtgaaaacccttacgccacaattaaggacccacccatcctcacctgcaagcttccagaaagcagctatgtagaaatgaagtcgcctgtgcacatggggtctccgtacacagatgtgccatccttgtcgacatctaataaaaatatatatgaagttgagcccacagtcagtgtggtccaagaaggttgcggtcataactccagctatatccagaatgcatacgacctacctaggaacagccatattcctggtcattatgacctcctcccagtaagacagagccctgccaatgggccgtcccaggacaagcaatcttaagagggataagcttctctcttgcagtgtgctctactgaatattctgactctgaaagaagacagtcccttgacttgaagtaatggtacagactggctccagctgcatgttagttattacgttcacctggaactaaagaagagcgtccaggtgggactgggataattgttcaaggaattgtgttctcaaaggcaaatcctatcacccactcagccccaaatgccctggattatatgatttttaaaacattttaagatacagctactcatcaacatcagctaaatatagctgatatatatatatatatttatctgaaacgtgatattttaaaaacatgtaggtttaacaaaccttcctaggacaaaaaggagactggggagggaagaggattactttaaagcacctgaaacgtatatgtacttttggttgctgttaccatcaacatctgttttattaccgaagacaattagtacacagacatgaactgttcttaaacagaacagtcttaaaatgtctgtacatatctgtctggtccatcaaattacaacagccaagattacagaatctatatagtctaatgctgacaacttctattttaaaaaacaagactttactttcttctgccccctaagtgataggtttaaacacacagagacacacacacacgtttccaaagtgcagcagtgtctctttcagtctacaataagattcctagggcagctttatcaaattttgccaattcaaagttcaaggacattacaagttagtcctggctttgtcatatctacttagtccatccgacacctgaatcattccatgtaaaacagagctctaagatgatcctttaagcaagcagtcatagactggtcgggattaagtaaaagacggctagttggcctcctcattttatttggtcagcatcccttgactcaagagtacttgctttcaagttcttcataaatcttgagattgacgtagtatgaaacctaaaagtatacaggaaattggacaaatgtggatacagcaagtttacactgcttaaagtacattatgctttttaatggaactaaatgatcaaaaaaagaatggactgtaaccagttgctgtaacgtgatgtaaaaacgttactgtaaacagcatgaggatatgaagtccttccaccttctatcttaaaactactacttactgagctagcccaatatgcattacaatgagctaatgctccagatcccagtattcagatgtgtctataccttccactatgaacacagataaactgaggctcagataagtccaaatgaaatgaaatcaactcccaagccctaaagagaaccttctcacaagaattaaaaacaaaaagggcaaacctaggaagctaacggctactcctgtaccactctattcactggtacagtccagccagtaaaaaacacttccaaaaagatacacagaagaggaactaaatgactgcgaagctggaatactgctacaggaagtatgagagttctgaaacccttgatagaaactggaagcctgccatggaacacaatactttgggcaataatcagaaaaagcaaaaaaataaataaatgagtacatctccccttcccacatcactcaaggcataagcagattttactgttagaggaaaatatgtaatacttacatgaatgttgcatgtgtgcatgggagcaactgagtagcaatagtaaatttactttccaaaaaagccttattaaaatataaatattagaaaattactttggagacccaagtaaatatttctcatacatatgtagaaagaaatataggtaagcagcttacctcagtatttcagggcagcaagtgtttgtgaagcaaggatgagcagcatgaagatgtcagatcagcaaggagaaacttcaactcaatcccaggttttctcttcttcccttatcctgcatgtacaataactgctgcctggcaaactgcaaacaagcagcatcactcaagtttgaagtttcgccgcttttgtcaactatcctctgggcaaaggtattcagcaagaggtggaatggctagacactgaatcaagagatttcagtgttactctggtcaagttagtcgccctctctgggctcccttttttcctatgcataaaaaggggagaagcagagagtgggaagacagctctactaacccttcagctctagcagtccatgactttttaaggaaatgtaatacaagtcaaaccaggcaatacagaggagaagggaaaggcagagggtgtgattatggtgacaatagctgccttcccctatcgaacagttatcagtaaaagacatttcaatcttacaaagcaactgttagaaacttctgtctaacaccatcacaaataggttcatggtcagcctaaacatgtatactgtgcattttatgggtgactttgaaagatctgttcaattatttttcagaaactaaattttcaaaaaattaatatgtgtacaattaaaatgaatgaaagaaaaaccattattgtacagaggtattaatgagactatgaaacggcaatacttttttaaatcacagatttgtaatatatgttcactgtgcagagggattgtaccttgtacaaaataaaacaaatttctcaaactaattt

SEQ ID NO: 224104 - DNA, 6144 bp, Artificial Sequence
  derived and/or modified sequence
gcccgctgcccgccgcccggctcccggctgctcgcggccccctgctcctgcctggcgctctggccaggctcgggctccggaggacaggaccgcgcgactggccggccgatccctgggccggccgcgggagcagggcccgggatggtgctctccctgacggggctcattgccttctccttcctgcaagccacccttgccctgaaccccgaggaccccaacgtgtgcagccactgggagagctatgctgtgactgtccaggaatcgtatgcacaccccttcgatcagatctattacacacgatgcacagacatcctcaactggttcaagtgcaccaggcaccggatcagttataagacggcgtatcggagaggcctccggaccatgtaccggcggaggtcccagtgctgccctggctactatgagagcggagacttctgcatacccctgtgtacggaggagtgtgtgcacggccgctgcgtttccccggacacctgccactgcgagcctggctggggagggcccgactgctccagcggctgcgacagcgaccactgggggccccactgcagcaaccggtgccagtgccagaacggcgccctgtgtaaccccatcacaggcgcctgcgtgtgcgccgccggcttccgtggatggcgctgcgaggagctctgcgcacctggcacccacggcaagggatgccagctgccgtgccagtgccgacacggtgccagctgcgacccccgcgccggcgagtgcctctgcgcacctggctacaccggcgtctactgcgaggagctgtgccctcctgggagccatggagctcactgtgagctgcgctgcccctgtcagaatgggggcacctgccaccacatcactggcgagtgtgcctgccccccaggctggacgggagcagtgtgtgcccagccctgcccaccagggacatttggccagaactgcagccaggattgtccttgccaccatggagggcagtgtgaccacgtgactggacagtgccactgtacagctggatacatgggggacaggtgccaagaggagtgccccttcgggtccttcggcttccagtgctcacagcactgtgactgccacaatggggggcagtgttcacccaccacgggtgcctgcgagtgtgagcctggctacaagggcccacgctgccaggagcgactgtgcccggagggcctgcatggcccaggctgcaccctgccctgcccctgtgacgctgacaacaccatcagctgccacccagtaactggagcttgtacctgccagccaggctggtctggtcaccactgcaatgaatcctgccctgttggctactatggcgatggctgccagctgccttgcacctgtcagaatggcgccgactgccacagcatcactgggggctgcacttgtgctccgggcttcatgggagaggtctgtgccgtttcctgtgcagcagggacctatggccccaactgctcgtccatctgtagctgtaacaatggtggcacctgctccccagtagatggctcctgtacctgcaaggaagggtggcagggcctggactgcaccctgccatgtcccagtgggacgtggggcctgaactgcaacgagagctgcacctgtgccaatggggcagcctgcagccccatagacggctcctgctcctgcactcctggctggctgggagacacctgtgagctgccttgcccggatggcacatttgggctgaactgcagtgaacactgtgactgcagccatgctgatggatgtgaccccgtcacaggccactgctgctgcctggccggatggacaggcatccgctgtgacagcacgtgtccacctggccgctggggccccaactgctctgtctcctgcagctgtgagaatggaggctcctgctccccagaggatgggagctgcgagtgtgcccctggcttccgaggacccttatgccagagaatctgcccccctgggttctatggccacggctgcgcccagccatgccccctctgcgtgcacagcagcaggccctgccaccacatcagcggcatctgtgagtgcctcccaggattctctggagctctctgcaaccaagtgtgtgctggaggatactttgggcaggactgtgcccagctctgctcctgtgccaacaacgggacctgcagccctatcgatggctcctgccagtgctttcctggatggattggcaaggactgctcacaggcttgcccacccgggttctggggccccgcctgcttccacgcatgcagctgccacaacggggcgagctgcagcgccgaggacggggcctgccactgcacccctggctggactggactcttctgcacacagcgtaagccccacctcctggcctcccagccacttagaataccatgctgcggcctactggccactgtgggcattgtccagaccagcagggagggaggaatgcaggcagccccaggactggtggtacctgactcctgccccacgagaactgaggagctctgcaggggcagctccagacctgactggattcaggggattgacaagcccaaagtcctggaaggtcagggctgcaaggctgcccagcagcattttttgggaaggactgtgggcgcgtatgccagtgtcagaatggcgccagctgtgaccacatcagtggcaagtgcacctgccgcacaggcttcaccgggcaacactgtgagcagagatgtgccccaggaacctttggctatgggtgtcagcagctatgtgagtgcatgaacaactccacctgtgaccatgtcaccggcacctgttactgcagccctggcttcaaaggaatcaggtgtgaccaagctgccctcatgatggaggagctgaatccctacaccaagatcagcccagcactgggtgcagagcggcactcggtgggtgctgtcacaggcatcatgctcctgttattcctcattgtggtgctgctgggcctatttgcctggcatcggcggcggcagaaagagaagggccgagacctggctccccgtgtctcctacacacctgccatgaggatgaccagcaccgactactccctctcaggtgcttgtggaatggatagacgtcagaacacatacattatggacaaaggcttcaaagattacatgaaagaatccgtgtgcagttctagtacttgttccttgaatagcagtgaaaacccttacgccacaattaaggacccacccatcctcacctgcaagcttccagaaagcagctatgtagaaatgaagtcgcctgtgcacatggggtctccgtacacagatgtgccatccttgtcgacatctaataaaaatatatatgaagttgagcccacagtcagtgtggtccaagaaggttgcggtcataactccagctatatccagaatgcatacgacctacctaggaacagccatattcctggtcattatgacctcctcccagtaagacagagccctgccaatgggccgtcccaggacaagcaatcttaagagggataagcttctctcttgcagtgtgctctactgaatattctgactctgaaagaagacagtcccttgacttgaagtaatggtacagactggctccagctgcatgttagttattacgttcacctggaactaaagaagagcgtccaggtgggactgggataattgttcaaggaattgtgttctcaaaggcaaatcctatcacccactcagccccaaatgccctggattatatgatttttaaaacattttaagatacagctactcatcaacatcagctaaatatagctgatatatatatatatatttatctgaaacgtgatattttaaaaacatgtaggtttaacaaaccttcctaggacaaaaaggagactggggagggaagaggattactttaaagcacctgaaacgtatatgtacttttggttgctgttaccatcaacatctgttttattaccgaagacaattagtacacagacatgaactgttcttaaacagaacagtcttaaaatgtctgtacatatctgtctggtccatcaaattacaacagccaagattacagaatctatatagtctaatgctgacaacttctattttaaaaaacaagactttactttcttctgccccctaagtgataggtttaaacacacagagacacacacacacgtttccaaagtgcagcagtgtctctttcagtctacaataagattcctagggcagctttatcaaattttgccaattcaaagttcaaggacattacaagttagtcctggctttgtcatatctacttagtccatccgacacctgaatcattccatgtaaaacagagctctaagatgatcctttaagcaagcagtcatagactggtcgggattaagtaaaagacggctagttggcctcctcattttatttggtcagcatcccttgactcaagagtacttgctttcaagttcttcataaatcttgagattgacgtagtatgaaacctaaaagtatacaggaaattggacaaatgtggatacagcaagtttacactgcttaaagtacattatgctttttaatggaactaaatgatcaaaaaaagaatggactgtaaccagttgctgtaacgtgatgtaaaaacgttactgtaaacagcatgaggatatgaagtccttccaccttctatcttaaaactactacttactgagctagcccaatatgcattacaatgagctaatgctccagatcccagtattcagatgtgtctataccttccactatgaacacagataaactgaggctcagataagtccaaatgaaatgaaatcaactcccaagccctaaagagaaccttctcacaagaattaaaaacaaaaagggcaaacctaggaagctaacggctactcctgtaccactctattcactggtacagtccagccagtaaaaaacacttccaaaaagatacacagaagaggaactaaatgactgcgaagctggaatactgctacaggaagtatgagagttctgaaacccttgatagaaactggaagcctgccatggaacacaatactttgggcaataatcagaaaaagcaaaaaaataaataaatgagtacatctccccttcccacatcactcaaggcataagcagattttactgttagaggaaaatatgtaatacttacatgaatgttgcatgtgtgcatgggagcaactgagtagcaatagtaaatttactttccaaaaaagccttattaaaatataaatattagaaaattactttggagacccaagtaaatatttctcatacatatgtagaaagaaatataggtaagcagcttacctcagtatttcagggcagcaagtgtttgtgaagcaaggatgagcagcatgaagatgtcagatcagcaaggagaaacttcaactcaatcccaggttttctcttcttcccttatcctgcatgtacaataactgctgcctggcaaactgcaaacaagcagcatcactcaagtttgaagtttcgccgcttttgtcaactatcctctgggcaaaggtattcagcaagaggtggaatggctagacactgaatcaagagatttcagtgttactctggtcaagttagtcgccctctctgggctcccttttttcctatgcataaaaaggggagaagcagagagtgggaagacagctctactaacccttcagctctagcagtccatgactttttaaggaaatgtaatacaagtcaaaccaggcaatacagaggagaagggaaaggcagagggtgtgattatggtgacaatagctgccttcccctatcgaacagttatcagtaaaagacatttcaatcttacaaagcaactgttagaaacttctgtctaacaccatcacaaataggttcatggtcagcctaaacatgtatactgtgcattttatgggtgactttgaaagatctgttcaattatttttcagaaactaaattttcaaaaaattaatatgtgtacaattaaaatgaatgaaagaaaaaccattattgtacagaggtattaatgagactatgaaacggcaatacttttttaaatcacagatttgtaatatatgttcactgtgcagagggattgtaccttgtacaaaataaaacaaatttctcaaactaattt

SEQ ID NO: 224105 - DNA, 2956 bp, Artificial Sequence
  derived and/or modified sequence
aggacaggaccgcgcgactggccggccgatccctgggccggccgcgggagcagggcccgggatggtgctctccctgacggggctcattgccttctccttcctgcaagccacccttgccctgaaccccgaggaccccaacgtgtgcagccactgggagagctatgctgtgactgtccaggaatcgtatgcacaccccttcgatcagatctattacacacgatgcacagacatcctcaactggttcaagtgcaccaggcaccggatcagttataagacggcgtatcggagaggcctccggaccatgtaccggcggaggtcccagtgctgccctggctactatgagagcggagacttctgcatacccctgtgtacggaggagtgtgtgcacggccgctgcgtttccccggacacctgccactgcgagcctggctggggagggcccgactgctccagcggctgcgacagcgaccactgggggccccactgcagcaaccggtgccagtgccagaacggcgccctgtgtaaccccatcacaggcgcctgcgtgtgcgccgccggcttccgtggatggcgctgcgaggagctctgcgcacctggcacccacggcaagggatgccagctgccgtgccagtgccgacacggtgccagctgcgacccccgcgccggcgagtgcctctgcgcacctggctacaccggcgtctactgcgaggagctgtgccctcctgggagccatggagctcactgtgagctgcgctgcccctgtcagaatgggggcacctgccaccacatcactggcgagtgtgcctgccccccaggctggacgggagcagtgtgtgcccagccctgcccaccagggacatttggccagaactgcagccaggattgtccttgccaccatggagggcagtgtgaccacgtgactggacagtgccactgtacagctggatacatgggggacaggtgccaagaggagtgccccttcgggtccttcggcttccagtgctcacagcactgtgactgccacaatggggggcagtgttcacccaccacgggtgcctgcgagtgtgagcctggctacaagggcccacgctgccaggagcgactgtgcccggagggcctgcatggcccaggctgcaccctgccctgcccctgtgacgctgacaacaccatcagctgccacccagtaactggagcttgtacctgccagccaggctggtctggtcaccactgcaatgaatcctgccctgttggctactatggcgatggctgccagctgccttgcacctgtcagaatggcgccgactgccacagcatcactgggggctgcacttgtgctccgggcttcatgggagaggtctgtgccgtttcctgtgcagcagggacctatggccccaactgctcgtccatctgtagctgtaacaatggtggcacctgctccccagtagatggctcctgtacctgcaaggaagggtggcagggcctggactgcaccctgccatgtcccagtgggacgtggggcctgaactgcaacgagagctgcacctgtgccaatggggcagcctgcagccccatagacggctcctgctcctgcactcctggctggctgggagacacctgtgagctgccttgcccggatggcacatttgggctgaactgcagtgaacactgtgactgcagccatgctgatggatgtgaccccgtcacaggccactgctgctgcctggccggatggacaggcatccgctgtgacagcacgtgtccacctggccgctggggccccaactgctctgtctcctgcagctgtgagaatggaggctcctgctccccagaggatgggagctgcgagtgtgcccctggcttccgaggacccttatgccagagaatctgcccccctgggttctatggccacggctgcgcccagccatgccccctctgcgtgcacagcagcaggccctgccaccacatcagcggcatctgtgagtgcctcccaggattctctggagctctctgcaaccaagtgtgtgctggaggatactttgggcaggactgtgcccagctctgctcctgtgccaacaacgggacctgcagccctatcgatggctcctgccagtgctttcctggatggattggcaaggactgctcacaggcttgcccacccgggttctggggccccgcctgcttccacgcatgcagctgccacaacggggcgagctgcagcgccgaggacggggcctgccactgcacccctggctggactggactcttctgcacacagcgctgcccagcagcattttttgggaaggactgtgggcgcgtatgccagtgtcagaatggcgccagctgtgaccacatcagtggcaagtgcacctgccgcacaggcttcaccgggcaacactgtgagcagagatgtgccccaggaacctttggctatgggtgtcagcagctatgtgagtgcatgaacaactccacctgtgaccatgtcaccggcacctgttactgcagccctggcttcaaaggaatcaggtgtgaccaagctgccctcatgatggaggagctgaatccctacaccaagatcagcccagcactgggtgcagagcggcactcggtgggtgctgtcacaggcatcatgctcctgttattcctcattgtggtgctgctgggcctatttgcctggcatcggcggcggcagaaagagaagggccgagacctggctccccgtgtctcctacacacctgccatgaggatgaccagcaccgactactccctctcagcatcaaccacaccatggtggcctgtcatggaacacctagctcgccctttctctcaacggcctaggacccagctcagtaacaagtcccttgacagagacacagcaggctggaccccctacagctatgtgaacgtgttagatcagtgccctggaggccaggtacccgcccgaggacttctacattga

SEQ ID NO: 224106 - DNA, 5813 bp, Artificial Sequence
  derived and/or modified sequence
gcccgctgcccgccgcccggctcccggctgctcgcggccccctgctcctgcctggcgctctggccaggctcgggctccggaggacaggaccgcgcgactggccggccgatccctgggccggccgcgggagcagggcccgggatggtgctctccctgacggggctcattgccttctccttcctgcaagccacccttgccctgaaccccgaggaccccaacgtgtgcagccactgggagagctatgctgtgactgtccaggaatcgtatgcacaccccttcgatcagatctattacacacgatgcacagacatcctcaactggttcaagtgcaccaggcaccgccctgtgtacggaggagtgtgtgcacggccgctgcgtttccccggacacctgccactgcgagcctggctggggagggcccgactgctccagcggctgcgacagcgaccactgggggccccactgcagcaaccggtgccagtgccagaacggcgccctgtgtaaccccatcacaggcgcctgcgtgtgcgccgccggcttccgtggatggcgctgcgaggagctctgcgcacctggcacccacggcaagggatgccagctgccgtgccagtgccgacacggtgccagctgcgacccccgcgccggcgagtgcctctgcgcacctggctacaccggcgtctactgcgaggagctgtgccctcctgggagccatggagctcactgtgagctgcgctgcccctgtcagaatgggggcacctgccaccacatcactggcgagtgtgcctgccccccaggctggacgggagcagtgtgtgcccagccctgcccaccagggacatttggccagaactgcagccaggattgtccttgccaccatggagggcagtgtgaccacgtgactggacagtgccactgtacagctggatacatgggggacaggtgccaagaggagtgccccttcgggtccttcggcttccagtgctcacagcactgtgactgccacaatggggggcagtgttcacccaccacgggtgcctgcgagtgtgagcctggctacaagggcccacgctgccaggagcgactgtgcccggagggcctgcatggcccaggctgcaccctgccctgcccctgtgacgctgacaacaccatcagctgccacccagtaactggagcttgtacctgccagccaggctggtctggtcaccactgcaatgaatcctgccctgttggctactatggcgatggctgccagctgccttgcacctgtcagaatggcgccgactgccacagcatcactgggggctgcacttgtgctccgggcttcatgggagaggtctgtgccgtttcctgtgcagcagggacctatggccccaactgctcgtccatctgtagctgtaacaatggtggcacctgctccccagtagatggctcctgtacctgcaaggaagggtggcagggcctggactgcaccctgccatgtcccagtgggacgtggggcctgaactgcaacgagagctgcacctgtgccaatggggcagcctgcagccccatagacggctcctgctcctgcactcctggctggctgggagacacctgtgagctgccttgcccggatggcacatttgggctgaactgcagtgaacactgtgactgcagccatgctgatggatgtgaccccgtcacaggccactgctgctgcctggccggatggacaggcatccgctgtgacagcacgtgtccacctggccgctggggccccaactgctctgtctcctgcagctgtgagaatggaggctcctgctccccagaggatgggagctgcgagtgtgcccctggcttccgaggacccttatgccagagaatctgcccccctgggttctatggccacggctgcgcccagccatgccccctctgcgtgcacagcagcaggccctgccaccacatcagcggcatctgtgagtgcctcccaggattctctggagctctctgcaaccaagtgtgtgctggaggatactttgggcaggactgtgcccagctctgctcctgtgccaacaacgggacctgcagccctatcgatggctcctgccagtgctttcctggatggattggcaaggactgctcacaggcttgcccacccgggttctggggccccgcctgcttccacgcatgcagctgccacaacggggcgagctgcagcgccgaggacggggcctgccactgcacccctggctggactggactcttctgcacacagcgctgcccagcagcattttttgggaaggactgtgggcgcgtatgccagtgtcagaatggcgccagctgtgaccacatcagtggcaagtgcacctgccgcacaggcttcaccgggcaacactgtgagcagagatgtgccccaggaacctttggctatgggtgtcagcagctatgtgagtgcatgaacaactccacctgtgaccatgtcaccggcacctgttactgcagccctggcttcaaaggaatcaggtgtgaccaagctgccctcatgatggaggagctgaatccctacaccaagatcagcccagcactgggtgcagagcggcactcggtgggtgctgtcacaggcatcatgctcctgttattcctcattgtggtgctgctgggcctatttgcctggcatcggcggcggcagaaagagaagggccgagacctggctccccgtgtctcctacacacctgccatgaggatgaccagcaccgactactccctctcaggtgcttgtggaatggatagacgtcagaacacatacattatggacaaaggcttcaaagattacatgaaagaatccgtgtgcagttctagtacttgttccttgaatagcagtgaaaacccttacgccacaattaaggacccacccatcctcacctgcaagcttccagaaagcagctatgtagaaatgaagtcgcctgtgcacatggggtctccgtacacagatgtgccatccttgtcgacatctaataaaaatatatatgaagttgagcccacagtcagtgtggtccaagaaggttgcggtcataactccagctatatccagaatgcatacgacctacctaggaacagccatattcctggtcattatgacctcctcccagtaagacagagccctgccaatgggccgtcccaggacaagcaatcttaagagggataagcttctctcttgcagtgtgctctactgaatattctgactctgaaagaagacagtcccttgacttgaagtaatggtacagactggctccagctgcatgttagttattacgttcacctggaactaaagaagagcgtccaggtgggactgggataattgttcaaggaattgtgttctcaaaggcaaatcctatcacccactcagccccaaatgccctggattatatgatttttaaaacattttaagatacagctactcatcaacatcagctaaatatagctgatatatatatatatatttatctgaaacgtgatattttaaaaacatgtaggtttaacaaaccttcctaggacaaaaaggagactggggagggaagaggattactttaaagcacctgaaacgtatatgtacttttggttgctgttaccatcaacatctgttttattaccgaagacaattagtacacagacatgaactgttcttaaacagaacagtcttaaaatgtctgtacatatctgtctggtccatcaaattacaacagccaagattacagaatctatatagtctaatgctgacaacttctattttaaaaaacaagactttactttcttctgccccctaagtgataggtttaaacacacagagacacacacacacgtttccaaagtgcagcagtgtctctttcagtctacaataagattcctagggcagctttatcaaattttgccaattcaaagttcaaggacattacaagttagtcctggctttgtcatatctacttagtccatccgacacctgaatcattccatgtaaaacagagctctaagatgatcctttaagcaagcagtcatagactggtcgggattaagtaaaagacggctagttggcctcctcattttatttggtcagcatcccttgactcaagagtacttgctttcaagttcttcataaatcttgagattgacgtagtatgaaacctaaaagtatacaggaaattggacaaatgtggatacagcaagtttacactgcttaaagtacattatgctttttaatggaactaaatgatcaaaaaaagaatggactgtaaccagttgctgtaacgtgatgtaaaaacgttactgtaaacagcatgaggatatgaagtccttccaccttctatcttaaaactactacttactgagctagcccaatatgcattacaatgagctaatgctccagatcccagtattcagatgtgtctataccttccactatgaacacagataaactgaggctcagataagtccaaatgaaatgaaatcaactcccaagccctaaagagaaccttctcacaagaattaaaaacaaaaagggcaaacctaggaagctaacggctactcctgtaccactctattcactggtacagtccagccagtaaaaaacacttccaaaaagatacacagaagaggaactaaatgactgcgaagctggaatactgctacaggaagtatgagagttctgaaacccttgatagaaactggaagcctgccatggaacacaatactttgggcaataatcagaaaaagcaaaaaaataaataaatgagtacatctccccttcccacatcactcaaggcataagcagattttactgttagaggaaaatatgtaatacttacatgaatgttgcatgtgtgcatgggagcaactgagtagcaatagtaaatttactttccaaaaaagccttattaaaatataaatattagaaaattactttggagacccaagtaaatatttctcatacatatgtagaaagaaatataggtaagcagcttacctcagtatttcagggcagcaagtgtttgtgaagcaaggatgagcagcatgaagatgtcagatcagcaaggagaaacttcaactcaatcccaggttttctcttcttcccttatcctgcatgtacaataactgctgcctggcaaactgcaaacaagcagcatcactcaagtttgaagtttcgccgcttttgtcaactatcctctgggcaaaggtattcagcaagaggtggaatggctagacactgaatcaagagatttcagtgttactctggtcaagttagtcgccctctctgggctcccttttttcctatgcataaaaaggggagaagcagagagtgggaagacagctctactaacccttcagctctagcagtccatgactttttaaggaaatgtaatacaagtcaaaccaggcaatacagaggagaagggaaaggcagagggtgtgattatggtgacaatagctgccttcccctatcgaacagttatcagtaaaagacatttcaatcttacaaagcaactgttagaaacttctgtctaacaccatcacaaataggttcatggtcagcctaaacatgtatactgtgcattttatgggtgactttgaaagatctgttcaattatttttcagaaactaaattttcaaaaaattaatatgtgtacaattaaaatgaatgaaagaaaaaccattattgtacagaggtattaatgagactatgaaacggcaatacttttttaaatcacagatttgtaatatatgttcactgtgcagagggattgtaccttgtacaaaataaaacaaatttctcaaactaattt

SEQ ID NO: 224107 - DNA, 5946 bp, Artificial Sequence
  derived and/or modified sequence
cgctcccggtgcccgctgcccgccgcccggctcccggctgctcgcggccccctgctcctgcctggcgctctggccaggctcgggctccggaggacaggaccgcgcgactggccggccgatccctgggccggccgcgggagcagcctcctttgttctcctgtgcagggcccgggatggtgctctccctgacggggctcattgccttctccttcctgcaagccacccttgccctgaaccccgaggaccccaacgtgtgcagccactgggagagctatgctgtgactgtccaggaatcgtatgcacaccccttcgatcagatctattacacacgatgcacagacatcctcaactggttcaagtgcaccaggcaccggatcagttataagacggcgtatcggagaggcctccggaccatgtaccggcggaggtcccagtgctgccctggctactatgagagcggagacttctgcatacccctgtgtacggaggagtgtgtgcacggccgctgcgtttccccggacacctgccactgcgagcctggctggggagggcccgactgctccagcggctgcgacagcgaccactgggggccccactgcagcaaccggtgccagtgccagaacggcgccctgtgtaaccccatcacaggcgcctgcgtgtgcgccgccggcttccgtggatggcgctgcgaggagctctgcgcacctggcacccacggcaagggatgccagctgccgtgccagtgccgacacggtgccagctgcgacccccgcgccggcgagtgcctctgcgcacctggctacaccggcgtctactgcgaggagctgtgccctcctgggagccatggagctcactgtgagctgcgctgcccctgtcagaatgggggcacctgccaccacatcactggcgagtgtgcctgccccccaggctggacgggagcagtgtgtgcccagccctgcccaccagggacatttggccagaactgcagccaggattgtccttgccaccatggagggcagtgtgaccacgtgactggacagtgccactgtacagctggatacatgggggacaggtgccaagaggagtgccccttcgggtccttcggcttccagtgctcacagcactgtgactgccacaatggggggcagtgttcacccaccacgggtgcctgcgagtgtgagcctggctacaagggcccacgctgccaggagcgactgtgcccggagggcctgcatggcccaggctgcaccctgccctgcccctgtgacgctgacaacaccatcagctgccacccagtaactggagcttgtacctgccagccaggctggtctggtcaccactgcaatgaatcctgccctgttggctactatggcgatggctgccagctgccttgcacctgtcagaatggcgccgactgccacagcatcactgggggctgcacttgtgctccgggcttcatgggagaggtctgtgccgtttcctgtgcagcagggacctatggccccaactgctcgtccatctgtagctgtaacaatggtggcacctgctccccagtagatggctcctgtacctgcaaggaagggtggcagggcctggactgcaccctgccatgtcccagtgggacgtggggcctgaactgcaacgagagctgcacctgtgccaatggggcagcctgcagccccatagacggctcctgctcctgcactcctggctggctgggagacacctgtgagctgccttgcccggatggcacatttgggctgaactgcagtgaacactgtgactgcagccatgctgatggatgtgaccccgtcacaggccactgctgctgcctggccggatggacaggcatccgctgtgacagcacgtgtccacctggccgctggggccccaactgctctgtctcctgcagctgtgagaatggaggctcctgctccccagaggatgggagctgcgagtgtgcccctggcttccgaggacccttatgccagagaatctgcccccctgggttctatggccacggctgcgcccagccatgccccctctgcgtgcacagcagcaggccctgccaccacatcagcggcatctgtgagtgcctcccaggattctctggagctctctgcaaccaagtgtgtgctggaggatactttgggcaggactgtgcccagctctgctcctgtgccaacaacgggacctgcagccctatcgatggctcctgccagtgctttcctggatggattggcaaggactgctcacaggcttgcccacccgggttctggggccccgcctgcttccacgcatgcagctgccacaacggggcgagctgcagcgccgaggacggggcctgccactgcacccctggctggactggactcttctgcacacagcgctgcccagcagcattttttgggaaggactgtgggcgcgtatgccagtgtcagaatggcgccagctgtgaccacatcagtggcaagtgcacctgccgcacaggcttcaccgggcaacactgtgagcagagatgtgccccaggaacctttggctatgggtgtcagcagctatgtgagtgcatgaacaactccacctgtgaccatgtcaccggcacctgttactgcagccctggcttcaaaggaatcaggtgtgaccaagctgccctcatgatggaggagctgaatccctacaccaagatcagcccagcactgggtgcagagcggcactcggtgggtgctgtcacaggcatcatgctcctgttattcctcattgtggtgctgctgggcctatttgcctggcatcggcggcggcagaaagagaagggccgagacctggctccccgtgtctcctacacacctgccatgaggatgaccagcaccgactactccctctcaggtgcttgtggaatggatagacgtcagaacacatacattatggacaaaggcttcaaagattacatgaaagaatccgtgtgcagttctagtacttgttccttgaatagcagtgaaaacccttacgccacaattaaggacccacccatcctcacctgcaagcttccagaaagcagctatgtagaaatgaagtcgcctgtgcacatggggtctccgtacacagatgtgccatccttgtcgacatctaataaaaatatatatgaagttgagcccacagtcagtgtggtccaagaaggttgcggtcataactccagctatatccagaatgcatacgacctacctaggaacagccatattcctggtcattatgacctcctcccagtaagacagagccctgccaatgggccgtcccaggacaagcaatcttaagagggataagcttctctcttgcagtgtgctctactgaatattctgactctgaaagaagacagtcccttgacttgaagtaatggtacagactggctccagctgcatgttagttattacgttcacctggaactaaagaagagcgtccaggtgggactgggataattgttcaaggaattgtgttctcaaaggcaaatcctatcacccactcagccccaaatgccctggattatatgatttttaaaacattttaagatacagctactcatcaacatcagctaaatatagctgatatatatatatatatttatctgaaacgtgatattttaaaaacatgtaggtttaacaaaccttcctaggacaaaaaggagactggggagggaagaggattactttaaagcacctgaaacgtatatgtacttttggttgctgttaccatcaacatctgttttattaccgaagacaattagtacacagacatgaactgttcttaaacagaacagtcttaaaatgtctgtacatatctgtctggtccatcaaattacaacagccaagattacagaatctatatagtctaatgctgacaacttctattttaaaaaacaagactttactttcttctgccccctaagtgataggtttaaacacacagagacacacacacacgtttccaaagtgcagcagtgtctctttcagtctacaataagattcctagggcagctttatcaaattttgccaattcaaagttcaaggacattacaagttagtcctggctttgtcatatctacttagtccatccgacacctgaatcattccatgtaaaacagagctctaagatgatcctttaagcaagcagtcatagactggtcgggattaagtaaaagacggctagttggcctcctcattttatttggtcagcatcccttgactcaagagtacttgctttcaagttcttcataaatcttgagattgacgtagtatgaaacctaaaagtatacaggaaattggacaaatgtggatacagcaagtttacactgcttaaagtacattatgctttttaatggaactaaatgatcaaaaaaagaatggactgtaaccagttgctgtaacgtgatgtaaaaacgttactgtaaacagcatgaggatatgaagtccttccaccttctatcttaaaactactacttactgagctagcccaatatgcattacaatgagctaatgctccagatcccagtattcagatgtgtctataccttccactatgaacacagataaactgaggctcagataagtccaaatgaaatgaaatcaactcccaagccctaaagagaaccttctcacaagaattaaaaacaaaaagggcaaacctaggaagctaacggctactcctgtaccactctattcactggtacagtccagccagtaaaaaacacttccaaaaagatacacagaagaggaactaaatgactgcgaagctggaatactgctacaggaagtatgagagttctgaaacccttgatagaaactggaagcctgccatggaacacaatactttgggcaataatcagaaaaagcaaaaaaataaataaatgagtacatctccccttcccacatcactcaaggcataagcagattttactgttagaggaaaatatgtaatacttacatgaatgttgcatgtgtgcatgggagcaactgagtagcaatagtaaatttactttccaaaaaagccttattaaaatataaatattagaaaattactttggagacccaagtaaatatttctcatacatatgtagaaagaaatataggtaagcagcttacctcagtatttcagggcagcaagtgtttgtgaagcaaggatgagcagcatgaagatgtcagatcagcaaggagaaacttcaactcaatcccaggttttctcttcttcccttatcctgcatgtacaataactgctgcctggcaaactgcaaacaagcagcatcactcaagtttgaagtttcgccgcttttgtcaactatcctctgggcaaaggtattcagcaagaggtggaatggctagacactgaatcaagagatttcagtgttactctggtcaagttagtcgccctctctgggctcccttttttcctatgcataaaaaggggagaagcagagagtgggaagacagctctactaacccttcagctctagcagtccatgactttttaaggaaatgtaatacaagtcaaaccaggcaatacagaggagaagggaaaggcagagggtgtgattatggtgacaatagctgccttcccctatcgaacagttatcagtaaaagacatttcaatcttacaaagcaactgttagaaacttctgtctaacaccatcacaaataggttcatggtcagcctaaacatgtatactgtgcattttatgggtgactttgaaagatctgttcaattatttttcagaaactaaattttcaaaaaattaatatgtgtacaattaaaatgaatgaaagaaaaaccattattgtacagaggtattaatgagactatgaaacggcaatacttttttaaatcacagatttgtaatatatgttcactgtgcagagggattgtaccttgtacaaaataaaacaaatttctcaaactaattt

SEQ ID NO: 224108 - DNA, 5914 bp, Artificial Sequence
  derived and/or modified sequence
gcccgctgcccgccgcccggctcccggctgctcgcggccccctgctcctgcctggcgctctggccaggctcgggctccggaggacaggaccgcgcgactggccggccgatccctgggccggccgcgggagcagggcccgggatggtgctctccctgacggggctcattgccttctccttcctgcaagccacccttgccctgaaccccgaggaccccaacgtgtgcagccactgggagagctatgctgtgactgtccaggaatcgtatgcacaccccttcgatcagatctattacacacgatgcacagacatcctcaactggttcaagtgcaccaggcaccggatcagttataagacggcgtatcggagaggcctccggaccatgtaccggcggaggtcccagtgctgccctggctactatgagagcggagacttctgcatacccctgtgtacggaggagtgtgtgcacggccgctgcgtttccccggacacctgccactgcgagcctggctggggagggcccgactgctccagcggctgcgacagcgaccactgggggccccactgcagcaaccggtgccagtgccagaacggcgccctgtgtaaccccatcacaggcgcctgcgtgtgcgccgccggcttccgtggatggcgctgcgaggagctctgcgcacctggcacccacggcaagggatgccagctgccgtgccagtgccgacacggtgccagctgcgacccccgcgccggcgagtgcctctgcgcacctggctacaccggcgtctactgcgaggagctgtgccctcctgggagccatggagctcactgtgagctgcgctgcccctgtcagaatgggggcacctgccaccacatcactggcgagtgtgcctgccccccaggctggacgggagcagtgtgtgcccagccctgcccaccagggacatttggccagaactgcagccaggattgtccttgccaccatggagggcagtgtgaccacgtgactggacagtgccactgtacagctggatacatgggggacaggtgccaagaggagtgccccttcgggtccttcggcttccagtgctcacagcactgtgactgccacaatggggggcagtgttcacccaccacgggtgcctgcgagtgtgagcctggctacaagggcccacgctgccaggagcgactgtgcccggagggcctgcatggcccaggctgcaccctgccctgcccctgtgacgctgacaacaccatcagctgccacccagtaactggagcttgtacctgccagccaggctggtctggtcaccactgcaatgaatcctgccctgttggctactatggcgatggctgccagctgccttgcacctgtcagaatggcgccgactgccacagcatcactgggggctgcacttgtgctccgggcttcatgggagaggtctgtgccgtttcctgtgcagcagggacctatggccccaactgctcgtccatctgtagctgtaacaatggtggcacctgctccccagtagatggctcctgtacctgcaaggaagggtggcagggcctggactgcaccctgccatgtcccagtgggacgtggggcctgaactgcaacgagagctgcacctgtgccaatggggcagcctgcagccccatagacggctcctgctcctgcactcctggctggctgggagacacctgtgagctgccttgcccggatggcacatttgggctgaactgcagtgaacactgtgactgcagccatgctgatggatgtgaccccgtcacaggccactgctgctgcctggccggatggacaggcatccgctgtgacagcacgtgtccacctggccgctggggccccaactgctctgtctcctgcagctgtgagaatggaggctcctgctccccagaggatgggagctgcgagtgtgcccctggcttccgaggacccttatgccagagaatctgcccccctgggttctatggccacggctgcgcccagccatgccccctctgcgtgcacagcagcaggccctgccaccacatcagcggcatctgtgagtgcctcccaggattctctggagctctctgcaaccaagtgtgtgctggaggatactttgggcaggactgtgcccagctctgctcctgtgccaacaacgggacctgcagccctatcgatggctcctgccagtgctttcctggatggattggcaaggactgctcacaggcttgcccacccgggttctggggccccgcctgcttccacgcatgcagctgccacaacggggcgagctgcagcgccgaggacggggcctgccactgcacccctggctggactggactcttctgcacacagcgctgcccagcagcattttttgggaaggactgtgggcgcgtatgccagtgtcagaatggcgccagctgtgaccacatcagtggcaagtgcacctgccgcacaggcttcaccgggcaacactgtgagcagagatgtgccccaggaacctttggctatgggtgtcagcagctatgtgagtgcatgaacaactccacctgtgaccatgtcaccggcacctgttactgcagccctggcttcaaaggaatcaggtgtgaccaagctgccctcatgatggaggagctgaatccctacaccaagatcagcccagcactgggtgcagagcggcactcggtgggtgctgtcacaggcatcatgctcctgttattcctcattgtggtgctgctgggcctatttgcctggcatcggcggcggcagaaagagaagggccgagacctggctccccgtgtctcctacacacctgccatgaggatgaccagcaccgactactccctctcaggtgcttgtggaatggatagacgtcagaacacatacattatggacaaaggcttcaaagattacatgaaagaatccgtgtgcagttctagtacttgttccttgaatagcagtgaaaacccttacgccacaattaaggacccacccatcctcacctgcaagcttccagaaagcagctatgtagaaatgaagtcgcctgtgcacatggggtctccgtacacagatgtgccatccttgtcgacatctaataaaaatatatatgaagttgagcccacagtcagtgtggtccaagaaggttgcggtcataactccagctatatccagaatgcatacgacctacctaggaacagccatattcctggtcattatgacctcctcccagtaagacagagccctgccaatgggccgtcccaggacaagcaatcttaagagggataagcttctctcttgcagtgtgctctactgaatattctgactctgaaagaagacagtcccttgacttgaagtaatggtacagactggctccagctgcatgttagttattacgttcacctggaactaaagaagagcgtccaggtgggactgggataattgttcaaggaattgtgttctcaaaggcaaatcctatcacccactcagccccaaatgccctggattatatgatttttaaaacattttaagatacagctactcatcaacatcagctaaatatagctgatatatatatatatatttatctgaaacgtgatattttaaaaacatgtaggtttaacaaaccttcctaggacaaaaaggagactggggagggaagaggattactttaaagcacctgaaacgtatatgtacttttggttgctgttaccatcaacatctgttttattaccgaagacaattagtacacagacatgaactgttcttaaacagaacagtcttaaaatgtctgtacatatctgtctggtccatcaaattacaacagccaagattacagaatctatatagtctaatgctgacaacttctattttaaaaaacaagactttactttcttctgccccctaagtgataggtttaaacacacagagacacacacacacgtttccaaagtgcagcagtgtctctttcagtctacaataagattcctagggcagctttatcaaattttgccaattcaaagttcaaggacattacaagttagtcctggctttgtcatatctacttagtccatccgacacctgaatcattccatgtaaaacagagctctaagatgatcctttaagcaagcagtcatagactggtcgggattaagtaaaagacggctagttggcctcctcattttatttggtcagcatcccttgactcaagagtacttgctttcaagttcttcataaatcttgagattgacgtagtatgaaacctaaaagtatacaggaaattggacaaatgtggatacagcaagtttacactgcttaaagtacattatgctttttaatggaactaaatgatcaaaaaaagaatggactgtaaccagttgctgtaacgtgatgtaaaaacgttactgtaaacagcatgaggatatgaagtccttccaccttctatcttaaaactactacttactgagctagcccaatatgcattacaatgagctaatgctccagatcccagtattcagatgtgtctataccttccactatgaacacagataaactgaggctcagataagtccaaatgaaatgaaatcaactcccaagccctaaagagaaccttctcacaagaattaaaaacaaaaagggcaaacctaggaagctaacggctactcctgtaccactctattcactggtacagtccagccagtaaaaaacacttccaaaaagatacacagaagaggaactaaatgactgcgaagctggaatactgctacaggaagtatgagagttctgaaacccttgatagaaactggaagcctgccatggaacacaatactttgggcaataatcagaaaaagcaaaaaaataaataaatgagtacatctccccttcccacatcactcaaggcataagcagattttactgttagaggaaaatatgtaatacttacatgaatgttgcatgtgtgcatgggagcaactgagtagcaatagtaaatttactttccaaaaaagccttattaaaatataaatattagaaaattactttggagacccaagtaaatatttctcatacatatgtagaaagaaatataggtaagcagcttacctcagtatttcagggcagcaagtgtttgtgaagcaaggatgagcagcatgaagatgtcagatcagcaaggagaaacttcaactcaatcccaggttttctcttcttcccttatcctgcatgtacaataactgctgcctggcaaactgcaaacaagcagcatcactcaagtttgaagtttcgccgcttttgtcaactatcctctgggcaaaggtattcagcaagaggtggaatggctagacactgaatcaagagatttcagtgttactctggtcaagttagtcgccctctctgggctcccttttttcctatgcataaaaaggggagaagcagagagtgggaagacagctctactaacccttcagctctagcagtccatgactttttaaggaaatgtaatacaagtcaaaccaggcaatacagaggagaagggaaaggcagagggtgtgattatggtgacaatagctgccttcccctatcgaacagttatcagtaaaagacatttcaatcttacaaagcaactgttagaaacttctgtctaacaccatcacaaataggttcatggtcagcctaaacatgtatactgtgcattttatgggtgactttgaaagatctgttcaattatttttcagaaactaaattttcaaaaaattaatatgtgtacaattaaaatgaatgaaagaaaaaccattattgtacagaggtattaatgagactatgaaacggcaatacttttttaaatcacagatttgtaatatatgttcactgtgcagagggattgtaccttgtacaaaataaaacaaatttctcaaactaattt

SEQ ID NO: 224109 - DNA, 2910 bp, Artificial Sequence
  derived and/or modified sequence
atgcacacccccagcatccggagcatcacccacgacgcccagacctctagcacgggctcctcagcgcctggcaccgctctgtgcacagaagagtgcgtgcacggtaggtgcgtttccccagatacctgtcattgcgagcccggatggggcggccctgattgcagctctggctgtgactcggaccactgggggccccactgctcaaatcggtgtcaatgccagaacggggcattatgcaatccaatcacaggtgcatgcgtgtgtgctgcaggatttcgaggttggcgatgcgaagagctgtgcgcacccggtacccatgggaagggttgccagctgccctgtcagtgcaggcatggggctagttgcgaccccagggccggcgaatgtttgtgcgcacctggatacactggtgtctactgcgaagagctgtgtccgcccggtagccacggagctcactgtgagctgaggtgcccatgccagaacggtggaacctgccaccatattacaggggagtgcgcctgcccaccaggatggactggggcagtgtgtgcacagccatgcccccccggaactttcggtcagaactgtagtcaggactgtccgtgtcaccatggtggccaatgcgatcatgtgaccggtcagtgccactgcaccgccggctacatgggcgatcgatgtcaggaagagtgccccttcggaagcttcggctttcagtgttcacagcattgcgattgccacaacggcgggcagtgtagccctactactggtgcgtgcgaatgcgaaccgggatacaagggaccgaggtgccaagaacggctgtgccctgagggcctccacgggccaggatgtactctgccgtgcccatgtgatgccgataataccattagctgccaccccgtcaccggcgcatgtacatgccagcctggatggagtggacatcattgtaacgaaagttgcccagttgggtactacggggatggttgccagcttccttgtacatgtcagaacggggccgactgccacagtatcacgggcggttgtacgtgcgccccaggatttatgggtgaggtatgcgccgttagctgtgctgccgggacttacggtccaaactgctctagcatttgctcgtgtaacaatgggggcacatgcagccccgtggacggctcatgtacatgcaaagaggggtggcagggcctagattgtacactgccctgcccaagtggaacatgggggttaaattgcaacgaatcctgcacatgtgccaatggcgccgcttgtagccccatcgacgggtcatgctcatgcacacctggctggctgggagatacatgcgagttgccctgtccggacgggacttttggacttaattgctctgagcactgtgattgttcgcatgccgacgggtgtgaccctgtaaccggccattgttgctgcttagccggctggacaggcatacgctgtgactcgacatgcccaccaggccgctggggaccaaattgcagcgtaagttgttcttgtgaaaatggtggctcttgctccccagaggacggctcctgcgaatgtgctccggggtttcgggggccactttgtcaacgaatttgcccccccgggttttatggtcacggttgcgcccagccttgcccgctctgcgtccattcatcccggccgtgccaccatatttcagggatctgcgagtgcttacctggcttttctggagcattgtgcaaccaagtatgtgccggggggtatttcggccaggactgtgctcagctttgctcatgtgcgaacaatgggacatgctcaccaatagatgggagttgccagtgcttcccagggtggattggaaaggactgtagtcaggcctgtcctcccggcttctgggggccagcctgttttcacgcctgctcctgccataacggtgcatcatgctcagccgaagacggagcatgtcattgcactcccggatggaccgggttgttctgcacccaacgttgccccgctgccttttttggtaaagactgcggccgggtgtgccagtgccagaacggcgccagctgtgatcacatttccggcaaatgcacatgtaggacgggttttactgggcagcactgcgagcaaagatgtgcgcccgggaccttcggatacgggtgccagcagctttgcgagtgcatgaacaactctacatgcgaccatgtgaccgggacttgctactgctcgccaggctttaaaggcattcggtgcgatcaggctgcactgatgatggaggagctgaatccttataccaagatctcacctgcacttggtgccgaaagacattcagtgggggcagtcacgggaatcatgttactgctgtttttgatagtggttttactgggcttattcgcatggcatcggcgccggcagaaggagaaagggagagacctggctccgagggtctcctacacacctgctatgcggatgacctctactgattactcactttctggtgcctgcggtatggataggcggcaaaacacctatatcatggataaagggttcaaagactacatgaaggaaagcgtctgctctagtagtacctgctctctgaacagttctgagaatccctacgctactatcaaggatccaccgattctgacgtgtaaacttcccgaatcctcttatgttgagatgaaatcacctgtacacatggggagcccatatacagatgtaccatctctgagcacctctaataagaacatatacgaggtggagccaaccgtctcggtggttcaggagggctgcggccataattcttcctacatccagaatgcctacgacttgcctcgcaactcccacatcccaggtcattatgacctgctcccggttagacaatctccagctaatggaccaagccaggacaagcaatcatag

SEQ ID NO: 224110 - DNA, 2628 bp, Artificial Sequence
  derived and/or modified sequence
atggtgctgagcctgaccggcctgatcgccttcagcttcctgcaggcgaccctcgcccttaaccccgaggatcccaatgtctgttctcactgggaatcttatgcagtgaccgtccaggaatcatacgcacatcctttcgatcagatctactatacacgatgcaccgacattctgaattggtttaagtgtacccggcaccgcatctcgtataaaaccgcttacagacgaggattgcggaccatgtatcggcggcgctcacagtgctgccctgggtactacgagagtggcgacttttgcatacccctgtgcactgaagagtgtgtgcacggcaggtgtgtcagccccgacacttgccattgcgagccaggatggggagggcccgactgttcctccggttgcgatagtgatcactgggggccccactgctccaatcggtgccagtgccaaaatggagcactgtgtaatcctattaccggcgcttgtgtttgcgctgcgggatttcgagggtggcggtgtgaggaactgtgtgcccctggtactcacgggaaaggctgtcaactgccttgtcaatgtaggcacggcgccagctgtgaccctagggctggggagtgtctttgcgctcccggttataccggggtatactgcgaggaactgtgccccccaggcagccacggggcccactgcgaattgcggtgcccctgccagaacggcgggacctgccaccacattacaggcgagtgcgcctgtccccctggatggactggcgcggtctgtgcccaaccttgcccccctgggactttcggacagaactgttcccaggactgtccttgtcaccacggtggacaatgcgatcacgtgactgggcagtgtcactgtaccgccgggtacatgggcgaccgctgccaggaggagtgccccttcggaagttttggctttcagtgctctcagcactgtgattgccataatggcggtcaatgcagcccaactaccggtgcctgtgagtgtgaaccgggatacaaaggtccaaggtgccaagaaaggctctgcccggagggcttacatgggccaggttgcacgctcccctgtccttgtgatgcagataacactatctcctgccacccggtcactggcgcttgtacgtgccagccaggctggtcaggacaccactgcaacgaatcctgtcctgttggatactatggcgacggctgtcagctaccatgcacctgccagaacggcgccgactgccactctatcactggaggctgtacttgcgcccctggcttcatgggcgaagtctgcgctgtttcctgcgccgccggaacttatggtcccaactgtagcagtatttgctcttgtaacaatgggggaacatgttcgcccgtcgacgggagctgcacctgcaaggagggatggcaggggctcgattgcacactcccctgcccttccgggacatgggggttgaactgcaatgaatcctgcacctgtgccaacggtgccgcttgttcccctatagacggaagttgttcttgcactccgggctggctgggggatacgtgtgaactgccatgtcctgacggaacttttggccttaattgcagtgaacattgcgactgttctcacgccgatggctgcgatcccgtgacaggccactgctgttgtctggcaggttggactgggattcggtgcgactccacttgccccccagggagatggggtcccaattgctctgtcagttgctcttgcgagaacggagggtcgtgttctccggaggacggtagttgcgagtgtgcaccggggttcagaggtcctttatgtcagcggatatgcccgcccggattctacggacacgggtgtgcacagccatgtcctttgtgcgtgcactcttctaggccctgtcaccacatttccggtatctgcgaatgcttacctggttttagcggtgcactgtgtaaccaggtttgcgccgggggctacttcgggcaagattgcgctcagctgtgtagttgtgctaataacggcacttgcagtcccatagacggcagttgtcagtgctttcccggctggattggcaaggattgcagtcaagcctgtcccccagggttttggggcccggcctgttttcacgcgtgtagctgccacaacggtgcctcatgctctgcagaggacggagcttgccactgcaccccaggctggacaggactgttttgcacccaaaggaagccccacctgctcgctagccagcctctgcgaatcccttgttgcgggctccttgccactgtcggcattgttcagacatcgagagaaggtgggatgcaggcagccccagggctagtcgtgcccgattcatgtcccacaaggacagaggagctttgcaggggatctagccggcctgattggattcaggggatagataagccaaaggtcttagagggtcagggctgcaaggctgcacagcagcacttcctcgggagaaccgtgggcgcttacgcgagtgttcggatggcccccgcggtaacgacatcagtcgcctccgcccctgcggctcaggcttccccaggtaacaccgtgagccgtgatgttccccaagagcccctggccatgggcgtgtctagctacgtcagcgcctag

SEQ ID NO: 224111 - DNA, 2910 bp, Artificial Sequence
  derived and/or modified sequence
atgcacacccccagcatccggagcatcacccacgacgcccagaccagtagtacaggctcctctgcacctggaactgccctatgcacggaagagtgcgtacacggcagatgcgtatcacccgatacatgtcattgcgaaccgggctggggggggccggactgttcctccggttgtgatagtgaccactggggtccacattgctcaaaccggtgccagtgccagaacggagcactgtgcaaccctatcactggggcttgtgtatgcgcagctggtttccggggctggcgatgcgaggagctgtgcgctcccggaacacacggcaaagggtgccagctgccttgtcagtgcagacatggggcctcttgtgacccaagggccggcgagtgcctgtgcgccccaggctatacaggcgtatactgcgaggaactttgccctccggggagccacggtgctcactgcgagctgcgctgcccatgccagaacgggggaacatgtcaccacattactggtgagtgtgcttgcccaccgggctggacaggtgcggtttgtgcacagccatgcccccccggcaccttcggacagaactgtagtcaagactgcccatgccaccatggcggacagtgtgatcacgtgaccggacagtgccactgtacggctgggtatatgggtgatcgctgccaagaggagtgcccatttggatcgtttggcttccagtgttcacaacactgtgactgccataacggaggacagtgtagtcctacaaccggcgcatgtgaatgtgaaccaggatataaaggtcctagatgtcaggagagactttgtccggaagggctccacggcccaggctgtacactgccttgtccctgcgacgctgacaataccatttcctgccatcctgtcactggcgcctgtacctgtcagcccggatggtctggccaccattgcaacgagtcatgtcctgtgggttattacggtgacggttgccaactgccttgcacttgccagaatggtgcagattgccattcaataacgggaggatgtacgtgcgcccctggattcatgggagaggtgtgtgcagtttcttgcgctgccgggacgtatgggccaaattgttcttctatctgttcatgcaataatggcgggacttgctcaccagttgacggcagctgtacgtgcaaggagggatggcaaggactggattgcactcttccctgcccgtccggcacgtggggactcaattgtaacgagtcatgcacctgcgctaatggagcggcatgcagtccaatagatggttcctgcagctgtacacctggatggttaggagatacatgtgaattaccatgtccggacggcacttttgggctgaattgttccgaacattgtgactgtagccacgcagatgggtgcgaccccgtgacagggcattgttgctgtctcgctgggtggacagggattcgctgtgactcaacctgtcctcctgggcgctggggacccaactgtagcgtcagctgttcgtgtgaaaatggtggttcctgcagccctgaagatggctcctgcgagtgcgccccaggattccgtggtcccttatgtcaacgaatctgcccacctggattctatggccatggctgcgctcagccatgccctctctgcgtgcactcctctcggccttgtcaccacattagcggcatctgcgaatgtcttcccgggttcagcggcgcactgtgcaatcaggtctgcgcaggcggttacttcgggcaggactgcgcccagctttgctcctgcgcaaacaatggcacctgctcacctatcgatgggtcctgccaatgcttcccaggctggatcgggaaggattgctctcaggcctgtccaccaggattctggggcccagcctgtttccatgcgtgcagttgtcataacggagccagctgctctgctgaggatggagcttgtcactgtactcccggatggactggactgttttgcacgcagcgttgcccggcagccttttttggaaaggactgcgggcgcgtatgtcagtgccagaatggagccagctgcgatcacatctccggcaagtgtacttgcagaactggtttcacaggccagcattgcgagcagaggtgcgccccaggtaccttcggatacggctgccaacagctgtgtgagtgtatgaacaattcaacctgcgatcacgtgactggcacctgttactgctctcctgggtttaagggcattagatgtgaccaggcagccctgatgatggaagaactgaacccatacacaaaaatcagccccgccttgggcgccgaacggcactccgtgggggccgtgacaggcattatgctactgttattcctgatcgtggtgctgcttggcctgttcgcctggcatcgacggaggcaaaaggagaagggtagggatctagcaccacgcgtaagctatactcccgctatgcgcatgactagcaccgactactctctcagtggcgcctgcggaatggatcgacgtcagaatacttatatcatggacaaggggtttaaggattatatgaaagagtcagtgtgtagcagctcaacttgcagcctcaattcctcggagaatccatacgccactattaaggaccctccaattctcacctgtaagctgccggaaagttcttatgtagagatgaaatccccagtgcacatggggtctccctacacggatgttccctctttatccacgtccaacaagaatatatatgaagtggagcctacagtgtctgtggtacaagaaggttgcggccacaatagcagctacatccagaacgcttatgatctgcctagaaattcccatatccctggtcattatgatctgctgcctgtacggcagagccccgcaaacggaccgtcccaggacaagcagtcgtag

SEQ ID NO: 224112 - DNA, 3135 bp, Artificial Sequence
  derived and/or modified sequence
atggtgctgagcctgaccggcctgatcgccttcagcttcctgcaggcaacactggctcttaacccagaggaccccaatgtgtgctcacattgggaaagctatgccgtgacagtgcaggagagctacgcacacccatttgaccagatatattatacaagatgtaccgatatcctcaactggttcaaatgcactcgccatagaatcagctataaaaccgcctataggcggggcctgagaaccatgtataggcgacgaagtcagtgttgcccaggctattacgaaagcggcgatttctgtataccactgtgtaccgaggaatgtgtccatggccgctgcgtcagcccagacacgtgtcattgtgagcccggttggggcggacccgactgtagctccggatgcgattctgatcactggggccctcattgtagcaacaggtgtcagtgccagaacggcgccctgtgtaacccaattacaggagcttgtgtttgtgccgcagggttccgcggatggcggtgcgaggagctgtgcgctcccgggacgcacggtaaagggtgtcagctgccctgccagtgcaggcatggcgcttcttgtgacccacgggcaggagaatgtctgtgcgcccctggctatactggagtttactgtgaagagctgtgcccacctgggagccacggtgctcactgcgaactcaggtgcccatgccagaatggaggcacttgccatcacatcaccggggagtgtgcctgccctcctggctggactggggcggtctgcgcccagccctgccctcccggcacctttggtcagaactgttcgcaggactgtccatgtcatcatggtgggcagtgcgaccatgtcaccgggcagtgtcactgcaccgctgggtatatgggagaccgttgccaggaggagtgtccatttggatcctttggattccaatgtagccagcattgcgattgtcacaacggcggacaatgcagtcccaccactggtgcctgcgaatgcgagccagggtacaagggccccagatgccaagagagactgtgccccgaaggattgcacggtcctgggtgcaccctaccatgtccttgcgacgccgacaatactattagttgccatccggtgactggtgcctgcacctgccagccgggatggtctggacatcattgcaatgagagttgtccagtggggtactatggcgacggatgtcagctcccatgcacttgccagaacggcgccgactgccactcgataacaggcggctgtacttgtgctcctggttttatgggcgaggtttgcgcagtgtcctgcgctgccggaacatacggcccaaactgctctagcatctgctcttgcaataacgggggtacatgctcaccagtggacggcagctgcacttgcaaagaaggctggcaggggcttgattgcacgctgccttgtcccagcgggacttgggggttaaactgcaatgagtcctgtacatgcgcaaatggagctgcctgctctcctattgacgggtcttgttcctgtaccccaggatggcttggggacacatgcgagctgccctgcccggacggcaccttcggcctcaattgttccgaacactgcgattgctcacacgcagacgggtgtgatcccgtcaccggtcactgctgctgtcttgccgggtggaccggaatcaggtgtgatagcacgtgtccaccaggacgatggggaccgaattgctctgtgtcgtgctcttgtgagaatggaggctcatgctccccagaagacgggagctgcgaatgtgcgcctggtttcaggggacccttgtgccagagaatctgtccaccgggattttacggacatgggtgcgcacagccatgtcccttgtgcgtgcactcatccagaccctgtcaccatatttcaggcatctgtgagtgtctccctggcttctcaggggccttgtgtaatcaggtctgcgccggcggctacttcggtcaagattgtgctcagttatgttcttgtgcaaataacggtacctgttcacccatagatggctcctgccagtgcttccctggctggatcgggaaggattgttcccaagcctgcccaccagggttttggggccctgcttgcttccatgcttgttcttgccacaatggggcgtcctgtagtgcagaagacggcgcatgtcactgcactcccggctggactggcctcttctgtactcagagatgtcctgccgcattctttggcaaggactgcggaagagtgtgtcaatgtcaaaacggggcctcctgcgaccacatcagcggtaaatgcacctgccggactggtttcacgggtcaacattgcgagcagcgctgtgctcctgggacgtttggttatggctgccagcaactgtgcgagtgtatgaataacagcacctgcgatcatgtcaccggaacctgctactgctcaccaggtttcaaaggtatccggtgtgatcaggctgcgctcatgatggaggagctcaatccctataccaagatatccccggcactgggggccgagcggcactctgtgggggccgtgaccgggatcatgcttctactgttcttgatcgttgtgctgctcggcctcttcgcctggcacaggagaagacagaaggagaagggccgtgaccttgctccccgcgtctcatatacaccggcgatgcgaatgacttcaactgattacagtctgagcggggcctgtggcatggaccgcagacaaaatacttatattatggacaagggattcaaggattacatgaaggagagcgtatgcagctcaagcacctgttccctcaatagttccgaaaatccgtacgctacaatcaaagaccctcctatactgacatgtaagttgcctgaaagtagttatgttgagatgaaaagccctgtgcatatgggctctccctatacagacgttccaagcctttctacttctaacaagaatatttacgaggttgagcctacagtgtcagtggtgcaagaaggttgcggccacaattcctcctatattcaaaatgcatatgatcttcccaggaacagtcacattccaggacattatgacctgctgccggtgaggcagagccccgctaatggcccgtcacaggacaaacagagctag

SEQ ID NO: 224113 - DNA, 3135 bp, Artificial Sequence
  derived and/or modified sequence
atggtgctgagcctgaccggcctgatcgccttcagcttcctgcaggcaacactcgcactgaatcctgaggacccaaacgtgtgcagtcactgggagagctatgcggtgacggtgcaggaatcatacgcccatccttttgaccagatatactatacaagatgtactgacatccttaactggttcaaatgcactagacacagaatctcttacaagaccgcctatcgacgcggattgaggacaatgtacagacgacggagccagtgctgtcctggatattacgagagtggggatttttgtatccctctttgtactgaagagtgcgtccacggaagatgcgtctcaccggacacctgccactgcgaaccgggctgggggggtccagattgctcctcaggatgtgatagcgaccattggggcccccactgttctaatagatgccaatgccagaacggggctctttgcaaccccattaccggcgcatgcgtctgcgccgccggatttcgtggctggcggtgtgaggagctatgcgcgcccgggacccacgggaaagggtgtcagctgccatgccagtgtcgccatggtgcgagctgcgacccccgggccggggagtgcttgtgcgcacctggatacaccggagtatattgtgaagagctttgtccaccaggctcccacggcgcccattgcgaattacgctgcccatgccagaacggaggcacctgccatcacatcaccggggagtgtgcctgtccgccagggtggactggtgctgtttgtgctcagccttgtcctcccggtacattcggacaaaactgctcccaagattgtccttgccaccacggggggcagtgcgaccacgtaactggccagtgtcactgcacggctggctatatgggcgatagatgtcaagaagaatgccccttcgggagctttgggtttcagtgtagtcaacactgcgattgccacaacggaggacagtgctcacccactacaggggcatgtgagtgtgagcccggctataaaggcccaaggtgccaggaaagactgtgccccgaggggctccacggcccagggtgtactttgccgtgcccctgtgatgctgataatactatctcgtgccacccagttaccggagcctgcacatgccagcctgggtggtctggacatcactgcaacgaatcttgtcccgtcgggtactatggagatggttgtcagctgccgtgtacttgccagaatggcgcggactgtcatagtatcactggcggctgcacttgtgcccccggctttatgggcgaggtttgtgccgtttcatgtgccgccgggacatatggaccgaactgtagttccatttgcagctgtaataacggcggaacatgctcaccagtcgacggctcttgtacttgtaaagagggatggcaaggattggattgtacgctcccatgcccttcaggcacctgggggctcaattgcaatgagtcctgcacttgtgctaacggagcagcgtgcagcccaattgacggctcctgtagttgcacacccggttggctgggtgatacgtgtgagctgccatgcccagatggcacatttgggctgaattgctcggaacattgtgattgttctcatgccgacgggtgcgaccctgtcacaggacactgttgctgtttagcggggtggaccgggatcagatgtgactccacatgcccaccaggacgctggggccccaactgcagcgtgtcctgctcttgcgagaacggcggcagctgttcacctgaagatggcagctgtgagtgcgccccgggattccgaggccccctctgccagaggatatgccccccgggattctacggtcacggttgcgcgcagccttgtcctctatgtgtgcattcgtccaggccttgtcatcatatttccggcatttgcgaatgtcttcctgggttctctggcgctctgtgcaaccaagtatgcgcgggagggtattttggacaggactgcgcacagctatgtagttgtgccaacaatggaacctgctcccccatcgatggcagctgccagtgctttccggggtggatcggaaaagactgcagccaggcatgccccccgggcttttggggacccgcatgtttccacgcttgcagctgtcacaatggagcatcttgctccgccgaggacggcgcgtgccactgcaccccgggatggaccggtctcttttgcacccagagatgccctgcagcattttttgggaaggattgtggcagagtgtgtcaatgtcagaatggggctagctgcgatcatatcagcgggaaatgtacgtgccgtaccggattcactggtcagcactgcgagcaaagatgcgctcctggaacatttggatatggctgtcaacaattgtgcgaatgcatgaataattctacttgtgatcatgtcaccgggacatgctattgttctcccggatttaagggcatccgatgtgaccaagctgctctcatgatggaggaactgaacccgtataccaaaatttccccggccttgggcgctgaaaggcacagcgtgggcgctgttactgggattatgctgttgctttttctcattgtagtactgctgggcttgttcgcctggcatcggcgccgacaaaaggaaaagggtcgggacctggctccgcgtgtcagctatacccctgcaatgaggatgaccagcaccgattactccttatccggagcttgcggtatggatcgacgccagaacacatatattatggacaagggattcaaggactacatgaaagagtctgtgtgtagcagcagcacctgctctttaaattcttccgagaacccctacgctacgatcaaggacccacctattctgacctgcaaacttcctgaatcatcttacgtggaaatgaagtcccccgtacacatgggtagcccttacacggatgtgccaagcttgagtacatcaaataaaaacatttacgaagtcgaacctacagtatcggttgtgcaagagggctgcggccacaactcttcctacatacagaatgcctacgacttgcctcgcaactctcatatcccggggcattacgatctcctgcctgtgaggcagtcccctgctaacgggcccagccaggataagcagtcatag

SEQ ID NO: 224114 - DNA, 2910 bp, Artificial Sequence
  derived and/or modified sequence
atgcacacgccttctatcagatcgatcacccatgacgcacaaacctcttcaaccggcagttccgcccctggtaccgcactgtgcactgaagagtgtgtccacggacggtgtgttagccccgatacatgtcactgtgagccgggatggggaggcccagactgctcatccggatgtgacagcgatcactggggcccacactgcagtaacagatgtcagtgtcagaatggagcattgtgtaacccgattaccggagcgtgtgtgtgcgctgcgggattccgcggatggcgctgcgaggaactctgtgcccctggaacccacggaaagggctgccagttgccttgtcagtgccgccatggcgcaagttgtgaccctcgcgctggcgaatgtctgtgcgccccaggctataccggcgtctattgcgaagaattgtgtcctcccggtagccatggagcccactgcgagctacgctgcccttgtcagaatggaggcacctgccaccatatcactggagagtgtgcctgtccccctggatggaccggggctgtctgcgcccagccatgtccaccgggaacatttggtcagaattgttcccaggattgcccctgtcaccatggtggccagtgcgaccatgtcacaggccagtgccactgtaccgccggttacatgggcgataggtgccaggaggagtgcccatttggctccttcggctttcagtgctcccagcactgcgactgtcacaacggagggcagtgcagtccaactactggggcttgtgaatgcgaaccaggctacaaaggcccacgatgccaagagaggctgtgcccggagggtttgcacgggccagggtgcacactcccgtgtccttgcgacgctgacaatacgataagctgccaccccgttacaggggcatgtacatgtcaacccggatggagtggccaccattgtaatgagtcatgccctgttggctattatggtgatggctgtcagctgccctgtacatgccaaaacggggctgactgccattccatcacaggcggatgtacttgcgcacctgggttcatgggggaagtttgtgcagtgtcctgtgctgcaggcacttacggtccaaattgcagcagcatttgtagttgcaacaacggtggaacttgttcacccgtcgatggctcctgtacatgtaaagagggatggcaggggctggactgcacgctgccatgcccgagtgggacctgggggctcaattgcaatgaatcttgcacttgcgccaacggggctgcctgttctcccatcgacgggtcatgtagctgtacaccgggatggttgggagatacatgtgagctgccttgtccagatggcacgtttgggctgaattgctctgagcactgcgactgctcccacgctgatggctgtgaccccgtgacaggacattgttgttgcctcgccggatggacaggcatccgctgtgattccacatgtcctcctgggcgatggggccctaattgttctgtgtcttgttcatgcgagaatggtgggtcctgctctccagaagacggaagctgcgaatgtgccccaggtttccggggacccctgtgccagcgcatctgtcccccaggattctatggacatggttgtgcacaaccatgcccactctgcgtgcattcttcacggccttgtcaccatattagcggcatctgcgaatgcttgcccggtttctccggcgcactgtgtaaccaggtctgtgcaggcggttacttcggacaggattgtgcccagctgtgttcctgtgctaacaacgggacctgttcccctatcgatggctcctgccaatgcttcccaggttggatcgggaaggattgctcccaggcatgtccccctggattttggggccctgcatgctttcacgcatgcagctgtcacaatggagccagttgttctgctgaagatggagcatgccattgtacgccgggatggactggtcttttctgtacccagcggtgccccgctgccttctttggtaaagattgtggccgagtgtgtcagtgccaaaatggggcttcttgtgaccacatatctggtaagtgtacatgcagaacaggtttcacaggtcagcattgtgaacagagatgcgctcccggaaccttcggttatgggtgccagcagttatgtgaatgtatgaacaatagcacctgcgatcatgtgacagggacctgctattgtagccccggatttaaggggatacgatgcgatcaagccgctctaatgatggaggaactcaatccttataccaaaataagtccagccctcggagctgaaaggcactcagtaggtgccgttactggcatcatgctgctcctgttcctgatcgtggttctgctcgggctatttgcctggcaccggaggaggcaaaaggagaaaggtcgcgacctcgccccacgagtcagctacacacccgctatgaggatgacgtccacggactattcactatccggggcttgcggtatggatagacggcaaaatacatacatcatggacaaggggttcaaagattacatgaaagagagtgtctgcagctcctcaacttgctctctcaacagcagtgagaatccctacgctaccattaaggatcccccaatcctgacttgcaaactcccagaatcttcctacgtcgaaatgaaaagccctgtccacatgggttctccatatacagacgtccccagtctttccacatctaacaaaaatatttatgaggtagagcctaccgtttcggtggtacaggagggatgtggccacaacagctcctacatacaaaacgcatacgatctgccacgaaatagtcacattcctggacactacgatcttttgccagtgcggcagtcccctgctaatggcccttcgcaggacaagcaaagctag

SEQ ID NO: 224115 - DNA, 2628 bp, Artificial Sequence
  derived and/or modified sequence
atggtgctgagccttactgggctcattgcgttttcatttctgcaagctaccctggcattgaatcccgaggatccaaatgtctgctctcattgggaatcatatgccgtaacagttcaggagtcctacgcccaccctttcgaccagatttattatacccgatgtactgatattctcaattggttcaaatgcacacgccaccgaatttcttacaaaactgcttaccggagaggcctcaggactatgtatagacgcaggagtcagtgttgtccgggatattacgagtccggggatttttgcatccccctctgcacggaagaatgtgtccacggtagatgtgtctcccctgatacatgtcactgcgaaccgggatggggtgggcctgattgcagctcaggttgcgacagcgaccactgggggccacattgctccaacagatgccagtgtcagaacggcgcactgtgcaatcctataacaggggcttgcgtatgcgccgctggcttcagggggtggcgttgcgaagagctctgcgctccaggaacccacggaaagggttgccagcttccttgccagtgtagacatggcgctagttgtgacccacgagcgggagaatgcctctgcgcgccaggatacacaggcgtgtactgtgaggagttgtgccccccaggatctcacggagctcactgcgagctacgctgcccctgccagaatggaggcacttgtcaccatattaccggagagtgcgcgtgccccccaggctggactggagcagtatgcgcacagccttgcccaccagggactttcggtcaaaattgttctcaggattgcccatgccaccacggaggccagtgtgaccatgtaacagggcaatgccattgcaccgcagggtacatgggcgatagatgtcaggaggaatgccccttcgggtcattcggttttcagtgtagccaacattgcgactgccacaatggcggacagtgctcgcccacaactggtgcttgtgagtgcgaacctggatataagggccctcgttgccaggagcgcctgtgtccagaggggctgcatggtcccggatgtacattaccatgtccctgcgatgccgacaatactatttcttgccacccggtgacaggcgcttgcacgtgccagccaggatggagtggccatcactgcaacgagtcctgccctgtcggctattacggagatggctgtcagctcccctgcacgtgccagaatggagccgattgccacagcataacagggggttgtacatgcgccccagggttcatgggggaggtgtgtgcagttagctgtgcagcaggtacctatgggcctaactgcagttctatctgcagttgcaacaacggcggaacttgctcacccgtggatggatcctgtacttgtaaggaagggtggcagggactggattgtacactcccctgcccatccggaacatggggactaaattgcaatgaatcctgcacttgcgcaaatggcgctgcctgcagtccaatcgacggcagctgtagctgcactccaggatggcttggggatacctgtgagctgccttgtccagacggcacattcggcctgaactgctccgaacactgtgactgtagccacgcggacggatgtgatcccgtcactggccattgttgctgtctggccggatggactggaatcaggtgcgactctacttgtccgcctgggaggtggggtcccaactgtagcgtttcctgttcctgtgaaaatggcggttcctgctcccctgaggacgggtcctgcgagtgtgcccctgggttcaggggtcccctttgtcagcgcatctgtcctccaggtttttatggacatggttgcgcccagccatgtccgctttgtgtacactcttctcgcccatgtcatcacatatctggaatctgtgagtgcctccccggattcagcggggcactctgcaatcaggtctgtgccggaggatactttggtcaggactgtgcccagctgtgctcctgcgccaataacggaacctgttctccaattgatggaagctgtcaatgcttcccaggctggatcggaaaggactgctcacaagcttgccctcccggattttggggcccagcttgctttcacgcctgttcctgccacaacggtgcatcttgttccgccgaagatggagcctgtcattgcaccccaggctggaccggccttttctgcacgcagagaaagccgcacttgctcgcctcgcaaccactgcgtatcccatgctgcggactcctcgctacagtgggcatcgtacaaacttcgcgcgagggtggaatgcaggccgctcctggactggtggtgcctgattcctgtcctacccgcaccgaggagctctgtagagggtccagcaggcctgattggatccagggaatcgacaaacccaaggtccttgaaggccagggctgtaaggctgcgcagcagcactttctgggaaggacagtaggcgcatacgcctcagtgcggatggctcctgccgtcaccacctctgtggcttccgcccctgcagcccaggcttctcccggaaacaccgtgagccgggacgtgccacaggagccgttggccatgggagtttcctcttatgtgtcagcatag

SEQ ID NO: 224116 - DNA, 2910 bp, Artificial Sequence
  derived and/or modified sequence
atgcacaccccttccattagatccatcactcatgacgcacagacatccagcaccggctccagcgccccagggacagcactttgcacggaggagtgcgtccatggcagatgcgtgtccccagatacctgtcactgcgaacccggatggggcggtccagattgctcttctggatgtgactcggaccactggggacctcattgctccaaccgatgtcaatgccagaatggagccctgtgcaatccaattactggcgcttgtgtctgtgcagccggattccgcggttggcggtgtgaagaactgtgtgccccaggcacccatggcaaaggatgtcagctgccctgccagtgcagacacggtgcatcttgcgacccacgtgctggggagtgcttatgcgctccaggatacacaggcgtgtactgcgaggagctgtgcccccctggatcccatggagcgcactgtgaactgcgttgcccctgtcagaacgggggtacctgccaccacattaccggcgagtgtgcatgcccaccaggttggaccggggctgtgtgcgctcagccttgcccccctggtacattcggccagaattgctcccaggactgtccctgtcaccatgggggacaatgtgaccatgttactggtcaatgtcattgtacagccggttatatgggcgacaggtgccaagaagagtgtcctttcggctcctttgggttccagtgctcccaacactgcgactgccataacggcggacagtgtagtccaacgacaggagcctgcgaatgtgaacccggatataaaggcccaaggtgccaggaacgcctctgcccagaaggcctccatgggcctggatgtactttgccttgtccctgcgacgccgacaatactatcagctgtcatcccgtgaccggcgcttgcacttgtcaaccaggctggtccgggcaccactgcaatgagtcgtgcccagtggggtattacggggacggatgtcagttgccctgtacctgtcagaacggagcagactgccactccataaccggcggatgcacctgtgcgcctgggttcatgggagaggtctgtgccgtgagctgcgccgctggtacgtacggccctaattgcagcagtatctgtagttgcaataacggcggtacctgcagtccggttgacggttcttgtacctgtaaggagggatggcagggattggattgtactttaccctgcccctcgggcacctggggactgaattgcaacgagagctgcacctgtgctaacggcgctgcctgctcacccatcgacggctcatgctcctgtaccccaggttggctgggggacacctgcgagctgccttgcccagacggaacatttggacttaactgttccgaacactgtgattgttctcacgcagacgggtgtgaccctgtcacaggacactgttgttgcctggccggttggactggcattagatgtgactctacttgtcctcctggtcgatgggggcctaactgcagtgtgagttgttcctgcgaaaacggcggaagctgctctccggaggacggatcgtgcgagtgtgcgccaggtttcagggggcctctgtgccaacgcatctgccctcctggcttctacgggcacggctgtgctcagccatgtcccctgtgtgtgcatagttctagaccatgccaccatatcagtggaatatgcgagtgtctacccggattttcgggagctctttgtaaccaggtttgcgccggaggatactttggccaggattgtgctcaactgtgtagctgcgcaaacaatggcacatgttcccccatagacggcagctgccagtgctttccaggatggatagggaaggactgctctcaggcttgtcctcccggattctgggggcctgcatgcttccacgcatgcagctgtcataatggggcatcttgttcggccgaggacggtgcctgccactgtacaccgggatggacaggtctgttctgtactcagagatgccccgcagctttcttcggcaaggactgtggacgtgtctgtcagtgccagaatggcgcttcttgcgatcacatttcaggcaagtgtacttgccgcacaggcttcaccggccagcattgtgaacagagatgcgcacctggaacttttggatacggttgtcaacagctttgtgagtgcatgaataattcaacttgtgaccacgtcacagggacctgttattgttccccagggttcaaagggattagatgcgaccaggctgctctgatgatggaagagctaaatccatatacgaagatcagtcccgcactgggggctgagaggcactccgttggcgcagttacagggatcatgctgctcctgttcttgatagttgtgctcctgggtctgttcgcatggcaccggagacgtcagaaggagaagggcagagacctggccccaagggtaagctacactcctgccatgagaatgactagcaccgattattccctcagtggcgcatgtgggatggacaggagacagaatacgtacattatggacaaaggattcaaggattacatgaaagagagcgtttgcagttcttcaacgtgtagtctgaactcctccgaaaacccatatgccacgattaaggacccccctattctcacctgtaagttgccagaatcgtcctatgtggaaatgaagtccccagtgcacatggggtccccgtatacggatgtgccatcattgagcacaagtaataaaaacatctatgaggtggagcctactgtgagtgtggtccaagaggggtgtggccataatagctcatacattcagaacgcctatgatcttcccagaaattctcatatacctggtcattacgacctgctccctgtgagacagagtcctgcgaatggacctagtcaggacaagcagagttag

SEQ ID NO: 224117 - DNA, 3135 bp, Artificial Sequence
  derived and/or modified sequence
atggtactaagtctcactggcctgattgccttctcttttctgcaggccactttggccctgaaccctgaggatccaaacgtttgtagccactgggagagctacgcggtcaccgtgcaagagtcctacgcacatcccttcgatcagatctactatacacgctgtaccgatatccttaactggtttaagtgcactcgccatcgcataagttataaaaccgcttatagaaggggcctcagaacaatgtacaggaggaggtctcagtgctgtcccggttattacgagagcggggacttttgcattccactgtgtaccgaggagtgcgtccacggccgttgtgtgagcccggatacgtgtcattgcgaaccaggatggggcggaccagactgctcatctggatgcgattcagaccattggggaccccactgttccaatcgatgtcagtgccagaacggggctttatgtaatcctattacgggggcatgtgtttgtgccgctggatttaggggttggcgatgcgaggaactctgcgcaccaggaacgcacgggaaaggttgccagctcccatgtcagtgtaggcatggagcttcatgtgaccctcgggctggggaatgtctctgtgcacccggatacaccggcgtttattgtgaggaactgtgcccacccggttcccacggcgctcactgtgagctgagatgtccatgccaaaatggcggtacgtgccaccatatcactggcgaatgtgcatgtcccccaggttggacgggcgctgtctgtgcacaaccctgtcctcccggaacattcggccaaaactgctctcaagactgcccgtgtcaccacggcggtcaatgtgaccacgtaactgggcagtgccactgtacagccggttacatgggcgatcgctgtcaggaagaatgcccattcggtagttttggctttcaatgctcccaacattgcgactgccataacggaggccagtgctcccctacaacaggagcttgcgagtgtgagcccggttacaaaggaccgagatgtcaggaaaggctctgtcccgagggccttcatgggcctggatgcacactaccgtgcccttgcgacgctgataataccatcagctgtcatcccgtgactggcgcttgtacttgccaacccggttggagcggccatcattgtaacgaaagctgtccggtcgggtactatggcgacggatgtcagctcccatgcacatgccagaacggagcggactgccattccatcaccggagggtgtacatgcgcccctggctttatgggcgaagtttgtgcagtaagctgcgccgctggcacctacgggccaaactgtagctctatctgctcctgcaataacggagggacgtgtagtcccgtagacggctcttgcacatgtaaagagggttggcagggtctggattgcaccctgccttgtccatctggcacttgggggctgaactgtaacgaatcttgtacatgcgccaatggggcagcttgctccccgatcgacggttcctgttcctgcacaccaggttggctcggtgacacctgtgagcttccgtgtcccgatggtacttttggcctgaactgctccgagcactgcgattgttcacacgctgacgggtgtgatccagtcactggccattgctgctgtttggctggttggacaggcataagatgcgattctacctgcccaccaggacgttggggcccaaactgttccgtgtcatgcagctgcgagaatggtggaagctgttcacctgaagatggatcttgtgagtgtgccccaggctttcgaggaccgctgtgtcagaggatctgcccgccagggttctacggccatgggtgtgcacaaccttgtcccctgtgcgttcactccagccggccttgccatcatatcagcggcatttgcgagtgcctccctggatttagtggagcactctgtaatcaggtctgcgccggaggttacttcggacaggattgtgctcaactgtgtagttgcgccaacaatggaacatgctcccctattgatggctcttgccagtgctttcccggttggattggaaaggactgcagtcaggcttgccccccaggcttctgggggcctgcatgtttccacgcttgctcatgccacaatggcgcttcatgtagcgccgaagacggcgcttgccactgcacgcctgggtggaccggacttttttgtacccaaagatgcccagcggcattctttggaaaagattgcggccgagtctgtcagtgccagaatggcgcaagctgcgaccatatttccggaaaatgtacctgtcgtacaggcttcaccggacaacattgcgaacaacggtgcgcgccaggcacattcggatacgggtgtcagcagctctgtgagtgcatgaataattcaacttgtgatcatgttaccggtacctgttattgctcgcccggtttcaagggaatccggtgtgatcaagctgcattgatgatggaggagctgaacccctacacaaagatttcaccggcactgggcgcagaacgccacagcgtgggagccgtgacgggcatcatgctcctcctctttctcatcgtggtgttactgggccttttcgcctggcacagaagaaggcagaaagagaaggggagagacctggcaccgagggttagctacactcctgcgatgcgaatgacctctactgattattccctgtccggcgcatgtgggatggatcgcagacagaacacttacattatggacaaaggattcaaggattatatgaaagaatcagtgtgtagcagctctacttgttccctcaatagttccgagaacccatatgccactattaaagatcccccaatcctcacctgcaaactccccgagagttcatatgtcgaaatgaagagccctgtgcatatgggcagcccctacactgacgtgccctctctgagcacctccaacaagaatatctatgaagtggagccgaccgtgtccgtggtgcaggaaggatgcggccataactcatcatatatacagaacgcctacgaccttcctcgcaacagtcatatccctgggcattacgatttgttgccggtgcgccagagtcccgctaacggaccctcccaggacaagcagtcttag

SEQ ID NO: 224118 - DNA, 3135 bp, Artificial Sequence
  derived and/or modified sequence
atggtgctatccctgaccggccttatcgcctttagttttttgcaggctaccttggccttgaaccctgaggaccctaatgtatgttcccattgggagtcttacgccgtgacagtccaagagtcctacgctcaccctttcgaccaaatctattacactcgctgtacagacattctaaactggtttaagtgcacacgccatcggattagttacaagaccgcctatcgtcggggattgcgaaccatgtacaggagacgctcacagtgttgtcccggatactacgaatccggagacttctgtattccgctgtgcactgaggagtgcgtccatggaagatgtgtgtctcccgatacctgccactgtgaaccgggttgggggggaccagattgttcatccgggtgcgacagtgaccactggggccctcactgcagcaatagatgtcagtgtcagaatggggcactgtgtaaccccatcacaggggcttgcgtgtgcgccgctggcttcagaggatggagatgtgaagagttgtgcgcaccagggacacacggaaagggctgccagctcccttgccaatgtcgccacggagcgtcctgcgatcctcgcgctggagaatgtttgtgtgctccaggatacacgggtgtttactgtgaggagctgtgcccccctggcagccacggagctcactgcgagctgaggtgtccctgtcaaaatgggggtacctgtcatcacatcacaggcgagtgcgcttgccccccagggtggacaggcgctgtctgtgcccagccttgtccaccgggaacattcgggcagaactgctctcaggattgcccatgtcaccatgggggacagtgcgaccatgtcacagggcagtgccactgcacagccggttatatgggcgataggtgtcaggaggaatgtccgtttgggagcttcggatttcagtgcagccagcattgcgactgtcataacggtgggcagtgcagcccaaccacaggagcctgcgagtgtgaacccggatacaaaggcccacgctgtcaggagcggttgtgcccagagggcctgcatggacccggatgtacgctgccctgcccgtgcgatgcagacaatacaattagttgccaccctgtcacaggcgcatgtacttgccagcccggatggagcggacaccactgtaatgaatcttgtcccgtgggttattacggggacggctgccagctcccatgcacttgccagaatggtgctgattgccatagcattacagggggatgtacctgcgctcccggattcatgggggaggtctgcgctgtttcatgcgctgctggtacttatgggccaaattgcagctccatctgctcttgtaataacggcggaacgtgctctcctgtcgatggctcctgtacatgcaaagaaggatggcaggggctggattgtacactgccttgtccatctgggacttggggcttgaattgtaatgaatcctgtacatgtgccaacggtgccgcatgctcccccatagatgggagttgctcctgcactcctggttggctgggggatacatgtgagttgccctgccccgatgggacatttggtttgaactgttccgagcattgtgactgctctcatgcagatggctgcgatcccgtgacgggccattgctgttgcctggcaggatggaccgggataagatgtgatagcacctgcccacccggtcgctggggacctaactgctctgtcagttgttcctgcgaaaatggcggttcttgctcccctgaagatggatcttgtgaatgtgccccaggtttccgaggcccactttgtcagcggatctgccccccaggcttttatggccacggttgtgcccagccatgtcctctgtgtgtgcacagctctcggccatgtcaccatatcagtggtatttgtgaatgtttgcctggattctctggagccttgtgtaaccaagtgtgtgctgggggttatttcggacaagactgcgcccagctgtgctcctgcgcaaacaacggtacgtgttctcctatagacggaagttgccaatgttttcctggctggatcggaaaggattgctctcaggcctgtccacccggattctgggggcctgcgtgctttcatgcctgttcctgccataatggggcttcctgtagcgctgaggacggtgcttgtcattgcacacccggttggaccggcctattttgcacacagagatgccccgcagcgttcttcggaaaggattgtggcagggtctgtcagtgtcaaaatggggctagctgcgaccacatcagcggcaaatgtacctgccgaacaggatttacgggtcagcactgcgaacagaggtgtgctccagggaccttcggctatggctgccagcagttatgtgagtgcatgaacaactctacctgtgaccacgtaaccggcacatgttactgctcacccggatttaaaggaattaggtgtgatcaggcggctctgatgatggaggagctgaatccatatacaaaaattagccctgctctcggggcagaaagacactcagttggcgctgtgacaggaataatgctgctcttgttcctgatcgtggtgctcctgggactctttgcttggcatcgcaggcggcaaaaggagaagggacgagacctcgctccacgcgtatcttacacacctgcaatgcgaatgacctccacggattactctttgtctggagcctgcgggatggatcgtcgccagaacacttatatcatggacaagggtttcaaagattatatgaaagagtccgtgtgttccagtagcacatgttccttaaactcctcggagaacccatacgcaaccatcaaggacccacctatcttaacatgtaaactccccgaaagttcatacgtcgagatgaaatcgccagtacatatgggatcaccctacacagatgtcccgtccctgagcacctcaaataagaacatatacgaggttgagccgacagtgagcgtggtacaggaggggtgcggtcataacagtagctacattcagaatgcttatgacctgcccaggaactcccacattcctggccactatgatctcttgccagtcagacagtctcctgcaaacggcccatctcaggataaacaaagctag

SEQ ID NO: 224119 - DNA, 2910 bp, Artificial Sequence
  derived and/or modified sequence
atgcacacccccagcatcagaagcatcacccacgacgcccagaccagcagcaccggcagcagcgcccccggcaccgccctgtgcaccgaggagtgcgtgcacggcagatgcgtgagccccgacacctgccactgcgagcccggctggggcggccccgactgcagcagcggctgcgacagcgaccactggggcccccactgcagcaacagatgccagtgccagaacggcgccctgtgcaaccccatcaccggcgcctgcgtgtgcgccgccggcttcagaggctggagatgcgaggagctgtgcgcccccggcacccacggcaagggctgccagctgccctgccagtgcagacacggcgccagctgcgaccccagagccggcgagtgcctgtgcgcccccggctacaccggcgtgtactgcgaggagctgtgcccccccggcagccacggcgcccactgcgagctgagatgcccctgccagaacggcggcacctgccaccacatcaccggcgagtgcgcctgcccccccggctggaccggcgccgtgtgcgcccagccctgcccccccggcaccttcggccagaactgcagccaggactgcccctgccaccacggcggccagtgcgaccacgtgaccggccagtgccactgcaccgccggctacatgggcgacagatgccaggaggagtgccccttcggcagcttcggcttccagtgcagccagcactgcgactgccacaacggcggccagtgcagccccaccaccggcgcctgcgagtgcgagcccggctacaagggccccagatgccaggagagactgtgccccgagggcctgcacggccccggctgcaccctgccctgcccctgcgacgccgacaacaccatcagctgccaccccgtgaccggcgcctgcacctgccagcccggctggagcggccaccactgcaacgagagctgccccgtgggctactacggcgacggctgccagctgccctgcacctgccagaacggcgccgactgccacagcatcaccggcggctgcacctgcgcccccggcttcatgggcgaggtgtgcgccgtgagctgcgccgccggcacctacggccccaactgcagcagcatctgcagctgcaacaacggcggcacctgcagccccgtggacggcagctgcacctgcaaggagggctggcagggcctggactgcaccctgccctgccccagcggcacctggggcctgaactgcaacgagagctgcacctgcgccaacggcgccgcctgcagccccatcgacggcagctgcagctgcacccccggctggctgggcgacacctgcgagctgccctgccccgacggcaccttcggcctgaactgcagcgagcactgcgactgcagccacgccgacggctgcgaccccgtgaccggccactgctgctgcctggccggctggaccggcatcagatgcgacagcacctgcccccccggcagatggggccccaactgcagcgtgagctgcagctgcgagaacggcggcagctgcagccccgaggacggcagctgcgagtgcgcccccggcttcagaggccccctgtgccagagaatctgcccccccggcttctacggccacggctgcgcccagccctgccccctgtgcgtgcacagcagcagaccctgccaccacatcagcggcatctgcgagtgcctgcccggcttcagcggcgccctgtgcaaccaggtgtgcgccggcggctacttcggccaggactgcgcccagctgtgcagctgcgccaacaacggcacctgcagccccatcgacggcagctgccagtgcttccccggctggatcggcaaggactgcagccaggcctgcccccccggcttctggggccccgcctgcttccacgcctgcagctgccacaacggcgccagctgcagcgccgaggacggcgcctgccactgcacccccggctggaccggcctgttctgcacccagagatgccccgccgccttcttcggcaaggactgcggcagagtgtgccagtgccagaacggcgccagctgcgaccacatcagcggcaagtgcacctgcagaaccggcttcaccggccagcactgcgagcagagatgcgcccccggcaccttcggctacggctgccagcagctgtgcgagtgcatgaacaacagcacctgcgaccacgtgaccggcacctgctactgcagccccggcttcaagggcatcagatgcgaccaggccgccctgatgatggaggagctgaacccctacaccaagatcagccccgccctgggcgccgagagacacagcgtgggcgccgtgaccggcatcatgctgctgctgttcctgatcgtggtgctgctgggcctgttcgcctggcacagaagaagacagaaggagaagggcagagacctggcccccagagtgagctacacccccgccatgagaatgaccagcaccgactacagcctgagcggcgcctgcggcatggacagaagacagaacacctacatcatggacaagggcttcaaggactacatgaaggagagcgtgtgcagcagcagcacctgcagcctgaacagcagcgagaacccctacgccaccatcaaggacccccccatcctgacctgcaagctgcccgagagcagctacgtggagatgaagagccccgtgcacatgggcagcccctacaccgacgtgcccagcctgagcaccagcaacaagaacatctacgaggtggagcccaccgtgagcgtggtgcaggagggctgcggccacaacagcagctacatccagaacgcctacgacctgcccagaaacagccacatccccggccactacgacctgctgcccgtgagacagagccccgccaacggccccagccaggacaagcagagctag

SEQ ID NO: 224120 - DNA, 2628 bp, Artificial Sequence
  derived and/or modified sequence
atggtgctgagcctgaccggcctgatcgccttcagcttcctgcaggccaccctggccctgaaccccgaggaccccaacgtgtgcagccactgggagagctacgccgtgaccgtgcaggagagctacgcccaccccttcgaccagatctactacaccagatgcaccgacatcctgaactggttcaagtgcaccagacacagaatcagctacaagaccgcctacagaagaggcctgagaaccatgtacagaagaagaagccagtgctgccccggctactacgagagcggcgacttctgcatccccctgtgcaccgaggagtgcgtgcacggcagatgcgtgagccccgacacctgccactgcgagcccggctggggcggccccgactgcagcagcggctgcgacagcgaccactggggcccccactgcagcaacagatgccagtgccagaacggcgccctgtgcaaccccatcaccggcgcctgcgtgtgcgccgccggcttcagaggctggagatgcgaggagctgtgcgcccccggcacccacggcaagggctgccagctgccctgccagtgcagacacggcgccagctgcgaccccagagccggcgagtgcctgtgcgcccccggctacaccggcgtgtactgcgaggagctgtgcccccccggcagccacggcgcccactgcgagctgagatgcccctgccagaacggcggcacctgccaccacatcaccggcgagtgcgcctgcccccccggctggaccggcgccgtgtgcgcccagccctgcccccccggcaccttcggccagaactgcagccaggactgcccctgccaccacggcggccagtgcgaccacgtgaccggccagtgccactgcaccgccggctacatgggcgacagatgccaggaggagtgccccttcggcagcttcggcttccagtgcagccagcactgcgactgccacaacggcggccagtgcagccccaccaccggcgcctgcgagtgcgagcccggctacaagggccccagatgccaggagagactgtgccccgagggcctgcacggccccggctgcaccctgccctgcccctgcgacgccgacaacaccatcagctgccaccccgtgaccggcgcctgcacctgccagcccggctggagcggccaccactgcaacgagagctgccccgtgggctactacggcgacggctgccagctgccctgcacctgccagaacggcgccgactgccacagcatcaccggcggctgcacctgcgcccccggcttcatgggcgaggtgtgcgccgtgagctgcgccgccggcacctacggccccaactgcagcagcatctgcagctgcaacaacggcggcacctgcagccccgtggacggcagctgcacctgcaaggagggctggcagggcctggactgcaccctgccctgccccagcggcacctggggcctgaactgcaacgagagctgcacctgcgccaacggcgccgcctgcagccccatcgacggcagctgcagctgcacccccggctggctgggcgacacctgcgagctgccctgccccgacggcaccttcggcctgaactgcagcgagcactgcgactgcagccacgccgacggctgcgaccccgtgaccggccactgctgctgcctggccggctggaccggcatcagatgcgacagcacctgcccccccggcagatggggccccaactgcagcgtgagctgcagctgcgagaacggcggcagctgcagccccgaggacggcagctgcgagtgcgcccccggcttcagaggccccctgtgccagagaatctgcccccccggcttctacggccacggctgcgcccagccctgccccctgtgcgtgcacagcagcagaccctgccaccacatcagcggcatctgcgagtgcctgcccggcttcagcggcgccctgtgcaaccaggtgtgcgccggcggctacttcggccaggactgcgcccagctgtgcagctgcgccaacaacggcacctgcagccccatcgacggcagctgccagtgcttccccggctggatcggcaaggactgcagccaggcctgcccccccggcttctggggccccgcctgcttccacgcctgcagctgccacaacggcgccagctgcagcgccgaggacggcgcctgccactgcacccccggctggaccggcctgttctgcacccagagaaagccccacctgctggccagccagcccctgagaatcccctgctgcggcctgctggccaccgtgggcatcgtgcagaccagcagagagggcggcatgcaggccgcccccggcctggtggtgcccgacagctgccccaccagaaccgaggagctgtgcagaggcagcagcagacccgactggatccagggcatcgacaagcccaaggtgctggagggccagggctgcaaggccgcccagcagcacttcctgggcagaaccgtgggcgcctacgccagcgtgagaatggcccccgccgtgaccaccagcgtggccagcgcccccgccgcccaggccagccccggcaacaccgtgagcagagacgtgccccaggagcccctggccatgggcgtgagcagctacgtgagcgcctag

SEQ ID NO: 224121 - DNA, 3135 bp, Artificial Sequence
  derived and/or modified sequence
atggtgctgagcctgaccggcctgatcgccttcagcttcctgcaggccaccctggccctgaaccccgaggaccccaacgtgtgcagccactgggagagctacgccgtgaccgtgcaggagagctacgcccaccccttcgaccagatctactacaccagatgcaccgacatcctgaactggttcaagtgcaccagacacagaatcagctacaagaccgcctacagaagaggcctgagaaccatgtacagaagaagaagccagtgctgccccggctactacgagagcggcgacttctgcatccccctgtgcaccgaggagtgcgtgcacggcagatgcgtgagccccgacacctgccactgcgagcccggctggggcggccccgactgcagcagcggctgcgacagcgaccactggggcccccactgcagcaacagatgccagtgccagaacggcgccctgtgcaaccccatcaccggcgcctgcgtgtgcgccgccggcttcagaggctggagatgcgaggagctgtgcgcccccggcacccacggcaagggctgccagctgccctgccagtgcagacacggcgccagctgcgaccccagagccggcgagtgcctgtgcgcccccggctacaccggcgtgtactgcgaggagctgtgcccccccggcagccacggcgcccactgcgagctgagatgcccctgccagaacggcggcacctgccaccacatcaccggcgagtgcgcctgcccccccggctggaccggcgccgtgtgcgcccagccctgcccccccggcaccttcggccagaactgcagccaggactgcccctgccaccacggcggccagtgcgaccacgtgaccggccagtgccactgcaccgccggctacatgggcgacagatgccaggaggagtgccccttcggcagcttcggcttccagtgcagccagcactgcgactgccacaacggcggccagtgcagccccaccaccggcgcctgcgagtgcgagcccggctacaagggccccagatgccaggagagactgtgccccgagggcctgcacggccccggctgcaccctgccctgcccctgcgacgccgacaacaccatcagctgccaccccgtgaccggcgcctgcacctgccagcccggctggagcggccaccactgcaacgagagctgccccgtgggctactacggcgacggctgccagctgccctgcacctgccagaacggcgccgactgccacagcatcaccggcggctgcacctgcgcccccggcttcatgggcgaggtgtgcgccgtgagctgcgccgccggcacctacggccccaactgcagcagcatctgcagctgcaacaacggcggcacctgcagccccgtggacggcagctgcacctgcaaggagggctggcagggcctggactgcaccctgccctgccccagcggcacctggggcctgaactgcaacgagagctgcacctgcgccaacggcgccgcctgcagccccatcgacggcagctgcagctgcacccccggctggctgggcgacacctgcgagctgccctgccccgacggcaccttcggcctgaactgcagcgagcactgcgactgcagccacgccgacggctgcgaccccgtgaccggccactgctgctgcctggccggctggaccggcatcagatgcgacagcacctgcccccccggcagatggggccccaactgcagcgtgagctgcagctgcgagaacggcggcagctgcagccccgaggacggcagctgcgagtgcgcccccggcttcagaggccccctgtgccagagaatctgcccccccggcttctacggccacggctgcgcccagccctgccccctgtgcgtgcacagcagcagaccctgccaccacatcagcggcatctgcgagtgcctgcccggcttcagcggcgccctgtgcaaccaggtgtgcgccggcggctacttcggccaggactgcgcccagctgtgcagctgcgccaacaacggcacctgcagccccatcgacggcagctgccagtgcttccccggctggatcggcaaggactgcagccaggcctgcccccccggcttctggggccccgcctgcttccacgcctgcagctgccacaacggcgccagctgcagcgccgaggacggcgcctgccactgcacccccggctggaccggcctgttctgcacccagagatgccccgccgccttcttcggcaaggactgcggcagagtgtgccagtgccagaacggcgccagctgcgaccacatcagcggcaagtgcacctgcagaaccggcttcaccggccagcactgcgagcagagatgcgcccccggcaccttcggctacggctgccagcagctgtgcgagtgcatgaacaacagcacctgcgaccacgtgaccggcacctgctactgcagccccggcttcaagggcatcagatgcgaccaggccgccctgatgatggaggagctgaacccctacaccaagatcagccccgccctgggcgccgagagacacagcgtgggcgccgtgaccggcatcatgctgctgctgttcctgatcgtggtgctgctgggcctgttcgcctggcacagaagaagacagaaggagaagggcagagacctggcccccagagtgagctacacccccgccatgagaatgaccagcaccgactacagcctgagcggcgcctgcggcatggacagaagacagaacacctacatcatggacaagggcttcaaggactacatgaaggagagcgtgtgcagcagcagcacctgcagcctgaacagcagcgagaacccctacgccaccatcaaggacccccccatcctgacctgcaagctgcccgagagcagctacgtggagatgaagagccccgtgcacatgggcagcccctacaccgacgtgcccagcctgagcaccagcaacaagaacatctacgaggtggagcccaccgtgagcgtggtgcaggagggctgcggccacaacagcagctacatccagaacgcctacgacctgcccagaaacagccacatccccggccactacgacctgctgcccgtgagacagagccccgccaacggccccagccaggacaagcagagctag

SEQ ID NO: 224122 - protein, 1140 aa, Artificial Sequence
  derived and/or modified sequence
MVISLNSCLSFICLLLCHWIGTASPLNLEDPNVCSHWESYSVTVQESYPHPFDQIYYTSCTDILNWFKCTRHRVSYRTAYRHGEKTMYRRKSQCCPGFYESGEMCVPHCADKCVHGRCIAPNTCQCEPGWGGTNCSSACDGDHWGPHCTSRCQCKNGALCNPITGACHCAAGFRGWRCEDRCEQGTYGNDCHQRCQCQNGATCDHVTGECRCPPGYTGAFCEDLCPPGKHGPQCEQRCPCQNGGVCHHVTGECSCPSGWMGTVCGQPCPEGRFGKNCSQECQCHNGGTCDAATGQCHCSPGYTGERCQDECPVGTYGVLCAETCQCVNGGKCYHVSGACLCEAGFAGERCEARLCPEGLYGIKCDKRCPCHLENTHSCHPMSGECACKPGWSGLYCNETCSPGFYGEACQQICSCQNGADCDSVTGKCTCAPGFKGIDCSTPCPLGTYGINCSSRCGCKNDAVCSPVDGSCTCKAGWHGVDCSIRCPSGTWGFGCNLTCQCLNGGACNTLDGTCTCAPGWRGEKCELPCQDGTYGLNCAERCDCSHADGCHPTTGHCRCLPGWSGVHCDSVCAEGRWGPNCSLPCYCKNGASCSPDDGICECAPGFRGTTCQRICSPGFYGHRCSQTCPQCVHSSGPCHHITGLCDCLPGFTGALCNEVCPSGRFGKNCAGICTCTNNGTCNPIDRSCQCYPGWIGSDCSQPCPPAHWGPNCIHTCNCHNGAFCSAYDGECKCTPGWTGLYCTQRCPLGFYGKDCALICQCQNGADCDHISGQCTCRTGFMGRHCEQKCPSGTYGYGCRQICDCLNNSTCDHITGTCYCSPGWKGARCDQAGVIIVGNLNSLSRTSTALPADSYQIGAIAGIIILVLVVLFLLALFIIYRHKQKGKESSMPAVTYTPAMRVVNADYTISGTLPHSNGGNANSHYFTNPSYHTLTQCATSPHVNNRDRMTVTKSKNNQLFVNLKNVNPGKRGPVGDCTGTLPADWKHGGYLNELGAFGLDRSYMGKSLKDLGKNSEYNSSNCSLSSSENPYATIKDPPVLIPKSSECGYVEMKSPARRDSPYAEINNSTSANRNVYEVEPTVSVVQGVFSNNGRLSQDPYDLPKNSHIPCHYDLLPVRDSSSSPKQEDSGGSSSNSSSSSE

SEQ ID NO: 224123 - protein, 567 aa, Artificial Sequence
  derived and/or modified sequence
MVISLNSCLSFICLLLCHWIGTASPLNLEDPNVCSHWESYSVTVQESYPHPFDQIYYTSCTDILNWFKCTRHRVSYRTAYRHGEKTMYRRKSQCCPGFYESGEMCVPHCADKCVHGRCIAPNTCQCEPGWGGTNCSSACDGDHWGPHCTSRCQCKNGALCNPITGACHCAAGFRGWRCEDRCEQGTYGNDCHQRCQCQNGATCDHVTGECRCPPGYTGAFCEDLCPPGKHGPQCEQRCPCQNGGVCHHVTGECSCPSGWMGTVCGQPCPEGRFGKNCSQECQCHNGGTCDAATGQCHCSPGYTGERCQDECPVGTYGVLCAETCQCVNGGKCYHVSGACLCEAGFAGERCEARLCPEGLYGIKCDKRCPCHLENTHSCHPMSGECACKPGWSGLYCNETCSPGFYGEACQQICSCQNGADCDSVTGKCTCAPGFKGIDCSTPCPLGTYGINCSSRCGCKNDAVCSPVDGSCTCKAGWHGVDCSIRCPSGTWGFGCNLTCQCLNGGACNTLDGTCTCAPGWRGEKCELPCQDGTYGLNCAERCDCSHADGCHPTTGHCRCLPGWSGLF

SEQ ID NO: 224124 - DNA, 3423 bp, Artificial Sequence
  derived and/or modified sequence
atggtcatcagccttaatagttgcctgagttttatctgcttattgttgtgtcactggatcggaaccgcatccccactgaacctggaggaccccaacgtgtgtagccattgggaatcttatagcgttaccgtgcaagaaagttatccacatccgttcgatcagatctactacaccagctgcacggatatcctcaactggtttaaatgtacgcgtcacagagtcagttatagaaccgcttataggcatggcgaaaagaccatgtacagacgcaaatcccagtgctgccccgggttctatgaatcaggcgaaatgtgcgtccctcattgtgccgataagtgcgtgcacgggcgctgtatcgctcccaatacctgccagtgtgaacctggatggggagggactaattgttcatcagcctgcgatggcgatcactggggtcctcactgcacatcaagatgccagtgcaaaaatggagctctgtgtaaccccatcaccggcgcctgccattgcgcagccggcttccgggggtggagatgcgaagatcgctgtgaacaggggacttacggcaatgactgtcatcagagatgtcagtgtcaaaacggcgcaacatgcgaccatgttaccggagagtgtcgttgccctcctgggtataccggtgcattttgtgaagatttatgcccccctggcaagcacggaccccagtgtgagcagcgatgcccctgtcagaacggcggagtgtgccatcacgtgacgggggaatgctcctgtccctctgggtggatgggcaccgtgtgtggacaaccctgcccagagggaagattcggaaaaaactgctctcaggaatgccaatgccataatggcggaacatgcgacgcagcaactgggcaatgtcactgctctcccgggtacactggcgaacgttgccaggacgagtgtcccgttggaacctacggagtgctttgtgcggagacttgtcaatgcgttaacggcggcaaatgttatcatgtatccggggcctgtctttgcgaggctgggtttgccggcgagagatgcgaagcacggctgtgtcccgagggcctctacggaattaaatgtgataaacggtgtccatgccacctggagaatacccacagttgccaccccatgagcggcgagtgcgcttgtaagcctggctggtcaggactatattgcaacgaaacgtgcagccccggattttacggagaagcctgccagcagatatgttcttgtcagaacggggcggattgcgactctgtcaccggcaaatgtacttgtgccccaggttttaagggtatcgactgcagcacaccttgtccacttggcacatacggcataaactgctcttcgcgctgtgggtgcaagaacgacgccgtctgttccccagttgatggttcttgcacttgtaaggctggatggcatggggtggattgtagcatacggtgcccaagtggcacatggggcttcgggtgtaatcttacatgtcaatgcctcaacggcggcgcctgtaatacgctagacgggacctgtacatgcgcacccggatggaggggggagaagtgtgagctgccatgtcaggatggtacttatggcctgaactgcgcagaacggtgcgactgttctcatgccgatgggtgccaccccactaccgggcattgtcggtgtttgcccggttggtctggggtgcactgcgactctgtgtgcgcagagggacgctggggtccaaattgttccctgccctgctattgcaaaaatggggcatcgtgctcacccgacgacggcatctgcgagtgtgcgccggggttcaggggtactacctgccagaggatatgctctcccgggttctacggtcacagatgcagccagacctgtcctcagtgtgtgcactcatcaggcccgtgccaccacatcacgggactctgtgattgcctcccaggattcacgggcgccctctgtaacgaagtttgcccaagcggacggtttggcaaaaactgcgccggaatctgcacttgtaccaacaacggaacctgcaatccaatcgaccggtcatgtcagtgttatcccggctggattggcagtgactgtagtcagccctgtccgcctgctcattggggaccaaattgcattcatacttgtaactgtcacaatggcgctttttgttctgcatatgatggagagtgtaaatgcacacccgggtggacaggcctgtactgcactcagagatgcccgctggggttctacgggaaggattgcgctctcatttgtcagtgtcagaatggcgccgattgcgaccatattagcggccaatgtacttgtagaaccgggtttatggggcgccattgtgagcagaaatgcccgagtggcacatacggatacggctgccgacagatctgcgattgcctcaataattcaacatgtgatcacatcaccgggacctgttattgcagtcctggctggaaaggggccaggtgtgaccaagccggggttatcatcgtgggcaatttgaatagcctcagtaggaccagcaccgccctccccgcggattcctatcagattggtgcaattgccggtatcattatcttggttctcgtggtgctctttctattggcattattcatcatctaccgtcataagcagaaggggaaagaatcttcgatgccagctgttacctacacccctgcaatgagagtcgttaatgccgactacactataagcgggactctcccacacagcaatggtggtaacgcaaacagccactacttcaccaatcctagctaccacacactgacgcagtgcgcaacctctccacacgtgaataatcgcgaccgaatgacagttactaaatcaaagaataaccagcttttcgtcaacctaaaaaacgtcaacccagggaagagaggtcccgtcggcgactgcaccgggacacttcccgccgattggaaacacggcgggtatttaaacgagttgggggcatttggactggatcgatcttatatgggcaagtcacttaaagacctgggcaaaaactctgaatacaattcttctaattgtagcctgtccagctctgaaaatccatatgccacaattaaagatccccctgtcctcattcccaagtctagtgaatgcgggtacgttgaaatgaaaagccccgctagaagagactcgccatacgctgagatcaataacagcacctccgccaatcgtaatgtttacgaagtggagccaaccgtcagcgtggtgcagggcgttttcagcaataatggccgtctgtctcaggatccctacgatctacctaaaaactctcacatcccctgccactacgacctgttacctgtaagagattcctcctcatcccccaaacaggaggatagcggcggatcatcttctaacagcagttcctcctcagaatag

SEQ ID NO: 224125 - DNA, 3423 bp, Artificial Sequence
  derived and/or modified sequence
atggtgatcagtctcaactcctgcttgtccttcatctgcctgctcctctgtcattggatcggaacggcaagccccttgaacttggaagacccaaacgtttgtagtcactgggaatcgtatagcgttacagttcaggaatcatacccacatccattcgaccaaatctattacacctcttgcactgacattttgaactggtttaagtgcacacggcatagagttagttataggaccgcatatagacacggcgagaaaaccatgtatagacggaagtctcagtgctgcccaggcttttatgaatccggcgagatgtgtgtcccccactgcgccgacaagtgcgttcatgggcgatgtattgctccgaacacctgtcagtgcgagcctgggtgggggggcaccaattgctcctcagcctgcgacggcgaccattgggggccccactgtacctctaggtgccagtgcaaaaatggtgccctctgtaacccgatcaccggggcttgtcattgcgcagcgggttttcgagggtggaggtgcgaggacagatgcgaacagggaacgtacggtaacgactgccatcagagatgtcaatgtcagaacggcgcgacatgtgatcacgtgactggagaatgccgatgcccccctggatacacaggagcattctgtgaagatctctgtccaccaggaaagcatggacctcaatgtgagcagagatgcccgtgtcagaatggcggggtatgtcatcatgtgaccggtgaatgttcctgccctagtggctggatgggcactgtttgcgggcagccttgtccagagggacgcttcggcaagaactgcagtcaggagtgccagtgccataacgggggcacatgtgacgcagccacagggcagtgtcattgcagccccggttataccggagagcgatgccaggacgagtgccctgtcgggacatatggggtgctgtgtgcagaaacctgccagtgcgtgaacggaggaaagtgttaccatgtgagcggagcctgcctgtgtgaggccgggttcgctggcgagagatgtgaggcaaggttatgcccggaaggactatatgggatcaagtgtgataaacgctgtccctgccacctggagaatacgcacagctgtcaccctatgtctggcgaatgcgcatgtaagccagggtggtccggcctctactgtaatgagacatgttcccccgggttttacggtgaagcctgccaacagatttgttcctgccaaaacggagccgactgcgattccgtcacgggcaaatgcacctgtgccccagggttcaaggggatcgattgcagcactccttgcccactgggtacgtacggaataaactgctcctctaggtgcggttgtaagaatgatgccgtttgcagtcccgttgacggcagttgtacttgcaaagccgggtggcacggcgtggactgctctataaggtgtccatctggaacgtggggattcggatgtaaccttacatgccagtgcttgaacgggggagcttgcaataccctggacggcacgtgtacatgcgctcctgggtggcgtggagaaaaatgtgaactgccctgtcaggacggcacctatggtctgaattgtgctgaaaggtgcgattgcagccacgccgacggctgccaccctaccacaggacattgtcgttgcctgcctggatggtctggtgtgcactgtgatagcgtttgcgctgagggccgttgggggcccaactgctcattgccgtgctactgcaagaacggcgcgagttgttcccccgacgatggcatttgcgagtgtgccccagggtttcgggggacgacttgccagcgtatctgctctcctggattctatggacatcgatgttctcagacttgcccccagtgcgtgcactcttctggcccttgtcatcacatcaccggtctctgtgattgtctgccaggtttcactggcgcactttgcaacgaagtgtgtccttcgggtcgcttcggcaaaaactgtgcaggcatttgcacgtgcactaacaatggaacatgtaatcctattgatagaagttgccagtgttacccaggctggatcggatctgactgctcccagccctgccctcctgcgcactggggccctaattgcatccacacctgtaactgccacaatggcgccttctgcagcgcttatgatggcgagtgtaagtgcactccaggctggaccgggctttactgcacccagagatgccccctgggcttctacggcaaggactgtgccctcatctgccagtgtcagaatggagctgactgcgatcacatctctgggcagtgcacttgtcggaccggatttatgggtagacactgcgagcagaaatgccctagcgggacatacgggtacggttgtcgccaaatatgcgactgcctgaacaattctacctgtgaccacattaccggtacttgctactgttccccaggttggaaaggggccaggtgcgaccaggctggcgtgatcatcgtgggcaatcttaattctctgagcaggaccagcactgctctgccagctgattcatatcagatcggggctatcgctggaattattattctggtgcttgtggtgctctttctgctggctctttttatcatctacaggcacaagcagaagggtaaggagagctctatgccggccgtgacttacacacctgctatgagggtagtgaacgcggactatactatcagcggcacccttccacatagcaacggaggaaacgcaaattcacactattttaccaacccatcctaccacacacttacacagtgcgcaacaagccctcatgtgaacaaccgggacagaatgacagtcacaaagtctaagaataatcagttattcgtcaatctaaagaatgtcaacccagggaagaggggacccgtcggtgactgtacaggaactcttcctgccgactggaagcacggaggatatctgaacgaactgggcgcctttggccttgataggtcctatatgggcaagagtttgaaggacctgggaaagaatagcgaatataacagctcaaattgttctttgagttcatcggaaaacccatatgcaaccatcaaagatcctcccgtgctgatccccaaatcttccgaatgcggctacgtggaaatgaagtctcctgcgcgaagagactctccttatgctgagatcaacaattcaacctccgcaaaccgcaacgtgtacgaagtggagcccacggtgagtgtcgtccaaggcgtattttcgaacaatggtcggctgtcacaggacccatatgacctgccaaaaaattcccatattccctgtcattacgatctcctccccgtgcgcgatagctcgagctcgcctaaacaggaagactctggggggagctcttctaacagttcaagcagcagtgagtag

SEQ ID NO: 224126 - DNA, 3423 bp, Artificial Sequence
  derived and/or modified sequence
atggtgatcagcctgaacagctgcctgtccttcatctgcctgctgctgtgccactggattggaacagccagccccctgaacctggaggaccccaacgtgtgcagccactgggagagctacagcgtgacagtgcaggagagctacccccacccctttgaccagatctactacaccagctgcacagacatcctgaactggttcaagtgcaccaggcaccgggtgtcctacagaacagcctaccgccacggggagaagaccatgtacagaaggaagagccagtgctgccccggcttctatgaaagtggagagatgtgtgtgccccactgtgccgacaagtgtgtgcacggccgctgcatcgcccccaacacctgccagtgtgagcccggctggggcggcaccaactgcagcagcgcctgtgatggagaccactggggcccccactgcaccagccgctgccagtgcaagaatggagccctgtgcaaccccatcaccggggcctgccactgtgccgccggcttccggggctggaggtgtgaagatcgctgtgagcagggcacctatggaaatgactgccaccagcgctgccagtgccagaatggagccacctgtgaccacgtgactggagaatgtcgctgccccccaggctacacaggagccttctgtgaggacctgtgccccccaggcaagcacggcccccagtgtgagcagcgctgcccctgccagaatggaggagtgtgccaccacgtgactggagagtgcagctgccccagcggctggatgggcaccgtgtgtggccagccctgcccagagggccgctttgggaagaactgcagccaggagtgccagtgccacaatggaggcacctgtgatgctgccaccggccagtgccactgcagccctggctacacaggagagcgctgccaggatgagtgccctgtgggcacctacggcgtgctgtgtgccgagacctgccagtgtgtgaatggaggcaagtgctaccacgtgtctggggcctgcctgtgtgaggccggctttgctggggagcgctgtgaggcccggctgtgcccagagggcctgtatggcatcaagtgtgacaagcgctgcccctgccacctggagaacacccacagctgccaccccatgtctggagaatgtgcctgcaagccaggctggagcggcctgtactgcaatgagacctgcagccctggcttctatggagaggcctgccagcagatctgcagctgccagaatggagctgactgtgacagcgtgacaggcaagtgcacctgtgcccctggcttcaagggcatcgactgcagcaccccctgccccctgggcacctacggcatcaactgcagcagccgctgtggctgcaagaatgatgctgtgtgcagccctgtggatggcagctgcacctgcaaggccggctggcacggcgtggactgcagcatccgctgccccagcggcacctggggcttcggctgcaacctgacctgccagtgcctgaatggaggagcctgcaacaccctggatggcacctgcacctgtgcccctggctggagaggagagaagtgtgagctgccctgccaggacggcacctacggcctgaactgtgccgagcgctgtgactgcagccatgctgatggctgccaccccaccaccggccactgccgctgcctgcccggctggagcggcgtgcactgtgacagcgtgtgtgccgagggccgctggggccccaactgcagcctgccctgctactgcaagaatggagccagctgcagcccagatgatggcatctgtgaatgtgcccctggcttccggggcaccacctgccagaggatctgcagccctggcttctacggccaccgctgcagccagacctgcccccagtgtgtgcacagcagcggcccctgccaccacatcaccggcctgtgtgactgcctgcccggcttcaccggggccctgtgcaatgaggtgtgccccagcggccgctttgggaagaactgtgccggcatctgcacctgcaccaacaacggcacctgcaaccccatcgacaggagctgccagtgctacccaggctggattggaagtgactgcagccagccctgccccccagcccactggggccccaactgcatccacacctgcaactgccacaacggggccttctgcagcgcctatgatggagagtgcaagtgcaccccaggctggacaggcctgtactgcacccagcgctgccccctgggcttctacggcaaggactgtgccctgatctgccagtgccagaatggagctgactgtgaccacatcagcggccagtgcacctgcaggacaggcttcatgggccgccactgtgagcagaagtgccccagcggcacctacggctacggctgccggcagatctgtgactgcctgaacaacagcacctgtgaccacatcaccggcacctgctactgcagccctggctggaagggggcccgctgtgaccaggccggggtcatcatcgtgggcaacctgaacagcctgagcaggaccagcacagccctgcctgctgacagctaccagatcggggccatcgccggcatcatcatcctggtgctggtggtgctcttcctgctggccctcttcatcatctaccgccacaagcagaagggcaaggagagctccatgcctgctgtgacctacaccccagccatgagggtggtgaatgctgactacaccatcagcggcaccctgccccacagcaatggaggaaatgccaacagccactacttcaccaaccccagctaccacaccctgacccagtgtgccaccagcccccacgtgaacaacagagacaggatgacagtgaccaagagcaagaacaaccagctgtttgtgaacctgaagaatgtgaaccctgggaagaggggccctgtgggggactgcaccggcaccctgcctgctgactggaagcacggcggctacctgaatgagctgggcgccttcggcctggacaggagctacatgggcaagagcctgaaggacctgggcaagaacagcgagtacaacagcagcaactgcagcctgagcagcagcgagaacccctatgccaccatcaaggacccccctgtgctgatccccaagagcagtgaatgtggctacgtggagatgaagagccctgcccggcgggacagcccctatgcagagatcaacaacagcaccagcgccaacagaaatgtgtatgaggtggagcccaccgtgtctgtggtgcagggcgtcttcagcaacaacggccgcctgagccaggacccctatgacctgcccaagaacagccacatcccctgccactatgacctgctgcctgtgcgggacagcagcagcagccccaagcaggaggacagcggcggcagcagcagcaacagcagcagcagcagcgagtag

SEQ ID NO: 224127 - DNA, 7594 bp, Artificial Sequence
  derived and/or modified sequence
tgggaacgcgttgagacgttcctctttcccgcttctccacctttacgcctgaaagaagactcccaaagattgctttcttctgggacgctgcttggacgctaaccgcgttgattggaacagattttgtgtcttggctggctttgggtgaagaccggggagaaaaggttgcgctgcgattctcaagatctctggacctggattatcattgcaaatccattaaagaaggagaagcaagcggatttcagagaggttgttcttcagaaaaaaatggttatttctttgaactcatgcctgagctttatttgtttattgttatgccactggattgggacagcatcacctctgaatcttgaagaccctaatgtgtgtagccactgggaaagctactcagtgactgtgcaagagtcatacccacatccctttgatcaaatttactacacgagctgcactgacattctaaactggtttaaatgcacgcggcacagagtcagctatcggacagcctatcgacatggggagaagactatgtataggcgcaagtctcagtgttgtcctggattttatgaaagcggggaaatgtgtgtcccccactgtgctgataaatgtgtccatggtcgctgtattgctccaaacacctgtcagtgtgagcctggctggggagggaccaactgctccagtgcctgcgatggtgatcactggggtccccactgcaccagccggtgccagtgcaaaaatggggctctgtgcaaccccatcaccggggcttgccactgtgctgcgggcttccggggctggcgctgcgaggaccgctgtgagcagggcacctatggtaacgactgtcatcagagatgccagtgccagaatggagccacctgcgaccacgtcacgggggaatgccgctgcccaccaggatacaccggagccttctgtgaggatctttgtcctcctggtaaacatggtccacagtgtgagcagagatgcccttgtcaaaatggaggagtgtgtcatcacgtcactggagaatgctcttgcccttctggctggatgggcacagtgtgtggtcagccttgccccgagggtcgctttggaaagaactgttcccaagaatgccagtgccataatggagggacgtgtgatgctgccacaggccaatgtcattgcagtccaggatacacaggggaacggtgccaggatgagtgtcctgttgggacctatggcgttctctgtgctgagacctgccagtgtgtcaacggagggaagtgttaccacgtgagcggcgcatgcctctgtgaagcaggctttgctggcgagcgctgcgaagcacgcctgtgtcctgaggggctctacggcatcaaatgtgacaaacggtgtccctgccacctggaaaacactcatagctgtcaccccatgtctggagagtgtgcctgcaagccgggctggtcaggactctactgtaatgagacatgttctcctggattctacggggaagcttgccagcagatctgcagctgccaaaatggggcagactgtgacagtgtgactggaaagtgcacctgtgccccaggattcaaaggaattgactgctctaccccatgccctctgggaacctatgggataaactgttcctctcgctgtggctgtaaaaatgatgcagtctgctctcctgtggacgggtcttgtacttgcaaggcaggctggcacggggtggactgctccatcagatgtcccagtggcacatggggctttggctgtaacttaacatgccagtgcctcaacgggggagcctgcaacaccctggacgggacctgcacgtgtgcacctggatggcgcggggagaaatgcgaacttccctgccaggatggcacgtacgggctgaactgtgctgagcgctgcgactgcagccacgcagatggctgccaccctaccacgggccattgccgctgcctccccggatggtcaggtgtccactgtgacagcgtgtgtgctgagggacgctggggccccaactgctccctgccctgctactgtaaaaatggggcttcatgctcccctgatgatggcatctgcgagtgtgcaccaggcttccgaggcaccacttgtcagaggatctgctcccctggtttttatgggcatcgctgcagccagacatgcccacagtgcgttcacagcagcgggccctgccaccacatcaccggcctgtgtgactgcttgcctggcttcacaggcgccctctgcaatgaagtgtgtcccagtggcagatttgggaaaaactgtgcaggaatttgtacctgcaccaacaacggaacctgtaaccccattgacagatcttgtcagtgttaccccggttggattggcagtgactgctctcaaccatgtccacctgcccactggggcccaaactgcatccacacgtgcaactgccataatggagctttctgcagcgcctacgatggggaatgtaaatgcactcctggctggacagggctctactgcactcagagatgtcctctagggttttatggaaaagattgtgcactgatatgccaatgtcaaaacggagctgactgcgaccacatttctgggcagtgtacttgccgcactggattcatgggacggcactgtgagcagaagtgcccttcaggaacatatggctatggctgtcgccagatatgtgattgtctgaacaactccacctgcgaccacatcactgggacctgttactgcagccccggatggaagggagcgagatgtgatcaagctggtgttatcatagttggaaatctgaacagcttaagccgaaccagtactgctctccctgctgattcctaccagatcggggccattgcaggcatcatcattcttgtcctagttgttctcttcctactggcattgttcattatttatagacacaagcagaagggaaaggaatcaagcatgccagcagttacctacacccctgctatgagggtcgtcaatgcagattataccatttcaggaacccttcctcacagcaatggtggaaacgctaatagccactacttcaccaatcccagttaccacacgctcacccagtgtgccacatcccctcacgtcaacaacagggacaggatgactgtcacgaagtcaaaaaacaatcaactgtttgtgaatcttaaaaatgtgaaccctgggaagagaggccctgtgggggactgcactgggacattgccggctgactggaaacatggcggctacctcaacgagctcggtgcttttggacttgacagaagctatatgggaaaatccttaaaagacctgggaaagaattctgaatataattcaagtaactgctccctaagcagttctgagaacccatatgccactattaaagacccacctgtacttatcccgaaaagctcagagtgtggttatgtggagatgaaatcgccggcacgaagagattccccatatgcagagatcaataactcaacttcagccaacaggaatgtctatgaagttgaacctacagtgagtgttgtccaaggagtattcagcaataatgggcgtctctcccaggatccatatgacctcccaaagaacagtcacatcccttgtcattatgacctgctgccagtccgagacagttcatcctcccctaagcaagaggacagtggtggtagcagcagcaacagcagcagcagcagtgaatgacaccaaaggaccgcttggtagccactggaaccctttccagaactgctgtttggttcttctccatcctcaattttgccactttcatgtgaatgttagtcaattcggtgggcaatttttggacatgaaccagaaagctgaaagctgaggctgacacggactgtaggtgctttttgttcaggtggattcgaaggagttagagatgtgatttcccattgctgttagttttagaactatacccgtgaagcatgacttattgtaagatgttggctgaaagcatgaacttgcagaactccctcggagacgcaggttgcagtggacattgggattgttgcttgaaaaattaaaatttgaatattttctctctcatttgcatcatacagctctacctaggattgtacagtttaccataaaatttacttcatgaaagtgggaatcactgaacatgtagaagacaaggaacatattgttaactcctgattcttaactttattcaactggactcagaattgtagggataatatgaatgcaggaggaaacattctgtcaggcggtatgactggacagactttgaatatactctaaaagtggacagaaaatttacgaaaatcttagattttgtttagaatgagaaaatatacaattagaattattttagaaatagtaggaagtattgcagaagtcaatacacaaatgtgccaggcagaggtggttttctctgtttgactctcaaccaacttcagatctatgacattattctgatcactggctccatcatacatattcaccacttgagattcataacatatcaatagttatttcataaatatagaaatgaaataattttatttttgacagactggatggaatgagtgtgtaatgattgataaaggttgtaaattttaaatgcaagatgacgcttacgttctgtaaaccattagtaatacatgctgtaatatagaattagtggaacattttgattaatctttccctagaagtgactgaaatatttttgtgcatatttgagaaagggaactttccttttattaattgtcaatttagagaaactatgcttaagctggtcttttgcattgctaatgtgacatgtacccaacttttcattaatttgtatttccatttttaaattgcatattctatgttttgtagtgtttggattgttaatgaaaaaatattatatgttcgttattccttgtattattgccacttatcttttgcttgataaaaatgcgttgttcttttttcttttggagggacaagatgaaaatatataatttgaattgattaaaattggtcgttactaaaatagtatagtaaccacaagtgattggcttataaatgaagtagaaatgctttttaatattccaaaatagagttccttttgatctgttggtgctgagccttggttaaaccagggagaaggggagcagaaaggaaacgttgttactgatgagtaccacagactcatcttaaaaaaaactctcattatggtgatcatagaattgaccatccaaactgggacactcttgagagtaaatggagggcattattaataattatcttgtaatgaacttaaatctggactgttccaggcaaaccagacttatcttgcaatatgagaatgctgacacaatgcaggaaagccagtttcccttttgttgatctacttgaccaagcaaaggggctgaaaaactgaataaggaaacaactttataagagaaacagtggtcttcaatcttttaaagacatgaaatcctatatggcattctgtctcagtgagtcagttaacaaatacgtatgtgcaacccttctgctagtagtgcacataagtgattatccctgccaggtatcgagttggaatatccagttatttcatgtcacacatcggcacgtatgatggtggtttggtcagatggataatacagcagacacacttagaacactcactgcactggtggctgttcattttgaggaactccaaagtcaattcaaggaaataaggaatgacctggaacaggccttagaaacaattgatttattccaatagttaaccactggctggctcccaactctaggtgataggcatctaattgagacatgtgtgagtcaatagccatcggggtcctttttggtgagaagaaataagacattttctcccttttaaagatcatctcttcagagctgcatggtaaatttgaatttccccattgttctctagagctaggtcaaaaaaacaactgtttcttttcttattccactattaataaattgaaagcttgctgtacaaaggcaacagcaacttaaaaaagaaaatctggacaatagatgtggactccaaggggccactgccatcccttcctgtgtgctctttttgacaagtaaatcactccagttagctgatgtcctgaaatgacatttgtacctgaggcaattcttattagagcttactcaggacttttcaaacatcaggacacacatagcaatttggatgttgtaaaactacgtgttacatttggagaggtcttgttgagaaggcaaaattttctaaatattttgatatcaatttgggtaaagaaaggaatacttttgttagaatgagaattaaagagaaaacaaaagaatcttggcaaaattttccctctgaaattacaaactttaggaacttttccagatgtatcgaatttaatttgacattgatgtcactcttcataccaagtgaatctattctcatgaactttgaacccatgttaattttggaccctataactaatttcctttctgtatcccatggtggtcaaagcagtaaaggagtttagagatacttagcaaatgccattcatatagtattgttagccaaactattattccttccttagaagttgatgtatcagaaaatttataagttatttgtatttatatataagtacatcagaacttgcccacatgataactcatgtttgctttaataaggaaaatatgttatttgaggttaattatatgatagtgaggaacattttacaattatttacagtgtttgacattaattgctgtcctatgatacagtagtaatgttaacagagagtttaatatgtttagcattatctttatggaatttatattcaccaatttcaggaaaaccaaccatagaactttataataggacagttataacctgactgaaccaaatccatcagcataatgactgtgtgttctgagaaatgcaaacaactttatgaaagtgtggtcatcttgacccccaaagagccacagtagctgtcaattattgagatttttaaatggtaaatattgcaaaagttaaacaagggtaccacaatatcatttataattgatgtcaatattagtagtccactttatgcttaaaataaaatcataaaaaatcaagttttaaggttatattttttaaaataatgaattttctatctctaggcaacatgtctttattattcaagctgaatgtttaagagagattttggtcttaaaggcttcacatcatgaaagtgtacatgcatatgcaagtgtgaattacgtggtatggatgtttgcttgtttattaactaaagatgtacagcaaactgcccgtttagagtcctgttaatattgatgtcctaacactgggtctgcttatgctagttcagtatttggtctaggcttcattttgatatgactgaattgcaatctatatttttaaaaagaaaaatcaaaatacattagggtttacttggttgtggcaaacaaacaaaaaatgctttcagtgttgaaatatctctattttccaaagatgataaactttcatcgttcttagcctacattgtcatttatatcaccaaatgagtttatagattaatgcaataaactttctaataaaaaa

SEQ ID NO: 224128 - DNA, 7571 bp, Artificial Sequence
  derived and/or modified sequence
actttcccggtgcgcaaaactgggcgactgggaacgcgttgagacgttcctctttcccgcttctccacctttacgcctgaaagaagactcccaaagattgctttcttctgggacgctgcttggacgctaaccgcgttgattggaacagattttgtgtcttggctggctttgggtgaagaccggggagaaaaggttgcgctgcgattctcaagatctctggacctgggttgttcttcagaaaaaaatggttatttctttgaactcatgcctgagctttatttgtttattgttatgccactggattgggacagcatcacctctgaatcttgaagaccctaatgtgtgtagccactgggaaagctactcagtgactgtgcaagagtcatacccacatccctttgatcaaatttactacacgagctgcactgacattctaaactggtttaaatgcacgcggcacagagtcagctatcggacagcctatcgacatggggagaagactatgtataggcgcaagtctcagtgttgtcctggattttatgaaagcggggaaatgtgtgtcccccactgtgctgataaatgtgtccatggtcgctgtattgctccaaacacctgtcagtgtgagcctggctggggagggaccaactgctccagtgcctgcgatggtgatcactggggtccccactgcaccagccggtgccagtgcaaaaatggggctctgtgcaaccccatcaccggggcttgccactgtgctgcgggcttccggggctggcgctgcgaggaccgctgtgagcagggcacctatggtaacgactgtcatcagagatgccagtgccagaatggagccacctgcgaccacgtcacgggggaatgccgctgcccaccaggatacaccggagccttctgtgaggatctttgtcctcctggtaaacatggtccacagtgtgagcagagatgcccttgtcaaaatggaggagtgtgtcatcacgtcactggagaatgctcttgcccttctggctggatgggcacagtgtgtggtcagccttgccccgagggtcgctttggaaagaactgttcccaagaatgccagtgccataatggagggacgtgtgatgctgccacaggccaatgtcattgcagtccaggatacacaggggaacggtgccaggatgagtgtcctgttgggacctatggcgttctctgtgctgagacctgccagtgtgtcaacggagggaagtgttaccacgtgagcggcgcatgcctctgtgaagcaggctttgctggcgagcgctgcgaagcacgcctgtgtcctgaggggctctacggcatcaaatgtgacaaacggtgtccctgccacctggaaaacactcatagctgtcaccccatgtctggagagtgtgcctgcaagccgggctggtcaggactctactgtaatgagacatgttctcctggattctacggggaagcttgccagcagatctgcagctgccaaaatggggcagactgtgacagtgtgactggaaagtgcacctgtgccccaggattcaaaggaattgactgctctaccccatgccctctgggaacctatgggataaactgttcctctcgctgtggctgtaaaaatgatgcagtctgctctcctgtggacgggtcttgtacttgcaaggcaggctggcacggggtggactgctccatcagatgtcccagtggcacatggggctttggctgtaacttaacatgccagtgcctcaacgggggagcctgcaacaccctggacgggacctgcacgtgtgcacctggatggcgcggggagaaatgcgaacttccctgccaggatggcacgtacgggctgaactgtgctgagcgctgcgactgcagccacgcagatggctgccaccctaccacgggccattgccgctgcctccccggatggtcaggtgtccactgtgacagcgtgtgtgctgagggacgctggggccccaactgctccctgccctgctactgtaaaaatggggcttcatgctcccctgatgatggcatctgcgagtgtgcaccaggcttccgaggcaccacttgtcagaggatctgctcccctggtttttatgggcatcgctgcagccagacatgcccacagtgcgttcacagcagcgggccctgccaccacatcaccggcctgtgtgactgcttgcctggcttcacaggcgccctctgcaatgaagtgtgtcccagtggcagatttgggaaaaactgtgcaggaatttgtacctgcaccaacaacggaacctgtaaccccattgacagatcttgtcagtgttaccccggttggattggcagtgactgctctcaaccatgtccacctgcccactggggcccaaactgcatccacacgtgcaactgccataatggagctttctgcagcgcctacgatggggaatgtaaatgcactcctggctggacagggctctactgcactcagagatgtcctctagggttttatggaaaagattgtgcactgatatgccaatgtcaaaacggagctgactgcgaccacatttctgggcagtgtacttgccgcactggattcatgggacggcactgtgagcagaagtgcccttcaggaacatatggctatggctgtcgccagatatgtgattgtctgaacaactccacctgcgaccacatcactgggacctgttactgcagccccggatggaagggagcgagatgtgatcaagctggtgttatcatagttggaaatctgaacagcttaagccgaaccagtactgctctccctgctgattcctaccagatcggggccattgcaggcatcatcattcttgtcctagttgttctcttcctactggcattgttcattatttatagacacaagcagaagggaaaggaatcaagcatgccagcagttacctacacccctgctatgagggtcgtcaatgcagattataccatttcaggaacccttcctcacagcaatggtggaaacgctaatagccactacttcaccaatcccagttaccacacgctcacccagtgtgccacatcccctcacgtcaacaacagggacaggatgactgtcacgaagtcaaaaaacaatcaactgtttgtgaatcttaaaaatgtgaaccctgggaagagaggccctgtgggggactgcactgggacattgccggctgactggaaacatggcggctacctcaacgagctcggtgcttttggacttgacagaagctatatgggaaaatccttaaaagacctgggaaagaattctgaatataattcaagtaactgctccctaagcagttctgagaacccatatgccactattaaagacccacctgtacttatcccgaaaagctcagagtgtggttatgtggagatgaaatcgccggcacgaagagattccccatatgcagagatcaataactcaacttcagccaacaggaatgtctatgaagttgaacctacagtgagtgttgtccaaggagtattcagcaataatgggcgtctctcccaggatccatatgacctcccaaagaacagtcacatcccttgtcattatgacctgctgccagtccgagacagttcatcctcccctaagcaagaggacagtggtggtagcagcagcaacagcagcagcagcagtgaatgacaccaaaggaccgcttggtagccactggaaccctttccagaactgctgtttggttcttctccatcctcaattttgccactttcatgtgaatgttagtcaattcggtgggcaatttttggacatgaaccagaaagctgaaagctgaggctgacacggactgtaggtgctttttgttcaggtggattcgaaggagttagagatgtgatttcccattgctgttagttttagaactatacccgtgaagcatgacttattgtaagatgttggctgaaagcatgaacttgcagaactccctcggagacgcaggttgcagtggacattgggattgttgcttgaaaaattaaaatttgaatattttctctctcatttgcatcatacagctctacctaggattgtacagtttaccataaaatttacttcatgaaagtgggaatcactgaacatgtagaagacaaggaacatattgttaactcctgattcttaactttattcaactggactcagaattgtagggataatatgaatgcaggaggaaacattctgtcaggcggtatgactggacagactttgaatatactctaaaagtggacagaaaatttacgaaaatcttagattttgtttagaatgagaaaatatacaattagaattattttagaaatagtaggaagtattgcagaagtcaatacacaaatgtgccaggcagaggtggttttctctgtttgactctcaaccaacttcagatctatgacattattctgatcactggctccatcatacatattcaccacttgagattcataacatatcaatagttatttcataaatatagaaatgaaataattttatttttgacagactggatggaatgagtgtgtaatgattgataaaggttgtaaattttaaatgcaagatgacgcttacgttctgtaaaccattagtaatacatgctgtaatatagaattagtggaacattttgattaatctttccctagaagtgactgaaatatttttgtgcatatttgagaaagggaactttccttttattaattgtcaatttagagaaactatgcttaagctggtcttttgcattgctaatgtgacatgtacccaacttttcattaatttgtatttccatttttaaattgcatattctatgttttgtagtgtttggattgttaatgaaaaaatattatatgttcgttattccttgtattattgccacttatcttttgcttgataaaaatgcgttgttcttttttcttttggagggacaagatgaaaatatataatttgaattgattaaaattggtcgttactaaaatagtatagtaaccacaagtgattggcttataaatgaagtagaaatgctttttaatattccaaaatagagttccttttgatctgttggtgctgagccttggttaaaccagggagaaggggagcagaaaggaaacgttgttactgatgagtaccacagactcatcttaaaaaaaactctcattatggtgatcatagaattgaccatccaaactgggacactcttgagagtaaatggagggcattattaataattatcttgtaatgaacttaaatctggactgttccaggcaaaccagacttatcttgcaatatgagaatgctgacacaatgcaggaaagccagtttcccttttgttgatctacttgaccaagcaaaggggctgaaaaactgaataaggaaacaactttataagagaaacagtggtcttcaatcttttaaagacatgaaatcctatatggcattctgtctcagtgagtcagttaacaaatacgtatgtgcaacccttctgctagtagtgcacataagtgattatccctgccaggtatcgagttggaatatccagttatttcatgtcacacatcggcacgtatgatggtggtttggtcagatggataatacagcagacacacttagaacactcactgcactggtggctgttcattttgaggaactccaaagtcaattcaaggaaataaggaatgacctggaacaggccttagaaacaattgatttattccaatagttaaccactggctggctcccaactctaggtgataggcatctaattgagacatgtgtgagtcaatagccatcggggtcctttttggtgagaagaaataagacattttctcccttttaaagatcatctcttcagagctgcatggtaaatttgaatttccccattgttctctagagctaggtcaaaaaaacaactgtttcttttcttattccactattaataaattgaaagcttgctgtacaaaggcaacagcaacttaaaaaagaaaatctggacaatagatgtggactccaaggggccactgccatcccttcctgtgtgctctttttgacaagtaaatcactccagttagctgatgtcctgaaatgacatttgtacctgaggcaattcttattagagcttactcaggacttttcaaacatcaggacacacatagcaatttggatgttgtaaaactacgtgttacatttggagaggtcttgttgagaaggcaaaattttctaaatattttgatatcaatttgggtaaagaaaggaatacttttgttagaatgagaattaaagagaaaacaaaagaatcttggcaaaattttccctctgaaattacaaactttaggaacttttccagatgtatcgaatttaatttgacattgatgtcactcttcataccaagtgaatctattctcatgaactttgaacccatgttaattttggaccctataactaatttcctttctgtatcccatggtggtcaaagcagtaaaggagtttagagatacttagcaaatgccattcatatagtattgttagccaaactattattccttccttagaagttgatgtatcagaaaatttataagttatttgtatttatatataagtacatcagaacttgcccacatgataactcatgtttgctttaataaggaaaatatgttatttgaggttaattatatgatagtgaggaacattttacaattatttacagtgtttgacattaattgctgtcctatgatacagtagtaatgttaacagagagtttaatatgtttagcattatctttatggaatttatattcaccaatttcaggaaaaccaaccatagaactttataataggacagttataacctgactgaaccaaatccatcagcataatgactgtgtgttctgagaaatgcaaacaactttatgaaagtgtggtcatcttgacccccaaagagccacagtagctgtcaattattgagatttttaaatggtaaatattgcaaaagttaaacaagggtaccacaatatcatttataattgatgtcaatattagtagtccactttatgcttaaaataaaatcataaaaaatcaagttttaaggttatattttttaaaataatgaattttctatctctaggcaacatgtctttattattcaagctgaatgtttaagagagattttggtcttaaaggcttcacatcatgaaagtgtacatgcatatgcaagtgtgaattacgtggtatggatgtttgcttgtttattaactaaagatgtacagcaaactgcccgtttagagtcctgttaatattgatgtcctaacactgggtctgcttatgctagttcagtatttggtctaggcttcattttgatatgactgaattgcaatctatatttttaaaaagaaaaatcaaaatacattagggtttacttggttgtggcaaacaaacaaaaaatgctttcagtgttgaaatatctctattttccaaagatgataaactttcatcgttcttagcctacattgtcatttatatcaccaaatgagtttatagattaatgcaataaactttctaataaaaaa

SEQ ID NO: 224129 - DNA, 3423 bp, Artificial Sequence
  derived and/or modified sequence
atggtgatcagcctgaacagctgcctgagcttcatctgcctgctgctctgtcattggataggcacggcatcacctctcaatctagaggatccgaatgtgtgttcccactgggaaagttattctgttacagttcaggagtcgtacccgcaccccttcgaccagatttactacacaagttgtacagatatcctgaactggttcaagtgcaccagacaccgggtctcttatagaaccgcctatcgacatggagaaaaaacgatgtatagacgcaaaagtcaatgctgtcccggcttctatgagagtggagagatgtgcgtcccacattgtgctgacaaatgtgtccacgggaggtgcattgcaccaaatacatgccaatgcgagcccggatggggcgggaccaactgcagttccgcttgtgacggggatcactggggcccgcactgtacctcaagatgtcaatgtaagaacggcgcactgtgcaacccgatcactggagcctgccactgtgccgcggggtttagaggatggcgctgcgaggacagatgcgaacaggggacatacggtaatgattgtcaccagagatgccagtgccagaatggtgccacatgtgatcatgtgactggtgaatgtcggtgcccacctggatataccggtgcgttttgtgaggatctctgtcccccaggtaaacacggtcctcagtgcgaacagcggtgtccttgtcaaaatggcggggtctgtcaccacgtcacaggcgagtgttcctgcccttccggctggatggggacagtgtgcggccagccttgtcctgaaggcagatttggcaaaaactgtagccaggaatgccagtgtcacaacgggggcacctgcgacgcagctactgggcagtgccactgtagtccagggtacactggcgagcgatgccaggatgaatgtcccgtgggcacatatggtgtactgtgcgccgagacttgccagtgcgttaacgggggcaagtgttaccatgtgagtggcgcctgtctatgcgaagcagggttcgctggtgaacgatgtgaggcaagactgtgtcccgagggcctgtacgggatcaagtgcgacaagcgttgtccctgtcatctggagaacacacatagttgccaccctatgagtggagaatgcgcgtgcaagccaggttggtctggcctgtattgcaacgagacttgttcccccggattctatggcgaggcctgtcaacagatctgtagctgccagaatggcgctgattgtgacagcgtgaccggaaagtgtacttgtgcacctggtttcaaaggcattgattgttccacaccatgtcctctgggcacctatggaatcaattgttcatctcgctgtgggtgcaaaaacgatgcggtctgctcacctgtggacggctcttgtacatgtaaggctggctggcatggcgtggattgtagtatccgctgccctagcggtacctggggatttgggtgtaatttaacatgtcagtgccttaacggtggagcttgcaataccttggatggtacttgcacctgcgcccccgggtggcgaggagagaaatgcgagctgccgtgccaggacggtacatacggattgaactgtgccgagagatgtgattgttcacacgccgatggctgtcaccccacaactggtcactgtcgatgtctccccggttggtccggcgtccattgcgacagcgtctgcgctgagggcaggtggggacctaattgttcactgccttgctattgtaagaacggcgcgtcttgctcacccgatgatggcatttgcgaatgtgctcctggattccgaggcacaacgtgccagcgcatttgctctcctgggttttatggacacaggtgtagccagacatgcccccagtgtgtccactcgtcaggaccctgtcatcacatcacaggcctgtgcgattgtctgccagggttcaccggtgctctgtgcaatgaggtatgcccaagcggcagattcggcaagaattgcgccggtatctgtacctgtacgaacaatggcacctgcaaccccattgatcgctcatgtcagtgctaccccggctggatcggcagcgactgttcacagccatgtccccccgcacattggggcccaaactgcattcacacttgcaattgtcacaacggcgcattttgtagcgcttatgatggcgagtgcaaatgcaccccagggtggaccggcctctactgtacacaaaggtgtccactgggtttctatgggaaggattgcgcgctgatctgtcaatgccagaatggtgcagattgcgaccacatttccgggcagtgcacgtgtcggactggtttcatgggacggcactgcgagcaaaaatgtccttccggcacatatggatatggctgcagacagatttgtgactgcttgaacaactccacatgtgaccacatcacggggacatgctactgtagcccagggtggaagggcgcccgttgcgatcaggctggcgttatcatcgtgggcaacctgaatagcctgtctcgtacttctactgcccttcccgcggacagctaccagataggagctatcgcaggcatcatcatccttgtcctggttgtgctgtttctattggcactctttattatctatcgacataaacaaaaaggaaaagagagttcaatgccagcagttacctacacccccgcaatgagggtggttaacgctgattacaccatatccggcactctcccacactcgaacggagggaacgcgaactcacactattttaccaatccctcttaccacacactgactcagtgcgccaccagccctcatgtgaacaatagggaccggatgaccgtgacaaagtccaaaaataaccagttgtttgtcaacttgaaaaacgtgaaccctggtaaacgtgggcctgtcggggactgcactggaactcttccagctgactggaagcacgggggctacctgaatgaactgggagcgttcggcttagatcggtcgtacatgggtaaatccctgaaggatctcggaaaaaactcagagtacaactcaagcaactgtagtctgtcctcaagtgaaaacccgtacgctaccattaaggatccaccagtgctcatccctaagtcatctgaatgtggctacgtggaaatgaagtcaccagccagacgggattctccttatgcagaaattaacaatagcacgtcagccaatagaaatgtgtacgaggttgagcctacagtttcagttgtgcagggtgtcttttctaataacggacgactgagccaggatccatatgatcttccaaaaaactcccatattccttgtcattacgatctgttgcctgtgcgggacagttcctcatcgcctaagcaagaggactctggaggatcgtcctccaatagttcttcttcctcagaatag

SEQ ID NO: 224130 - DNA, 3423 bp, Artificial Sequence
  derived and/or modified sequence
atggtgatcagcctgaacagctgcctgagcttcatctgcctgctgttatgtcactggatcggcaccgcttctcctctcaatctggaggatccaaatgtatgcagccactgggaatcgtatagcgtaacagtgcaggagtcctacccgcatccgttcgaccaaatttattacacatcatgtaccgacatcctgaactggtttaaatgcacccggcaccgtgtctcctaccgaaccgcttatcggcacggtgagaaaaccatgtatagacgtaagtcccaatgttgccccggtttctatgagtctggcgagatgtgtgtaccacactgtgccgacaaatgtgtccacggaaggtgcatcgcccccaacacttgccaatgtgaacctggctggggcggcaccaactgttcatccgcgtgtgatggagatcattggggtcctcactgtacatctcgctgccagtgcaagaatggcgcactgtgcaaccccataacaggagcttgtcattgcgccgcgggattccgcggttggcggtgcgaagataggtgtgaacaagggacgtatgggaacgactgccaccaaagatgccagtgccagaatggtgcaacgtgcgaccatgtgacaggcgagtgtagatgtccccctggttacacgggcgcattttgcgaagacctgtgcccccctggcaaacacggacctcagtgcgagcaaagatgtccatgtcagaacggcggtgtatgccatcacgtgactggggagtgtagctgtccctccggatggatggggacagtgtgtgggcagccctgtcctgaagggagattcggtaagaattgtagccaggagtgccaatgccataacgggggaacatgtgatgcggcaactggacaatgtcactgttctcccgggtatactggcgagcgctgccaggacgaatgccccgtgggtacttacggcgtgctgtgtgccgagacctgccagtgcgttaatggaggtaagtgttaccacgtgagtggggcctgcctctgcgaagccgggttcgccggcgagaggtgtgaagctagactgtgccctgaggggctgtatgggataaaatgtgataagaggtgcccttgtcacttggaaaatacacactcatgccatcctatgtccggcgagtgtgcttgtaaacccggatggagcgggctgtactgcaacgagacatgttcacccggcttctatggcgaggcgtgccagcagatctgttcatgccagaacggggccgactgcgattccgtgactggcaagtgtacttgtgcccctggtttcaaaggaatagattgctcgactccctgtcctctagggacctacgggattaattgctcatcaagatgcggttgcaagaacgatgcagtttgctctcctgtcgacggatcctgcacctgtaaggcaggatggcacggggtggactgctccattcggtgcccaagtggtacgtggggttttggctgtaacctgacatgccagtgtctaaacggaggagcatgtaacactctggatggcacttgcacatgtgcccctgggtggagaggagaaaagtgcgagttgccttgccaagatggaacctatggccttaactgtgccgaaagatgtgattgtagccacgcagacggctgccatcccaccacggggcactgcagatgcctgccaggctggagtggagtgcactgcgacagcgtctgtgccgagggccgctggggcccgaattgttctttaccatgctactgtaagaacggggctagttgcagtcccgacgacggcatatgcgagtgcgctcctggcttccgcggtaccacttgccagcgcatctgtagtccggggttttatggccatcgctgcagtcagacctgtccccaatgcgtgcattcatctggaccctgtcatcacataacaggcctctgcgactgcctgcctggtttcaccggagcgctgtgcaatgaggtttgcccctcaggcagattcgggaaaaattgtgctggaatctgtacatgcaccaataacggcacttgtaatcccattgatagatcttgccagtgctatcctgggtggatcggtagtgactgcagccaaccctgtccccctgcccactggggccctaattgcatacatacttgtaattgtcacaacggggccttttgctccgcgtatgacggtgagtgtaaatgcacccctgggtggacaggcttgtactgcacccaaagatgcccactggggttttatgggaaagattgtgcgcttatctgccagtgccagaatggggccgattgcgatcatatcagtggtcaatgtacatgtagaactgggtttatgggtcggcactgtgagcaaaagtgtccttctggaacatacgggtatggctgcagacagatctgtgattgcttgaataactcaacttgcgaccacataacagggacatgctactgttctcccggctggaaaggggctaggtgcgaccaggcaggtgtaattatcgttggtaatttaaactctttgagccggacgagtaccgccctgccggcggattcctaccaaataggagcgattgctgggattatcatactggttcttgtggtgttattcctgctcgctctgtttattatctacaggcataagcaaaagggcaaggaatcttccatgccagcagtgacttacacccccgcaatgcgggtggtgaatgctgactataccatcagtggcactctgccacactccaacggaggtaatgctaatagccattacttcactaatccgtcctaccatacgctgacgcagtgtgccactagccctcacgtgaacaatagagacaggatgacagttaccaagtctaaaaacaatcagctcttcgtgaacctaaagaacgtgaacccaggaaaacggggccccgtgggggattgcacaggcaccctccctgccgactggaagcatggagggtacctcaatgaactgggggccttcggactggacagatcctacatggggaaatctcttaaggacctgggtaagaactcggagtacaattcatcaaactgtagtctctcaagtagcgaaaacccatatgccacaattaaagaccctccagtcttgattcctaagtcatccgaatgcgggtatgtggaaatgaaaagtcccgcacggcgggattctccctatgcggagatcaataattctacctctgccaatcggaatgtctatgaggtcgaaccaacagtgtccgtggtgcagggggtgttttccaataacggcaggctatcccaggacccatacgatctgcccaaaaattcccacataccctgccactacgatctgctgcccgtgagagattcaagtagctcgccaaagcaggaagacagcggaggctcttcaagcaatagctcctcatctagtgagtag

SEQ ID NO: 224131 - DNA, 3423 bp, Artificial Sequence
  derived and/or modified sequence
atggtaatttctttgaactcatgcctaagttttatatgcctcctgctctgccactggattggaaccgcctcacctcttaatctggaggatcccaacgtgtgttctcactgggagagctattccgtgactgttcaggaaagttatccccaccccttcgatcagatctattatacaagctgcacggacattcttaattggttcaagtgtactcgccaccgggtgagttatcggactgcttatcgtcacggtgagaaaacaatgtatcgacggaagtcccagtgttgcccgggattctacgagtccggggaaatgtgcgttccacattgtgcagataaatgcgtccacggtcggtgtatagcacccaatacctgccagtgcgaacctgggtgggggggaaccaattgtagcagcgcctgtgacggagatcactggggcccacactgtaccagtaggtgccagtgcaagaatggcgctttgtgtaatccgatcacaggagcctgccattgcgccgctggatttagagggtggcggtgcgaggaccgctgcgagcaggggacctacggcaatgattgccaccagagatgtcaatgccagaatggcgctacctgcgatcatgttaccggcgaatgccgctgccccccagggtataccggagccttctgcgaagacctgtgtcctccgggaaagcacggtccccaatgcgaacagcgatgtccctgtcagaatggcggagtgtgccatcacgtaacaggagaatgctcttgtccatcaggatggatgggcaccgtctgtgggcagccatgccccgagggccgatttgggaagaactgctcacaggagtgtcagtgtcacaatggtggaacctgtgacgcggcaacaggccagtgccactgttctccaggctatacaggggagaggtgtcaagatgagtgcccagtaggcacatacggggtcctctgcgcagagacttgtcagtgtgtgaacggaggaaaatgctatcacgtttctggcgcatgcctgtgtgaggccggatttgcgggagagaggtgcgaggctagactctgtcctgagggcctttacggaattaagtgcgataagagatgtccgtgccacctcgaaaacacacattcctgtcatcccatgagcggcgagtgcgcatgtaaaccaggttggagtggactgtattgcaatgaaacttgcagccccggtttttacggcgaagcttgccagcaaatctgttcatgtcaaaacggcgctgattgtgactccgtgactgggaaatgtacatgtgccccagggttcaaaggtatcgattgctctaccccctgcccacttgggacctacgggataaactgctcaagtcggtgcggttgtaagaatgacgccgtttgcagccctgttgacggctcttgtacttgcaaagctggatggcatggcgtggactgctccataagatgtcccagcggtacatggggattcgggtgcaatctcacttgtcaatgcctaaatgggggagcgtgcaacaccttagacggcacatgcacgtgcgcacctggctggagaggcgagaagtgcgagctcccctgccaggacggcacctacggcctcaattgcgctgagcgttgcgattgctctcacgctgatggctgccatcccaccacaggccattgtagatgcctcccagggtggtccggtgtgcactgcgatagtgtgtgcgctgaagggagatggggacccaactgctctctcccctgctactgtaaaaatggcgcatcttgttcccccgatgatggaatctgtgagtgcgcgccaggcttccggggtacgacttgccagcgcatttgctctcctggattctacggtcaccgatgctcacaaacctgcccccaatgcgttcactcatctggcccttgccaccacataactggcctctgtgattgtctccccggattcaccggcgctctctgtaacgaggtttgcccctccggcagattcgggaagaactgcgctgggatttgtacatgtactaacaatggaacatgcaatcctattgacagaagctgtcagtgttacccgggatggattggtagtgattgctcccagccctgccctcctgctcattgggggcctaactgcattcacacatgcaattgtcataatggcgcattctgttcagcatatgacggtgagtgcaagtgtactcctggttggacaggtctctactgtactcagagatgccccctcggcttctatggcaaggattgtgccctgatctgtcagtgccagaatggtgcagactgcgatcacatctccggccagtgcacgtgccggacaggatttatggggaggcactgcgaacagaaatgtccctcagggacatacgggtatggatgtcggcagatctgcgactgcttgaacaactcgacctgcgaccacatcaccggaacttgttattgttcaccaggctggaaaggcgcaagatgcgatcaggcaggcgtgatcattgtgggcaacctaaattcgctgtcccgaaccagcacagccctccccgcagatagctaccagattggggcaatcgccggtataattatcctcgtgctggtcgtcctcttcctgttagcactgtttattatttaccgacataaacagaagggcaaagaatcctctatgcctgccgttacctatactccagctatgcgggtggtgaatgcagactataccataagcggaacgctcccccacagcaacggaggcaatgcgaattctcactattttaccaacccctcatatcatacgttgacacagtgcgctacctccccgcacgttaacaacagggatcggatgactgtaaccaagtcgaagaacaaccaactgttcgtcaatctaaaaaacgtgaatccgggtaagagagggcctgtcggtgactgcaccgggactctgcctgccgactggaagcatggcggttacttgaacgagttgggcgctttcggactagaccggagttacatggggaaaagtctgaaagacctaggaaaaaatagtgaatacaacagcagcaactgcagtttaagctctagcgagaatccatacgctacaattaaagatccgcctgtcttaatacctaaaagtagcgaatgtggatatgtcgaaatgaagtctccagcacgcagagattcgccctacgccgagataaataacagcacaagcgccaatcgtaatgtctacgaagtcgagccaacggtgagtgtggtgcagggcgtcttcagtaacaacggaaggctatcacaggacccgtacgatctgcccaagaattctcacatcccttgccactacgatcttctgcctgttagagattccagctcttcccccaagcaagaagatagcggaggctcatcgtccaattcgtcctcctcctccgaatag

SEQ ID NO: 224132 - DNA, 3423 bp, Artificial Sequence
  derived and/or modified sequence
atggtaatttctctgaactcatgtctgagttttatttgcctcctgctgtgccactggattggcacggctagccctttgaacttggaagacccgaatgtgtgctctcactgggagtcgtactcagtaacagtacaagagagttatccgcatccttttgaccaaatttactacacctcgtgtacagatattctgaactggtttaagtgcacacggcatcgggtttcatacaggaccgcatatcggcacggcgaaaagacaatgtacaggagaaagagccaatgctgtcccggtttctatgagtccggcgagatgtgcgtgccacattgtgctgacaagtgcgtccatgggagatgcattgccccaaatacatgtcagtgtgaacctggatgggggggaactaattgtagctctgcatgcgatggggatcattggggcccacactgcacttcccggtgccagtgcaagaacggcgctctctgcaaccccattacaggtgcttgtcactgcgccgctggttttaggggctggagatgcgaggaccggtgcgaacagggaacctacggaaacgactgccatcagaggtgccagtgtcagaacggtgccacctgtgatcatgtcaccggcgaatgcagatgccctccaggctatactggggcattttgtgaggacttgtgcccaccagggaagcatgggccacagtgcgagcaaaggtgtccatgccagaatgggggagtctgtcaccacgtgacgggcgaatgctcttgtccaagcggttggatgggcacagtttgcgggcagccttgccccgaggggcgattcgggaagaattgctcgcaggagtgtcaatgtcataacggaggcacttgtgatgcagccacaggccaatgccattgttcaccgggatatactggcgaaagatgccaagacgaatgtccagttggtacctacggcgtgttgtgtgcagaaacttgtcaatgtgttaacgggggaaagtgctatcacgtctccggagcgtgtctctgtgaggcaggctttgcaggagagcggtgcgaagccaggctttgtcccgaagggctatatggcatcaaatgcgataagcggtgtccttgtcaccttgaaaatacccactcctgtcaccccatgagtggggaatgtgcctgcaagccagggtggtcaggtttatattgtaatgaaacctgctcaccaggattctatggagaggcttgtcagcagatttgctcatgccagaacggagcagattgtgattctgtaacaggcaagtgtacttgcgctccagggttcaagggaatcgattgttccaccccgtgcccactgggcacttacggaatcaactgctcatccaggtgcggctgcaagaatgatgcagtgtgctcaccagtagacgggtcttgtacctgcaaagctggatggcacggcgtggactgtagtatacgctgcccctcaggtacctggggcttcggatgtaacctgacctgtcagtgtctcaacggtggagcatgcaataccttggacggcacatgcacttgtgcccctgggtggcgcggagaaaaatgcgagctgccgtgtcaggatggcacatatgggcttaattgtgcggagagatgcgactgcagtcatgctgacggatgtcatcccaccacagggcattgtaggtgcctccctggctggtccggtgtgcactgcgacagcgtgtgtgctgaaggtcgatggggacctaactgtagcctgccgtgctattgcaaaaatggcgcttcttgtagccctgatgatggaatctgcgagtgtgctcccggttttagggggaccacatgtcagcgtatctgcagtccgggtttctatggacaccgctgtagccagacttgcccacagtgcgtacatagctcagggccatgtcatcatattaccggactgtgcgattgtcttcctggttttactggtgccctatgtaacgaggtgtgtccctctggacgcttcggaaagaattgtgccggaatctgcacatgtaccaataacggaacttgcaaccccatcgatagatcctgccaatgctaccccggttggatcggttctgactgttcccagccttgccctccagcccactggggcccaaattgtattcacacctgcaattgtcataatggtgctttctgctctgcatatgacggcgaatgtaaatgcactccgggttggacaggactgtactgcacacaacgatgtccactcggattctatggtaaagattgcgcactgatttgccagtgccagaatggcgcagactgtgatcacatcagtggccagtgcacttgcagaacaggatttatgggacgtcattgcgagcagaaatgtcctagcggaacatacgggtacgggtgtcggcagatatgcgattgcctgaacaatagtacgtgcgatcacattaccggcacatgttattgctcccctgggtggaagggcgcacgctgcgatcaggcaggcgtcatcatagttggcaatctcaattccctgagtcgcaccagcacggccttgcccgcagacagctatcagattggcgctattgcaggcatcatcatcctggtactggtagtcttgttcttgctggccctatttattatttacaggcataaacaaaagggcaaagaatcatctatgcctgccgtcacctacactccggctatgagggtcgtgaacgctgattatacaatatcgggtacccttcctcatagcaatggcggtaatgcgaattctcactacttcactaatccatcttaccacaccttgacccaatgtgccacgagtcctcacgttaataaccgcgataggatgactgttactaagagcaagaacaatcagttgttcgttaatcttaaaaatgtcaatcccggaaaaaggggcccagtgggcgattgtactgggacgctgccagcagactggaagcatggcggttaccttaacgaactgggcgcattcggactggatcggagctatatgggcaagtctctgaaagacctgggcaaaaatagcgagtataacagttctaattgcagtttatcaagctctgaaaatccatatgccacaatcaaggacccccctgttctgattcccaagtcttctgaatgtggatacgtggagatgaagagccccgctcgacgggattctccgtacgctgagattaataactccacttctgccaaccgtaacgtgtacgaagtggagccgactgtgtccgtcgtgcagggggtgttttctaacaatgggagactgtcccaggatccctatgaccttcctaagaactcccatatcccgtgccattatgacctactacccgtgcgggacagctcttcttcacctaaacaagaggattccggtggcagttctagcaactcttcaagtagcagtgaatag

SEQ ID NO: 224133 - DNA, 3423 bp, Artificial Sequence
  derived and/or modified sequence
atggtgatcagcctgaacagctgcctgagcttcatctgcctgctgctgtgccactggatcggcaccgccagccccctgaacctggaggaccccaacgtgtgcagccactgggagagctacagcgtgaccgtgcaggagagctacccccaccccttcgaccagatctactacaccagctgcaccgacatcctgaactggttcaagtgcaccagacacagagtgagctacagaaccgcctacagacacggcgagaagaccatgtacagaagaaagagccagtgctgccccggcttctacgagagcggcgagatgtgcgtgccccactgcgccgacaagtgcgtgcacggcagatgcatcgcccccaacacctgccagtgcgagcccggctggggcggcaccaactgcagcagcgcctgcgacggcgaccactggggcccccactgcaccagcagatgccagtgcaagaacggcgccctgtgcaaccccatcaccggcgcctgccactgcgccgccggcttcagaggctggagatgcgaggacagatgcgagcagggcacctacggcaacgactgccaccagagatgccagtgccagaacggcgccacctgcgaccacgtgaccggcgagtgcagatgcccccccggctacaccggcgccttctgcgaggacctgtgcccccccggcaagcacggcccccagtgcgagcagagatgcccctgccagaacggcggcgtgtgccaccacgtgaccggcgagtgcagctgccccagcggctggatgggcaccgtgtgcggccagccctgccccgagggcagattcggcaagaactgcagccaggagtgccagtgccacaacggcggcacctgcgacgccgccaccggccagtgccactgcagccccggctacaccggcgagagatgccaggacgagtgccccgtgggcacctacggcgtgctgtgcgccgagacctgccagtgcgtgaacggcggcaagtgctaccacgtgagcggcgcctgcctgtgcgaggccggcttcgccggcgagagatgcgaggccagactgtgccccgagggcctgtacggcatcaagtgcgacaagagatgcccctgccacctggagaacacccacagctgccaccccatgagcggcgagtgcgcctgcaagcccggctggagcggcctgtactgcaacgagacctgcagccccggcttctacggcgaggcctgccagcagatctgcagctgccagaacggcgccgactgcgacagcgtgaccggcaagtgcacctgcgcccccggcttcaagggcatcgactgcagcaccccctgccccctgggcacctacggcatcaactgcagcagcagatgcggctgcaagaacgacgccgtgtgcagccccgtggacggcagctgcacctgcaaggccggctggcacggcgtggactgcagcatcagatgccccagcggcacctggggcttcggctgcaacctgacctgccagtgcctgaacggcggcgcctgcaacaccctggacggcacctgcacctgcgcccccggctggagaggcgagaagtgcgagctgccctgccaggacggcacctacggcctgaactgcgccgagagatgcgactgcagccacgccgacggctgccaccccaccaccggccactgcagatgcctgcccggctggagcggcgtgcactgcgacagcgtgtgcgccgagggcagatggggccccaactgcagcctgccctgctactgcaagaacggcgccagctgcagccccgacgacggcatctgcgagtgcgcccccggcttcagaggcaccacctgccagagaatctgcagccccggcttctacggccacagatgcagccagacctgcccccagtgcgtgcacagcagcggcccctgccaccacatcaccggcctgtgcgactgcctgcccggcttcaccggcgccctgtgcaacgaggtgtgccccagcggcagattcggcaagaactgcgccggcatctgcacctgcaccaacaacggcacctgcaaccccatcgacagaagctgccagtgctaccccggctggatcggcagcgactgcagccagccctgcccccccgcccactggggccccaactgcatccacacctgcaactgccacaacggcgccttctgcagcgcctacgacggcgagtgcaagtgcacccccggctggaccggcctgtactgcacccagagatgccccctgggcttctacggcaaggactgcgccctgatctgccagtgccagaacggcgccgactgcgaccacatcagcggccagtgcacctgcagaaccggcttcatgggcagacactgcgagcagaagtgccccagcggcacctacggctacggctgcagacagatctgcgactgcctgaacaacagcacctgcgaccacatcaccggcacctgctactgcagccccggctggaagggcgccagatgcgaccaggccggcgtgatcatcgtgggcaacctgaacagcctgagcagaaccagcaccgccctgcccgccgacagctaccagatcggcgccatcgccggcatcatcatcctggtgctggtggtgctgttcctgctggccctgttcatcatctacagacacaagcagaagggcaaggagagcagcatgcccgccgtgacctacacccccgccatgagagtggtgaacgccgactacaccatcagcggcaccctgccccacagcaacggcggcaacgccaacagccactacttcaccaaccccagctaccacaccctgacccagtgcgccaccagcccccacgtgaacaacagagacagaatgaccgtgaccaagagcaagaacaaccagctgttcgtgaacctgaagaacgtgaaccccggcaagagaggccccgtgggcgactgcaccggcaccctgcccgccgactggaagcacggcggctacctgaacgagctgggcgccttcggcctggacagaagctacatgggcaagagcctgaaggacctgggcaagaacagcgagtacaacagcagcaactgcagcctgagcagcagcgagaacccctacgccaccatcaaggacccccccgtgctgatccccaagagcagcgagtgcggctacgtggagatgaagagccccgccagaagagacagcccctacgccgagatcaacaacagcaccagcgccaacagaaacgtgtacgaggtggagcccaccgtgagcgtggtgcagggcgtgttcagcaacaacggcagactgagccaggacccctacgacctgcccaagaacagccacatcccctgccactacgacctgctgcccgtgagagacagcagcagcagccccaagcaggaggacagcggcggcagcagcagcaacagcagcagcagcagcgagtag

SEQ ID NO: 224134 - protein, 2809 aa, Artificial Sequence
  derived and/or modified sequence
MTLEGLYLARGPLARLLLAWSALLCMAGGQGRWDGALEAAGPGRVRRRGSPGILQGPNVCGSRFHAYCCPGWRTFPGRSQCVVPICRRACGEGFCSQPNLCTCADGTLAPSCGVSRGSGCSVSCMNGGTCRGASCLCQKGYTGTVCGQPICDRGCHNGGRCIGPNRCACVYGFMGPQCERDYRTGPCFGQVGPEGCQHQLTGLVCTKALCCATVGRAWGLPCELCPAQPHPCRRGFIPNIHTGACQDVDECQAVPGLCQGGSCVNMVGSFHCRCPVGHRLSDSSAACEDYRAGACFSVLFGGRCAGDLAGHYTRRQCCCDRGRCWAAGPVPELCPPRGSNEFQQLCAQRLPLLPGHPGLFPGLLGFGSNGMGPPLGPARLNPHGSDARGIPSLGPGNSNIGTATLNQTIDICRHFTNLCLNGRCLPTPSSYRCECNVGYTQDVRGECIDVDECTSSPCHHGDCVNIPGTYHCRCYPGFQATPTRQACVDVDECIVSGGLCHLGRCVNTEGSFQCVCNAGFELSPDGKNCVDHNECATSTMCVNGVCLNEDGSFSCLCKPGFLLAPGGHYCMDIDECQTPGICVNGHCTNTEGSFRCQCLGGLAVGTDGRVCVDTHVRSTCYGAIEKGSCARPFPGTVTKSECCCANPDHGFGEPCQLCPAKDSAEFQALCSSGLGITTDGRDINECALDPEVCANGVCENLRGSYRCVCNLGYEAGASGKDCTDVDECALNSLLCDNGWCQNSPGSYSCSCPPGFHFWQDTEICKDVDECLSSPCVSGVCRNLAGSYTCKCGPGSRLDPSGTFCLDSTKGTCWLKIQESRCEVNLQGASLRSECCATLGAAWGSPCERCEIDPACARGFARMTGVTCDDVNECESFPGVCPNGRCVNTAGSFRCECPEGLMLDASGRLCVDVRLEPCFLRWDEDECGVTLPGKYRMDVCCCSIGAVWGVECEACPDPESLEFASLCPRGLGFASRDFLSGRPFYKDVNECKVFPGLCTHGTCRNTVGSFHCACAGGFALDAQERNCTDIDECRISPDLCGQGTCVNTPGSFECECFPGYESGFMLMKNCMDVDECARDPLLCRGGTCTNTDGSYKCQCPPGHELTAKGTACEDIDECSLSDGLCPHGQCVNVIGAFQCSCHAGFQSTPDRQGCVDINECRVQNGGCDVHCINTEGSYRCSCGQGYSLMPDGRACADVDECEENPRVCDQGHCTNMPGGHRCLCYDGFMATPDMRTCVDVDECDLNPHICLHGDCENTKGSFVCHCQLGYMVRKGATGCSDVDECEVGGHNCDSHASCLNIPGSFSCRCLPGWVGDGFECHDLDECVSQEHRCSPRGDCLNVPGSYRCTCRQGFAGDGFFCEDRDECAENVDLCDNGQCLNAPGGYRCECEMGFDPTEDHRACQDVDECAQGNLCAFGSCENLPGMFRCICNGGYELDRGGGNCTDINECADPVNCINGVCINTPGSYLCSCPQDFELNPSGVGCVDTRAGNCFLETHDRGDSGISCSAEIGVGVTRASCCCSLGRAWGNPCELCPMANTTEYRTLCPGGEGFQPNRITVILEDIDECQELPGLCQGGDCVNTFGSFQCECPPGYHLSEHTRICEDIDECSTHSGICGPGTCYNTLGNYTCVCPAEYLQVNGGNNCMDMRKSVCFRHYNGTCQNELAFNVTRKMCCCSYNIGQAWNRPCEACPTPISPDYQILCGNQAPGFLTDIHTGKPLDIDECGEIPAICANGICINQIGSFRCECPAGFNYNSILLACEDVDECGSRESPCQQNADCINIPGSYRCKCTRGYKLSPGGACVGRNECREIPNVCSHGDCMDTEGSYMCLCHRGFQASADQTLCMDIDECDRQPCGNGTCKNIIGSYNCLCFPGFVVTHNGDCVDFDECTTLVGQVCRFGHCLNTAGSFHCLCQDGFELTADGKNCVDTNECLSLAGTCLPGTCQNLEGSFRCICPPGFQVQSDHCIDIDECSEEPNLCLFGTCTNSPGSFQCLCPPGFVLSDNGHRCFDTRQSFCFTRFEAGKCSVPKAFNTTKTRCCCSKRPGEGWGDPCELCPQEGSAAFQELCPFGHGAVPGPDDSREDVNECAENPGVCTNGVCVNTDGSFRCECPFGYSLDFTGINCVDTDECSVGHPCGQGTCTNVIGGFECACADGFEPGLMMTCEDIDECSLNPLLCAFRCHNTEGSYLCTCPAGYTLREDGAMCRDVDECADGQQDCHARGMECKNLIGTFACVCPPGMRPLPGSGEGCTDDNECHAQPDLCVNGRCVNTAGSFRCDCDEGFQPSPTLTECHDIRQGPCFAEVLQTMCRSLSSSSEAVTRAECCCGGGRGWGPRCELCPLPGTSAYRKLCPHGSGYTAEGRDVDECRMLAHLCAHGECINSLGSFRCHCQAGYTPDATATTCLDMDECSQVPKPCTFLCKNTKGSFLCSCPRGYLLEEDGRTCKDLDECTSRQHNCQFLCVNTVGAFTCRCPPGFTQHHQACFDNDECSAQPGPCGAHGHCHNTPGSFRCECHQGFTLVSSGHGCEDVNECDGPHRCQHGCQNQLGGYRCSCPQGFTQHSQWAQCVDENECALSPPTCGSASCRNTLGGFRCVCPSGFDFDQALGGCQEVDECAGRRGPCSYSCANTPGGFLCGCPQGYFRAGQGHCVSGLGFSPGPQDTPDKEELLSSEACYECKINGLSPRDRPRRSAHRDHQVNLATLDSEALLTLGLNLSHLGRAERILELRPALEGLEGRIRYVIVRGNEQGFFRMHHLRGVSSLQLGRRRPGPGTYRLEVVSHMAGPWGVQPEGQPGPWGQALRLKVQLQLL

SEQ ID NO: 224135 - protein, 872 aa, Artificial Sequence
  derived and/or modified sequence
MGIVWILMSVLPWWGRCADLAIASTQLVPSTASARMALSSQLMGRTVWTPMSASALQEPAYPALARTSRAPSAASVPLASRCRVTTALISTSAQRSPTSASLAPVPTALGASSASAHLALSSLTMGTVALTHGRVSASPVLRLGSARCPKLSTPPRPAAAAVRGLGRAGETPANCVPRRAVPGPDDSREDVNECAENPGVCTNGVCVNTDGSFRCECPFGYSLDFTGINCVDTDECSVGHPCGQGTCTNVIGGFECACADGFEPGLMMTCEDIDECSLNPLLCAFRCHNTEGSYLCTCPAGYTLREDGAMCRDVDECADGQQDCHARGMECKNLIGTFACVCPPGMRPLPGSGEGCTDDNECHAQPDLCVNGRCVNTAGSFRCDCDEGFQPSPTLTECHDIRQGPCFAEVLQTMCRSLSSSSEAVTRAECCCGGGRGWGPRCELCPLPGTSAYRKLCPHGSGYTAEGRDVDECRMLAHLCAHGECINSLGSFRCHCQAGYTPDATATTCLDMDECSQVPKPCTFLCKNTKGSFLCSCPRGYLLEEDGRTCKDLDECTSRQHNCQFLCVNTVGAFTCRCPPGFTQHHQACFDVNECDGPHRCQHGCQNQLGGYRCSCPQGFTQHSQWAQCVDENECALSPPTCGSASCRNTLGGFRCVCPSGFDFDQALGGCQEVDECAGRRGPCSYSCANTPGGFLCGCPQGYFRAGQGHCVSGLGFSPGPQDTPDKEELLSSEACYECKINGLSPRDRPRRSAHRDHQVNLATLDSEALLTLGLNLSHLGRAERILELRPALEGLEGRIRYVIVRGNEQGFFRMHHLRGVSSLQLGRRRPGPGTYRLEVVSHMAGPWGVQPEGQPGPWGQALRLKVQLQLL

SEQ ID NO: 224136 - DNA, 8430 bp, Artificial Sequence
  derived and/or modified sequence
atgaccctggagggcctgtacctggcccggggccccctggcccggttgctcttagcttggagtgctctcttgtgtatggctggtggtcagggaagatgggacggggcactggaagcagccggcccaggtagagtgcggaggcggggaagcccgggaattcttcagggcccaaacgtatgcggctctcgcttccatgcctattgctgtccaggctggcggacatttcctgggagaagtcagtgtgtggtccccatatgtcgccgcgcatgcggagaaggcttttgtagccagcccaacctgtgtacttgtgcagacggcactctcgcgccttcttgcggagttagccgcggtagcggatgttctgtgtcctgcatgaacgggggaacctgtcgcggagcatcatgcctgtgccagaaaggctacaccggcactgtttgcggccagcctatctgcgacaggggctgccataacggcggacgatgcatcggtccaaatcgatgcgcttgcgtctacggtttcatggggccgcagtgtgagcgggactacagaacaggcccttgtttcgggcaggtggggcccgaagggtgtcaacaccaattgactggcctcgtgtgtaccaaagcactctgctgtgcaacagttggcagggcctgggggctgccatgcgaactgtgtcctgctcagcctcacccttgccgccggggatttatccctaacatccataccggcgcatgccaggatgtcgacgaatgccaggctgtgccgggcctatgccaaggtggatcttgcgtcaacatggttgggagcttccattgtagatgcccagtcggccatcgccttagcgatagttctgcagcctgtgaggattacagagctggtgcttgtttttcggtactcttcggagggcgttgcgcaggcgatctagccgggcactacacgcgacgtcagtgttgttgtgacagaggccggtgttgggcagcgggaccagttcccgaattatgccctcctagaggtagtaacgaattccaacaattgtgtgctcagcgcttgcctctgctgccgggccatccgggattgttccctggacttttggggttcggcagcaacggtatgggtccacccctgggccctgcccggctaaatcctcacggatccgacgctcggggaatcccaagtctgggcccaggtaactccaatattggcaccgccacactcaaccagaccatcgacatttgtcggcacttcacaaatctgtgtcttaatggtcgctgtctgccaacgccaagcagctaccgctgcgaatgcaacgtgggatacacccaggacgtcaggggcgagtgtatcgacgtagacgaatgtacctcatctccgtgccaccacggggattgcgtgaatattccaggcacctaccactgcaggtgctacccaggattccaggcaacccccactcggcaggcatgtgtggacgtcgatgagtgcatcgtctccggaggtctttgccacctcggacgttgcgttaataccgagggctccttccagtgcgtctgcaatgccggctttgaactgagtcccgatggaaaaaactgcgtcgatcacaacgaatgcgctacgtccactatgtgcgtgaacggcgtgtgcttaaacgaggatggatcatttagttgtctgtgcaagcccgggtttctcctggccccaggcgggcactactgcatggacatcgacgagtgtcagactccaggcatttgcgtcaatgggcactgcacaaatactgagggaagcttcaggtgccaatgtctggggggactggcagtgggcaccgatgggagagtatgtgtagacacacatgtccgtagcacttgctacggggccatcgagaaaggcagttgtgcacgtccctttcctggaacagttaccaagagcgagtgttgctgtgccaacccagaccacggattcggggaaccatgccagctgtgccccgcaaaggatagcgccgagtttcaagccctctgttcttctggtttaggaattaccacagacggtagagatatcaatgagtgtgccctggaccccgaagtttgtgcgaacggcgtatgcgagaatctccgcggatcatatcggtgcgtctgcaacctggggtatgaagccggggcttcagggaaagattgcaccgatgtagatgagtgcgcccttaactcattgctgtgcgacaacgggtggtgtcaaaattcccccgggagctatagctgtagctgccctccggggtttcatttctggcaagacactgaaatatgtaaggacgttgatgaatgtttgagcagcccctgtgtgtcaggggtgtgtcggaacttggcaggatcttacacctgtaagtgtgggcccggcagcaggctggatccttccggcacgttctgtcttgacagcaccaaaggaacctgttggctgaagatccaagaaagccgctgtgaggtcaatctgcagggcgcctccctgagatccgagtgctgcgcgaccctgggagccgcctggggctctccttgtgagcggtgcgaaatagatccggcctgcgcccggggcttcgcacggatgacaggcgtgacctgtgatgacgttaacgaatgtgaaagttttccaggggtatgtccgaacggaaggtgcgttaacaccgccggctcgtttcgctgtgagtgcccagagggtttgatgttggacgctagcgggagattgtgcgtcgatgtcaggcttgaaccctgcttcctgcgatgggatgaggacgaatgcggcgtaacattgcccgggaaataccgaatggacgtgtgctgttgcagtatcggagccgtttggggggtggagtgtgaggcatgtcctgacccggagtccctggaattcgcttctttgtgtccgcggggactgggatttgccagccgtgattttctgtcaggtcgccctttctacaaagatgtgaacgagtgtaaagtctttcccggcttatgcacccatggcacctgccgcaataccgtgggatcttttcactgcgcttgtgctggcgggttcgccctagacgcccaggagcgtaactgtactgatatcgacgagtgtcgtatctcacccgatctgtgcggccaggggacctgtgtgaacacccccgggtccttcgagtgcgagtgttttccaggctacgaatcaggatttatgctcatgaagaattgtatggatgtggatgagtgcgcaagggaccccttgttgtgccgtggcgggacttgcactaataccgacgggtcctacaagtgccagtgccctcccgggcatgagttgaccgcaaaaggcactgcttgcgaggacatcgatgagtgctctctcagtgatggcctttgcccacacggacagtgtgtgaatgttattggcgcttttcaatgttcctgtcatgctggattccagtccaccccggaccgccaaggctgcgtggacatcaatgaatgtagggtccagaacggaggttgtgacgttcattgcattaacacggagggtagctatcgctgcagctgcggacaaggctactcactgatgcctgacggtcgcgcctgtgctgacgtagatgaatgtgaagagaaccctcgtgtgtgcgaccaaggacattgcaccaatatgcctggtgggcaccgctgcctatgctacgacggcttcatggccacacccgacatgagaacatgtgttgatgtcgacgaatgcgaccttaatcctcatatctgtctgcacggggactgtgagaacactaagggctctttcgtgtgccattgccagctaggatatatggtaagaaagggggcgacagggtgctccgatgtcgatgaatgtgaggttggaggccacaattgcgacagtcatgcatcctgtctaaatattccgggcagcttttcttgcaggtgcctgccaggatgggtgggagatggctttgagtgccatgacctggacgaatgtgtgtcacaggagcacagatgctccccgcgtggcgactgccttaatgtgccggggtcctatcgttgtacatgccggcaaggtttcgcaggagacggattcttttgcgaagaccgggacgaatgtgcagagaatgtggacctttgcgataacgggcagtgcctcaatgcccctggcgggtacaggtgtgagtgcgagatgggctttgatccgaccgaagatcacagagcttgtcaagatgtggatgaatgtgcccagggcaatctttgcgcctttggcagctgtgagaatctgcccggaatgtttaggtgtatctgtaatggggggtacgaactcgataggggtggtggtaactgtaccgatatcaatgaatgcgcggatcctgtgaattgtatcaatggggtgtgtattaatacgcccgggtcttatctttgctcctgtccccaggatttcgagctgaacccatccggggtagggtgcgtcgatacaagggccgggaattgcttcctggagacccatgaccggggtgattcaggaatctcatgttcggcagaaatcggcgtgggagtcactcgcgcttcctgctgctgctcactggggcgggcttggggaaacccctgtgaattgtgtccaatggccaatactactgaatatcgaaccttgtgccccggaggggagggtttccagcccaacagaattactgtgatactggaggacatagacgaatgccaggagctgcccgggctttgccaggggggagactgcgtaaacaccttcgggagtttccaatgtgaatgtccacctggctatcacctgagtgagcacacgcgcatctgcgaggacattgacgaatgctccacacactcgggtatttgtgggcctgggacttgttataacacattgggaaactatacctgcgtgtgcccagctgagtaccttcaagttaacggcggtaataactgtatggacatgcggaagtcagtctgttttcgccattacaatggaacatgccagaatgagctggcattcaatgttacccgcaaaatgtgttgttgttcctacaacatcggtcaagcttggaaccgcccatgtgaggcttgccctactcctatttctcctgactaccagatcttgtgtgggaaccaagcgcccggatttctcaccgatattcacaccgggaaacctcttgacatagatgagtgcggggagatcccagccatctgcgccaacggcatctgtataaaccagattggctccttcaggtgcgagtgtcccgctggatttaactacaatagcatactcctggcatgtgaggatgttgatgaatgcggtagccgcgaatcaccgtgtcagcaaaatgcggactgcattaacatccccggttcttataggtgtaagtgcactagaggctataagctctcaccgggaggggcatgcgtagggagaaacgagtgccgagagatccccaacgtctgtagccatggagattgtatggacaccgaagggtcgtacatgtgtctgtgtcaccgcggatttcaggcctcagccgaccagactctgtgtatggacatcgatgagtgtgatagacagccatgcgggaacggcacatgtaaaaacattatcggatcatacaactgcttatgctttcccggatttgtggtgactcacaacggggactgcgtcgatttcgacgaatgcaccactctcgtcggccaggtctgtaggttcggtcattgtctcaatacagcggggtcatttcattgtttatgtcaggacgggtttgagcttacagccgatggtaagaattgcgtggacaccaacgaatgtctctcgttggcagggacttgtcttcccggcacttgtcagaacctggagggaagcttccgatgtatctgccccccaggtttccaggtgcagtccgaccactgcatagacattgatgagtgtagcgaggagccaaacctctgcctgttcggtacatgcactaattcacccgggtcctttcaatgcttatgccctcctggattcgttctgtccgacaacggccaccgctgttttgacaccaggcagtccttctgcttcacacggtttgaggcggggaagtgctcagtcccaaaggccttcaacacgacaaaaacccgttgctgctgcagcaagcgtcccggcgagggctggggagacccatgtgagttgtgccctcaggaaggatccgctgctttccaggaactgtgtccctttggacacggcgccgtgccgggtcccgacgacagccgggaggatgttaacgagtgtgcagaaaaccccggcgtctgcactaacggtgtttgtgtcaacactgacggctcgtttaggtgtgagtgcccctttggctacagtctggactttacaggaatcaactgtgttgacaccgacgaatgctctgtcggtcacccttgtggccagggcacctgcaccaatgtcattggcggatttgaatgtgcctgtgcagacggctttgaacctgggttgatgatgacatgcgaggacattgatgaatgttcattgaacccgctgctgtgcgcttttaggtgtcataatactgagggatcctatttgtgcacctgcccagctggatacactctcagagaggacggtgctatgtgcagggacgtagacgagtgtgccgatgggcaacaggactgccacgctcgggggatggagtgcaaaaatctcattggcacctttgcctgtgtgtgtcctccgggaatgaggccattgcctggctctggagagggctgcaccgacgacaacgagtgtcatgcacagcccgacctctgtgtgaacgggcggtgtgttaataccgctgggagcttccgttgcgactgcgatgaaggattccagccttcccctacacttactgaatgtcacgatatcaggcagggcccatgctttgcggaagttttgcagactatgtgcaggagcttgagcagctcctccgaggccgtgaccagagcagagtgctgttgcgggggggggcgtggctggggccctagatgcgagctttgccccctcccgggtacctctgcctaccgcaaactctgtccgcacggttccggctatactgccgaagggcgggatgtggatgaatgcaggatgctggcccatctttgcgcccacggtgagtgcattaactccctggggagcttccggtgccactgtcaagcgggctacactccagacgcgaccgctaccacctgtctggatatggacgagtgcagccaagtccccaagccttgcaccttcctctgtaaaaatacaaagggctcattcctgtgcagttgtcctaggggctatctgctggaggaggatggccggacgtgcaaggacctggatgagtgcacctccagacagcacaactgccagtttctctgcgtaaatactgtcggcgccttcacgtgccgctgcccacccgggtttactcaacatcaccaggcttgtttcgataacgacgagtgtagtgcgcagccaggcccctgtggtgcccatggtcactgtcataacactcctggcagctttagatgtgagtgtcaccaaggattcacccttgtttctagtgggcacggatgcgaagacgtgaatgagtgtgacggaccccataggtgtcagcatggatgtcagaaccaactgggcggctatagatgttcctgcccccaaggcttcacccagcatagccagtgggcccagtgcgtcgatgagaacgagtgcgccctgtctccaccaacttgcgggagcgcgtcgtgcagaaacacacttgggggctttcgttgcgtgtgcccttctggttttgacttcgatcaggcactcggtggatgtcaggaagtggatgagtgcgccgggcgccgcggtccctgtagttattcatgcgctaataccccagggggctttctttgtgggtgtccgcagggctactttagagcaggccagggccactgtgtctctggcctgggcttctctcccggaccacaggacacacctgataaagaggaactgctttcatcagaggcatgctatgaatgcaaaattaacggactctccccaagagaccggcctcgccggtccgcccaccgagaccaccaggtgaatttagccaccctggacagcgaagctttgttgaccttggggctcaacctgtcccatctggggcgcgctgagagaatcctggaacttaggcccgcgttggagggcctggagggaaggatccgctatgtcattgtgagaggcaacgaacagggcttttttcgcatgcaccatctgagaggggtgtcttccctgcaattagggaggcgccgcccagggcccggcacataccgcctagaagtcgtgtcacacatggccgggccttggggggtgcagccagagggacaacccgggccatggggtcaggctcttcgattgaaggtccagcttcagctgctgtag

SEQ ID NO: 224137 - DNA, 8429 bp, Artificial Sequence
  derived and/or modified sequence
atgaccttggagggcctttatctggccagagggccactggcaagactgctgctggcttggtctgctctgttgtgtatggccggaggtcagggcagatgggatggtgccctggaagcggctgggcctggcagagtgcgtcgaaggggcagcccaggtattttacagggccctaacgtctgtgggtcaaggtttcatgcttattgctgcccaggctggcgtactttccctgggagaagtcagtgcgtcgtaccaatatgccgcagagcttgcggggaaggcttttgtagtcagccaaatttgtgcacctgcgcagatgggaccctcgccccaagttgtggcgtgagtagaggttccggatgctctgtctcatgcatgaacggaggcacttgccgtggcgctagctgtctgtgtcagaaaggctatactgggactgtgtgtggccaacccatttgcgacagagggtgtcacaatggaggaaggtgcattggtccaaatcgctgcgcatgcgtgtacggattcatgggcccacaatgcgagagagattataggacagggccttgttttggtcaagtgggccctgaaggctgtcagcaccagctcactgggttggtgtgtacgaaggctctgtgctgtgcaacggtaggtagagcgtggggcttgccttgtgagctgtgtccagcgcagcctcacccttgtcggagaggattcattccgaacattcatactggcgcatgccaagatgttgacgagtgtcaggccgtgccgggactttgccagggaggttcctgcgtcaacatggtcggcagctttcactgtcgttgcccagttggacatagactaagcgactcaagtgccgcttgcgaggactatcgggctggggcatgcttcagcgtgctgtttggaggcagatgtgccggagacctcgctggtcactacacgcgacgccaatgctgctgtgacagagggcgatgctgggctgctggccctgtgcctgaactgtgtcctcccagaggttcgaatgagtttcagcaattgtgtgcccaaaggctgcccctgctgcccggacacccgggactcttccccggactgctgggtttcggatccaatggcatgggacctccccttgggcctgccagacttaatccccatggctccgatgccaggggaattccttccctggggcctggcaatagtaatattgggactgctacattaaaccagaccatcgacatttgcagacatttcacgaacctgtgcctgaatggtagatgcttacctacgccaagttcctacaggtgcgaatgcaacgtgggctacacccaagacgtccgtggcgagtgtatcgacgttgacgaatgcacaagttccccgtgtcaccatggggattgtgtcaatatccccggaacgtaccattgccgctgttacccgggtttccaggctacgccgacgcgacaggcctgcgtcgatgtcgacgagtgtatcgtgtcaggtggactctgccatctgggtcgctgcgtaaacaccgagggcagcttccagtgcgtgtgtaatgcgggattcgagttgtctccagacggtaagaactgtgtggaccataacgaatgcgcaacatctaccatgtgtgtgaacggggtatgtcttaacgaagacggaagttttagttgcctgtgtaaacccggatttttattggcccctggaggccattattgtatggatattgatgaatgccagacacctggaatatgtgtcaatggccattgcactaacacagagggaagttttaggtgtcagtgtctcggtggcttggccgttggtaccgacgggcgagtgtgtgtagatacccacgtccgcagcacttgctacggcgctatcgagaagggttcctgtgctcgcccatttccaggaaccgtcaccaaaagcgaatgctgttgtgctaaccccgaccatggttttggcgaaccttgccagttgtgtcctgccaaggacagcgcagagttccaggctctgtgctccagtggactcggaataacaactgatggaagagacatcaacgagtgcgcgctggatccagaggtgtgcgcaaatggagtgtgcgagaacctgcgcggaagctatcgctgcgtctgcaatctgggctacgaagccggagcttctggcaaggactgcacggacgtcgatgagtgtgccctcaactctcttctatgtgataatggctggtgtcaaaatagccctggctcctacagctgtagttgtccacccggattccatttctggcaggacaccgaaatctgtaaagacgtcgatgagtgtttatcttcaccatgtgtatctggtgtgtgtcgcaatctggctgggagctatacctgtaagtgtggtccaggctctagacttgacccatcgggcacattctgtctggactccactaaagggacctgttggctgaaaatacaggagtctcggtgcgaagtcaatctccagggggcttccctgcgatcagagtgctgcgcgaccttgggcgctgcctggggctctccttgcgaacgctgtgagatcgatcccgcttgtgccaggggattcgcgaggatgacgggcgttacctgtgatgacgtcaacgaatgcgagagttttcccggagtgtgtcctaatggccgatgcgtcaatacagctggtagtttccggtgtgagtgccctgagggcctgatgctcgatgcgtctggcagattatgtgtggacgtgaggctggagccctgtttcctgagatgggatgaggacgaatgcggcgtgacgctgccagggaagtacaggatggatgtttgttgctgtagcattggagcagtttggggggttgagtgtgaggcttgcccggacccggaaagcctggagttcgcttctttgtgccctaggggattgggatttgcatctagagattttctgtcagggagaccattctacaaggacgttaatgaatgtaaagtgttccctggtctctgtacccatggaacatgccgcaacacagtcggatcctttcattgtgcctgcgccggagggttcgctttggacgcgcaagaacgaaactgtactgacatagacgaatgcagaatctcacctgacctctgtgggcaagggacatgcgtaaatacgcctggctcattcgaatgcgagtgcttccccggatacgagagtgggtttatgctcatgaagaactgcatggatgtggacgaatgtgctcgtgaccctctactctgcaggggcggtacctgcacaaatacagacgggagttataaatgtcagtgtcctccaggccacgagctgacggcgaagggtaccgcatgcgaggacattgatgaatgcagcctctccgacggattgtgtccacacgggcaatgtgtgaatgttatcggggcatttcagtgttcctgccacgcaggctttcaatccacccctgatcggcaaggttgcgtggacattaacgaatgtcgagtacagaacggcggatgtgacgtccactgtattaacacagagggatcataccggtgttcctgcggccagggttactctctgatgcctgacggacgcgcatgtgcagacgtggacgagtgcgaagaaaacccccgagtctgtgatcagggtcactgcacaaatatgcctgggggacaccggtgtctgtgttacgatggcttcatggcaacacccgatatgcggacttgtgtggatgttgatgaatgtgacctcaatccacacatttgccttcacggggactgcgagaacactaagggatcttttgtatgccactgtcaacttgggtatatggtaagaaagggcgcaacaggttgcagtgatgttgacgaatgcgaggtcgggggacataattgtgacagccacgctagctgtctgaacatccccggaagtttctcatgccgatgtctaccgggatgggtcggagatggatttgagtgccacgatttagacgaatgtgtgagtcaggaacataggtgtagtccaaggggagattgcttaaatgtgccagggtcctaccgatgtacatgtcgtcagggttttgcaggtgatgggttcttctgtgaagaccgagatgagtgtgccgaaaacgtcgacttgtgtgacaacggccagtgtctaaacgccccagggggttaccgctgtgaatgcgagatgggattcgatcctacagaggaccacagggcctgtcaggacgtcgacgaatgcgctcaggggaatctgtgcgcgttcggctcttgtgaaaatttaccaggcatgttcagatgcatctgtaacggaggctatgagctcgaccggggagggggtaactgtaccgatattaacgaatgcgctgacccagtcaattgcattaatggcgtgtgcattaacacacccggatcttatctgtgcagttgtccccaggactttgagttaaacccctcgggcgtcggatgcgtcgacacccgggcagggaactgttttttagagacccatgaccgaggtgactccggaatatcctgttcggctgagataggtgtgggcgtgactagagcatcctgctgctgctccctgggtcgagcctggggaaacccttgtgagctgtgtcctatggctaatacaaccgagtacaggactctgtgtcctgggggagagggatttcagccgaatcgcatcaccgttattctggaggatatcgacgagtgtcaggaactgcctggactctgtcagggcggagattgcgtgaacaccttcgggtcattccagtgtgagtgccctcccggttatcatctttctgagcacactagaatatgtgaggacatcgatgagtgctctacacattccgggatttgcggcccaggcacgtgctataatactcttggtaactacacttgtgtctgccccgctgaatacctccaggtgaatgggggaaacaactgtatggacatgaggaagtctgtatgttttagacactacaatgggacgtgtcagaatgaacttgcttttaacgtgaccaggaagatgtgttgctgcagttacaatattgggcaggcatggaaccggccatgcgaagcctgtcctactcctatatcgcctgactatcagatcctctgtggtaaccaagcacctggattcctgactgatattcacaccgggaagcccttggatatcgacgagtgtggtgagattcctgccatatgtgctaacggcatttgtatcaaccagatcggtagtttccggtgcgagtgtcctgcgggtttcaattataactctatcctgctcgcctgcgaggatgtggatgaatgcggaagcagagaatccccttgccagcaaaacgccgactgcattaacatacccggaagttataggtgtaagtgcactaggggctataagctctcacctggaggagcatgtgtcggacgcaatgaatgtagagagattccaaacgtttgctcccatggcgactgcatggatactgaaggctcctacatgtgcctttgccaccgcggtttccaggcaagtgcagatcagactctgtgcatggacatcgacgaatgtgaccggcagccttgcgggaatggcacctgtaagaatatcattgggtcctacaattgtctctgtttccccggatttgttgtaacacacaacggcgattgcgtggactttgacgaatgtacaaccctcgttgggcaggtgtgtagattcggccattgcctgaacaccgccggttcctttcattgtctatgccaggacggttttgaactgactgccgacggtaagaactgtgtcgacacaaacgagtgcttgtcgctagccggtacttgccttcccggaacatgccagaatctagagggctctttccgctgcatctgccctcctggatttcaggtccagagtgaccactgcatcgatattgacgaatgcagcgaagagccaaacctgtgccttttcgggacatgcaccaacagccctgggtcctttcagtgcctctgcccacccggttttgtgctgtctgataacggccaccgttgttttgacacacgccaaagtttctgcttcaccagatttgaggccggtaaatgcagtgttccgaaagcctttaatacaacaaaaacacggtgttgctgtagtaagcgaccgggagagggttggggtgatccttgtgagttatgcccacaggaggggagtgcagcatttcaggagctttgtcctttcggccacggtgccgtaccaggacccgacgattcgcgcgaagatgtcaatgagtgcgcagagaaccccggagtgtgtacaaatggcgtatgtgtcaacacggacgggtcatttagatgtgagtgtcccttcgggtattccctcgatttcactgggatcaactgtgtagatacggatgaatgcagcgtcggtcacccctgtggccagggaacttgcactaatgtgataggcggattcgaatgcgcctgtgcagatgggttcgagcctggattaatgatgacctgcgaagatatcgatgagtgttccttgaacccgttactgtgcgcttttaggtgccataacaccgaagggtcttacttatgtacctgcccagctggttacactctgcgcgaagacggagctatgtgtagggacgtggatgagtgcgcagacgggcagcaggactgtcatgcacgcggaatggagtgtaaaaatctgatcggcacttttgcttgcgtctgccctccaggcatgaggccacttcccggaagtggggagggctgcactgatgacaacgaatgccacgcacagccagatctgtgtgtaaacgggaggtgtgtgaacaccgcaggatcgttccgttgcgattgtgacgaaggttttcagcccagtcctactttgaccgaatgccacgatattcgtcagggaccctgctttgctgaggtgctccagaccatgtgccgatccctgagctccagcagcgaggccgtgacccgggctgagtgctgttgtggcggtggcagagggtggggtccgaggtgcgaactctgcccactcccaggtacgagcgcctacaggaaattatgcccccacgggtcagggtacaccgcagagggccgtgatgtggacgagtgtagaatgctggcgcatctgtgcgcccacggggaatgcatcaactcattggggtccttccggtgtcactgtcaagccggatatacgccagatgcaaccgctaccacctgcctggacatggacgaatgttcccaggtcccgaaaccttgtacctttctgtgcaagaacacaaaggggtccttcttatgcagctgcccgaggggctatttactggaagaagatggtcgcacctgcaaggacctggacgaatgcaccagccggcaacataactgccaattcctctgtgtgaatactgtgggagcctttacctgcaggtgtccacctggattcacccagcatcaccaggcctgcttcgataacgacgagtgctctgcacagccaggcccttgtggcgcacatggacactgtcataacacccccggtagtttccgctgcgagtgtcaccagggcttcacgttagtttcaagcggacatggctgcgaggacgttaacgagtgtgacgggcctcatcggtgccagcatggttgccagaaccagctggggggatatagatgctcatgccctcaggggttcactcagcactcacagtgggcccagtgtgttgatgaaaatgagtgcgctctcagtccccctacctgcggcagcgcttcatgtcggaacaccctggggggatttagatgtgtatgtccgtctgggtttgatttcgaccaagccctcggcggatgccaagaggtggatgagtgtgcaggccgtcggggaccctgttcctactcctgcgcgaacactcccggaggattcctgtgtggctgtccacagggatatttccgtgctggccaaggccactgtgtgagcggattgggcttcagccccggtccacaggacaccccagataaagaagagctcctcagttccgaagcttgctacgagtgtaaaatcaacggactaagtcccagggatagaccccgtagatccgctcatcgagatcaccaggtaaatctggccacacttgactcagaggctctcctgacattgggattgaacctgagccaccttggcagagctgagcggatattggaactgcgcccagccttggaagggctcgagggtcggatcaggtacgttattgtgaggggtaatgagcagggtttcttcagaatgcatcacctgcgcggtgtcagctccttgcagctgggtaggcgacgacctggaccaggcacctatcggcttgaggtcgtatcacatatggcgggtccttggggtgtccagccagagggacagccaggaccctggggtcaggcacttcgcttgaaagtgcagctacagctcctcta

SEQ ID NO: 224138 - DNA, 2619 bp, Artificial Sequence
  derived and/or modified sequence
atgggaatcgtgtggatcttgatgagcgtgttgccttggtggggaagatgcgcagatctcgcgatagcctccacgcagctggttccctcaacggcctctgctagaatggctctgagtagccagctcatgggtaggacagtgtggacccctatgagcgcttcagcactacaggaacctgcataccctgcacttgctaggactagcagggctcccagcgcggctagtgtcccattagcttcccggtgtcgagtaacgacggccctgatttcaacatctgcccagagatccccaacgtctgcgtctctggcaccggtcccaacagcactgggggctagttctgcaagcgctcatctcgccctgtcctccctcacaatggggaccgtggccctcacccacggaagagtctctgctagcccagtgctgcggctgggcagcgcccgttgtccaaaactgtccacccctccaaggcctgctgcagccgctgtacgagggctgggcagagccggagagaccccagccaactgcgtgcctaggcgtgcagttccagggcctgatgattctcgcgaggacgtcaacgagtgcgcggagaaccccggtgtgtgcacaaacggtgtatgtgtcaatacggacggcagcttcagatgtgagtgtccgttcggctattccctggacttcaccggcataaattgcgttgacacggacgaatgctcagtcgggcacccttgcgggcaggggacctgcactaacgtgattggaggcttcgagtgcgcctgcgctgatggtttcgagcctggactgatgatgacctgcgaagacattgacgagtgctccctcaatccactgttgtgcgcgttccggtgccataatactgaggggtcctacctctgcacctgccccgctgggtatacccttagggaagacggcgcaatgtgcagggacgtggacgagtgcgctgacggacagcaggactgtcacgcacgaggcatggaatgtaagaacctcatcggaacattcgcatgcgtttgccctcccggaatgaggcctttgccgggtagtggagagggctgcaccgacgataacgaatgccatgctcaaccggacctttgtgttaacggtcggtgtgttaacaccgcaggtagcttccggtgcgattgtgacgaaggattccagccttctccaaccctcaccgagtgtcacgacatcagacagggcccatgcttcgccgaggtgctgcagacaatgtgccgaagtttgtcgtcctcatctgaggcagtgacgagagccgaatgttgctgcggcggtgggaggggctgggggcctaggtgcgagctctgccccctgcctggcacgtctgcctaccgcaagctctgcccgcatggctcaggatataccgccgagggcagggatgtggacgaatgccggatgctggcccacctatgcgcacacggcgagtgtatcaattcactgggtagcttcagatgccactgccaggccggttatactcccgatgcgaccgcaaccacgtgtctggacatggacgaatgctcacaggtgccgaagccatgtacgtttctctgcaagaataccaagggttctttcctgtgttcctgtcccagaggctatctgctggaggaggatggaagaacatgcaaagatttggatgagtgtaccagtcgccagcacaattgtcagtttctgtgtgttaatacagttggggcatttacttgccggtgcccccctggattcacacaacatcatcaagcgtgtttcgacgtcaacgaatgtgacggtcctcatagatgccagcatggttgtcagaatcagctgggcggttatagatgcagctgtcctcaggggttcacccagcactcacagtgggcacaatgcgttgatgagaacgagtgtgccctaagccctccaacgtgcggatccgcaagctgtcgcaatacgcttggcggatttcggtgcgtgtgtccttctggctttgatttcgaccaggccctaggcggatgccaggaagtggatgagtgcgccggacgaaggggcccttgttcatactcgtgtgccaataccccaggcggtttcctgtgcggttgtccacagggttatttccgggcagggcagggtcattgcgtttccggactcggcttttctcccggaccacaggatacgcctgataaggaggagctgctgtcctcagaagcctgttacgagtgcaagatcaatggcctgagtccacgcgaccggcctcgtaggagcgctcacagagaccatcaggtgaacttggcgaccctcgattcagaagccctgcttacactaggactaaatctgtcccacttaggacgggctgagaggatattggagttgcgacccgctctggaggggctagagggcaggatccgatacgttatcgtcagaggcaacgagcagggattcttccgtatgcatcacctccggggagtgagttctctgcagctgggcaggagaagacccggaccaggaacctaccgtctggaggtagtaagccacatggcaggcccttggggggttcaaccagagggccaaccaggaccctggggccaggccttgcggctgaaagtgcagctgcagctcctttag

SEQ ID NO: 224139 - DNA, 8430 bp, Artificial Sequence
  derived and/or modified sequence
atgactctggagggactatatttagcccgaggccctctggccagactcctgctggcctggagcgccttgctttgcatggctggagggcaaggcagatgggatggagcgctcgaagccgctggacctggcagggtgcgccgacgcggttctcccggtatcctgcagggccctaacgtgtgcggatcaaggttccatgcttactgctgtcctgggtggcgcacattccccggacgaagccaatgtgtggtcccgatctgccgacgtgcgtgtggcgagggcttctgctcacagccaaatctgtgtacctgcgcagatggaaccctcgcccctagctgtggggtcagtagaggtagtggctgtagtgtgagctgcatgaacgggggaacttgccgcggtgctagttgtctgtgccagaagggctatacaggaactgtgtgtggacagccaatctgtgaccgcggatgtcacaacggcggacgatgcattggcccaaacagatgcgcctgcgtgtatggcttcatggggcctcaatgcgaacgtgattatcgcacaggaccctgctttggtcaagtgggtccagagggttgccagcaccagctgactgggttagtctgtactaaggccttgtgctgcgccaccgtgggacgcgcatggggcctaccctgcgagctatgccctgcccagcctcacccatgtcgcaggggcttcatccccaatatacacacaggagcttgccaggatgtggatgagtgtcaggccgtgcctggactgtgtcagggcggatcctgcgtgaacatggtgggctcctttcactgccgctgtcctgtcggtcaccggctgtcagattcctccgctgcatgtgaggactacagggccggagcttgcttttctgtgttgttcggaggtcggtgcgccggagatttagcagggcactacactcggaggcaatgttgctgcgatagaggcaggtgctgggcagccggtcccgtgcccgagctctgtcccccaagaggatccaacgaattccagcagctctgcgctcagcgactaccccttttaccaggtcacccagggctctttccaggcttactaggcttcggatctaacggaatggggcctcctctgggcccagctagactcaatcctcacggctccgacgctcgcggaatcccttccttgggccctggtaactctaacattggcacagccaccctgaaccagacaatagatatctgtcggcactttacaaatctgtgcctgaacggccgatgcttgcctaccccctcctcttaccgctgcgagtgcaatgtcggctatacacaggacgtgcgcggagaatgcattgacgtggatgaatgcacgagtagcccttgccaccatggagactgcgtcaatatccccggaacataccattgtcgctgttaccctggattccaggccacgccaacccgtcaggcctgcgtggatgtggatgaatgtatagtcagcggcggtctttgccacctcggcagatgcgtgaacactgaggggtctttccagtgcgtgtgtaacgctggtttcgagctcagccctgacggtaaaaattgcgtcgaccacaacgagtgcgccacaagtaccatgtgcgtgaatggcgtatgtcttaacgaggacggcagcttttcatgcctctgtaagcctggctttctgcttgcccctggaggccactattgcatggacattgacgagtgccagacacctggcatctgtgtgaatggccactgtacaaacacagaaggcagcttccgctgtcagtgccttgggggattggcagtcggtaccgatggcagagtttgtgtggacacccacgttcgtagtacgtgttatggagctatcgaaaagggtagctgtgccagaccctttcccggtacagtcacaaaatcagagtgctgttgcgccaacccagaccacggatttggcgaaccgtgtcagttatgccccgctaaagacagcgccgaatttcaggcattgtgctcctctggcctgggcattacgaccgatggacgcgatatcaatgaatgcgccctggaccccgaggtgtgtgctaatggagtttgcgagaatctccgtgggagttacaggtgcgtctgtaacctgggctacgaggctggcgctagcgggaaagattgcacagatgtggacgagtgcgctctcaactctctattatgtgacaacgggtggtgccagaactcacctgggtcctactcgtgtagctgcccgccagggtttcacttctggcaggacactgaaatttgtaaggatgtcgatgagtgtttgtcttcaccttgtgtgtcaggcgtatgccgcaatctggctggcagttacacatgcaagtgcgggccagggtcccgattagatccctcgggaaccttctgtttggacagcacaaagggaacgtgttggctcaaaattcaagaaagccggtgtgaggtgaatctgcagggagccagcctcaggtcagaatgctgcgctaccctaggggctgcctggggttctccctgtgagcgctgtgagatagacccagcttgcgcccgtggttttgcaagaatgactggtgtcacttgcgacgacgtcaatgaatgtgaaagctttcctggcgtctgcccaaacggcagatgcgttaacactgccggtagtttccgctgtgagtgcccagaggggttgatgctagatgctagcggcagactgtgtgtcgacgtgcgtcttgaaccctgcttcctacgctgggatgaagacgagtgcggggtaaccttgcccggaaaatatcggatggatgtgtgttgctgctccattggtgcagtgtggggggtcgaatgcgaggcctgtcctgaccccgagtccttggaatttgcctcactgtgccccaggggactcggttttgcgagcagggattttctgtctggcaggcccttctataaggacgtcaacgagtgcaaagtcttcccgggtctgtgtacccacggcacgtgtcggaatactgtaggttcgttccattgcgcgtgtgccggaggctttgccctcgatgcgcaggagcgtaattgcacagatatcgacgagtgcaggatatcaccagatctatgtggtcagggcacttgcgtgaacacgcctgggagtttcgagtgcgagtgcttcccagggtacgaatcagggtttatgctcatgaaaaattgtatggacgttgacgaatgcgccagagatccactgctttgccggggtggcacctgcacaaacactgacggctcatacaaatgccaatgcccccctggtcacgaactgaccgctaaggggactgcctgtgaagatatcgatgaatgcagcctctccgacggcttgtgtccacacggtcaatgcgtgaacgtaattggtgcatttcaatgctcctgtcacgctggctttcagtcaacaccagatcgccagggttgtgtcgatatcaatgagtgtcgtgtgcagaatggtggctgtgatgtgcactgcataaataccgaaggcagctataggtgcagctgcggccaggggtattcactgatgccagacggaagggcatgcgctgacgtcgacgagtgtgaagaaaacccacgggtgtgcgatcaagggcattgcactaatatgcccggtggtcatagatgcctgtgttacgatgggtttatggccaccccggatatgaggacatgtgttgatgtcgatgaatgtgacctgaatcctcatatatgcttgcatggtgattgtgagaataccaaagggtccttcgtttgtcattgccagcttgggtacatggttcgcaagggtgccacgggatgtagcgatgttgacgagtgcgaagtggggggacataactgcgatagccacgccagctgcttgaacataccaggtagcttctcctgccgttgcctcccaggttgggtgggtgacggctttgagtgccacgacctggacgaatgtgttagccaagagcaccggtgctcgcctagaggtgattgcctcaacgtgcccggttcctaccggtgtacctgtcgtcaaggcttcgccggtgatgggttcttctgcgaggaccgcgacgagtgtgcagaaaacgtggacctttgtgataatggccagtgcctcaacgcccctggtggctaccgctgcgaatgcgagatgggcttcgatccaacagaagatcacagagcctgtcaggatgtggacgaatgcgcccagggcaacttgtgtgcatttggatcatgcgagaacctcccaggtatgttcagatgtatttgcaacggagggtacgaactggaccgtggcggagggaattgtactgacatcaatgaatgtgccgatccagtgaattgtataaacggggtgtgcatcaacacaccaggaagctatttatgctcttgcccgcaggacttcgagctgaatcctagcggagtaggttgtgttgatacacgggctggcaattgctttctggagacacatgatcggggagattccgggattagctgctccgctgaaattggcgtgggcgtgactcgtgcttcttgctgttgtagcctcggacgcgcatgggggaatccttgtgagctgtgcccgatggccaatacgaccgagtatcggacactctgtccagggggtgagggcttccagcccaaccgtattaccgttatcctggaggatatagacgaatgccaggagctcccgggtctgtgccaggggggtgactgcgtaaatacctttggttctttccagtgcgagtgccccccagggtatcacctttccgagcacacccggatctgtgaggatatcgatgaatgtagcactcatagtgggatctgtggccctggaacctgttacaataccctgggcaactatacctgcgtgtgcccagcggagtacctgcaggtgaatggcggaaacaactgtatggacatgcgaaaatccgtgtgctttcgtcactacaacggtacctgtcagaacgagctcgcttttaatgtcaccagaaaaatgtgctgctgctcgtataatataggacaggcatggaatagaccttgtgaagcctgtcctacacctatttctcccgattatcagattctctgcggcaatcaagccccagggttcctgacagacattcatacaggcaagccactcgatatagatgagtgcggtgagataccggctatatgtgccaacggtatatgcattaaccaaatcggcagcttccgctgcgaatgtcccgctggcttcaactataattccattttgttggcctgcgaggacgttgatgagtgtggtagccgagaaagtccttgccagcagaacgctgactgcataaacatacctggctcttatcggtgcaagtgcacacggggatacaagctatctccgggaggagcttgtgtggggaggaacgagtgtcgggaaatcccgaatgtgtgcagccacggagactgcatggataccgaaggctcttacatgtgcctctgtcatcggggtttccaggcgtcagccgaccaaaccctgtgcatggatatcgacgagtgcgatcggcagccttgcgggaacgggacctgtaaaaacataataggctcatataattgcctctgttttcctggttttgtggtgacacacaacggtgactgcgtcgacttcgacgaatgtactacgctcgttggccaggtgtgtagatttggccattgcttaaacacagccggatcctttcactgcttgtgtcaggacggattcgaactaacagcggacgggaaaaactgcgttgataccaatgaatgtttaagcctggctggtacatgtctgcccggtacctgccaaaacttggaaggttcatttcgatgcatctgtccccctggattccaggttcagtctgatcactgcattgacatcgatgagtgctcagaggagccgaatctttgtctgtttggaacgtgtacgaattctccgggatccttccagtgcctgtgtccacctggttttgtgttgtccgacaacgggcatagatgttttgacaccagacagagcttttgttttacaagatttgaagctggaaagtgtagcgtacccaaggccttcaacacgaccaaaacaagatgttgctgtagcaagagacccggtgaggggtggggggacccttgtgagctgtgtcctcaggaggggtctgctgcgtttcaggagctgtgcccttttggacacggtgccgtgccagggcctgatgactctagggaagacgttaatgagtgcgccgagaatccaggcgtgtgtaccaacggcgtgtgcgtaaatacagacggaagtttccggtgcgaatgccctttcggctacagcctagatttcactgggatcaactgcgtcgacaccgacgaatgcagtgtagggcatccctgcggtcaggggacctgcaccaatgtaattggaggattcgaatgcgcatgcgccgatggattcgagcctgggctgatgatgacctgcgaagatatcgacgagtgttctcttaatccccttttgtgcgctttccgatgccacaacacagaaggatcctacttatgcacatgtcccgcaggctacacccttagggaggacggcgcaatgtgcagagacgtggacgaatgcgccgacggccagcaggactgtcacgcaagaggcatggaatgtaaaaatctgatcgggactttcgcctgtgtgtgcccaccaggcatgagacctttgcctgggtcaggggagggatgcacagatgataacgagtgtcatgctcaacccgatctgtgcgtgaacggccgttgcgtaaacacagctggctcttttcggtgcgattgcgacgaaggcttccagccttcaccgaccctcaccgaatgtcacgacatcaggcagggcccttgctttgccgaggttctgcagactatgtgtcgcagcctgtcaagtagcagcgaggccgttacgagggcagaatgctgttgtggcggtggcagaggttggggtccccgttgtgagctctgtcctcttcctggcacgtcagcctaccggaagctttgcccccatggctccggctacacggccgaggggagagatgtggatgagtgcagaatgctggcacacctttgcgcccatggagagtgcatcaactcactcggatcctttcgctgccattgccaggctggttacacaccagacgcgacagcaacaacttgcctggacatggatgagtgttcacaagtgcccaaaccatgtacgttcctgtgtaaaaataccaaggggtcatttctctgttcctgccctaggggatatctactggaggaagatgggagaacttgtaaagacctcgacgagtgcacatctaggcagcacaattgtcagttcctttgcgtgaataccgtaggcgcattcacatgtcggtgtcctccaggcttcactcagcatcaccaggcttgtttcgacaacgacgaatgtagtgcccaacctggcccatgtggtgcccacgggcattgccacaacacccctggaagtttccgctgcgagtgtcaccagggcttcactcttgtgagcagcggccatggatgcgaggacgtgaacgaatgtgatggcccacaccgatgtcagcacgggtgtcagaatcaacttgggggttacaggtgttcctgcccgcagggcttcactcagcacagccaatgggctcagtgtgttgatgaaaatgagtgtgcgctgtcaccgcctacatgtggatcagcttcttgcagaaatacattgggcggattccgatgtgtctgtccatccggattcgactttgaccaggcattgggcggatgtcaggaagtggacgagtgcgccggacggaggggaccgtgttcttacagttgcgcaaatactcctggcggtttcctctgtggctgtccacaagggtattttagagcgggtcaaggccactgcgttagcggacttggtttctcccccggaccgcaagacacccctgataaagaggagctgctcagctcagaggcatgttatgaatgcaagatcaatgggctaagtccacgcgataggccccgacggagcgcacacagggatcatcaagtcaatcttgccacattggactctgaggccttgctgaccctgggccttaatctgtcccatcttggcagggccgagagaatactcgagctcaggcccgctctcgaaggcctcgaaggacggattcgctatgtcattgtgagagggaacgaacagggctttttccggatgcatcacctgcgtggtgtgtcttctctacagctgggccgacgacgtcccggacccggaacctataggcttgaggtggtgagccacatggcaggtccttggggtgtacagcccgaagggcagcccggaccgtggggccaggccttacggcttaaggttcaactgcagctcctgtac

SEQ ID NO: 224140 - DNA, 8430 bp, Artificial Sequence
  derived and/or modified sequence
atgacactcgagggattgtatctcgcaagagggcctctggcacggttgctgctcgcctggtccgcactgctatgcatggccggcggacaaggacgctgggatggggcccttgaggccgctggacccggacgggtcaggagaagaggaagtcctggcattctccaagggcctaatgtgtgtggtagccgttttcacgcctactgctgtcccgggtggagaacgtttccagggagaagtcagtgcgtggtgcccatctgtaggcgggcctgtggagaggggttctgttcgcagccaaacctgtgtacctgtgccgacggaaccctagcaccctcatgtggagtcagccggggttctggctgcagtgtttcttgcatgaatggcggcacgtgtcggggggcgagctgcctgtgtcagaaagggtacacaggtacagtgtgtggccaacccatctgcgatcgtggctgccacaacggggggcgctgcatcggccccaatcgatgcgcctgtgtctacggctttatgggccctcaatgcgaacgggattaccgtacaggtccttgttttggccaggtggggccggaagggtgtcagcaccagctcacaggccttgtttgtacgaaggcactgtgttgcgcgacagttggaagagcctggggcctgccatgcgaactctgtcctgcccagcctcacccatgcagaagggggttcattccgaatattcacacgggagcctgccaggatgttgacgagtgtcaggctgtgcctgggctgtgtcagggcgggtcatgtgtgaatatggtgggctcctttcattgtagatgtccagtcggccatcgtctgagtgactctagcgccgcttgtgaggactatcgggcaggggcctgcttctcagtactgtttgggggccgatgcgccggagacctggcgggacattatacgcgcaggcagtgctgttgcgatcgcggtcggtgctgggcggctggacctgtccccgaattgtgcccgcccagaggatctaatgagttccagcagctctgcgcgcagagactgcccctacttcccggacatccgggcctgtttcccggccttctggggttcggatctaatggtatgggcccaccattaggccctgcccggctgaacccacacggaagcgatgcgcgtggcattccaagcctgggcccaggcaactccaatatcggcaccgcaacgctgaatcaaactatcgatatctgcaggcattttacaaatctatgtctgaacggtcgctgtcttcccacaccctctagttatcgttgtgaatgtaacgtaggctatacccaggatgtccgcggagaatgtatcgatgtggatgagtgtaccagcagtccctgccatcacggtgactgtgtcaatattcccggaacgtaccactgtcgatgctatcctggctttcaagctacccctacaagacaggcctgcgtcgatgtggatgaatgcattgtgagcggaggactctgtcacctgggccgatgcgtcaacactgagggctcatttcagtgcgtttgcaatgctggcttcgagctgtcccccgacgggaaaaattgtgttgatcataacgaatgcgcaacgtccaccatgtgtgttaatggtgtttgtctgaacgaggatggcagtttcagctgtctgtgtaagcctggtttcctgcttgctccgggaggccactattgtatggatatcgacgagtgtcagacacctggaatctgtgttaacggacactgtacgaatactgagggtagctttcgctgccagtgtctgggcggactggctgtgggcaccgatggccgagtttgtgtcgacactcatgtccgaagcacttgctacggtgcaattgaaaaaggatcctgtgctagacctttccctggcaccgtcactaaaagtgaatgttgttgcgcaaacccagatcacggtttcggagagccctgtcagctctgtccggccaaagatagtgcggagtttcaagcactctgctcctcaggtctcggtataactactgatgggcgggatataaacgagtgcgccctggaccctgaggtctgtgcaaacggcgtttgtgaaaaccttcgtgggagttaccgctgcgtgtgtaacctgggctacgaggccggtgcttccggaaaggattgcactgacgttgatgagtgtgctctgaacagtttactctgtgataatggatggtgtcaaaattctcccggatcctactcttgctcgtgccctcctgggttccatttctggcaggacacagagatttgtaaagatgtggacgagtgcctttcaagtccgtgtgtttccggagtatgtcgcaacctggctggctcttacacctgcaaatgcggccccggatctcgcctggacccctcgggcaccttttgcttggacagcactaaagggacgtgctggcttaaaattcaggaatcccggtgcgaggtgaatcttcaaggagcttccctgcggagcgaatgttgcgcaactttgggagctgcctgggggagcccgtgcgagcgatgtgagattgacccagcgtgtgcccgtgggtttgcaaggatgaccggagttacctgcgacgacgttaatgagtgcgagtcgttccccggggtgtgtccaaacggtcggtgcgtcaacacagccggatcttttaggtgcgaatgccccgagggactcatgttggacgcaagcgggcgcctgtgtgtggatgtacgcctggaaccctgttttctgcggtgggacgaagatgaatgtggagttacactacctggcaaatataggatggatgtctgttgctgctctatcggggccgtttggggcgtggagtgtgaagcctgtccagatcccgagtctttagagttcgcatcactgtgccctcgggggctgggctttgcgagtcgggatttcctgtccgggcggcccttctacaaagatgtaaacgagtgcaaggtgttccccggcctttgcacacacggaacatgccgcaatacagtgggatcctttcattgtgcttgcgccgggggattcgctctggatgcacaagaacggaattgtactgatattgatgaatgtaggatatcaccagatctgtgtggacaaggcacatgtgtaaacacccccggcagtttcgaatgcgagtgttttcctggctatgaaagcggatttatgctgatgaaaaattgcatggatgtagatgaatgtgccagagatcctctcctctgccggggcgggacatgcacaaatactgacgggagctataaatgtcaatgccctccaggccacgaattgaccgcaaaggggacagcctgcgaggatatcgacgaatgctcgctgtctgacggcttatgtccgcacggccaatgcgttaatgttatcggggccttccagtgcagttgtcatgccggctttcagtctacaccggatagacagggctgcgtggacattaatgagtgcagagtacagaatggcggttgcgatgtccattgcatcaatactgaaggatcttaccgttgttcttgcggccagggctattcactgatgcctgacggacgggcctgtgctgatgtggatgagtgtgaagaaaacccccgggtctgcgaccaagggcattgcaccaatatgccagggggtcatagatgcttgtgttacgacggcttcatggcgacacccgatatgagaacctgtgttgacgttgacgagtgcgacctgaatcctcatatttgtttgcatggtgactgcgaaaataccaaagggtctttcgtgtgccactgtcagttgggctatatggttaggaagggtgctactggctgtagtgacgtggacgagtgcgaggtcgggggacacaattgtgatagccatgcctcctgtctgaatatccccggatccttttcatgccgatgtctcccagggtgggtgggtgatggatttgaatgccatgatctagatgaatgtgtaagtcaggaacaccggtgctctccccgcggggattgcctcaatgttccaggttcttatagatgcacctgccgtcagggcttcgccggtgacggattcttttgtgaagacagagatgagtgtgcagagaacgttgatttgtgtgataatggtcaatgtctcaatgcccctggtggctacaggtgcgaatgtgaaatgggattcgatccaaccgaagatcaccgtgcctgtcaggatgttgacgagtgcgctcagggaaacctatgcgcgttcggaagctgtgagaacctgcccggtatgttcagatgcatctgcaatggcggttacgagttagaccggggcgggggaaattgcaccgacataaacgagtgtgcggacccagtgaactgtattaatggggtgtgtataaacacgcccggaagttacctgtgttcctgtccacaggactttgaactcaacccgtcaggcgtagggtgtgttgatacccgggctggtaattgtttcctcgagacccatgatagaggagactctgggatttcttgtagtgcagagatcggcgtcggcgtgaccagggcttcatgttgttgttcacttgggcgcgcctggggaaatccctgcgagctgtgccctatggccaacacaactgaatataggacactctgtccgggaggggagggctttcagcctaaccggattaccgtgatccttgaggacatcgatgagtgccaagaacttcctggactttgccaaggcggggactgtgtcaatacatttggaagcttccagtgcgaatgccctccgggataccatctgagcgagcacacacggatttgcgaggatatagatgagtgctcaactcactcaggaatttgtggaccaggaacttgctacaacacactgggcaactatacctgtgtctgcccagcagagtacctgcaggtcaatgggggaaacaattgcatggatatgagaaagagcgtatgttttagacactataacggaacctgccagaacgagttggcctttaatgtgacgagaaagatgtgttgctgctcttacaacatagggcaggcttggaacagaccctgcgaagcatgccctacaccaatctcccccgactaccagatcctttgcgggaaccaagcccccggctttcttacagacattcacaccggtaaacccctggacattgacgaatgtggggaaatcccggcaatttgcgccaatgggatctgcatcaaccaaataggttccttccggtgtgagtgccctgctggctttaactacaacagcattcttttggcttgcgaagatgtggacgaatgcggcagtagagagtccccctgccagcaaaacgctgattgtattaatattcccggaagctatcggtgcaagtgcacacgcggatataagctttccccgggtggggcctgcgtcggccgaaatgagtgtcgcgaaatccccaatgtatgcagccatggcgactgcatggatacagaagggtcctacatgtgcctgtgccatcgaggatttcaggcgtccgctgaccagaccctttgcatggacatcgatgagtgcgatcgacagccttgtggcaacggtacttgcaagaacatcatcggttcctacaattgcctttgtttcccgggcttcgtagtcactcataatggggactgcgttgactttgacgaatgtacgacgctcgttgggcaggtgtgccgcttcggacactgcctgaatacagctggatcttttcactgcctgtgtcaagatggcttcgaactgacagctgatggaaagaactgtgtcgacacaaatgaatgtctaagtctggccggaacatgcttgcctgggacttgccagaacttggagggatccttccggtgcatatgtccgcccggctttcaggtccagtcagatcactgcatcgatattgatgaatgcagcgaggagcccaatctgtgtctgtttggaacctgtacaaactcccccggaagtttccagtgtttgtgccctcccggattcgtgctgtccgataatggccatagatgttttgacacccgccagtcgttttgtttcacccgcttcgaagcgggtaagtgtagcgtgccaaaggccttcaacacaactaagactaggtgctgttgctcaaagcgccccggggaaggctggggggacccctgcgaactatgtccgcaggaagggtccgcagcattccaggagttgtgcccattcggtcacggggctgtgcccggacccgacgattctagggaagacgttaatgaatgcgccgaaaatccaggggtttgtacaaatggagtttgcgtcaacacagacggatcctttcggtgtgaatgtccttttgggtacagcttggatttcactggaatcaactgtgttgacactgacgaatgctcagttggacacccctgcgggcagggcacctgtacgaatgtgatcggggggttcgaatgtgcttgcgctgatggcttcgagccaggcttgatgatgacttgcgaggacatagacgaatgctctttaaacccattgctgtgcgcttttaggtgccataacacagagggcagctacttatgtacctgccccgccgggtacaccctcagagaagatggggctatgtgcagagacgttgatgaatgcgctgacggacagcaggactgtcacgctcgcggaatggaatgtaagaatctgattggtacttttgcttgcgtgtgcccgccagggatgcgcccccttcccggttcaggtgagggctgcacagatgacaatgagtgtcacgcacagcctgacttgtgtgttaatggtcggtgcgtgaataccgcgggaagtttcaggtgtgactgtgacgagggtttccaacctagcccgacgctaacagaatgccacgatattcgacaaggaccctgcttcgcggaggtgctgcagaccatgtgtcgaagcctgtcaagctcctccgaagccgttacccgcgctgagtgctgttgcggcggtggtaggggatggggccctaggtgcgaattgtgcccactgcctgggacttcagcatacagaaaactctgcccccatggttctgggtacacagctgagggaagagatgtagatgaatgcagaatgttggcacacttgtgtgcgcatggagaatgtatcaacagcttggggtcctttagatgtcactgccaggcaggttacactcccgatgcaaccgccacgacttgcctggatatggatgaatgttcccaggtccccaagccctgtaccttcttatgcaaaaatacaaagggcagcttcctttgctcttgcccccgcggatatctcctcgaggaagacggtagaacctgcaaagacctggatgagtgcaccagccgacagcataattgtcagttcttgtgtgttaacacggtgggtgccttcacctgccggtgcccacccggcttcacacagcaccaccaggcgtgttttgataacgatgaatgctctgcccagccaggaccgtgtggcgcccacgggcactgccacaatacgccaggaagctttcgttgcgaatgccaccaaggctttaccctggtctctagtggtcatggttgtgaagatgtcaatgaatgtgatgggccccaccggtgccagcacgggtgtcagaaccagcttggtggatatagatgctcttgcccccaaggtttcacacagcatagccagtgggcccagtgcgttgacgagaatgagtgcgctctgtccccacctacatgcggctctgcatcctgtcgtaataccctgggcggctttaggtgtgtttgtccatccgggtttgacttcgatcaggctctgggaggatgtcaggaggtggacgaatgcgcgggtcggcggggtccatgtagctactcttgcgccaatacccccgggggctttctgtgtggctgtccccaaggatatttcagagccgggcaggggcactgtgtgtcaggacttggattcagccctggcccacaggatactcccgacaaggaggaactgctgtcatccgaggcatgctatgaatgtaagatcaatgggctgagtccgcgggatcggccacgacgcagcgcccacagagaccaccaagtgaatctggcgacactggacagtgaagctctcctgacacttggcttaaacctttcgcacttggggcgcgccgaaagaattttagagctgcgtccagcactcgaggggctggagggccgcatccgatacgttattgtgcgggggaacgaacaagggttcttcagaatgcaccacctgcgaggagtgtcatcattgcaactggggagacgtagacctggccctggtacataccggttggaagtcgtatcacacatggcaggaccttggggcgttcagcccgaggggcagccaggtccctgggggcaggcattacggctgaaagtgcagttgcagcttctgtag

SEQ ID NO: 224141 - DNA, 2619 bp, Artificial Sequence
  derived and/or modified sequence
atgggtatcgtttggattctgatgtcagtattgccatggtggggtcggtgtgctgatctggcaattgcttctactcagctggtgccctcaaccgcatctgctcgtatggcactgtcttctcagctcatgggtcgcacagtctggacacctatgtccgcatccgcccttcaggaacccgcttatccagctttggctagaacctcaagggctccaagcgctgcatccgttcctctggccagccgctgcagggtcacaacagccctgatctctaccagtgcccagcgctcccccacatcagcttccctcgcacctgtacctactgccctaggcgcatcctccgcctcagcccatttggccttaagttcactcactatgggaacggtggcactgacccacgggagagtcagcgcatccccagtactacggttggggtccgcccggtgccccaagttaagcacacctcctaggcctgccgccgccgcagtgcgagggctgggccgagccggcgagacacctgccaactgcgtgccaagaagagctgtacccggccccgatgattcaagagaagacgtgaacgagtgtgcagagaaccctggggtgtgtacgaatggggtgtgtgtgaacaccgatggctccttccgctgtgaatgcccttttgggtattctctggacttcacagggatcaactgtgtcgataccgacgagtgttccgttggccacccttgtgggcaaggcacgtgtaccaatgttattgggggatttgagtgtgcgtgtgccgatggctttgaacccggcctgatgatgacatgcgaggatatcgatgagtgctccctgaaccctttgttatgcgctttccggtgccataataccgagggaagttatctctgtacgtgccccgcgggctacactctccgagaggacggcgcgatgtgccgagatgtggacgagtgcgccgacggtcagcaagactgccacgctcgcggaatggaatgtaagaaccttatcggaactttcgcctgtgtttgtcctccgggcatgaggccccttccaggcagtggtgaaggatgcaccgacgacaatgagtgccacgcccagcccgacctttgtgtgaacggccggtgcgtcaatacagctggctcctttagatgcgattgtgatgaaggcttccaaccttccccaaccttaaccgaatgccatgacatccggcagggaccttgttttgccgaggtgctgcagaccatgtgccgatctttgtcctcaagcagcgaggctgtcacaagagcagagtgctgctgcggtggggggcgaggctgggggccccggtgcgagttgtgcccactcccaggtacaagcgcgtatcgcaaactgtgccctcatggctctgggtatacagcggaagggcgcgacgtcgacgagtgcaggatgttagcccacctctgtgcccacggggagtgcatcaattcactgggtagttttaggtgtcattgccaggccggatacaccccagacgccactgcgaccacctgtctggacatggatgagtgtagccaggttcccaagccatgcacgttcctgtgcaaaaatactaaggggtctttcttgtgttcctgcccacggggctaccttttggaggaagacggccgtacttgcaaagacctggacgagtgtacctccaggcagcacaactgccagttcttatgcgtaaatacagtgggagcgttcacgtgtagatgccctccaggtttcacccagcatcatcaagcttgctttgatgtcaatgaatgtgacggccctcaccggtgccagcatggatgccagaaccagttgggaggatacagatgctcctgcccccaaggatttacacaacattcccagtgggctcagtgtgttgacgaaaacgaatgcgccttgtcgccgccaacctgtggctcagcttcatgtcgcaacactttaggcgggtttaggtgcgtatgtccatccggattcgacttcgaccaggcactgggaggatgccaggaagtcgacgaatgtgccggacggagaggcccctgttcgtatagctgcgctaatacgcctggtggatttttgtgtggttgccctcagggctacttcagagctggccaggggcactgcgtgagtggcctcggatttagtcccggcccacaggacaccccagataaagaggagctgctttcttccgaggcttgctacgagtgcaagataaatggtcttagcccccgggacagaccacgccgatcggcccacagagatcaccaagtcaacctggcaacactggacagtgaggccctcctgacgctgggtctcaacctctcgcacctcggcagggccgaacgtattctagaactgagacccgctctggaagggcttgaggggcgaattcgctatgtgatcgtgcgcggtaatgagcagggcttttttagaatgcaccacttgcgtggagtctcttctctgcaacttgggcgcagacggcctggaccagggacgtatcggctggaggtcgtttctcacatggccggcccgtggggagtacaaccagagggacagcccgggccgtggggtcaggccctgagactaaaagtccagcttcaactactctag

SEQ ID NO: 224142 - DNA, 8430 bp, Artificial Sequence
  derived and/or modified sequence
atgactcttgaggggctctaccttgcccgtggaccactggccaggcttctgctcgcctggagtgctctgctgtgcatggccggaggccagggtcgctgggacggcgccttggaggcagccggcccaggaagagtgaggcgacgcggaagtccaggcatccttcaaggacctaacgtgtgcggctctcgcttccacgcctattgctgccctgggtggagaacattccctggacgttcccagtgtgtggtgcctatctgtcgtagagcttgcggagagggattctgcagccagcccaatctctgtacctgtgcggacggcaccctggctccatcatgtggtgtgtctcgcggaagcggctgctccgtgtcctgcatgaacggtgggacctgcaggggagcctcttgcctgtgtcagaagggttacactggcacagtgtgcggccagcctatttgtgaccgaggctgtcacaatggcgggaggtgcatcggaccgaatagatgcgcctgtgtctatggattcatgggtcctcagtgcgagagggattatcgaactggcccgtgcttcggacaagtaggacccgagggttgccagcaccagctaacaggcctggtctgcactaaagccctgtgctgcgcaaccgtgggcagagcctggggccttccctgtgaactgtgtcctgctcaaccccatccttgtcggagaggctttattccaaacatccacaccggggcatgtcaggacgtggatgagtgccaggctgtgcccgggctgtgccaagggggatcatgcgttaacatggtgggttccttccactgcagatgccccgtgggccatcggttgtcagattcgagcgccgcctgtgaagattatcgcgccggagcgtgtttttccgtgctctttggcggccggtgtgccggcgatcttgccggacactatacacgcaggcagtgttgctgcgatcgcggtcgctgttgggccgccggtccagtccctgaactgtgcccgccacgtgggtctaacgaattccagcagctctgcgcccagcgcttgccgctgctcccgggccatccaggccttttccctggtctcctgggatttgggtccaatgggatgggaccccccctggggcctgctcggttgaacccccatggcagcgatgctaggggcattccgagcctcggtccaggtaattccaacattgggactgccaccttgaatcagaccattgacatctgtcggcacttcacaaatctgtgtttgaatgggcgttgtcttcccacaccaagcagctatcggtgcgaatgcaatgttggatatactcaggacgtccgcggtgagtgcattgacgtggacgagtgcacgtcatccccctgccaccacggagactgcgtgaacattccaggcacctatcattgtcggtgctatcccggattccaagcgactcctacaagacaggcgtgcgtggacgtagatgaatgcatagtctctggtggcctgtgccatctaggaagatgtgtgaatacagagggatcattccaatgtgtctgcaacgccggattcgagttatctccggacggcaagaattgtgtggaccataatgagtgtgcaacaagcaccatgtgcgttaatggtgtatgcctgaatgaggacggcagcttctcctgtctgtgcaaacctgggttcctcctggcacccggaggacactactgcatggatattgatgaatgtcagacaccaggaatttgtgttaacggccactgtaccaacaccgagggctcctttcgatgtcagtgtctcggcggacttgccgtggggacggatggtcgggtttgcgtggacacccacgtgagatctacatgctacggtgccatcgagaaaggcagctgtgcacggccttttcccggaactgttaccaagtcagagtgttgttgcgctaatcctgaccatggatttggagaaccttgccagctctgtcctgcaaaagactctgctgagtttcaggcactctgtagttccggcttggggatcactaccgatggacgtgatatcaatgaatgcgccctagatcccgaggtgtgtgccaatggggtgtgtgagaacttaagagggtcttatcgatgcgtatgcaacttgggctacgaggccggagcctccggcaaggactgtaccgacgtggacgagtgcgccctgaactccctcctgtgtgacaatgggtggtgtcagaactcacctggtagctattcatgcagctgcccaccgggttttcatttttggcaggatacagagatttgcaaggatgttgacgagtgccttagctccccatgtgtgtctggggtgtgtcgaaatcttgccggttcttacacttgcaaatgtggcccaggctcccgactcgaccctagcggcacattttgcttggatagtacaaagggcacttgttggctgaagatccaggagagccgatgtgaggtcaatctgcagggcgcatccctgaggtcagaatgttgtgctacacttggtgctgcctggggatccccatgcgaacgttgcgaaattgatccagcatgcgcccgtgggttcgccagaatgaccggagttacctgtgacgacgtgaacgaatgtgaatccttccctggcgtctgtcctaatgggcgatgtgtaaacaccgcaggctccttcagatgcgaatgccctgagggactgatgttggatgcctctgggcggctttgtgtcgacgtccgcctcgagccttgctttctgaggtgggacgaggatgaatgtggggtgaccctgccaggcaaataccgaatggacgtctgttgttgcagcattggcgccgtgtggggggtggaatgcgaggcctgtcccgacccggagtccctcgagtttgcctcactgtgtccaagaggactggggtttgctagccgggatttcctgagcgggagacccttttataaggacgttaacgaatgcaaggtctttcccggcctgtgtactcatgggacctgtaggaatacagtcgggtcatttcactgtgcctgcgccggcggcttcgccctggacgctcaggagcggaattgtacagacatcgacgagtgcaggattagcccagacctttgcgggcagggaacctgcgtgaatacacctggctcattcgagtgcgagtgtttccccgggtacgagagtggtttcatgctgatgaagaactgtatggatgttgacgagtgcgctagagaccccttattatgtcgcggcggtacatgcacgaatacagacggcagttataagtgccagtgcccacctggccacgagcttaccgccaaaggcaccgcttgcgaagatatcgatgagtgttcactgtcggatggcctgtgcccacatggacaatgcgtaaatgtaatcggcgccttccagtgtagctgtcacgctgggttccagagcaccccagatcgacagggctgtgtggacataaacgaatgtcgggtccaaaatgggggatgtgacgtccactgtataaacacagaagggtcttaccggtgctcatgcggccaaggctactctctcatgcccgatggaagagcctgtgcagacgtggacgagtgtgaggaaaacccacgcgtgtgcgaccaggggcattgcaccaatatgcctggcgggcacagatgcctgtgttacgacggctttatggcgacgccagacatgcgaacttgtgtggacgtggatgagtgcgatctcaatccccacatctgcctgcacggcgactgtgagaacacaaagggatccttcgtatgtcattgccaattaggctatatggtccgtaagggcgcaacaggttgctctgacgtcgacgagtgtgaagtggggggccataattgtgattcacacgcctcatgtttaaatattcccggctcattctcgtgcaggtgcttacccgggtgggtcggtgatggtttcgagtgtcacgacctcgatgaatgtgttagtcaggagcatagatgttcccccaggggagactgtctgaacgtaccgggtagctataggtgcacatgcaggcagggttttgctggcgacggcttcttttgcgaagatcgagatgagtgtgccgaaaacgtagacctgtgcgacaacggacagtgcctgaatgctcccggaggctaccggtgcgaatgcgaaatgggcttcgatcccacagaggaccatagagcgtgccaggatgtagacgagtgtgcacaaggcaatctctgcgccttcggatcttgtgagaatcttcctggcatgtttaggtgtatatgcaatggggggtacgagcttgacagaggaggagggaactgtaccgacatcaatgagtgcgctgaccctgtgaactgtattaatggagtgtgcatcaatactcctggtagttatctatgttcttgcccccaagactttgaactgaacccaagtggcgtgggttgtgtggatacacgagctggcaattgttttctggagacccatgacaggggagactccggcatctcctgcagtgccgaaataggcgtcggggtaactagggccagctgttgctgttcactgggaagagcatggggcaatccttgcgaactatgccctatggccaacaccaccgaatatcgtactctgtgcccaggtggggagggctttcagccaaatcgaatcaccgttattctggaagatattgatgagtgccaagagctgccaggtctgtgccagggcggtgattgtgtaaacacctttgggtccttccaatgtgaatgtccaccaggctatcatttgtctgagcatacacggatttgcgaggacatcgacgagtgttccacccactccggtatctgcggccctggaacttgttacaatactcttgggaattacacctgcgtgtgccctgctgaatatcttcaagtcaacggagggaacaattgcatggacatgcgaaagagtgtgtgttttaggcattacaatggcacttgtcagaacgaactggctttcaacgtgacccgaaaaatgtgttgttgctcatacaacattgggcaggcttggaaccgtccctgtgaagcctgccccacccctataagtcctgattatcagatactctgtggaaatcaagcccctggtttcctcaccgacatacacacaggcaagccattggatatagacgagtgtggggaaattccagccatttgcgcaaatggcatctgcattaaccagatcgggtcttttcggtgtgagtgccccgctgggttcaattacaattcaattctactcgcgtgcgaggacgttgacgagtgcggctccagagaatctccgtgtcaacagaacgccgattgcattaatatccctggcagctatcggtgcaagtgtactaggggctacaagctctcaccaggcggcgcttgtgtgggccgcaatgaatgccgtgaaattcccaacgtgtgctctcacggcgactgtatggacactgaagggagctacatgtgcttatgtcaccgcggattccaggccagtgctgatcagaccctttgtatggacattgatgagtgtgaccgacagccatgtggcaatggaacatgtaagaacattatcggaagctataactgtctgtgcttccctggctttgttgtaacccacaacggggactgcgtggactttgatgagtgtactacactcgtaggtcaagtgtgccgtttcggtcactgcctgaataccgctggttcatttcactgtctgtgtcaggatggattcgaactcaccgccgacgggaaaaactgcgtcgacacaaatgagtgcctgagcctcgccgggacatgtctccctgggacttgtcaaaacctggagggttcatttaggtgtatttgcccacccgggttccaggtgcaatccgatcactgcattgatatagatgaatgttctgaagagcctaatttgtgtctctttggcacgtgcacaaactctcccggctccttccagtgtctgtgccctccggggtttgtgctctctgacaatggccatagatgtttcgataccagacagtctttctgtttcactaggttcgaagccggcaaatgctcagtgcccaaagctttcaacacaaccaaaacaagatgttgttgctccaaacgtcctggagagggctggggcgacccctgtgagctctgtccccaagagggttctgccgcctttcaggagctatgtccttttgggcacggagccgtccccggccctgacgattctcgagaagacgttaatgaatgtgccgaaaacccaggtgtctgtactaacggggtttgtgtgaatacagacggctctttccgatgtgagtgcccattcggctacagcttggatttcaccggcattaattgtgtggatacagacgagtgctcggtggggcatccctgcggacaggggacctgtaccaacgtcatcggaggatttgaatgtgcctgtgccgacgggtttgaacctggtctcatgatgacctgtgaagacatagacgaatgctccctaaatccattgctgtgtgcatttcgttgccacaacactgagggctcctatctgtgcacatgccctgctggctacacccttcgcgaagacggagctatgtgtcgggacgtagatgagtgcgccgacgggcagcaggactgccacgcgcggggaatggagtgtaagaacctgattgggactttcgcctgtgtctgcccaccagggatgcggcccctgcctggctcaggcgaaggttgcacagacgataatgaatgccacgcacaaccagatctctgcgtgaatgggaggtgcgtgaacactgccggaagcttcaggtgtgattgcgatgaaggtttccagccatccccgacactcactgagtgccacgatattcgtcagggaccttgtttcgcggaagttctgcaaacaatgtgcagaagtctgtcgagtagtagcgaagctgtaacccgcgccgagtgctgttgcggaggcggaagaggctggggaccaaggtgtgagctctgcccattgcctgggacttccgcctacagaaaattatgcccacatgggtcaggctatactgctgagggtcgtgacgtggacgaatgccgcatgctggcacatttgtgtgcacatggggagtgtatcaacagcctgggctcgtttcgctgtcactgccaggccggctataccccagacgcaactgcaacaacatgtttggatatggacgaatgcagccaggtgcccaagccgtgcacctttctatgcaagaatacaaaaggctcatttttatgtagctgtccgagaggttatttgttagaagaagatggaagaacatgcaaagacttggacgagtgcactagcaggcaacataattgtcagttcctttgcgtcaacacagtaggggcttttacttgcagatgcccccccggattcacccaacatcatcaggcttgctttgataatgacgaatgtagtgctcaacctgggccctgtggtgcacacggccactgccataacacaccggggtctttccggtgcgagtgccaccagggcttcacattggtgtcctctggacatggatgcgaagatgtgaacgagtgcgacggacctcaccgatgtcagcatggctgtcaaaaccaactgggtgggtaccggtgcagctgtcctcagggctttacacagcattctcagtgggcgcagtgtgtggatgagaacgagtgcgcactgtctcctcctacatgtggatccgctagttgtagaaatacccttggcggtttccgctgcgtgtgccccagcggattcgatttcgaccaggctctgggtggttgtcaggaagttgacgagtgtgcaggccgtcgtggcccctgttcctatagttgcgctaacacccctggaggtttcctttgtggctgcccccagggctatttccgggctggccaggggcattgtgtctccggactgggtttctcacctggaccacaagacacgcccgacaaagaagaactcctgtcctcagaggcctgctacgagtgcaaaatcaacggactgtccccgcgtgacagaccgaggcgcagcgctcaccgagaccaccaggtgaatctggccaccctcgacagtgaagctctgctcaccctcgggttgaacctcagccacctggggagagcagagagaattctcgagctccgtcctgcactggaaggtctggaggggagaatccggtacgtgatcgtgcgcggaaatgagcaagggttttttcgcatgcaccacttgaggggcgtaagcagtcttcagctcgggcgacgcaggccaggaccgggaacttatagactcgaggttgtcagtcacatggctggcccatggggggtacagcccgagggacaacccggcccatgggggcaagctctgcgcttaaaagtccagctgcagctcctgtag

SEQ ID NO: 224143 - DNA, 8430 bp, Artificial Sequence
  derived and/or modified sequence
atgacgcttgaagggctttacctggcaagaggccctctcgctagactgctcctggcttggtctgcattgctctgtatggccggcgggcagggacgatgggacggggctttggaggccgctggtccaggtagggtgcggcgccgtggatcccccggtattttacagggacccaacgtttgcggttctagattccacgcctattgctgcccaggctggcgcactttccccggcagaagtcaatgcgtggtccccatctgtcgcagagcctgtggcgagggattttgctcccagccaaacctgtgcacctgcgcggatggaactttggcacccagctgcggcgtttctagaggctccgggtgttcagtgtcttgcatgaacgggggaacttgtcggggcgcaagttgcctatgtcagaaaggatacacagggacagtgtgtggtcagcctatctgcgatagaggttgtcacaatggcgggcgatgtatcggccctaataggtgtgcatgcgtttacggtttcatgggaccacaatgcgagcgtgattacaggactggtccctgcttcggccaggtcgggcccgaggggtgtcagcatcagctcactggtttagtgtgcacaaaagctttgtgttgtgcaactgtcggacgcgcatggggactcccctgcgagctttgtccagctcagccacacccatgccggagaggattcatccccaacatacataccggtgcctgccaggacgtggatgagtgtcaggccgttcctgggctctgtcagggcggatcctgtgtcaatatggtcgggtcgtttcactgtagatgtcccgttggtcataggttgtctgattcctccgcagcctgtgaggattaccgtgctggagcctgttttagtgttttgtttggaggcagatgcgccggcgaccttgccggtcactatactagacgccagtgctgctgtgataggggccgctgttgggcagccggtcccgtccccgaactgtgtccgccgcgcgggtcaaatgagttccaacagctctgtgcacagcggttacctctgctgccaggacatcccggactcttccctggtctgctgggctttggaagtaacggtatgggcccgcccttaggccctgcccggttgaatccccacgggtcggatgctcgcggaattccttcactcggaccaggaaactcaaacatcgggacagcaaccttaaaccaaaccatcgatatctgccggcactttaccaacctgtgtctcaatggaagatgtcttcctactccttcttcgtatcggtgtgagtgcaatgtcggttacacccaagatgtacgtggcgaatgtatcgacgtggatgaatgcacaagtagcccttgccaccacggggattgcgttaacatacccggaacctatcattgtcgctgttacccagggttccaagccactccaacaagacaagcctgcgtggatgttgacgaatgtatcgtgtctgggggactatgtcacctgggacgatgtgtgaataccgagggatcatttcaatgcgtctgcaatgcaggattcgagctaagccctgacgggaagaattgtgtcgatcataacgaatgtgccacatctaccatgtgtgtcaacggcgtatgcttgaatgaagatgggagcttcagctgcctgtgcaaaccaggcttcctcctggcacctggaggccactactgtatggatatcgatgaatgccagacacctggaatatgcgtaaatgggcattgtaccaacaccgaaggatctttccgctgccagtgtctgggaggccttgcagtaggaactgatgggcgagtttgtgtcgatacccacgtgcggtcaacttgctacggagcaatagaaaaggggtcatgtgcccgcccgttcccagggacagtgaccaagagcgagtgctgctgcgccaatcctgatcacggtttcggtgagccatgccaactgtgtccagccaaagacagtgcagaatttcaggctctgtgcagctcaggtttgggaatcacgactgatgggcgggacatcaacgaatgcgctctggacccggaagtgtgcgccaatggagtctgtgagaacctccgaggctcctatcggtgtgtctgtaacctgggttacgaagctggcgcctctggaaaggactgtaccgacgtggatgaatgtgccctaaattcgctactctgcgataatgggtggtgccagaattcccccggctcttactcttgtagttgcccacccggatttcacttctggcaagatacggagatttgcaaagatgtcgatgaatgtctctctagtccttgcgtatctggggtgtgtcggaatcttgctgggagttatacctgtaaatgcggcccaggctctcgacttgatcctagtggtacgttttgtcttgacagtacaaagggtacatgctggctaaaaattcaggagtcccgatgtgaggtgaatctgcaaggagccagtctgagaagtgaatgttgcgccaccctgggtgccgcatggggcagcccgtgtgagaggtgcgagatcgatccagcctgcgcaaggggattcgctagaatgacaggtgtgacatgcgatgatgtcaatgagtgcgagagctttcccggtgtgtgcccaaacggaagatgtgttaatacagccgggagtttccgatgcgaatgtccggagggattgatgcttgatgcctccggccgtctttgtgtggatgtgagattggaaccctgcttcctgagatgggacgaggatgaatgcggagtaacattgcctggtaagtatagaatggacgtttgttgttgtagtatcggggcagtttggggtgttgaatgtgaggcgtgtcccgaccccgagagcctagagttcgcctcactgtgtccaagggggttaggctttgcgtccagggattttttgtccggacgcccattttataaggatgtgaatgagtgcaaagtgttcccaggtctgtgcacccatgggacatgccgtaatacagtgggttcttttcattgcgcctgtgctggaggatttgctctggacgcccaagaacgcaactgtacagacattgacgagtgccgcatatcacctgatctatgcggccaaggcacctgcgtgaacacccctggcagttttgagtgcgaatgctttcctgggtacgaatccgggtttatgcttatgaaaaattgtatggacgtagacgagtgcgctagagacccccttctttgtcgcggcggcacctgtacaaatacagatggctcttacaaatgtcagtgtccccctggacatgaacttacagctaagggtacagcctgcgaagatattgacgaatgttctttaagtgatggtctttgtccccatggacagtgcgtgaatgtgatcggtgcatttcaatgcagttgccacgctggattccaatcaacgcctgatcgccaggggtgtgtggacataaacgagtgtagagttcaaaatggcgggtgcgacgttcattgtatcaatacagaggggtcctacagatgctcttgtggacagggttacagcctcatgccggacggaagggcctgtgccgacgtggacgagtgtgaagaaaatcccagagtgtgtgatcaaggacactgtacgaacatgcctggaggacaccgctgcttatgttatgatggatttatggccacccccgatatgcggacttgtgtcgacgtggacgagtgtgatctgaacccacatatttgcttacatggcgactgtgaaaatacaaagggttcctttgtctgccactgccagctcggttacatggtgaggaagggcgccactggatgctccgacgtcgacgaatgcgaggtgggcgggcacaattgtgattcacacgccagctgcctgaatatccccggctcttttagctgtagatgtctgcccggctgggtgggtgatggcttcgaatgtcatgatctagacgaatgcgtcagtcaggagcacaggtgcagtccaaggggtgattgtttgaatgtgcctggtagctaccgatgcacatgtcggcaaggatttgctggggatggcttcttttgtgaggaccgcgatgagtgtgcagagaacgtcgacctctgtgacaatggacagtgtctcaacgcacccggaggttacaggtgcgagtgtgaaatgggttttgaccccaccgaggatcatagagcctgccaagacgtcgacgaatgcgcacaaggcaatctgtgtgctttcggatcctgcgaaaatctccctgggatgttccgatgtatttgcaatggtgggtacgagttagacagagggggcggcaattgtaccgacattaacgaatgtgcagatcctgtgaattgcatcaatggagtttgtatcaatacccctggatcatacttatgttcttgcccccaggactttgaattgaaccccagcggtgtgggttgcgtggacacgagagccgggaactgctttctcgaaacacatgatcggggcgattccggtatatcatgctctgccgaaattggcgtcggagtcaccagggcctcatgctgctgttctttgggccgggcatggggaaacccctgcgagttatgtcccatggccaataccaccgagtaccgcaccctgtgccctgggggggagggatttcagcccaatcgcatcacagttattttggaggacattgatgagtgtcaggagctcccaggcctttgtcagggcggagattgtgtcaatacctttgggtccttccagtgcgaatgccctcctggttaccacctcagtgagcacacccggatatgtgaagatatcgacgagtgttccactcactccggcatttgtggacccggaacatgttataataccctcggcaattacacttgtgtctgcccggctgaatatctgcaggtgaacggcggcaacaactgtatggatatgcgaaaaagtgtgtgctttagacattacaatggaacatgccagaacgaattggcatttaatgtgacacgcaagatgtgttgttgtagttataacattggacaggcctggaatcgcccctgtgaggcttgccctaccccaatttcccctgattaccagattctgtgtggtaaccaagcccccgggttccttactgacattcatacaggcaaaccactggatattgacgaatgtggtgaaattccagccatttgcgcaaacggaatctgtattaatcaaatcggctcatttagatgtgaatgtccagccggctttaattacaacagcatattattggcgtgcgaagacgtcgacgagtgtggcagtcgggaaagcccatgccagcagaatgctgactgcatcaacatccccggatcatataggtgcaagtgtacgaggggatacaagttatcccccgggggcgcttgcgtgggtcggaacgaatgccgagagatccccaacgtctgctctcacggtgattgcatggacaccgaaggatcctatatgtgcttgtgtcatcggggattccaggccagtgccgatcagactctgtgtatggacattgatgagtgcgataggcagccttgcggtaatggcacctgcaaaaacattataggcagttataattgtttatgtttccctggatttgtcgtgacccataacggggattgtgtcgattttgatgaatgtactaccttggtgggtcaggtatgtcggtttggccactgtcttaacactgcaggcagctttcactgtctttgccaggacggcttcgaactcacagctgacgggaaaaactgcgttgacaccaatgagtgcctcagcctggccggaacctgtctacccggcacgtgtcagaacctcgaaggctcattccgctgcatatgtccaccaggctttcaggtgcaaagcgaccattgcatcgacatcgatgagtgttctgaagagccaaacctatgcctgttcggtacgtgtacaaatagtccaggatcattccagtgtctgtgtccccccggctttgtcctgtctgataatggccatcgttgcttcgatacccgccaatctttctgttttacccgattcgaggctggtaaatgctctgttcctaaagctttcaataccactaagacgcgatgctgttgctctaagcgacctggagagggatggggcgatccatgtgagttatgtccacaggaaggatcggcggcgtttcaggagctgtgccctttcgggcatggggcagttccaggtcccgatgactcccgagaagatgtcaatgagtgcgctgagaatcccggggtgtgtacaaacggcgtgtgtgtcaatacagacggctccttccgttgcgaatgtcccttcggctattccttggactttacaggtattaactgcgtggataccgacgaatgcagcgttggacacccttgcggacagggcacctgcaccaacgtgattggcggcttcgaatgcgcttgcgccgacgggtttgaaccaggcctgatgatgacttgtgaggatatcgatgaatgtagtctaaacccgctcctgtgcgccttccgctgtcataacacagaaggaagctacctgtgtacttgcccagccggttacacccttagagaagatggggcgatgtgtcgtgatgtggacgaatgcgctgatggacagcaggactgccacgcccgcggaatggaatgtaagaacttgatcgggacatttgcatgcgtatgccctccgggaatgaggccgctgccaggaagtggggagggctgtacagacgataatgagtgtcacgctcagcccgacctttgtgtaaatgggagatgtgttaatacagcagggtcgttccgttgtgactgcgatgaaggttttcaaccatcaccaactcttaccgaatgtcatgacatcaggcaagggccctgcttcgctgaggtgctgcaaacaatgtgtcgttccttgagttctagtagcgaggccgttacacgcgctgagtgctgttgtgggggggggcgcggatggggacctaggtgcgaattgtgtccgttacctggaacgagtgcatatcgaaagctttgcccacatggttctggttacacggccgagggaagagacgtggacgaatgtcgaatgctggcacatctgtgcgcccatggcgaatgcattaactcgcttggctcgttccggtgccattgtcaggctggttacacgcccgatgctactgccactacatgtcttgacatggatgagtgttcccaagttcccaaaccgtgcacgttcctgtgtaaaaataccaaaggttcattcctctgttcgtgccctcgtggatacctcctagaagaagacggacgcacatgcaaggacctcgatgaatgcacctcacggcagcacaactgccaattcctttgtgtaaatacagttggtgcctttacttgtcgatgtccacccggctttacacagcaccaccaggcatgttttgacaacgatgaatgttctgcgcagccaggtccttgcggcgcccacggtcactgccacaataccccaggaagcttcagatgcgagtgtcaccaggggttcacattagtttcttccggacacggttgtgaggacgtgaacgaatgcgacggacctcatagatgtcagcacggctgccagaatcagctgggaggttatcgctgtagctgtccccaaggctttacccagcattcacagtgggcccaatgtgtggacgagaatgaatgcgccctctcccctccgacctgtggatccgcatcttgtagaaatacacttggaggctttcgttgcgtgtgcccatcgggattcgactttgatcaggcacttgggggttgtcaggaggtcgacgagtgcgcaggaagacgcgggccttgttcatattcatgtgccaacaccccaggtggatttctttgcgggtgcccccaaggatactttagagctgggcagggccactgtgtgtctggcctaggattttcccctggcccgcaggacacaccggacaaggaagaattactatccagcgaggcttgctacgagtgcaaaatcaatggcctgtctccacgcgacagacccagaagaagcgcccaccgcgaccaccaggtcaacttggccactttggactccgaagcactgctcacgttgggcctaaatctatcacacctggggagagctgagcgaattttggagcttcggccagcattggaaggccttgagggacgaattcgatacgtgatcgttcgcggcaacgagcaaggattctttagaatgcaccatcttaggggagtcagttccttgcagctggggcgtaggagacctggaccgggtacttacaggttggaagtagtttctcatatggccggtccctggggtgtgcaacccgaaggccaaccggggccttggggtcaagcactcagactaaaagtacaactgcaactactatag

SEQ ID NO: 224144 - DNA, 2619 bp, Artificial Sequence
  derived and/or modified sequence
atgggtatcgtttggattctgatgtcagtattgccatggtggggtcggtgtgctgatctggcaattgcttctactcagctggtgccctcaaccgcatctgctcgtatggcactgtcttctcagctcatgggtcgcacagtctggacacctatgtccgcatccgcccttcaggaacccgcttatccagctttggctagaacctcaagggctccaagcgctgcatccgttcctctggccagccgctgcagggtcacaacagccctgatctctaccagtgcccagcgctcccccacatcagctagtctggcacccgtccctactgccttaggcgcgtcatcagccagcgcccacctggccctcagctccctgacaatggggacagtcgcacttacccacggccgcgtcagcgcaagtcccgtccttagactcggctctgcaagatgtcctaaactgtcaacaccccctcgtcctgccgccgccgccgtacggggactgggtcgtgccggcgaaacccctgcaaactgtgtgcctcggagggcagtgccgggccctgacgattccagagaagacgtgaacgaatgtgcagaaaatccgggcgtatgcaccaacggagtgtgcgtgaacacagacggatcatttcggtgtgaatgcccatttggatactcccttgatttcacaggaattaactgcgtggatactgatgagtgcagtgtggggcacccctgtggtcagggaacctgcacaaacgtgataggaggcttcgagtgcgcctgtgccgatggatttgagcccggcctgatgatgacatgcgaggatattgacgagtgctctctgaaccccctgctgtgtgccttccgttgtcataatactgagggctcttatctctgtacatgtccagccggttatactctgcgggaggacggggccatgtgtcgggatgttgatgaatgcgctgacggccagcaagattgtcatgctcgcggaatggagtgcaaaaatctgattggcacattcgcttgtgtgtgtcctccaggcatgagacccctcccaggttccggcgaagggtgtactgacgacaatgaatgccacgcccaacccgacttgtgcgtgaacggcagatgcgtgaacactgcaggttctttcagatgtgactgcgatgaaggctttcagcccagcccaactctcactgaatgccatgacattcgtcaaggaccttgttttgccgaagtcctccagaccatgtgccgctctttgtcctcttccagtgaggctgtgacacgtgcggagtgttgttgcgggggtggtcggggatgggggcccagatgtgaattatgtcctctacctggcacctcggcatacagaaagctgtgtccccatgggagtggttacaccgcagaaggccgggatgtggatgaatgcagaatgctcgctcatttatgtgcgcacggcgagtgcatcaactctttgggctcgtttcgatgccattgccaagcaggctacacccccgacgccacggccactacttgcttagatatggatgaatgtagccaggtccccaaaccatgtacttttttatgcaaaaataccaaggggtcatttctttgttcctgcccaagaggatatttattagaggaggacggtcggacctgcaaggatctagatgaatgtactagccgccagcataattgccaattcctatgtgtgaacaccgtgggcgctttcacctgcagatgtcccccaggctttactcagcatcaccaggcatgtttcgacgtaaatgaatgcgacggaccacatcggtgccagcatggatgccagaaccagttgggaggatacagatgctcctgcccccaaggatttacacaacattcccagtgggctcagtgtgttgacgaaaacgaatgcgccttgtcgccgccaacctgtggctcagcttcatgtcgcaacactttaggcgggtttaggtgcgtatgtccatccggattcgacttcgaccaggcactgggaggatgccaggaagtcgacgaatgtgccggacggagaggcccctgttcgtatagctgcgctaatacgcctggtggatttttgtgtggttgccctcagggatacttccgcgccgggcagggacactgcgtatccgggcttggcttctcaccagggccgcaggatacacccgataaggaagagctcttatccagcgaggcttgttatgaatgcaaaattaacggcttgtcacccagggaccgtcctcgacgctccgcccaccgagaccatcaagttaacctggccacactggatagtgaagcactgctgaccctaggactgaacttatctcatcttggtcgggccgaaaggattctagaattgcgacccgcactcgaaggtctggaaggccgcatacgctatgtgattgttcgcggtaatgaacagggcttcttccgaatgcatcacctgaggggagtaagcagcttgcagctaggcaggcggagacccggaccaggcacctacaggctcgaagtggtaagccatatggcaggtccttggggagtgcagcctgaggggcaacccggaccatggggacaagcattaagattgaaggtccagctccagctcctgtag

SEQ ID NO: 224145 - DNA, 8430 bp, Artificial Sequence
  derived and/or modified sequence
atgactctggagggactctacctggcccgaggccccctagcacggctcctgctagcgtggtccgccttactttgcatggcaggaggacagggacgctgggacggggcattagaagctgcaggacccggccgcgtcagacgacgagggagccctggcatcctgcagggtccaaatgtctgtgggtcacgttttcacgcatattgctgcccaggctggcgcacttttccaggtagatctcagtgcgttgtgcccatctgtcgacgggcatgtggggaaggtttttgctctcaaccaaatctgtgcacctgtgcggacgggactcttgcaccatcttgtggcgtaagtcggggatccggctgttccgttagctgtatgaatggcggaacatgtaggggagcatcttgtttgtgtcaaaaaggctataccggcactgtatgcggacaacctatatgcgatcgaggatgtcataatggggggaggtgtattggccctaacaggtgtgcctgcgtgtatggattcatgggaccacaatgcgaacgcgattacagaacaggtccttgctttggccaggtgggtcctgaaggatgtcagcaccagctgacaggcttggtgtgcactaaagctctgtgctgtgctacggttggtagggcctggggtcttccatgcgagttatgtccggctcaacctcacccctgcagacgcggattcatcccaaacatacatactggggcctgccaagatgttgacgagtgccaagctgtccccgggttatgtcagggcggctcttgcgtgaacatggtgggatcatttcactgccggtgtcctgtcggtcatagattgtccgattcatccgccgcctgcgaagactatcgggccggtgcctgttttagtgtcctctttggaggaagatgcgccggcgatcttgccggccattacacccgaagacagtgttgttgcgaccggggtcggtgctgggccgcaggaccagtgcctgaattatgccctcctagaggatctaatgaattccaacagctttgtgcacagcgactgcccttgcttcctggtcaccccggtctctttccgggtctgctagggtttggctcaaacggaatgggacccccactgggacccgcgcgactgaatccacatggtagtgatgctcgcgggattccatccctgggccccggaaattccaatataggcacggcaacactgaatcaaactattgatatctgccgtcactttacgaatttatgcttgaatggtcgatgcctccccactccaagttcctataggtgcgagtgcaatgttggctacacccaagacgtgagaggagagtgcattgatgtcgacgagtgcactagctcaccatgccaccacggcgattgcgtaaacatccctggtacctaccactgtcgctgctacccaggttttcaggccaccccaacacgacaggcctgcgttgatgtggacgaatgcattgttagcggcggactctgtcaccttggtagatgtgtgaatacggaggggagctttcagtgtgtctgtaatgccggatttgagttaagccccgacggaaagaattgcgtagaccacaatgaatgtgctacgtccacgatgtgtgtaaatggcgtttgtctcaatgaggacggctctttttcatgcttgtgcaaacccggttttttattagccccaggcggccattactgtatggatatcgacgaatgccaaacacccgggatatgtgtcaacggacattgcacaaatacagaaggcagttttcgatgccagtgtttaggcggactagctgtgggaaccgatggccgggtttgtgtggacacccacgtacgaagcacatgctacggggctatcgagaaaggatcctgcgctcgccccttccctggcactgtaactaaatccgaatgctgctgcgcaaatccagatcatggcttcggcgaaccctgtcagctctgtcctgctaaagattctgccgagtttcaggcgctttgctcaagtggactcggaattacgacagatggaagagatataaacgagtgtgccttggacccggaggtctgcgcaaacggcgtgtgtgaaaatcttcgaggttcttaccgatgtgtctgcaatttaggctacgaagcaggcgcttcaggcaaagattgcaccgatgtggacgaatgcgccctcaacagtctgttatgtgacaatggttggtgccagaacagccccggcagttacagttgttcatgcccccccggctttcacttctggcaggacacagaaatttgcaaagacgtggacgagtgcctgagctcaccatgcgtttccggtgtgtgcaggaatctggcaggttcttatacctgtaaatgcggccccggctctcgcttagatccatccggcactttctgcctcgactcaactaaaggtacctgttggctcaagatacaggagagccgctgtgaagtaaacttgcaaggggcctccctcagaagcgaatgttgtgctacattaggtgccgcatggggctcaccttgcgagcggtgtgagattgatcctgcgtgtgccagggggttcgctcggatgactggagtgacctgcgacgatgttaatgaatgcgaaagttttccaggggtttgtcctaacggccgctgcgtgaatactgcgggttcctttaggtgcgaatgcccggagggacttatgcttgatgccagtggaagattgtgtgtggacgtccgactggagccctgtttcctgagatgggatgaagatgagtgcggggtcacattgccgggtaagtatagaatggacgtgtgctgttgtagcattggagcggtgtggggtgtggaatgcgaggcctgtcctgatcctgagtcattggaatttgcctctctatgtccacgagggctgggcttcgcctccagagattttctatcagggagaccgttctacaaagacgttaatgagtgtaaagtgtttccaggtctgtgtacacatggcacttgtcgcaataccgtgggctcttttcattgcgcctgcgcaggaggatttgccctcgacgctcaagagagaaattgtactgacattgatgaatgccgcatttccccagatctctgcggccaaggaacatgcgtaaacacccccgggtccttcgaatgcgaatgcttcccaggatatgagtccggattcatgttgatgaagaattgcatggacgtagatgagtgcgccagggatccgctactctgtagaggaggcacctgtactaacactgacggaagctataaatgtcagtgccccccaggccacgaactcacagcaaaaggaacagcttgcgaggatatcgacgagtgcagcctctctgacggcctgtgtccccatggacagtgtgttaatgtaattggtgccttccagtgcagttgtcacgctgggttccaatccacccctgacagacaaggctgtgtggatatcaacgagtgtagagtgcagaacgggggatgtgatgtgcattgtatcaatacagaaggaagttaccgttgttcttgcgggcagggctattcattaatgcctgatggacgggcttgtgcagatgtcgatgaatgcgaggagaaccctagagtgtgtgaccagggccactgcacaaacatgcccgggggccacagatgtttatgctacgatgggtttatggccaccccagatatgaggacctgtgtcgatgtcgacgaatgtgatttaaatccccacatttgcctgcatggcgactgtgagaataccaaagggtcttttgtttgtcactgccaactaggatatatggtccgcaagggagctactggctgttccgacgtcgatgagtgtgaagtgggaggacacaattgcgattcgcacgctagctgcctgaatattcccggaagtttcagctgccgatgtttgccaggatgggtcggtgacggtttcgaatgtcacgacttagacgaatgtgttagtcaggagcatcgttgttcccctcgaggtgactgcctaaacgttcctggatcttatagatgtacatgccggcagggatttgcaggggacggattcttttgcgaggatagagacgagtgcgcggaaaacgttgacttgtgtgataacggacaatgcctgaacgccccaggtggctataggtgcgagtgtgaaatgggatttgatcccacggaagatcaccgggcttgtcaggatgtagatgagtgtgcccaaggcaacctttgcgcattcggatcctgtgaaaatctgcccggaatgtttcggtgcatttgcaacggcggatacgagcttgaccgcggcggaggaaactgtactgatatcaacgagtgcgccgaccccgttaactgtataaatggtgtttgtatcaacacccccggttcctacctctgctcttgtccgcaagattttgaactcaacccatccggtgttggctgcgtggacacgagagctggcaattgcttcctcgagactcacgaccgtggagattcagggatctcttgcagcgctgaaatcggagttggtgtgactcgggcctcctgttgttgctcattaggccgggcttggggcaatccttgtgagctttgccctatggcaaacaccacagaatatcgtaccttgtgtccaggtggcgaggggttccagcctaacaggatcacagtaatccttgaggacatagacgagtgtcaggagctacccgggctatgccaggggggagattgtgtgaatacctttggaagctttcaatgcgagtgtccgccaggatatcatctgtcagagcacaccagaatctgtgaagacattgatgaatgttctactcattcaggaatttgcggcccaggaacttgctataatactcttggcaactacacctgcgtgtgcccagcagaatacttgcaggttaacggaggcaataattgtatggatatgagaaaaagcgtatgctttagacattataacggcacctgccagaatgaactggccttcaatgtcactaggaaaatgtgttgctgttcatataatatcgggcaagcgtggaatcgcccttgtgaagcttgtcccacccccatcagccccgattatcagatcctgtgcgggaaccaagctcccggattcttgaccgatattcacaccggtaagcctcttgatatcgacgaatgcggcgaaattccagccatctgcgccaacggaatatgtattaatcagatagggtctttcagatgtgaatgcccggccggctttaactataattccattctattagcctgcgaagatgtggacgagtgtgggtcgcgcgagtctccttgccagcagaatgctgattgtataaatatacccggaagctacagatgcaaatgcacacgcgggtataaactttcacccggtggggcctgcgttggcaggaacgaatgtagagaaatccctaatgtttgtagtcatggggattgcatggatacggaaggctcgtacatgtgtttatgtcatagaggattccaagcaagcgccgaccagaccttgtgtatggacatcgacgagtgtgacagacagccctgcggtaatggaacttgtaagaacatcatcggctcttataactgtctgtgtttcccaggcttcgtagttacccacaatggggactgcgtggattttgacgagtgtaccacattagtaggtcaagtatgtcgcttcggccattgtttaaataccgcaggctcctttcactgtctatgccaggacgggttcgaactcaccgctgatggtaagaactgcgtggataccaatgaatgcctctctctggccggaacatgcctgcccggtacttgtcaaaacttggaagggtccttcagatgtatttgccccccaggatttcaggttcaaagtgaccattgcattgacattgatgagtgtagcgaagaacctaatctgtgcctgttcggaacctgcacaaacagtccgggcagcttccagtgtctttgtccacccggctttgtgctcagcgataatggacacagatgcttcgacactaggcagagtttttgctttacacggttcgaggccggcaaatgctccgtacccaaggctttcaacacaactaagacaagatgctgttgttctaaaaggcctggagaaggttggggagatccatgtgagctctgccctcaagagggaagtgctgcctttcaagagctctgtccgtttggtcatggcgctgtcccggggcccgatgattcaagagaggatgttaacgagtgtgcagagaacccaggcgtttgcactaacggtgtttgcgtcaatacagatggaagcttcagatgcgaatgcccttttggatactccctggattttacaggaatcaattgcgtggacactgacgaatgctctgtgggacatccatgcgggcaggggacctgcacaaacgtgattgggggtttcgagtgcgcctgtgccgacggatttgaacccgggctaatgatgacatgcgaagatatcgacgagtgttccctgaacccattactctgcgccttccgatgtcacaatactgaaggaagctacttatgtacttgccctgctgggtacactctgagagaggatggggcaatgtgtagagatgtggacgagtgcgccgatgggcagcaggactgtcatgccagaggaatggagtgtaagaatcttattgggacctttgcctgcgtgtgcccccctggaatgcgaccccttcctggaagcggagaaggctgcacagacgacaatgagtgccatgctcagcctgacttatgcgtgaacggaagatgcgtaaacacggcggggtctttcagatgcgattgcgacgaaggcttccagccatctcctaccctgacagagtgccatgatattaggcaagggccctgcttcgccgaggtgctccaaacaatgtgccgatcactatcttcatcgtctgaggccgtgactagagcagaatgttgctgtggcgggggaagaggctggggtccccgctgtgaactttgcccactccctgggacctccgcttatagaaaattgtgcccgcatggatccgggtacacagctgagggcagagatgtggacgagtgtaggatgttagcccatctgtgcgcccatggcgaatgtattaattctctgggatcgtttcggtgtcactgccaggcagggtataccccagacgcaaccgctacaacatgtctggacatggatgaatgctcccaagtaccgaaaccctgcacctttttatgcaaaaacactaagggaagcttcctctgcagctgtccacgtggttatctcctggaagaggatggcagaacctgcaaggatctggacgaatgtacctctcgacaacacaattgtcagtttctgtgcgtcaatacggtcggtgcctttacctgcagatgcccacccggctttactcagcatcaccaggcttgtttcgacaacgacgaatgttccgcacaaccaggcccctgcggtgcccacggccactgtcacaatactccagggagctttagatgcgagtgtcatcagggatttactctggtctcatctggccatggatgtgaagacgtaaacgaatgtgatggcccgcatcgctgccagcacggatgccaaaatcagttgggtgggtacagatgtagctgtcctcaaggttttactcaacactcccagtgggcacagtgcgtggatgagaatgaatgcgccctgtcacctcccacatgtggatctgccagctgtagaaataccctaggcggtttcagatgcgtgtgcccgagcgggttcgatttcgatcaagcgttaggagggtgccaagaggtagacgagtgcgctggcagacgcggaccctgtagttattcttgcgccaacactcccggagggttcctgtgtggatgtccccaggggtactttagagccggacaaggacattgcgtcagcggtcttggattctctccagggccacaggatacgccagataaagaggagctcctctcaagtgaagcatgctatgagtgcaaaattaatggcctgtccccccgagatcgcccccgcagaagtgcccaccgtgaccatcaggtgaaccttgccacattggatagcgaagccctgttaacgttgggattgaacctatcacacctcggacgtgcggagcgcatcctggaactaagacctgcattggagggcttagaggggaggattagatatgtaatcgttcgagggaacgaacaaggatttttccgaatgcaccatctcagaggcgttagctcactgcagctggggcgacgtcggcccggtccaggcacctacagactggaggtagtatcccatatggcaggcccttggggagtacagcctgaaggtcaacctggtccttggggccaggctctgcgcctaaaagttcaacttcagctgctctag

SEQ ID NO: 224146 - DNA, 9362 bp, Artificial Sequence
  derived and/or modified sequence
aaaagtcagagccccacctccaccttagtctcgatccgaaaacgcggccccggcagcccctactaggcgcccccagcccgccctcacatccctccagtccatcggagtttttcactcggagccccggaccctcccccgagccgcagcctctctccccgccccggatcggagccccccgtccccgccccgggagctaagaggtgcaaacgcgccctcctccaactcctcccgcccccaactcccccccgagtggcagctctgggctgggaacgcggcggggtcggcctctcggctttgcgttcccgccccgggtccccggcgccgcaggagcccgccctgcagcgctgagtcccgcgcgtccgcctgccgtgcccgcctccacgcgcgccgcctcgcagcctccaggggacacgccatgactctggagggtctgtatttggcaaggggccccctggcccggctcctgctggcctggtcggccctgttgtgcatggcaggtggccaaggccgctgggacggggccttggaggctgcaggtcctggacgtgtgcggaggcggggcagcccaggcatcttgcaggggccgaatgtgtgcggctcccggttccatgcctactgctgtccaggctggaggacattccctggcaggagccagtgtgtcgtacccatctgtaggcgcgcctgcggtgaaggcttctgctcccagcccaacctgtgcacctgtgcggatgggacgctggctcccagctgcggggtgagccgagggtcagggtgcagtgtgagctgtatgaatgggggcacctgccggggggcgtcctgtctgtgtcagaagggctacacaggcaccgtgtgtgggcagcccatctgtgaccgcggctgccacaatgggggtcgctgcattgggcccaaccgctgcgcctgtgtgtatggcttcatgggacctcaatgtgagagagattaccggacgggaccctgctttggccaagtaggccccgaggggtgccagcatcagctgacgggcctcgtgtgcaccaaggcactttgctgtgccactgtgggccgtgcctggggccttccatgtgaactttgccctgcacagccacacccctgccgccgcggcttcatccccaatatccacacgggggcctgccaagatgtggatgagtgccaggctgtgccaggcctgtgccagggaggcagctgcgtcaacatggtgggctccttccattgccgctgtccagttggacaccggctcagtgacagcagcgccgcatgtgaagactaccgggccggcgcctgcttctcagtgcttttcgggggccgctgtgctggagacctcgccggccactacactcgcaggcagtgctgctgtgacaggggcaggtgctgggcagctggcccggtccctgagctgtgtcctcctcggggctccaatgaattccagcaactgtgcgcccagcggctgccgctgctacccggccaccctggcctcttccctggcctcctgggcttcggatccaatggcatgggtccccctcttgggccagcgcgactcaacccccatggctctgatgcgcgtgggatccccagcctgggccctggcaactctaatattggcactgctaccctgaaccagaccattgacatctgccgacacttcaccaacctgtgtctgaatggccgctgcctgcccacgccttccagctaccgctgcgagtgtaacgtgggctacacccaggacgtgcgcggcgagtgcattgatgtagacgaatgcaccagcagcccctgccaccacggtgactgcgtcaacatccccggcacctaccactgccggtgctacccgggcttccaggccacgcccaccaggcaggcatgcgtggatgtggacgagtgcattgtcagtggtggcctttgtcacctgggccgctgtgtcaacacagagggcagcttccagtgtgtctgcaatgcaggcttcgagctcagccctgacggcaagaactgtgtggaccacaacgagtgtgccaccagcaccatgtgcgtcaacggcgtgtgtctcaacgaggatggcagcttctcctgcctctgcaaacccggcttcctgctggcgcctggcggccactactgcatggacattgacgagtgccagacgcccggcatctgcgtgaacggccactgtaccaacaccgagggctccttccgctgccagtgcctgggggggctggcggtaggcacggatggccgcgtgtgcgtggacacccacgtgcgcagcacctgctatggggccatcgagaagggctcctgtgcccgccccttccctggcactgtcaccaagtccgagtgctgctgtgccaatccggaccacggttttggggagccctgccagctttgtcctgccaaagactccgctgagttccaggcactgtgcagcagtgggcttggcattaccacggatggtcgagacatcaacgagtgtgctctggatcctgaggtttgtgccaatggcgtgtgcgagaaccttcggggcagctaccgctgtgtctgcaacctgggttatgaggcaggtgcctcaggcaaggactgcacagacgtggatgagtgtgccctcaacagcctcctgtgtgacaacgggtggtgccagaatagccctggcagctacagctgctcctgcccccccggcttccacttctggcaggacacggagatctgcaaagatgtcgacgaatgcctgtccagcccgtgtgtgagtggcgtctgtcggaacctggccggctcctacacctgcaaatgtggccctggcagccggctggacccctctggtaccttctgtctagacagcaccaagggcacctgctggctgaagatccaggagagccgctgtgaggtgaaccttcagggagccagcctgcggtctgagtgctgcgccaccctcggggcagcctgggggagcccctgcgaacgctgcgagatcgaccctgcctgtgcccggggctttgcccggatgacgggtgtcacctgcgatgatgtgaacgagtgtgagtccttcccgggagtctgtcccaacgggcgttgcgtcaacactgctgggtctttccgctgtgagtgtccagagggcctgatgctggacgcctcaggccggctgtgcgtggatgtgagattggaaccatgtttcctgcgatgggatgaggatgagtgtggggtcaccctgcctggcaagtaccggatggacgtctgctgctgctccatcggggccgtgtggggagtcgagtgcgaggcctgcccggatcccgagtctctggagttcgccagcctgtgcccgcgggggctgggcttcgccagccgggacttcctgtctggccgaccattctataaagatgtgaatgaatgcaaggtgttccctggcctctgcacgcacggtacctgcagaaacacggtgggcagcttccactgcgcctgtgcggggggcttcgccctggatgcccaggaacggaactgcacagatatcgacgagtgtcgcatctctcctgacctctgcggccagggcacctgtgtcaacacgccgggcagctttgagtgcgagtgttttcccggctacgagagtggcttcatgctgatgaagaactgcatggacgtggacgagtgtgcaagggacccgctgctctgccggggaggcacttgcaccaacacggatgggagctacaagtgccagtgtccccctgggcatgagctgacggccaagggcactgcctgtgaggacatcgatgagtgctccctgagtgatggcctgtgtccccatggccagtgtgtcaatgtcatcggtgccttccagtgctcctgccatgccggcttccagagcacacctgaccgccagggctgcgtggacatcaacgaatgccgggtccagaatggtgggtgtgacgtgcactgtattaacactgagggcagctaccggtgcagctgtgggcagggctactcgctgatgcccgacggaagggcatgtgcagacgtggacgagtgtgaagagaacccccgcgtttgtgaccaaggccactgcaccaacatgccagggggtcaccgctgcctgtgctatgatggcttcatggccacgccagacatgaggacatgtgttgatgtggatgagtgtgacctgaaccctcacatctgcctccatggggactgcgagaacacgaagggttcctttgtctgccactgtcagctgggctacatggtcaggaagggggccacaggctgctctgatgtggatgaatgcgaggttggaggacacaactgtgacagtcacgcctcctgtctcaacatcccggggagtttcagctgtaggtgcctgccaggctgggtgggggatggcttcgaatgtcacgacctggatgaatgcgtctcccaggagcaccggtgcagcccaagaggtgactgtctcaatgtccctggctcctaccgctgcacctgccgccagggctttgccggggatggcttcttctgcgaagacagggatgaatgtgccgagaacgtggacctctgtgacaacgggcagtgcctcaatgcgcccggcgggtaccgctgtgaatgtgagatgggctttgaccccaccgaggaccaccgggcctgccaggatgtggacgagtgtgcgcaagggaacctctgtgcatttgggagctgtgagaacctgcctggaatgttccgctgcatctgcaatggtggctacgaactggaccgagggggtggcaactgcacagacatcaacgagtgtgcagacccagtaaactgcatcaacggcgtgtgcattaacacccccggcagctacctctgcagctgcccccaggattttgagctgaaccccagcggagtgggctgcgtggacactcgggccgggaactgtttcctggagacgcatgaccgaggggacagtggcatttcctgcagtgccgagatcggagttggtgtcacccgagcttcctgctgttgctccctgggccgggcttggggcaatccctgtgagctgtgccctatggccaacaccactgagtacagaaccctgtgcccgggtggtgagggcttccagcctaaccgcatcactgtcattctggaagacatcgacgagtgccaagagctgccagggctgtgtcaggggggtgactgcgtcaacacgtttggcagtttccagtgtgagtgcccacctggctaccacctcagtgagcacacccgcatctgtgaggatattgacgaatgctccacacactccggcatctgtggccctggcacctgctacaacaccctggggaactacacctgtgtctgccctgcagagtacctccaagtcaatggtggcaacaactgcatggatatgaggaagagtgtctgcttccggcactataacggcacatgtcaaaatgagctggccttcaacgtgacccggaaaatgtgttgctgctcctacaacattggccaggcctggaatagaccctgtgaggcctgccccactcccatcagtcctgactaccagatcctgtgtggaaatcaggccccgggattcctcactgacatccacacggggaagccccttgacattgatgagtgtggggagatccccgccatctgtgccaatggcatctgcataaaccagatcgggagtttccgctgcgagtgccccgcaggcttcaactacaacagcatcctgctggcttgtgaagatgtcgatgagtgtggcagcagggagagtccctgccagcagaatgctgactgcatcaacatccccggtagctaccgctgcaagtgcacccgagggtacaaactgtcgccaggcggggcttgtgtgggacggaatgagtgtcgggagatcccgaatgtctgtagccatggtgactgcatggacacagaaggcagctacatgtgtctgtgtcaccgtggattccaggcctctgcagaccagaccctgtgcatggacattgacgagtgtgaccggcagccttgtggaaatgggacctgcaagaacatcattggctcctacaactgcctctgcttccctggctttgtggtgacacacaatggggattgtgtggattttgatgagtgtactaccctggtggggcaggtgtgccgatttggccattgcctcaacacagctggttccttccactgcctctgccaggatggctttgagctcacagctgatgggaagaactgtgtggacaccaatgagtgcctcagccttgcaggaacctgcctacccggcacttgccagaacctcgagggctccttccgctgcatctgtccccctggcttccaggtgcagagtgaccactgcattgatatcgacgagtgctcagaggagcccaacctctgcctctttggcacctgtaccaacagccctgggagcttccagtgcctctgcccacctggctttgtcctctctgacaatgggcaccgttgctttgacacacggcagagtttctgcttcacccgttttgaggctgggaagtgctcggtgcccaaagctttcaacaccaccaagacccgctgctgctgcagtaagaggcctggggagggctggggagacccctgcgaactgtgtccccaggagggcagcgctgcctttcaggagctctgcccctttggccacggggcagtcccaggcccggatgactcccgagaagacgtgaatgagtgtgcagagaaccctggcgtctgcactaacggcgtctgtgtcaacaccgatggatccttccgctgtgagtgtccctttggctacagcctggacttcactggcatcaactgtgtggacacagacgagtgctctgtcggccacccctgtgggcaagggacatgcaccaatgtcatcggaggcttcgaatgtgcctgtgctgacggctttgagcctggcctcatgatgacctgcgaggacatcgacgaatgctccctgaacccgctgctctgtgccttccgctgccacaataccgagggctcctacctgtgcacctgtccagccggctacaccctgcgggaggatggggccatgtgtcgagatgtggacgagtgtgcagatggtcagcaggactgccacgcccggggcatggagtgcaagaacctcatcggtaccttcgcgtgcgtctgtcccccaggcatgcggcccctgcctggctctggggagggctgcacagatgacaatgaatgccacgctcagcctgacctctgtgtcaacggccgctgtgtcaacaccgcgggcagcttccggtgcgactgtgatgagggattccagcccagccccacccttaccgagtgccacgacatccggcaggggccctgctttgccgaggtgctgcagaccatgtgccggtctctgtccagcagcagtgaggctgtcaccagggccgagtgctgctgtgggggtggccggggctgggggccccgctgcgagctctgtcccctgcccggcacctctgcctacaggaagctgtgcccccatggctcaggctacactgctgagggccgagatgtagatgaatgccgtatgcttgctcacctgtgtgctcatggggagtgcatcaacagccttggctccttccgctgccactgtcaggccgggtacacaccggatgctactgctactacctgcctggatatggatgagtgcagccaggtccccaagccatgtaccttcctctgcaaaaacacgaagggcagtttcctgtgcagctgtccccgaggctacctgctggaggaggatggcaggacctgcaaagacctggacgaatgcacctcccggcagcacaactgtcagttcctctgtgtcaacactgtgggcgccttcacctgccgctgtccgcccggcttcacccagcaccaccaggcctgcttcgacaatgatgagtgctcagcccagcctggcccatgtggtgcccacgggcactgccacaacaccccgggcagcttccgctgtgaatgccaccaaggcttcaccctggtcagctcaggccatggctgtgaagatgtgaatgaatgtgatgggccccaccgctgccagcatggctgtcagaaccagctagggggctaccgctgcagctgcccccagggtttcacccagcactcccagtgggcccagtgtgtggatgagaatgagtgtgccctgtcgccccccacctgcgggagcgcctcctgtcgcaacactcttggtggcttccgctgcgtctgcccctctggctttgactttgatcaggccctcgggggctgccaggaggtggatgagtgcgccggacggcgtggcccctgtagctacagctgtgccaacacgcctggtggcttcctgtgcggctgtcctcaaggctacttccgggctgggcaagggcactgtgtctccggcctgggcttcagccccggaccccaggacaccccggacaaagaggagctgctctcgtctgaagcctgctacgaatgcaagatcaatggcctctcccctcgggaccggccacgacgcagtgcccacagggaccaccaggtgaacctggccacccttgactccgaggccctgctgaccttgggcctgaacctctcacacctgggccgggccgagcgcatcctggagctccggccggccctggagggtctagagggccggatccgctacgtcatcgtccgcggaaacgagcaaggtttctttcgcatgcatcacctccgtggcgtcagctccctgcagctggggcggaggcggccggggcctggaacctaccggctggaggtggtgagccacatggcaggaccctggggtgtccagccagaggggcagccagggccatggggccaggccttgaggctgaaggtgcagctgcagttgctttagttgggaggagcctcagtgggccccagctgtccagagaagggggattctggaactgggaaggactgatccccagaagcgatggctgaccagattgaaccccgaaactcaggaagagtgaaatgctacacgacaacctcaggcaagcccggcctctgcctgggcctctgtgccagccccgggggccccccagttactcagtctttcctggagacagcaagaagctgcaatgtgcaatccccctgcccccacagccaaggtcaggaagaggccctgtggtcaccgtgtctggccaatctcaggctttcacttctgtactgcactgtggcttgccctggcggggggcagggggttggcaggacatggcaatgggcaactggggtgggcacagggcttattcctcggagtagaagggtgtacagggggcccagactccacagtgacttgccacatttgccccccatttggagaatgcttttatatcaaaagtggagacgataataaagttattttgggttaa

SEQ ID NO: 224147 - DNA, 9232 bp, Artificial Sequence
  derived and/or modified sequence
gccctctctcccctcccttccacttcccactcccgtcttgccttggctgtgcaccctcagccccaagacccttctctaacatcacacctcctccaggaagcctcctctgactgttcaccgcttcccggttggggctggatgcctccttgggctcccagaggccccggggctgccccatttggcaaccaccctgccctcctcgttgtgttgggtcccccatggctagggtggggggctcatctagggctgactctgcttcctctccgcagcctccaggggacacgccatgactctggagggtctgtatttggcaaggggccccctggcccggctcctgctggcctggtcggccctgttgtgcatggcaggtggccaaggccgctgggacggggccttggaggctgcaggtcctggacgtgtgcggaggcggggcagcccaggcatcttgcaggggccgaatgtgtgcggctcccggttccatgcctactgctgtccaggctggaggacattccctggcaggagccagtgtgtcgtacccatctgtaggcgcgcctgcggtgaaggcttctgctcccagcccaacctgtgcacctgtgcggatgggacgctggctcccagctgcggggtgagccgagggtcagggtgcagtgtgagctgtatgaatgggggcacctgccggggggcgtcctgtctgtgtcagaagggctacacaggcaccgtgtgtgggcagcccatctgtgaccgcggctgccacaatgggggtcgctgcattgggcccaaccgctgcgcctgtgtgtatggcttcatgggacctcaatgtgagagagattaccggacgggaccctgctttggccaagtaggccccgaggggtgccagcatcagctgacgggcctcgtgtgcaccaaggcactttgctgtgccactgtgggccgtgcctggggccttccatgtgaactttgccctgcacagccacacccctgccgccgcggcttcatccccaatatccacacgggggcctgccaagatgtggatgagtgccaggctgtgccaggcctgtgccagggaggcagctgcgtcaacatggtgggctccttccattgccgctgtccagttggacaccggctcagtgacagcagcgccgcatgtgaagactaccgggccggcgcctgcttctcagtgcttttcgggggccgctgtgctggagacctcgccggccactacactcgcaggcagtgctgctgtgacaggggcaggtgctgggcagctggcccggtccctgagctgtgtcctcctcggggctccaatgaattccagcaactgtgcgcccagcggctgccgctgctacccggccaccctggcctcttccctggcctcctgggcttcggatccaatggcatgggtccccctcttgggccagcgcgactcaacccccatggctctgatgcgcgtgggatccccagcctgggccctggcaactctaatattggcactgctaccctgaaccagaccattgacatctgccgacacttcaccaacctgtgtctgaatggccgctgcctgcccacgccttccagctaccgctgcgagtgtaacgtgggctacacccaggacgtgcgcggcgagtgcattgatgtagacgaatgcaccagcagcccctgccaccacggtgactgcgtcaacatccccggcacctaccactgccggtgctacccgggcttccaggccacgcccaccaggcaggcatgcgtggatgtggacgagtgcattgtcagtggtggcctttgtcacctgggccgctgtgtcaacacagagggcagcttccagtgtgtctgcaatgcaggcttcgagctcagccctgacggcaagaactgtgtggaccacaacgagtgtgccaccagcaccatgtgcgtcaacggcgtgtgtctcaacgaggatggcagcttctcctgcctctgcaaacccggcttcctgctggcgcctggcggccactactgcatggacattgacgagtgccagacgcccggcatctgcgtgaacggccactgtaccaacaccgagggctccttccgctgccagtgcctgggggggctggcggtaggcacggatggccgcgtgtgcgtggacacccacgtgcgcagcacctgctatggggccatcgagaagggctcctgtgcccgccccttccctggcactgtcaccaagtccgagtgctgctgtgccaatccggaccacggttttggggagccctgccagctttgtcctgccaaagactccgctgagttccaggcactgtgcagcagtgggcttggcattaccacggatggtcgagacatcaacgagtgtgctctggatcctgaggtttgtgccaatggcgtgtgcgagaaccttcggggcagctaccgctgtgtctgcaacctgggttatgaggcaggtgcctcaggcaaggactgcacagacgtggatgagtgtgccctcaacagcctcctgtgtgacaacgggtggtgccagaatagccctggcagctacagctgctcctgcccccccggcttccacttctggcaggacacggagatctgcaaagatgtcgacgaatgcctgtccagcccgtgtgtgagtggcgtctgtcggaacctggccggctcctacacctgcaaatgtggccctggcagccggctggacccctctggtaccttctgtctagacagcaccaagggcacctgctggctgaagatccaggagagccgctgtgaggtgaaccttcagggagccagcctgcggtctgagtgctgcgccaccctcggggcagcctgggggagcccctgcgaacgctgcgagatcgaccctgcctgtgcccggggctttgcccggatgacgggtgtcacctgcgatgatgtgaacgagtgtgagtccttcccgggagtctgtcccaacgggcgttgcgtcaacactgctgggtctttccgctgtgagtgtccagagggcctgatgctggacgcctcaggccggctgtgcgtggatgtgagattggaaccatgtttcctgcgatgggatgaggatgagtgtggggtcaccctgcctggcaagtaccggatggacgtctgctgctgctccatcggggccgtgtggggagtcgagtgcgaggcctgcccggatcccgagtctctggagttcgccagcctgtgcccgcgggggctgggcttcgccagccgggacttcctgtctggccgaccattctataaagatgtgaatgaatgcaaggtgttccctggcctctgcacgcacggtacctgcagaaacacggtgggcagcttccactgcgcctgtgcggggggcttcgccctggatgcccaggaacggaactgcacagatatcgacgagtgtcgcatctctcctgacctctgcggccagggcacctgtgtcaacacgccgggcagctttgagtgcgagtgttttcccggctacgagagtggcttcatgctgatgaagaactgcatggacgtggacgagtgtgcaagggacccgctgctctgccggggaggcacttgcaccaacacggatgggagctacaagtgccagtgtccccctgggcatgagctgacggccaagggcactgcctgtgaggacatcgatgagtgctccctgagtgatggcctgtgtccccatggccagtgtgtcaatgtcatcggtgccttccagtgctcctgccatgccggcttccagagcacacctgaccgccagggctgcgtggacatcaacgaatgccgggtccagaatggtgggtgtgacgtgcactgtattaacactgagggcagctaccggtgcagctgtgggcagggctactcgctgatgcccgacggaagggcatgtgcagacgtggacgagtgtgaagagaacccccgcgtttgtgaccaaggccactgcaccaacatgccagggggtcaccgctgcctgtgctatgatggcttcatggccacgccagacatgaggacatgtgttgatgtggatgagtgtgacctgaaccctcacatctgcctccatggggactgcgagaacacgaagggttcctttgtctgccactgtcagctgggctacatggtcaggaagggggccacaggctgctctgatgtggatgaatgcgaggttggaggacacaactgtgacagtcacgcctcctgtctcaacatcccggggagtttcagctgtaggtgcctgccaggctgggtgggggatggcttcgaatgtcacgacctggatgaatgcgtctcccaggagcaccggtgcagcccaagaggtgactgtctcaatgtccctggctcctaccgctgcacctgccgccagggctttgccggggatggcttcttctgcgaagacagggatgaatgtgccgagaacgtggacctctgtgacaacgggcagtgcctcaatgcgcccggcgggtaccgctgtgaatgtgagatgggctttgaccccaccgaggaccaccgggcctgccaggatgtggacgagtgtgcgcaagggaacctctgtgcatttgggagctgtgagaacctgcctggaatgttccgctgcatctgcaatggtggctacgaactggaccgagggggtggcaactgcacagacatcaacgagtgtgcagacccagtaaactgcatcaacggcgtgtgcattaacacccccggcagctacctctgcagctgcccccaggattttgagctgaaccccagcggagtgggctgcgtggacactcgggccgggaactgtttcctggagacgcatgaccgaggggacagtggcatttcctgcagtgccgagatcggagttggtgtcacccgagcttcctgctgttgctccctgggccgggcttggggcaatccctgtgagctgtgccctatggccaacaccactgagtacagaaccctgtgcccgggtggtgagggcttccagcctaaccgcatcactgtcattctggaagacatcgacgagtgccaagagctgccagggctgtgtcaggggggtgactgcgtcaacacgtttggcagtttccagtgtgagtgcccacctggctaccacctcagtgagcacacccgcatctgtgaggatattgacgaatgctccacacactccggcatctgtggccctggcacctgctacaacaccctggggaactacacctgtgtctgccctgcagagtacctccaagtcaatggtggcaacaactgcatggatatgaggaagagtgtctgcttccggcactataacggcacatgtcaaaatgagctggccttcaacgtgacccggaaaatgtgttgctgctcctacaacattggccaggcctggaatagaccctgtgaggcctgccccactcccatcagtcctgactaccagatcctgtgtggaaatcaggccccgggattcctcactgacatccacacggggaagccccttgacattgatgagtgtggggagatccccgccatctgtgccaatggcatctgcataaaccagatcgggagtttccgctgcgagtgccccgcaggcttcaactacaacagcatcctgctggcttgtgaagatgtcgatgagtgtggcagcagggagagtccctgccagcagaatgctgactgcatcaacatccccggtagctaccgctgcaagtgcacccgagggtacaaactgtcgccaggcggggcttgtgtgggacggaatgagtgtcgggagatcccgaatgtctgtagccatggtgactgcatggacacagaaggcagctacatgtgtctgtgtcaccgtggattccaggcctctgcagaccagaccctgtgcatggacattgacgagtgtgaccggcagccttgtggaaatgggacctgcaagaacatcattggctcctacaactgcctctgcttccctggctttgtggtgacacacaatggggattgtgtggattttgatgagtgtactaccctggtggggcaggtgtgccgatttggccattgcctcaacacagctggttccttccactgcctctgccaggatggctttgagctcacagctgatgggaagaactgtgtggacaccaatgagtgcctcagccttgcaggaacctgcctacccggcacttgccagaacctcgagggctccttccgctgcatctgtccccctggcttccaggtgcagagtgaccactgcattgatatcgacgagtgctcagaggagcccaacctctgcctctttggcacctgtaccaacagccctgggagcttccagtgcctctgcccacctggctttgtcctctctgacaatgggcaccgttgctttgacacacggcagagtttctgcttcacccgttttgaggctgggaagtgctcggtgcccaaagctttcaacaccaccaagacccgctgctgctgcagtaagaggcctggggagggctggggagacccctgcgaactgtgtccccaggagggcagcgctgcctttcaggagctctgcccctttggccacggggcagtcccaggcccggatgactcccgagaagacgtgaatgagtgtgcagagaaccctggcgtctgcactaacggcgtctgtgtcaacaccgatggatccttccgctgtgagtgtccctttggctacagcctggacttcactggcatcaactgtgtggacacagacgagtgctctgtcggccacccctgtgggcaagggacatgcaccaatgtcatcggaggcttcgaatgtgcctgtgctgacggctttgagcctggcctcatgatgacctgcgaggacatcgacgaatgctccctgaacccgctgctctgtgccttccgctgccacaataccgagggctcctacctgtgcacctgtccagccggctacaccctgcgggaggatggggccatgtgtcgagatgtggacgagtgtgcagatggtcagcaggactgccacgcccggggcatggagtgcaagaacctcatcggtaccttcgcgtgcgtctgtcccccaggcatgcggcccctgcctggctctggggagggctgcacagatgacaatgaatgccacgctcagcctgacctctgtgtcaacggccgctgtgtcaacaccgcgggcagcttccggtgcgactgtgatgagggattccagcccagccccacccttaccgagtgccacgacatccggcaggggccctgctttgccgaggtgctgcagaccatgtgccggtctctgtccagcagcagtgaggctgtcaccagggccgagtgctgctgtgggggtggccggggctgggggccccgctgcgagctctgtcccctgcccggcacctctgcctacaggaagctgtgcccccatggctcaggctacactgctgagggccgagatgtagatgaatgccgtatgcttgctcacctgtgtgctcatggggagtgcatcaacagccttggctccttccgctgccactgtcaggccgggtacacaccggatgctactgctactacctgcctggatatggatgagtgcagccaggtccccaagccatgtaccttcctctgcaaaaacacgaagggcagtttcctgtgcagctgtccccgaggctacctgctggaggaggatggcaggacctgcaaagacctggacgaatgcacctcccggcagcacaactgtcagttcctctgtgtcaacactgtgggcgccttcacctgccgctgtccgcccggcttcacccagcaccaccaggcctgcttcgacaatgatgagtgctcagcccagcctggcccatgtggtgcccacgggcactgccacaacaccccgggcagcttccgctgtgaatgccaccaaggcttcaccctggtcagctcaggccatggctgtgaagatgtgaatgaatgtgatgggccccaccgctgccagcatggctgtcagaaccagctagggggctaccgctgcagctgcccccagggtttcacccagcactcccagtgggcccagtgtgtggatgagaatgagtgtgccctgtcgccccccacctgcgggagcgcctcctgtcgcaacactcttggtggcttccgctgcgtctgcccctctggctttgactttgatcaggccctcgggggctgccaggaggtggatgagtgcgccggacggcgtggcccctgtagctacagctgtgccaacacgcctggtggcttcctgtgcggctgtcctcaaggctacttccgggctgggcaagggcactgtgtctccggcctgggcttcagccccggaccccaggacaccccggacaaagaggagctgctctcgtctgaagcctgctacgaatgcaagatcaatggcctctcccctcgggaccggccacgacgcagtgcccacagggaccaccaggtgaacctggccacccttgactccgaggccctgctgaccttgggcctgaacctctcacacctgggccgggccgagcgcatcctggagctccggccggccctggagggtctagagggccggatccgctacgtcatcgtccgcggaaacgagcaaggtttctttcgcatgcatcacctccgtggcgtcagctccctgcagctggggcggaggcggccggggcctggaacctaccggctggaggtggtgagccacatggcaggaccctggggtgtccagccagaggggcagccagggccatggggccaggccttgaggctgaaggtgcagctgcagttgctttagttgggaggagcctcagtgggccccagctgtccagagaagggggattctggaactgggaaggactgatccccagaagcgatggctgaccagattgaaccccgaaactcaggaagagtgaaatgctacacgacaacctcaggcaagcccggcctctgcctgggcctctgtgccagccccgggggccccccagttactcagtctttcctggagacagcaagaagctgcaatgtgcaatccccctgcccccacagccaaggtcaggaagaggccctgtggtcaccgtgtctggccaatctcaggctttcacttctgtactgcactgtggcttgccctggcggggggcagggggttggcaggacatggcaatgggcaactggggtgggcacagggcttattcctcggagtagaagggtgtacagggggcccagactccacagtgacttgccacatttgccccccatttggagaatgcttttatatcaaaagtggagacgataataaagttattttgggtta

SEQ ID NO: 224148 - DNA, 8430 bp, Artificial Sequence
  derived and/or modified sequence
atgaccctggagggcctgtacctggccagaggccccctggccagactgctgctggcctggagcgccctgctgtgcatggccggcggccagggcagatgggacggcgccctggaggccgccggccccggcagagtgagaagaagaggcagccccggcatcctgcagggccccaacgtgtgcggcagcagattccacgcctactgctgccccggctggagaaccttccccggcagaagccagtgcgtggtgcccatctgcagaagagcctgcggcgagggcttctgcagccagcccaacctgtgcacctgcgccgacggcaccctggcccccagctgcggcgtgagcagaggcagcggctgcagcgtgagctgcatgaacggcggcacctgcagaggcgccagctgcctgtgccagaagggctacaccggcaccgtgtgcggccagcccatctgcgacagaggctgccacaacggcggcagatgcatcggccccaacagatgcgcctgcgtgtacggcttcatgggcccccagtgcgagagagactacagaaccggcccctgcttcggccaggtgggccccgagggctgccagcaccagctgaccggcctggtgtgcaccaaggccctgtgctgcgccaccgtgggcagagcctggggcctgccctgcgagctgtgccccgcccagccccacccctgcagaagaggcttcatccccaacatccacaccggcgcctgccaggacgtggacgagtgccaggccgtgcccggcctgtgccagggcggcagctgcgtgaacatggtgggcagcttccactgcagatgccccgtgggccacagactgagcgacagcagcgccgcctgcgaggactacagagccggcgcctgcttcagcgtgctgttcggcggcagatgcgccggcgacctggccggccactacaccagaagacagtgctgctgcgacagaggcagatgctgggccgccggccccgtgcccgagctgtgcccccccagaggcagcaacgagttccagcagctgtgcgcccagagactgcccctgctgcccggccaccccggcctgttccccggcctgctgggcttcggcagcaacggcatgggcccccccctgggccccgccagactgaacccccacggcagcgacgccagaggcatccccagcctgggccccggcaacagcaacatcggcaccgccaccctgaaccagaccatcgacatctgcagacacttcaccaacctgtgcctgaacggcagatgcctgcccacccccagcagctacagatgcgagtgcaacgtgggctacacccaggacgtgagaggcgagtgcatcgacgtggacgagtgcaccagcagcccctgccaccacggcgactgcgtgaacatccccggcacctaccactgcagatgctaccccggcttccaggccacccccaccagacaggcctgcgtggacgtggacgagtgcatcgtgagcggcggcctgtgccacctgggcagatgcgtgaacaccgagggcagcttccagtgcgtgtgcaacgccggcttcgagctgagccccgacggcaagaactgcgtggaccacaacgagtgcgccaccagcaccatgtgcgtgaacggcgtgtgcctgaacgaggacggcagcttcagctgcctgtgcaagcccggcttcctgctggcccccggcggccactactgcatggacatcgacgagtgccagacccccggcatctgcgtgaacggccactgcaccaacaccgagggcagcttcagatgccagtgcctgggcggcctggccgtgggcaccgacggcagagtgtgcgtggacacccacgtgagaagcacctgctacggcgccatcgagaagggcagctgcgccagacccttccccggcaccgtgaccaagagcgagtgctgctgcgccaaccccgaccacggcttcggcgagccctgccagctgtgccccgccaaggacagcgccgagttccaggccctgtgcagcagcggcctgggcatcaccaccgacggcagagacatcaacgagtgcgccctggaccccgaggtgtgcgccaacggcgtgtgcgagaacctgagaggcagctacagatgcgtgtgcaacctgggctacgaggccggcgccagcggcaaggactgcaccgacgtggacgagtgcgccctgaacagcctgctgtgcgacaacggctggtgccagaacagccccggcagctacagctgcagctgcccccccggcttccacttctggcaggacaccgagatctgcaaggacgtggacgagtgcctgagcagcccctgcgtgagcggcgtgtgcagaaacctggccggcagctacacctgcaagtgcggccccggcagcagactggaccccagcggcaccttctgcctggacagcaccaagggcacctgctggctgaagatccaggagagcagatgcgaggtgaacctgcagggcgccagcctgagaagcgagtgctgcgccaccctgggcgccgcctggggcagcccctgcgagagatgcgagatcgaccccgcctgcgccagaggcttcgccagaatgaccggcgtgacctgcgacgacgtgaacgagtgcgagagcttccccggcgtgtgccccaacggcagatgcgtgaacaccgccggcagcttcagatgcgagtgccccgagggcctgatgctggacgccagcggcagactgtgcgtggacgtgagactggagccctgcttcctgagatgggacgaggacgagtgcggcgtgaccctgcccggcaagtacagaatggacgtgtgctgctgcagcatcggcgccgtgtggggcgtggagtgcgaggcctgccccgaccccgagagcctggagttcgccagcctgtgccccagaggcctgggcttcgccagcagagacttcctgagcggcagacccttctacaaggacgtgaacgagtgcaaggtgttccccggcctgtgcacccacggcacctgcagaaacaccgtgggcagcttccactgcgcctgcgccggcggcttcgccctggacgcccaggagagaaactgcaccgacatcgacgagtgcagaatcagccccgacctgtgcggccagggcacctgcgtgaacacccccggcagcttcgagtgcgagtgcttccccggctacgagagcggcttcatgctgatgaagaactgcatggacgtggacgagtgcgccagagaccccctgctgtgcagaggcggcacctgcaccaacaccgacggcagctacaagtgccagtgcccccccggccacgagctgaccgccaagggcaccgcctgcgaggacatcgacgagtgcagcctgagcgacggcctgtgcccccacggccagtgcgtgaacgtgatcggcgccttccagtgcagctgccacgccggcttccagagcacccccgacagacagggctgcgtggacatcaacgagtgcagagtgcagaacggcggctgcgacgtgcactgcatcaacaccgagggcagctacagatgcagctgcggccagggctacagcctgatgcccgacggcagagcctgcgccgacgtggacgagtgcgaggagaaccccagagtgtgcgaccagggccactgcaccaacatgcccggcggccacagatgcctgtgctacgacggcttcatggccacccccgacatgagaacctgcgtggacgtggacgagtgcgacctgaacccccacatctgcctgcacggcgactgcgagaacaccaagggcagcttcgtgtgccactgccagctgggctacatggtgagaaagggcgccaccggctgcagcgacgtggacgagtgcgaggtgggcggccacaactgcgacagccacgccagctgcctgaacatccccggcagcttcagctgcagatgcctgcccggctgggtgggcgacggcttcgagtgccacgacctggacgagtgcgtgagccaggagcacagatgcagccccagaggcgactgcctgaacgtgcccggcagctacagatgcacctgcagacagggcttcgccggcgacggcttcttctgcgaggacagagacgagtgcgccgagaacgtggacctgtgcgacaacggccagtgcctgaacgcccccggcggctacagatgcgagtgcgagatgggcttcgaccccaccgaggaccacagagcctgccaggacgtggacgagtgcgcccagggcaacctgtgcgccttcggcagctgcgagaacctgcccggcatgttcagatgcatctgcaacggcggctacgagctggacagaggcggcggcaactgcaccgacatcaacgagtgcgccgaccccgtgaactgcatcaacggcgtgtgcatcaacacccccggcagctacctgtgcagctgcccccaggacttcgagctgaaccccagcggcgtgggctgcgtggacaccagagccggcaactgcttcctggagacccacgacagaggcgacagcggcatcagctgcagcgccgagatcggcgtgggcgtgaccagagccagctgctgctgcagcctgggcagagcctggggcaacccctgcgagctgtgccccatggccaacaccaccgagtacagaaccctgtgccccggcggcgagggcttccagcccaacagaatcaccgtgatcctggaggacatcgacgagtgccaggagctgcccggcctgtgccagggcggcgactgcgtgaacaccttcggcagcttccagtgcgagtgcccccccggctaccacctgagcgagcacaccagaatctgcgaggacatcgacgagtgcagcacccacagcggcatctgcggccccggcacctgctacaacaccctgggcaactacacctgcgtgtgccccgccgagtacctgcaggtgaacggcggcaacaactgcatggacatgagaaagagcgtgtgcttcagacactacaacggcacctgccagaacgagctggccttcaacgtgaccagaaagatgtgctgctgcagctacaacatcggccaggcctggaacagaccctgcgaggcctgccccacccccatcagccccgactaccagatcctgtgcggcaaccaggcccccggcttcctgaccgacatccacaccggcaagcccctggacatcgacgagtgcggcgagatccccgccatctgcgccaacggcatctgcatcaaccagatcggcagcttcagatgcgagtgccccgccggcttcaactacaacagcatcctgctggcctgcgaggacgtggacgagtgcggcagcagagagagcccctgccagcagaacgccgactgcatcaacatccccggcagctacagatgcaagtgcaccagaggctacaagctgagccccggcggcgcctgcgtgggcagaaacgagtgcagagagatccccaacgtgtgcagccacggcgactgcatggacaccgagggcagctacatgtgcctgtgccacagaggcttccaggccagcgccgaccagaccctgtgcatggacatcgacgagtgcgacagacagccctgcggcaacggcacctgcaagaacatcatcggcagctacaactgcctgtgcttccccggcttcgtggtgacccacaacggcgactgcgtggacttcgacgagtgcaccaccctggtgggccaggtgtgcagattcggccactgcctgaacaccgccggcagcttccactgcctgtgccaggacggcttcgagctgaccgccgacggcaagaactgcgtggacaccaacgagtgcctgagcctggccggcacctgcctgcccggcacctgccagaacctggagggcagcttcagatgcatctgcccccccggcttccaggtgcagagcgaccactgcatcgacatcgacgagtgcagcgaggagcccaacctgtgcctgttcggcacctgcaccaacagccccggcagcttccagtgcctgtgcccccccggcttcgtgctgagcgacaacggccacagatgcttcgacaccagacagagcttctgcttcaccagattcgaggccggcaagtgcagcgtgcccaaggccttcaacaccaccaagaccagatgctgctgcagcaagagacccggcgagggctggggcgacccctgcgagctgtgcccccaggagggcagcgccgccttccaggagctgtgccccttcggccacggcgccgtgcccggccccgacgacagcagagaggacgtgaacgagtgcgccgagaaccccggcgtgtgcaccaacggcgtgtgcgtgaacaccgacggcagcttcagatgcgagtgccccttcggctacagcctggacttcaccggcatcaactgcgtggacaccgacgagtgcagcgtgggccacccctgcggccagggcacctgcaccaacgtgatcggcggcttcgagtgcgcctgcgccgacggcttcgagcccggcctgatgatgacctgcgaggacatcgacgagtgcagcctgaaccccctgctgtgcgccttcagatgccacaacaccgagggcagctacctgtgcacctgccccgccggctacaccctgagagaggacggcgccatgtgcagagacgtggacgagtgcgccgacggccagcaggactgccacgccagaggcatggagtgcaagaacctgatcggcaccttcgcctgcgtgtgcccccccggcatgagacccctgcccggcagcggcgagggctgcaccgacgacaacgagtgccacgcccagcccgacctgtgcgtgaacggcagatgcgtgaacaccgccggcagcttcagatgcgactgcgacgagggcttccagcccagccccaccctgaccgagtgccacgacatcagacagggcccctgcttcgccgaggtgctgcagaccatgtgcagaagcctgagcagcagcagcgaggccgtgaccagagccgagtgctgctgcggcggcggcagaggctggggccccagatgcgagctgtgccccctgcccggcaccagcgcctacagaaagctgtgcccccacggcagcggctacaccgccgagggcagagacgtggacgagtgcagaatgctggcccacctgtgcgcccacggcgagtgcatcaacagcctgggcagcttcagatgccactgccaggccggctacacccccgacgccaccgccaccacctgcctggacatggacgagtgcagccaggtgcccaagccctgcaccttcctgtgcaagaacaccaagggcagcttcctgtgcagctgccccagaggctacctgctggaggaggacggcagaacctgcaaggacctggacgagtgcaccagcagacagcacaactgccagttcctgtgcgtgaacaccgtgggcgccttcacctgcagatgcccccccggcttcacccagcaccaccaggcctgcttcgacaacgacgagtgcagcgcccagcccggcccctgcggcgcccacggccactgccacaacacccccggcagcttcagatgcgagtgccaccagggcttcaccctggtgagcagcggccacggctgcgaggacgtgaacgagtgcgacggcccccacagatgccagcacggctgccagaaccagctgggcggctacagatgcagctgcccccagggcttcacccagcacagccagtgggcccagtgcgtggacgagaacgagtgcgccctgagcccccccacctgcggcagcgccagctgcagaaacaccctgggcggcttcagatgcgtgtgccccagcggcttcgacttcgaccaggccctgggcggctgccaggaggtggacgagtgcgccggcagaagaggcccctgcagctacagctgcgccaacacccccggcggcttcctgtgcggctgcccccagggctacttcagagccggccagggccactgcgtgagcggcctgggcttcagccccggcccccaggacacccccgacaaggaggagctgctgagcagcgaggcctgctacgagtgcaagatcaacggcctgagccccagagacagacccagaagaagcgcccacagagaccaccaggtgaacctggccaccctggacagcgaggccctgctgaccctgggcctgaacctgagccacctgggcagagccgagagaatcctggagctgagacccgccctggagggcctggagggcagaatcagatacgtgatcgtgagaggcaacgagcagggcttcttcagaatgcaccacctgagaggcgtgagcagcctgcagctgggcagaagaagacccggccccggcacctacagactggaggtggtgagccacatggccggcccctggggcgtgcagcccgagggccagcccggcccctggggccaggccctgagactgaaggtgcagctgcagctgctgtag

SEQ ID NO: 224149 - DNA, 2619 bp, Artificial Sequence
  derived and/or modified sequence
atgggcatcgtgtggatcctgatgagcgtgctgccctggtggggcagatgcgccgacctggccatcgccagcacccagctggtgcccagcaccgccagcgccagaatggccctgagcagccagctgatgggcagaaccgtgtggacccccatgagcgccagcgccctgcaggagcccgcctaccccgccctggccagaaccagcagagcccccagcgccgccagcgtgcccctggccagcagatgcagagtgaccaccgccctgatcagcaccagcgcccagagaagccccaccagcgccagcctggcccccgtgcccaccgccctgggcgccagcagcgccagcgcccacctggccctgagcagcctgaccatgggcaccgtggccctgacccacggcagagtgagcgccagccccgtgctgagactgggcagcgccagatgccccaagctgagcaccccccccagacccgccgccgccgccgtgagaggcctgggcagagccggcgagacccccgccaactgcgtgcccagaagagccgtgcccggccccgacgacagcagagaggacgtgaacgagtgcgccgagaaccccggcgtgtgcaccaacggcgtgtgcgtgaacaccgacggcagcttcagatgcgagtgccccttcggctacagcctggacttcaccggcatcaactgcgtggacaccgacgagtgcagcgtgggccacccctgcggccagggcacctgcaccaacgtgatcggcggcttcgagtgcgcctgcgccgacggcttcgagcccggcctgatgatgacctgcgaggacatcgacgagtgcagcctgaaccccctgctgtgcgccttcagatgccacaacaccgagggcagctacctgtgcacctgccccgccggctacaccctgagagaggacggcgccatgtgcagagacgtggacgagtgcgccgacggccagcaggactgccacgccagaggcatggagtgcaagaacctgatcggcaccttcgcctgcgtgtgcccccccggcatgagacccctgcccggcagcggcgagggctgcaccgacgacaacgagtgccacgcccagcccgacctgtgcgtgaacggcagatgcgtgaacaccgccggcagcttcagatgcgactgcgacgagggcttccagcccagccccaccctgaccgagtgccacgacatcagacagggcccctgcttcgccgaggtgctgcagaccatgtgcagaagcctgagcagcagcagcgaggccgtgaccagagccgagtgctgctgcggcggcggcagaggctggggccccagatgcgagctgtgccccctgcccggcaccagcgcctacagaaagctgtgcccccacggcagcggctacaccgccgagggcagagacgtggacgagtgcagaatgctggcccacctgtgcgcccacggcgagtgcatcaacagcctgggcagcttcagatgccactgccaggccggctacacccccgacgccaccgccaccacctgcctggacatggacgagtgcagccaggtgcccaagccctgcaccttcctgtgcaagaacaccaagggcagcttcctgtgcagctgccccagaggctacctgctggaggaggacggcagaacctgcaaggacctggacgagtgcaccagcagacagcacaactgccagttcctgtgcgtgaacaccgtgggcgccttcacctgcagatgcccccccggcttcacccagcaccaccaggcctgcttcgacgtgaacgagtgcgacggcccccacagatgccagcacggctgccagaaccagctgggcggctacagatgcagctgcccccagggcttcacccagcacagccagtgggcccagtgcgtggacgagaacgagtgcgccctgagcccccccacctgcggcagcgccagctgcagaaacaccctgggcggcttcagatgcgtgtgccccagcggcttcgacttcgaccaggccctgggcggctgccaggaggtggacgagtgcgccggcagaagaggcccctgcagctacagctgcgccaacacccccggcggcttcctgtgcggctgcccccagggctacttcagagccggccagggccactgcgtgagcggcctgggcttcagccccggcccccaggacacccccgacaaggaggagctgctgagcagcgaggcctgctacgagtgcaagatcaacggcctgagccccagagacagacccagaagaagcgcccacagagaccaccaggtgaacctggccaccctggacagcgaggccctgctgaccctgggcctgaacctgagccacctgggcagagccgagagaatcctggagctgagacccgccctggagggcctggagggcagaatcagatacgtgatcgtgagaggcaacgagcagggcttcttcagaatgcaccacctgagaggcgtgagcagcctgcagctgggcagaagaagacccggccccggcacctacagactggaggtggtgagccacatggccggcccctggggcgtgcagcccgagggccagcccggcccctggggccaggccctgagactgaaggtgcagctgcagctgctgtag

SEQ ID NO: 224150 - DNA, 8430 bp, Artificial Sequence
  derived and/or modified sequence
atgacacttgaaggtctgtacctcgctcggggaccactggctagactcttgcttgcatggagtgctctattgtgcatggccgggggacaggggcgatgggatggtgcactggaggctgccgggcccggcagagtacggcgccgcggaagcccagggatcctccagggccctaacgtgtgcgggagcagattccacgcatattgttgtcctgggtggagaacattccctggacgttcacagtgcgtagtgcctatatgccgcagagcttgcggagaaggcttttgttcgcaacctaatttatgcacctgcgctgatggaaccctggcaccttcatgtggagtatccagaggctcaggttgttccgtctcctgcatgaacggcggtacatgtcgtggagcctcctgtctctgccagaaaggctatactggaaccgtttgcggccaaccaatatgcgacagaggttgccacaatggcggaagatgcattgggccaaatagatgtgcatgcgtgtacggatttatgggaccccagtgtgagagggattaccgcaccgggccttgctttgggcaagtcggaccagagggctgtcaacaccagctcaccggactggtttgcacaaaggctctctgttgtgccactgttggccgggcctggggactgccatgcgaactgtgcccagctcagccccacccatgtagacgcggcttcatcccgaatattcacaccggggcctgtcaagacgtggacgaatgtcaggccgttccggggctctgtcaaggaggtagctgtgtgaatatggtgggatccttccactgtcggtgtccagtcgggcacaggttatctgactcaagtgcagcgtgtgaagactaccgggcaggggcatgttttagcgtgcttttcggaggccgctgcgccggggatcttgctggccattacacgcgtcgccaatgctgttgtgaccggggtcgatgctgggctgcaggaccagtcccagagctttgcccccctaggggctccaacgagtttcagcaactgtgtgcccaacgcctcccactcctgcctgggcaccctggactcttcccaggtcttctgggattcggaagcaatggaatgggccctcccctagggcctgcgcgcctcaatcctcacggctccgacgcccgggggatcccctccctggggcccggcaatagcaacattggtaccgcgaccttgaatcagacaatcgacatttgtcggcattttactaacctgtgtcttaacggccgctgcctccctacgccctcttcctacagatgtgaatgcaatgttggctacactcaggacgtcagaggcgagtgtatcgacgtggacgaatgcacatcctccccatgccaccatggagattgcgtgaacatacctggaacttatcattgccggtgttatcctggatttcaagcgacgccgacccggcaggcttgcgttgacgtggatgagtgtatcgtgtccggcggactgtgtcacctcgggagatgcgtcaataccgagggctccttccagtgcgtttgcaacgccggcttcgaactctcacctgatggaaaaaactgcgtggatcacaatgaatgtgcaaccagcacgatgtgcgttaacggtgtttgcctaaatgaagacgggtcgttcagctgtctatgtaagcctgggttcctcctcgcccctggcggacattattgtatggacatcgacgaatgccagacacccgggatctgtgtcaatggccattgcacgaacactgagggatccttcagatgccagtgcttagggggcttagccgtgggaacagatgggagagtatgtgtggatacacacgtaaggtccacatgttacggtgcgatcgagaaagggagctgtgcccgtcccttccccggtactgtcactaaatccgagtgttgctgtgcaaatcccgatcacgggtttggggaaccatgtcaactttgtccagcgaaggattcagccgaattccaggctctgtgctcatctggcctgggcattacgaccgatggcagggacataaacgaatgcgccctagaccctgaggtatgtgcgaacggcgtgtgtgaaaaccttcgggggtcctatcggtgcgtgtgtaatctgggatatgaggcaggagcaagcggaaaagactgtacggacgttgatgagtgcgctctgaactcgttactctgcgacaacggctggtgccaaaattcgcctggttcttactcctgcagctgtcctcccggcttccacttctggcaggatacagagatatgtaaggatgtcgatgaatgtttgagcagtccctgtgtaagcggggtgtgccgcaacctggccggatcttatacttgtaaatgtgggcctggaagtagactagacccgagcgggactttctgcctggatagcaccaaaggtacctgctggctgaaaattcaggagtccaggtgcgaggtgaacctccagggcgcctctctgcgttccgaatgctgcgctacccttggagcagcctggggaagcccttgtgagcggtgtgaaatcgaccccgcatgtgctcgtggcttcgccaggatgacaggagttacctgtgacgacgtgaacgaatgcgagtcctttccaggcgtgtgtccaaacggacggtgtgtgaatactgccggatcattccgctgtgaatgccccgagggccttatgctggatgcttcaggacggttgtgcgtagatgttcgcctagaaccctgcttcttacggtgggacgaggatgagtgtggagtcacgcttcccgggaaatatcgcatggatgtttgctgttgctcaattggtgccgtgtggggggtcgagtgcgaagcgtgcccagaccccgaatctctggagtttgcaagtttgtgtccgcgcgggctgggattcgcttcccgagattttttgtccggcagaccgttttataaagatgtgaatgagtgcaaagtgttcccaggactgtgcacccacggcacgtgccggaatacggtgggatcttttcactgcgcctgtgccggagggtttgccctggatgcacaagagcggaactgtaccgacatagatgaatgtaggatctctcccgatctgtgtggacaaggtacttgtgtgaatactcccgggagttttgagtgcgagtgcttccctgggtatgaatcaggattcatgctgatgaaaaattgtatggacgtggacgaatgcgcacgcgatcctcttctatgccgtggaggcacctgtacaaacacggacggctcctacaaatgtcagtgtcctcccggccacgaacttacagcaaagggcactgcctgtgaggacatcgatgaatgttcacttagtgatggcctgtgcccacatgggcagtgcgttaatgtcattggagctttccagtgtagctgccacgcaggtttccaaagcaccccagacaggcaggggtgtgtcgacatcaatgagtgtcgggtgcagaatggaggatgcgacgttcactgtattaacaccgaagggagttacagatgctcatgcggacagggttattcactaatgccagacgggcgtgcctgcgctgacgtcgacgagtgtgaggagaacccaagagtctgtgatcagggacactgtacaaacatgccaggggggcacagatgcttatgttacgatggtttcatggccacccccgatatgcgtacatgcgtggacgtggacgagtgtgacctcaatccccacatatgcctgcacggcgactgtgagaacacaaagggatcttttgtttgtcattgccaacttggctatatggtccggaaaggagcaacaggctgttctgacgttgatgaatgtgaggttggcggtcataattgcgatagccatgcttcatgcctgaatattcctggctctttttcttgccggtgtttacctgggtgggtgggggacggtttcgagtgtcacgatttggatgagtgcgtcagccaagagcatcgatgctctccgaggggtgactgtctaaacgtacccgggtcctataggtgtacatgccggcagggctttgccggagacggcttcttctgcgaggatcgggatgagtgcgccgagaatgtggatctgtgcgataacgggcaatgtttgaacgccccaggaggctacagatgcgagtgcgaaatgggctttgacccgacagaagatcaccgagcatgccaggatgtagacgagtgtgcacagggtaatttatgtgctttcggttcttgtgagaacttgcctggtatgtttagatgtatttgcaacggaggctacgagttagataggggcggcggcaactgcacagacataaatgaatgtgcggaccctgtgaattgtatcaatggcgtttgtattaacacaccaggatcttatctgtgcagttgcccccaggatttcgagctgaaccccagcggcgtaggctgcgttgatacccgcgcgggcaattgctttctggaaactcatgaccggggtgacagcggcattagctgctctgctgaaataggggtgggcgtgacaagggcaagctgctgctgctcactcgggagggcttggggcaatccctgtgagctctgcccgatggccaatacaaccgaataccgcaccttgtgtccaggaggagaaggatttcagcctaaccgaattacggtgattttggaggatattgacgaatgtcaggagctgcctggcttgtgccagggcggtgactgtgtcaatacttttggtagctttcagtgcgagtgcccacccggatatcatttgtccgagcacacacgcatctgtgaagatatcgatgaatgctctactcacagtggaatctgtggtccaggaacatgctataatacacttgggaactatacttgtgtctgtcccgccgagtatctgcaggtcaatggagggaacaactgtatggatatgcggaagtccgtgtgttttcgccattacaacgggacatgccagaacgaactggccttcaacgttacacgcaaaatgtgctgctgcagctacaacattgggcaagcctggaatcgcccttgcgaggcctgcccgacccccatctcacccgactaccagatactgtgcggaaatcaagcccccggctttctcactgatatccatacaggaaagcctttggacatcgatgagtgtggcgaaatcccggctatttgcgccaacggtatttgtataaaccaaattggcagctttagatgtgagtgccccgctggcttcaactataacagcatattgcttgcctgcgaagatgtggacgagtgtggtagtagggagagcccatgccagcagaatgccgactgtatcaatatcccaggttcctacaggtgtaagtgcacccgggggtacaaactgtctcccgggggtgcctgtgtgggcaggaacgaatgtcgcgagatccctaacgtctgttctcatggggattgcatggataccgagggcagttatatgtgtctctgccatcgtggtttccaggcgtctgcagaccagacactctgtatggacatcgacgaatgcgacagacagccatgcggaaacggtacgtgtaaaaacatcattggatcatacaattgcctatgttttcccggatttgtagtgacccacaacggggattgcgtcgatttcgacgagtgcaccacactggtgggacaggtctgtaggttcggccattgcctcaatacagctggatcttttcactgcttatgccaggatgggttcgagctgacagctgacggtaagaattgtgtcgacacaaacgagtgcctgagtctggctggtacatgtctccccggaacctgccagaacttagagggttcctttagatgcatttgccccccaggcttccaggtacagtctgatcactgcatagacattgacgagtgttctgaggagcccaatctgtgcctgttcggtacctgtactaactcccccggatctttccagtgcttatgccccccgggatttgttttatcagataatggccatcggtgctttgacactcggcaatccttctgtttcaccagattcgaagctggcaagtgctcagtgccgaaagcatttaacaccaccaagacccgatgctgttgctctaagaggcctggagagggttggggcgatccctgcgagctctgccctcaggaaggtagtgccgcatttcaggagctttgcccattcggccacggcgccgtgccaggtccagacgacagtagagaagatgtcaatgaatgcgcggaaaatccgggagtctgcacaaatggagtgtgtgtcaataccgatggatcgtttagatgcgaatgcccattcggatattcactggacttcaccggaattaattgcgtcgatacggatgagtgctccgtcggtcatccctgtggccagggcacctgcacaaatgtgattggggggttcgagtgcgcatgcgcggatgggtttgagcctggcttaatgatgacttgcgaggatatcgatgaatgcagcctgaaccctctcctctgtgcattccggtgtcacaatactgaggggtcttacttgtgcacatgccctgctggatacaccctcagggaagatggggccatgtgtagagacgtggacgaatgtgcggacggccagcaggactgtcacgccagaggaatggaatgcaagaatttgatcggtaccttcgcttgtgtgtgcccccctgggatgaggcctctgcccgggtccggggaaggctgcactgacgacaatgagtgccatgcgcaacctgatctgtgcgttaacggtcggtgcgtgaatacagcaggttctttccgctgcgattgcgatgaaggatttcagccttcccctacacttactgagtgtcatgatatcaggcaaggcccatgttttgctgaagtgctacagacaatgtgcagatcgttatctagctcgtcagaggcagtgaccagggcggaatgttgctgcgggggtggcagagggtgggggccaagatgtgaactctgcccactgccaggtacatctgcctaccggaagctgtgccctcatggatccggatataccgctgagggccgggacgtggatgagtgtagaatgctcgcccatctatgtgcacatggagaatgcattaactcactggggagctttaggtgtcactgccaggcagggtacacacctgatgccaccgcgaccacctgtctggacatggatgaatgcagccaggttcctaagccctgtactttcctgtgcaagaacactaaggggtcattcctgtgttcctgcccgagggggtatttgctggaagaggacgggaggacatgcaaggacctggatgagtgtacttccagacaacacaactgccagtttctgtgtgtaaacactgtgggagcttttacgtgtcgatgccccccaggcttcacacagcaccaccaagcctgctttgacaacgacgagtgctccgctcaacctggtccttgtggagcccatggacactgtcataatacgccaggctccttccgctgcgagtgtcaccagggtttcacactggtgtcatctggacatggctgtgaggacgtgaacgagtgcgacggcccccataggtgtcagcacggttgtcaaaatcagctcgggggttaccggtgtagttgtccccaagggttcacacagcacagtcagtgggcccagtgcgtagatgagaacgagtgtgccctgtcacctccaacctgcggctctgcctcttgtaggaatactctgggcgggttccggtgcgtctgcccatcaggctttgacttcgaccaagccctaggcggctgtcaggaggttgacgaatgcgccggacgccggggcccctgtagttacagttgcgcaaatacccctggaggattcctgtgcgggtgtccccaagggtattttcgtgcgggacaaggtcactgtgtttctggattagggttctcccctggtccacaggacacacctgataaagaagagcttctcagtagcgaagcctgctacgaatgtaaaatcaacgggctgagccctcgggaccgcccacggcgttctgctcaccgtgaccatcaggtgaacctggccactctcgactcagaagcgcttctaacactagggctgaacctgtcgcatctcggcagagcagaacgcatccttgaactgagacctgcactcgaggggctcgaaggacggatacggtatgtgatcgtaagaggcaacgaacaaggcttctttagaatgcatcaccttagaggcgtgtcgtccttacagctgggacgcaggcgacctggtcccggaacttacaggttagaagtcgtgagccacatggccggcccctggggagtccagcccgaagggcagccagggccctggggacaagcacttagattgaaagtgcagttgcagctactctag

SEQ ID NO: 224151 - DNA, 2619 bp, Artificial Sequence
  derived and/or modified sequence
atggggatcgtctggatcttgatgtccgtcttgccatggtgggggcgatgtgcagatctagcgattgcaagcactcagctggtgcccagcaccgcctctgcccgtatggccctgtcttcgcagctgatgggccgcaccgtgtggacaccaatgagtgctagcgccttacaggagcccgcctaccccgccttggctcggacatccagggcgccatccgcagcctcggtccccctggccagcaggtgtcgggtgacgacagccctaatcagtacttctgctcagagatcccccacaagtgcgtcgcttgccccggtgccgactgctttgggcgcgtctagcgcctccgctcacttagcactgagcagtctgaccatgggcacagtggctttaacacatggaagggtaagcgcgtcacccgtgctgcgtctgggctctgcacgctgtcctaagctgagcactcccccccgtcctgcagccgctgccgtgcgaggcctggggagagctggtgagaccccggctaactgtgtaccaagaagggcagtgcccggcccggatgattcccgagaggacgtcaacgaatgtgccgaaaaccccggcgtctgtacaaatggcgtgtgtgtgaataccgacggatctttcaggtgtgaatgtccatttgggtacagtctggatttcaccggaatcaattgcgttgacactgacgaatgtagcgtgggccacccgtgtgggcaggggacttgcaccaacgttattgggggcttcgaatgtgcgtgtgctgatggattcgagccaggactcatgatgacgtgcgaggatattgacgaatgttccctcaatcccttactgtgcgcttttcgatgccacaacactgaaggatcctacctatgtacttgtccagccggctatacccttagagaggatggcgccatgtgccgagatgtcgacgaatgcgcggacgggcaacaagactgccacgcacgcggcatggaatgcaaaaacttgataggtaccttcgcctgcgtttgtccacctggtatgcggcccctgccgggcagcggtgaaggatgtacagatgataatgagtgtcatgcgcagcccgatctatgcgttaacggacgttgcgttaacacagctgggtccttcaggtgcgattgcgatgaaggctttcagccaagcccgacattgacggagtgccacgacatccgacaggggccttgtttcgccgaggtgctgcagactatgtgccgcagccttagctcttctagtgaagcagtaacaagagcagagtgctgttgcggcggagggcggggctggggaccccgctgcgagctttgtcctctgcccggtacttctgcatacagaaagctctgtccacacggcagcgggtacaccgctgaaggcagagacgtggacgagtgcaggatgctcgctcacctctgcgctcatggagaatgtattaattctttagggtccttccggtgtcactgccaggccgggtatacaccagacgcaacagctaccacatgtttagacatggatgaatgtagccaggtgccgaaaccctgcacttttctgtgcaagaacacaaaggggtcttttctctgttcgtgtcccagaggctacctccttgaagaagacgggcgcacctgcaaggatctcgacgaatgcacatccagacagcataattgtcaattcttgtgtgttaacacggttggggccttcacctgcaggtgccccccgggctttacgcaacaccatcaggcatgcttcgatgttaacgaatgcgacggcccccatcggtgccaacacgggtgtcagaaccagctgggcgggtatagatgctcatgtccccagggattcactcagcacagtcaatgggcccaatgcgtcgacgagaacgagtgcgcccttagcccccctacctgtggctccgcctcctgtagaaacaccctgggtgggttcaggtgcgtttgtccgagcggctttgatttcgatcaggctctgggcggctgccaggaagtcgacgaatgcgcgggccggagagggccatgctcttattcttgcgccaacacccccgggggctttctttgtggctgtccacaggggtattttcgggctgggcagggacattgcgtctcaggccttggattctcaccaggtcctcaagacacccctgacaaagaagagcttctttcctctgaagcctgttacgaatgcaaaattaatgggctctcaccaagagatcgcccccgtagatccgcgcacagggaccatcaggtgaacctggcgacgttagactctgaggcccttctaacactagggctgaacctatcccacctgggtcgggccgagagaattctggagctgagaccagcattggaagggctcgagggcagaattcgatatgtgatcgtgcggggaaacgagcagggtttctttagaatgcatcacctccgtggcgtttcctctttgcagctgggccggaggcgccccggaccaggaacatatcggctcgaggtagttagccacatggcagggccatggggggtgcagccagagggacagccgggaccgtgggggcaagcgctgaggctcaaagtacagctccaacttctgtag

SEQ ID NO: 224152 - DNA, 3493 bp, Artificial Sequence
  derived and/or modified sequence
cccagatgtcgatgagtgtggcagcagggagagtccctgccagcagaatgctgactgcatcaacatccccggtagctaccgctgcaagtgcacccgagggtacaaactgtcgccaggcggggcttgtgtgggacggaatgagtgtcgggagatcccgaatgtctgtagccatggtgactgcatggacacagaaggcagctacatgtgtctgtgtcaccgtggattccaggcctctgcagaccagaccctgtgcatggacattgacgagtgtgaccggcagccttgtggaaatgggacctgcaagaacatcattggctcctacaactgcctctgcttccctggctttgtggtgacacacaatggggattgtgtggattttgatgagtgtactaccctggtggggcaggtgtgccgatttggccattgcctcaacacagctggttccttccactgcctctgccaggatggctttgagctcacagctgatgggaagaactgtgtggacaccaatgagtgcctcagccttgcaggaacctgcctacccggcacttgccagaacctcgagggctccttccgctgcatctgtccccctggcttccaggtgcagagtgaccactgcattgatatcgacgagtgctcagaggagcccaacctctgcctctttggcacctgtaccaacagccctgggagcttccagtgcctctgcccacctggctttgtcctctctgacaatgggcaccgttgctttgacacacggcagagtttctgcttcacccgttttgaggctgggaagtgctcggtgcccaaagctttcaacaccaccaagacccgctgctgctgcagtaagaggcctggggagggctggggagacccctgcgaactgtgtccccaggagggcagtcccaggcccggatgactcccgagaagacgtgaatgagtgtgcagagaaccctggcgtctgcactaacggcgtctgtgtcaacaccgatggatccttccgctgtgagtgtccctttggctacagcctggacttcactggcatcaactgtgtggacacagacgagtgctctgtcggccacccctgtgggcaagggacatgcaccaatgtcatcggaggcttcgaatgtgcctgtgctgacggctttgagcctggcctcatgatgacctgcgaggacatcgacgaatgctccctgaacccgctgctctgtgccttccgctgccacaataccgagggctcctacctgtgcacctgtccagccggctacaccctgcgggaggatggggccatgtgtcgagatgtggacgagtgtgcagatggtcagcaggactgccacgcccggggcatggagtgcaagaacctcatcggtaccttcgcgtgcgtctgtcccccaggcatgcggcccctgcctggctctggggagggctgcacagatgacaatgaatgccacgctcagcctgacctctgtgtcaacggccgctgtgtcaacaccgcgggcagcttccggtgcgactgtgatgagggattccagcccagccccacccttaccgagtgccacgacatccggcaggggccctgctttgccgaggtgctgcagaccatgtgccggtctctgtccagcagcagtgaggctgtcaccagggccgagtgctgctgtgggggtggccggggctgggggccccgctgcgagctctgtcccctgcccggcacctctgcctacaggaagctgtgcccccatggctcaggctacactgctgagggccgagatgtagatgaatgccgtatgcttgctcacctgtgtgctcatggggagtgcatcaacagccttggctccttccgctgccactgtcaggccgggtacacaccggatgctactgctactacctgcctggatatggatgagtgcagccaggtccccaagccatgtaccttcctctgcaaaaacacgaagggcagtttcctgtgcagctgtccccgaggctacctgctggaggaggatggcaggacctgcaaagacctggacgaatgcacctcccggcagcacaactgtcagttcctctgtgtcaacactgtgggcgccttcacctgccgctgtccgcccggcttcacccagcaccaccaggcctgcttcgatgtgaatgaatgtgatgggccccaccgctgccagcatggctgtcagaaccagctagggggctaccgctgcagctgcccccagggtttcacccagcactcccagtgggcccagtgtgtggatgagaatgagtgtgccctgtcgccccccacctgcgggagcgcctcctgtcgcaacactcttggtggcttccgctgcgtctgcccctctggctttgactttgatcaggccctcgggggctgccaggaggtggatgagtgcgccggacggcgtggcccctgtagctacagctgtgccaacacgcctggtggcttcctgtgcggctgtcctcaaggctacttccgggctgggcaagggcactgtgtctccggcctgggcttcagccccggaccccaggacaccccggacaaagaggagctgctctcgtctgaagcctgctacgaatgcaagatcaatggcctctcccctcgggaccggccacgacgcagtgcccacagggaccaccaggtgaacctggccacccttgactccgaggccctgctgaccttgggcctgaacctctcacacctgggccgggccgagcgcatcctggagctccggccggccctggagggtctagagggccggatccgctacgtcatcgtccgcggaaacgagcaaggtttctttcgcatgcatcacctccgtggcgtcagctccctgcagctggggcggaggcggccggggcctggaacctaccggctggaggtggtgagccacatggcaggaccctggggtgtccagccagaggggcagccagggccatggggccaggccttgaggctgaaggtgcagctgcagttgctttagttgggaggagcctcagtgggccccagctgtccagagaagggggattctggaactgggaaggactgatccccagaagcgatggctgaccagattgaaccccgaaactcaggaagagtgaaatgctacacgacaacctcaggcaagcccggcctctgcctgggcctctgtgccagccccgggggccccccagttactcagtctttcctggagacagcaagaagctgcaatgtgcaatccccctgcccccacagccaaggtcaggaagaggccctgtggtcaccgtgtctggccaatctcaggctttcacttctgtactgcactgtggcttgccctggcggggggcagggggttggcaggacatggcaatgggcaactggggtgggcacagggcttattcctcggagtagaagggtgtacagggggcccagactccacagtgacttgccacatttgccccccatttggagaatgcttttatatcaaaagtggagacgataataaagttattttgggtt

SEQ ID NO: 224153 - DNA, 8430 bp, Artificial Sequence
  derived and/or modified sequence
atgaccttggaaggactgtatctggcacggggacccctggcccggttgttgctagcctggagcgcccttctctgcatggctggtggccagggtcgctgggatggtgctctggaggccgccggccctggcagagtgcggcgaagaggaagcccaggcatcctgcaaggtcccaacgtgtgcggaagcaggttccatgcatactgctgtcctgggtggagaacgttccctggccggagccagtgcgtcgtcccaatctgcagacgagcatgcggcgaagggttctgttctcagcccaacctctgcacctgtgccgacggaacgctcgctccgtcctgcggagtgtcgaggggaagtggctgttccgtgtcttgcatgaatggcggtacatgcagaggagcatcatgcctctgtcaaaagggctatacaggcacagtgtgcggccaacctatatgtgatcgcggctgccacaatggcgggcgatgcattggtcccaatcgctgcgcgtgtgtctacggattcatggggccacagtgtgagcgggattatagaaccggaccgtgttttgggcaggtgggtcctgagggatgccaacatcagttaaccggcctggtgtgcacaaaagctctgtgctgcgccactgtgggcagggcatggggcctgccctgcgagttgtgccccgcgcagcctcatccttgtcgtcgcgggtttattccaaacatccacacaggtgcctgtcaagacgtcgatgaatgccaggccgtgcccgggctttgccagggcgggtcctgtgtgaatatggtgggtagcttccactgccggtgccccgttggtcatcggcttagtgattcctcggcggcgtgcgaggactacagagctggggcgtgcttttcagttctgttcggaggtaggtgcgccggggaccttgccgggcattacactagaagacagtgctgttgtgaccgcggccgatgttgggccgctgggccagtgcccgaactctgtccccctcgaggctcaaacgagtttcagcagctttgtgcacagcgtttgcccctactcccgggacaccctggacttttccctgggttgctggggtttggatcaaatggaatggggccacctttaggacctgctcgtctgaaccctcacggtagtgatgcgcggggcattccttctctgggtccaggtaatagcaatatcggcactgctactctgaaccagaccattgatatatgtcgtcatttcaccaacttgtgtctgaatggcagatgcctcccaaccccttctagctaccggtgcgagtgcaatgtgggatacactcaggacgtgagaggagagtgtatagacgtggacgaatgcacgtccagcccctgccatcatggcgactgcgttaacataccaggtacgtaccattgccgctgttatcccggcttccaggccacccccactagacaagcctgtgtggacgtggatgagtgtatcgtttccggcggcctgtgccacctagggcgttgtgtcaataccgaaggctccttccagtgtgtgtgtaatgcaggctttgaactgtccccggacgggaagaattgcgtcgaccataacgagtgcgccacctccaccatgtgcgtgaacggcgtgtgcttaaatgaggatgggagtttttcatgcctctgcaaacccgggttccttcttgccccagggggtcactattgcatggatatcgacgaatgtcagactcctggtatctgcgtcaacggacattgcaccaacaccgaggggtcattccggtgtcagtgcctcgggggccttgctgtggggaccgacggcagggtttgtgttgatacacacgtgcgttccacctgctatggggctattgaaaaaggttcttgtgcacgcccgttcccaggaaccgttacaaagtccgaatgttgttgcgccaaccccgatcacgggttcggcgagccttgtcagctgtgccccgcaaaggacagcgccgaatttcaggccctatgttcttctggtctgggtattaccaccgacggccgggacatcaacgagtgcgcactggatcctgaggtgtgtgccaacggggtgtgtgagaacctgagagggtcctacagatgtgtatgcaatctgggctatgaggccggtgcctcaggcaaggactgcacggacgtggacgagtgtgctctgaattcgttactgtgcgacaacggatggtgtcagaatagccccggtagttattcctgtagttgcccccctggatttcacttttggcaagataccgagatttgtaaggacgtggatgaatgcctgtcctcgccttgcgtttctggcgtatgtcgaaaccttgcgggcagttatacctgcaagtgtgggcctgggagtaggctagatcccagcggcactttctgcttggactctacaaaggggacatgttggctgaaaattcaggaatcgcgctgcgaggtgaacctgcagggtgcctccctgcggtccgagtgttgcgccactctcggggcagcctggggatctccatgtgaacgctgcgaaatcgatccagcctgtgccagaggattcgccaggatgactggcgtgacgtgcgacgatgttaatgaatgcgagtcctttcccggcgtttgtcctaatggaaggtgcgtaaataccgctggctcttttcggtgtgaatgcccggaagggctgatgctggatgccagcggtcgcctgtgcgtcgacgtccggctggaaccatgctttctcaggtgggatgaagatgaatgcggtgtaacgctgcccgggaaatacaggatggacgtgtgctgctgttcaatcggcgcagtgtggggcgttgagtgtgaggcttgccccgacccggagagtctggagttcgcaagcctgtgtcctcgcggcttaggctttgcttcccgggattttctgtccggtcggcccttttacaaggacgttaacgagtgtaaagtgtttcccgggctttgtacccatggaacatgccgcaacacagtggggagctttcattgtgcctgtgccggaggttttgcgctggatgctcaagagaggaactgcactgatattgatgagtgccggatcagcccggacctctgtggacaaggtacctgcgtgaatacacctggtagcttcgagtgcgaatgttttcccgggtacgagagcgggtttatgctgatgaagaactgtatggatgtcgatgaatgtgcaagggatccgctgctttgcagggggggtacctgtactaatactgatgggtcctacaagtgccagtgtcctcccgggcatgagctgacagcaaaaggtaccgcatgcgaagacatcgacgagtgctctctgtccgatggtctctgcccacacggccagtgtgttaacgttattggggcattccagtgctcttgccatgccggattccagtctacccccgatcgccagggctgtgtggacatcaacgagtgtcgcgtgcagaatggtggttgtgacgtccactgcatcaatacagagggcagctatcggtgctcttgcgggcaggggtacagccttatgccagatggaagggcttgtgctgacgtggacgaatgtgaggagaacccacgagtatgcgaccagggtcactgcaccaacatgccagggggacatagatgcttatgctacgacggatttatggccaccccagatatgaggacatgtgtggacgtcgacgagtgcgatttaaatccccacatttgcttacacggcgattgtgagaatacgaagggctcatttgtgtgtcactgccagctgggatacatggtgcgcaaaggagcaacagggtgcagcgacgtggacgaatgtgaagtgggcggacataactgcgattcacatgctagctgcctcaacataccagggtccttctcctgtcggtgcctgcccgggtgggtgggtgatggcttcgagtgtcacgacttagacgagtgcgtatcccaggaacatcggtgcagtccacgcggagattgcttgaacgtgccgggtagctaccggtgtacttgcagacagggatttgccggcgatggtttcttttgcgaagatcgcgacgaatgcgctgagaacgtggatctgtgtgataatggccaatgccttaacgcaccgggcggctatcgatgtgaatgtgagatggggtttgatccaaccgaggaccatagggcttgccaggacgttgatgaatgtgcgcagggtaatttatgtgcctttggttcgtgtgagaacctgcctggtatgttcagatgtatctgtaacggtgggtatgagctggacagaggcggtggaaactgcaccgatatcaatgaatgtgccgaccccgttaactgcattaatggtgtgtgcattaatacccccggcagttacttatgttcttgcccccaggactttgagctcaatccaagcggcgtggggtgtgttgatacccgggcgggaaactgctttctggaaactcacgaccgaggcgacagtggcatcagctgcagcgctgaaattggtgtgggcgtgacccgcgcaagttgttgttgctccctgggacgcgcatgggggaacccatgcgaactttgcccaatggctaacacgaccgagtaccgtacactgtgccctggcggtgaggggtttcagccgaatcgtataaccgttattctcgaagatatagacgagtgccaggagctacctggcctgtgccagggaggagattgcgtgaacacatttgggagctttcagtgcgaatgtcctccaggataccatttgagcgagcacacccggatttgcgaggatatagacgagtgttctacccattcaggaatctgtgggcctgggacctgctacaataccctgggcaactacacatgtgtctgcccagccgagtatctgcaggttaatggggggaacaactgcatggacatgcggaaatcggtttgtttcagacattacaacggaacatgtcagaatgaactagcatttaatgttacacgaaagatgtgctgctgttcctataatataggacaggcctggaatcgcccttgcgaggcctgtcctaccccaatatccccagattatcagatactctgcggcaaccaggcccccgggtttctgacagacatacatactggtaaacccctggacattgacgagtgcggggaaattccggctatctgtgcaaatgggatttgtatcaaccaaattgggagcttcaggtgcgaatgcccggccggatttaattacaacagcatcctgcttgcctgcgaggatgtcgatgagtgcggaagcagggagtcgccctgtcagcagaatgccgactgcatcaatattcctggatcttaccgttgcaaatgcacacgcggctacaagttgagtcccggcggggcctgcgttgggcgtaacgaatgcagagagatcccaaatgtctgctcacacggagactgtatggacacagaagggtcttacatgtgtctatgtcacaggggattccaagcttctgcagaccagacgctctgtatggatattgatgaatgtgaccggcagccctgtggcaacggtacgtgtaagaatatcatagggtcttacaactgcctctgcttcccagggttcgtcgtgacgcacaacggcgattgtgtggactttgatgaatgcaccacattggtgggccaggtctgcaggttcggtcactgccttaataccgcagggagttttcattgcctgtgccaggatggctttgagctgaccgcggatggtaaaaattgcgttgacactaacgagtgtctttctctggctgggacttgccttcccggtacttgccagaatttggagggctcttttaggtgtatttgtcctcccggctttcaggtgcagagcgaccattgtattgatattgacgagtgtagcgaagaaccaaacctgtgcctatttggcacatgtacaaatagtcctggtagtttccagtgtctgtgcccaccaggatttgttttgagcgacaatggacaccgatgtttcgacacaagacagtctttctgtttcacaagattcgaggcagggaagtgttctgtcccaaaggccttcaatacaactaaaacccggtgctgctgtagcaagagaccaggagagggttggggagacccctgcgagctttgtccacaggagggaagcgctgcttttcaggagctttgtcccttcggacatggcgctgtaccagggccagacgactcaagagaggatgtgaacgaatgtgctgaaaaccccggagtatgcaccaacggcgtttgcgttaataccgacggctcattccgatgcgagtgtcccttcggctactctctggactttaccggaatcaattgcgttgacacagacgagtgttcagtgggacacccgtgtggacagggaacatgcaccaatgtgattggagggttcgagtgtgcttgcgctgacggatttgaaccgggactgatgatgacatgcgaggatatcgatgaatgcagcctcaatcctcttctatgcgcctttcgctgtcataacaccgaggggtcttacctctgtacttgtcctgccggatacacattgcgggaggacggagccatgtgccgcgatgtagatgagtgtgccgacgggcagcaggattgccatgcccgtggcatggagtgcaagaacctgatcgggacgttcgcttgcgtttgccccccaggaatgcgcccattgcccggcagtggggaaggatgtactgacgataacgagtgtcacgcacagccagacttatgcgtgaatggtaggtgtgtcaacacagctggctccttcagatgcgattgcgacgaaggctttcaaccgtctcctacattaactgaatgccacgacattcgtcagggcccctgtttcgccgaagttctacagaccatgtgcaggagcctgtccagctcctccgaggcggtgaccagggccgagtgctgctgtggaggcggacgcgggtggggcccacgctgcgaactctgcccgctgcctgggacaagtgcctaccgtaagctctgcccacatggttcaggctatacagctgaggggcgcgatgtcgatgaatgtcgcatgctcgcccatctctgcgcacacggtgagtgtatcaattcactcggttcgtttcggtgtcattgtcaggccggctacactcctgatgccacagcgaccacatgcttagatatggatgagtgctcccaggtaccaaagccatgtactttcttgtgcaaaaacacaaagggaagtttcctttgttcttgcccgcgcggatatctcctggaggaggatgggcggacatgcaaagatctggatgagtgtaccagcaggcagcacaattgccaattcttgtgtgttaacactgtcggcgccttcacctgtaggtgccctcctgggtttacacagcatcaccaggcatgctttgataacgatgagtgctcggctcagcccggaccctgtggggcgcacggacactgtcataacaccccaggctccttcagatgtgaatgccaccagggcttcactctggtgtcttcaggacacggttgtgaggacgtaaatgaatgcgacggtcctcaccgctgccagcatggctgccaaaaccaactcggcgggtatcgctgcagctgtccacaagggttcacgcagcattctcagtgggctcagtgtgtggatgagaatgagtgtgccctgtcccccccgacatgcggcagtgccagctgtaggaacactctcgggggattccgatgcgtgtgtccatccggtttcgatttcgaccaggccctgggcgggtgtcaggaagttgacgagtgtgctggcaggaggggaccctgctcttactcatgcgccaacactccaggaggctttttgtgcggttgccctcagggctacttccgggcaggccagggccattgcgtgagtggcctggggttcagcccaggaccccaggacacacccgacaaagaggaactcctatcgtcagaagcctgttacgagtgcaagataaacgggctgtccccacgggatcgccctagacggtcagctcaccgagaccatcaggtcaatctggcaaccctggattcggaggcgcttctaactttaggactgaaccttagtcacttgggcagggcggagagaatcctggaattgaggcccgcccttgagggcttagaaggaagaatccggtatgtaatcgtacggggaaacgagcagggatttttccggatgcatcatctacgtggggtgtcatccttgcaactgggtagacgacgacctggaccaggcacctacaggcttgaggtggtcagtcacatggccggtccatggggcgtccagcccgaaggccagcccggcccttggggacaagctttgcggcttaaagtacagttgcagttgctctag

SEQ ID NO: 224154 - DNA, 8430 bp, Artificial Sequence
  derived and/or modified sequence
atgaccctggagggcctgtacctggcccggggccccctggcccggctgctgctggcctggagcgccctgctgtgcatggccggcggccagggccgctgggatggagccctggaggccgccggccctggccgggtgagaagaagaggcagccctggcatcctgcagggccccaacgtgtgtggcagccgcttccacgcctactgctgccccggctggaggaccttccctggccgcagccagtgtgtggtgcccatctgcagaagagcctgtggggagggcttctgcagccagcccaacctgtgcacctgtgctgatggcaccctggcccccagctgtggggtgtcccggggcagcggctgcagcgtgtcctgcatgaatggaggcacctgccgcggggccagctgcctgtgccagaagggctacacaggcaccgtgtgtggccagcccatctgtgaccggggctgccacaatggaggccgctgcatcggccccaacagatgtgcctgtgtgtatggcttcatgggcccccagtgtgagcgggactacagaacaggcccctgcttcggccaggtgggccctgagggctgccagcaccagctgaccggcctggtgtgcaccaaggccctgtgctgtgccaccgtgggccgggcctggggcctgccctgtgagctgtgcccagcccagccccacccctgcagaagaggcttcatccccaacatccacactggagcctgccaggatgtggatgagtgccaggccgtgcccggcctgtgccagggcggcagctgtgtgaacatggtgggcagcttccactgccgctgccctgtgggccaccggctgagtgacagcagcgctgcctgtgaggactaccgggccggggcctgcttctctgtgctgtttggaggccgctgtgccggggacctggccggccactacacccggcggcagtgctgctgtgaccggggccgctgctgggccgccggccctgtgcctgagctgtgccccccccggggcagcaatgagttccagcagctgtgtgcccagaggctgcccctgctgcccggccaccctggcctcttccctggcctgctgggcttcggcagcaatggcatgggcccccccctgggccctgcccggctgaacccccacggcagtgatgcccggggcatccccagcctgggccctggcaacagcaacatcggcacagccaccctgaaccagaccatcgacatctgccgccacttcaccaacctgtgcctgaatggccgctgcctgcccacccccagcagctaccgctgtgagtgcaatgtgggctacacccaggatgtgcggggggagtgcattgatgtggatgagtgcaccagcagcccctgccaccacggggactgtgtgaacatccctggcacctaccactgccgctgctacccaggcttccaggccacccccacccggcaggcctgtgtggatgtggatgagtgcatcgtgtctgggggcctgtgccacctgggccgctgtgtgaacacagagggcagcttccagtgtgtgtgcaatgccggctttgagctgagcccagatggcaagaactgtgtggaccacaatgaatgtgccaccagcaccatgtgtgtgaatggagtgtgcctgaatgaagatggcagcttcagctgcctgtgcaagccaggcttcctgctggcccctgggggccactactgcatggacattgatgagtgccagaccccaggcatctgtgtgaatggccactgcaccaacacagagggcagcttccgctgccagtgcctgggcggcctggccgtgggcacagatggccgggtgtgtgtggacacccacgtgcgcagcacctgctatggagccatcgagaagggcagctgtgcccggcccttccctggcaccgtgaccaagtctgagtgctgctgtgccaacccagaccacggctttggagagccctgccagctgtgcccagccaaggacagcgctgagttccaggccctgtgcagcagcggcctgggcatcaccacagatggccgggacatcaatgaatgtgccctggaccctgaggtgtgtgccaatggagtgtgtgagaacctgcggggcagctaccgctgtgtgtgcaacctgggctatgaagctggggccagcggcaaggactgcacagatgtggatgaatgtgccctgaacagcctgctgtgtgacaatggctggtgccagaacagccctggcagctacagctgcagctgccccccaggcttccacttctggcaggacacagagatctgcaaggatgtggatgaatgtctgagcagcccctgtgtgtctggagtgtgcaggaacctggccggcagctacacctgcaagtgtggccctggcagccggctggaccccagcggcaccttctgcctggacagcaccaagggcacctgctggctgaagatccaggagagccgctgtgaggtgaacctgcagggcgccagcctgcggtctgagtgctgtgccaccctgggcgccgcctggggcagcccctgtgagcgctgtgaaattgatcctgcctgtgcccggggctttgccaggatgactggagtgacctgtgatgatgtgaatgaatgtgagagcttccctggggtgtgccccaacggccgctgtgtgaacacagctggcagcttccgctgtgaatgtcctgagggcctgatgctggatgccagcggccgcctgtgtgtggatgtgcggctggagccctgcttcctgcgctgggatgaagatgaatgtggggtgaccctgcccgggaagtacaggatggatgtgtgctgctgcagcattggagctgtgtggggcgtggagtgtgaggcctgcccagaccctgagagcctggagtttgccagcctgtgcccccggggcctgggctttgccagccgggacttcctgagcggccggcccttctacaaggatgtgaatgaatgcaaggtgtttcctggcctgtgcacccacggcacctgcaggaacacagtgggcagcttccactgtgcctgtgccggcggctttgccctggatgcccaggagaggaactgcacagacattgatgaatgtcgcatcagcccagacctgtgtggccagggcacctgtgtgaacaccccaggcagctttgaatgtgagtgcttccctggctatgaaagtggcttcatgctgatgaagaactgcatggatgtggatgaatgtgcccgggaccccctgctgtgccggggcggcacctgcaccaacacagatggcagctacaagtgccagtgccccccaggccacgagctgacagccaagggcacagcctgtgaggacattgatgagtgcagcctgagtgatggcctgtgcccccacggccagtgtgtgaatgtgattggagccttccagtgcagctgccacgccggcttccagagcaccccagaccggcagggctgtgtggacatcaatgaatgtcgggtgcagaatggaggctgtgatgtgcactgcatcaacacagagggcagctaccgctgcagctgtggccagggctacagcctgatgccagatggccgggcctgtgctgatgtggatgaatgtgaggagaacccccgggtgtgtgaccagggccactgcaccaacatgcctgggggccaccgctgcctgtgctatgatggcttcatggccaccccagacatgaggacctgtgtggatgtggatgaatgtgacctgaacccccacatctgcctgcatggagactgtgagaacaccaagggcagctttgtgtgccactgccagctgggctacatggtgaggaaaggagccaccggctgcagtgatgtggatgaatgtgaggtgggcggccacaactgtgacagccacgccagctgcctgaacatccctggcagcttcagctgccgctgcctgcccggctgggtgggagatggctttgagtgccacgacctggatgaatgtgtgtcccaggagcaccgctgcagccccaggggggactgcctgaatgtgcccggcagctaccgctgcacctgccggcagggctttgctggagatggcttcttctgtgaagatagagatgaatgtgccgagaatgtggacctgtgtgacaatggccagtgcctgaatgcccctgggggctaccgctgtgaatgtgagatgggctttgaccccacagaggaccaccgggcctgccaggatgtggatgaatgtgcccagggcaacctgtgtgccttcggcagctgtgagaacctgcccggcatgttccgctgcatctgcaatggaggctatgagctggacagaggaggcggcaactgcacagacatcaatgaatgtgccgaccctgtgaactgcatcaatggagtgtgcatcaacaccccaggcagctacctgtgcagctgcccccaggactttgagctgaaccccagcggcgtgggctgtgtggacaccagggctggcaactgcttcctggagacccatgacagaggagacagcggcatcagctgcagcgctgagattggagtgggcgtgacccgggccagctgctgctgcagcctgggccgggcctggggcaacccctgtgagctgtgccccatggccaacaccacagagtaccgcaccctgtgccctggaggagagggcttccagcccaaccgcatcaccgtcatcctggaggacattgatgagtgccaggagctgcccggcctgtgccagggcggggactgtgtgaacaccttcggcagcttccagtgtgaatgtcctcctggctaccacctgtctgagcacacccgcatctgtgaggacattgatgagtgcagcacccacagcggcatctgtggccctggcacctgctacaacaccctgggcaactacacctgtgtgtgcccagctgagtacctgcaggtgaatggaggcaacaactgcatggacatgaggaagtctgtgtgcttccgccactacaacggcacctgccagaatgagctggccttcaacgtgaccaggaagatgtgctgctgcagctacaacatcggccaggcctggaaccggccctgtgaggcctgccccacccccatcagcccagactaccagatcctgtgtggcaaccaggcccctggcttcctgacagacatccacacaggcaagcccctggacattgatgaatgtggggagatcccagccatctgtgccaacggcatctgcatcaaccagatcggcagcttccgctgtgaatgtcctgctggcttcaactacaacagcatcctgctggcctgtgaagatgtggatgaatgtggcagccgggagagcccctgccagcagaatgctgactgcatcaacatccctggcagctaccgctgcaagtgcacccggggctacaagctgagccctggaggagcctgtgtgggcagaaatgaatgtcgggagatccccaacgtgtgcagccacggggactgcatggacacagagggcagctacatgtgcctgtgccaccggggcttccaggccagcgctgaccagaccctgtgcatggacattgatgaatgtgaccggcagccctgtggaaatggcacctgcaagaacatcatcggcagctacaactgcctgtgcttccctggctttgtggtgacccacaatggagactgtgtggactttgatgaatgtaccaccctggtgggccaggtgtgccgcttcggccactgcctgaacacagctggcagcttccactgcctgtgccaggacggctttgagctgacagcagatggcaagaactgtgtggacaccaatgaatgtctgagcctggccggcacctgcctgcccggcacctgccagaacctggagggcagcttccgctgcatctgccccccaggcttccaggtgcagagcgaccactgcatcgacattgatgagtgcagcgaggagcccaacctgtgcctgtttggcacctgcaccaacagccctggcagcttccagtgcctgtgccccccaggctttgtgctgagtgacaatggccaccgctgctttgacacccggcagagcttctgcttcaccaggtttgaagctggaaaatgttctgtgcccaaggccttcaacaccaccaagacccgctgctgctgcagcaagaggcctggagagggctggggagacccctgtgagctgtgcccccaggagggcagcgctgccttccaggagctgtgccccttcggccacggggctgtgcccggcccagatgacagcagagaagatgtgaatgaatgtgccgagaaccctggggtgtgcaccaatggagtgtgtgtgaacacagatggcagcttccgctgtgagtgccccttcggctacagcctggacttcaccggcatcaactgtgtggacacagatgaatgttctgtgggccacccctgtggccagggcacctgcaccaacgtgattggaggctttgaatgtgcctgtgctgatggctttgagcccggcctgatgatgacctgtgaagatattgatgaatgttccctgaaccccctgctgtgtgccttccgctgccacaacacagagggcagctacctgtgcacctgcccagctggctacaccctgcgggaggatggagccatgtgcagagatgtggatgaatgtgctgatggccagcaggactgccacgcccggggcatggagtgcaagaacctgattggcacctttgcctgtgtgtgccccccaggcatgaggcccctgcccggcagcggggagggctgcacagatgacaatgaatgtcatgcccagcctgacctgtgtgtgaatggccgctgtgtgaacacagctggcagcttccgctgtgactgtgatgagggcttccagcccagccccaccctgacagaatgtcatgacatccggcagggcccctgctttgctgaggtgctgcagaccatgtgccgcagcctgagcagcagcagcgaggccgtgaccagggctgagtgctgctgcggcggcggccggggctggggcccccgctgtgagctgtgccccctgcccggcaccagcgcctacaggaagctgtgcccccacggcagcggctacacagctgagggcagagatgtggatgagtgcaggatgctggcccacctgtgtgcccacggggagtgcatcaacagcctgggcagcttccgctgccactgccaggccggctacaccccagatgccacagccaccacctgcctggacatggatgagtgcagccaggtgcccaagccctgcaccttcctgtgcaagaacaccaagggcagcttcctgtgcagctgcccccggggctacctgctggaggaggatggccgcacctgcaaggacctggatgaatgtaccagccggcagcacaactgccagttcctgtgtgtgaacacagtgggcgccttcacctgccgctgccccccaggcttcacccagcaccaccaggcctgctttgacaatgatgagtgcagcgcccagcccggcccctgtggggcccacggccactgccacaacaccccaggcagcttccgctgtgagtgccaccagggcttcaccctggtgagcagcggccacggctgtgaagatgtgaatgaatgtgatggcccccaccgctgccagcacggctgccagaaccagctgggcggctaccgctgcagctgcccccagggcttcacccagcacagccagtgggcccagtgtgtggatgaaaatgaatgtgccctgagcccccccacctgtggcagcgccagctgcaggaacaccctgggcggcttccgctgtgtgtgccccagcggctttgattttgaccaggccctgggcggctgccaggaggtggatgaatgtgccggcagaagaggcccctgcagctacagctgtgccaacaccccaggcggcttcctgtgtggctgcccccagggctacttccgggccggccagggccactgtgtgtctggcctgggcttcagccctggcccccaggacaccccagacaaggaggagctgctgagcagcgaggcctgctatgagtgcaagatcaatggcctgagcccccgggaccggccccggcgcagcgcccaccgggaccaccaggtgaacctggccaccctggacagcgaggccctgctgaccctgggcctgaacctgagccacctgggccgggcagagcgcatcctggagctgcggcctgccctggagggcctggagggccgcatccgctacgtgattgtgagaggaaatgagcagggcttcttcaggatgcaccacctgcggggcgtgagcagcctgcagctgggcagaagaagacctggccctggcacctaccgcctggaggtggtgagccacatggccggcccctggggcgtgcagcctgagggccagcccggcccctggggccaggccctgcggctgaaggtgcagctgcagctgctgtag

SEQ ID NO: 224155 - DNA, 2619 bp, Artificial Sequence
  derived and/or modified sequence
atgggcatcgtgtggatcctgatgtctgtgctgccctggtggggccgctgtgccgacctggccatcgccagcacccagctggtgcccagcacagccagcgccaggatggccctgagcagccagctgatgggccgcacagtgtggacccccatgtctgccagcgccctgcaggagcccgcctacccagccctggcccggaccagccgggcccccagcgctgcctctgtgcccctggccagccgctgccgggtgaccacagccctgatcagcaccagcgcccagaggagccccaccagcgccagcctggcccctgtgcccacagccctgggcgccagcagcgccagcgcccacctggccctgagcagcctgaccatgggcaccgtggccctgacccacggccgggtgtctgccagccctgtgctgcggctgggcagcgcccgctgccccaagctgagcaccccacccaggcctgctgctgctgctgtgcggggcctgggccgggccggggagaccccagccaactgtgtgccccggcgggctgtgcccggcccagatgacagcagagaagatgtgaatgaatgtgccgagaaccctggggtgtgcaccaatggagtgtgtgtgaacacagatggcagcttccgctgtgagtgccccttcggctacagcctggacttcaccggcatcaactgtgtggacacagatgaatgttctgtgggccacccctgtggccagggcacctgcaccaacgtgattggaggctttgaatgtgcctgtgctgatggctttgagcccggcctgatgatgacctgtgaagatattgatgaatgttccctgaaccccctgctgtgtgccttccgctgccacaacacagagggcagctacctgtgcacctgcccagctggctacaccctgcgggaggatggagccatgtgcagagatgtggatgaatgtgctgatggccagcaggactgccacgcccggggcatggagtgcaagaacctgattggcacctttgcctgtgtgtgccccccaggcatgaggcccctgcccggcagcggggagggctgcacagatgacaatgaatgtcatgcccagcctgacctgtgtgtgaatggccgctgtgtgaacacagctggcagcttccgctgtgactgtgatgagggcttccagcccagccccaccctgacagaatgtcatgacatccggcagggcccctgctttgctgaggtgctgcagaccatgtgccgcagcctgagcagcagcagcgaggccgtgaccagggctgagtgctgctgcggcggcggccggggctggggcccccgctgtgagctgtgccccctgcccggcaccagcgcctacaggaagctgtgcccccacggcagcggctacacagctgagggcagagatgtggatgagtgcaggatgctggcccacctgtgtgcccacggggagtgcatcaacagcctgggcagcttccgctgccactgccaggccggctacaccccagatgccacagccaccacctgcctggacatggatgagtgcagccaggtgcccaagccctgcaccttcctgtgcaagaacaccaagggcagcttcctgtgcagctgcccccggggctacctgctggaggaggatggccgcacctgcaaggacctggatgaatgtaccagccggcagcacaactgccagttcctgtgtgtgaacacagtgggcgccttcacctgccgctgccccccaggcttcacccagcaccaccaggcctgctttgatgtgaatgaatgtgatggcccccaccgctgccagcacggctgccagaaccagctgggcggctaccgctgcagctgcccccagggcttcacccagcacagccagtgggcccagtgtgtggatgaaaatgaatgtgccctgagcccccccacctgtggcagcgccagctgcaggaacaccctgggcggcttccgctgtgtgtgccccagcggctttgattttgaccaggccctgggcggctgccaggaggtggatgaatgtgccggccggcggggcccctgcagctacagctgtgccaacacccctgggggcttcctgtgtggctgcccccagggctacttccgggccggccagggccactgtgtgtctggcctgggcttcagccctggcccccaggacaccccagacaaggaggagctgctgagcagcgaggcctgctatgagtgcaagatcaatggcctgagcccccgggaccggcccaggagaagtgcccaccgggaccaccaggtgaacctggccaccctggacagcgaggccctgctgaccctgggcctgaacctgagccacctgggccgggcagagcgcatcctggagctgcggcctgccctggagggcctggagggccgcatccgctacgtgattgtgagaggaaatgagcagggcttcttcaggatgcaccacctgcggggcgtgagcagcctgcagctgggcagaagaagacctggccctggcacctaccgcctggaggtggtgagccacatggccggcccctggggcgtgcagcctgagggccagcccggcccctggggccaggccctgcggctgaaggtgcagctgcagctgctgtag

SEQ ID NO: 224156 - DNA, 8430 bp, Artificial Sequence
  derived and/or modified sequence
atgaccctggagggcctgtacctggcccggggccccctggcccggctcttactcgcttggtctgcattgttgtgcatggctggggggcagggtcgctgggacggagcgctggaggcggcaggtccagggcgggtcagaaggcgaggtagtcctgggattttgcaaggaccaaacgtgtgtgggtccaggttccacgcgtactgttgtcctggctggagaaccttccctgggcgcagccaatgcgtcgtgccgatttgcagacgggcgtgcggggagggcttttgttcacaacccaatctgtgcacctgcgccgacggaaccctcgctcccagctgcggtgtgtcccggggcagtggctgttcagtgagttgcatgaatggtggtacctgccgcggggcatcttgtctatgccagaagggatacaccggcactgtatgtggtcagccaatttgcgaccgtggctgtcacaacggagggaggtgtatcggccccaatcggtgtgcgtgcgtgtacgggttcatggggccccaatgtgaacgcgattatagaacaggtccctgttttggccaagtaggaccagaagggtgccagcaccagctgaccggactggtgtgcactaaggcactgtgttgtgccaccgtcggtcgcgcctggggactgccgtgcgaactgtgtccggcacagccacacccctgcagacgcggatttatccctaacatacacaccggcgcttgtcaggatgtagatgagtgccaggccgtccctggactttgccaggggggctcgtgcgttaatatggtcggttcatttcattgtaggtgccctgttggacatcgtttgtctgactcgagtgctgcatgcgaggactatcgagctggcgcttgcttttccgttctgttcggcgggaggtgtgcaggggacctagccggtcactatactagacgccagtgctgctgcgatcgcggacgctgttgggctgctgggccagttcccgagctgtgtccccccaggggatctaacgaatttcagcagctctgcgcgcagagactaccgctcctgccaggccacccagggttgtttcctggactgcttggcttcggctccaatggtatgggccccccgctcggaccagctcgccttaatcctcacgggtccgatgcacgaggcatcccttcactcgggcccgggaatagtaacatcggaactgctacactaaaccagacaatcgacatatgtagacactttactaacctctgtctgaacggacggtgcctgccaaccccttcttcctatcggtgcgaatgtaatgttggatatactcaggatgttagaggtgaatgcatcgacgtggacgaatgcacctccagcccttgccaccatggcgattgcgtgaatatccctggaacctatcactgcagatgttatccgggattccaagctacgccgaccaggcaggcttgcgtggacgtggacgaatgcattgtcagtggtggtctttgtcacctcggacgatgtgtgaacacagaggggagttttcagtgtgtctgcaacgctggattcgagttgtcaccggatggaaagaactgcgtagaccacaacgaatgtgctacgtcaaccatgtgcgttaatggcgtttgtctcaacgaagacgggtccttctcgtgtctgtgcaagcctggctttctattggctcctggaggccattattgcatggatatagatgagtgccaaaccccagggatctgtgttaatgggcactgtaccaacaccgaggggtctttccggtgccagtgcctggggggcctagccgtgggaactgatgggcgagtctgtgtggatacacacgtacgatcaacttgctatggagccattgaaaagggctcatgtgcacgccccttccctggaaccgtgaccaagtctgagtgttgctgtgccaaccccgaccatgggttcggagaaccttgtcaattatgtccagctaaagactctgcggagtttcaggctctttgctcatcaggactgggaattacaacagatggcagagacatcaacgaatgtgcactggatcctgaggtttgtgccaacggagtttgcgagaacctgcgtggttcctataggtgtgtgtgcaatttaggctatgaagcaggtgcgtcaggtaaggactgcaccgacgtcgacgagtgcgctctgaacagcctgctgtgtgacaacggttggtgccaaaactctcctggttcttactcctgtagttgcccacccggctttcatttctggcaggatacagaaatctgcaaggatgtagatgaatgcctctcctcaccctgtgtctccggagtctgcagaaacctcgcaggctcctacacctgcaagtgtgggcctgggtcgaggctcgatccctcaggtacattctgccttgattctaccaaggggacttgttggctaaaaattcaggaaagcagatgcgaggtcaaccttcaaggtgcctccctgaggtccgagtgctgtgctacactgggggctgcttgggggtctccctgcgaacggtgtgagatcgatcctgcctgcgccaggggtttcgcacggatgactggtgtgacttgcgatgacgtgaatgagtgcgaatcctttccaggagtgtgtccgaatgggaggtgtgtgaacacagccggctcatttcgctgcgaatgcccggagggactgatgctcgacgcgtcgggtcgcctttgcgtggacgtgagattggaaccatgctttctccgttgggacgaggacgagtgcggggtcacactgcctggcaaatatcgaatggatgtctgctgctgttccatcggagccgtgtggggggtcgaatgcgaagcgtgcccagatccggaaagcctcgagttcgcatcactgtgcccccggggtttagggttcgcatcaagagacttcctgtcggggagacccttttacaaagacgttaacgagtgtaaagtgtttccggggctgtgtacacacggaacctgtcgcaacactgtagggagtttccactgtgcttgcgctggcgggttcgccttggatgcgcaggagagaaactgcaccgatatcgacgaatgccgcatttcccctgacctgtgtggccaaggcacatgcgtgaatactcctggcagctttgaatgtgagtgcttcccagggtacgaatctggtttcatgctgatgaagaactgtatggatgtcgacgagtgcgcccgcgaccctttattgtgcagaggaggcacttgtactaatacggatggatcatataaatgtcagtgcccacccggccatgaacttactgctaaaggaaccgcgtgcgaggatatcgacgagtgcagtctgtcggacggcctctgtccgcatggccaatgtgttaatgtgattggagcatttcagtgtagctgtcacgccggatttcagtctacccccgaccgccagggttgcgtggatatcaatgaatgccgggttcagaacggtgggtgtgatgtccactgcatcaacacggagggatcctataggtgcagctgcggccagggttattctctgatgcctgacggacgggcttgtgccgacgttgacgaatgtgaggaaaatccacgagtatgtgaccaggggcattgcactaatatgcccggcggccaccgctgcttatgttatgacggcttcatggccactcccgacatgcgcacctgtgtggacgtggacgagtgtgacctgaatcctcatatttgcctgcacggagattgtgagaatacgaaaggtagtttcgtctgccattgccagctaggttacatggtgcgtaagggcgccaccggttgcagcgacgtcgatgaatgcgaggtgggggggcacaattgtgactctcatgcaagctgcctaaatattccaggctctttcagctgccgatgtctacctggatgggtgggcgacgggttcgaatgtcatgacctcgatgaatgcgtgtcgcaggagcataggtgtagcccacggggagactgcctgaatgtgccggggtcctataggtgcacctgccggcagggctttgcaggcgacgggttcttttgcgaggatcgcgacgagtgtgcagaaaacgtcgacttgtgtgacaatggacagtgcttaaacgccccggggggatatcgatgcgagtgcgaaatggggttcgacccaaccgaggaccatcgcgcttgtcaggatgtagatgagtgcgcccagggtaacctgtgcgccttcggttcttgcgagaatctccccggcatgttcaggtgtatatgtaacgggggttatgaactggatagggggggagggaactgtaccgacattaatgagtgtgcagatccggtgaactgcatcaacggggtgtgcattaatacccctggttcttacctgtgcagctgcccccaggactttgagctgaaccccagtggggtcgggtgtgtcgacaccagggccggaaactgtttcctggaaacccacgacagaggggactctggaatatcctgctcagctgagatcggggtgggggtgactagggcctcctgctgctgttcactcgggcgagcatggggaaacccttgcgagctgtgccccatggcaaacacaacagagtaccgaacactttgccccggcggagagggctttcagcctaacagaatcacagtgatactggaagatattgacgaatgccaggagctccctggcctgtgccagggaggcgattgtgtcaatacgttcggttcctttcaatgcgagtgccctcccggctaccacctgagcgagcatacacgcatctgtgaggacattgacgagtgtagtactcactccggcatatgtggtccaggcacttgctataacaccttaggcaactacacctgcgtctgtcctgcggagtacctgcaggtaaacggagggaacaattgtatggatatgcggaaatctgtctgttttcgacattacaatggtacttgtcagaatgaactggccttcaatgttacacgaaaaatgtgctgttgctcttacaatatcggacaggcgtggaatcgtccatgcgaagcttgcccgacccctatcagcccggactatcagatcctctgcggcaaccaggcaccaggcttcctgactgacatccataccggcaaacccctggatattgatgaatgtggggagatccccgctatctgtgctaacggtatttgcataaaccagatcgggagtttccggtgtgagtgccccgcaggttttaattataactccatcctactggcttgcgaagatgtcgatgagtgcggcagtagggagagcccatgtcagcagaacgcagactgcattaacatccctggcagctatcgttgtaaatgtaccagaggatataagctctccccggggggagcctgtgtggggaggaacgagtgtcgggaaatccctaatgtttgcagtcacggtgactgtatggacacagaaggcagctatatgtgcctgtgccacagagggttccaggccagtgccgaccagacgctgtgtatggacattgatgaatgtgaccggcagccttgcggcaatgggacctgtaagaacatcattggttcgtacaactgtttgtgttttccaggcttcgtcgtcactcataatggggactgtgtggattttgacgagtgcacaaccctggtgggccaggtgtgtagatttggtcactgtctaaacaccgccgggtccttccactgtctgtgtcaggatggatttgagcttactgccgatggcaagaactgcgttgatactaatgagtgtctgagtcttgccggaacctgcctacccggaacatgtcagaatctggaaggttccttccgctgtatatgtccccctggattccaggttcaatcagatcactgtatcgatatcgacgaatgtagtgaagagccaaatctctgcctcttcgggacctgcactaactccccaggctcctttcagtgcctttgtccacccggttttgttttatccgataatggccaccgctgctttgatacaagacagtctttttgctttactcgatttgaggccgggaagtgcagcgttccaaaagcctttaatacgactaagacacgttgctgttgctcgaaacggcctggggagggatggggcgacccttgtgagttgtgtccccaagagggaagtgctgccttccaggaactttgcccgttcgggcacggggccgtccccgggcctgatgactctcgggaggatgttaacgagtgcgcagaaaatccaggcgtttgcactaacggagtgtgtgtaaacacagacggaagtttcaggtgcgagtgcccctttgggtattccctcgattttacagggatcaactgcgtcgacaccgacgagtgctccgtgggccacccctgcgggcaaggcacatgcactaatgtgatcgggggattcgagtgcgcctgcgcagacgggtttgaacccggcctgatgatgacctgcgaggacattgatgaatgctcgcttaaccctctgctgtgcgcctttcgctgccacaataccgaggggtcttatttgtgcacttgtcccgctgggtacaccttacgggaggacggagccatgtgccgggacgtggacgaatgcgctgatggccagcaagactgccatgcccgaggcatggaatgtaaaaacctgataggcacttttgcttgcgtctgtccgcccggaatgcgtcctctgccagggagtggcgagggatgcacagacgacaacgagtgccacgcacaacctgatctttgcgttaacggccgctgcgttaatactgccggaagtttccggtgtgattgcgatgaagggttccagccctccccgaccctcacggaatgtcatgacatccgccagggcccctgtttcgccgaggtgctacagacaatgtgccgttcactatcttcctcatctgaggccgtcaccagagccgaatgttgctgcggaggcggaagagggtggggtcccaggtgtgaactatgccccctccccggtacttccgcctaccgaaagttgtgtcctcacggctctggatacaccgccgagggaagggatgtggatgaatgtagaatgctggctcatctctgcgctcacggcgagtgtattaactcactcggatcattccgatgtcactgccaggccggatataccccagatgcgacggcaaccacatgcctggatatggatgagtgctcacaggtgcccaagccctgcacatttctgtgtaagaacaccaaaggctccttcttgtgctcatgtccccggggctacctgctcgaggaagatggacggacctgcaaagaccttgacgagtgtacttctaggcaacataattgccaatttttatgcgtcaacaccgtcggcgctttcacatgcagatgtccaccaggattcacccagcaccaccaggcatgttttgataacgacgagtgttcagctcagcccggtccctgtggagcccatggccactgccacaataccccaggatcattccggtgcgaatgtcaccagggtttcacacttgtcagctccggacatggttgtgaagacgtgaatgaatgtgacggaccccaccgttgtcaacacggatgccagaaccagctgggagggtatagatgctcgtgcccccaggggttcacacagcactctcagtgggcccagtgcgtggatgagaatgaatgcgccctgtcccctccgacctgcggttccgcatcctgccggaacacactcgggggattcagatgcgtctgtccctcgggattcgattttgaccaggcactcggtggttgccaggaagtggacgaatgcgcaggacgaagggggccttgtagctattcgtgcgccaacacacccggaggcttcctgtgcggctgtccgcaaggatattttagagccggccaagggcattgcgtgtcagggcttgggttcagccccggcccacaagatacccccgacaaagaggagctgcttagtagcgaagcttgctatgaatgtaagattaatggtctttccccgcgcgataggcccagacgcagcgcacacagggaccatcaggtaaacctggctacactcgattccgaggccctgttaacgcttgggctcaacctgtcccacctgggcagagccgagagaatcctcgagctacgtccagccctcgaaggcctggaagggcgcattcggtacgtcatcgtccgggggaatgaacaggggtttttcagaatgcaccacctgcggggggtgtccagtctgcagcttgggagaagacggcctggtcctggtacctatcgtctcgaggtggtaagccatatggcaggcccttggggagtgcagccggaaggccagccgggtccctggggccaggccctgagacttaaggtgcagctgcagctactttag

SEQ ID NO: 224157 - DNA, 2619 bp, Artificial Sequence
  derived and/or modified sequence
atgggcatcgtgtggatcctgatgagcgtgctgccctggtggggccgttgcgctgacttagccatcgcaagtacacagctcgtgccatccaccgcctcagcacggatggccttgtcctcccaactgatgggtcggacagtctggaccccaatgagcgcttctgctctgcaggagcccgcgtatccggccctggccagaacttctcgagctccttccgccgccagcgtgccactggcatctaggtgcagagtgaccactgctttgataagtacatctgcccagcggtctcccacctcagcgagccttgctccggtgcccactgctctcggtgcctccagcgcctctgcacacctcgccctcagctctctcactatgggaactgttgccctcacccacggacgcgtgtctgcttccccagtgctgcgattgggttctgcacgttgtcctaagctctccacacccccgcgacctgcagcagccgccgttaggggactcggcagagcaggggagacaccagccaactgcgtacccaggagagctgtcccaggccctgatgatagtagggaggatgtgaatgagtgcgctgagaaccccggagtgtgtacgaatggcgtgtgtgtgaacacagacggcagttttagatgtgagtgcccttttggctactcccttgatttcaccgggatcaattgcgttgatacagacgagtgctcagtaggccatccttgtggtcagggcacttgcactaatgtgatcggcgggttcgaatgcgcctgcgccgacggcttcgagcctgggctcatgatgacctgtgaggacattgacgagtgttcgctcaacccattactctgtgctttccgttgccataacactgagggctcttacctgtgtacatgtcctgctggctacacgctgcgggaggatggggcaatgtgccgggatgtggatgaatgtgcagacgggcagcaggactgccatgccaggggtatggagtgtaaaaacttgatagggacattcgcatgtgtctgtccccccggaatgcgccccctgccagggagtggcgaaggttgcacagatgataacgagtgccacgcacagcccgatctatgcgtgaatggacggtgtgttaacactgctggcagctttaggtgtgattgtgacgaggggttccagcctagccccaccctcaccgagtgccacgacatacgacaagggccgtgctttgccgaggtccttcaaacaatgtgtcgatccctctccagttctagcgaggccgtcactagggctgaatgctgctgcggtggcgggcgggggtggggaccccgatgtgaattgtgtccattacccgggactagtgcttataggaagctgtgtccccacgggagtggttataccgcagagggcagggacgtcgacgagtgccgcatgttggctcatctatgtgcacatggagaatgcatcaattcactgggatccttcaggtgccactgccaagccgggtataccccagacgcaactgctaccacgtgtctggatatggacgagtgttcacaggtgccgaagccatgtaccttcctttgcaaaaacaccaagggttctttcctgtgcagctgtcccaggggctacctcctggaagaggatggtaggacctgcaaggatctggacgagtgcacctcacgccagcataactgtcaatttctctgtgtgaacaccgtgggggcatttacctgtagatgtcctcccggttttacccagcaccaccaggcctgttttgatgtaaatgaatgtgatgggccccatcgttgtcaacacggttgccagaaccaactcggcggctatcgctgctcgtgcccccaggggtttacgcagcattcgcagtgggcgcagtgtgtagatgaaaacgaatgcgcgctgtctcctcccacgtgcggctctgcctcatgcagaaatactctaggagggttccggtgtgtatgcccttcggggtttgatttcgatcaggcactgggtggttgccaggaagtcgatgagtgtgccggccgtcgcggcccctgttcttactcctgcgccaatactcccggcggtttcctctgtggctgtccacagggttactttagggcgggtcaggggcattgcgtgtctgggctcggcttcagtccaggaccacaggatacgcccgataaggaggagctgctttcttccgaagcatgttatgaatgcaagataaatggcctgtcgcctcgtgataggccccggaggagtgcccaccgggaccatcaggtgaacctggcaaccctggacagtgaagccctcctgaccctcgggctcaatttatctcatctaggaagggcggagagaatactagagctccggcctgccctagaggggcttgagggcaggatcaggtacgtgatcgttagggggaatgagcaagggttttttcgcatgcatcatctaaggggcgtgagctctcttcagctgggccggcgcagaccgggtccaggaacctacaggttggaggtggtctcccacatggcaggcccttggggcgtacaaccagaaggccagcccggaccctgggggcaggcactgcggctcaaagttcagctgcagctactctag

SEQ ID NO: 224158 - RNA, 8430 nt, Artificial Sequence
  derived and/or modified sequence
augacacucgagggauuguaucucgcaagagggccucuggcacgguugcugcucgccugguccgcacugcuaugcauggccggcggacaaggacgcugggauggggcccuugaggccgcuggacccggacgggucaggagaagaggaaguccuggcauucuccaagggccuaaugugugugguagccguuuucacgccuacugcugucccggguggagaacguuuccagggagaagucagugcguggugcccaucuguaggcgggccuguggagagggguucuguucgcagccaaaccuguguaccugugccgacggaacccuagcacccucauguggagucagccgggguucuggcugcaguguuucuugcaugaauggcggcacgugucggggggcgagcugccugugucagaaaggguacacagguacaguguguggccaacccaucugcgaucguggcugccacaacggggggcgcugcaucggccccaaucgaugcgccugugucuacggcuuuaugggcccucaaugcgaacgggauuaccguacagguccuuguuuuggccagguggggccggaagggugucagcaccagcucacaggccuuguuuguacgaaggcacuguguugcgcgacaguuggaagagccuggggccugccaugcgaacucuguccugcccagccucacccaugcagaaggggguucauuccgaauauucacacgggagccugccaggauguugacgagugucaggcugugccugggcugugucagggcgggucaugugugaauauggugggcuccuuucauuguagauguccagucggccaucgucugagugacucuagcgccgcuugugaggacuaucgggcaggggccugcuucucaguacuguuugggggccgaugcgccggagaccuggcgggacauuauacgcgcaggcagugcuguugcgaucgcggucggugcugggcggcuggaccuguccccgaauugugcccgcccagaggaucuaaugaguuccagcagcucugcgcgcagagacugccccuacuucccggacauccgggccuguuucccggccuucugggguucggaucuaaugguaugggcccaccauuaggcccugcccggcugaacccacacggaagcgaugcgcguggcauuccaagccugggcccaggcaacuccaauaucggcaccgcaacgcugaaucaaacuaucgauaucugcaggcauuuuacaaaucuaugucugaacggucgcugucuucccacacccucuaguuaucguugugaauguaacguaggcuauacccaggauguccgcggagaauguaucgauguggaugaguguaccagcagucccugccaucacggugacugugucaauauucccggaacguaccacugucgaugcuauccuggcuuucaagcuaccccuacaagacaggccugcgucgauguggaugaaugcauugugagcggaggacucugucaccugggccgaugcgucaacacugagggcucauuucagugcguuugcaaugcuggcuucgagcugucccccgacgggaaaaauuguguugaucauaacgaaugcgcaacguccaccauguguguuaaugguguuugucugaacgaggauggcaguuucagcugucuguguaagccugguuuccugcuugcuccgggaggccacuauuguauggauaucgacgagugucagacaccuggaaucuguguuaacggacacuguacgaauacugaggguagcuuucgcugccagugucugggcggacuggcugugggcaccgauggccgaguuugugucgacacucauguccgaagcacuugcuacggugcaauugaaaaaggauccugugcuagaccuuucccuggcaccgucacuaaaagugaauguuguugcgcaaacccagaucacgguuucggagagcccugucagcucuguccggccaaagauagugcggaguuucaagcacucugcuccucaggucucgguauaacuacugaugggcgggauauaaacgagugcgcccuggacccugaggucugugcaaacggcguuugugaaaaccuucgugggaguuaccgcugcguguguaaccugggcuacgaggccggugcuuccggaaaggauugcacugacguugaugagugugcucugaacaguuuacucugugauaauggauggugucaaaauucucccggauccuacucuugcucgugcccuccuggguuccauuucuggcaggacacagagauuuguaaagauguggacgagugccuuucaaguccguguguuuccggaguaugucgcaaccuggcuggcucuuacaccugcaaaugcggccccggaucucgccuggaccccucgggcaccuuuugcuuggacagcacuaaagggacgugcuggcuuaaaauucaggaaucccggugcgaggugaaucuucaaggagcuucccugcggagcgaauguugcgcaacuuugggagcugccugggggagcccgugcgagcgaugugagauugacccagcgugugcccguggguuugcaaggaugaccggaguuaccugcgacgacguuaaugagugcgagucguuccccgggguguguccaaacggucggugcgucaacacagccggaucuuuuaggugcgaaugccccgagggacucauguuggacgcaagcgggcgccuguguguggauguacgccuggaacccuguuuucugcggugggacgaagaugaauguggaguuacacuaccuggcaaauauaggauggaugucuguugcugcucuaucggggccguuuggggcguggagugugaagccuguccagaucccgagucuuuagaguucgcaucacugugcccucgggggcugggcuuugcgagucgggauuuccuguccgggcggcccuucuacaaagauguaaacgagugcaagguguuccccggccuuugcacacacggaacaugccgcaauacagugggauccuuucauugugcuugcgccgggggauucgcucuggaugcacaagaacggaauuguacugauauugaugaauguaggauaucaccagaucuguguggacaaggcacauguguaaacacccccggcaguuucgaaugcgaguguuuuccuggcuaugaaagcggauuuaugcugaugaaaaauugcauggauguagaugaaugugccagagauccucuccucugccggggcgggacaugcacaaauacugacgggagcuauaaaugucaaugcccuccaggccacgaauugaccgcaaaggggacagccugcgaggauaucgacgaaugcucgcugucugacggcuuauguccgcacggccaaugcguuaauguuaucggggccuuccagugcaguugucaugccggcuuucagucuacaccggauagacagggcugcguggacauuaaugagugcagaguacagaauggcgguugcgauguccauugcaucaauacugaaggaucuuaccguuguucuugcggccagggcuauucacugaugccugacggacgggccugugcugauguggaugagugugaagaaaacccccgggucugcgaccaagggcauugcaccaauaugccagggggucauagaugcuuguguuacgacggcuucauggcgacacccgauaugagaaccuguguugacguugacgagugcgaccugaauccucauauuuguuugcauggugacugcgaaaauaccaaagggucuuucgugugccacugucaguugggcuauaugguuaggaagggugcuacuggcuguagugacguggacgagugcgaggucgggggacacaauugugauagccaugccuccugucugaauauccccggauccuuuucaugccgaugucucccagggugggugggugauggauuugaaugccaugaucuagaugaauguguaagucaggaacaccggugcucuccccgcggggauugccucaauguuccagguucuuauagaugcaccugccgucagggcuucgccggugacggauucuuuugugaagacagagaugagugugcagagaacguugauuugugugauaauggucaaugucucaaugccccugguggcuacaggugcgaaugugaaaugggauucgauccaaccgaagaucaccgugccugucaggauguugacgagugcgcucagggaaaccuaugcgcguucggaagcugugagaaccugcccgguauguucagaugcaucugcaauggcgguuacgaguuagaccggggcgggggaaauugcaccgacauaaacgagugugcggacccagugaacuguauuaaugggguguguauaaacacgcccggaaguuaccuguguuccuguccacaggacuuugaacucaacccgucaggcguaggguguguugauacccgggcugguaauuguuuccucgagacccaugauagaggagacucugggauuucuuguagugcagagaucggcgucggcgugaccagggcuucauguuguuguucacuugggcgcgccuggggaaaucccugcgagcugugcccuauggccaacacaacugaauauaggacacucuguccgggaggggagggcuuucagccuaaccggauuaccgugauccuugaggacaucgaugagugccaagaacuuccuggacuuugccaaggcggggacugugucaauacauuuggaagcuuccagugcgaaugcccuccgggauaccaucugagcgagcacacacggauuugcgaggauauagaugagugcucaacucacucaggaauuuguggaccaggaacuugcuacaacacacugggcaacuauaccugugucugcccagcagaguaccugcaggucaaugggggaaacaauugcauggauaugagaaagagcguauguuuuagacacuauaacggaaccugccagaacgaguuggccuuuaaugugacgagaaagauguguugcugcucuuacaacauagggcaggcuuggaacagacccugcgaagcaugcccuacaccaaucucccccgacuaccagauccuuugcgggaaccaagcccccggcuuucuuacagacauucacaccgguaaaccccuggacauugacgaauguggggaaaucccggcaauuugcgccaaugggaucugcaucaaccaaauagguuccuuccggugugagugcccugcuggcuuuaacuacaacagcauucuuuuggcuugcgaagauguggacgaaugcggcaguagagagucccccugccagcaaaacgcugauuguauuaauauucccggaagcuaucggugcaagugcacacgcggauauaagcuuuccccggguggggccugcgucggccgaaaugagugucgcgaaauccccaauguaugcagccauggcgacugcauggauacagaaggguccuacaugugccugugccaucgaggauuucaggcguccgcugaccagacccuuugcauggacaucgaugagugcgaucgacagccuuguggcaacgguacuugcaagaacaucaucgguuccuacaauugccuuuguuucccgggcuucguagucacucauaauggggacugcguugacuuugacgaauguacgacgcucguugggcaggugugccgcuucggacacugccugaauacagcuggaucuuuucacugccugugucaagauggcuucgaacugacagcugauggaaagaacugugucgacacaaaugaaugucuaagucuggccggaacaugcuugccugggacuugccagaacuuggagggauccuuccggugcauauguccgcccggcuuucagguccagucagaucacugcaucgauauugaugaaugcagcgaggagcccaaucugugucuguuuggaaccuguacaaacucccccggaaguuuccaguguuugugcccucccggauucgugcuguccgauaauggccauagauguuuugacacccgccagucguuuuguuucacccgcuucgaagcggguaaguguagcgugccaaaggccuucaacacaacuaagacuaggugcuguugcucaaagcgccccggggaaggcuggggggaccccugcgaacuauguccgcaggaaggguccgcagcauuccaggaguugugcccauucggucacggggcugugcccggacccgacgauucuagggaagacguuaaugaaugcgccgaaaauccagggguuuguacaaauggaguuugcgucaacacagacggauccuuucggugugaauguccuuuuggguacagcuuggauuucacuggaaucaacuguguugacacugacgaaugcucaguuggacaccccugcgggcagggcaccuguacgaaugugaucgggggguucgaaugugcuugcgcugauggcuucgagccaggcuugaugaugacuugcgaggacauagacgaaugcucuuuaaacccauugcugugcgcuuuuaggugccauaacacagagggcagcuacuuauguaccugccccgccggguacacccucagagaagauggggcuaugugcagagacguugaugaaugcgcugacggacagcaggacugucacgcucgcggaauggaauguaagaaucugauugguacuuuugcuugcgugugcccgccagggaugcgcccccuucccgguucaggugagggcugcacagaugacaaugagugucacgcacagccugacuuguguguuaauggucggugcgugaauaccgcgggaaguuucaggugugacugugacgaggguuuccaaccuagcccgacgcuaacagaaugccacgauauucgacaaggacccugcuucgcggaggugcugcagaccaugugucgaagccugucaagcuccuccgaagccguuacccgcgcugagugcuguugcggcggugguaggggauggggcccuaggugcgaauugugcccacugccugggacuucagcauacagaaaacucugcccccaugguucuggguacacagcugagggaagagauguagaugaaugcagaauguuggcacacuugugugcgcauggagaauguaucaacagcuugggguccuuuagaugucacugccaggcagguuacacucccgaugcaaccgccacgacuugccuggauauggaugaauguucccagguccccaagcccuguaccuucuuaugcaaaaauacaaagggcagcuuccuuugcucuugcccccgcggauaucuccucgaggaagacgguagaaccugcaaagaccuggaugagugcaccagccgacagcauaauugucaguucuuguguguuaacacggugggugccuucaccugccggugcccacccggcuucacacagcaccaccaggcguguuuugauaacgaugaaugcucugcccagccaggaccguguggcgcccacgggcacugccacaauacgccaggaagcuuucguugcgaaugccaccaaggcuuuacccuggucucuaguggucaugguugugaagaugucaaugaaugugaugggccccaccggugccagcacgggugucagaaccagcuugguggauauagaugcucuugcccccaagguuucacacagcauagccagugggcccagugcguugacgagaaugagugcgcucuguccccaccuacaugcggcucugcauccugucguaauacccugggcggcuuuagguguguuuguccauccggguuugacuucgaucaggcucugggaggaugucaggagguggacgaaugcgcgggucggcgggguccauguagcuacucuugcgccaauacccccgggggcuuucuguguggcuguccccaaggauauuucagagccgggcaggggcacugugugucaggacuuggauucagcccuggcccacaggauacucccgacaaggaggaacugcugucauccgaggcaugcuaugaauguaagaucaaugggcugaguccgcgggaucggccacgacgcagcgcccacagagaccaccaagugaaucuggcgacacuggacagugaagcucuccugacacuuggcuuaaaccuuucgcacuuggggcgcgccgaaagaauuuuagagcugcguccagcacucgaggggcuggagggccgcauccgauacguuauugugcgggggaacgaacaaggguucuucagaaugcaccaccugcgaggagugucaucauugcaacuggggagacguagaccuggcccugguacauaccgguuggaagucguaucacacauggcaggaccuuggggcguucagcccgaggggcagccaggucccugggggcaggcauuacggcugaaagugcaguugcagcuucuguag

SEQ ID NO: 224159 - RNA, 2619 nt, Artificial Sequence
  derived and/or modified sequence
auggguaucguuuggauucugaugucaguauugccaugguggggucggugugcugaucuggcaauugcuucuacucagcuggugcccucaaccgcaucugcucguauggcacugucuucucagcucaugggucgcacagucuggacaccuauguccgcauccgcccuucaggaacccgcuuauccagcuuuggcuagaaccucaagggcuccaagcgcugcauccguuccucuggccagccgcugcagggucacaacagcccugaucucuaccagugcccagcgcucccccacaucagcuucccucgcaccuguaccuacugcccuaggcgcauccuccgccucagcccauuuggccuuaaguucacucacuaugggaacgguggcacugacccacgggagagucagcgcauccccaguacuacgguugggguccgcccggugccccaaguuaagcacaccuccuaggccugccgccgccgcagugcgagggcugggccgagccggcgagacaccugccaacugcgugccaagaagagcuguacccggccccgaugauucaagagaagacgugaacgagugugcagagaacccugggguguguacgaauggggugugugugaacaccgauggcuccuuccgcugugaaugcccuuuuggguauucucuggacuucacagggaucaacugugucgauaccgacgaguguuccguuggccacccuugugggcaaggcacguguaccaauguuauugggggauuugagugugcgugugccgauggcuuugaacccggccugaugaugacaugcgaggauaucgaugagugcucccugaacccuuuguuaugcgcuuuccggugccauaauaccgagggaaguuaucucuguacgugccccgcgggcuacacucuccgagaggacggcgcgaugugccgagauguggacgagugcgccgacggucagcaagacugccacgcucgcggaauggaauguaagaaccuuaucggaacuuucgccuguguuuguccuccgggcaugaggccccuuccaggcaguggugaaggaugcaccgacgacaaugagugccacgcccagcccgaccuuugugugaacggccggugcgucaauacagcuggcuccuuuagaugcgauugugaugaaggcuuccaaccuuccccaaccuuaaccgaaugccaugacauccggcagggaccuuguuuugccgaggugcugcagaccaugugccgaucuuuguccucaagcagcgaggcugucacaagagcagagugcugcugcgguggggggcgaggcugggggccccggugcgaguugugcccacucccagguacaagcgcguaucgcaaacugugcccucauggcucuggguauacagcggaagggcgcgacgucgacgagugcaggauguuagcccaccucugugcccacggggagugcaucaauucacuggguaguuuuaggugucauugccaggccggauacaccccagacgccacugcgaccaccugucuggacauggaugaguguagccagguucccaagccaugcacguuccugugcaaaaauacuaaggggucuuucuuguguuccugcccacggggcuaccuuuuggaggaagacggccguacuugcaaagaccuggacgaguguaccuccaggcagcacaacugccaguucuuaugcguaaauacagugggagcguucacguguagaugcccuccagguuucacccagcaucaucaagcuugcuuugaugucaaugaaugugacggcccucaccggugccagcauggaugccagaaccaguugggaggauacagaugcuccugcccccaaggauuuacacaacauucccagugggcucaguguguugacgaaaacgaaugcgccuugucgccgccaaccuguggcucagcuucaugucgcaacacuuuaggcggguuuaggugcguauguccauccggauucgacuucgaccaggcacugggaggaugccaggaagucgacgaaugugccggacggagaggccccuguucguauagcugcgcuaauacgccugguggauuuuugugugguugcccucagggcuacuucagagcuggccaggggcacugcgugaguggccucggauuuagucccggcccacaggacaccccagauaaagaggagcugcuuucuuccgaggcuugcuacgagugcaagauaaauggucuuagcccccgggacagaccacgccgaucggcccacagagaucaccaagucaaccuggcaacacuggacagugaggcccuccugacgcugggucucaaccucucgcaccucggcagggccgaacguauucuagaacugagacccgcucuggaagggcuugaggggcgaauucgcuaugugaucgugcgcgguaaugagcagggcuuuuuuagaaugcaccacuugcguggagucucuucucugcaacuugggcgcagacggccuggaccagggacguaucggcuggaggucguuucucacauggccggcccguggggaguacaaccagagggacagcccgggccguggggucaggcccugagacuaaaaguccagcuucaacuacucuag

SEQ ID NO: 224160 - RNA, 8430 nt, Artificial Sequence
  derived and/or modified sequence
augacucuugaggggcucuaccuugcccguggaccacuggccaggcuucugcucgccuggagugcucugcugugcauggccggaggccagggucgcugggacggcgccuuggaggcagccggcccaggaagagugaggcgacgcggaaguccaggcauccuucaaggaccuaacgugugcggcucucgcuuccacgccuauugcugcccuggguggagaacauucccuggacguucccaguguguggugccuaucugucguagagcuugcggagagggauucugcagccagcccaaucucuguaccugugcggacggcacccuggcuccaucauguggugugucucgcggaagcggcugcuccguguccugcaugaacggugggaccugcaggggagccucuugccugugucagaaggguuacacuggcacagugugcggccagccuauuugugaccgaggcugucacaauggcgggaggugcaucggaccgaauagaugcgccugugucuauggauucauggguccucagugcgagagggauuaucgaacuggcccgugcuucggacaaguaggacccgaggguugccagcaccagcuaacaggccuggucugcacuaaagcccugugcugcgcaaccgugggcagagccuggggccuucccugugaacuguguccugcucaaccccauccuugucggagaggcuuuauuccaaacauccacaccggggcaugucaggacguggaugagugccaggcugugcccgggcugugccaagggggaucaugcguuaacaugguggguuccuuccacugcagaugccccgugggccaucgguugucagauucgagcgccgccugugaagauuaucgcgccggagcguguuuuuccgugcucuuuggcggccggugugccggcgaucuugccggacacuauacacgcaggcaguguugcugcgaucgcggucgcuguugggccgccgguccagucccugaacugugcccgccacgugggucuaacgaauuccagcagcucugcgcccagcgcuugccgcugcucccgggccauccaggccuuuucccuggucuccugggauuuggguccaaugggaugggacccccccuggggccugcucgguugaacccccauggcagcgaugcuaggggcauuccgagccucgguccagguaauuccaacauugggacugccaccuugaaucagaccauugacaucugucggcacuucacaaaucuguguuugaaugggcguugucuucccacaccaagcagcuaucggugcgaaugcaauguuggauauacucaggacguccgcggugagugcauugacguggacgagugcacgucaucccccugccaccacggagacugcgugaacauuccaggcaccuaucauugucggugcuaucccggauuccaagcgacuccuacaagacaggcgugcguggacguagaugaaugcauagucucugguggccugugccaucuaggaagaugugugaauacagagggaucauuccaaugugucugcaacgccggauucgaguuaucuccggacggcaagaauuguguggaccauaaugagugugcaacaagcaccaugugcguuaaugguguaugccugaaugaggacggcagcuucuccugucugugcaaaccuggguuccuccuggcacccggaggacacuacugcauggauauugaugaaugucagacaccaggaauuuguguuaacggccacuguaccaacaccgagggcuccuuucgaugucagugucucggcggacuugccguggggacggauggucggguuugcguggacacccacgugagaucuacaugcuacggugccaucgagaaaggcagcugugcacggccuuuucccggaacuguuaccaagucagaguguuguugcgcuaauccugaccauggauuuggagaaccuugccagcucuguccugcaaaagacucugcugaguuucaggcacucuguaguuccggcuuggggaucacuaccgauggacgugauaucaaugaaugcgcccuagaucccgaggugugugccaauggggugugugagaacuuaagagggucuuaucgaugcguaugcaacuugggcuacgaggccggagccuccggcaaggacuguaccgacguggacgagugcgcccugaacucccuccugugugacaauggguggugucagaacucaccugguagcuauucaugcagcugcccaccggguuuucauuuuuggcaggauacagagauuugcaaggauguugacgagugccuuagcuccccaugugugucuggggugugucgaaaucuugccgguucuuacacuugcaaauguggcccaggcucccgacucgacccuagcggcacauuuugcuuggauaguacaaagggcacuuguuggcugaagauccaggagagccgaugugaggucaaucugcagggcgcaucccugaggucagaauguugugcuacacuuggugcugccuggggauccccaugcgaacguugcgaaauugauccagcaugcgcccguggguucgccagaaugaccggaguuaccugugacgacgugaacgaaugugaauccuucccuggcgucuguccuaaugggcgauguguaaacaccgcaggcuccuucagaugcgaaugcccugagggacugauguuggaugccucugggcggcuuugugucgacguccgccucgagccuugcuuucugaggugggacgaggaugaauguggggugacccugccaggcaaauaccgaauggacgucuguuguugcagcauuggcgccgugugggggguggaaugcgaggccugucccgacccggagucccucgaguuugccucacuguguccaagaggacugggguuugcuagccgggauuuccugagcgggagacccuuuuauaaggacguuaacgaaugcaaggucuuucccggccuguguacucaugggaccuguaggaauacagucgggucauuucacugugccugcgccggcggcuucgcccuggacgcucaggagcggaauuguacagacaucgacgagugcaggauuagcccagaccuuugcgggcagggaaccugcgugaauacaccuggcucauucgagugcgaguguuuccccggguacgagagugguuucaugcugaugaagaacuguauggauguugacgagugcgcuagagaccccuuauuaugucgcggcgguacaugcacgaauacagacggcaguuauaagugccagugcccaccuggccacgagcuuaccgccaaaggcaccgcuugcgaagauaucgaugaguguucacugucggauggccugugcccacauggacaaugcguaaauguaaucggcgccuuccaguguagcugucacgcuggguuccagagcaccccagaucgacagggcuguguggacauaaacgaaugucggguccaaaaugggggaugugacguccacuguauaaacacagaagggucuuaccggugcucaugcggccaaggcuacucucucaugcccgauggaagagccugugcagacguggacgagugugaggaaaacccacgcgugugcgaccaggggcauugcaccaauaugccuggcgggcacagaugccuguguuacgacggcuuuauggcgacgccagacaugcgaacuuguguggacguggaugagugcgaucucaauccccacaucugccugcacggcgacugugagaacacaaagggauccuucguaugucauugccaauuaggcuauaugguccguaagggcgcaacagguugcucugacgucgacgagugugaaguggggggccauaauugugauucacacgccucauguuuaaauauucccggcucauucucgugcaggugcuuacccgggugggucggugaugguuucgagugucacgaccucgaugaauguguuagucaggagcauagauguucccccaggggagacugucugaacguaccggguagcuauaggugcacaugcaggcaggguuuugcuggcgacggcuucuuuugcgaagaucgagaugagugugccgaaaacguagaccugugcgacaacggacagugccugaaugcucccggaggcuaccggugcgaaugcgaaaugggcuucgaucccacagaggaccauagagcgugccaggauguagacgagugugcacaaggcaaucucugcgccuucggaucuugugagaaucuuccuggcauguuuagguguauaugcaaugggggguacgagcuugacagaggaggagggaacuguaccgacaucaaugagugcgcugacccugugaacuguauuaauggagugugcaucaauacuccugguaguuaucuauguucuugcccccaagacuuugaacugaacccaaguggcguggguuguguggauacacgagcuggcaauuguuuucuggagacccaugacaggggagacuccggcaucuccugcagugccgaaauaggcgucgggguaacuagggccagcuguugcuguucacugggaagagcauggggcaauccuugcgaacuaugcccuauggccaacaccaccgaauaucguacucugugcccagguggggagggcuuucagccaaaucgaaucaccguuauucuggaagauauugaugagugccaagagcugccaggucugugccagggcggugauuguguaaacaccuuuggguccuuccaaugugaauguccaccaggcuaucauuugucugagcauacacggauuugcgaggacaucgacgaguguuccacccacuccgguaucugcggcccuggaacuuguuacaauacucuugggaauuacaccugcgugugcccugcugaauaucuucaagucaacggagggaacaauugcauggacaugcgaaagaguguguguuuuaggcauuacaauggcacuugucagaacgaacuggcuuucaacgugacccgaaaaauguguuguugcucauacaacauugggcaggcuuggaaccgucccugugaagccugccccaccccuauaaguccugauuaucagauacucuguggaaaucaagccccugguuuccucaccgacauacacacaggcaagccauuggauauagacgaguguggggaaauuccagccauuugcgcaaauggcaucugcauuaaccagaucgggucuuuucggugugagugccccgcuggguucaauuacaauucaauucuacucgcgugcgaggacguugacgagugcggcuccagagaaucuccgugucaacagaacgccgauugcauuaauaucccuggcagcuaucggugcaaguguacuaggggcuacaagcucucaccaggcggcgcuugugugggccgcaaugaaugccgugaaauucccaacgugugcucucacggcgacuguauggacacugaagggagcuacaugugcuuaugucaccgcggauuccaggccagugcugaucagacccuuuguauggacauugaugagugugaccgacagccauguggcaauggaacauguaagaacauuaucggaagcuauaacugucugugcuucccuggcuuuguuguaacccacaacggggacugcguggacuuugaugaguguacuacacucguaggucaagugugccguuucggucacugccugaauaccgcugguucauuucacugucugugucaggauggauucgaacucaccgccgacgggaaaaacugcgucgacacaaaugagugccugagccucgccgggacaugucucccugggacuugucaaaaccuggaggguucauuuagguguauuugcccacccggguuccaggugcaauccgaucacugcauugauauagaugaauguucugaagagccuaauuugugucucuuuggcacgugcacaaacucucccggcuccuuccagugucugugcccuccgggguuugugcucucugacaauggccauagauguuucgauaccagacagucuuucuguuucacuagguucgaagccggcaaaugcucagugcccaaagcuuucaacacaaccaaaacaagauguuguugcuccaaacguccuggagagggcuggggcgaccccugugagcucuguccccaagaggguucugccgccuuucaggagcuauguccuuuugggcacggagccguccccggcccugacgauucucgagaagacguuaaugaaugugccgaaaacccaggugucuguacuaacgggguuugugugaauacagacggcucuuuccgaugugagugcccauucggcuacagcuuggauuucaccggcauuaauuguguggauacagacgagugcucgguggggcaucccugcggacaggggaccuguaccaacgucaucggaggauuugaaugugccugugccgacggguuugaaccuggucucaugaugaccugugaagacauagacgaaugcucccuaaauccauugcugugugcauuucguugccacaacacugagggcuccuaucugugcacaugcccugcuggcuacacccuucgcgaagacggagcuaugugucgggacguagaugagugcgccgacgggcagcaggacugccacgcgcggggaauggaguguaagaaccugauugggacuuucgccugugucugcccaccagggaugcggccccugccuggcucaggcgaagguugcacagacgauaaugaaugccacgcacaaccagaucucugcgugaaugggaggugcgugaacacugccggaagcuucaggugugauugcgaugaagguuuccagccauccccgacacucacugagugccacgauauucgucagggaccuuguuucgcggaaguucugcaaacaaugugcagaagucugucgaguaguagcgaagcuguaacccgcgccgagugcuguugcggaggcggaagaggcuggggaccaaggugugagcucugcccauugccugggacuuccgccuacagaaaauuaugcccacaugggucaggcuauacugcugagggucgugacguggacgaaugccgcaugcuggcacauuugugugcacauggggaguguaucaacagccugggcucguuucgcugucacugccaggccggcuauaccccagacgcaacugcaacaacauguuuggauauggacgaaugcagccaggugcccaagccgugcaccuuucuaugcaagaauacaaaaggcucauuuuuauguagcuguccgagagguuauuuguuagaagaagauggaagaacaugcaaagacuuggacgagugcacuagcaggcaacauaauugucaguuccuuugcgucaacacaguaggggcuuuuacuugcagaugcccccccggauucacccaacaucaucaggcuugcuuugauaaugacgaauguagugcucaaccugggcccuguggugcacacggccacugccauaacacaccggggucuuuccggugcgagugccaccagggcuucacauugguguccucuggacauggaugcgaagaugugaacgagugcgacggaccucaccgaugucagcauggcugucaaaaccaacuggguggguaccggugcagcuguccucagggcuuuacacagcauucucagugggcgcaguguguggaugagaacgagugcgcacugucuccuccuacauguggauccgcuaguuguagaaauacccuuggcgguuuccgcugcgugugccccagcggauucgauuucgaccaggcucugggugguugucaggaaguugacgagugugcaggccgucguggccccuguuccuauaguugcgcuaacaccccuggagguuuccuuuguggcugcccccagggcuauuuccgggcuggccaggggcauugugucuccggacuggguuucucaccuggaccacaagacacgcccgacaaagaagaacuccuguccucagaggccugcuacgagugcaaaaucaacggacuguccccgcgugacagaccgaggcgcagcgcucaccgagaccaccaggugaaucuggccacccucgacagugaagcucugcucacccucggguugaaccucagccaccuggggagagcagagagaauucucgagcuccguccugcacuggaaggucuggaggggagaauccgguacgugaucgugcgcggaaaugagcaaggguuuuuucgcaugcaccacuugaggggcguaagcagucuucagcucgggcgacgcaggccaggaccgggaacuuauagacucgagguugucagucacauggcuggcccaugggggguacagcccgagggacaacccggcccaugggggcaagcucugcgcuuaaaaguccagcugcagcuccuguag

SEQ ID NO: 224161 - RNA, 8430 nt, Artificial Sequence
  derived and/or modified sequence
augacgcuugaagggcuuuaccuggcaagaggcccucucgcuagacugcuccuggcuuggucugcauugcucuguauggccggcgggcagggacgaugggacggggcuuuggaggccgcugguccagguagggugcggcgccguggaucccccgguauuuuacagggacccaacguuugcgguucuagauuccacgccuauugcugcccaggcuggcgcacuuuccccggcagaagucaaugcgugguccccaucugucgcagagccuguggcgagggauuuugcucccagccaaaccugugcaccugcgcggauggaacuuuggcacccagcugcggcguuucuagaggcuccggguguucagugucuugcaugaacgggggaacuugucggggcgcaaguugccuaugucagaaaggauacacagggacaguguguggucagccuaucugcgauagagguugucacaauggcgggcgauguaucggcccuaauaggugugcaugcguuuacgguuucaugggaccacaaugcgagcgugauuacaggacuggucccugcuucggccaggucgggcccgaggggugucagcaucagcucacugguuuagugugcacaaaagcuuuguguugugcaacugucggacgcgcauggggacuccccugcgagcuuuguccagcucagccacacccaugccggagaggauucauccccaacauacauaccggugccugccaggacguggaugagugucaggccguuccugggcucugucagggcggauccugugucaauauggucgggucguuucacuguagaugucccguuggucauagguugucugauuccuccgcagccugugaggauuaccgugcuggagccuguuuuaguguuuuguuuggaggcagaugcgccggcgaccuugccggucacuauacuagacgccagugcugcugugauaggggccgcuguugggcagccggucccguccccgaacuguguccgccgcgcgggucaaaugaguuccaacagcucugugcacagcgguuaccucugcugccaggacaucccggacucuucccuggucugcugggcuuuggaaguaacgguaugggcccgcccuuaggcccugcccgguugaauccccacgggucggaugcucgcggaauuccuucacucggaccaggaaacucaaacaucgggacagcaaccuuaaaccaaaccaucgauaucugccggcacuuuaccaaccugugucucaauggaagaugucuuccuacuccuucuucguaucggugugagugcaaugucgguuacacccaagauguacguggcgaauguaucgacguggaugaaugcacaaguagcccuugccaccacggggauugcguuaacauacccggaaccuaucauugucgcuguuacccaggguuccaagccacuccaacaagacaagccugcguggauguugacgaauguaucgugucugggggacuaugucaccugggacgaugugugaauaccgagggaucauuucaaugcgucugcaaugcaggauucgagcuaagcccugacgggaagaauugugucgaucauaacgaaugugccacaucuaccaugugugucaacggcguaugcuugaaugaagaugggagcuucagcugccugugcaaaccaggcuuccuccuggcaccuggaggccacuacuguauggauaucgaugaaugccagacaccuggaauaugcguaaaugggcauuguaccaacaccgaaggaucuuuccgcugccagugucugggaggccuugcaguaggaacugaugggcgaguuugugucgauacccacgugcggucaacuugcuacggagcaauagaaaaggggucaugugcccgcccguucccagggacagugaccaagagcgagugcugcugcgccaauccugaucacgguuucggugagccaugccaacuguguccagccaaagacagugcagaauuucaggcucugugcagcucagguuugggaaucacgacugaugggcgggacaucaacgaaugcgcucuggacccggaagugugcgccaauggagucugugagaaccuccgaggcuccuaucggugugucuguaaccuggguuacgaagcuggcgccucuggaaaggacuguaccgacguggaugaaugugcccuaaauucgcuacucugcgauaauggguggugccagaauucccccggcucuuacucuuguaguugcccacccggauuucacuucuggcaagauacggagauuugcaaagaugucgaugaaugucucucuaguccuugcguaucuggggugugucggaaucuugcugggaguuauaccuguaaaugcggcccaggcucucgacuugauccuagugguacguuuugucuugacaguacaaaggguacaugcuggcuaaaaauucaggagucccgaugugaggugaaucugcaaggagccagucugagaagugaauguugcgccacccugggugccgcauggggcagcccgugugagaggugcgagaucgauccagccugcgcaaggggauucgcuagaaugacaggugugacaugcgaugaugucaaugagugcgagagcuuucccggugugugcccaaacggaagauguguuaauacagccgggaguuuccgaugcgaauguccggagggauugaugcuugaugccuccggccgucuuuguguggaugugagauuggaacccugcuuccugagaugggacgaggaugaaugcggaguaacauugccugguaaguauagaauggacguuuguuguuguaguaucggggcaguuugggguguugaaugugaggcgugucccgaccccgagagccuagaguucgccucacuguguccaaggggguuaggcuuugcguccagggauuuuuuguccggacgcccauuuuauaaggaugugaaugagugcaaaguguucccaggucugugcacccaugggacaugccguaauacaguggguucuuuucauugcgccugugcuggaggauuugcucuggacgcccaagaacgcaacuguacagacauugacgagugccgcauaucaccugaucuaugcggccaaggcaccugcgugaacaccccuggcaguuuugagugcgaaugcuuuccuggguacgaauccggguuuaugcuuaugaaaaauuguauggacguagacgagugcgcuagagacccccuucuuugucgcggcggcaccuguacaaauacagauggcucuuacaaaugucagugucccccuggacaugaacuuacagcuaaggguacagccugcgaagauauugacgaauguucuuuaagugauggucuuuguccccauggacagugcgugaaugugaucggugcauuucaaugcaguugccacgcuggauuccaaucaacgccugaucgccagggguguguggacauaaacgaguguagaguucaaaauggcgggugcgacguucauuguaucaauacagagggguccuacagaugcucuuguggacaggguuacagccucaugccggacggaagggccugugccgacguggacgagugugaagaaaaucccagagugugugaucaaggacacuguacgaacaugccuggaggacaccgcugcuuauguuaugauggauuuauggccacccccgauaugcggacuugugucgacguggacgagugugaucugaacccacauauuugcuuacauggcgacugugaaaauacaaaggguuccuuugucugccacugccagcucgguuacauggugaggaagggcgccacuggaugcuccgacgucgacgaaugcgaggugggcgggcacaauugugauucacacgccagcugccugaauauccccggcucuuuuagcuguagaugucugcccggcugggugggugauggcuucgaaugucaugaucuagacgaaugcgucagucaggagcacaggugcaguccaaggggugauuguuugaaugugccugguagcuaccgaugcacaugucggcaaggauuugcuggggauggcuucuuuugugaggaccgcgaugagugugcagagaacgucgaccucugugacaauggacagugucucaacgcacccggagguuacaggugcgagugugaaauggguuuugaccccaccgaggaucauagagccugccaagacgucgacgaaugcgcacaaggcaaucugugugcuuucggauccugcgaaaaucucccugggauguuccgauguauuugcaaugguggguacgaguuagacagagggggcggcaauuguaccgacauuaacgaaugugcagauccugugaauugcaucaauggaguuuguaucaauaccccuggaucauacuuauguucuugcccccaggacuuugaauugaaccccagcgguguggguugcguggacacgagagccgggaacugcuuucucgaaacacaugaucggggcgauuccgguauaucaugcucugccgaaauuggcgucggagucaccagggccucaugcugcuguucuuugggccgggcauggggaaaccccugcgaguuaugucccauggccaauaccaccgaguaccgcacccugugcccugggggggagggauuucagcccaaucgcaucacaguuauuuuggaggacauugaugagugucaggagcucccaggccuuugucagggcggagauugugucaauaccuuuggguccuuccagugcgaaugcccuccugguuaccaccucagugagcacacccggauaugugaagauaucgacgaguguuccacucacuccggcauuuguggacccggaacauguuauaauacccucggcaauuacacuugugucugcccggcugaauaucugcaggugaacggcggcaacaacuguauggauaugcgaaaaagugugugcuuuagacauuacaauggaacaugccagaacgaauuggcauuuaaugugacacgcaagauguguuguuguaguuauaacauuggacaggccuggaaucgccccugugaggcuugcccuaccccaauuuccccugauuaccagauucugugugguaaccaagcccccggguuccuuacugacauucauacaggcaaaccacuggauauugacgaauguggugaaauuccagccauuugcgcaaacggaaucuguauuaaucaaaucggcucauuuagaugugaauguccagccggcuuuaauuacaacagcauauuauuggcgugcgaagacgucgacgaguguggcagucgggaaagcccaugccagcagaaugcugacugcaucaacauccccggaucauauaggugcaaguguacgaggggauacaaguuaucccccgggggcgcuugcgugggucggaacgaaugccgagagauccccaacgucugcucucacggugauugcauggacaccgaaggauccuauaugugcuugugucaucggggauuccaggccagugccgaucagacucuguguauggacauugaugagugcgauaggcagccuugcgguaauggcaccugcaaaaacauuauaggcaguuauaauuguuuauguuucccuggauuugucgugacccauaacggggauugugucgauuuugaugaauguacuaccuuggugggucagguaugucgguuuggccacugucuuaacacugcaggcagcuuucacugucuuugccaggacggcuucgaacucacagcugacgggaaaaacugcguugacaccaaugagugccucagccuggccggaaccugucuacccggcacgugucagaaccucgaaggcucauuccgcugcauauguccaccaggcuuucaggugcaaagcgaccauugcaucgacaucgaugaguguucugaagagccaaaccuaugccuguucgguacguguacaaauaguccaggaucauuccagugucuguguccccccggcuuuguccugucugauaauggccaucguugcuucgauacccgccaaucuuucuguuuuacccgauucgaggcugguaaaugcucuguuccuaaagcuuucaauaccacuaagacgcgaugcuguugcucuaagcgaccuggagagggauggggcgauccaugugaguuauguccacaggaaggaucggcggcguuucaggagcugugcccuuucgggcauggggcaguuccaggucccgaugacucccgagaagaugucaaugagugcgcugagaaucccgggguguguacaaacggcgugugugucaauacagacggcuccuuccguugcgaaugucccuucggcuauuccuuggacuuuacagguauuaacugcguggauaccgacgaaugcagcguuggacacccuugcggacagggcaccugcaccaacgugauuggcggcuucgaaugcgcuugcgccgacggguuugaaccaggccugaugaugacuugugaggauaucgaugaauguagucuaaacccgcuccugugcgccuuccgcugucauaacacagaaggaagcuaccuguguacuugcccagccgguuacacccuuagagaagauggggcgaugugucgugauguggacgaaugcgcugauggacagcaggacugccacgcccgcggaauggaauguaagaacuugaucgggacauuugcaugcguaugcccuccgggaaugaggccgcugccaggaaguggggagggcuguacagacgauaaugagugucacgcucagcccgaccuuuguguaaaugggagauguguuaauacagcagggucguuccguugugacugcgaugaagguuuucaaccaucaccaacucuuaccgaaugucaugacaucaggcaagggcccugcuucgcugaggugcugcaaacaaugugucguuccuugaguucuaguagcgaggccguuacacgcgcugagugcuguugugggggggggcgcggauggggaccuaggugcgaauuguguccguuaccuggaacgagugcauaucgaaagcuuugcccacaugguucugguuacacggccgagggaagagacguggacgaaugucgaaugcuggcacaucugugcgcccauggcgaaugcauuaacucgcuuggcucguuccggugccauugucaggcugguuacacgcccgaugcuacugccacuacaugucuugacauggaugaguguucccaaguucccaaaccgugcacguuccuguguaaaaauaccaaagguucauuccucuguucgugcccucguggauaccuccuagaagaagacggacgcacaugcaaggaccucgaugaaugcaccucacggcagcacaacugccaauuccuuuguguaaauacaguuggugccuuuacuugucgauguccacccggcuuuacacagcaccaccaggcauguuuugacaacgaugaauguucugcgcagccagguccuugcggcgcccacggucacugccacaauaccccaggaagcuucagaugcgagugucaccagggguucacauuaguuucuuccggacacgguugugaggacgugaacgaaugcgacggaccucauagaugucagcacggcugccagaaucagcugggagguuaucgcuguagcuguccccaaggcuuuacccagcauucacagugggcccaauguguggacgagaaugaaugcgcccucuccccuccgaccuguggauccgcaucuuguagaaauacacuuggaggcuuucguugcgugugcccaucgggauucgacuuugaucaggcacuuggggguugucaggaggucgacgagugcgcaggaagacgcgggccuuguucauauucaugugccaacaccccagguggauuucuuugcgggugcccccaaggauacuuuagagcugggcagggccacugugugucuggccuaggauuuuccccuggcccgcaggacacaccggacaaggaagaauuacuauccagcgaggcuugcuacgagugcaaaaucaauggccugucuccacgcgacagacccagaagaagcgcccaccgcgaccaccaggucaacuuggccacuuuggacuccgaagcacugcucacguugggccuaaaucuaucacaccuggggagagcugagcgaauuuuggagcuucggccagcauuggaaggccuugagggacgaauucgauacgugaucguucgcggcaacgagcaaggauucuuuagaaugcaccaucuuaggggagucaguuccuugcagcuggggcguaggagaccuggaccggguacuuacagguuggaaguaguuucucauauggccggucccuggggugugcaacccgaaggccaaccggggccuuggggucaagcacucagacuaaaaguacaacugcaacuacuauag

SEQ ID NO: 224162 - RNA, 2619 nt, Artificial Sequence
  derived and/or modified sequence
auggguaucguuuggauucugaugucaguauugccaugguggggucggugugcugaucuggcaauugcuucuacucagcuggugcccucaaccgcaucugcucguauggcacugucuucucagcucaugggucgcacagucuggacaccuauguccgcauccgcccuucaggaacccgcuuauccagcuuuggcuagaaccucaagggcuccaagcgcugcauccguuccucuggccagccgcugcagggucacaacagcccugaucucuaccagugcccagcgcucccccacaucagcuagucuggcacccgucccuacugccuuaggcgcgucaucagccagcgcccaccuggcccucagcucccugacaauggggacagucgcacuuacccacggccgcgucagcgcaagucccguccuuagacucggcucugcaagauguccuaaacugucaacacccccucguccugccgccgccgccguacggggacugggucgugccggcgaaaccccugcaaacugugugccucggagggcagugccgggcccugacgauuccagagaagacgugaacgaaugugcagaaaauccgggcguaugcaccaacggagugugcgugaacacagacggaucauuucggugugaaugcccauuuggauacucccuugauuucacaggaauuaacugcguggauacugaugagugcaguguggggcaccccuguggucagggaaccugcacaaacgugauaggaggcuucgagugcgccugugccgauggauuugagcccggccugaugaugacaugcgaggauauugacgagugcucucugaacccccugcugugugccuuccguugucauaauacugagggcucuuaucucuguacauguccagccgguuauacucugcgggaggacggggccaugugucgggauguugaugaaugcgcugacggccagcaagauugucaugcucgcggaauggagugcaaaaaucugauuggcacauucgcuuguguguguccuccaggcaugagaccccucccagguuccggcgaaggguguacugacgacaaugaaugccacgcccaacccgacuugugcgugaacggcagaugcgugaacacugcagguucuuucagaugugacugcgaugaaggcuuucagcccagcccaacucucacugaaugccaugacauucgucaaggaccuuguuuugccgaaguccuccagaccaugugccgcucuuuguccucuuccagugaggcugugacacgugcggaguguuguugcggggguggucggggaugggggcccagaugugaauuauguccucuaccuggcaccucggcauacagaaagcuguguccccaugggagugguuacaccgcagaaggccgggauguggaugaaugcagaaugcucgcucauuuaugugcgcacggcgagugcaucaacucuuugggcucguuucgaugccauugccaagcaggcuacacccccgacgccacggccacuacuugcuuagauauggaugaauguagccagguccccaaaccauguacuuuuuuaugcaaaaauaccaaggggucauuucuuuguuccugcccaagaggauauuuauuagaggaggacggucggaccugcaaggaucuagaugaauguacuagccgccagcauaauugccaauuccuaugugugaacaccgugggcgcuuucaccugcagaugucccccaggcuuuacucagcaucaccaggcauguuucgacguaaaugaaugcgacggaccacaucggugccagcauggaugccagaaccaguugggaggauacagaugcuccugcccccaaggauuuacacaacauucccagugggcucaguguguugacgaaaacgaaugcgccuugucgccgccaaccuguggcucagcuucaugucgcaacacuuuaggcggguuuaggugcguauguccauccggauucgacuucgaccaggcacugggaggaugccaggaagucgacgaaugugccggacggagaggccccuguucguauagcugcgcuaauacgccugguggauuuuugugugguugcccucagggauacuuccgcgccgggcagggacacugcguauccgggcuuggcuucucaccagggccgcaggauacacccgauaaggaagagcucuuauccagcgaggcuuguuaugaaugcaaaauuaacggcuugucacccagggaccguccucgacgcuccgcccaccgagaccaucaaguuaaccuggccacacuggauagugaagcacugcugacccuaggacugaacuuaucucaucuuggucgggccgaaaggauucuagaauugcgacccgcacucgaaggucuggaaggccgcauacgcuaugugauuguucgcgguaaugaacagggcuucuuccgaaugcaucaccugaggggaguaagcagcuugcagcuaggcaggcggagacccggaccaggcaccuacaggcucgaagugguaagccauauggcagguccuuggggagugcagccugaggggcaacccggaccauggggacaagcauuaagauugaagguccagcuccagcuccuguag

SEQ ID NO: 224163 - RNA, 8430 nt, Artificial Sequence
  derived and/or modified sequence
augacucuggagggacucuaccuggcccgaggcccccuagcacggcuccugcuagcgugguccgccuuacuuugcauggcaggaggacagggacgcugggacggggcauuagaagcugcaggacccggccgcgucagacgacgagggagcccuggcauccugcaggguccaaaugucugugggucacguuuucacgcauauugcugcccaggcuggcgcacuuuuccagguagaucucagugcguugugcccaucugucgacgggcauguggggaagguuuuugcucucaaccaaaucugugcaccugugcggacgggacucuugcaccaucuuguggcguaagucggggauccggcuguuccguuagcuguaugaauggcggaacauguaggggagcaucuuguuugugucaaaaaggcuauaccggcacuguaugcggacaaccuauaugcgaucgaggaugucauaauggggggagguguauuggcccuaacaggugugccugcguguauggauucaugggaccacaaugcgaacgcgauuacagaacagguccuugcuuuggccagguggguccugaaggaugucagcaccagcugacaggcuuggugugcacuaaagcucugugcugugcuacgguugguagggccuggggucuuccaugcgaguuauguccggcucaaccucaccccugcagacgcggauucaucccaaacauacauacuggggccugccaagauguugacgagugccaagcuguccccggguuaugucagggcggcucuugcgugaacauggugggaucauuucacugccgguguccugucggucauagauuguccgauucauccgccgccugcgaagacuaucgggccggugccuguuuuaguguccucuuuggaggaagaugcgccggcgaucuugccggccauuacacccgaagacaguguuguugcgaccggggucggugcugggccgcaggaccagugccugaauuaugcccuccuagaggaucuaaugaauuccaacagcuuugugcacagcgacugcccuugcuuccuggucaccccggucucuuuccgggucugcuaggguuuggcucaaacggaaugggacccccacugggacccgcgcgacugaauccacaugguagugaugcucgcgggauuccaucccugggccccggaaauuccaauauaggcacggcaacacugaaucaaacuauugauaucugccgucacuuuacgaauuuaugcuugaauggucgaugccuccccacuccaaguuccuauaggugcgagugcaauguuggcuacacccaagacgugagaggagagugcauugaugucgacgagugcacuagcucaccaugccaccacggcgauugcguaaacaucccugguaccuaccacugucgcugcuacccagguuuucaggccaccccaacacgacaggccugcguugauguggacgaaugcauuguuagcggcggacucugucaccuugguagaugugugaauacggaggggagcuuucagugugucuguaaugccggauuugaguuaagccccgacggaaagaauugcguagaccacaaugaaugugcuacguccacgauguguguaaauggcguuugucucaaugaggacggcucuuuuucaugcuugugcaaacccgguuuuuuauuagccccaggcggccauuacuguauggauaucgacgaaugccaaacacccgggauaugugucaacggacauugcacaaauacagaaggcaguuuucgaugccaguguuuaggcggacuagcugugggaaccgauggccggguuuguguggacacccacguacgaagcacaugcuacggggcuaucgagaaaggauccugcgcucgccccuucccuggcacuguaacuaaauccgaaugcugcugcgcaaauccagaucauggcuucggcgaacccugucagcucuguccugcuaaagauucugccgaguuucaggcgcuuugcucaaguggacucggaauuacgacagauggaagagauauaaacgagugugccuuggacccggaggucugcgcaaacggcgugugugaaaaucuucgagguucuuaccgaugugucugcaauuuaggcuacgaagcaggcgcuucaggcaaagauugcaccgauguggacgaaugcgcccucaacagucuguuaugugacaaugguuggugccagaacagccccggcaguuacaguuguucaugcccccccggcuuucacuucuggcaggacacagaaauuugcaaagacguggacgagugccugagcucaccaugcguuuccggugugugcaggaaucuggcagguucuuauaccuguaaaugcggccccggcucucgcuuagauccauccggcacuuucugccucgacucaacuaaagguaccuguuggcucaagauacaggagagccgcugugaaguaaacuugcaaggggccucccucagaagcgaauguugugcuacauuaggugccgcauggggcucaccuugcgagcggugugagauugauccugcgugugccaggggguucgcucggaugacuggagugaccugcgacgauguuaaugaaugcgaaaguuuuccagggguuuguccuaacggccgcugcgugaauacugcggguuccuuuaggugcgaaugcccggagggacuuaugcuugaugccaguggaagauuguguguggacguccgacuggagcccuguuuccugagaugggaugaagaugagugcggggucacauugccggguaaguauagaauggacgugugcuguuguagcauuggagcggugugggguguggaaugcgaggccuguccugauccugagucauuggaauuugccucucuauguccacgagggcugggcuucgccuccagagauuuucuaucagggagaccguucuacaaagacguuaaugaguguaaaguguuuccaggucuguguacacauggcacuugucgcaauaccgugggcucuuuucauugcgccugcgcaggaggauuugcccucgacgcucaagagagaaauuguacugacauugaugaaugccgcauuuccccagaucucugcggccaaggaacaugcguaaacacccccggguccuucgaaugcgaaugcuucccaggauaugaguccggauucauguugaugaagaauugcauggacguagaugagugcgccagggauccgcuacucuguagaggaggcaccuguacuaacacugacggaagcuauaaaugucagugccccccaggccacgaacucacagcaaaaggaacagcuugcgaggauaucgacgagugcagccucucugacggccuguguccccauggacaguguguuaauguaauuggugccuuccagugcaguugucacgcuggguuccaauccaccccugacagacaaggcuguguggauaucaacgaguguagagugcagaacgggggaugugaugugcauuguaucaauacagaaggaaguuaccguuguucuugcgggcagggcuauucauuaaugccugauggacgggcuugugcagaugucgaugaaugcgaggagaacccuagagugugugaccagggccacugcacaaacaugcccgggggccacagauguuuaugcuacgauggguuuauggccaccccagauaugaggaccugugucgaugucgacgaaugugauuuaaauccccacauuugccugcauggcgacugugagaauaccaaagggucuuuuguuugucacugccaacuaggauauaugguccgcaagggagcuacuggcuguuccgacgucgaugagugugaagugggaggacacaauugcgauucgcacgcuagcugccugaauauucccggaaguuucagcugccgauguuugccaggaugggucggugacgguuucgaaugucacgacuuagacgaauguguuagucaggagcaucguuguuccccucgaggugacugccuaaacguuccuggaucuuauagauguacaugccggcagggauuugcaggggacggauucuuuugcgaggauagagacgagugcgcggaaaacguugacuugugugauaacggacaaugccugaacgccccagguggcuauaggugcgagugugaaaugggauuugaucccacggaagaucaccgggcuugucaggauguagaugagugugcccaaggcaaccuuugcgcauucggauccugugaaaaucugcccggaauguuucggugcauuugcaacggcggauacgagcuugaccgcggcggaggaaacuguacugauaucaacgagugcgccgaccccguuaacuguauaaaugguguuuguaucaacacccccgguuccuaccucugcucuuguccgcaagauuuugaacucaacccauccgguguuggcugcguggacacgagagcuggcaauugcuuccucgagacucacgaccguggagauucagggaucucuugcagcgcugaaaucggaguuggugugacucgggccuccuguuguugcucauuaggccgggcuuggggcaauccuugugagcuuugcccuauggcaaacaccacagaauaucguaccuuguguccagguggcgagggguuccagccuaacaggaucacaguaauccuugaggacauagacgagugucaggagcuacccgggcuaugccaggggggagauugugugaauaccuuuggaagcuuucaaugcgaguguccgccaggauaucaucugucagagcacaccagaaucugugaagacauugaugaauguucuacucauucaggaauuugcggcccaggaacuugcuauaauacucuuggcaacuacaccugcgugugcccagcagaauacuugcagguuaacggaggcaauaauuguauggauaugagaaaaagcguaugcuuuagacauuauaacggcaccugccagaaugaacuggccuucaaugucacuaggaaaauguguugcuguucauauaauaucgggcaagcguggaaucgcccuugugaagcuugucccacccccaucagccccgauuaucagauccugugcgggaaccaagcucccggauucuugaccgauauucacaccgguaagccucuugauaucgacgaaugcggcgaaauuccagccaucugcgccaacggaauauguauuaaucagauagggucuuucagaugugaaugcccggccggcuuuaacuauaauuccauucuauuagccugcgaagauguggacgagugugggucgcgcgagucuccuugccagcagaaugcugauuguauaaauauacccggaagcuacagaugcaaaugcacacgcggguauaaacuuucacccgguggggccugcguuggcaggaacgaauguagagaaaucccuaauguuuguagucauggggauugcauggauacggaaggcucguacauguguuuaugucauagaggauuccaagcaagcgccgaccagaccuuguguauggacaucgacgagugugacagacagcccugcgguaauggaacuuguaagaacaucaucggcucuuauaacugucuguguuucccaggcuucguaguuacccacaauggggacugcguggauuuugacgaguguaccacauuaguaggucaaguaugucgcuucggccauuguuuaaauaccgcaggcuccuuucacugucuaugccaggacggguucgaacucaccgcugaugguaagaacugcguggauaccaaugaaugccucucucuggccggaacaugccugcccgguacuugucaaaacuuggaaggguccuucagauguauuugccccccaggauuucagguucaaagugaccauugcauugacauugaugaguguagcgaagaaccuaaucugugccuguucggaaccugcacaaacaguccgggcagcuuccagugucuuuguccacccggcuuugugcucagcgauaauggacacagaugcuucgacacuaggcagaguuuuugcuuuacacgguucgaggccggcaaaugcuccguacccaaggcuuucaacacaacuaagacaagaugcuguuguucuaaaaggccuggagaagguuggggagauccaugugagcucugcccucaagagggaagugcugccuuucaagagcucuguccguuuggucauggcgcugucccggggcccgaugauucaagagaggauguuaacgagugugcagagaacccaggcguuugcacuaacgguguuugcgucaauacagauggaagcuucagaugcgaaugcccuuuuggauacucccuggauuuuacaggaaucaauugcguggacacugacgaaugcucugugggacauccaugcgggcaggggaccugcacaaacgugauuggggguuucgagugcgccugugccgacggauuugaacccgggcuaaugaugacaugcgaagauaucgacgaguguucccugaacccauuacucugcgccuuccgaugucacaauacugaaggaagcuacuuauguacuugcccugcuggguacacucugagagaggauggggcaauguguagagauguggacgagugcgccgaugggcagcaggacugucaugccagaggaauggaguguaagaaucuuauugggaccuuugccugcgugugccccccuggaaugcgaccccuuccuggaagcggagaaggcugcacagacgacaaugagugccaugcucagccugacuuaugcgugaacggaagaugcguaaacacggcggggucuuucagaugcgauugcgacgaaggcuuccagccaucuccuacccugacagagugccaugauauuaggcaagggcccugcuucgccgaggugcuccaaacaaugugccgaucacuaucuucaucgucugaggccgugacuagagcagaauguugcuguggcgggggaagaggcugggguccccgcugugaacuuugcccacucccugggaccuccgcuuauagaaaauugugcccgcauggauccggguacacagcugagggcagagauguggacgaguguaggauguuagcccaucugugcgcccauggcgaauguauuaauucucugggaucguuucggugucacugccaggcaggguauaccccagacgcaaccgcuacaacaugucuggacauggaugaaugcucccaaguaccgaaacccugcaccuuuuuaugcaaaaacacuaagggaagcuuccucugcagcuguccacgugguuaucuccuggaagaggauggcagaaccugcaaggaucuggacgaauguaccucucgacaacacaauugucaguuucugugcgucaauacggucggugccuuuaccugcagaugcccacccggcuuuacucagcaucaccaggcuuguuucgacaacgacgaauguuccgcacaaccaggccccugcggugcccacggccacugucacaauacuccagggagcuuuagaugcgagugucaucagggauuuacucuggucucaucuggccauggaugugaagacguaaacgaaugugauggcccgcaucgcugccagcacggaugccaaaaucaguuggguggguacagauguagcuguccucaagguuuuacucaacacucccagugggcacagugcguggaugagaaugaaugcgcccugucaccucccacauguggaucugccagcuguagaaauacccuaggcgguuucagaugcgugugcccgagcggguucgauuucgaucaagcguuaggagggugccaagagguagacgagugcgcuggcagacgcggacccuguaguuauucuugcgccaacacucccggaggguuccuguguggauguccccagggguacuuuagagccggacaaggacauugcgucagcggucuuggauucucuccagggccacaggauacgccagauaaagaggagcuccucucaagugaagcaugcuaugagugcaaaauuaauggccuguccccccgagaucgcccccgcagaagugcccaccgugaccaucaggugaaccuugccacauuggauagcgaagcccuguuaacguugggauugaaccuaucacaccucggacgugcggagcgcauccuggaacuaagaccugcauuggagggcuuagaggggaggauuagauauguaaucguucgagggaacgaacaaggauuuuuccgaaugcaccaucucagaggcguuagcucacugcagcuggggcgacgucggcccgguccaggcaccuacagacuggagguaguaucccauauggcaggcccuuggggaguacagccugaaggucaaccugguccuuggggccaggcucugcgccuaaaaguucaacuucagcugcucuag

SEQ ID NO: 224164 - DNA, 1794 bp, Artificial Sequence
  derived and/or modified sequence
gaacgaggcggctgtggcggtggctgaggcggctgggcctagggtgcagcgggcgcgtctgcggctggtgttggcgcatctctagatgtcaccagcacctgcctagctgtcaaggagtggtttgtgtatcctgggaacccactgaggcacccggacctcgtcaggccgctgcagatgaccattccagggggaacgcctagtttgaaaatattatggctgaaccaagagccagaaatacaggttcggcgcttggacacactcctagcctgtttcaatctttcctcctcaagagaagagctgcaggctgtcgaaagcccatttcaagctttgtgctgcctcttgatctacctctttgtccaggtggacacgctttgcctggaggatttgcatgcgtttattgcgcaggccttgtgcctccaaggaaaatccacctcgcagcttgtaaatctacagcctgattacatcaaccccagagccgtgcagctgggctcccttctcgtccgcggcctcaccactctggttttagtcaacagcgcatgtggcttcccctggaagacgagtgatttcatgccctggaatgtatttgacgggaagctttttcatcagaagtacttgcaatctgaaaagggttatgctgtggaggttcttttagaacaaaatagatctcggctcaccaaattccacaacctgaaggcagtcgtctgcaaggcctgcatgaaggagaacagacgcatcactggccgagcccactggggctcacaccacgcagggaggtggggaagacagggctccagctaccacaggacgggctctgggtatagccgttccagtcagggacagccgtggagagaccagggaccaggaagcagacagtatgagcatgaccagtggagaaggtactagtcaacctccagaaagagtatggagagaaaaagaggcacacctggacgcagagccctgccagcgccctcctctgctgttgcagctgcaaggagaccatgcctgtgggagccaggcctcgcttgcatgaagaaggaacgatgcctttttcaatggtgtctccctcccattgtgcagaagagcttttgttggcttctctcccgagcttgtgcctgattctgtggcccaaaacaatcattgttaacatcttcatgtgtttcattctgatctttcattcatatatatgatgcctagctaatttcattttaaaataaatgggaatctgttgtattctgattttttattagcaacactagattatgaggggttatctcctgttattaaaaagtcagaaaacactatacagtagtcctcccttatctgcgggggagacatcccaagaccctcagtggatgcctgagactggatagtatggaatcctacatatctataccttggctttttcctctacgtacataccatgataaagcttaacaaagaacagtgagagattaacagcaaccaataactaataaaagctatgtgaatgtggtctctgtcaaaatatcgtgctgtaatcacccttcttgctatctgaaaaccaagaagaccactaagtgactaatggtcagagaagctggatgaggggctgattcatgtcctgggcatgacagagcgggaggcacaaggtttcatcacactattcacaatggcgagcaagttaaaacggatttcccatttaatttaattttcagacttcagttgaccatgagtaaccgaaaccacagaaagtgaagctggggatatttcagaaattcttttctaatcagaaattctaatcaaacataagtttcc

SEQ ID NO: 224165 - protein, 628 aa, Artificial Sequence
  derived and/or modified sequence
MSPGGKFDFDDGGCYVGGWEAGRAHGYGVCTGPGAQGEYSGCWAHGFESLGVFTGPGGHSYQGHWQQGKREGLGVERKSRWTYRGEWLGGLKGRSGVWESVSGLRYAGLWKDGFQDGYGTETYSDGGTYQGQWQAGKRHGYGVRQSVPYHQAALLRSPRRTSLDSGHSDPPTPPPPLPLPGDEGGSPASGSRGGFVLAGPGDADGASSRKRTPAAGGFFRRSLLLSGLRAGGRRSSLGSKRGSLRSEVSSEVGSTGPPGSEASGPPAAAPPALIEGSATEVYAGEWRADRRSGFGVSQRSNGLRYEGEWLGNRRHGYGRTTRPDGSREEGKYKRNRLVHGGRVRSLLPLALRRGKVKEKVDRAVEGARRAVSAARQRQEIAAARAADALLKAVAASSVAEKAVEAARMAKLIAQDLQPMLEAPGRRPRQDSEGSDTEPLDEDSPGVYENGLTPSEGSPELPSSPASSRQPWRPPACRSPLPPGGDQGPFSSPKAWPEEWGGAGAQAEELAGYEAEDEAGMQGPGPRDGSPLLGGCSDSSGSLREEEGEDEEPLPPLRAPAGTEPEPIAMLVLRGSSSRGPDAGCLTEELGEPAATERPAQPGAANPLVVGAVALLDLSLAFLFSQLLT

SEQ ID NO: 224166 - protein, 629 aa, Artificial Sequence [sequence omitted]

SEQ ID NO: 224167 - DNA, 1887 bp, Artificial Sequence
  derived and/or modified sequence
atgagccccggcggcaagttcgacttcgacgacggcggctgctacgtgggcggctgggaggccggcagagcccacggctacggcgtgtgcaccggccccggcgcccagggcgagtacagcggctgctgggcccacggcttcgagagcctgggcgtgttcaccggccccggcggccacagctaccagggccactggcagcagggcaagagagagggcctgggcgtggagagaaagagcagatggacctacagaggcgagtggctgggcggcctgaagggcagaagcggcgtgtgggagagcgtgagcggcctgagatacgccggcctgtggaaggacggcttccaggacggctacggcaccgagacctacagcgacggcggcacctaccagggccagtggcaggccggcaagagacacggctacggcgtgagacagagcgtgccctaccaccaggccgccctgctgagaagccccagaagaaccagcctggacagcggccacagcgacccccccaccccccccccccccctgcccctgcccggcgacgagggcggcagccccgccagcggcagcagaggcggcttcgtgctggccggccccggcgacgccgacggcgccagcagcagaaagagaacccccgccgccggcggcttcttcagaagaagcctgctgctgagcggcctgagagccggcggcagaagaagcagcctgggcagcaagagaggcagcctgagaagcgaggtgagcagcgaggtgggcagcaccggcccccccggcagcgaggccagcggcccccccgccgccgccccccccgccctgatcgagggcagcgccaccgaggtgtacgccggcgagtggagagccgacagaagaagcggcttcggcgtgagccagagaagcaacggcctgagatacgagggcgagtggctgggcaacagaagacacggctacggcagaaccaccagacccgacggcagcagagaggagggcaagtacaagagaaacagactggtgcacggcggcagagtgagaagcctgctgcccctggccctgagaagaggcaaggtgaaggagaaggtggacagagccgtggagggcgccagaagagccgtgagcgccgccagacagagacaggagatcgccgccgccagagccgccgacgccctgctgaaggccgtggccgccagcagcgtggccgagaaggccgtggaggccgccagaatggccaagctgatcgcccaggacctgcagcccatgctggaggcccccggcagaagacccagacaggacagcgagggcagcgacaccgagcccctggacgaggacagccccggcgtgtacgagaacggcctgacccccagcgagggcagccccgagctgcccagcagccccgccagcagcagacagccctggagaccccccgcctgcagaagccccctgccccccggcggcgaccagggccccttcagcagccccaaggcctggcccgaggagtggggcggcgccggcgcccaggccgaggagctggccggctacgaggccgaggacgaggccggcatgcagggccccggccccagagacggcagccccctgctgggcggctgcagcgacagcagcggcagcctgagagaggaggagggcgaggacgaggagcccctgccccccctgagagcccccgccggcaccgagcccgagcccatcgccatgctggtgctgagaggcagcagcagcagaggccccgacgccggctgcctgaccgaggagctgggcgagcccgccgccaccgagagacccgcccagcccggcgccgccaaccccctggtggtgggcgccgtggccctgctggacctgagcctggccttcctgttcagccagctgctgacctag

SEQ ID NO: 224168 - DNA, 1887 bp, Artificial Sequence
  derived and/or modified sequence
atgtccccaggggggaaattcgactttgatgacggaggctgttacgtgggggggtgggaagccgggcgagcacatgggtatggcgtatgtactggccccggcgctcagggcgaatactctggctgctgggctcacggctttgaatctttgggggtctttactggtcccggtgggcactcctaccagggccattggcaacaggggaagcgggaggggcttggcgtagaacggaagagccggtggacttatcgaggagaatggctcggtggcctgaaagggcggagcggtgtttgggaatccgtctcgggactgaggtatgctggactctggaaagacgggttccaggatgggtacggcaccgaaacatatagcgacggaggtacctaccagggacaatggcaggctggcaagaggcacggatacggcgtgaggcagtccgttccataccatcaggcagcgcttctcaggtctccaaggcgtacaagtcttgactccggccatagtgatccgccaacgccgcctcccccactgccgcttcccggggacgaaggcggaagtcccgcctctggcagcagggggggtttcgtcttggcaggaccgggagatgccgatggtgctagtagtagaaaacgaacccctgccgccggtggcttttttcgacgcagtcttttgctgtccggcttaagagctggtggacgaagatccagcctcgggtccaaaagggggagtctgaggtcggaggtcagctctgaagtggggtccaccgggcctcccggcagcgaggccagcggcccgcccgccgcagctccccctgccctgatcgaggggtccgcaaccgaggtttatgccggcgagtggcgcgcggacagacggtcagggttcggcgtgagccagcgcagtaatggactgagatatgagggtgagtggctaggtaatcggaggcacggatacggccgcactacacggcccgatggtagccgagaagaaggaaagtataaacgcaatagacttgtgcatggtgggagggtgcggtccctgctgcccttagcactgcgacgtggaaaggtgaaggagaaggttgatcgcgcagtcgagggagcgagacgagctgtctcagccgcacgacagcgtcaggaaattgctgcggcccgcgccgctgatgccctgctaaaggccgtagccgcttcgtctgtggctgagaaagccgttgaagccgcgaggatggcaaagcttatcgcccaagatctgcagccaatgcttgaggcccccggacgcagaccccgtcaagactcagagggatcagacaccgagcccctcgacgaagactcccctggcgtttatgaaaatgggctgaccccttccgaggggagccctgagcttccgagctctccagcttcctccagacagccttggcggccaccagcctgccgcagccctctgccgcctggaggagatcaggggccatttagcagtccaaaggcttggcccgaagaatggggcggggccggcgcccaggctgaagaactggctggatatgaggccgaggatgaagctggaatgcaaggccctggcccaagggacggctctcccttgcttggaggctgttcagactcatccgggtctctccgggaagaggaaggtgaagacgaggaaccactaccacccctcagagcaccggcaggcacagagccagaacccatcgctatgcttgtcttgcgggggtccagctccaggggccctgacgctggatgcctcaccgaggagctgggtgaacccgcagcgaccgaaaggccagcccagcctggcgcagccaacccattagtggtgggcgcagttgccctgctcgacctgagcctggcctttctgttctcacaactgctgacatag

SEQ ID NO: 224169 - DNA, 1887 bp, Artificial Sequence
  derived and/or modified sequence
atgagccctggtgggaagttcgacttcgatgacggaggttgttacgtgggtgggtgggaagcaggcagagcccatgggtacggggtctgcactggcccaggtgcacaaggtgaatactctggctgctgggcccacgggttcgaatcacttggagttttcacgggacctggcggtcactcttaccaggggcactggcagcaaggcaaaagagaaggactgggcgtcgagcgaaaatcgcgatggacttaccgcggggagtggctcggcggactgaaagggagatccggggtttgggagtccgtgtcagggctccgctatgcgggcctctggaaagatggatttcaagacggctatggcactgaaacctactccgacggaggtacctaccagggccagtggcaagcaggtaagcggcatggttatggggtgcggcaatctgtgccgtaccatcaagcggcccttttgaggagtccccgtcgaactagtctcgacagcggccatagcgatcccccaacaccacctccgccactgcccttaccaggggacgagggcggatccccagccagcgggagtagagggggcttcgtgctcgctggacccggcgatgccgatggggcttcctctcggaaacgaactcctgcggcaggtgggttttttagaagatccctgttgcttagcgggctgcgggcgggagggaggaggtcaagcttgggaagtaagagaggatcactgagatctgaggttagttccgaagtcggatccacaggcccccctggctccgaggcctctggtccccctgccgccgctccacccgcattgattgaaggctctgctacagaggtgtacgcgggcgagtggagggcagacagaaggtccgggttcggcgtgtctcagcgctccaatggactgcggtacgaaggcgagtggttagggaatcggcgccacggctacggcaggactacacgcccggacgggagccgagaggaaggcaaatataaacgaaatcgtttggtgcatggggggcgcgtcagatccctgctgcccctggctctccggcgaggcaaagtaaaagaaaaggtcgaccgcgctgtcgagggtgcgcggcgtgcagttagtgcggcccggcagaggcaggaaatcgccgcagcgcgcgcagccgatgccttgctgaaagcagtggctgcgagctccgtcgcagaaaaagccgtggaggctgctcggatggcaaagctgatcgcacaggatcttcaaccaatgctagaagctcccggcagacggccacggcaggattcagaggggtctgatacggagcccctggacgaggactcccctggggtgtatgaaaacggactcaccccgagcgaaggtagccctgaactgcctagcagccctgccagctccagacagccatggagaccccctgcctgccgatcgccactgcccccagggggcgatcaaggtccatttagctcgcccaaggcctggccagaagagtgggggggtgccggtgctcaagctgaggaactcgcagggtatgaagccgaagacgaggctggcatgcaggggcccggcccgcgggacgggagccctctgttgggaggatgctcagatagttcaggctccctgcgtgaagaggaaggtgaggacgaggaaccacttccacccttgcgagctccagcaggcactgagccggagcctatcgctatgctggtgttgaggggtagtagttctcggggacccgacgcaggatgcctgaccgaagagctgggcgaaccggctgccacggaacgtcccgctcagccgggagccgccaatccactcgtggtgggtgcagtggctctcttagacctgtctcttgccttcctttttagccagcttctgacatag

SEQ ID NO: 224170 - DNA, 1887 bp, Artificial Sequence
  derived and/or modified sequence
atgtcacctgggggcaaatttgacttcgacgacggtggctgctacgtgggaggctgggaggccggccgcgcgcacggatatggcgtgtgtactggccccggcgcgcagggcgaatattctggctgttgggcccatggatttgagagtctgggcgtcttcactgggccaggcggccatagctaccagggccactggcagcagggcaagcgtgaaggtttgggcgtggaaagaaagtccaggtggacataccggggggaatggctcgggggccttaaaggaaggagtggtgtttgggagtccgtgagtgggctgagatacgcaggtctctggaaggacgggtttcaggatggctatggtacagaaacatattctgatggtggaacttaccagggtcagtggcaagccggaaagaggcacggatatggggttcgtcagagcgtgccctaccaccaggctgctttgctccggtcccctagaagaaccagcttagacagtgggcactctgacccaccaacacccccacccccactgcccctgcctggagatgaaggaggaagtccggcttccggttctaggggaggatttgttttagcaggtcccggggatgctgatggcgcctccagccggaagcgcactcccgcggctggtggctttttcaggcggagcctgctcctttctggcctacgtgctggcggccgcaggagcagtctcggttccaaaagaggatccctccgctccgaggtcagcagcgaggtgggttctacagggccacctggatcagaagccagtggaccgccagccgcggcccctcccgcgcttatcgagggcagcgctaccgaagtgtatgcaggcgagtggcgcgcagaccgaaggagcggctttggtgtctcccagcggagcaacgggctccggtatgaaggagagtggctggggaacaggagacatggatatggacgaacaacaaggcctgatggatctagagaagagggcaaatacaagcgcaaccgcctcgtccatgggggccgcgtccgctccttgctgcccttggcattacggaggggcaaggtgaaagagaaagtagacagggccgtagaaggagcgaggagggctgtgagcgccgcaagacagagacaagagattgctgccgctagggctgcggacgcgctgcttaaagccgtcgccgccagctctgtagctgaaaaggccgtcgaggccgccaggatggcaaagcttattgctcaggatctgcaaccaatgctcgaggcccccggtcggagacccaggcaggactccgagggctccgacacggagcctcttgatgaagatagtcccggagtgtacgagaacggattgacgccctccgagggtagccctgaactaccttctagcccagcctccagtagacagccttggcgacctcccgcttgtaggagtccactcccgcccggaggagatcagggcccgttcagtagcccaaaagcttggccagaggagtggggaggagccggtgcccaggcggaagagctggctggctatgaggccgaggatgaagccggaatgcagggtccaggtccaagagacggttcccccctcctcggcggctgttcagacagtagcggttccctgagggaggaggagggagaagatgaggagccactgccaccactccgtgcacccgccggtaccgaacctgaacctatcgcaatgctggtcctcaggggctcctcttcaagaggccctgatgccggttgtctcacggaggaactcggagagcccgctgctactgagaggcctgctcagcctggtgccgcaaaccccctggttgtgggcgccgttgctctactggacttgtcactggcttttctgttttcacaactcctgacgtag

SEQ ID NO: 224171 - DNA, 4278 bp, Artificial Sequence
  derived and/or modified sequence
tgggggtctcagtgcatctccttctcctctctgcctgcctcctccctcaccgaagggttagcggacacccatccttttctgcttggggaccccaccaccacccgcaacactgccgctgtctcttcttcaccgtatccttctctacccaccctcttctctcttctcttctccctgcccctttaaatctgcctggcccagcctcccccgtgatgctgggatggagcaaacattgatttgtgctgggatggaatcggaattttgatttatttttcctctcccaaccataagaagaaaaaaataataaaaacaccccctcttgagagccccctccccctttgcatccagctcccagctcttcttccctatctccatccaaggcagattttttcccctacactattctcatcttcccccacccttgccactacctcgcccccccacccagcctgctcctccagctggggagagaggggactctccggactcccccacctttcctctctgggttggagcagtctctccggaaggggagggggcttggcttgtccgggcgaggtgggagtggaggtatcctgccatggatgctgtgccggggaggcagcctgagccccagcccacatgccactcaggatgagggtccggccctgcctgccctcgctggggcccccccgcccggccccggtctaactgcccccgccccgaggcctcgcccggctccaaggcccccagcaggctctccagtcccaggatgcgctgagccgccggggggctgaggccgcgccaactacatgcatgtcccccgggggcaagttcgactttgacgacgggggctgctacgtggggggctgggaggcggggcgggcacatggctacggcgtgtgcacgggccccggcgcccagggcgagtacagcggctgctgggcacacggcttcgagtcactgggcgtcttcacggggcccggcggacacagctaccagggccactggcagcagggcaagcgcgaagggctgggcgtggagcgcaagagccgctggacgtaccgcggcgagtggctgggcgggctgaaggggcgcagcggcgtgtgggaaagcgtgtccggcctgcgctacgccgggctctggaaggacggtttccaggacggctacggcactgagacctactccgacggaggcacctaccagggccagtggcaggccgggaagcgccacggctacggggtacgccagagtgtgccctaccatcaggcggcgctgctgcgctcgccccgccgcacctccctggattccggccacagcgaccccccgacgccacccccgcccctgcccttgccgggcgacgagggaggcagccccgcctcgggctcccggggcggcttcgtgctggccgggcccggggacgccgacggcgcgtcgtcccgaaagcgcactccggcggccggcggattctttcgccgttcgctgctgctcagcgggctccgagcgggcggacgtcgcagctccctgggcagcaagcgaggctccctgcgcagcgaggtgagcagcgaggtgggcagcaccggaccgcccggctcggaggccagcgggcccccggccgcagcgccgcccgccctcatcgagggctcggccacagaggtgtacgcgggcgagtggcgcgcagatcggcgcagcggcttcggcgtcagccagcgctccaacgggctgcgctacgagggcgagtggctgggcaaccggcggcacggctacgggcgcaccacccgccccgacggctcccgcgaggagggcaagtacaagcgcaaccggctggtgcacggcgggcgcgtccgcagtctcctgcctctggcccttcggcggggcaaggttaaggagaaggtggacagggctgtcgagggcgcccgtcgagccgtgagtgctgcccgtcagcgccaggagatcgccgctgccagggcagcagacgccctcctaaaggcagtggcagccagcagtgtcgctgagaaggccgtggaggcagctcgaatggccaaactgatagcccaggacctgcagcccatgctagaggccccaggccgcagacccaggcaggactcagaaggttccgacacggagcccctggatgaggacagccctggggtatatgagaacggactgaccccctcagagggatcccctgaactgcccagcagtcctgcctcctcccgccaaccctggcgaccccctgcctgccggagcccactgcctcctggaggggaccagggtcccttctccagccccaaagcttggcctgaggagtgggggggggcaggcgcacaggcagaggaactagctggctatgaggctgaggatgaggctgggatgcaagggccagggcccagagacggttccccactcctcggaggctgcagcgacagttcaggaagtcttcgagaggaggagggggaggatgaagagcccctgcccccgctgagggccccagcaggcacggagcctgagcccatcgccatgctggtcctgaggggctcgtcctcgaggggtcctgatgctgggtgcctgacagaagagctcggggagcccgctgcaaccgagaggcctgcccagccgggagctgccaaccccctggtggtgggagccgtggccctcctggacctcagcctggcattcctgttctcccagctcctcacctgaggctacttcctggcctggttctggctttggttgcgtgcctcttcacccctttgacctgccttttttctcttctcctcttcctggctgtgttttctcctatctttctttctcttcttcctttcttttctgtgctcctttgtttttttctctcgctttttctttccctgtcttctttcagattatctcatttcttctggatctgtctctgtattcctcactcccttccccatcccaaccccttctttctctagattgtttacatatgaagggcttttctctctcagagttgctgtcttctctgagacacacaaatctaagtcagaccattgctccacgccctcccaccttttctttagacctcaacttcgctgcgggtgggggtttggtgtcctaaggagactcctggaagctgaatggagaggaggaagaaaatgaagaaggagtgattgaatgtcgggcaaggcactggctgagctgctgtggctccctagcctaaggggcctgctgtccctctgaggcctagtgaaaaagctgcaggaggtgcatcctccacctctaatcttggaggctattatcttacctccaagcactgagctgggttactgcccaattccatccttccctgaaggagagaagggaagtgaaaagtagagtaactccccagcatttccctctttttctcctcatcggccagcccctcctccagccccctctggtggcatgccatgccaagagcaacgtgtaaaggaacagagaatatccaatgcagtcaagtccaccctgcccagactttgccactgacttctcccacccttctgtctcccccataatagtttatttggttggtctggactcacttgtggcctttgattaaattcctaaggggcctgaagaagacatttctactgcagagggttagaggcacttgagcaaggcccccacatcccaactctgggagttgtggtgggaggaggcacttctgggggataggaccagacaagataacaggagctcacatggaagcagaagctgtgacaagtttagtagtcccaaaatgggttatatcccttccccctttacatcagaatcttgtgaaatgggaaaacaacagaaggaggggatcaaagatagctgatctcacatgcttcccaggcagggcagaggtgggagtcaaacccgggtgacaggtgggtggagagccctgtttgaggttgtggctgatccctctctggtattagtttttcccctgggagcaggaagccctaggaagaggggactgcagggtccccaggggatctttcctccctcccctgcatgaggcagaggcaagctgcctgccaaccccctccctcaaggaatggccttgcccaggaatgcccaccacacataccctcttctttttttctagtcaaactcttgtttattccttggcttgcctccctccttcctcccctctcaacctttacttctgatttctatttcatggaatttgggattgaagttaaactacaacagtgccgccaacaccaagtcttgcaggaaaaaaatacaaagaaatttaacaaaaaaaatatattaataaaaaagttcaaaaaaggg

SEQ ID NO: 224172 - DNA, 4386 bp, Artificial Sequence
  derived and/or modified sequence
atctccttctcctctctgcctgcctcctccctcaccgaagggttagcggacacccatccttttctgcttggggaccccaccaccacccgcaacactgccgctgtctcttcttcaccgtatccttctctacccaccctcttctctcttctcttctccctgcccctttaaatctgcctggcccagcctcccccgtgatgctgggatggagcaaacattgatttgtgctgggatggaatcggaattttgatttatttttcctctcccaaccataagaagaaaaaaataataaaaacaccccctcttgagagccccctccccctttgcatccagctcccagctcttcttccctatctccatccaaggcagattttttcccctacactattctcatcttcccccacccttgccactacctcgcccccccacccagcctgctcctccagctggggagagaggggactctccggactcccccacctttcctctctgggttggagcagtctctccggaaggggagggggcttggcttgtccgggcgaggtgggagtggaggtatcctgccatggatgctgtgccggggaggcagcctgagccccagcccacatgagacgccgaagaaccggggcagaggggtcctgacagcagccagggaaacgggtgccctacgattctgcccagccccctctcaggacccccaaactgccatccacactcgacacttcggggttctagccactcaggatgagggtccggccctgcctgccctcgctggggcccccccgcccggccccggtctaactgcccccgccccgaggcctcgcccggctccaaggcccccagcaggctctccagtcccaggatgcgctgagccgccggggggctgaggccgcgccaactacatgcatgtcccccgggggcaagttcgactttgacgacgggggctgctacgtggggggctgggaggcggggcgggcacatggctacggcgtgtgcacgggccccggcgcccagggcgagtacagcggctgctgggcacacggcttcgagtcactgggcgtcttcacggggcccggcggacacagctaccagggccactggcagcagggcaagcgcgaagggctgggcgtggagcgcaagagccgctggacgtaccgcggcgagtggctgggcgggctgaaggggcgcagcggcgtgtgggaaagcgtgtccggcctgcgctacgccgggctctggaaggacggtttccaggacggctacggcactgagacctactccgacggaggcacctaccagggccagtggcaggccgggaagcgccacggctacggggtacgccagagtgtgccctaccatcaggcggcgctgctgcgctcgccccgccgcacctccctggattccggccacagcgaccccccgacgccacccccgcccctgcccttgccgggcgacgagggaggcagccccgcctcgggctcccggggcggcttcgtgctggccgggcccggggacgccgacggcgcgtcgtcccgaaagcgcactccggcggccggcggattctttcgccgttcgctgctgctcagcgggctccgagcgggcggacgtcgcagctccctgggcagcaagcgaggctccctgcgcagcgaggtgagcagcgaggtgggcagcaccggaccgcccggctcggaggccagcgggcccccggccgcagcgccgcccgccctcatcgagggctcggccacagaggtgtacgcgggcgagtggcgcgcagatcggcgcagcggcttcggcgtcagccagcgctccaacgggctgcgctacgagggcgagtggctgggcaaccggcggcacggctacgggcgcaccacccgccccgacggctcccgcgaggagggcaagtacaagcgcaaccggctggtgcacggcgggcgcgtccgcagtctcctgcctctggcccttcggcggggcaaggttaaggagaaggtggacagggctgtcgagggcgcccgtcgagccgtgagtgctgcccgtcagcgccaggagatcgccgctgccagggcagcagacgccctcctaaaggcagtggcagccagcagtgtcgctgagaaggccgtggaggcagctcgaatggccaaactgatagcccaggacctgcagcccatgctagaggccccaggccgcagacccaggcaggactcagaaggttccgacacggagcccctggatgaggacagccctggggtatatgagaacggactgaccccctcagagggatcccctgaactgcccagcagtcctgcctcctcccgccaaccctggcgaccccctgcctgccggagcccactgcctcctggaggggaccagggtcccttctccagccccaaagcttggcctgaggagtgggggggggcaggcgcacaggcagaggaactagctggctatgaggctgaggatgaggctgggatgcaagggccagggcccagagacggttccccactcctcggaggctgcagcgacagttcaggaagtcttcgagaggaggagggggaggatgaagagcccctgcccccgctgagggccccagcaggcacggagcctgagcccatcgccatgctggtcctgaggggctcgtcctcgaggggtcctgatgctgggtgcctgacagaagagctcggggagcccgctgcaaccgagaggcctgcccagccgggagctgccaaccccctggtggtgggagccgtggccctcctggacctcagcctggcattcctgttctcccagctcctcacctgaggctacttcctggcctggttctggctttggttgcgtgcctcttcacccctttgacctgccttttttctcttctcctcttcctggctgtgttttctcctatctttctttctcttcttcctttcttttctgtgctcctttgtttttttctctcgctttttctttccctgtcttctttcagattatctcatttcttctggatctgtctctgtattcctcactcccttccccatcccaaccccttctttctctagattgtttacatatgaagggcttttctctctcagagttgctgtcttctctgagacacacaaatctaagtcagaccattgctccacgccctcccaccttttctttagacctcaacttcgctgcgggtgggggtttggtgtcctaaggagactcctggaagctgaatggagaggaggaagaaaatgaagaaggagtgattgaatgtcgggcaaggcactggctgagctgctgtggctccctagcctaaggggcctgctgtccctctgaggcctagtgaaaaagctgcaggaggtgcatcctccacctctaatcttggaggctattatcttacctccaagcactgagctgggttactgcccaattccatccttccctgaaggagagaagggaagtgaaaagtagagtaactccccagcatttccctctttttctcctcatcggccagcccctcctccagccccctctggtggcatgccatgccaagagcaacgtgtaaaggaacagagaatatccaatgcagtcaagtccaccctgcccagactttgccactgacttctcccacccttctgtctcccccataatagtttatttggttggtctggactcacttgtggcctttgattaaattcctaaggggcctgaagaagacatttctactgcagagggttagaggcacttgagcaaggcccccacatcccaactctgggagttgtggtgggaggaggcacttctgggggataggaccagacaagataacaggagctcacatggaagcagaagctgtgacaagtttagtagtcccaaaatgggttatatcccttccccctttacatcagaatcttgtgaaatgggaaaacaacagaaggaggggatcaaagatagctgatctcacatgcttcccaggcagggcagaggtgggagtcaaacccgggtgacaggtgggtggagagccctgtttgaggttgtggctgatccctctctggtattagtttttcccctgggagcaggaagccctaggaagaggggactgcagggtccccaggggatctttcctccctcccctgcatgaggcagaggcaagctgcctgccaaccccctccctcaaggaatggccttgcccaggaatgcccaccacacataccctcttctttttttctagtcaaactcttgtttattccttggcttgcctccctccttcctcccctctcaacctttacttctgatttctatttcatggaatttgggattgaagttaaactacaacagtgccgccaacaccaagtcttgcaggaaaaaaatacaaagaaatttaacaaaaaaaatatattaataaaaaagttcaaaaaa

SEQ ID NO: 224173 - DNA, 2483 bp, Artificial Sequence
  derived and/or modified sequence
gatgctgtgccggggaggcagcctgagccccagcccacatgagacgccgaagaaccggggcagaggggtcctgacagcagccagggaaacgggtgccctacgattctgcccagccccctctcaggacccccaaactgccatccacactcgacacttcggggttctagccactcaggatgagggtccggccctgcctgccctcgctggggcccccccgcccggccccggtctaactgcccccgccccgaggcctcgcccggctccaaggcccccagcaggctctccagtcccaggatgcgctgagccgccggggggctgaggccgcgccaactacatgcatgtcccccgggggcaagttcgactttgacgacgggggctgctacgtggggggctgggaggcggggcgggcacatggctacggcgtgtgcacgggccccggcgcccagggcgagtacagcggctgctgggcacacggcttcgagtcactgggcgtcttcacggggcccggcggacacagctaccagggccactggcagcagggcaagcgcgaagggctgggcgtggagcgcaagagccgctggacgtaccgcggcgagtggctgggcgggctgaaggggcgcagcggcgtgtgggaaagcgtgtccggcctgcgctacgccgggctctggaaggacggtttccaggacggctacggcactgagacctactccgacggaggcacctaccagggccagtggcaggccgggaagcgccacggctacggggtacgccagagtgtgccctaccatcaggcggcgctgctgcgctcgccccgccgcacctccctggattccggccacagcgaccccccgacgccacccccgcccctgcccttgccgggcgacgagggaggcagccccgcctcgggctcccggggcggcttcgtgctggccgggcccggggacgccgacggcgcgtcgtcccgaaagcgcactccggcggccggcggattctttcgccgttcgctgctgctcagcgggctccgagcgggcggacgtcgcagctccctgggcagcaagcgaggctccctgcgcagcgaggtgagcagcgaggtgggcagcaccggaccgcccggctcggaggccagcgggcccccggccgcagcgccgcccgccctcatcgagggctcggccacagaggtgtacgcgggcgagtggcgcgcagatcggcgcagcggcttcggcgtcagccagcgctccaacgggctgcgctacgagggcgagtggctgggcaaccggcggcacggctacgggcgcaccacccgccccgacggctcccgcgaggagggcaagtacaagcgcaaccggctggtgcacggcgggcgcgtccgcagtctcctgcctctggcccttcggcggggcaaggttaaggagaaggtggacagggctgtcgagggcgcccgtcgagccgtgagtgctgcccgtcagcgccaggagatcgccgctgccagggcagcagacgccctcctaaaggcagtggcagccagcagtgtcgctgagaaggccgtggaggcagctcgaatggccaaactgatagcccaggacctgcagcccatgctagaggccccaggccgcagacccaggcaggactcagaaggttccgacacggagcccctggatgaggacagccctggggtatatgagaacggactgaccccctcagagggatcccctgaactgcccagcagtcctgcctcctcccgccaaccctggcgaccccctgcctgccggagcccactgcctcctggaggggaccagggtcccttctccagccccaaagcttggcctgaggagtgggggggggcaggcgcacaggcagaggaactagctggctatgaggctgaggatgaggctgggatgcaagggccagggcccagagacggttccccactcctcggaggctgcagcgacagttcaggaagtcttcgagaggaggagggggaggatgaagagcccctgcccccgctgagggccccagcaggcacggagcctgagcccatcgccatgctggtcctgaggggctcgtcctcgaggggtcctgatgctgggtgcctgacagaagagctcggggagcccgctgcaaccgagaggcctgcccagccgggagctgccaaccccctggtggtgggagccgtggccctcctggacctcagcctggcattcctgttctcccagctcctcacctgaggctacttcctggcctggttctggctttggttgcgtgcctcttcacccctttgacctgccttttttctcttctcctcttcctggctgtgttttctcctatctttctttctcttcttcctttcttttctgtgctccctccttcctcccctctcaacctttacttctgatttctatttcatggaatttgggattgaagttaaactacaacagtgccgccaacaccaagtcttgcaggaaaaaaatacaaagaaatttaac

SEQ ID NO: 224174 - DNA, 1887 bp, Artificial Sequence
  derived and/or modified sequence
atgagccctgggggcaagtttgattttgatgatggcggctgctacgtgggcggctgggaggccggccgggcccacggctatggagtgtgcaccggccctggggcccagggcgagtacagcggctgctgggcccacggctttgagagcctgggcgtcttcaccggccctgggggccacagctaccagggccactggcagcagggcaagcgggagggcctgggcgtggagaggaagagccgctggacctacagaggagagtggctgggcggcctgaagggccgctctggagtgtgggagagcgtgtctggcctgcgctatgccggcctgtggaaggatggcttccaggacggctacggcacagagacctacagtgatggcggcacctaccagggccagtggcaggccggcaagagacatggctatggagtgcggcagagcgtgccctaccaccaggccgccctgctgcggagccccaggaggaccagcctggacagcggccacagcgacccccccaccccacctccacccctgcccctgcctggagatgagggcggcagccctgccagcggcagcagaggaggctttgtgctggccggccctggagatgctgatggagccagcagcaggaagaggaccccagctgctgggggcttcttccgccgcagcctgctgctgagcggcctgcgggccggcggcagaagaagcagcctgggcagcaagaggggcagcctgcggtctgaggtgagcagcgaggtgggcagcactggacctcctggcagcgaggccagcggccccccagctgctgcccccccagccctgattgagggcagcgccacagaggtgtatgctggggagtggagggctgaccggcgcagcggcttcggcgtgtcccagaggagcaatggcctgcgctatgaaggagagtggctgggcaacagaagacatggctacggccgcaccaccaggccagatggcagccgggaggagggcaagtacaagaggaaccggctggtgcatggaggccgggtgcgcagcctgctgcccctggccctgcggcggggcaaggtgaaggagaaggtggacagagctgtggagggcgcccggcgggctgtgtctgctgcccggcagaggcaggagattgctgctgcccgggcagcagatgccctgctgaaggctgtggccgccagctctgtggccgagaaggctgtggaggccgccaggatggccaagctgattgcccaggacctgcagcccatgctggaggcccctggaagaagaccccggcaggacagcgagggcagtgacacagagcccctggatgaggacagccctggggtgtatgaaaatggcctgacccccagcgagggcagccctgagctgcccagcagccctgccagcagccggcagccctggaggcccccagcctgccgcagccccctgcccccaggaggagaccagggccccttcagcagccccaaggcctggccagaggagtggggcggggccggggcccaggccgaggagctggccggctatgaagcagaagatgaggccggcatgcagggccctggccccagagatggcagccccctgctgggcggctgcagcgacagcagcggcagcctgcgggaggaggagggggaggatgaggagcccctgccccccctgcgggccccagctggaacagagcctgagcccatcgccatgctggtgctgcggggcagcagcagccggggcccagatgctggctgcctgacagaggagctgggggagcctgctgccacagagaggcctgcccagcctggagctgccaaccccctggtggtgggcgctgtggccctgctggacctgagcctggccttcctgttcagccagctgctgacctag

SEQ ID NO: 224175 - DNA, 1887 bp, Artificial Sequence
  derived and/or modified sequence
atgagccccggcggcaagttcgacttcgacgacggcggctgctacgtgggagggtgggaggccggtagggcccatgggtatggggtctgcacaggccctggtgcacaaggtgaatacagcggctgctgggcccatggcttcgaatctttgggcgtttttaccggcccgggcggacacagttaccagggccactggcagcagggaaaacgagaaggactgggcgttgaacggaagagccggtggacatacagaggagaatggctgggggggctgaaaggacgctccggggtctgggaatcagtgtctggcctgcggtatgcaggcctgtggaaagacggtttccaggacgggtacggaacggagacctattccgacggcggtacctaccagggccaatggcaggcaggtaagcgccacgggtacggcgtcagacagtctgtgccttaccatcaggcagctctgctgaggtctccacggcggacctctctggacagtggacattctgacccccccactcctccccctcctctcccactgcccggcgacgagggcggttctcccgcgtccggctccaggggcggattcgtgttggccgggccaggcgatgccgacggtgcgagtagtagaaagcgaactccagcagctggcggcttcttcaggcgatctctgctgctttcaggactgagagccggcggccggcgatcttctcttggttcaaaacgaggtagcctcagaagcgaggtgagctcggaggtcggtagcacgggtcctccgggctctgaggcaagtggccctcctgctgctgcccccccagcactgattgagggcagtgccacagaggtatatgccggggaatggcgggctgacaggcgcagcggctttggcgtgtctcagagatcaaatggcttgcgatatgaaggcgaatggctcggaaatagaagacacggctatgggcgtaccacgagaccggacggaagccgggaggaggggaagtacaagcggaatcgactcgtccatggcggccgcgtgagatccctgctgccactggccctgcgtaggggtaaagtgaaggaaaaggtcgatcgagccgtcgagggggcacggcgtgcagtgtctgctgccaggcaacgccaggaaattgccgccgcccgagcagccgatgcgttgctgaaagctgtggcagctagctcagtggctgagaaggccgtggaggctgcaagaatggcaaagctgatcgcccaggatctgcaacccatgctcgaagcccccggacgtcgcccccgccaagactccgaggggtccgatactgagcccctcgatgaagatagccctggcgtttacgagaatgggctgacacctagcgagggctcccctgaactcccaagctcccctgctagctcacgccaaccctggcgcccgcctgcctgccgctcacccctccctccaggaggcgaccagggacctttctccagtcctaaagcctggccagaagagtgggggggggccggagctcaagctgaggagctggccggatacgaggcggaggacgaggccggaatgcagggccccggaccacgggacgggtctccgctgttgggaggttgctcggacagctctggaagccttcgggaggaggagggagaggacgaggaaccacttccccccctcagggcaccggcgggtactgagccagagcccattgctatgctggtgttgcgaggatccagctctcggggacctgatgcaggatgtctcaccgaggagctgggagagcctgccgctaccgagagaccagcgcagcccggcgcagccaaccccctggtggtgggggccgtggctttgctcgacttgtctctggcgttccttttctctcaacttctgacctag

SEQ ID NO: 224176 - DNA, 1887 bp, Artificial Sequence
  derived and/or modified sequence
atgagccccggcggcaagttcgacttcgacgacggcggctgctacgttggtggatgggaggcaggtcgggctcatggatatggcgtgtgcacgggacccggtgcacagggtgagtactccgggtgctgggctcacggctttgagagccttggagttttcacgggcccaggcggtcatagctatcaaggacactggcaacagggaaaacgcgaaggcttgggcgtggagcgcaagagtagatggacgtaccgcggcgagtggctgggggggttgaaagggaggagcggtgtctgggaatccgtatcagggcttagatatgccggactgtggaaagacggattccaggatggatacggtacagagacctatagtgatgggggcacgtaccaaggacagtggcaggcagggaagcggcatgggtatggtgtgcggcaatctgtgccttaccatcaggccgctctgctcaggtccccaaggcgcaccagtctcgatagtgggcacagtgacccacctacacctccacctcctcttccactgcccggagatgagggaggatcaccagcaagcggcagccggggggggtttgtgctcgcaggccctggtgatgcggatggggcttccagtcggaaaaggacccctgccgcgggtgggttcttcagacgatctctgctactgtcaggcctccgagccggtggacggaggtcctctttgggatcaaagcgtggttctctcaggtctgaggtgtcatccgaagtgggatctacaggccccccaggttctgaggcttctggccctcctgccgcagccccaccagctctgatcgagggcagtgctactgaggtatacgcaggagagtggcgcgccgatagaaggtcaggattcggagtgtcacagagatccaatggcctccggtacgaaggggaatggttgggcaaccgccggcatggatacggccgaacgacgaggcctgacgggagcagagaggagggtaaatacaaacgcaacaggctggttcacggcgggcgcgtcagaagtctgctgcctttagcccttcgaagaggaaaggttaaggaaaaggtggaccgggccgtggaaggagcccgccgggcagtgtcagctgcaaggcagagacaggaaatagccgctgcacgtgccgccgacgccctcctgaaggctgttgccgcttcctcggtggccgaaaaagccgtagaggctgcccgcatggccaagcttattgcacaggacctgcaacccatgctagaagcacctgggagacgtccgaggcaagactcagagggcagcgataccgaacctttagatgaagatagcccaggtgtctacgaaaacggcctaacacccagtgaggggtcccccgagctgccttcctcccctgcatcttcacgccagccttggcggccacctgcctgtagatctccactccctccaggcggggaccaggggccatttagcagtcctaaggcttggcctgaagagtggggtggtgctggagctcaggcagaagagctggcaggctacgaggccgaggacgaagccggaatgcaggggcccggtcctcgcgatgggtcacccctgttgggaggctgtagcgattcctccgggtctcttcgcgaggaagagggagaggatgaggagcctctgccacctctgagagcccctgcaggcaccgaacctgagcccatcgctatgttggtcctgagaggcagtagcagccgcggccctgacgccggatgcctgacagaggagctcggcgaacccgctgcaactgagcgcccggcacagcctggcgccgcaaaccctctggtggtgggggccgtagcactcttggatctgagtttggctttcctattctctcagctccttacatag

SEQ ID NO: 224177 - DNA, 1887 bp, Artificial Sequence
  derived and/or modified sequence
atgagccccggcggcaagttcgacttcgacgacggcggctgctacgtcggtgggtgggaggctggaagagctcacggctatggtgtttgcactggacccggggctcagggagagtatagcggttgttgggctcacggtttcgaatctttgggagtcttcactgggcccgggggccactcctatcagggtcactggcagcaaggcaaacgggagggccttggtgtcgaaaggaaaagcagatggacttaccgcggtgagtggctcggcggccttaaagggagatctggagtgtgggagtctgtttctgggctgagatatgctggactgtggaaagacggcttccaagacggctatggtaccgagacctatagtgatgggggcacttaccagggtcaatggcaggccggcaaaagacatggatacggggtcaggcagtcagtgccatatcaccaggcagccctgttgcgttctcctagacggacttcactcgattccgggcactccgacccccccacacccccacctccattgcctttgccaggagacgagggcggcagccccgcctccgggtctaggggggggtttgttctcgcaggcccgggagacgcagatggagcatcttctaggaagagaacccctgctgccggcgggtttttcaggcgatccttactgctgtctggtcttcgcgccggtgggagacgttccagcctcggttccaagcgcggatccctaaggagtgaggtgtcttccgaagtgggttcaacaggtccaccaggttcagaggcatctggccccccggccgctgctccccccgctctcattgagggttcagccaccgaggtgtacgcaggggagtggcgggcagatcggagaagcggatttggggtgagtcagcgtagtaatggactcagatacgagggagaatggctcggcaatagacgccacgggtacgggcgaacaacgcgccctgatgggtcccgagaagaagggaagtacaaaaggaatcgcctggtacacggaggtcgggttcgatcactacttcccctcgctttgaggaggggcaaggtgaaagagaaggttgaccgggccgtggaaggcgcacggagagctgtgagcgctgcccggcagagacaggagattgctgctgcaagagctgcagacgcactgctcaaagctgtggcggctagctctgtggccgagaaggccgtggaggccgcacgtatggcaaaactcatcgcccaggacctccaaccgatgttggaggcgcccggccgcaggcctaggcaggattcagagggatccgatactgaacctcttgacgaggattctcccggcgtgtacgaaaacggcctgactccgtctgaggggagcccagaactgccaagctcccctgcatcctctcgccagccttggagacctcctgcgtgtcggagcccactgccgcctggcggggaccaggggcctttttcatcgcccaaagcgtggcctgaagagtgggggggcgccggagctcaggccgaggagctggccggttacgaggcggaagatgaggcggggatgcagggacccggaccgcgagacggttcccccttacttggcggatgctctgattcttcaggctcacttagagaagaggagggcgaagacgaagaacccctccctcccctgcgggcacccgccggaactgagccggagcctattgccatgctcgtcttgagaggaagcagctcaaggggtcctgatgcaggctgtctgacagaggagctcggggaacccgccgccaccgaacgccctgcccagcccggggctgccaacccgctcgtggtaggagcagtggcgttgcttgatctgagcttggcgtttctcttttctcagcttcttacatag

SEQ ID NO: 224178 - DNA, 1887 bp, Artificial Sequence
  derived and/or modified sequence
atgagtccaggaggaaaatttgatttcgatgacggcggatgctacgtgggcggttgggaagcaggcagggcccatggttatggcgtgtgcaccggtcctggtgcacagggcgagtactccggatgctgggcccacggattcgagagccttggagttttcactgggccaggaggtcacagctatcaaggccattggcagcaggggaagcgagaagggctgggcgtagaacgaaagtcgagatggacctatcgaggcgagtggttgggtggactcaaaggacggtcaggggtctgggaaagcgtctcagggctccgctacgctggtctttggaaagacgggttccaggacggatatggcactgaaacctattcagacgggggtacttaccaggggcagtggcaagcaggcaagagacacggatacggggtgcgccaaagcgtcccctatcaccaggcagcactgctgcggtcgcccagacgtaccagccttgactctggtcactccgatccccctacaccccctccaccgctcccgctgccgggtgatgaggggggatcccccgctagtggttctcgagggggttttgttctggccggtccaggggacgccgacggcgcaagctcacgaaaacgtacaccagccgctgggggattctttaggagatcccttctgctttccggtttacgcgcaggaggccgacgctcatcccttggctccaaaagaggctctttgcgatccgaagttagctcagaggtcggcagtacaggccctcccggaagcgaggccagtggtccacccgctgcggctcctcccgcactcatcgaaggcagcgctacagaggtctatgccggagaatggcgggcagacaggcggtctggatttggggttagccagagatctaatgggctacggtatgagggagaatggctggggaatcggagacacgggtacgggcgtaccacccgcccagacgggtcccgggaagagggaaaatataagaggaacaggctggtgcacggtggcagggtgagatccctactgccactggccttaagaagaggcaaggtcaaagaaaaagttgaccgggctgtggagggggcacggcgagctgttagtgcagctagacaacgacaagagattgctgcagccagggcagcagatgctctgttgaaggctgttgccgctagctccgtggccgagaaggcagtggaggcagctcgaatggctaagttaatagctcaagatttacagcctatgttagaagcacctggccgtcggcctcgtcaggactccgaggggagcgacaccgagccactggatgaagattctccaggagtctacgagaacggacttaccccgagtgaggggtcgcccgagttaccaagttccccagcttcttctaggcaaccctggaggccaccagcctgcagatcacccctgcccccaggaggtgaccagggcccattttctagtccaaaggcgtggccagaagagtggggcggtgcaggcgctcaggccgaagaactggccggatacgaggccgaggacgaagccggaatgcaggggcctggtcccagggacggttcacccttactgggtggctgtagcgattcgtccggatccttaagggaagaagaaggagaagatgaagaaccattacctccacttcgcgcacccgcaggaacagagccagagccaattgctatgctggtgctcagaggcagcagtagtcgtggcccagatgcagggtgccttaccgaggagcttggcgaaccagctgcaacagagcgtcctgcccagccaggagccgctaaccccctggtggtcggtgcagtggctctattggacctgagcctggccttcttgttctcacaactgctcacatag

SEQ ID NO: 224179 - DNA, 1887 bp, Artificial Sequence
  derived and/or modified sequence
atgtcccccggaggcaaattcgattttgatgacggcggatgttacgtcggtggctgggaggcagggagagcccatggttacggggtatgtaccggccctggcgcacagggcgaatactccggttgctgggctcacggttttgagagcctgggtgtattcactggccctggtggccatagctatcaggggcactggcagcaaggtaagagagaaggtctaggggtggaaaggaaatcgagatggacttaccgcggtgagtggctcggcggactgaagggacgtagtggggtgtgggagagtgtaagtggactgcgctatgctggactgtggaaggatgggttccaagacggctatgggaccgaaacttactctgacgggggaacctatcagggccagtggcaggctgggaaaagacatggttacggcgtcagacaatctgtgccctaccaccaggctgcgctgctccgttccccccgtcgcactagcttggattccggccattccgacccaccaactccacccccacctcttccgctgccaggagacgagggcggaagccctgcctccggtagtcgcggaggctttgtgctcgctgggcctggggacgcagatggagctagctctagaaagaggacacctgctgccggagggttttttcggaggtctttactgctgtctggactcagggctgggggaagaagatctagtttaggttccaagcgagggtcactacggagcgaagtgagtagcgaggtcggctcaactgggccaccaggcagcgaagcgagtggtccccctgctgctgccccacctgccctgattgaggggtccgcaactgaggtatacgcaggcgagtggcgagcggaccgtaggtccggctttggcgtgtctcagaggagtaatggtctacgatacgagggggagtggcttggaaacagacggcacggctacggacgaacaaccagaccagacggctcccgagaggagggtaaatacaaaaggaatagattggtgcacggaggacgcgtgagatcactgctgcctttggctctgcggcgtggcaaagttaaggaaaaagtggacagagccgtcgagggggctcgccgtgcagtctccgcagccaggcagagacaagaaattgcggcagcaagagcagctgacgcccttctcaaggctgtcgcagcatcgtctgtggccgaaaaagctgtcgaggccgctcgcatggcgaaactgattgctcaggacctccagcccatgttggaggcgcctgggcgacgccctagacaggactctgagggaagtgacactgaacctctagatgaggactctccaggagtgtacgagaacggactgacacccagcgaaggatcccccgaacttccatctagcccagccagttcccgccaaccttggcggcctcctgcatgcagatcacccctgcccccaggcggtgaccagggtccatttagcagcccgaaggcctggcccgaggaatgggggggtgctggagcacaggccgaggaactcgccggatacgaagcagaagatgaggctggtatgcagggccctggcccaagggacgggagccctcttcttggtgggtgctccgacagctcgggatctctgagagaagaggagggggaggatgaggagcctttgccacccctgcgagctcctgcagggactgaacctgagcccatcgcaatgctcgtcctgcgtggcagtagcagtcgcggtcctgatgcaggctgtttgaccgaggaattgggcgaaccagctgccaccgaacgacctgctcaacccggagccgcaaatccccttgttgtgggagctgtggccctgctggacctttcattggcctttttgttttcccagttgttaacttag

SEQ ID NO: 224180 - DNA, 1887 bp, Artificial Sequence
  derived and/or modified sequence
atgtccccgggtgggaaattcgattttgatgacggtgggtgctatgtcgggggatgggaagccggtagggcacatggatatggggtctgcacaggcccaggcgcacagggagagtactcaggctgctgggcacatgggttcgagtccctgggtgtgttcaccgggccagggggacatagctatcagggccactggcagcaaggtaaacgggaagggttaggagtagaacggaagagcaggtggacgtacaggggcgagtggctggggggtctgaaaggaaggagcggtgtgtgggagagtgtatccggcctgcgctacgccggattatggaaggacggtttccaggatggatatggtacagaaacttattctgacggtgggacataccagggccagtggcaggccggaaaaagacatgggtatggtgtccgtcagtctgtaccttaccatcaggccgcattgctccggtcaccccgaaggacgtccctcgattcaggtcactccgatccaccaacaccccctccacctttgccgctgccaggggatgaaggaggctcgcccgcttcgggatccaggggcggatttgtgctggccggacccggagacgcggatggtgcatcttcgcggaaacgcacacccgctgcaggcggttttttccggcgttcattactgttgagcgggcttcgcgctgggggacggagatcgtctctcggaagtaaaagaggctccttgcgttctgaagtatcaagcgaggtgggatccaccggaccccctggaagcgaagctagtggcccacctgccgcagctcctcccgcattgattgaagggtccgctaccgaagtctatgccggtgaatggagagcagacaggaggagcggctttggggtaagccaaaggagtaatggtctgcgctacgagggcgagtggctcggtaataggaggcatggctacgggaggacaacaagacctgatggcagtcgcgaggagggcaaatacaaaaggaatcggctggtgcacggtgggcgtgtgcgctctctgcttccactggcactccggagagggaaggttaaggagaaagttgaccgggcagtggagggtgccaggagagccgtgtcagccgctcggcagaggcaggagattgcagccgcacgagctgccgacgcgctgctcaaagcggttgccgcaagctcagtggctgagaaggccgtcgaagcggctaggatggccaaattaatcgcccaggatcttcagccaatgctggaggccccagggaggaggccgcgacaggacagcgagggctctgacacagagcctctggacgaagacagtccgggagtgtatgaaaatggcttgaccccaagtgaaggtagtcctgaactgcccagcagtcctgcatcatcaaggcagccttggcgcccaccggcatgtaggtctcctctgcctccaggtggtgaccaggggcctttttcctctccaaaagcttggccagaggagtggggcggagccggtgcacaggcagaggaactggcaggctacgaagccgaagacgaggctggcatgcagggcccagggccacgcgacggcagcccactgctgggtgggtgcagcgactcatcaggcagcttgcgggaggaggagggagaggacgaagaaccacttcccccattgcgcgctcctgctgggaccgagcctgaacctattgctatgctggtgttgcgtggtagttcctcccgcggaccagacgccggatgtctgacagaagagttaggcgagccagcagccactgaacgtcctgcacagccaggcgcagccaacccactggtggtcggtgctgtcgctttactggacctgagcctggctttcctattttcccagctgctgacctag

SEQ ID NO: 224181 - DNA, 1890 bp, Artificial Sequence
  derived and/or modified sequence
atgcacgtgcccggcggcaagttcgacttcgacgacggcggctgctacgtgggcggctgggaggccggcagagcccacggctacggcgtgtgcaccggccccggcgcccagggcgagtacagcggctgctgggcccacggcttcgagagcctgggcgtgttcaccggccccggcggccacagctaccagggccactggcagcagggcaagagagagggcctgggcgtggagagaaagagcagatggacctacagaggcgagtggctgggcggcctgaagggcagaagcggcgtgtgggagagcgtgagcggcctgagatacgccggcctgtggaaggacggcttccaggacggctacggcaccgagacctacagcgacggcggcacctaccagggccagtggcaggccggcaagagacacggctacggcgtgagacagagcgtgccctaccaccaggccgccctgctgagaagccccagaagaaccagcctggacagcggccacagcgacccccccaccccccccccccccctgcccctgcccggcgacgagggcggcagccccgccagcggcagcagaggcggcttcgtgctggccggccccggcgacgccgacggcgccagcagcagaaagagaacccccgccgccggcggcttcttcagaagaagcctgctgctgagcggcctgagagccggcggcagaagaagcagcctgggcagcaagagaggcagcctgagaagcgaggtgagcagcgaggtgggcagcaccggcccccccggcagcgaggccagcggcccccccgccgccgccccccccgccctgatcgagggcagcgccaccgaggtgtacgccggcgagtggagagccgacagaagaagcggcttcggcgtgagccagagaagcaacggcctgagatacgagggcgagtggctgggcaacagaagacacggctacggcagaaccaccagacccgacggcagcagagaggagggcaagtacaagagaaacagactggtgcacggcggcagagtgagaagcctgctgcccctggccctgagaagaggcaaggtgaaggagaaggtggacagagccgtggagggcgccagaagagccgtgagcgccgccagacagagacaggagatcgccgccgccagagccgccgacgccctgctgaaggccgtggccgccagcagcgtggccgagaaggccgtggaggccgccagaatggccaagctgatcgcccaggacctgcagcccatgctggaggcccccggcagaagacccagacaggacagcgagggcagcgacaccgagcccctggacgaggacagccccggcgtgtacgagaacggcctgacccccagcgagggcagccccgagctgcccagcagccccgccagcagcagacagccctggagaccccccgcctgcagaagccccctgccccccggcggcgaccagggccccttcagcagccccaaggcctggcccgaggagtggggcggcgccggcgcccaggccgaggagctggccggctacgaggccgaggacgaggccggcatgcagggccccggccccagagacggcagccccctgctgggcggctgcagcgacagcagcggcagcctgagagaggaggagggcgaggacgaggagcccctgccccccctgagagcccccgccggcaccgagcccgagcccatcgccatgctggtgctgagaggcagcagcagcagaggccccgacgccggctgcctgaccgaggagctgggcgagcccgccgccaccgagagacccgcccagcccggcgccgccaaccccctggtggtgggcgccgtggccctgctggacctgagcctggccttcctgttcagccagctgctgacctag

SEQ ID NO: 224182 - DNA, 1890 bp, Artificial Sequence
  derived and/or modified sequence
atgcacgtcccagggggcaagttcgacttcgacgacggaggctgctatgtaggaggttgggaggctggccgagctcatggttatggtgtgtgtaccgggcctggagctcaaggcgagtactctggttgttgggctcatggatttgagagtctcggagtattcaccggtcccggggggcactcttaccagggccattggcagcagggcaagcgcgaagggttgggcgttgagagaaagtctagatggacttatcggggagagtggttaggcggactcaagggccggtccggagtgtgggagtctgttagtgggctgcggtatgcaggcctctggaaggacggcttccaggatggatacggaactgaaacctactcagacggtggcacctaccagggccagtggcaggcaggaaaaagacacgggtatggggttaggcagtcggttccataccatcaggctgccctcttgaggtcccctcgccgcacttccctggattctggacacagcgatccaccaactccacccccacccctcccgctccccggggatgagggaggctctccagcctcaggctccagaggaggcttcgtccttgctggaccgggtgacgcggatggagcttcaagtcgtaagcggacccccgctgctggaggtttcttccggcgttcattactgctctccgggctgagggctggcggtaggcggtccagcttaggatcaaagcgcggcagtctgcggagtgaagtgtctagcgaagttggaagcacaggcccgccaggcagcgaggctagcggcccgcccgcagcggctccaccggccctgattgaggggtccgctaccgaagtttacgcgggagagtggcgcgccgaccgcagatccgggttcggagtgtctcagagatctaacggactccgatatgagggcgagtggctggggaatagaagacacggttatgggcgcacaactcgacctgacggaagccgagaggagggaaaatacaaaaggaaccgtttggtgcatgggggacgtgtgagaagtctgctgccgctggccctgagacgcgggaaagtaaaagagaaggttgaccgggccgtagaaggcgcccgaagagctgtgagcgctgcgcggcagaggcaggaaattgcagctgcccgggctgctgacgcactgctcaaggctgtggcagcctcctcagttgctgagaaagccgtggaagctgcgcgtatggccaagctcatcgcccaagaccttcagcccatgcttgaagcccccggaaggcgaccaaggcaggattctgagggcagcgacaccgagcctctggacgaagattctccgggagtctacgagaacggtttgacgccttctgagggatccccggaattgccttcatctcccgcatccagccgccagccttggcggcctcccgcttgtcgctcccctctcccgccagggggagatcaggggcctttttcttccccgaaggcttggcccgaggagtggggcggagctggggcgcaggccgaagagctggcgggctacgaggccgaagacgaggcagggatgcagggaccaggtcctcgggatgggagtccactcctggggggttgcagtgactcgagtgggtccctgagggaggaagagggcgaggacgaggaacccctgcctcccctcagggcacccgccggcacagaaccggagccaattgccatgctcgtgctgcgggggtcttcgtctcggggtccagatgcgggttgtttgaccgaagagcttggggaacctgccgctacagaacgccctgcccagcctggggcggccaatccattagtggtgggtgctgtggctctgctagacctcagtctggcattcttgttctctcaattactgacttag

SEQ ID NO: 224183 - DNA, 1890 bp, Artificial Sequence
  derived and/or modified sequence
atgcacgtgcctgggggcaagtttgattttgatgatggcggctgctacgtgggcggctgggaggccggccgggcccacggctacggcgtgtgcaccggccctggggcccagggcgagtacagcggctgctgggcccacggctttgagagcctgggcgtcttcaccggccctgggggccacagctaccagggccactggcagcagggcaagcgggagggcctgggcgtggagaggaagagccgctggacctacagaggagagtggctgggcggcctgaagggccgcagcggcgtgtgggagagcgtgtctggcctgcgctatgccggcctgtggaaggatggcttccaggacggctatggaacagagacctacagtgatggcggcacctaccagggccagtggcaggccggcaagagacatggctacggcgtgcggcagagcgtgccctaccaccaggccgccctgctgcggagccccaggaggaccagcctggacagcggccacagcgacccccccaccccacctccacccctgcccctgcctggagatgaaggaggcagccctgccagcggcagccggggcggctttgtgctggccggccctggagatgctgatggagccagcagcaggaagaggaccccagctgctgggggcttcttcagaagaagcctgctgctgagcggcctgcgggccggcggccgccgcagcagcctgggcagcaagaggggcagcctgcggtctgaggtgtcctctgaggtgggcagcacaggccccccaggcagcgaggccagcggccccccagctgctgcccccccagccctgattgagggcagcgccacagaggtgtatgctggggagtggagggctgacagaagaagtggctttggagtgtcccagaggagcaatggcctgcgctatgaaggagagtggctgggcaacagaagacatggctacggccgcaccaccaggccagatggcagccgggaggagggcaagtacaagaggaaccggctggtgcacggcggccgggtgcgcagcctgctgcccctggccctgcggcggggcaaggtgaaggagaaggtggacagagctgtggagggcgccaggagagctgtgtctgctgcccggcagaggcaggagattgctgctgcccgggctgctgatgccctgctgaaggctgtggccgccagctctgtggccgagaaggctgtggaggccgccaggatggccaagctgattgcccaggacctgcagcccatgctggaggcccctggccggcggccccggcaggacagcgagggcagtgacacagagcccctggatgaggacagccctggggtgtatgaaaatggcctgaccccatctgagggcagccctgagctgcccagcagccctgccagcagccggcagccctggaggcccccagcctgccgcagccccctgcccccaggaggagaccagggccccttcagcagccccaaggcctggccagaggagtggggcggggccggggcccaggccgaggagctggccggctatgaagcagaagatgaagctggcatgcagggccctggccccagagatggcagccccctgctgggcggctgcagcgacagcagcggcagcctgcgggaggaggagggagaagatgaggagcccctgccccccctgcgggccccagctggaacagagcctgagcccatcgccatgctggtgctgcggggcagcagcagccggggcccagatgctggctgcctgacagaggagctgggggagcctgctgccacagagaggcctgcccagcccggggccgccaaccccctggtggtgggcgctgtggccctgctggacctgagcctggccttcctgttcagccagctgctgacctag

SEQ ID NO: 224184 - DNA, 3439 bp, Artificial Sequence
  derived and/or modified sequence
gccaactacatgcatgtccccgggggcaagttcgactttgacgacgggggctgctacgtggggggctgggaggcggggcgggcacatggctacggcgtgtgcacgggccccggcgcccagggcgagtacagcggctgctgggcacacggcttcgagtcactgggcgtcttcacggggcccggcggacacagctaccagggccactggcagcagggcaagcgcgaagggctgggcgtggagcgcaagagccgctggacgtaccgcggcgagtggctgggcgggctgaaggggcgcagcggcgtgtgggaaagcgtgtccggcctgcgctacgccgggctctggaaggacggtttccaggacggctacggcactgagacctactccgacggaggcacctaccagggccagtggcaggccgggaagcgccacggctacggggtacgccagagtgtgccctaccatcaggcggcgctgctgcgctcgccccgccgcacctccctggattccggccacagcgaccccccgacgccacccccgcccctgcccttgccgggcgacgagggaggcagccccgcctcgggctcccggggcggcttcgtgctggccgggcccggggacgccgacggcgcgtcgtcccgaaagcgcactccggcggccggcggattctttcgccgttcgctgctgctcagcgggctccgagcgggcggacgtcgcagctccctgggcagcaagcgaggctccctgcgcagcgaggtgagcagcgaggtgggcagcaccggaccgcccggctcggaggccagcgggcccccggccgcagcgccgcccgccctcatcgagggctcggccacagaggtgtacgcgggcgagtggcgcgcagatcggcgcagcggcttcggcgtcagccagcgctccaacgggctgcgctacgagggcgagtggctgggcaaccggcggcacggctacgggcgcaccacccgccccgacggctcccgcgaggagggcaagtacaagcgcaaccggctggtgcacggcgggcgcgtccgcagtctcctgcctctggcccttcggcggggcaaggttaaggagaaggtggacagggctgtcgagggcgcccgtcgagccgtgagtgctgcccgtcagcgccaggagatcgccgctgccagggcagcagacgccctcctaaaggcagtggcagccagcagtgtcgctgagaaggccgtggaggcagctcgaatggccaaactgatagcccaggacctgcagcccatgctagaggccccaggccgcagacccaggcaggactcagaaggttccgacacggagcccctggatgaggacagccctggggtatatgagaacggactgaccccctcagagggatcccctgaactgcccagcagtcctgcctcctcccgccaaccctggcgaccccctgcctgccggagcccactgcctcctggaggggaccagggtcccttctccagccccaaagcttggcctgaggagtgggggggggcaggcgcacaggcagaggaactagctggctatgaggctgaggatgaggctgggatgcaagggccagggcccagagacggttccccactcctcggaggctgcagcgacagttcaggaagtcttcgagaggaggagggggaggatgaagagcccctgcccccgctgagggccccagcaggcacggagcctgagcccatcgccatgctggtcctgaggggctcgtcctcgaggggtcctgatgctgggtgcctgacagaagagctcggggagcccgctgcaaccgagaggcctgcccagccgggagctgccaaccccctggtggtgggagccgtggccctcctggacctcagcctggcattcctgttctcccagctcctcacctgaggctacttcctggcctggttctggctttggttgcgtgcctcttcacccctttgacctgccttttttctcttctcctcttcctggctgtgttttctcctatctttctttctcttcttcctttcttttctgtgctcctttgtttttttctctcgctttttctttccctgtcttctttcagattatctcatttcttctggatctgtctctgtattcctcactcccttccccatcccaaccccttctttctctagattgtttacatatgaagggcttttctctctcagagttgctgtcttctctgagacacacaaatctaagtcagaccattgctccacgccctcccaccttttctttagacctcaacttcgctgcgggtgggggtttggtgtcctaaggagactcctggaagctgaatggagaggaggaagaaaatgaagaaggagtgattgaatgtcgggcaaggcactggctgagctgctgtggctccctagcctaaggggcctgctgtccctctgaggcctagtgaaaaagctgcaggaggtgcatcctccacctctaatcttggaggctattatcttacctccaagcactgagctgggttactgcccaattccatccttccctgaaggagagaagggaagtgaaaagtagagtaactccccagcatttccctctttttctcctcatcggccagcccctcctccagccccctctggtggcatgccatgccaagagcaacgtgtaaaggaacagagaatatccaatgcagtcaagtccaccctgcccagactttgccactgacttctcccacccttctgtctcccccataatagtttatttggttggtctggactcacttgtggcctttgattaaattcctaaggggcctgaagaagacatttctactgcagagggttagaggcacttgagcaaggcccccacatcccaactctgggagttgtggtgggaggaggcacttctgggggataggaccagacaagataacaggagctcacatggaagcagaagctgtgacaagtttagtagtcccaaaatgggttatatcccttccccctttacatcagaatcttgtgaaatgggaaaacaacagaaggaggggatcaaagatagctgatctcacatgcttcccaggcagggcagaggtgggagtcaaacccgggtgacaggtgggtggagagccctgtttgaggttgtggctgatccctctctggtattagtttttcccctgggagcaggaagccctaggaagaggggactgcagggtccccaggggatctttcctccctcccctgcatgaggcagaggcaagctgcctgccaaccccctccctcaaggaatggccttgcccaggaatgcccaccacacataccctcttctttttttctagtcaaactcttgtttattccttggcttgcctccctccttcctcccctctcaacctttacttctgatttctatttcatggaatttgggattgaagttaaactacaacagtgccgccaacaccaagtcttgcagg

SEQ ID NO: 224185 - DNA, 1890 bp, Artificial Sequence
  derived and/or modified sequence
atgcacgtgcccggcggcaagttcgacttcgacgacggcggctgctacgtgggtggatgggaggccggccgcgcgcatgggtacggagtgtgcacaggccccggagctcagggggaatatagtggctgctgggctcacgggtttgaatccttgggagtttttaccggccctggtggacattcatatcagggccattggcaacaggggaaaagggagggtctgggagttgaacgcaagagtcgttggacttataggggggaatggctcggcggcctgaaggggagaagcggcgtttgggaatcagtctcgggtctccgttatgctggcctgtggaaggacgggtttcaggacggctatgggaccgagacctactcagacggcggtacataccagggccagtggcaggctggcaaaagacatggatatggcgttaggcagtctgttccttaccaccaggccgctctcctgcgttctcccagacggacttccctggatagcggtcactccgatccccctactccccctccgccactccccctaccaggcgatgaggggggcagtccagctagcggatcaaggggaggattcgtgctggcaggtcctggcgatgcagatggagcatccagccgcaaaagaacccccgccgccggcggcttcttccgccgcagccttctcctgtccgggctgcgggcaggcgggcgtcgctcctccctgggcagcaagcggggctcactgagatcggaggtgagttccgaagtgggttcgactggaccgccaggctcggaagcctctggacctcccgctgccgccccccccgccttaatagagggctccgctacggaggtgtatgcaggggaatggagggccgatcggagaagcggctttggagtgagccagcggagtaacgggctgcgatacgagggggaatggttaggcaaccgaaggcacgggtatgggagaaccaccaggcccgacgggtccagggaggaggggaagtacaaaaggaatcgtctcgttcacggaggccgagtcagaagcttgctccccttagccctgcgcaggggcaaggtgaaggagaaagttgatcgggctgtggagggcgcccgcagggccgtgtctgctgctaggcagcggcaagagatcgcagcagcgagggccgctgacgccttgctcaaggctgtcgccgcctcctctgtcgctgagaaagccgtagaggcagctcgaatggcgaaactcattgctcaggacttacaaccgatgctcgaagcacctggcaggagaccgagacaggactctgagggatctgacaccgagccgttagatgaagactctcccggcgtttatgaaaacggcttgacaccttctgaaggaagcccagaactcccatccagccctgctagctccaggcagccttggcgcccaccagcatgtaggagcccgttaccccccggcggagaccaggggccgttttcatcccctaaggcttggccagaggagtggggtggagccggggctcaggccgaggaactcgccggttacgaagccgaggatgaagctggtatgcagggccctggtccaagagacgggtccccgctgctagggggctgttccgacagctccggctcactccgagaggaggagggcgaagatgaagagcccctcccgcccctccgcgcccccgccggtaccgagcctgaacctatcgccatgctggtcctgaggggctccagttcaaggggtcctgacgctgggtgcctgacagaggaacttggcgagccagccgctactgagagacccgcccagccgggagccgcaaatcccttggtagtgggggctgttgctcttctggacctctctctggcctttcttttcagtcagttgctcacctag

SEQ ID NO: 224186 - DNA, 1890 bp, Artificial Sequence
  derived and/or modified sequence
atgcacgtgcctggaggcaaatttgactttgatgacgggggttgctacgtggggggttgggaagcgggacgggctcacgggtacggtgtgtgcactggccctggggctcagggcgagtactccggctgttgggctcatgggttcgagtccctcggggtgttcacggggccaggagggcacagctaccagggtcactggcagcaggggaagagagaggggctgggagtggagcgaaagagcaggtggacctacaggggcgagtggctcggcggtttgaagggtcgcagcggcgtgtgggagtcagtttcaggattacggtatgcaggtctatggaaagacggatttcaggacggctatgggacagagacctacagcgacggaggtacctatcagggccagtggcaagcagggaagcggcacgggtacggagtgaggcagagcgtgccctaccaccaagccgcactgctcaggagcccacggcgtaccagtctagactcaggtcacagcgaccctccgactccaccccctccgctgcctctcccgggtgacgagggcggatcacctgcatctggatcgcgagggggatttgtactggccggacctggcgatgctgacggggcatcatctaggaagcgtacacctgccgcaggcggatttttccggagatccctgctcttgagtggactgcgcgctggtggccgaagatcatcactcggcagtaaaagaggtagcctgagaagcgaagtgagctccgaagtcggctccacaggacccccagggtctgaggcgtcaggtccgccagcggctgctcctccagcgctgatcgaggggagcgcgaccgaggtttatgctggtgaatggcgcgcagacagacgcagcggcttcggcgtctctcagcgctcaaatggtctgagatatgagggtgaatggctagggaataggaggcacggctacggccgtacaacccggccagatggctcacgcgaggagggcaagtacaagcgtaacaggctcgttcacggcggaagggttagaagcctactccctcttgcgcttcgcagaggcaaagtgaaggagaaagttgatcgggctgtggaaggggctcgacgggctgtgagcgcagcacggcagagacaggaaattgcagctgcgagggcagccgacgccttgctgaaggccgtcgcagccagctcagtcgcagagaaggcagtggaggcagcacgcatggccaagcttattgcccaagatttgcagcctatgttggaagcgcctggccgaaggccacgccaagactcagaggggtcagacacagaacccttagacgaggattccccaggcgtttacgaaaatggccttactccaagcgaagggtctccggagttaccctcctcacccgcttcctccagacagccttggagacctccggcttgcagaagtcccctgcctcccggaggggatcagggcccattctcttcccctaaagcatggcctgaagaatgggggggtgccggagctcaagccgaagagctggcgggttacgaggcggaggacgaggccggaatgcagggcccaggtccgagagatggatcccctttgctgggaggctgctctgattcctcaggatccttacgcgaggaggagggcgaagatgaggagccacttccacctttacgagcacccgcaggtaccgagcctgagccgattgcaatgttagtccttcgcggttcgtcttcccgcggtccagatgccggatgcttgaccgaggaactgggggagcctgcggctactgaacgacccgcacaacccggtgcagctaatccacttgtggtgggagccgtagccctgctcgacctgtcactggctttcctattctcacagctgctgacatag

SEQ ID NO: 224187 - protein, 368 aa, Artificial Sequence
  derived and/or modified sequence
MQKWFSAFDDAIIQRQWRANPSRGGGGVSFTKEVDTNVATGAPPRRQRVPGRACPWREPIRGRRGARPGGGDAGGTPGETVRHCSAPEDPIFRFSSLHSYPFPGTIKSRDMSWKRHHLIPETFGVKRRRKRGPVESDPLRGEPGSARAAVSELMQLFPRGLFEDALPPIVLRSQVYSLVPDRTVADRQLKELQEQGEIRIVQLGFDLDAHGIIFTEDYRTRVCDCVLKACDGRPYAGAVQKFLASVLPACGDLSFQQDQMTQTFGFRDSEITHLVNAGVLTVRDAGSWWLAVPGAGRFIKYFVKGRQAVLSMVRKAKYRELLLSELLGRRAPVVVRLGLTYHVHDLIGAQLVDCISTTSGTLLRLPET

SEQ ID NO: 224188 - protein, 368 aa, Artificial Sequence [sequence omitted]

SEQ ID NO: 224189 - DNA, 1107 bp, Artificial Sequence
  derived and/or modified sequence
atgcagaagtggtttagtgcgtttgacgacgccatcattcaaagacagtggcgggcaaacccgtcccgaggaggagggggagtttcttttacgaaagaagtggacacgaatgtggcaactggtgcccccccacgccgtcagcgcgtgcctggcagagcctgcccatggagggagccaataaggggccggcggggggcccggcccggcggcggcgacgctgggggaacaccaggagagacagtcagacactgctccgctccggaggaccctatcttcagattcagcagcctccatagttatcccttcccaggcaccattaagagccgagatatgagttggaagcgtcatcaccttattcccgaaactttcggagtcaaaaggcgaaggaagaggggaccagtggaatccgaccctctgcgtggagagcccggaagtgctcgggctgctgtcagcgaattgatgcagctcttcccccggggactgttcgaggacgccctcccaccgatcgtcctgagatcacaggtctattcacttgtcccggacaggactgtggcggacagacaactgaaagaattgcaggaacagggggagatccggatagtgcagctcggctttgacctcgatgcccacggcataattttcaccgaggactatcgtactagggtttgtgactgtgttctgaaagcatgcgacgggcggccgtacgccggtgccgttcaaaaattcctggcatctgttctcccagcctgtggcgacctctcctttcagcaggatcaaatgacccagacttttggatttcgcgactccgagatcacacacctggtgaacgcaggagtgctcactgtacgggacgctggtagttggtggctcgcagtcccaggcgccgggaggttcataaaatactttgtcaagggcaggcaggctgtgctcagcatggtcagaaaagctaagtatagagaactcctgctttcagagcttctggggagacgtgccccggtcgtagttcgcctgggtctaacctaccacgtgcacgacctgattggggcccagttagtagactgcatctcgacaacaagcggtaccctcttgagactacctgagacgtag

SEQ ID NO: 224190 - DNA, 1107 bp, Artificial Sequence
  derived and/or modified sequence
atgcagaagtggttttcagccttcgatgacgccataattcagcggcagtggagggctaacccatcaagaggaggtggaggggtgagcttcacaaaagaggtggacacaaatgtggcaactggagcccccccccgccgccagcgagtaccaggacgggcttgtccatggcgggaacccatcagaggtcgaagaggcgcaagaccaggcgggggcgatgctggagggactcccggggagacggttaggcattgttctgccccagaggatcctatttttcgtttctcctctctgcatagctaccccttccccggaaccatcaaatccagagacatgagttggaaaagacaccacctgatccccgagaccttcggcgtgaaacggagaagaaaacggggtcccgtggagtctgacccactaagaggcgagccaggcagcgcgagagctgcagtgtcagaattgatgcagctttttccccgaggcctgtttgaggacgccctgcctcccatcgtgctgcgtagccaggtgtactcactagtgcctgacaggaccgtggctgaccggcagcttaaagagctgcaggaacaaggagagatacgtatagtgcagctcggcttcgaccttgacgctcacggcattatcttcactgaagattatcgaaccagggtgtgtgattgcgttctgaaggcctgtgatgggcggccatatgcaggagctgtgcagaaattcttagcttccgttctccctgcatgcggcgacctgagtttccagcaggaccagatgacacaaacgttcggcttccgtgacagtgagatcacccacttagtcaacgcgggagtgttgactgtgagagacgccggaagctggtggctcgcagttcccggagctggaaggtttattaagtactttgttaaggggcgccaggctgtcctcggtatggtacggaaggccaagtaccgcgagctcttattaagcgagctgttgggccgtcgagccccggtggttgttcgtcttggactgacataccacgtgcacgacttaataggagctcagctagtggactgtatttcaacaacgagcgggacattgttgagactgcctgagacatag

SEQ ID NO: 224191 - DNA, 1107 bp, Artificial Sequence
  derived and/or modified sequence
atgcagaaatggttctctgccttcgatgatgcgatcatccaaaggcaatggagagccaatccttcgcgaggcggtggcggcgttagctttaccaaggaagtggacacaaatgttgccaccggcgccccaccgcgcaggcagcgagttccgggacgggcttgcccttggagggaaccaatccgggggcgaaggggcgcccgcccaggcgggggagatgcgggaggaactccgggcgagacagtccgccactgcagcgccccggaagaccctatattcaggttcagcagcctgcacagctaccctttcccgggcaccataaaatcccgcgacatgtcatggaaaagacatcatctgattcccgagacttttggtgtcaagcggcgacggaagcgaggccccgttgagtccgaccctctgaggggggaaccaggaagcgctagggcagccgtgtccgagctcatgcagctgtttccgcgtggccttttcgaagatgcgttgcctcctattgttctgagaagtcaggtgtattccctcgtccccgacagaaccgtggcagacagacaacttaaggaactgcaggagcaaggcgagattcgcatcgtacagctgggatttgatttagacgcccacggcatcatctttactgaagattaccggacccgggtctgcgattgcgtcctcaaagcgtgcgacggcagaccctatgccggagccgtgcagaagttcctcgcctccgtgttgcctgcgtgcggcgatctttcctttcagcaggaccagatgacacagaccttcggcttcagagactctgagattacacatctggttaatgccggggtccttactgttcgtgacgccgggtcttggtggctagccgttccaggagccggacggttcattaagtatttcgtaaaagggcgtcaggcagtgctgtctatggtgcgcaaagccaagtatagagaattacttttgagcgagctcctgggccgcagggcccccgtggtggtgcgtcttgggctgacataccacgtgcatgacctcattggagctcagctagtcgactgtatctcaacaacttcagggactctcctgagactccctgaaacttag

SEQ ID NO: 224192 - DNA, 1107 bp, Artificial Sequence
  derived and/or modified sequence
atgcagaaatggttttcagcattcgacgatgccatcattcagcgtcaatggcgtgcaaatccctccagaggggggggcggcgtttcttttaccaaggaggtcgataccaacgttgcaaccggcgccccaccgcgccggcaaagggtcccggggcgggcatgtccgtggcgtgagcccattcgtggtcggcgtggggctagacccggcgggggcgacgccggcggaacacctggggagaccgtccgccactgcagcgccccggaggatccgattttcagattttcttcacttcactcttacccttttccaggaaccatcaagtcaagggacatgagttggaaacgccaccatctcatccccgaaactttcggggtgaaacggcgtaggaagagaggaccagtggaatccgacccactgagaggtgaacccggctctgcacgggctgcagtatctgaactcatgcagctgttccctcgggggctgtttgaggacgccctccctcctatcgtcttgaggagccaggtctactctctggtgccagaccgcactgttgctgacaggcagctgaaggagctgcaggaacagggcgagatacgtatagtccagctgggctttgaccttgacgcccacgggatcatctttactgaggactacagaacaagagtttgtgattgtgtcctcaaggcgtgtgacggccgcccttatgccggcgcagttcaaaagtttctagcctccgtcctgcccgcttgcggggatttatccttccaacaggatcagatgacacagacattcggattccgagatagcgaaataacgcatctcgtcaacgcgggcgtcttaactgtgcgagatgccggttcctggtggctggccgtcccaggtgctgggcgatttatcaagtacttcgtgaaaggacgacaagccgtgctgtctatggttcgcaaggctaagtatcgggagttgttactgtcagagttgttgggacgccgtgcccctgttgttgtgaggcttggcctgacgtatcacgtccacgatctgataggcgcgcagcttgtggactgcatctccactactagcgggactctgctacgcctccccgaaacatag

SEQ ID NO: 224193 - DNA, 1107 bp, Artificial Sequence
  derived and/or modified sequence
atgcagaagtggttttctgccttcgacgatgctattatccagaggcagtggcgtgccaacccgagtagaggcggtggaggggtctctttcacaaaggaggtcgacactaatgtggccaccggggcacctccccgtcgacagcgcgtgcccggcagggcatgcccctggagggaacctatcaggggcaggcgcggggcccgcccgggagggggcgatgctggcggcacacccggtgagactgtgcgccattgtagcgcaccagaagatccaatctttcgattttcttcactgcactcatacccatttccagggacaattaaatctagagacatgtcatggaagcgtcaccaccttatcccagaaaccttcggtgtcaaaaggcgaagaaagcgaggccctgtcgaatccgacccactcaggggggagcccgggtccgccagggcagccgtttccgagctgatgcagctctttccgcgcggcctttttgaagatgccctccctccaattgtgctgcgatcgcaggtatattctctcgtgcctgatcgcacagttgcagaccgccagctgaaggagctccaggagcagggcgaaatcagaatcgttcagctaggctttgatctggatgcacatgggatcatcttcacagaagattaccggacccgggtctgtgattgtgtccttaaggcttgtgatggtcgcccttatgcaggcgcagtacaaaagtttctggctagtgttctacccgcctgcggggacctgagttttcaacaggaccaaatgactcagacctttggtttccgcgactcggaaattacccacctggtcaatgccggggtgcttactgtccgcgacgccggctcttggtggctcgcagttcctggtgccgggaggtttattaagtacttcgtgaagggccggcaggccgttctgtccatggtgcgcaaggcaaagtaccgcgaattgctgctgtctgaactgttgggccggcgagctccagtcgttgtgcggctaggtttaacataccatgtgcatgatctcataggcgcccagcttgtggattgcattagcacaactagcgggaccctcctgcgactgcccgaaacatag

SEQ ID NO: 224194 - DNA, 1107 bp, Artificial Sequence
  derived and/or modified sequence
atgcagaagtggttcagcgctttcgacgatgcaattatacagcggcagtggcgcgctaatcccagtagagggggtggaggagtgtcctttaccaaggaggtggacactaacgttgcaactggcgcaccaccacgtcgtcaaagagtgcccgggagggcctgcccatggagagagccaattcgtgggcggaggggggccagacccggcggcggcgatgctggcggcacaccaggtgaaaccgtgaggcactgctctgcgcccgaagaccctatctttcggttctcatcgctgcacagttatccctttccagggaccatcaaatcgagagacatgagctggaaacgccatcacctcatccccgagacatttggtgtgaaacgccggagaaagcgcggacctgtggaatcagatccattacggggagagccaggttctgcccgggctgctgtcagcgagctaatgcagcttttccctagaggcttgttcgaggatgctctgccgccaatagtgctgagatcacaggtttacagtttggtccccgatcgcaccgtcgcggatagacagctgaaagaattgcaagaacagggagaaattagaattgtgcaattgggcttcgatctggacgcacacgggatcatcttcaccgaggattatagaacccgagtgtgcgattgtgtgctcaaagcatgcgatggcaggccatatgccggcgctgttcagaaatttctcgcaagtgtgctcccagcttgtggggacctgtctttccagcaggaccagatgacccagacctttggattccgcgatagcgaaatcacccatctggtcaatgcaggagtgctcacggttagggatgctggatcctggtggctcgcagtaccaggggccgggcgcttcataaagtactttgttaaaggccgccaggcggttctctccatggtgcgcaaggccaaatatagagaactgctgctgagcgagctcctgggacggcgcgctcccgtggtagtcaggctgggactgacttatcacgttcatgacctcatcggggcacagctggtcgactgtattagcacgacatctggcaccctgctgagactaccagagacatag

SEQ ID NO: 224195 - DNA, 1107 bp, Artificial Sequence
  derived and/or modified sequence
atgcagaagtggttcagcgcctttgatgatgccatcatccagaggcagtggagggccaaccccagccggggcggcggcggcgtgtccttcaccaaggaggtggacaccaacgtggccaccggggccccaccccggcggcagagggtgcccggccgggcctgcccctggagggagcccatccggggcagaagaggagcccggcctggaggaggagatgctgggggcaccccaggagagaccgtgcgccactgcagcgcccctgaggaccccatcttccgcttcagcagcctgcacagctaccccttccctggcaccatcaagagccgggacatgtcctggaagaggcaccacctgatccctgagacctttggagtgaagagaagaaggaagaggggccctgtggagagtgaccccctgcggggggagcccggcagcgcccgggctgctgtgtctgagctgatgcagctgttcccccggggcctgtttgaagatgccctgccccccatcgtgctgcggagccaggtgtacagcctggtgcctgacagaacagtggccgaccggcagctgaaggagctgcaggagcagggcgagatccgcatcgtgcagctgggctttgacctggatgcccacggcatcatcttcacagaggactaccgcaccagggtgtgtgactgtgtgctgaaggcctgtgatggccggccctatgctggagctgtgcagaagttcctggcctctgtgctgcctgcctgtggggacctgtccttccagcaggaccagatgacccagaccttcggcttccgggacagcgagatcacccacctggtgaatgccggcgtgctgactgtgagagatgctggctcctggtggctggccgtgcctggagctggccgcttcatcaagtactttgtgaagggccggcaggccgtgctgtccatggtgaggaaggccaagtaccgggagctgctgctgtctgagctgctgggcagaagagcccctgtggtggtgcggctgggcctgacctaccacgtgcatgacctgattggagcccagctggtggactgcatcagcaccaccagcggcaccctgctgcggctgcctgagacctag

SEQ ID NO: 224196 - DNA, 1107 bp, Artificial Sequence
  derived and/or modified sequence
atgcagaagtggttcagcgcctttgatgatgccatcatccagaggcagtggagggccaaccccagccggggcggcggcggcgtgtccttcaccaaggaggtggacaccaacgtggccaccggggccccaccccggcggcagagggtgcccggccgggcctgcccctggagggagcccatccggggcagaagaggagcccggcctggaggaggagatgctgggggcaccccaggagagaccgtgcgccactgcagcgcccctgaggaccccatcttccgcttcagcagcctgcacagctaccccttccctggcaccatcaagagccgggacatgtcctggaagaggcaccacctgatccctgagacctttggagtgaagagaagaaggaagaggggccctgtggagagtgaccccctgcggggggagcccggcagcgcccgggctgctgtgtctgagctgatgcagctgttcccccggggcctgtttgaagatgccctgccccccatcgtgctgcggagccaggtgtacagcctggtgcctgacagaacagtggccgaccggcagctgaaggagctgcaggagcagggcgagatccgcatcgtgcagctgggctttgacctggatgcccacggcatcatcttcacagaggactaccgcaccagggtgtgtgactgtgtgctgaaggcctgtgatggccggccctatgctggagctgtgcagaagttcctggcctctgtgctgcctgcctgtggggacctgtccttccagcaggaccagatgacccagaccttcggcttccgggacagcgagatcacccacctggtgaatgccggcgtgctgactgtgagagatgctggctcctggtggctggccgtgcctggagctggccgcttcatcaagtactttgtgaagggccggcaggccgtgctgggcatggtgaggaaggccaagtaccgggagctgctgctgtctgagctgctgggcagaagagcccctgtggtggtgcggctgggcctgacctaccacgtgcatgacctgattggagcccagctggtggactgcatcagcaccaccagcggcaccctgctgcggctgcctgagacctag

SEQ ID NO: 224197 - DNA, 1107 bp, Artificial Sequence
  derived and/or modified sequence
atgcagaagtggttcagcgccttcgacgacgccatcatccagcggcagtggcgcgctaacccatctcgcggggggggaggggtgtctttcaccaaagaggtcgacaccaatgtcgcaactggcgcccctccccggagacagagggtcccaggccgggcctgtccatggcgagagccaatccgtggccgccgaggtgcccgccctggcggcggggatgcgggcgggaccccaggcgaaacagtgagacattgctccgctcccgaggacccaatctttagattttcaagccttcactcctatcctttccctggcacaattaagagccgagatatgtcctggaagcgccatcacctgattcctgagacgttcggggtcaagcggagaaggaagagaggccccgttgagagcgaccccctccggggtgagcccggctcagcccgcgcggcggtgagtgagttgatgcagctcttcccaaggggtctcttcgaggacgcccttcctcccattgtgctacggagtcaggtgtattcacttgttccggaccggactgttgctgatcgtcagctcaaagagttacaggagcaaggagagatccgaatcgttcagctgggctttgacctggacgcccatggtatcatattcactgaagactaccgcacaagagtttgcgactgtgtgctgaaagcttgcgatggtcggccatatgcaggggctgtccagaaattcctggcatccgtgctaccagcttgcggtgacttgtcgtttcagcaagaccaaatgactcaaacctttggcttcagggattctgagattacccatctggtgaatgcaggcgtcctgacagtgcgtgatgccggctcatggtggctcgctgtgccaggggcaggaaggtttatcaaatatttcgtgaaggggaggcaagcagtgctgagcatggtcaggaaggccaaataccgtgagctacttttgagcgagttgcttggcagaagagcgccggtcgttgtgagacttgggctgacataccatgtgcatgatctgataggcgcccagctggtggattgtatttcaacaacgtcaggcaccttactcagattgccagagacctag

SEQ ID NO: 224198 - DNA, 1107 bp, Artificial Sequence
  derived and/or modified sequence
atgcagaagtggttcagcgccttcgacgacgccatcatccagcggcagtggcgcgccaaccctagtcgcggcggaggcggagttagtttcacaaaggaggttgacaccaacgtcgcaactggggccccacccagacgacagagggtccctgggcgcgcttgtccctggagggagccaataagaggcaggcggggcgctcgaccaggcgggggcgatgccgggggaacccccggagagaccgtgaggcactgcagcgctcccgaggaccctatcttccgattcagctctctgcacagttacccatttcccgggaccattaagtcacgcgatatgtcttggaaacggcaccatttaatacctgagactttcggcgttaagcggcgacgcaagaggggccccgtcgaatccgatcccctgaggggtgagccagggtccgcccgcgccgccgtgtccgaattgatgcagctgtttcctaggggcttgttcgaggatgcactcccccccatcgtgctgcggtctcaggtgtacagtttggtgcctgatcggaccgtggcagaccgacaacttaaagagctccaagaacagggcgagatcagaatagttcagctgggattcgaccttgatgcccatggcatcatttttacagaggattacaggacccgggtctgcgactgtgtgcttaaggcctgtgacgggagaccgtatgctggcgcggtccagaagttcttagcatcagtactccctgcttgcggagacctttcattccagcaggatcagatgactcaaacgtttgggtttcgggactctgagataacccacctggttaacgcgggagtacttacggtgagggacgccggctcgtggtggctcgccgtacctggcgccgggcggttcataaaatacttcgttaaagggcgacaagcggtgctaggcatggttcggaaagcaaagtacagggagcttcttctgagcgagttgcttggcagacgtgccccggtcgttgtaaggctgggactcacgtaccacgtgcatgatttgatcggtgcccagctggtagattgcatctccactacgagtgggacactgctgcgcctgcctgagacctag

SEQ ID NO: 224199 - DNA, 1107 bp, Artificial Sequence
  derived and/or modified sequence
atgcagaagtggttcagcgccttcgacgacgccatcatccagcggcagtggcgcgccaaccctagccggggcggcggcggggtgtcctttactaaagaggttgacaccaatgttgccactggggccccacctcgtaggcagcgggtgcctgggagagcttgcccgtggagggaacccatcagagggcggagaggcgctcgtcccggaggcggcgatgcaggtggaacccccggcgaaacagtgaggcattgttcagcacctgaggaccccatttttcggttcagcagtctgcattcatacccttttcccggcaccatcaaaagccgagatatgtcctggaaaaggcaccacttgatccccgagacgttcggcgttaaacgccgtcggaagcgcggtccggtggaaagcgatcctttgcgaggcgaaccaggcagtgctagagccgctgtctccgaactcatgcagttattcccgagggggctgttcgaagatgccctgcctcctattgtgttacgtagtcaggtgtatagtctcgtccccgaccgcactgtggctgaccgccaactcaaagagttgcaggagcagggagagatccggattgtccaactggggtttgatttggatgcgcatggcattatctttacggaggattacagaaccagggtctgcgattgcgtactaaaagcctgcgacggaaggccctatgctggcgcggtgcagaagttcctggcttctgtgttacccgcctgtggcgacctgtcatttcaacaggaccagatgactcaaacctttggatttcgagattccgagattacacatttggttaacgcgggagtgttaacagtgagagatgcaggttcttggtggctggcagtccccggcgctggacggtttattaagtattttgtaaaggggagacaagctgtcctctcaatggtgcgaaaagccaaatatagggaattgctcctttctgagctgctgggacgaagggcccctgtagtggtacgactgggactcacctaccacgttcacgatttaattggcgctcagttagtggactgcatctctacaacaagcgggaccttgctcagactgcccgaaacttag

SEQ ID NO: 224200 - DNA, 1107 bp, Artificial Sequence
  derived and/or modified sequence
atgcagaagtggttcagcgccttcgacgacgccatcatccagcggcagtggcgcgcgaatccatctcgtggcgggggcggtgtgtcttttacaaaagaagtggacactaatgtggccacaggtgcccccccccgacgacaacgagtgcctggcagagcctgcccctggagggagcctataagggggcgccggggcgcacggcccgggggcggagatgcgggcggtacaccgggcgagacggtgaggcactgcagtgccccagaagatccgatctttagattcagttccttgcactcttatccttttcccggcacgattaagagccgcgatatgagctggaagcggcatcatttgatcccagaaaccttcggcgtcaagcggcgccggaaacgcggtcctgtagaatctgatcctctgaggggcgagccaggttcagctcgggcagcagtttcagagctgatgcagttgttcccaagaggcctgttcgaggatgccctgccccctatcgtgttgcgttcacaggtgtatagcctggtgccagaccgcacagttgcagataggcagttaaaagaattgcaggagcaaggggaaattcgcattgttcagctgggatttgatctcgatgcgcatggcatcatattcaccgaggattaccgaacacgagtatgcgactgtgtgctgaaggcgtgtgatggtcgcccctatgccggagccgtccaaaagttccttgcatcagtcctgcccgcatgcggtgatctgtctttccagcaggatcagatgacccagactttcgggtttcgtgacagtgaaattacccacctggtcaatgcaggggtgctgaccgtaagagacgcggggtcctggtggttagctgtgccaggggcgggccggttcattaaatattttgtgaagggtagacaggctgtgttgagtatggtgcgcaaggcaaaataccgggagctcttactttctgagctgctggggagacgggcgcctgtcgtggtgcggctcggtttgacctaccacgtgcacgatctgattggtgcgcagctggttgactgtattagcaccacttctggaacccttctccgccttcctgaaacttag

SEQ ID NO: 224201 - DNA, 1107 bp, Artificial Sequence
  derived and/or modified sequence
atgcagaagtggttcagcgccttcgacgacgccatcatccagcggcagtggcgcgcgaacccatctcgtgggggcggaggcgtgtcctttacaaaagaagtggataccaacgtggccactggggctccgccacgccgccagcgggtgcccgggagagcctgtccatggagggagccaattcgaggccgccggggggcgcgacctggcggaggggatgccggcggcactcctggtgagacagttaggcattgctctgcgcctgaagacccaatttttcgcttttcctcattgcatagctatcctttcccagggaccattaaaagccgggatatgtcatggaagcggcaccaccttatccccgaaaccttcggggtcaaacgtcgccggaagcgggggcccgttgaaagtgatcccttgagaggcgagccgggatcagccagggctgccgttagcgagcttatgcagctgtttccacgcgggcttttcgaagatgccctcccacccatcgtgctgcgctcgcaagtctactctttggtacccgatcggacagtggcggatcgccagttaaaggagctgcaggaacagggcgaaatccgtatcgtgcaactcggctttgacctcgatgcccatggaataatttttactgaagactacaggacccgagtctgcgactgcgtgcttaaggcttgcgacggtcgaccctacgccggcgccgttcagaaattccttgcatcggtgttgccagcctgcggtgatctgagcttccagcaggatcagatgactcagacgtttgggttcagggattctgaaattacccatctggtgaacgctggcgtccttacagtccgcgacgccggaagctggtggctcgccgtgccaggagccgggcgatttatcaagtacttcgtaaaggggagacaggctgtcctgtccatggtcaggaaagcaaaataccgcgaacttcttctgagtgagctgcttggccgtcgggcacctgtggtggtgagactgggccttacatatcacgtgcatgacctgatcggagcccagctggtagactgtatcagcactacgagcggaaccttgctgaggttacccgaaacctag

SEQ ID NO: 224202 - DNA, 1107 bp, Artificial Sequence
  derived and/or modified sequence
atgcagaagtggttcagcgccttcgacgacgccatcatccagcggcagtggcgcgccaacccctctcggggcggtggcggggttagtttcacaaaggaggtcgatacaaatgtagcaaccggcgcaccaccacggagacagcgagtgcctgggcgtgcatgtccttggcgcgagccaatacggggtagacggggcgcccggcccggtggcggcgacgctggagggacgccaggtgagacagtgcgccactgttcagcacccgaggaccctatctttaggttcagctctctacactcctatccattcccaggcacaattaagtctcgcgacatgtcgtggaagaggcatcatctcatccctgaaacttttggcgtgaagaggagaaggaaaagaggacctgtggagtccgatccactgaggggagagcccgggtccgctagagctgccgtctccgaactgatgcagctgtttccacgggggctgttcgaggacgcgttgcctcccatcgtcctgagaagccaggtatattcgctggtccctgatcggactgttgctgatcggcagttgaaggaacttcaagaacagggagagatccgaatcgtccagctcggctttgacctagatgctcatggcatcatattcacagaggactaccgcacccgcgtgtgtgattgcgtcctgaaggcctgcgacggccgcccctatgcaggcgcagtccaaaaatttctggccagcgtgcttcccgcatgcggagatctcagcttccagcaggatcagatgactcaaacgttcggcttccgagactctgaaataacacacctggtgaatgcaggtgtcctgaccgtgagggacgcaggatcatggtggctggctgttcccggggcaggccgcttcattaagtatttcgtgaaaggacgccaggccgtcttgtcaatggtgagaaaagcaaaatatcgagagctgttactgagcgaactactgggccgacgcgcaccggtagtcgtgcggttgggtctgacctaccatgtgcatgaccttatcggtgctcaacttgtggattgtatatctaccaccagcggcacgctcctgaggctgccggagacctag

SEQ ID NO: 224203 - DNA, 1107 bp, Artificial Sequence
  derived and/or modified sequence
atgcagaagtggttcagcgctttcgacgatgcaataatacagcggcaatggagggctaatccttcaagaggcggaggaggggtgtcatttactaaagaagtggacacaaacgtagccacgggtgcgccaccacgcaggcaaagagtgcctggccgagcctgtccctggcgggaaccaatacggggacggagaggcgctagacccggagggggtgacgcaggagggaccccaggcgagacagtccgccactgtagtgcaccagaggaccctatttttcgcttcagctcactgcacagctatccctttcccggaacgattaagagtcgagatatgtcctggaaacgacatcaccttatccctgaaacatttggagtcaagcgccgaagaaagcgcggtcccgttgagtcagatcctttacgcggagagcctggcagtgctcgcgcagcggtgtccgaactgatgcagctgttcccacgcggtctctttgaagatgcactcccaccgattgtgcttcggtctcaggtgtatagcctcgtcccagaccgcactgtggccgataggcagctcaaggagctccaggagcaaggggagattcgtatcgtacagcttgggtttgacttggacgcacacgggattattttcacagaagattacaggacaagagtgtgcgattgtgtgctcaaagcttgcgatgggaggccttatgccggagccgttcaaaagtttcttgcgagtgtgcttcctgcctgcggtgatctttcatttcagcaggaccagatgacgcagacgtttggcttccgggactctgagataactcaccttgttaacgccggagtgctgactgtgcgggacgccggtagctggtggctggccgtgccaggtgccggtagatttataaaatactttgtaaaaggaagacaggctgtgctgtcgatggtgcgaaaggcgaaatacagagagttgttgctcagcgagctgctaggcagaagggcccctgtcgtggttcggctggggctgacctatcacgtgcacgatctgattggagctcagcttgtggattgcatctcaactacgagcggcacactgttgcggctccccgaaacctag

SEQ ID NO: 224204 - DNA, 1107 bp, Artificial Sequence
  derived and/or modified sequence
atgcagaagtggttttccgccttcgatgacgctattatccaacgacagtggcgcgctaacccctcacggggagggggaggagtcagttttaccaaagaggtagacaccaacgttgcaactggagccccacccaggcggcagcgagtgcccggaagggcctgtccatggagggagcccatcaggggacggaggggggctaggcctgggggaggagatgcaggcggaacccccggagagacagtaagacactgctcagcccctgaggacccaatctttcgattctcatctttacattcttacccctttccaggcactatcaagagcagagatatgtcctggaaaagacaccacttgatacctgagacctttggcgtgaagaggcggagaaagaggggccctgttgagtctgatcctctgcggggagaaccaggcagcgctagagcagctgtatctgagctgatgcagttatttcccaggggacttttcgaagacgctctcccaccaatcgttctgcgaagtcaggtgtatagtctggtcccagaccgcacagtcgcagacaggcagctgaaagagttgcaagagcaaggggagataagaattgttcagttaggattcgatctagacgctcacgggattatttttacagaagattacaggacccgcgtgtgtgattgtgtgctgaaggcttgtgacggtcggccttatgccggagcggtccaaaagtttctcgcaagcgtcctgcctgcatgcggggatctgtctttccagcaggaccagatgacgcagaccttcggattccgtgattcagagatcacacatctggttaacgccggtgtcctgaccgtcagggatgccggaagttggtggttggcagtcccaggagcaggtcggtttattaaatattttgtgaagggtcgccaggcggtcttgggaatggttaggaaggccaaatatagagagctcctgcttagtgagctcctcggacggcgagcaccagtagtggtgaggctgggtctgacataccacgtccacgacctcattggcgctcagttagttgattgtattagtaccacatcaggcacacttctgagactgcctgagacttag

SEQ ID NO: 224205 - DNA, 1107 bp, Artificial Sequence
  derived and/or modified sequence
atgcagaagtggttctctgcatttgatgatgccattatccagcggcagtggcgggctaacccatctcggggaggtggtggcgtatcttttaccaaggaggtggacaccaacgtcgcgaccggcgctcctccaagaaggcagcgcgtcccagggagggcatgcccctggcgagagccaataaggggacgcagaggtgctagacctggaggcggtgatgcaggaggtactcccggtgagacagtgcgtcactgttcagccccagaagaccctatctttcgcttctctagtctacattcgtacccatttccgggtaccataaagagccgtgacatgtcctggaagaggcaccatcttatccctgaaaccttcggggtaaagcgaaggcggaaacgtggccctgtggaaagtgatcctcttcgaggcgagccgggtagcgcaagggcagccgtgtcggagctgatgcaactgttccccagaggactgttcgaggacgctttaccacctatcgtattgcgcagtcaggtttattccctggtgcccgatcgtacggtggcggatcgtcagctcaaggagcttcaagagcagggtgagatcaggatcgtgcaactcgggtttgatctcgacgcccacgggatcatatttactgaagactacagaactcgcgtgtgcgattgtgtcctgaaagcatgtgatgggaggccatatgctggtgccgtgcagaaattcctggcgagcgtgttacctgcttgcggagatctaagctttcagcaggatcagatgactcagacattcggctttcgcgatagcgagataacacatctggtgaacgctggagtgctcacagtacgtgacgccggttcttggtggttggccgttcctggagccggaagatttataaaatacttcgtaaaaggccgacaggccgtcctctcaatggttagaaaggcaaagtaccgagaattactgctgtctgaactgctcggacgcagggcacccgtcgtcgtacgactggggttgacgtaccacgtacacgatctcatcggcgctcaattagtcgattgcatttccacaacaagtggtactctgctgcgactgcccgagacatag

SEQ ID NO: 224206 - DNA, 1107 bp, Artificial Sequence
  derived and/or modified sequence
atgcaaaagtggttttcagctttcgacgatgctattatacagcgacaatggagggctaatccaagcagaggtggaggcggagtgagcttcacaaaagaagttgatactaacgtggctacaggcgcaccccctcgtcgtcagcgggtccctgggagggcttgtccctggcgggagcctataagaggacgacgtggcgcacgccctggaggcggagatgccggaggcactcccggagagaccgtcagacactgcagcgcccctgaagaccccatttttcgttttagttccttacactcatatccttttcccggaacgattaaatcccgagatatgtcttggaaaaggcatcatctgatccccgagacctttggtgtaaaacgaagacgcaagcgtgggcctgttgagagtgatcccctaaggggcgaaccaggtagcgcccgagccgctgtttctgagctgatgcagctattccccagggggctattcgaggacgctttgccacccatagttctccgcagtcaggtctactccctcgtcccggatcggacagtggccgatcggcagcttaaagagcttcaggaacagggagagatccgcattgtgcagctgggatttgatttggacgcacacgggatcatatttacagaggactacagaacacgcgtgtgcgattgcgtcttgaaggcctgcgatggtcggccatatgccggagccgtgcaaaaatttctggcctcagtgctgccagcttgtggtgacctgtcatttcaacaggaccagatgacccaaacgttcggctttagggacagcgagatcactcatttggtaaacgccggagtcctaactgtcagagacgcaggttcatggtggctggcggtgcctggcgcagggagatttataaaatatttcgtaaagggtcgtcaggcagtcctgtcaatggtgcggaaggccaagtatagagagctcctgttgagcgagcttctcgggaggcgggcacctgtggttgttcggctgggcctgacctatcacgtccatgacctgattggggcacaactggtagattgtatcagcaccacctccggcacgttgctccgattaccagagacctag

SEQ ID NO: 224207 - DNA, 1107 bp, Artificial Sequence
  derived and/or modified sequence
atgcagaagtggttctcagcctttgacgacgccattatacagcgacagtggcgtgcaaacccttcgaggggtggagggggagtgtcttttaccaaggaggtcgacaccaatgttgcaacgggagcgccaccacggaggcaacgcgtgcccggaagagcttgtccatggagagagccaatcagagggaggaggggcgctcgccctggcggaggtgatgccggtggtacccccggagaaaccgttcgtcattgttccgcccctgaggatcctatcttcagattttcatccctgcatagctaccctttccccggaactatcaagagtcgggatatgagctggaagcgccatcatcttatccctgagactttcggggtgaagcgccgacggaagcggggacccgttgagagcgacccactgcgcggtgagcccggaagtgcccgagccgctgtgtctgaactcatgcagctgtttccgagaggactgttcgaggatgcactgccgccaatcgtgctcagaagccaggtttactctctcgtgccagatagaacagtagcagatcggcagttaaaggaactgcaggaacagggggagattaggatagttcagttgggatttgatctggatgcacatggtataatcttcaccgaggactatcggacccgggtgtgtgactgtgtgcttaaagcctgtgacggaagaccttacgctggagccgtgcagaagttcctcgcctccgtgcttcccgcatgtggcgatctgtcttttcaacaggaccagatgactcaaaccttcgggtttcgtgacagtgagattacccatctggttaatgcaggtgtgctcactgtgcgggatgccggatcgtggtggctcgctgtaccaggcgctggcagattcataaagtactttgttaagggaagacaggctgtcctgtccatggtccgcaaggctaagtatcgtgagttgttgttgtccgaactgctgggccgacgggcacctgtcgtggttcgtctgggcctcacctaccacgtgcacgatctgatcggcgctcagttagtcgactgcatcagtaccaccagcggaacattactgagactgccggagacatag

SEQ ID NO: 224208 - DNA, 1107 bp, Artificial Sequence
  derived and/or modified sequence
atgcaaaaatggttttccgccttcgacgatgctattattcagagacagtggagagccaacccttctagaggcggtggtggcgtaagttttaccaaggaagtggacaccaacgtcgcaactggcgctcctccccgacgacagcgagtaccgggacgagcttgtccctggcgtgagcctattcgaggtaggcgtggcgctaggcccggaggcggtgacgccggagggacacccggagagacggtgcgccactgcagcgcgccagaggatcccatctttcggtttagctccctacattcatacccgttcccgggaaccatcaaatctcgcgacatgagttggaagaggcaccatctcattccagagacattcggcgtgaagcgtcgccgaaaaagggggccagtggagtcggaccctttgcggggtgagcccggatcagccagagcggcagtgagtgaactcatgcagctcttccccaggggattatttgaggatgccttgcccccaattgttcttcggtctcaagtgtatagtttggtgccagacaggactgtggctgatagacagctcaaagagctccaagagcagggtgaaattaggatcgtgcagctagggttcgacctcgatgcccacggtattatttttactgaggattaccgtacgcgggtctgtgattgtgtgttgaaagcttgcgatggacgcccttacgcaggagccgtgcagaagttcctcgcgagcgtgctccccgcatgtggggacctgtcatttcagcaggatcagatgactcaaacctttgggtttcgcgactccgagattactcatcttgtgaacgccggtgttctgaccgtgagggacgccggatcgtggtggctggccgtgccaggcgctggtagattcataaaatactttgtgaagggaaggcaggcggttctgagcatggtcaggaaggccaaatatcgtgaactgctactttcagagctgctggggagacgtgcccctgttgtcgtgaggcttgggctcacctatcatgtgcacgatttgataggtgcacagctcgtggactgcatatcaacgacatccggaacactgctgagactgcctgagacttag

SEQ ID NO: 224209 - DNA, 1557 bp, Artificial Sequence
  derived and/or modified sequence
cttccacctccgcagagctatgacgtcatggcaggcacgccagaggccgaaggatgcaaaagtggttttctgctttcgatgatgcaatcattcagcgacagtggcgggcaaacccctcccggggcgggggaggtgtgagcttcacgaaggaggttgacaccaacgtggccaccggcgcccctccacgccgccaacgagtccccgggcgtgcgtgcccttggagggagccaatccgcggccggcgtggggcccggcctggcggaggtgatgctggagggacgcccggggagaccgtacgtcactgctctgcgccggaagaccctattttcaggttctcttccctccattcctaccccttccccggtaccataaaatcccgggatatgagctggaagaggcatcacctgatcccggagacctttggagttaagaggcggcggaagcgagggcctgtggagtcggatcctcttcggggtgagccagggtcggcgcgcgcggctgtctcagaactcatgcagctgttcccgcgaggcctgtttgaggacgcgctgccgcccatcgtgctgaggagccaggtgtacagccttgtgcctgacaggaccgtggccgaccggcagctgaaggagcttcaagagcagggggagatcagaatcgtccagctgggcttcgacttggatgcccatggaattatcttcactgaggactacaggaccagagtatgtgactgtgtcctcaaggcctgtgatggccgaccgtatgctggggcagtgcagaaatttctagcttcagtacttccagcctgtggggaccttagtttccagcaggaccaaatgacacagacctttggcttcagggactcagaaatcacgcatctggtgaatgctggagtcctcaccgtccgagatgctgggagctggtggctagctgtgcctggagctgggagattcatcaagtactttgttaaagggcgccaggctgtccttagcatggtccggaaggcaaagtaccgggaactgctcctatcagagctcctgggccggcgggcgcctgtcgtggtgcggcttggcctcacctaccatgtgcacgacctcattggggcccagctagtggactgcatctctaccacttcaggaaccctcctccgcctgccagagacatgaagattctgctcatcattgctcagctcctcagagtgggccgggaggggactagaagagctgcatgatggtggctgagacagggtcaccttgggaaggcttgggagccaggatgagtgtcgggctctcgtgtgtgcaaaaggtcagatgtgactgctgctgtttgcctggtttctgacccagtggtggggtttgagcaatgcttctctgcccttccatggaaagtggaaccagaaatggtgccaaggctgtggctgttccctttcgtgtaaaatggtgctgttattactctgtcttgaaataggaaggtgggatttctggggaggctggtgaaggagggcagggttcttttctctacgtgtcatgttaaaattgccaaataaagtacctctgcctgtga

SEQ ID NO: 224210 - DNA, 1557 bp, Artificial Sequence
  derived and/or modified sequence
cttccacctccgcagagctatgacgtcatggcaggcacgccagaggccgaaggatgcaaaagtggttttctgctttcgatgatgcaatcattcagcgacagtggcgggcaaacccctcccggggcgggggaggtgtgagcttcacgaaggaggttgacaccaacgtggccaccggcgcccctccacgccgccaacgagtccccgggcgtgcgtgcccttggagggagccaatccgcggccggcgtggggcccggcctggcggaggtgatgctggagggacgcccggggagaccgtacgtcactgctctgcgccggaagaccctattttcaggttctcttccctccattcctaccccttccccggtaccataaaatcccgggatatgagctggaagaggcatcacctgatcccggagacctttggagttaagaggcggcggaagcgagggcctgtggagtcggatcctcttcggggtgagccagggtcggcgcgcgcggctgtctcagaactcatgcagctgttcccgcgaggcctgtttgaggacgcgctgccgcccatcgtgctgaggagccaggtgtacagccttgtgcctgacaggaccgtggccgaccggcagctgaaggagcttcaagagcagggggagatcagaatcgtccagctgggcttcgacttggatgcccatggaattatcttcactgaggactacaggaccagagtatgtgactgtgtcctcaaggcctgtgatggccgaccgtatgctggggcagtgcagaaatttctagcttcagtacttccagcctgtggggaccttagtttccagcaggaccaaatgacacagacctttggcttcagggactcagaaatcacgcatctggtgaatgctggagtcctcaccgtccgagatgctgggagctggtggctagctgtgcctggagctgggagattcatcaagtactttgttaaagggcgccaggctgtccttggcatggtccggaaggcaaagtaccgggaactgctcctatcagagctcctgggccggcgggcgcctgtcgtggtgcggcttggcctcacctaccatgtgcacgacctcattggggcccagctagtggactgcatctctaccacttcaggaaccctcctccgcctgccagagacatgaagattctgctcatcattgctcagctcctcagagtgggccgggaggggactagaagagctgcatgatggtggctgagacagggtcaccttgggaaggcttgggagccaggatgagtgtcgggctctcgtgtgtgcaaaaggtcagatgtgactgctgctgtttgcctggtttctgacccagtggtggggtttgagcaatgcttctctgcccttccatggaaagtggaaccagaaatggtgccaaggctgtggctgttccctttcgtgtaaaatggtgctgttattactctgtcttgaaataggaaggtgggatttctggggaggctggtgaaggagggcagggttcttttctctacgtgtcatgttaaaattgccaaataaagtacctctgcctgtga

SEQ ID NO: 224211 - DNA, 1107 bp, Artificial Sequence
  derived and/or modified sequence
atgcagaagtggttcagcgccttcgacgacgccatcatccagagacagtggagagccaaccccagcagaggcggcggcggcgtgagcttcaccaaggaggtggacaccaacgtggccaccggcgccccccccagaagacagagagtgcccggcagagcctgcccctggagagagcccatcagaggcagaagaggcgccagacccggcggcggcgacgccggcggcacccccggcgagaccgtgagacactgcagcgcccccgaggaccccatcttcagattcagcagcctgcacagctaccccttccccggcaccatcaagagcagagacatgagctggaagagacaccacctgatccccgagaccttcggcgtgaagagaagaagaaagagaggccccgtggagagcgaccccctgagaggcgagcccggcagcgccagagccgccgtgagcgagctgatgcagctgttccccagaggcctgttcgaggacgccctgccccccatcgtgctgagaagccaggtgtacagcctggtgcccgacagaaccgtggccgacagacagctgaaggagctgcaggagcagggcgagatcagaatcgtgcagctgggcttcgacctggacgcccacggcatcatcttcaccgaggactacagaaccagagtgtgcgactgcgtgctgaaggcctgcgacggcagaccctacgccggcgccgtgcagaagttcctggccagcgtgctgcccgcctgcggcgacctgagcttccagcaggaccagatgacccagaccttcggcttcagagacagcgagatcacccacctggtgaacgccggcgtgctgaccgtgagagacgccggcagctggtggctggccgtgcccggcgccggcagattcatcaagtacttcgtgaagggcagacaggccgtgctgagcatggtgagaaaggccaagtacagagagctgctgctgagcgagctgctgggcagaagagcccccgtggtggtgagactgggcctgacctaccacgtgcacgacctgatcggcgcccagctggtggactgcatcagcaccaccagcggcaccctgctgagactgcccgagacctag

SEQ ID NO: 224212 - DNA, 1107 bp, Artificial Sequence
  derived and/or modified sequence
atgcagaagtggttcagcgccttcgacgacgccatcatccagagacagtggagagccaaccccagcagaggcggcggcggcgtgagcttcaccaaggaggtggacaccaacgtggccaccggcgccccccccagaagacagagagtgcccggcagagcctgcccctggagagagcccatcagaggcagaagaggcgccagacccggcggcggcgacgccggcggcacccccggcgagaccgtgagacactgcagcgcccccgaggaccccatcttcagattcagcagcctgcacagctaccccttccccggcaccatcaagagcagagacatgagctggaagagacaccacctgatccccgagaccttcggcgtgaagagaagaagaaagagaggccccgtggagagcgaccccctgagaggcgagcccggcagcgccagagccgccgtgagcgagctgatgcagctgttccccagaggcctgttcgaggacgccctgccccccatcgtgctgagaagccaggtgtacagcctggtgcccgacagaaccgtggccgacagacagctgaaggagctgcaggagcagggcgagatcagaatcgtgcagctgggcttcgacctggacgcccacggcatcatcttcaccgaggactacagaaccagagtgtgcgactgcgtgctgaaggcctgcgacggcagaccctacgccggcgccgtgcagaagttcctggccagcgtgctgcccgcctgcggcgacctgagcttccagcaggaccagatgacccagaccttcggcttcagagacagcgagatcacccacctggtgaacgccggcgtgctgaccgtgagagacgccggcagctggtggctggccgtgcccggcgccggcagattcatcaagtacttcgtgaagggcagacaggccgtgctgggcatggtgagaaaggccaagtacagagagctgctgctgagcgagctgctgggcagaagagcccccgtggtggtgagactgggcctgacctaccacgtgcacgacctgatcggcgcccagctggtggactgcatcagcaccaccagcggcaccctgctgagactgcccgagacctag

SEQ ID NO: 224213 - protein, 1200 aa, Artificial Sequence
  derived and/or modified sequence
MLRMRTAGWARGWCLGCCLLLPLSLSLAAAKQLLRYRLAEEGPADVRIGNVASDLGIVTGSGEVTFSLESGSEYLKIDNLTGELSTSERRIDREKLPQCQMIFDENECFLDFEVSVIGPSQSWVDLFEGQVIVLDINDNTPTFPSPVLTLTVEENRPVGTLYLLPTATDRDFGRNGIERYELLQEPGGGGSGGESRRAGAADSAPYPGGGGNGASGGGSGGSKRRLDASEGGGGTNPGGRSSVFELQVADTPDGEKQPQLIVKGVYEADLAENSAPGTPILQLRAADLDVGVNGQIEYVFGAATESVRRLLRLDETSGWLSVLHRIDREEVNQLRFTVMARDRGQPPKTDKATVVLNIKDENDNVPSIEIRKIGRIPLKDGVANVAEDVLVDTPIALVQVSDRDQGENGVVTCTVVGDVPFQLKPASDTEGDQNKKKYFLHTSTPLDYEATREFNVVIVAVDSGSPSLSSNNSLIVKVGDTNDNPPMFGQSVVEVYFPENNIPGERVATVLATDADSGKNAEIAYSLDSSVMGIFAIDPDSGDILVNTVLDREQTDRYEFKVNAKDKGIPVLQGSTTVIVQVADKNDNDPKFMQDVFTFYVKENLQPNSPVGMVTVMDADKGRNAEMSLYIEENNNIFSIENDTGTIYSTMSFDREHQTTYTFRVKAVDGGDPPRSATATVSLFVMDENDNAPTVTLPKNISYTLLPPSSNVRTVVATVLATDSDDGINADLNYSIVGGNPFKLFEIDPTSGVVSLVGKLTQKHYGLHRLVVQVNDSGQPSQSTTTLVHVFVNESVSNATAIDSQIARSLHIPLTQDIAGDPSYEISKQRLSIVIGVVAGIMTVILIILIVVMARYCRSKNKNGYEAGKKDHEDFFTPQQHDKSKKPKKDKKNKKSKQPLYSSIVTVEASKPNGQRYDSVNEKLSDSPSMGRYRSVNGGPGSPDLARHYKSSSPLPTVQLHPQSPTAGKKHQAVQDLPPANTFVGAGDNISIGSDHCSEYSCQTNNKYSKQPFRRVTFSVVSQPQDPHQGSLQSCYDSGLEESETPSSKSSSGPRLGALPLPEDNYERTTPDGSVDSRPLPDVALTGKCTRECDEYGHSDSCWMPVRTSPERKKSQPKLSTFMPVDERGSQEKLANGEAAIMGDRNRNLLNKKLTSSYETFSAASFSKNEEANPEDIPLTKTGEYKPSPVNTLTRREVYL

SEQ ID NO: 224214 - DNA, 3603 bp, Artificial Sequence
  derived and/or modified sequence
atgttaagaatgcgaactgcaggatgggccaggggctggtgtctggggtgttgcctgctgctgcctctcagccttagtctagctgcagcgaagcagctcctacggtatagactggctgaagaggggcccgcagacgtacggatcggaaatgtggcgtctgacctggggatcgtgaccggcagcggtgaagtcacattctctcttgagtctggctccgagtatctgaaaatagataacttgaccggagaactcagcactagcgaacgcagaattgatcgcgaaaagttacctcagtgtcaaatgatcttcgatgagaacgagtgttttctcgatttcgaagtttctgtcatcgggccttcccagtcatgggtagacttatttgaaggccaagtaattgtgctggacattaacgacaatactcccacgttcccgtcccccgtgctcactctcacagtggaagagaatcggcccgtggggactctgtatctactgccaaccgccaccgatagagactttggaaggaatggcatcgagcggtatgagctacttcaagagcccggtggaggtgggagtgggggagaaagtaggagagccggggccgccgattccgcaccgtacccgggtgggggggggaacggcgccagtggtggagggtcaggcggtagcaaacgtcggctcgatgcatccgagggaggtggagggacaaatccgggcggacggtcgtctgtcttcgagttacaggtagccgatacacctgatggagagaaacagccgcaactgatcgttaagggggtttatgaagcggacctagcagagaatagtgcacccgggacacctatactccagttgagagcagcagatctggatgtgggcgtgaatgggcagatagaatatgtgtttggcgctgctactgagtccgtccgccgccttctccggctggacgagacgtcaggctggctgagtgttctacatagaattgatcgagaagaggtgaatcagctgaggttcactgttatggcccgcgaccggggccagccccccaaaacagacaaagcaacagtggtcctaaacatcaaggacgagaacgacaatgtgccctccattgaaataaggaaaataggacggatccctctaaaggatggcgtggcaaacgtggccgaggacgtgctggtggacacgcctatcgccttagttcaggttagtgaccgggatcagggcgaaaatggtgtggttacctgcacagtggttggcgatgtccccttccaattaaaacccgcaagtgacacagagggcgatcagaacaaaaagaaatacttcctgcacacatctacccctttggactatgaagccaccagggagttcaatgttgtcatcgtggctgtggatagtggatctccgtccttgtcgagcaataattctctgatcgtcaaggttggggacaccaacgacaatccccccatgtttggccagagcgtggtggaggtctactttcccgagaacaacatcccaggcgagcgagtagccaccgtcttagccacagatgctgatagcgggaagaatgcggaaattgcgtactctcttgactcctcagtgatgggtatttttgccattgaccccgacagtggcgacattctcgtaaatactgtgcttgaccgcgagcaaaccgaccggtatgaattcaaggttaacgccaaagacaagggtatacccgtcttgcaagggtctacaaccgtgatagtgcaggtcgccgataaaaatgacaatgaccccaagtttatgcaagacgtttttacgttctatgtgaaagaaaacctgcagcctaactctcctgtcggaatggtcactgtaatggacgctgacaagggcaggaacgctgaaatgtctctatacattgaagagaataacaacatattcagcatcgagaacgacaccggcacaatctacagcactatgtcttttgatagggagcaccagactacttatacattcagggtgaaagccgtggatggaggggatcctccacgcagcgctacagccaccgtttccctctttgtgatggatgaaaacgacaacgcgcccactgtcacactgccaaagaatattagctacacccttctgcccccctctagcaatgtccgtaccgtggttgccaccgtgctggccacagactctgacgacggcatcaacgccgatctgaactattccatcgttgggggtaatccctttaagctcttcgaaatagacccaacatccggcgtcgtatcactcgtcggaaaactgacccagaaacactacggattgcataggcttgtcgtacaagtgaatgatagcggccagccgagccagagtacaacgactcttgtgcacgtatttgtcaatgagagcgtgagcaacgcgaccgctattgactcacagatcgcacggagcttacacatacctcttacccaggatatcgcaggggatccatcctatgagatttccaagcagagattgtctatcgtgatcggcgtcgtcgcgggcattatgaccgtgattctgataatattaatagtggtcatggctcgctattgtagatctaaaaacaagaacggttatgaagctggcaagaaagatcacgaagatttcttcaccccacagcaacatgacaagtccaagaaacctaagaaagataaaaagaacaagaaatccaagcaacccctgtactcctcaatagttaccgttgaagcgtccaaacccaatgggcaaaggtacgactccgtgaatgaaaagcttagcgattccccatctatgggacggtacaggtccgtaaatggcggaccaggtagcccggacttggcaagacactataaaagttcatctcctctccccacagttcagttacaccctcaatcccctacagctgggaaaaaacatcaggccgtccaggatttgcccccagccaatacgtttgtgggcgcaggcgacaatatctccattggctccgaccactgtagtgaatactcctgccagaccaacaataagtattcgaagcagcccttccggagggtcacgttctctgtggtttctcagccacaagacccccaccagggttcactgcaatcttgctatgattcgggtctggaagagtccgagaccccatccagcaaatctagctccggtccaaggctcggggccctgccccttcccgaagacaattacgaacggacaacgcccgatggcagcgtagactctaggccactcccagacgtggctctgactggcaaatgtactagggaatgtgatgagtacggacattcagattcctgttggatgcccgtccgaacgtccccggaaaggaaaaagagccagcccaagctgagtacattcatgccggtggatgagcgcggctcacaggaaaaattggcaaacggggaggcagcaatcatgggggatagaaatcgcaatttattgaacaagaagctgacatcaagttacgagaccttctcggccgcaagtttcagtaaaaacgaagaagccaaccccgaggatatcccactgaccaaaaccggcgagtacaaacccagcccagtgaacacacttacgcgaagggaggtgtacctgtag

SEQ ID NO: 224215 - DNA, 3603 bp, Artificial Sequence
  derived and/or modified sequence
atgctgaggatgaggacagctggctgggcccggggctggtgcctgggctgctgcctgctgctgcccctgagcctgagcctggccgccgccaagcagctgctgcgctaccgcctggccgaggagggccctgcagatgtgagaattggaaatgtggccagtgacctgggcatcgtgactggaagtggagaggtgaccttcagcctggagagcggcagcgagtacctgaagattgacaacctgactggagagctgagcaccagcgagaggagaattgaccgggagaagctgccccagtgccagatgatctttgatgaaaatgaatgcttcctggactttgaggtgtctgtgattggccccagccagagctgggtggacctgtttgagggccaggtgattgtgctggacatcaatgacaacacccccaccttccccagccctgtgctgaccctgactgtggaggagaacagacctgtgggcaccctgtacctgctgcccacagccacagaccgggactttggaagaaatggaattgaaagatatgagctgctgcaggagcccggcggcggcggcagcggcggggagagccggcgggccggggctgctgacagcgccccctacccaggcggcggcggcaatggagccagcggcggcggcagcggcggcagcaagaggcggctggatgccagcgagggcggcggcggcaccaaccctgggggccgcagctctgtgtttgagctgcaggtggccgacaccccagatggagagaagcagccccagctgattgtgaagggcgtgtatgaggccgacctggccgagaacagcgcccctggcacccccatcctgcagctgcgggctgctgacctggatgtgggcgtgaatggccagatcgagtatgtgtttggagctgccacagagagcgtgcggcggctgctgcggctggatgagaccagcggctggctgtctgtgctgcacagaattgaccgggaggaggtgaaccagctgcgcttcaccgtgatggcccgggaccggggccagccccccaagacagacaaggccaccgtggtgctgaacatcaaggatgaaaatgacaacgtgcccagcattgagatcaggaagattggccgcatccccctgaaggatggagtggccaacgtggctgaagatgtgctggtggacacccccatcgccctggtgcaggtgtctgaccgggaccagggagaaaatggagtggtgacctgcaccgtggtgggagatgtgcccttccagctgaagccagccagtgacacagaaggagaccagaacaagaagaagtacttcctgcacaccagcacccccctggactatgaggccacccgggagttcaacgtggtgattgtggccgtggacagcggcagccccagcctgagcagcaacaacagcctgattgtgaaggtgggggacaccaatgacaacccccccatgtttggccagagcgtggtggaggtgtacttccctgagaacaacatccctggagagcgggtggccaccgtgctggccacagatgctgacagcggcaagaatgctgagatcgcctacagcctggacagctctgtgatgggcatctttgccattgatcctgattctggggacatcctggtgaacacagtgctggaccgggagcagacagacagatatgagttcaaggtgaatgccaaggacaagggcatccctgtgctgcagggcagcaccaccgtgattgtgcaggtggccgacaagaatgacaatgaccccaagttcatgcaggatgtgttcaccttctacgtgaaggagaacctgcagcccaacagccctgtgggcatggtgacagtgatggatgctgacaagggcagaaatgctgagatgagcctgtacatcgaggagaacaacaacatcttcagcattgaaaatgacaccggcaccatctacagcaccatgagctttgaccgggagcaccagaccacctacaccttccgggtgaaggctgtggatggaggagaccccccaagaagtgccacagccaccgtgtccctgtttgtgatggatgaaaatgacaatgcccccaccgtgaccctgcccaagaacatctcctacaccctgctgccccccagcagcaatgtgaggacagtggtggccaccgtgctggccacagacagtgatgatggcatcaatgctgacctgaactacagcatcgtgggcggcaaccccttcaagctgtttgaaattgaccccaccagcggcgtggtgtccctggtgggcaagctgacccagaagcactacggcctgcaccggctggtggtgcaggtgaatgattctggccagcccagccagagcaccaccaccctggtgcacgtgtttgtgaatgaatctgtgtccaatgccacagccatcgacagccagatcgcccggagcctgcacatccccctgacccaggacattgctggggaccccagctatgagatcagcaagcagaggctgagcatcgtgattggagtggtggccggcatcatgaccgtcatcctgatcatcctgattgtggtgatggcccgctactgccgcagcaagaacaagaatggctatgaagctgggaagaaggaccacgaggacttcttcaccccccagcagcacgacaagagcaagaagcccaagaaggacaagaagaacaagaagagcaagcagcccctgtacagcagcatcgtgacagtggaggccagcaagcccaacggccagagatatgattctgtgaatgagaagctgagtgacagccccagcatgggccgctacagatctgtgaatggaggccctggcagcccagacctggcccggcactacaagagcagcagccccctgcccaccgtgcagctgcacccccagagccccacagctgggaagaagcaccaggccgtgcaggacctgcccccagccaacacctttgtgggcgctggggacaacatcagcatcggcagtgaccactgcagcgagtacagctgccagaccaacaacaagtacagcaagcagcccttccggcgggtgaccttctctgtggtgtcccagccccaggacccccaccagggcagcctgcagagctgctatgacagcggcctggaggagagcgagacccccagcagcaagagcagcagcggcccccggctgggcgccctgcccctgcctgaggacaactatgaaagaaccaccccagatggctctgtggacagccggcccctgcctgatgtggccctgaccgggaagtgcacccgggagtgtgatgaatatggccacagcgacagctgctggatgcctgtgaggaccagccctgagaggaagaagagccagcccaagctgagcaccttcatgcctgtggatgagcggggcagccaggagaagctggccaacggggaggccgccatcatgggagacaggaacagaaacctgctgaacaagaagctgaccagcagctatgagaccttctctgctgccagcttcagcaagaatgaggaggccaaccctgaggacatccccctgaccaagacaggagagtacaagcccagccctgtgaacaccctgacccggcgggaggtgtacctgtag

SEQ ID NO: 224216 - DNA, 3603 bp, Artificial Sequence
  derived and/or modified sequence
atgctgcggatgcggaccgccggctgggcccggggctggtgcctgggatgttgcttactgcttccactgtctctgtcactggcagccgctaagcagctcctacggtatagactcgctgaagagggcccggccgatgtgagaattggcaatgtggcgagcgatctcgggatcgtcacgggctccggagaagtcacgttctccctggaatccggatctgagtatctgaaaattgacaacctgacaggcgagctgagcactagtgaacgcagaatcgatagagaaaagttgccccagtgtcagatgattttcgatgaaaacgaatgctttttggacttcgaagtcagtgttatcggtcccagtcagtcgtgggttgacctttttgagggtcaggtgatcgttttagatataaacgataatacgcctacattccctagtcccgtcttaacactgaccgtggaagagaaccgaccagtggggaccctgtatctgctgcccacggcaactgatcgtgatttcggccggaacggcattgagagatacgaattgttgcaagaaccaggaggcggcggatctgggggggagtctcggcgcgccggcgcagcagattctgcaccttatcccggcggggggggaaacggtgcatccgggggtggctctggtggatctaagcgacggctggacgctagcgaaggaggcggcgggacgaatcctggtggccgatcatcagtgttcgagctgcaggtcgccgacacccctgacggagagaagcagcctcaattgattgtaaagggagtctatgaagctgacctcgccgaaaatagtgctcccgggactcctatccttcagttgcgcgctgccgatcttgatgtgggggttaatgggcagattgagtacgttttcggggctgccactgagagtgtccgtcgtcttttaaggctcgacgaaacttctggctggctatctgtgctgcatagaatcgatcgggaggaagtcaaccaactgcgcttcacagtgatggcaagagacagagggcagccacccaagactgataaggctaccgtggtcctgaacatcaaggacgaaaatgacaacgttcccagtattgaaatacgaaagattggcaggattccactcaaggatggggtggcaaatgtggcagaagatgtcctagtcgatacccctatagcgctcgtgcaagtctctgatcgagatcagggcgagaatggggttgttacatgcacggtggttggagacgtaccttttcagttgaagcccgcttcggacaccgagggcgaccaaaataagaagaaatatttcttgcacacctcaactccactggactacgaagccacccgggaatttaatgttgttatagtggcagtagactccggttccccctcactttcctctaacaacagcttgatagttaaggtaggagacactaatgacaacccacccatgttcggccagagtgtcgtggaggtgtattttccggaaaataacatacccggggagcgggtggccacagttttggccaccgacgcggatagcggtaaaaacgccgagattgcatactctttggatagcagcgtgatgggaatctttgctattgaccccgacagcggtgatattctggtgaacacggtgctggatagggagcagaccgatagatacgagttcaaggttaacgccaaagataaggggattcctgtactgcagggttctaccactgttattgtgcaagtggcagataagaatgacaacgaccctaaattcatgcaagatgtatttacattctacgtcaaggagaatctccagccaaatagcccagtgggaatggtgaccgtcatggacgcagataagggccggaacgccgagatgagcctctacatcgaagagaacaataatattttctcaatagaaaatgacaccggaacaatatattcgaccatgtcttttgatagagaacatcagaccacctacacattcagagtgaaagccgtggatggcggggaccctccaaggtcagctaccgccactgttagcctgttcgtgatggacgagaatgacaatgcccctactgtgacacttcccaaaaacatctcatataccctcctgccacccagtagcaacgttagaaccgtggtggccactgttctggccactgactccgacgacggtattaacgcagacctcaactactcgattgtcggggggaaccccttcaaactttttgaaatcgacccaacttctggagtggtgtccctggtcggcaagctgacacagaagcactacggcctgcacagactggtcgtccaggtcaacgattcaggacaaccctctcagtcaacaacgacactggtccacgtctttgtcaacgagtccgtgtctaatgcgactgccattgattcccagatagcgcggtcactgcatatccctctaacccaggacatcgccggtgacccttcttatgaaatttctaaacagagactgtctatcgtgatcggcgtggtggccgggattatgaccgtaattctgatcatccttattgtagtgatggctaggtattgcaggagtaagaataagaacgggtacgaggcgggcaaaaaagaccatgaagatttcttcactccgcagcagcacgataagtccaaaaagccaaagaaggataagaaaaacaagaaatctaaacagcctttgtatagtagcatcgttactgtggaagcctctaaaccgaacggccaacgatatgacagtgtgaatgaaaaactgagcgactcaccctcaatggggcgttatcgcagcgtgaatggcgggcccgggtcaccggaccttgcacgccattataagagtagctctcctctgccaacagtccaactacacccccagtctcccacagcaggcaaaaagcatcaggccgtccaggacctgccacctgcaaatactttcgtgggcgctggagacaacatctccatcggatctgaccactgtagcgagtactcttgccagaccaacaacaaatactccaaacagcccttccggcgcgtgaccttcagtgtggtgtcccaaccccaagacccccaccaggggagtctgcaaagctgctacgactctggcctggaggaatccgagacaccatcttccaaaagcagttccggacctagactgggcgccctacctctgccggaggacaactacgagcgcactacgcctgacgggtctgtcgactctaggcctctaccagacgttgcactgacagggaagtgcaccagagagtgcgacgagtatggccatagcgactcttgttggatgcccgtgaggacatctcctgagaggaagaagtcccagcctaagctgagtaccttcatgcccgtcgatgagagggggtcgcaggaaaagcttgcaaatggagaggcggctatcatgggagatcgcaatcgcaatttactgaacaaaaaactaacctctagttatgagaccttctcggccgctagcttctcaaagaacgaagaagccaaccccgaggacatacccctgactaagaccggtgaatacaagccatcccccgtaaacaccctcactcggcgggaagtttacctgtag

SEQ ID NO: 224217 - DNA, 3603 bp, Artificial Sequence
  derived and/or modified sequence
atgcttcggatgagaacagcagggtgggctagggggtggtgcctcgggtgttgccttcttttaccactgagtttatctctcgctgccgctaaacaattgctccgctatcgcctcgctgaggaaggtccggctgatgtgcgcatcggtaatgtggccagcgatctcgggatagtgaccgggtccggtgaggtcacattcagtttggagagtgggagcgagtacctcaaaatcgacaacttgaccggagaactttcaacatcagagcggagaattgaccgggaaaaactgcctcagtgccagatgatcttcgacgaaaatgaatgcttcctggattttgaagtttcagtcatcggccctagtcagtcatgggtggacctgtttgagggccaggtgatcgtcctggatattaatgataacacacccaccttcccctcgccggttctaaccctgacagtggaggagaatagacctgtggggacattatatctgctgccgaccgcaactgatcgggacttcggtcgtaatggcattgagcgttacgaactcttgcaagagccaggcggaggtgggtctggtggagaaagcagacgggctggtgccgctgactcggcgccataccctggcggaggtggaaacggggcaagcggaggaggctctggaggaagcaaaagacgacttgacgcatcagaggggggtggaggcacaaatccagggggtagaagttcagtctttgaactgcaggtggcagatactcccgatggcgagaaacaaccgcagctgattgtcaagggcgtctacgaagctgatctggctgaaaatagcgccccaggcacacccatcctgcagcttcgtgccgctgatctagatgtgggcgtcaacggacagatagaatacgtttttggagcggcaactgaatccgtgaggcgactgcttcgcctcgatgagacctctgggtggctgtctgtgctacacagaatagaccgagaagaggtgaatcaattgaggtttaccgttatggcgagggacaggggacaacccccaaaaacggataaggctacggtggtgctgaatatcaaagatgagaacgacaatgtgccatctatcgagattaggaaaatcggaagaatccccttaaaagatggcgtggccaacgtagcagaggacgtgctcgtggacacacccatcgcccttgtccaagtaagcgatcgggaccagggtgagaatggggtcgttacctgcacagtagttggagacgtgccttttcaattaaagccggctagcgacacggaaggcgatcagaacaagaagaagtacttcttgcatacaagcacaccgttggactacgaagctacaagagagtttaatgtcgtgatagtggctgtcgattcgggaagcccttcattatcctccaacaacagtttgattgtgaaggttggcgacactaacgataacccacccatgttcggacaatctgtcgttgaagtttactttccggagaacaacatccccggtgagcgggttgctactgtgctggctactgacgccgactcgggaaagaacgcggaaattgcgtactccctggactcgagcgtgatgggcatctttgccatcgacccagattccggcgacatcctggttaacactgtgctggatcgggagcagaccgaccgatacgaatttaaggttaacgcaaaggataaggggataccagtactccagggaagcactactgttattgtgcaggtcgccgacaaaaacgacaatgacccaaaatttatgcaggatgtctttacattctatgtcaaggagaacctgcagcctaacagccctgtcggcatggtcaccgtgatggatgccgataaaggcaggaatgcggagatgagtctgtacatcgaggaaaataataatatcttcagcattgaaaatgacaccgggacgatttactcaacaatgtcatttgatcgggagcatcaaacaacctatacatttcgcgtcaaagccgttgacggaggagacccgcctcggtcagccacggccaccgtatctctctttgtgatggacgaaaacgataacgccccaacggtcactctgccgaagaacatcagctataccctgctgccaccctcatctaatgtcagaaccgtggtggcgaccgtactggccactgatagtgacgacggcatcaacgcggacctaaactatagtatcgtaggaggcaacccattcaagctgttcgagatcgaccccacatcaggggtagtgagcctcgtgggaaaactgacccagaagcattatggtctgcatagactggtggtgcaggtgaatgactctggccagccaagtcagtccacaacaaccctggtgcatgtgttcgtgaatgaatctgtgtcaaacgccacagcaatcgactcacaaatagctcggtcattgcacataccactaactcaggatattgctggggaccccagttatgagatttcaaaacaacgcctctcgatagtgatcggcgtagtagcgggtatcatgacagtgatcctcattatattgatcgtggtgatggcaagatactgcagatccaagaacaaaaacgggtatgaggctggtaagaaggaccacgaggacttcttcactccccagcagcacgacaagtccaaaaagccaaaaaaggacaaaaagaataaaaagtccaaacagccactatactcatccattgtaacagtggaggctagcaaacctaatggccagcggtacgatagtgttaatgaaaaactgagcgacagcccaagcatgggtaggtaccgctccgtaaacggcggtcctggttcaccagacctagctagacattacaagtcctccagcccactaccaaccgtacagctccacccgcaaagcccaactgctggaaagaaacatcaggccgtccaggacctgccacccgcaaatacgttcgttggcgctggggataacatttcaataggatctgaccattgcagtgaatattcttgtcagacaaataataagtacagtaaacagccatttcgtagggtgaccttctcggttgtttcacagcctcaggacccacatcaagggtccttgcagtcctgctacgattctgggctcgaggagtctgaaaccccctcttctaaatcctccagtggcccacgactgggggctttgccactcccagaggacaattacgaacgaaccacccccgatggaagcgtcgactcacgcccactcccagacgtcgcccttaccgggaagtgtacacgggagtgtgatgaatatggacatagcgactcctgctggatgcctgtgcgaacgtcacctgagcgaaagaagtcacagcctaaactgagtacattcatgccagtcgacgaacgaggctctcaggaaaagctggctaatggcgaggccgcaattatgggagatagaaacaggaatctccttaacaaaaagctgacaagttcctacgaaacttttagcgcagcatcgttcagcaaaaatgaggaggcgaacccggaggatatcccactgacaaagaccggggagtacaaaccatctcccgtcaataccttaacaaggagggaggtgtacctgtag

SEQ ID NO: 224218 - DNA, 3603 bp, Artificial Sequence
  derived and/or modified sequence
atgctgaggatgcggaccgcgggatgggcgcgcggctggtgcttgggctgctgcctcctcctgccgctctcgctcagcctggcggccgccaagcagctcctccggtaccggctggccgaggagggccccgccgacgtccgcatcggcaacgtggcttcagacctgggcatcgtgaccggatcgggtgaggtgactttcagcctggagtccggttccgagtacctgaagatcgacaacctcactggcgagctgagcacgagcgagcggcgcatcgaccgcgagaagctgccccagtgtcagatgatcttcgacgagaacgagtgcttcctggacttcgaggtgtcggtgatcgggccctcgcagagctgggtggacctgtttgagggtcaggtcatcgtgcttgacatcaacgacaacacgcccaccttcccgtcgcccgtgctcacgctcacggtggaggagaatcggccggtgggcacactttacctgctgcccacagccaccgaccgcgacttcggccgcaacggcatcgagcgctacgagctgctccaggagcccggaggcggcggcagcggcggcgagagccggcgcgccggggcggccgacagcgccccctaccccgggggcggcgggaacggcgcgagcggcggcggctcgggaggctccaagcggcggctggacgcatcagagggcggcggcggcaccaaccccggcggccgcagcagcgtgttcgagctgcaggtggcggacaccccggacggcgagaagcagccgcagctgatcgtgaagggcgtgtacgaggccgacttggctgagaacagcgccccggggacccccatcctgcaactgcgcgcagccgacttggacgtgggggtcaacgggcagatcgaatacgtgttcggggcggccaccgagtcggtgaggcggctgctgcgccttgacgagacgtccggctggctcagcgtcctgcaccggatcgaccgcgaggaggtgaaccagctgcgcttcacggtcatggcccgcgaccgcgggcagccccccaagaccgacaaggccaccgtggtccttaacatcaaagacgagaacgacaacgtgccgtccattgaaatccgcaagattgggcgcatccccctcaaggacggggtggccaacgtggccgaggacgttctggtcgacacccccatcgctctggtgcaggtgtccgaccgagaccaaggcgagaacggggtggtcacctgcaccgtggtgggcgacgtgcccttccagctcaagccagccagcgacaccgagggcgaccagaacaagaaaaagtacttcttgcacacctcgacccctctggactatgaggccacccgggagttcaacgtggtcatcgtggcggtggactcaggcagccccagcctctcgagcaacaactccctgattgtcaaggtgggagacaccaacgacaacccgcccatgttcggccagtcggtggtggaggtttacttccctgagaacaacatcccgggcgagagggtggccacggtgctggcgacagacgcagacagcggtaagaacgccgagatcgcctactcgctggactcctctgtgatggggatctttgccatcgatcccgattctggggacatcctggtcaataccgtgctggaccgcgagcagactgacaggtatgagtttaaagttaacgccaaagacaaaggcatccccgtgctgcagggcagcactacggtgattgtgcaggtggctgataaaaatgacaatgaccctaagtttatgcaggacgtcttcaccttttatgtgaaagaaaacttgcagcccaacagccctgtggggatggtcaccgtgatggatgctgacaaggggcggaatgcagagatgagcctgtacatagaggagaacaataacattttttctattgaaaatgacacggggaccatttactccacaatgtcttttgaccgggaacatcagaccacatacactttcagagtcaaggctgtggatgggggagatcctcccagatctgccacagctacagtctcgctttttgtgatggatgaaaatgacaatgctcccacagttacccttcccaaaaacatttcctacactttactgccaccttcgagtaatgtcaggacagtagtagctacagtgttggcaacagacagtgatgatggcatcaatgcagacctgaactacagcattgtgggaggaaatcccttcaagctgtttgaaattgatcccactagtggtgtggtttccttagtgggaaaactcacccaaaagcattatggcttgcacaggttggtggtgcaagtgaatgacagtgggcagccttcccagtccaccacgactctggtgcacgtgtttgtcaatgaaagtgtttctaatgcaactgcgattgactcccagatagctagaagtttgcacatcccactcacccaggatatagctggtgacccaagctatgaaattagcaaacagagactcagtattgtcattggcgtggttgctggcattatgacggtgattctaatcatcttaattgtagtgatggcaaggtactgcaggtccaaaaataaaaatggctatgaagccggcaaaaaagatcacgaagacttttttacaccccaacagcatgacaaatctaaaaagcctaaaaaggacaagaaaaacaaaaaatctaagcagcctctctacagcagcattgtcactgtggaggcttctaagccaaatggacagaggtatgatagtgtcaatgagaagctgtcagacagcccaagcatggggcgatacaggtccgttaatggtgggcccggcagtcctgacctggcaaggcattacaaatctagttccccattgcctactgttcagcttcatccccagtcaccaactgcaggaaaaaaacaccaggccgtacaagatctaccaccagccaacacatttgtgggagcaggagacaacatttcaattggatcagatcactgctctgagtacagctgtcaaaccaataacaagtacagcaaacagccatttcgtagagtgacgttttctgttgtgagtcagcctcaggacccacatcaggggtcactgcagagttgctatgacagcgggctggaggagtcagaaacaccaagcagtaagagttcatcagggccaagactgggtgcgcttccactcccagaggacaactatgaaaggaccacgccggatggcagtgttgattcaaggcctcttccagatgtagccctgactgggaagtgcactcgtgagtgtgatgagtatggccactcagactcctgctggatgccggtccgcacttctccggagaggaagaagagccagcctaaactgtccactttcatgcctgttgatgaacgaggaagccaggaaaagctggccaatggggaggccgccatcatgggtgaccgcaacagaaacctcctgaacaaaaagttgacctcatcctatgagaccttcagtgcagctagtttcagcaaaaatgaggaagccaaccctgaggatattccccttacaaaaacaggggaatataagccatctcctgtcaatactctcactagaagagaagtttacctgtag

SEQ ID NO: 224219 - DNA, 3603 bp, Artificial Sequence
  derived and/or modified sequence
atgctgagaatgagaaccgccggctgggccagaggctggtgcctgggctgctgcctgctgctgcccctgagcctgagcctggccgccgccaagcagctgctgagatacagactggccgaggagggccccgccgacgtgagaatcggcaacgtggccagcgacctgggcatcgtgaccggcagcggcgaggtgaccttcagcctggagagcggcagcgagtacctgaagatcgacaacctgaccggcgagctgagcaccagcgagagaagaatcgacagagagaagctgccccagtgccagatgatcttcgacgagaacgagtgcttcctggacttcgaggtgagcgtgatcggccccagccagagctgggtggacctgttcgagggccaggtgatcgtgctggacatcaacgacaacacccccaccttccccagccccgtgctgaccctgaccgtggaggagaacagacccgtgggcaccctgtacctgctgcccaccgccaccgacagagacttcggcagaaacggcatcgagagatacgagctgctgcaggagcccggcggcggcggcagcggcggcgagagcagaagagccggcgccgccgacagcgccccctaccccggcggcggcggcaacggcgccagcggcggcggcagcggcggcagcaagagaagactggacgccagcgagggcggcggcggcaccaaccccggcggcagaagcagcgtgttcgagctgcaggtggccgacacccccgacggcgagaagcagccccagctgatcgtgaagggcgtgtacgaggccgacctggccgagaacagcgcccccggcacccccatcctgcagctgagagccgccgacctggacgtgggcgtgaacggccagatcgagtacgtgttcggcgccgccaccgagagcgtgagaagactgctgagactggacgagaccagcggctggctgagcgtgctgcacagaatcgacagagaggaggtgaaccagctgagattcaccgtgatggccagagacagaggccagccccccaagaccgacaaggccaccgtggtgctgaacatcaaggacgagaacgacaacgtgcccagcatcgagatcagaaagatcggcagaatccccctgaaggacggcgtggccaacgtggccgaggacgtgctggtggacacccccatcgccctggtgcaggtgagcgacagagaccagggcgagaacggcgtggtgacctgcaccgtggtgggcgacgtgcccttccagctgaagcccgccagcgacaccgagggcgaccagaacaagaagaagtacttcctgcacaccagcacccccctggactacgaggccaccagagagttcaacgtggtgatcgtggccgtggacagcggcagccccagcctgagcagcaacaacagcctgatcgtgaaggtgggcgacaccaacgacaacccccccatgttcggccagagcgtggtggaggtgtacttccccgagaacaacatccccggcgagagagtggccaccgtgctggccaccgacgccgacagcggcaagaacgccgagatcgcctacagcctggacagcagcgtgatgggcatcttcgccatcgaccccgacagcggcgacatcctggtgaacaccgtgctggacagagagcagaccgacagatacgagttcaaggtgaacgccaaggacaagggcatccccgtgctgcagggcagcaccaccgtgatcgtgcaggtggccgacaagaacgacaacgaccccaagttcatgcaggacgtgttcaccttctacgtgaaggagaacctgcagcccaacagccccgtgggcatggtgaccgtgatggacgccgacaagggcagaaacgccgagatgagcctgtacatcgaggagaacaacaacatcttcagcatcgagaacgacaccggcaccatctacagcaccatgagcttcgacagagagcaccagaccacctacaccttcagagtgaaggccgtggacggcggcgacccccccagaagcgccaccgccaccgtgagcctgttcgtgatggacgagaacgacaacgcccccaccgtgaccctgcccaagaacatcagctacaccctgctgccccccagcagcaacgtgagaaccgtggtggccaccgtgctggccaccgacagcgacgacggcatcaacgccgacctgaactacagcatcgtgggcggcaaccccttcaagctgttcgagatcgaccccaccagcggcgtggtgagcctggtgggcaagctgacccagaagcactacggcctgcacagactggtggtgcaggtgaacgacagcggccagcccagccagagcaccaccaccctggtgcacgtgttcgtgaacgagagcgtgagcaacgccaccgccatcgacagccagatcgccagaagcctgcacatccccctgacccaggacatcgccggcgaccccagctacgagatcagcaagcagagactgagcatcgtgatcggcgtggtggccggcatcatgaccgtgatcctgatcatcctgatcgtggtgatggccagatactgcagaagcaagaacaagaacggctacgaggccggcaagaaggaccacgaggacttcttcaccccccagcagcacgacaagagcaagaagcccaagaaggacaagaagaacaagaagagcaagcagcccctgtacagcagcatcgtgaccgtggaggccagcaagcccaacggccagagatacgacagcgtgaacgagaagctgagcgacagccccagcatgggcagatacagaagcgtgaacggcggccccggcagccccgacctggccagacactacaagagcagcagccccctgcccaccgtgcagctgcacccccagagccccaccgccggcaagaagcaccaggccgtgcaggacctgccccccgccaacaccttcgtgggcgccggcgacaacatcagcatcggcagcgaccactgcagcgagtacagctgccagaccaacaacaagtacagcaagcagcccttcagaagagtgaccttcagcgtggtgagccagccccaggacccccaccagggcagcctgcagagctgctacgacagcggcctggaggagagcgagacccccagcagcaagagcagcagcggccccagactgggcgccctgcccctgcccgaggacaactacgagagaaccacccccgacggcagcgtggacagcagacccctgcccgacgtggccctgaccggcaagtgcaccagagagtgcgacgagtacggccacagcgacagctgctggatgcccgtgagaaccagccccgagagaaagaagagccagcccaagctgagcaccttcatgcccgtggacgagagaggcagccaggagaagctggccaacggcgaggccgccatcatgggcgacagaaacagaaacctgctgaacaagaagctgaccagcagctacgagaccttcagcgccgccagcttcagcaagaacgaggaggccaaccccgaggacatccccctgaccaagaccggcgagtacaagcccagccccgtgaacaccctgaccagaagagaggtgtacctgtag

SEQ ID NO: 224220 - protein, 365 aa, Artificial Sequence
  derived and/or modified sequence
MSSSVEQKKGPTRQRKCGFCKSNRDKECGQLLISENQKVAAHHKCMLFSSALVSSHSDNESLGGFSIEDVQKEIKRGTKLMCSLCHCPGATIGCDVKTCHRTYHYHCALHDKAQIREKPSQGIYMVYCRKHKKTAHNSEADLEESFNEHELEPSSPKSKKKSRKGRPRKTNFKGLSEDTRSTSSHGTDEMESSSYRDRSPHRSSPSDTRPKCGFCHVGEEENEARGKLHIFNAKKAAAHYKCMLFSSGTVQLTTTSRAEFGDFDIKTVLQEIKRGKRMKCTLCSQPGATIGCEIKACVKTYHYHCGVQDKAKYIENMSRGIYKLYCKNHSGNDERDEEDEERESKSRGKVEIDQQQLTQQQLNGN

SEQ ID NO: 224221 - protein, 324 aa, Artificial Sequence
  derived and/or modified sequence
MSSSVEQKKGPTRQRKCGFCKSNRDKECGQLLISENQKVAAHHKCMLFSSALVSSHSDNESLGGFSIEDVQKEIKRGTKLMCSLCHCPGATIGCDVKTCHRTYHYHCALHDKAQIREKPSQGIYMVYCRKHKKTAHNSEAADLEESFNEHELEPSSPKSKKKSRKGRPRKTNFKGLSEDTRSTSSHGTDEMESSSYRDRSPHRSSPSDTRPKCGFCHVGEEENEARGKLHIFNAKKAAAHYKCMLFSSGTVQLTTTSRAEFGDFDIKTVLQEIKRGKRMKCTLCSQPGATIGCEIKACVKTYHYHCGVQDKAKYIENMSRGIYK

SEQ ID NO: 224222 - protein, 366 aa, Artificial Sequence
  derived and/or modified sequence
MSSSVEQKKGPTRQRKCGFCKSNRDKECGQLLISENQKVAAHHKCMLFSSALVSSHSDNESLGGFSIEDVQKEIKRGTKLMCSLCHCPGATIGCDVKTCHRTYHYHCALHDKAQIREKPSQGIYMVYCRKHKKTAHNSEAADLEESFNEHELEPSSPKSKKKSRKGRPRKTNFKGLSEDTRSTSSHGTDEMESSSYRDRSPHRSSPSDTRPKCGFCHVGEEENEARGKLHIFNAKKAAAHYKCMLFSSGTVQLTTTSRAEFGDFDIKTVLQEIKRGKRMKCTLCSQPGATIGCEIKACVKTYHYHCGVQDKAKYIENMSRGIYKLYCKNHSGNDERDEEDEERESKSRGKVEIDQQQLTQQQLNGN

SEQ ID NO: 224223 - protein, 331 aa, Artificial Sequence
  derived and/or modified sequence
MSSSVEQKKGPTRQRKCGFCKSNRDKECGQLLISENQKVAAHHKCMMCSLCHCPGATIGCDVKTCHRTYHYHCALHDKAQIREKPSQGIYMVYCRKHKKTAHNSEADLEESFNEHELEPSSPKSKKKSRKGRPRKTNFKGLSEDTRSTSSHGTDEMESSSYRDRSPHRSSPSDTRPKCGFCHVGEEENEARGKLHIFNAKKAAAHYKCMLFSSGTVQLTTTSRAEFGDFDIKTVLQEIKRGKRMKCTLCSQPGATIGCEIKACVKTYHYHCGVQDKAKYIENMSRGIYKLYCKNHSGNDERDEEDEERESKSRGKVEIDQQQLTQQQLNGN

SEQ ID NO: 224224 - DNA, 1098 bp, Artificial Sequence
  derived and/or modified sequence
atgtcgagtagtgtcgagcaaaaaaagggccctactcggcagcggaagtgcggattttgcaagtccaatagggataaagagtgcgggcagctgctcataagcgagaaccaaaaggtcgctgcccaccacaaatgcatgctgttcagtagtgctctggttagctcccacagtgacaacgaatctctcggtggctttagtatcgaggatgtgcagaaggaaattaagcgcggcactaaactcatgtgttcattgtgtcactgccctggtgccactattgggtgcgacgtgaagacgtgccaccggacataccactaccattgcgctctgcatgataaagcccagattcgagaaaaaccctcgcaaggcatatatatggtttattgccgcaagcacaagaaaaccgctcataactcagaggcagatctggaagaaagcttcaacgagcacgagctggaaccttcctcacccaagagtaagaaaaagtcccgcaaaggcagacccaggaaaaccaatttcaagggcttgtctgaagatacccgttccacaagcagtcacggcacagatgagatggaatcctcctcctacagggataggtcccctcaccgcagcagccctagcgacaccagaccaaagtgtgggttctgccatgtgggggaggaggaaaacgaggccagagggaagctgcacatttttaacgccaagaaagccgcggcgcactacaagtgtatgctgttctcctctgggacagtccaactgacaaccacgtctcgggccgagttcggtgatttcgatatcaaaaccgtcctccaggagattaaacgtgggaaaagaatgaagtgcactctctgctcccagccaggggcgactattggctgcgaaataaaggcctgtgtaaagacgtaccactaccactgtggtgtgcaggacaaggccaaatacatcgaaaatatgtcgcgcgggatttataaactttactgtaaaaaccattcaggcaacgatgagcgtgacgaagaggacgaggaacgtgagagtaagagtagagggaaagtggagattgatcagcagcagttaactcagcagcagcttaacgggaattag

SEQ ID NO: 224225 - DNA, 975 bp, Artificial Sequence
  derived and/or modified sequence
atgtcttcctctgttgagcagaagaaaggacccactaggcaacgaaagtgcggcttttgcaagagtaacagagacaaagaatgtggacagctgctaatttcagagaaccagaaggtggctgcccatcacaagtgcatgttgttctcctccgccctggtgagttcacatagtgataatgaaagcctgggggggttctccattgaagacgtgcaaaaagagattaaaagaggtaccaaactgatgtgttccttgtgccactgtccaggtgcaacgattggctgcgacgttaagacttgtcatcgcacataccattatcactgcgccctacacgacaaagcccaaatccgcgaaaaaccgagccaggggatttacatggtatattgcaggaagcataagaaaactgctcacaatagcgaggcggctgatctcgaggaatccttcaatgaacatgagttggaacccagctcccctaagagtaaaaagaaatccagaaaaggccgccctagaaagactaactttaagggactgtctgaggataccaggtccacctcctcccacggtaccgatgagatggagtctagcagttacagagataggtcgcctcatagatcctcgccctccgacactaggcccaaatgcggcttctgccatgtcggtgaggaggagaacgaggctagaggtaaacttcacatctttaacgccaagaaggccgccgctcattataagtgcatgctctttagcagcgggactgtacagttgacaactacttcccgtgcggaattcggcgacttcgatatcaagactgtgctccaggagatcaaacgcggtaagaggatgaaatgcactctttgctcacagcctggagcgacgatagggtgcgagatcaaggcatgcgtgaagacctaccattatcactgtggcgtgcaggataaggcaaagtacatcgagaacatgtcaagagggatctataaatag

SEQ ID NO: 224226 - DNA, 1098 bp, Artificial Sequence
  derived and/or modified sequence
atgagctcaagcgtcgagcaaaaaaaggggcccacacggcaaaggaagtgtggcttctgcaagtctaaccgagacaaggagtgtgggcagcttcttatctcagagaaccagaaagtcgcagctcaccacaagtgcatgctgttcagttctgctctggtctcttctcattccgacaacgagagtctcggaggcttttccattgaagacgttcagaaggaaattaaaagaggaacaaagctgatgtgctcgctctgtcattgccccggcgcaacaattggctgtgatgtgaagacatgccatcggacctaccactatcattgcgcgcttcacgacaaggcacagattagagagaaaccatctcaggggatctacatggtgtactgtagaaaacacaaaaaaactgctcataactctgaagctgacctggaggagtctttcaacgagcacgaattggaaccgtcttcgcccaaaagcaaaaagaaatcaaggaaggggaggccacgcaaaaccaacttcaaggggttatcagaggacacaagaagcacttcgtcacatggcacggacgaaatggaatcctcgtcctacagagacaggtctcctcataggtcatccccttccgacacacgcccgaaatgcggattttgccacgttggggaggaggagaatgaggctagaggcaaattacacatcttcaacgctaaaaaagcggccgcccactataagtgtatgctgttttccagtggtacggtgcagctgacaactacttcacgggcagaatttggagacttcgatatcaagactgtcctgcaagaaattaaacggggtaagagaatgaaatgcaccctttgcagccaaccgggcgctacgatagggtgcgaaattaaagcctgcgttaagacctatcactaccattgtggagttcaagacaaggctaagtatatcgagaacatgtccaggggaatttataagctttattgcaaaaaccactccggaaacgacgagcgggacgaagaggacgaggaacgcgaatcaaaaagcagaggaaaggttgagattgaccaacaacagctgacccagcaacagctgaacgggaactag

SEQ ID NO: 224227 - DNA, 1101 bp, Artificial Sequence
  derived and/or modified sequence
atgtcctcgtccgtggaacaaaaaaaaggcccgactcgacagaggaaatgcggcttttgtaaatcaaatagggataaggaatgcgggcagctgctcatctcagagaaccagaaggttgcagcccaccacaaatgcatgctgttctcctctgcattggtcagcagtcatagtgacaacgagtctctcggcggcttcagcatagaggacgtgcagaaggaaatcaagcgggggaccaagttgatgtgcagcctgtgccattgccccggagccactattggatgcgatgtgaagacttgtcaccggacttaccactaccactgtgccttgcatgataaggcccagattagagagaagcccagtcagggtatatacatggtctactgtcgtaaacacaaaaagaccgcacacaattccgaggccgccgatctcgaagagagcttcaatgagcacgagcttgagccgtcaagcccgaaaagcaagaagaaatccaggaaggggagaccgaggaagactaactttaaaggcctgtccgaggacactcgctctaccagctctcacggaacagatgaaatggaaagctcatcgtatagagatcgttcaccccacaggagcagccccagcgacacccgccctaaatgtgggttctgccacgtgggtgaagaggaaaatgaggctcgaggcaagttgcacatattcaacgctaagaaggctgctgcgcactacaaatgcatgctgttttcatccggaaccgtgcagctgacaactacctccagggcagagttcggggactttgacatcaaaaccgtgcttcaggaaatcaagcgcggcaaacgcatgaaatgcacactgtgcagtcaaccaggggccacaatcggctgcgaaataaaagcctgtgtcaagacatatcactatcactgcggcgtgcaggacaaggccaaatatatagagaatatgagccggggcatatacaaattgtactgcaagaatcattccggaaatgacgaaagagacgaagaggatgaggagcgcgagtctaagagtcgtgggaaagttgaaattgaccaacaacagctgacgcagcaacaattaaacggaaactag
